United States Patent Application Publication US 2012/0017338 A1 - sequence listing, part 3

SEQ ID NO: 7570 - DNA, 384 bp, Zea mays
  Peptide Sequence Number=SeqID_49349
atgatgagccgcaccgagcctagggctacgaaggccagggatcggcagagcccaaatgatggcacttgggtccacattgtcagcgccgtccgtaataaagaatacaggacagccaagcgaccacacacatgcatgtctttaccgcatactcttcaagctccggatggccaaccgcgacaccaatcacgttcccgaagcagtgatccattcgggagcctcgacttctccttcgacgatgaaggcgaaatagtcagggccccagaagcccaacctccaccactgaaaaacctcggcgcgactacgagggctagcagtgacctctgcatcggctacgcccccgtagcagccatccgctttgggaaacttgatttgatcttcaactag

SEQ ID NO: 7571 - DNA, 306 bp, Zea mays
  Peptide Sequence Number=SeqID_49350
atggagctttccatgtcatactacacggaagcggcgtcctactacggtggctctagcagcggctccaacgccttcccaccacaactgcgccacaccccaacggcgcacctccgctataattcaccggactgtccggtgtgccagcggagcaacggctatctgcgcgcaacggtcgactctgacagcgaacagtgtagaacagtacacgtagcagaagtcagagcagttggtcagaggggcaccggactgtccggtgtcacaccggactatccggtgccgcatgaggacaaagccaccaacggttga

SEQ ID NO: 7572 - DNA, 783 bp, Zea mays
  Peptide Sequence Number=SeqID_49351
atggggacggggctggacgtgccgagcgcgcagcgactcggccgcgacatgcagggggcgaggcttgccggcgaagtggagcgcggctgctatggcgctaggcaccgacgcggctgggcgcgctgcggccagaggaggagagacgagggcggccgagccgactcagccaaaccccgggccatggcaagcgagcgccacgccgacacggcaaaaggcgaggaggagagtggtggagagaggaaggggggcgagctcacctcagcgaggcacagcgaggcgctgcgcacgcgggttttggcgatccgcacgacgacggcggcgacgtcactccgggcagggcgcagctccgacggcggcgatggcgaggtggagggtgagaaactgggtgaggggcgcgggtttcggccgatgttggaggcgtcgtgggcggttgctcctctggaaacccgcacaagcgtttcaagggagaagcacagtgggcgccggctccctgacgcgcgggcccacttgagcagcggcggtgggcgccgaaccgtccacgcgcggtcgcgtgcgtgcagggcgcgccacggctgggccgcgacgggcgcggagcgaggaacgtggcgagcgcgcgctgagccgctacgggcgcgcgttcatggggtgggcggggcagggagctgggccgccatgggcgggcccatgaggggggagggagcgctggccgagcgggggggaagagagagggagaaaggggccggggtgggtgggccgaatgggccagggaaggggggaagttga

SEQ ID NO: 7573 - DNA, 309 bp, Zea mays
  Peptide Sequence Number=SeqID_49352
atgaggctccatccgctgtcgatcatggccttcctgccttccttcctgggatgcccttggaggctcccaatagctgggcatgcggtgtctcgaaggatggagagaaaaagcgaggcagagaaggagggggctcacgagtgggcggagcagcagcggaaggacaagaaagatagggtggagaagaaacaatggagggctgaacgccagatgcgtagggactacatcactgaggctgactcgatcaacgaggatgaagacgacgatgataatgcaagttccgagccttgggccattcctgatgccccctaa

SEQ ID NO: 7574 - DNA, 744 bp, Zea mays
  Peptide Sequence Number=SeqID_49353
atggctttggtggcactcatcccttcatctgccgagcccccagccgaacagttactgggggctgcttgcatgggaagctcttctgcctcagactcgttagtggtcaagccagcatattgtcatggtctccagtgctcaccctcgaagcgagaggcgtggccggtgctccacttgggtgccacggaggcgaggcgtaccttggagagcaaagctcccctcaacttgctgcttctatgcggcgtcaagctcagtgtctgccttcattggcacggtggaggttgcggctccagggggacaacaccccttctttttcatggggagcctcgtaccgtgctgccgagctatggtggccaaccgggcatccagctcgctccaggctgctctatagacgacgatgaccccctagccctgtgcaaggagttgaatgaaaagaacaatgtgactaagaaggtgttgcggggtggcctcatttgtcttttgactgtgcaccaaaagctaatgtcgcttgcagggacgatggcgggcaggtcccgccttcttctcaaccaaagggaggtgtgggagtgttccactagcaatctactagttgcaagaaacgaggacgccgtagcccgtgcccgcaccgtgtcgattcaaaatgcttatgatgccttggttagggtggcaaggagggatgtagaatcgacgtcccttgcatgtctcgagattgtaaagaaggtctatcgcctctacaccctagagtga

SEQ ID NO: 7575 - DNA, 573 bp, Zea mays
  Peptide Sequence Number=SeqID_49354
atgggccacctatcggcccaactcgaaccccgccgcagaggcgcattcatgaaaagtcgtaaccccagtgtcctctatcttgtgttgccgccagcctcgccagccctggacgcgacagtcctcatcgggaagctagtttacaccgacggtgccaccgacgtagggaggaagagcggagaacgccgctgcgcgtgttgcattgtcaaaagggatctcggcaacaagccaaggagtgtcgcccgagctctccacgtgcgttcaaagcttcaccggggtggagttgatgctaggggacctcaaaattgctcaacggagcatttcctccgccgtgtgccacctcatgacgtgagccgtgcaaccaccaccacagtttcgagtaaggatccctacacccgattcatgatcctctccgcttcataccggcttatccgcgactgtgttagggcatcagcgcgcgggagcatcaactccggcgatggcgccgccgccctcgttggtgcgcgatgccgctctgctcggctgtgggatgagggtctttggaccgttgattccatcgtgggcagtgtagattag

SEQ ID NO: 7576 - DNA, 1137 bp, Zea mays
  Peptide Sequence Number=SeqID_49355
atggccaacgagcagagcgggcttcccctgcggaggtggaagcctttctacagcgctttccaggcgatcgacggcgcgatcgaggcatgcggctacccgcgcgccgagtatcgtgacgtgcgtggcgagatcgtcgtgctgctccgcggcgccacggatgacggcgtggccgagcagctctgcgccgtgctcgacgacgtcatggtcgaatccctcaagacgctgctggtcgcgcccgtcccgcacgacctgctggcgtccaccgagctggcgaggaccgtcggcgccctcgggagccacgggtcgtcccggatccggagcctcgcgcgcgacgtcgtgcgcgggtggagggtagccgtcgaagcctccttcgccactgctgtagcggtgaagaagaaactcgacaatctctctgctgatcagatcccgctcccgcgcgctgccgtcgacgagaagaagatgcttcccgctgctgctgaggtacacaacaagaagccgcacgtaccaccagcaaagacgcttcctgccgctgccgccgccgccgaggtgcacagcaagaggctacaagtaccaccagcaaagatgcttcccaccgccgaggaacacaagaagcagcattatgtaccgccaacaaagacaattccgaccgcagcaattctatcgaaccaccagaagaacatgagtgagaccaagaagtcgtccgtcgccgacaacgagaagatggaggctacaaaacgcaagctacgggagggttaccaaaaagccgatggagtcaagcgtcggcgcagcatccagaccatcaaggaggaggaggggaagctgttggagcagaagcaatgcaagaaggatgcgtcccatcgtatggagaggggcccagtaggatgtaggactaggacctcgacgaacatctacatcaacccaccgccggtggcgctgcctttgggaggcggatacggctacgaggggtcgttcttcggcggctacgaatacagctacgggtggtcgccgttcttgttcgcccccggtccgagtgtgtccgtcggggtaggcggtggcttcgacacactcattctcttcttggcgctgggcgccattgtcggagctgtcaggcggttcctcaaccggaactactactaa

SEQ ID NO: 7577 - DNA, 978 bp, Zea mays
  Peptide Sequence Number=SeqID_49356
atggcggtggtttgcagtggggttagtggcggtcgcgagggcaagaatgaggggagaactaggcgtgcccgggggtcgtggcactatatgggcgctgccggattcaccgacggcgtgattgaggcatgcggctacccgcgctccgagtttcgggacgtgcgtggcgagatcgtcgtgctgctccgcggcgccacggatgacagcgtggccgagcagctctgtgccgcgctcgacgacgtcatggtcgaatccctcaagacgctgctggtcgcgcccgtcccgcacgacctgctagcgtccacagacctggcaaggaccgtcggcgccctcggcaaccacgggtcgttccggatccggagcctcgcgcgcgacgtcgtgcgcgggtggagggtggccatcgaagcctcccgcaccactgctgtagcggtgaagaagaagctcgacagtctctgtgctaataagatcccgctcccgcgcgctgccgtcgacgagaagaagatgcttcccgctgctgctgaggtacacaacaagaacccgcacgtaccaccagcaaagacgcttcctgccgccgccgccgaggtgcacagcaagaggctacaagtaccaccagcaaagatgcttcccaccgccgaggaacacaagaagcagcattatgtaccaccaacgaagacgcttccgaccgcagcaattttatcgaaccaccggaagaacatgagtgagaccaagaagtcgtccgtcgccgacaacgagaagatggtggctacaaaacgcaagctacgggagggttaccaaaaagccgatggagtcaagcgtcggcgcagcatccagaccatcaaggaggaggaggggaagctgttggagcagaagcaatgcaagaagcatgcgtcccatcgtatggagagaggcacagtaggatgtaggactaggacctcgtcaggcgtcaatcgttctaggcctcctccttctcacgtgctttag

SEQ ID NO: 7578 - DNA, 594 bp, Zea mays
  Peptide Sequence Number=SeqID_49357
attggcttatgttgcaccagagtcacgagtggtgggagctggagacttggttgatgagccaaaaaaagttgctatccattatcttcgtggttactttttacttgatttctttgttgtgcttccactccctcaggtgatgatactgctagtagttcctaaagttgggttatctgctgcaaactatgctaagaatttattgcgtgtcactgttcttcttcaatatgtcccccgtatcatcagattcgtaccacttcttgatgactgtggacgtggcattgggagtggactgtacagacagcagtggttcaatgactcgggtgcagaagcttgttttaacactggaaatgatgctactttccaatatggaatttatgagcaggctgttttgctcactacagaagacagtgctgtaaaacgatatatatattcattattttgggggtttcagcaaataagtaccttagcaggaaaccttgtcccgagttactttatatgggaagttctgttcacgatggctattattggtctgggactgttgctttttgcattgcttattggaaacatgcaaaattttctgcaagctcttggaagaag

SEQ ID NO: 7579 - DNA, 153 bp, Zea mays
  Peptide Sequence Number=SeqID_49358
atggcacccgaggacgagctcagcatcgggcgagatggagattgcgcccgagggcgagcccagcgtcgggcgagacagaaatttgcgcccaaggcccgatctgcttttcctgttgtattagatgtcccatctggagatgacaggcgaacatga

SEQ ID NO: 7580 - DNA, 132 bp, Zea mays
  Peptide Sequence Number=SeqID_49359
atggccatgaagcttgcaactctgtatacaggaagcacaaaaagaatatgggccaccttcagcgtagagactgtcaacaactcagacttggaatacatcaactcagacttggaatacatcaactccaagtaa

SEQ ID NO: 7581 - DNA, 1137 bp, Zea mays
  Peptide Sequence Number=SeqID_49360
atggccgacgagcagagcgggcttcccctgcggaggtggaggccattctaccgcgctttccaggcgatcgacggcgtgatcgaggcatgcggctacccgcgcgccgagtttcgtgacgtgcgtggcgagatcgtcgtgctgctccgcggcgccacggacgacggcgtggccgagcagctctgcgccgcgctcgacgacgtcatggtcgaatccctcaagacgctgctggtcgcgcctctccctcacgacctgctggcatccaccgatctggcaaggaccgtcggcgccctcggcaaccacgggtcctcccggatccgtagcctcgcgcgcgacgtcgtgcgcgggtggagggtggccgtcgaagcctcctgcgccactgctgtagcggtgaagaagaaactcgacaatctctctgctgatcagatcccgctcccgcgcgctgccgtcgacgagaagaagatgcttcccgctgctgctgaggtacacaacaagaagccgcacgtaccaccagcaaagacgcttcctgccgctgccgccgccgccgaggtgcacagcaagaggctacaagtaccaccagcaaagatgcttcccaccgccgaggaacacaagaagcagcattatgtaccgccaacaaagacaattccgaccgcagcaattctatcgaaccaccagaagaacatgagtgagaccaagaagtcgtccgtcgccgacaacgagaagatggaggctacaaaacgcaagctacgggagggttaccaaaaagccgatggagtcaagcgtcggcgcagcatccagaccatcaaggaggaggaggggaagctgttggagcagaagcaatgcaagaaggatgcgtcccatcgtatggagagaggcccagtaggatgtaggactaggacctcgacgaacatctacatcaacccaccgccggtggcgctgcctttgggaggcggatacggctacgaggggtcgttcttcggcggctacgaatacagctacgggtggtcgccgttcttgttcgcccccggtccgagtgtgtccgtcggggtaggcggtggcttcgacacactcattctcttcttggcgctgggcgccattgtcggagctgtcaggcggttcctcaaccggaactactactaa

SEQ ID NO: 7582 - DNA, 1422 bp, Zea mays
  Peptide Sequence Number=SeqID_49361
atggccgacgagcagagcgggcttcccctgcggaggtggaggccattcttcggcgctttcgaggcgatcgacggcgtgatcgaggcatgcggctacccgcgcgccgagtatcgtgacgtgcgtggcgagatcgtcgtgctgctccgcggcgccacggatgacggcgtggccgagcagctctgcgccgtgctcgacgacgtcatggtcgaatccctcaagacgctgctggtcgcgcccgtcccgcacgacctgctggcgtccaccgagctggcgaggaccgtcggcgccctcgggagccacgggtcgtcccggatccggagcctcgcgcgcgacgtcgtgcgcgggtggagggtagccgtcgaagcctccttcgccactgctgtagcggtgaagaagaaactcgacaatctctctgctgatcagatcccgctcccgcgcgctgccgtcgacaaggtgcacgtaccgtctgccaagatgcttcccgctgctgctgaggtacacaacaagaagccggacataccaccagcaaagatgatttccacggccaccgccgccgaggcacataacaagaggccacacgtaccaccagcaaagacgcttgctgccgccgttgccgaggtgcacaacaagaggccacaagtaccaccagcaaagatgctttccaccgccgaggaacacaagaagcagcattatgtaccgccaacgaagacgcttccgaccacatcaattctatcgaatcaacagaagaacatgagtgagaccaaaaaaccggtcgtcgccgagagcgagaagatggaggctacaaaacgcaagctacgggagagttaccaagaagctgatggagtcaagcgtcggcgcagcatccagaccattaaggaggaggggaagctatttggtgaggggagaagagataatcagggagctccaaagctagtaggaaaaggaaaaccactgccgcacttgagttctcgtcgtcgccaccggtgggggctcgagaagggtgcggggtttcgccagcatacggggatttcgcacgttcggattttcgagcatgagaaccacgtgccgtggcggaattgctcgccggagtgccgcggattccagctcccccgcaagctgtgctctgcgccgcgccttcgtcggtatgaatgtctcccctgcgctctccgcgtccctctaaccgtattgtgcgtctcgaattgggtattggatgttgtgcgcgaattggcgccgctcaccggcgagaactgccgtcgtagctcggtcggcgtcgtcgtggtcggccagcgggttggggaagaagtccctttgggcgtcgaatccgtgttgtgcataccggattcgaccttggggggggagtcacagttacttaaaatatgggtcgtggatcacgaataccggttcgggaacgtgggattctaa

SEQ ID NO: 7583 - DNA, 780 bp, Zea mays
  Peptide Sequence Number=SeqID_49362
atggctcatggtggacgtgggcgacgcattgctcttgttcctcgcacaccattactgtcgtgctctgctaggcccgacctccctctctctgtccctgtaggagaaagacgactgttcacggcaacgtttgatgctcgatcgaacggccatgatttttttggaacgacgtggataggccgatcggtgttgtttccatccgagtttaatagtaaggaaatctccagttcttgcacccactcgtccaccgttcgcatacgtcacgctgcgcttgctcacatacgccgaccctacccatccgctggcccccgcctgtaccatagccgacgagcagagcgggcttcccctgcggaggtggaggccattcttccgcgctttcgaggcgatcgatggcttatcgaggcatgcggctacccgcgcgccgagttccgtgatgtgcatggcgagatcgtcatgctgctccgcggcgccacggatgacggcgtggccgccgagcagctctgcgccgtgctcgacgatgtcatggtcgaatccctcaagacgctgctggtcgtgttcgttccgcatgacctattagcgtccaccgacctggtgaggaccgtcggcgccctcgggagccacgggtcatcccggatccgaagcctcacgtgcgacgtcgtgcgcgggtggagggtggccgttgaagcctcctttgccactgctgtagcggtgaagaagaagctcgataatctctctgatgatcagatcccgctcccacacgttgccgtcgacaaggtgcactag

SEQ ID NO: 7584 - DNA, 297 bp, Zea mays
  Peptide Sequence Number=SeqID_49363
atggaggctacaaaatgcaagctccacgagggttacctggaagccgatggagtcaagcgtcggcgcagcatccaggccatcagcgtacgggagagaggcccagcaagatgtaggacaagctcaacgtcgggctcgggcgaggcggagatggcacccgaggacgagctcagcgtcgggcgagcccatcgtcgagtgagacaaaaatttgcgcctgaggcccgatctgcttttcctatcatattagatgacccatcgggagatgccaggcggtgtgcgtgcacagtggcgcgaccgtaa

SEQ ID NO: 7585 - DNA, 1017 bp, Zea mays
  Peptide Sequence Number=SeqID_49364
atggccgacgagcagagcgggcttcccctgcggaggtggaggccattcttcggcgctttcgaggcgatcgacggcgtgatcgaggcatgcggctacccgcgcgccgagtatcgtgacgtgcgtggcgagatcgtcgtgctgctccgcggcgccacggatgacggcgtggccgagcagctctgcgccgtgctcgacgacgtcatggtcgaatccctcaagacgctgctggtcgcgcccgtcccgcacgacctgctggcgtccaccgagctggcgaggaccgtcggcgccctcgggagccacgggtcgtcccggatccggagcctcgcgcgcgacgtcgtgcgcgggtggagggtagccgtcgaagcctccttcgccactgctgtagcggtgaagaagaaactcgacaatctctctgctgatcagatcccgctcccgcgggctgccgtcgacaaggtgcacgtaccgtctgccaagatgcttcccgctgctgctgaggtacacaacaagaagccggacataccaccagcaaagatgatttccaccgccaccgccgccgaggcacataacaagaggccacacgtaccaccagcaaagacgcttgctgccgccgttgccgaggtgcacaacaagaggccacaagtaccaccagcaaagatgctttccaccgccgaggaacacaagaagcagcattatgtaccgccaacgaagacgcttccgaccacatcaattctatcgaatcaacagaagaacatgagtgagaccaagaaaccggtcgtcgctgagagcgagaagatagaggctacaaaacgcaagctacgggagagttaccaagaagctgatggagtcaagcgtcggcgcagcatccagaccattaaggaggaggaggggaagctgttagagcagaagcaatgcaagaatcatgcgtcccatcgtatggagagaggcccagtaggatgtaggactaggacctcgtcaggcgtcagtcgttctaggcctcctccttctcacgtgctttag

SEQ ID NO: 7586 - DNA, 189 bp, Zea mays
  Peptide Sequence Number=SeqID_49365
atgaacgcgccgacaacctaccaccggggactgcagatggctgcaacagagacaaaatgcgatactagtcgtggccgagccaaagacgaggcggagctgcaatccggcgacaagagcttcgatgaaatgctacggtggaagttgcggttcctcaaccggaacaacgatgactacgataacgactactaa

SEQ ID NO: 7587 - DNA, 249 bp, Zea mays
  Peptide Sequence Number=SeqID_49366
atggacgctagtcctcatcccatagtcacccctaccctagcgtttgtccctgctctagccctccccagcctcctctctgctggtagccgtctccagccctccatggcaggctcgcccttcctccatccatggacgtgcctatccctttttctgctcgccatgggattcattgtcaaccttgtgagttcgagtccaaagttcgagtccagttttgttacagtgatgtccttcgctatccatgttggttag

SEQ ID NO: 7588 - DNA, 348 bp, Zea mays
  Peptide Sequence Number=SeqID_49367
atggcgagcggaggtgggcggaggtgggacgcggcgggactgcggcgggactgcggcttgggagcaggcgaggtttccggcgcgcgcaggcgtgcggaggtgggcggtggtgagcggatttggtggcgacggttccggcgtgcgcagtgtagtgtgtggtgctactttctaagattgcaatacttacaaagttcgatcacccaatgggtgcccaacatccaacgaatgcagatctatgggagcaagaacagaaccaacaactataggcttgtttggaagcatgatgaaggtgctcttgatgtccttgattcgtcggaggtgggcgccaatattgatcacctgctttga

SEQ ID NO: 7589 - DNA, 567 bp, Zea mays
  Peptide Sequence Number=SeqID_49368
atggatctaggtaatcggtcctcgcccacggtcctatctgctcgtgtggatctgattgaggtttccatcgacggggcaattgatcacataattaattcagctgccaaatcgaactacatgtctgctgggcagatatatgttcatattgtcttcacggatccaaatggtgctgttgttggagttggtgcccaacactcacagcaaggactgattgcagcaagacttgaagatttagggaagaaagaggaaagacttcaagaactgccacttctacatgatatatctgaactaatagaagcctatagctataggaaagttggcctgaatcttgtaaagcttcaaaaattaatattagcagcaaatcaaaccagccctactgaatttatggagaatatggtctggaagtttgagagggaggcgtggacggttatgcagagtagacaacacaatgtgcaatgggagttctttcttttcagtgcacaatcagctactactaccacctcggggtctggggtcactttagttatttttgatttactaccacctgggggtctggggtcactttag

SEQ ID NO: 7590 - DNA, 606 bp, Zea mays
  Peptide Sequence Number=SeqID_49369
atggcgttcgcgccgccgcacctcctcccgctgccccctcctccggcggcggcatccacgcgggccgtctccgcgcgcaaccacggggggcgcacggcgcctgagctctcgggcccgaccccgcgcgtggtggtcgtcacctccggcaagggcggcgtcggaaagacgaccaccaccgccaacctcgccgcctctctcgcgcgcctcggcctcccagccgtcgccgtcgacgccgatgctggcctccgcaacctcgacctcctgctcggcctcgagaaccgcgtccacctcaccgccgccgacgtcctcgcgggagactgccgactcgaccaggcgctcgtccgccaccgcgcgctccacgacctccacctcctctgcctctccaagccccgctccaagctgcccctcgcgttcggatccaagaccctcacctgggtcgcggacgcgctacgacgctcgaccagcccacccgcattcatcctcatcgactgccccgcagtatcacgatacaacgaattgaggaaccatttggatggtctcaacaaccccaatctttcagggatttccactatccagagataccactactactgtctaatccattag

SEQ ID NO: 7591 - DNA, 444 bp, Zea mays
  Peptide Sequence Number=SeqID_49370
atggatcagatagttcatcgcgggaggacgatctcgaagccgccagatcaaaagacgcctcagaggccatcaggccgaaggtggtcatcatcggaggacgcccttcgatgcgcccataggaggagatcgttgtcttcggatgccaccatggatggtcaccgcagccatcaccgctcgtgcctcggaaggtcatcgccaccgccaccgatcgcgcctcgggaggtcgcggttgtcgcaatcgctcgtgcctcgggcagacgcgaccaccgctactcgcgcctaggtcagtcacggccttcgcggcactcgcatctcgggccgacactcgccgacatcgcctgggactgccgctctcatcttgctccgcaggaagtcgtcgtcgacgtccgtccgccgctcgcacctcacgcggttgcagccgtcgccacgttgaaagtcgcctag

SEQ ID NO: 7592 - DNA, 144 bp, Zea mays
  Peptide Sequence Number=SeqID_49371
atggcggcatggaaggagcaacagaagctcaggccattcgtgcaggcgccccaatctacagcaggttgtggaatcaagatgctcgctgactatcattcctcttcttcaaagttggcacagagaggtgtagatgaggggaaatga

SEQ ID NO: 7593 - DNA, 540 bp, Zea mays
  Peptide Sequence Number=SeqID_49372
atggccgcgagccaaggccacaccgcggcgggcgccggggcaacgccgagctccgtgaacacgaggaggagggggaaacagggaagaagggagcgggggagggctcaccgcggggcgaggacgacggggcgagcggttccgaggggcagggacggctctagggcggctgcgggcgctagggagaaggggaggggcgttgggcgacagcaagttgatcttaagaaactagatgatgaagaggctccatgcaccacactaaggaacatgtctattggggatgtgtgcccacaagaaccgcaagagccaactcaaacacaagatcaatcatcttcctccactcaagcatctcctcaaactcaggatgaagagcaagctcaagaagatggggaacaagttaaagataatggacaatttaaagataggagaatacatcaaggggagatgaagaagaataacaagataataaggatgatcaagataaacaagtacctaaggtgcctcacccaagagtccatcaagcaattcaaagacaccacctag

SEQ ID NO: 7594 - DNA, 351 bp, Zea mays
  Peptide Sequence Number=SeqID_49373
atggacatgagacggtcatttggggctgcgccaacagatttcagggtccctttcaccattaccgtcgccgtgctcagacgccgtctgccgtcgtcttcatcccagctggtatccacggctcgaggtttctcggggctggacatctctcgcggctgtgagttcggttccatggatttggatctgtttggcatttcaccagacttcgtcgctcctctcaactcccccgatctacaccctggaaaacagcgccgctcaccccgctccgactgctgtgccagccacccgggcaaagccgacgacggcaagttcagcctcaggcgcaaccggaagctccgcctcacccgaccttag

SEQ ID NO: 7595 - DNA, 117 bp, Zea mays
  Peptide Sequence Number=SeqID_49374
atggagccctgttgtctcgagcttaagctggttccttgggcatctctgtggtggatcgccgggctgaggatcttgccagtgtcatggtcagagggtgcaggtgctgggcaggggtag

SEQ ID NO: 7596 - DNA, 252 bp, Zea mays
  Peptide Sequence Number=SeqID_49375
atgacccacctcttcgagttccacgaagttaaagaccctgagcatctgtttggtgaaggcaagaactggggtgtagttcgcttcgacgtcgtgccgttaatggggctcggtgtatgcggctcgctctgccaagagatgttcggactgctggtggcaatgagattgatggttcttggtattgactctggtaatggagaagatgaagccgtggaaggagactttcaggagttccaaggttacgacaagttctag

SEQ ID NO: 7597 - DNA, 243 bp, Zea mays
  Peptide Sequence Number=SeqID_49376
atgcacgacctcccacttgcgctggagctgcttggctattctggttggttactggggcaggaaggcgggctgcctggttattctgatgctggtactgatttcctccaggttgggtgcttggacggtactgctgctgctgctgctgctgctgaggaagctgcctctggtactggtgctgatgctgacgctggtgctagtgctggggatcaaccaatcctctcaggaaacagtactgcctcttag

SEQ ID NO: 7598 - DNA, 417 bp, Zea mays
  Peptide Sequence Number=SeqID_49377
atggtgcagcgccgaaggtgtaagcaggaaagcttcggcgtgacagcagaaggtggaaccgacttaaagacgaaaaggctatttagacctcgacagattactatagaattattatcaagtgtaaagggcatgaatgatagtggtcctacattcagcaaggctttgataccactaatgtcacacccggttttggaaggtaaaccgaatgcgaaccatgtaaagcaatatcataaactaaccatgataacccaaaaggtaaacaaggatgagtcgaagaaacggtatcttcggactcgtatcagaaagggagaagctcaaaagatacgaaggttgacacagcgccgaagctgtgaagcagtaaagcttcggcatgttcgcagaagagggaaccgacttaaagatgaaaaggccatttag

SEQ ID NO: 7599 - DNA, 735 bp, Zea mays
  Peptide Sequence Number=SeqID_49378
atggagaagaccaacacagaaaagatcaccaatgagatgctggctgggttgtctgaggattccagcgatagcgatagttttgatgtggagagtgagaatgaagatgccaaagatcggtcgtggaggctgagccatgttgtttttgggaagtcaactatgcgcgtgtggctgcctcgagtcgtgcaagcctcccctcgtccagccgttgtttacgcagcggtcccacatatcatctcctcccttctcccattcacagctgcctcagccccgtgcttgtcgaacgccaaggaaaaccggcccccactccaccatggcccgccacattgcttggtcttcaagccccttgcagttcaaccgcatagcagtccccgagacgcgctcaccgccatgctgcgcgtggccacgcccggagcaagctgcgcccgcgattctccctcgtcgagttcgtcgcaaggtgagaagtccagagacgcggcgtctcgcaccgtccctcccgcgaagcctcgcctggagttcccctggacccgcccttcgttcattcatggtgagctcgcccccttcctctctccatacccctcctcctcgcctcttgatgtgctcggcatgacacacactcgccgtggccagagcccgacggaaatggcccatggccgtgcccgggtctgctctacgcccgcgtcccggtgtggcgcgcgacctgcgcggcgaccggcgcggcatgcccgcgacgcgtag

SEQ ID NO: 7600 - DNA, 744 bp, Zea mays
  Peptide Sequence Number=SeqID_49379
atgacgaactccgcctcgcccgaccccagggctcggactccgctctggcctctgccgaacgacctccgcctcgcccgacccaggggctcgggctcggcctcggcaacagaagacagactcgacctcagcttcggaggagcccccacgcctttgacctcggacgcgggcccgccacgtcaacagggaacgccatcatcatcctaccccaagccgactcgggtcacagagaacaagaccgggggacgtcagcaaggactcgaccgccccgacagctgtccctccaccaggctccgttgctcctccgacagccacgacatcacgccagcagggtgccaagatctctccggctgccacattggcatggccttcttagagaaggttggccgcgcgggaccgaggacgggacaggcgctctcttggggccgctcgcttccctcacccgcgtggacgcttgtaacccccctactacaagcgcacccgacctgggcgcgggacgaacacgaaggccgcgggatctccacctctctcacgcccgtctccggccacctcgcttctccccccttcgcgctcgcccacacgctcgacccatctgggctggggcacgcggcacactcactcgtcggctcagggaccccccggtctcgaaacgccgacaatttgattagactatatttcatatcttatacttcccatgttgctataaatgcatatactattaactcatattttgttacctatgcataa

SEQ ID NO: 7601 - DNA, 741 bp, Zea mays
  Peptide Sequence Number=SeqID_49380
atggtgttccctgttgacgtggcgggcccgcgtccgaggtcggacggcgtgggggctcctccgaagctgaggtcgagtctgtcttctgttgccgaggccgagcccgagcccctgggtcgggccgaggcggaggtcgttcggcagaggccagagcggagtccgagccctagggtcgggcgaggcggagttcatcgtcttctggggctgagcccgagtccgagccctgggtcgggcggagcggagttcaccgtcttccgggtcttagcccgagtccgagccctggggtcgggcggagcggagttcgccgtcttccgggtcttagcccgagtccgagccctggggtcgggcggagcggagttcgccgtcttccgggtcttagcccgagtccgagccctggggtcgggcggagcggagttcgccgtcttccgggtcttagcccgagtccgagccctggggtcgggcggagcggagttcgccgtcttctgggtcttagcccgagtccgagccctggggtcgggcggagcggagtttcctatggcgcctttggcaagacctgactgcctgttagactcactctgtcgagtggcactgcagtcggagcggcgcaggcggcgctgtccttctgtcagaccgctttatgctgatgggggttaccagctgagaattaggcgccttgagggtacccctaattatggtccccgacacaaatattggagaagacatgtttgctcaagaatatga

SEQ ID NO: 7602 - DNA, 161 bp, Zea mays
  Peptide Sequence Number=SeqID_49381
atggctgaaaacttggatgccttgagatcgatcatgatgcttgagcatgttcggcatcttgagttggtggagaagcttgtacggaacatgaacggtagcatccttgtgactggacatggctcttcggattacttagaggacatccagactggacgtgatcg

SEQ ID NO: 7603 - DNA, 291 bp, Zea mays
  Peptide Sequence Number=SeqID_49382
atgctgggcgagcccgaaggagagggagggtgggtcgtccgggccaaggaagaagaaggagggcagaggaagaggagggagaggggctcacgcggtgaggatgacacggcgggcgacggttcgactccggggcggctgcggtcgagccgggcagggggagagggagagaacgtgtggggggggtcgtacctcacattcctctacggtaacccagttggttgggtggacataggcccctctttggtcgaccaagctgaccaaagggctaatataggatcaaaaagttggtaa

SEQ ID NO: 7604 - DNA, 309 bp, Zea mays
  Peptide Sequence Number=SeqID_49383
atggaggacgcgtcgtcagtcatcgtctacccaggccgggcacccagcacgacggcgcagccacccacggcggtgccatcgccggagctgatgccgctgcccccagcggtgagtggattcgcggcggcgatatggctccggtcagcgccgccagcagctccgaaattcacggcgaagctccaccatacgtgcttgacggttgaagacgagtattgggtactcgggcccacacgtcagtccaccagggagctggcacacgcggagacggccaaagaagcggctgaggcggagaggagtcaaggcggctag

SEQ ID NO: 7605 - DNA, 411 bp, Zea mays
  Peptide Sequence Number=SeqID_49384
atgggtcaagaagaggagccaacttcttcaaagccatatgcttttgcatgtgatgaacacaacaagatgaaaggcagaatgctccaagctcaagtgaagaagaggaggaagaagaagattatgatgaagatgaatatgatcaagcctcaacatcatcctccgaggaggaagaaacagcctgacgcgtcagaaagaagaggaggagcaaaggcatggcgcttacaagtgtcaagacttgggatgattcttcaagcgaagatgaacctccaaggacttgaatccaccgaccctcatcacgctcgtcatgtttgtcacataaatgcctcatggcaagaggtaaaacgagtatcccatcctctagtgatgatagtagtagtgatgagggtgaaggcgagggaaagccctccttag

SEQ ID NO: 7606 - DNA, 1008 bp, Zea mays
  Peptide Sequence Number=SeqID_49385
atggggggagcgcttcccgatggaggcggtgacggtggcggcgggcaggttattggaggccccgcgaagcccatgcccatggcggagcgcgcgcgcctcgcgaggatcccgctgccggagccggggctcaagtgcccgcgctgcgactccgccaacaccaagttctgctacttcaacaactactccctctctcagccgcgccacttctgccgggcatgccgccgctactggacgcgaggcggcgcgctccgcaacgtgcccgtgggcggcggctaccgccgccacgccaagcgcgccaagcccaagcagcagccggccggtgccggtgccgggaccgggatcgccgccaccaccgccgcgctgcagcaggctcccgcgtcgtcagccgccgcctgcaccgcgacgaccacggcgacgaccaccccgctgcctggcggcggcagcggcggtgggctgtccatgctgccgccgcttttccgcctcgccgacttcgacgccatgagcctcggctcctccggcttctccgggatatcgtcgatgactgggaagcccagctccgtcgacgcctacgcgcactcggtcagcggccatgcacccgctccggggggcgggctgctggagcagtggagggtgcagcagatgcagagcttcccgttcttgcatgcgatggaccagggcctcctgggcccacctctggccatggcaatggcgccggcgccaggaagcgggatgttccagctaggtctagtggacaccaccaccagtgataatggccgtggcggcggcggagaagacggatggtcgtctaccagagatcagccgctccatgtgatgcaagccgcagcagccaccaagaagagggagagctacccggcaccagcaccaagaggcgtgtatgggtatggcgaccaccaccatcaccatctcgctgctgctgctgatggtggtggttacgcttcctattccaccaatgctgctgcagtaaatgtgaatttgcatgattggtga

SEQ ID NO: 7607 - DNA, 234 bp, Zea mays
  Peptide Sequence Number=SeqID_49386
atgcagcgaactcactggtggggatttgactacaagaccggggtcaaagaggagagaatggcgaaggtagaactccaggtgggtcagggttgttccgatgaggaattccggctgcggggagggggtctgagacgtgctagggcctggactagcttcagcagagcgaggggaatatcagggaccgacgtgggggttttcaattcaagttccaacaaagtttcaaattcaaactaa

SEQ ID NO: 7608 - DNA, 165 bp, Zea mays
  Peptide Sequence Number=SeqID_49387
atgggggcctctctggctgaggtgcaggggaaggtggcctctcagacttcacctctcgctgaggcaagggggaagagtcctgctgctcctggtcctgctcctggtcctagcgtcggtgctcctgctcctcgtgcaagcaatgatgcagtctctccaggtgactag

SEQ ID NO: 7609 - DNA, 1686 bp, Zea mays
  Peptide Sequence Number=SeqID_49388
atggggagaaaggcgccgctcggctgtgctactactcttctcctcctcttggccgccgccgtcgctccggccgagctcagcgtattaggcctaggcggcggggcggcggctgcctcgggcgcggtcacccgggccgacttccccgccgggttcgtcttcggcgtcggctcctcggcgtaccaggtcgaaggtgcagttgcagaggacggaagaaagcctagcatctgggacacattcacacatgaaggctactccctcgacaacgccacaggcgacgtaactgcggatcagtatcataagtacaaggacgacgtaaagcttctgcatgagatgggtgtcgatgcctaccggatgtcgattgcctggcctcgacttatcccagctgatctgatctgctacaacaatcccatgcttcatgtaggaatacagcctcacgtgacgatataccatttcgatttcccacaggctcttcaggacgattccgatcccgtggcctctcctaagctaaagctagtacttactcatcttgccactttcaatcttgatgacgcgcgcagagaggacttcacggcgtacgcagacgtgtgcttcagcaacttcggcgacagggtcaagtactggagcaccgtcaacgagcccaacgtcgagacgatcggcgggtacgaccagggaatcctgccgccgcggcggtgctccttccccttcggcttcggctgcgaggaaggcaactccaccacggagccatacgtagcggcgcaccacctcctgcttgcgcacgcgtctgcggtgtccctgtacagagacaggtaccaggctgcgcaaggaggacggatcggactcaccttgcttggttggtggtacgagcctgggacgcagactcccgacgatgtcgcggcagccgcacggatgaacgacttccacatcggatggttcatgcatcctatggtgttcggggactaccctccggtgatgaggaggaacgtcgggtccaggctgccgaccttcacggacgaggaggcggcgcgagtgagggggtctttcgacttcgtcggattcaaccactacatcgtcgtctacgtcaaggctgaccttggccgcctagacgaccaagtgcgagactacatgggcgatgcagccgtgaagtatgacatgccgtttctcaagtcacgcaaccagttcccgttcggcgccttgacgagcgacttcatgacgtccaccccctgggctctcaagaaaatgctgaggcatctccgggtgacatacaagaaccctgcagtcatgatccatgaaaacggagctgccggacagcctgatccatccggcgtgaacagctacgacgacgagttcaggaacggatcgaacgtgcaaggctacttcgtgtggtcgttcctggacgtgttcgagtacctgttcggctaccgcctccggttcggcgtctacggcgtcgagttcaactcgacggcaaggacaaggttacgaaatagtgagtggcagtgtgttattgatagattcaaaaaacgattagctatgtggaaaggttcttttaggggggacgtattggctcagactctaaagattattgcagaaacaagaagctcaccaagagattcttgtgatatgtcaatccttagagacggtggcaatggagatccttgcagaaacaagaagctcaccagattcttgtga

SEQ ID NO: 7610 - DNA, 1152 bp, Zea mays
  Peptide Sequence Number=SeqID_49389
atggcggactggtcgttgctcccgtcttacctcgtcaaccgcatcgccgaccgcatcctggccaccgacgacctcgactactacatggacctccgcgccgtgtgccgtcgctggcgctcctccactgccgaccccaagagcaggccgctggacacgcgcttccggccgtgccagtgggctatgctcgacgaggtccaccagagcgacgcgcgcctcttcgtcaacgccggcaccggacgcttcgttcgcagggacctgccgctgctccgcaggtataacgtcgtcgcaagcgccgctggtggcttggtcgttctcgcggagaggagcttcccgcacgccgcccgcgtcctcaacccttttaccggcgccatgatcagtttcggtgcgcctgtgccttgcctttgtgatgccgctgctcatgtgatcggcgactctttgccgacactgatcctgctccctaacgattctcgtacggtctactgggctaatagtggcagcaaaagattcaggcactacaagaggccccacgctgctcgaatgcagcgtcctttggccaggttggccaacgaatgcagcgtctacgctgctgcacgagagggtggaccgttggagtcgttctttgttcctgtggccagcaaggttttggatctggcagccacgcactttgctaagtattttactggcagcgctgtagggctagccgggaaaaagcgttgttaccacgtggaatctgcaggggaaatgctggtcgtcttcaagctgcctcgtcgcgtcgatgtcttcaagatcgacaccgggagaggtcttctcgaacgggtgaacaacttaggcagccgagccctcttccttggggactgcaagtgcctgtccgttgatgctgacaagttcgcgtccgtggaagccaactgcatatactacgttgtggaggagctgtcgtacggttttgacgtgttcgtgtacagcctcaaggacaggacggaagtgagggctggtccagccatagattctatctaccccaacactctcagcgctggccctccgttctcggaagttcagctcctctgctgctacacttacgagaacgggcttacaccgggattcttcggtgagcttgcttggcttgcgtccgaagtatttgagcttggacattga

SEQ ID NO: 7611 - DNA, 270 bp, Zea mays
  Peptide Sequence Number=SeqID_49390
atggtgggcggcggcggaggcttcctgctggagacagcgatcctcgacagcgcgctgtttatcggcagcacgacaggcttcggcggcacgtggagcagcaacgtcagcatcactgggcatctcggcgtccatggctggagggtgggggtgcggaagcccgtctccctcccgtgggcgcacaactccgcgaagctcgaatctctgccatggattccgggggtggtgactggcaccccggaatcgacctcccctagcgctataaaatcatag

SEQ ID NO: 7612 - DNA, 522 bp, Zea mays
  Peptide Sequence Number=SeqID_49391
atggcggttgccaagaaactgagcctcaagggcaccccagatccggacctggtcacgctaccgagggtactgagtggagttcggcgcgagaacgtcggtgatggttgcccggatgctggtgtgggctgccgcttgagcgtgaagagaggcgcgaagagtggaggctggggcgggcacagactcgatagtgtcggcgtagtgacgagcggacgtaggagaaccatctggcacgcccttaccgacgagacgactgtaggtctcggtgtactagcgctcgacggcgtcaataaccgcctgctcctgctcaagagcacgggcgacgtcctgggcctgctggcgagccgccgtaacggctgcccgagtggcggcgaggatggcggtagcgtcatccgacagggcgcgcagggaggaggtgatggtggagggctggctgtagatggtcatcgacggagggcagtcgcgcacgagagccccaaccatcgtgccaagcgggacaggggaaaactcgacgccaatagctaa

SEQ ID NO: 7613 - DNA, 420 bp, Zea mays
  Peptide Sequence Number=SeqID_49392
atggcgctctacagcgtgcctcggtctgccccctttgactctggggcggttcctcttcaccacactttggccccaccgccctctagagctcttcgccagcctactggctccggggggtcatggccgcggtcgcggccacagtcgcaagagtggtcacggcgacccgtcgggcggctggggcagctctccaggtggctctcagtggccctttctctacaacccgtggactggcaccatccacatgtggcccgggccatccgcgggccgaaatccaacgaagttgtcttaatgctcaatgttggcatcctcaatgttgtcattgttttcttcttcttcatcgccgtcttcaccatcgctggaatcatccgggtcatcacctctaggagccggggcttgagctgctggtataggtggtgctga

SEQ ID NO: 7614 - DNA, 616 bp, Zea mays
  Peptide Sequence Number=SeqID_49393
atggcgcttcctgttgacgtggcgggtctgtgccctaggcagggtgacgtgggggctcctccgaagccgaggttgagtctgtcctctgttgccgaggccgagcccgagccatggggtcgggcgaggcggaagtcgttcggccgaggccagggcggagtccgagccctggggtcgggcgaggcggagtttcgtcgtcttccggcccgagtccgagccctggggtcgggcggagcggagttcgccgtcttccgggtcttagcccgagtccgagccctggggtcgggcggagcggagttcgccgtcttccgggtcttagcccgagtccgagccctggggtcgggcggagcggagttcgccgtcttccgggtcttagcccgagtccgagccctggggtcgggcggagcggagttcgccgtcttccgggtcttagcccgagtccgagccctggggtcgggcggagcggagttcgtcgtggcgcttttggcaaggcctgactgcctgtcagactcactctgtcgagtggcaccgcagtcggagtggcgcaggcggcgctgtccttctgtcagactgctttatgctgatgggggttaccagctgagaattaggcgtcttgagg

SEQ ID NO: 7615 - DNA, 618 bp, Zea mays
  Peptide Sequence Number=SeqID_49394
atgtcgctgactccagttctcgatcttgacctctttcgttgggcaaccgccgtgaacgcagtctccataggtggcgtgatgtttccatttaagggctaccctatcgcgcacttgacgcctcaccaatactttttctacaagcatgcagctgtcgcgacggttgttgtagccggctaccagattatcaagaagtcagaggaaactaagaaaaaggcaactgcagaaaaattcacatttggtatagaatcgaaagtgcaagagcatccaaagatgcaagagcagccaaaggtgcacgagcagccgaaggtggaatctgccccagtagggactcctcgaaaagaaaagaggatggctaatgtgctaaaacttgttctgaggcctgcgaagatggcatcgcctgcagcaccgaaggtttctgaggatatagctcttgagtcgaagacatccattgatgtggagatccctttcaactcggataaagccgaccttcgggatccgcttcaacaagacatgggtctgatagtctgtcagagaagggagatttaccagcacttgaagcattgccatctaaagatcatgagtacattattcgccatgcttcgaggaaaaattgactag

SEQ ID NO: 7616 - DNA, 579 bp, Zea mays
  Peptide Sequence Number=SeqID_49395
atggatgttgctatgtttgatgctcaaatggggctaccgcctgccgctgacgggggtggagaagtcgccgacgcttatacggccaagggcgtggcggcgaccgtcgcgcgacaacttcgttatcttcgttccaaaaggaagaggctggaggacaaaatagagcgcctacggatgcagcataccgaggccgtcagagataagtctatgaccgagaacaagattcaaaaccttctggataaggcccaagctgcctgcgcggaggcccaagccacccaaaagtgtactaccgagctagagctcgagacggtccccttcgacaaatcagaaggggaggtggagacctgcttcctctggcatttcaaagccttcgatcgaagttacaaggaattcgacctgggagcattccaggctatgagggacgaagaggtcgaagacctcgccggtctggagagctcagtggcccgacaagatgtcgatgcagaggtgggcaccgaggagcagtcatcgctcgcgagggttggcagtagtgaccctggagcggcggggaccttgcagtcatatgcctctatgcaggtgtaa

SEQ ID NO: 7617 - DNA, 2859 bp, Zea mays
  Peptide Sequence Number=SeqID_49396
atggagttagcagctagaaccacctcctttgtggtgttctttatcctcagttttgctcaaagagctcccacaagtgaagcagcaacactcaatgttggagtgatcctcaacttgcagtcattggtgggtaagatggcacgaaccagtattttgatggccatggaagatttctatgcagttcacaggaactatacgacaaagctggtccttcacatcagagattccagtgcagacagtgtccaagctgcatcagaagctgttgacctgctgaagaattacaatgtcagagccataattggaccacaaaaatcttcagaggctacttttgtggctaatcttgggaacaagagtcaagtaccagttatctccttcactgcaactagtcccacacttacatctggctccatgccttactttttgcgtgcaacaccaagtgatacagctcaagtgaactgtattgctgctctaattaagggatacggatggagagaagtggtaccgatctatgaagacacagactatggtaggggtatcataccatacttagttgattccctccaagaatttggagcttctgtaccttatcgtagtgtgatctctgtatcagcaagcagtgaccaagttgagcaagaactctacaagctaatgacaatgcaaacaagggtctacgttgtgcacatgttatcctcaattgcctctactctcttcatgaaggccaatgagttgggaatgatgagtgaaatgtatgcatgggttttaacagatgggattgcgaatatcattgactcactcaacccttcaattcttgattcaatgaacggtgcactgggtgtcaaattctatgtgcctaaatcaaaggaacttgatgacttcactccaagatggactaagagattcaaacaggactacccaaatgatccgtcagctcagttaggcatctttggactctggggttatgatactatttgggcattggcacaagcagcagaaaaggttaacatggtcgatgacatgtttcagaagcagcaggacaagaagccatcaacatgtttcggaactctcggtatctctactgttggtccaaaactcatagatgcaatcttacataatacgttcagaggcctaagtggagactttgaccttaaaaagaggcagctacaaccttccacattccagataattaacattgttggaagaagttcacaacagataggcttttggacagcaaagcatggaatcatcagaacactggatcaaaatggatcaaaaacaacaaatgcaaactctatgcctgaacttaatccagtgatttggccaggaaaagtatatgttgtgccaaaaggatggcagcttcctactaatggaaataagctccgagtaggtgtaacgtctagtggatatcctgaatttatgaaggcagaaagggatcctatcaccaacgcgacaattgctaccggatatgccattgatgtatttgaagaggtgctgaagggactaccatatgcaataccttatgaatatgtagcgtttgattttgaaggggcgagctataatgattttgtctaccaagttcatcttggagtatatgatgtggcaatcggagatataaccatcaggtacaatagaacttcctatgttgactttaccctaccttacaccgagtctggagtagcaatgattgtgcaagtgaaggatgacaccaataagaacacatgggttttcttaaagccattaactactgatttgtggcttggaagcatcgcatttttcatttacacagggattgtcatctggttattggagcgacgaatcaataatgctgaactgactggttcattttttcgccagcttgggatagcaatatatttctccttttttgcagatagggagaggatagacagtattttatctagattggttgtcattgtatgggtctttgtacttcttgtgattacgtcaagttatacggccaatctatcatcaattctcactgtacaacagcttcaacccacagtaactgatgttcatgaactcattagagaaggtgaatatgtagggtatcataatggttcttatgtggggaatctattagaagtacttggctttgacagaacaaagatcagggcatacaaaacttcagaagattttgctatgcactctctaaagggggcaaaaatggtggtgttgctgctgtcatacatgaagttccctacatcaagctatttcttgcaaagcattgcaaaggttacacaatggttggaccaatttacaaatccgaaggctttggctttaacttcgataaaaaataaatctgatcctaatcgggatgaaaaagaattggaaataatattgcaaaacataaacagccaggcattccccaagagatcccctatgatcaatgacttctccaggagaatcctcagcataacagaaggagatgtcatcattcagatagaaaataaatggattggggatcaacatgtctgtcaaactgatggtgccatcgccagccccagcagtctaaacttcagaagcttttctggactctttctggtcacaggtgttgcttcaacttctgccctttttatagccctcatgatgttcctctacaagaataagcacaagataagggacagtataagtcgagtccagactcgtggaggatatggatctgcgcatgcaaacagacagaatcaagaaagagaagtagattccaaccaggcccagagcatgcacgtgacagtgccaaatgatctagaagacgatacatgccaacaagagatagaagtatccatagaaatcactagtcctgttctggattcccatcgaggccaggctttgcacagtgttgcgcaatga

SEQ ID NO: 7618 - DNA, 1044 bp, Zea mays
  Peptide Sequence Number=SeqID_49397
atggcgccgccgcgaagcctcgccggcgccgccatagctgccacagccgcagccatcatcctctcatgtaacctctcactcttccctcacctcatcgtttctagctccaagttcccagcatcaacctctcctccctcaccaacgtgcctatccggctatcccacaggcttgttctacaggcgcaaatgcgctcgtctggccgcgcgggtccgcgagttggaggcgtcactggcggtcactgcagagaaggccgccgccgagcgccgcggcagagtgcgggcccagcagtcactgagggctctgagtcagctggagcctggttccgacgaagcgaggccgaccaaggccgccgcctcagcatcttacccgctggtgccgattggtactgtcgagtcctgcttctccactaggaacggtacaccaaggcagcctttggtagttacattagccagggcaactttggtgcttgatccagcccgagtcccagcagcagcgctggaggggctagctagttactcacattgctggatcctttatgtttttcatctgaacactgatcttgataaactgtggaaagatcctgctaggtctaagctaaaagcaaagtggatattgggtttgaatgaactaatggagtcttctgctttctcatggaaggtggaggcggtgaatggacatactcttttgctttctggagtagatttggttgatggcacgccagtccttgatattaaaccatacctgccatattctgacagtgttaaaggtgcagctgttcccagttggttagagagcttcatcaccaccattgatctccgccatccagctgtcccaacgggttatgtgaactggcatgacaacttcaccccgctactccttgttcggcaacctcactccatcgccgtgaaccgctgccagcattgcctacctgaggtcaagcttgctgatctccgcatacacaatacctcacgcttccccgtctcctctgttgacaccgcaaggaccaccgcggccgcctgtttacatgttggcgccaatccatga

SEQ ID NO: 7619 - DNA, 582 bp, Zea mays
  Peptide Sequence Number=SeqID_49398
atgttttcaacaagcgagggatggcaggttattttcaagcttcctcgaggactctttagcaaaaagacccggccgaaggggtatccaacgaccctggccgttggatcagagatccatgacccagatcaaaaggtatcatggctgattcttaacggtctagatctagatcgagggtctggattcaatctcgaagaggtatgcccacgatccgatcctagtcgtacactctacatcctacggctcgcacgaatttcccccaaccctctcttcttccccaatcagcagggcggcgacgaagcagagctccaccctgggagctcgctggatttcctccgcccagcgcactggcgtcaaaatccaaacgcgaacggtgctaaacattggggaaagaaaggcgaagtgatggatagtatccttaccggtgatcggagcgatggtagcatctctgcatctgcccacggcgacacaccagcgcccgcggaggcgccgcacggtggaggccatggcagaccttggatctggcaccgagtcgaccatcaagcagccggatccaatcccaacagagtcaacgacaaacagtaa

SEQ ID NO: 7620 - DNA, 453 bp, Zea mays
  Peptide Sequence Number=SeqID_49399
atgggcaagaacaacaagcgcaagcgtgagccgactcctccatcggaggagtttggtgattcggaatactcagaggaggagttctcctctgagtccgaggggtctccggctcccatccccctgcgtgagtcgtctgatgactcagacgactcccaggggcttgcggcggaggtctggacgtatatccgggccgtcgagcgctccgggctcgaaggctcggatgagtcggagtactcctcggatgaggaggactcggacggtggcgacgatggtgaagacgacgacgacgatgacgacaacgacgacgacgacgacgacgacgacggcggcagcggcagtggcaggggcggcggcgacggcagcagggacagcaccaagggcgacagcagcagggacggcaccaagggcagcagcaggggcggcggcggcggcaggggcagggccagtggctag

SEQ ID NO: 7621 - DNA, 645 bp, Zea mays
  Peptide Sequence Number=SeqID_49400
atggtggctgacgcatgggacacacactcgcatgaggacgtggtggagcgggccgtgtcgccggcgcggtccaggactggtgaaacacgtgtacagacgtgggggacgcacatgtgtttcggcgggaatcagaggcggcatgtggcgtcattgcaaaggcccactccctttgcgcgttcgcggcccaccccggcccagcaagaccgcgcgcaccacgatgctgacttgtgggaccctccggtcagtcacccgcccatgcgcgtgtggccaccaattgtctggcacgtcgggcccgcacgccagtcaccgaatgcccctgtttctcttctcggccgcgcgatggctaacgacccctccgaaattcgcgctggcaattgcgaccacctccccagctgcggccgcgtgacccacctacccatatatccaggctgtcctcgccgctactgcctcaaaccctactgcgaagcgattgcagagaagagattgggggaggtgagagatccatcgtcgccgcaaatcgttggcatcggcagggcacgatcccgtgatagcccagggggtagaccagagcgttcaagaccgatttgcgaggctgtggggcacggcatcgaccgggacctgtcgggttgctcatcggtggcgtaa

SEQ ID NO: 7622 - DNA, 525 bp, Zea mays
  Peptide Sequence Number=SeqID_49401
atggaggaaggctatgataggtttctagccaaaaaaatacaattgctgatttgtttacgaataagttttgcggaattacctgggcctctccccctaatatttgatttcacaaatgctcaaactctctgccagcatacataccttggacaggccctagtcagattctgctatgtctatgataggtacaatctgattgtgattggtccacaacaagctttaggctttacctttaatgtgattaggcataatgaggcgtggaattttcatgcgctcaactttaataggttgatcatgtgggaagcagaccactcgaacattacaaggttgttgcttcgggctagagtcacatcgctagaagaagtgcctcggtttattgttttttgtgtttcggagggctttaaaggtttctcttggactatccaatgtcaaccagttgctcaggtagggtttgatcttgacctacctcaggctgaggaagaaaatgatccaaatgaagacaatgctaggtgggatgaatgcctgtag

SEQ ID NO: 7623 - DNA, 672 bp, Zea mays
  Peptide Sequence Number=SeqID_49402
atggtggaagtggaacggagggggaagggtagtttggggattatgtctgcaattagagaggtcgtacctccagggtttggtggcgagtttacgtctatgacaatgtgggtcctctacggcagagaaagagagggtagccgaggccgagtccgagccctagggtcgggcgaggcgaaattcgtcgtcttccggggccgaggccgagtccgagccctggggtcgggcgaggcggagttcgtcgtcttccggagccgaggccgagtccgagccctagggtcgggcgaggcggagttcgtcgtcttccggggccgaggccgagtccgagccctggggtcgggcgaggcggagttcgtcgtcttccggggccgaggccgagtccgagccctggggtcgggcgaggcggagttcgtcgtcttccggggccgaggccgagtccgagccctggggtcgggcgaggcggagttcgtcgtcttccggggccgaggccgagtccgagccctggggtcgggcgaggcggagtttcctatggcgcccgaggccggacttggttgctgtcagcctctctctgtcgagtggcacagcagtcggagtggcgcaggcggcgctgtcttcttgtcaggccggtcagtggagcggcaaagtgactgcggtcacttcggctctgtcgactga

SEQ ID NO: 7624 - DNA, 342 bp, Zea mays
  Peptide Sequence Number=SeqID_49403
atggcgaactgcgggatgtgggagttggagaagcaagcggcggtgaagcagcatagatttgctgatcaggagaaaattccaacacttggtgaggtgcacatgcaatacacaaacaccgaacacatgtaccgacttatcactatctctataacagatcagaacaatatcatgatccttccaacatgcttgaatactatcactatgactcgagataaacatcaaaaaccggttcgcttcgcgattaaccggtggtttagagcgcgttttcgttggtttttcaccggtttttcgcagtgtccagagcgagacacgatgtggagtcgggctattcttgactcttga

SEQ ID NO: 7625 - DNA, 1167 bp, Zea mays
  Peptide Sequence Number=SeqID_49404
atggcccacacgattcggcaattccgagttcctcgtggtatttccaagctgaacctcaggttcagcagcagaccagcaacctcagaccagtgccgacgacgagctgtgaggagagggcaaggaaacaagcctgtgaggaaggcggcgatggagaggtacgaggtgatcaaggacataggatcgggcaacttcggggtggccaagctggtccgggacgtcaggaccaaggagctcttcgccgtcaagttcatcgagcgggggatgaagattgatgagaatgtccaaagggagatcatgaaccacaggtcactgaggcatccaaacatagttaaatttaaggaggttgtgctaactcccacacatttggccatagttatggaatatgctgctggtggtgagctatttgaaaggatctgtaatgctggaagatttagtgaggatgaggcgagatttttcttccaacaactgatttcaggagttagttattgccactcaatgcaaatatgccatagagatttgaaactagaaaacactctcctggatgatagtatagcacctcggctaaagatatgtgattttggttactccaagtcctctgtgctgcactctcaaccaaaatcaactgtcgggacaccagcttacattgctcctgaggtccttgctagaaaggaatatgatggaaaggtcgccgatgtttggtcatgtggagttactctgtatgtgatgcttgttggtgcctatccctttgaggaccccgacgaaccgaagaatttccgcaagacgcttactcggattatcagcgtccagtacgcggttcctgattttgtccgagtttcaatggagtgcaggcatctgctgtctcggatctttgtggcgaaacctgagcaacggataaccatcccagagatcaagaaccacccatggttcctgaagaacctgcccatcgagatgaccgacgagtaccagatgaacctacagctagtcgacatgaatgtcccctcgcaaagcctggaggagatcatgtccatcatactggaggcccggaagcccggcgacgggctgaagcatgcgggacagctccccggccttgggagcatggagctggatgacattgatgttgacgacatagacgttgaggacagtggcgactttgtatgtgccttgtga

SEQ ID NO: 7626 - DNA, 1338 bp, Zea mays
  Peptide Sequence Number=SeqID_49405
atgactctgccgacgagccctggtgctgcaagtgcggtcgacgacgacatgcccatgcccgtgcgctcgcccaagctgctcaggaccaactcgtccaagaaggtggcggcggccagcaacctggagcgggcgctgctcagcttcaagtcctgggaggccaccaagccccccgccgttccgccgtcgcccgtggtgcgccgcatccacggcgcccggcctggacggctggccctcagcagcccgacaccggcgacggaaagggacgatggtgccgacgacaccgccgtcctgcgttccccgctccacgacgccgccgccacccgggtgcagaagatgttcaagggccaccgcacgcgccgcaccctggccgactgcgccatcgtcatcgaggagctgtggtggaagctctgcgactccgcctcgctcgaccgcacctccatctccttcttcgccgccaccgccggcgggggcaagcaggagacggcggcgtcgcgatgggtcagggccggcaagcgcatcgccaaggtcggcaagggactctccaaggacgaaaaggcgcagaagctcgcgctacgccattggctggaagcgatcgacccgcggcatcggtacggccacaacctgcacctgtactacgacatgtggttccagagctccagcacggagcccttcttctactggctagacatcggaggcgggagggagatccatcaccccagctgccccaggagcaagctcaacgcgcagctcgtcatgtacctgggaatggccgagcgggcggcgtaccaggtggtggtggcggacgggaggctcacgtacctgcacaccgggctgcccgtccacaccaccgacgactccaaatggatcttcgtgctcagcaccaccaggtccctctacgtcgggcagaagcgcaagggccagttccagcactcaagcttcctcgccggcggagccacgtcagccgcgggcaggctagtcgccaaggacggcgtcctcaaggccatctggccctacagcggccactacctccccaccgaggagaacttcaacgagttcatcgccttcctgcgggacaacaacgtcgacctcaccgacgtcaagaggtgctcggtggacgacgacgaatgcccgttgtcgaagccagcagcaggcgccgtggtggccaagtggacgagcggcgccggcgcgcgcatcggctgcgtccgggactacccggcggaactgcagagccgggcgctggagcaggtcaacctgtcgccgcgggtgcagcacacgggcgcgccgccgctcaagcagcaacaaggccgccaggcgtcacattcagatggcagtagatag

SEQ ID NO: 7627 - DNA, 618 bp, Zea mays
  Peptide Sequence Number=SeqID_49406
atggcgcttcctgttgacgttgctggcctgcgccctaggttgggcgacgtggaggctcctccgaagccgaggtcgagtctgtcttccatggccgaggccgagtccgagcccctgggtcgggcgaggcggagtggcactgcagtcggagtggtgcaggcggcgctgtccttctgtcaggccggtcagtggagcggtgatgtgacggcggtcacttcggctctgccggagggcgcgcgtcaggataaaggtgtcaggtcacctttgcaaatgctcctgcgacttgggcggtcggtgacagtgaaactctggcatggtgcaatcataagcggatatctgccccctcattgcgaatgtgtttgtgcgagggctcaacaatggccctcccatccagtggagcatgttgctggtgtagatggcatcgcagttcttgaggctgcaattgaggaggttgtgaaaccatgtgtcgtggctttagggcaccaccaaggccacctcctcgatgtcagacatcaaggggttgcgaaggagggcctctacaacgtcgagaggagcgatggggacaacaacgctaaagtcaaggcatcgccgtgcctattgcgatgtccactattgagatag

SEQ ID NO: 7628 - DNA, 471 bp, Zea mays
  Peptide Sequence Number=SeqID_49407
atgtgcaagtggtggcgcagcctcgcgcccgccctgctcgccgccgcattggcgatcacagtggccacgctgcggccggcgacggagcacgcggacaccaaggggcagtcgccgctgcggttcgggccaggaggagcgttcaaagtggccctgttcgtgaacctgtattacggcgaggacacgtggacggactggggccccgcgcaggacgccgcgtcatggccgccgtcctcgatgccgagaacccaggacagcggggcgcaggtgggatcagaaaaggggcaacgcccggccgcccgaggccggggcgtgccatgggcgacggtgttcggcaaccatgacgacatggccttcgagtggccgcccataactgagctggctcataaagcacatgatactttcaaaaagttcagctcccaagctgactcggtgccatggcctagcatccaggatgttatgacacttgtctag

SEQ ID NO: 7629 - DNA, 132 bp, Zea mays
  Peptide Sequence Number=SeqID_49408
atgaaggatcttcaggctatggacagaggagccacatcggttgaggagaaggtgatgtctctccagaggttcaaggtgtcaatcgccaatgctgagaactccagctcgaagacaatgaacacaactgcttga

SEQ ID NO: 7630 - DNA, 189 bp, Zea mays
  Peptide Sequence Number=SeqID_49409
atgacagacaacctcagtgtcttcgctttcttcttggcggtcgttctgaagctcctcctcccgctgtccggtcctcacttccctgtgccaccattcctcatcgcggatgagaaggtcacggcgccgcgctttttagagacgtccaacatgtttgccaacgagatcagtgtttatccacacgagaaataa

SEQ ID NO: 7631 - DNA, 2190 bp, Zea mays
  Peptide Sequence Number=SeqID_49410
atgaaagagtccgaccagctcgcgacttttttcatcacaccctttggcatgtactgctacgttactatgccattcggtttgaggaatgcgggtgcgacataccaaaggtgcatgaaccacgtgttcggagagcacattggtcgaacggtcgaggcttacatcgatgacatcgtagtcaagacgaggaaagcctccaacctcctctccgaccttgaaacgacattcaagtgtctcaaggcgaaaggcgtaaaactcaatcccgagaagtgtgtcttcggggtcccccgaggcatgctcctggggttcatcgtctccgagcggggcatcgaggccaacccagagaaaatcgcggccatcaccaacatggggcccatcaaggacttgaaaggagtacagagggtcatgggatgccttgcggctctgagccgtttcatctcgcgcctcggcgaaagaggcctacctctgtaccgcctcttaaggaagaccgagcgcttcacttggacccccgaggctgaggaagccctcgggaacgtaaaggcgctccttacaagtgcgcccatcttggtgccccccgctaccggagaagccctcttgatctacatcgccgctaccactcaggtggtcagcgccgcgatcgtggtcgagagacgagaagaggggcacacattgcccgtccagaggccgatctacttcatcagtgagttgcgacactacttcgagtctcatccggtgactgtggtgtcatccttccccctgggagagatcatccagtgccgagaggcctcgggtagcattgcaaagtgggcggtggagatcatgggcgagacaatctcgttcgctcctcggaaggccatcaagtcccaagtcctggcagactttgtagctgaatgggtcgacacccagctcccagcagctctgatccaaccggaactctggaccatgtttttcgacgggtcgttgatgaaaacaggagcgggcgtgagcctgctcttcatctcgcccctcgggaagcacctccgctacgtgctgcacctccatttcccggcgtcaaacaacgtggccgagtacgaggctctggttaacgggttgcgcatcgccatcgagctaggggtccgacgcctcgacgctcgtggcgactcgcagcttgtcatcgaccaagtcatgaagaactcccattgccgcgacacgaagatggaagcctactgcgatgaggttcggtgtctggaggacaagttctacgggctcgagctcaaccacatcgcccgacgatgcaacgagactgtggacgagctggctaagatagcctcggggcggacaacggtccctctggatgtcttctcccgagacctacatcaaccctcaatcaagaccgacgacatgcccgagcccgagaagaaggcacccagaggctacacgcacctgctggtcgctatcgacaaattctccaagtggattgaggtccgacccctaaacagcatcaggtccgaacaagcggtggcgttcttcaccaacatcatccatcgcttcggggtcccgaactccatcatcaccgacaacggcacccagttcactggcagaaagttcctggacttctgtgaggaccaccacatccgggtggactgggccgccgtagctcaccccatgacgaatgggcaggtagagcgtgccaacggcatgattctacaaggactcaagccacggatctacaacgacctcaacaagtccggcaggcgatggatgaatgaactcccctcggtggtctggagtctgagaacgacgccgagccgagccacgggcttcacgccgttctttctagtctatggggccgaagctatcttgcccacagacttagaatacagatccccgaggacgagggcgtacgacgaccgaagcaaccggaccaaccgagaagactcgctggaccagctagaagaggctcgggacatggccttactacactcggcgcggtatcaacagtccctgcgacgctaccacgcccgaggggttcggtcccgagacctccaggtgggcgacttggtgcttcggctacggcaagacgcccgagggcgccacaagctcacgcctccctgggaagggccattcatcatcgccaagattttgaagcccggaacatacaagctggccaacagtcaaggcgaggtctataacaacgcttggaacatccgatag

SEQ ID NO: 7632 - DNA, 591 bp, Zea mays
  Peptide Sequence Number=SeqID_49411
atggagccgcgcatcggcaacaggttccgcgtcggccgcaagctggggagcggctcctttggggagatctacctcggcacgaacgtgcagacaaacgaggaggtcgcaattaaactggaaaacgttaagacgaagcatcctcaattgctttacgagtcgaagttatatagaatacttcaaggaggaactgggattccaaatgttaagtggtttggtgttgagggtgattacaatgttttggttatggacttactggggccaagccttgaagatctttttagctgttgtaacaggaagctgtctctcaaaactgttttgatgattgctgatcaaatgatcaatcgagttgaatttgttcattccaagtcattcttgcatagagatatcaagccggacaattttctcatgggtctcgggaaaagggcaaaccaggtttacattatcgattttggacttgcaaagaagtacagagatacatcaacacaccagcacattccatacagagagaacaagaacttgactggaacggcaagatatgcaagcccttccatggcagggcctgaaagctgggaacaagaaacagaagtatga

SEQ ID NO: 7633 - DNA, 521 bp, Zea mays
  Peptide Sequence Number=SeqID_49412
gaccaactcgtccaagaaggtggcggcggccagcaacctggagcgggcgctgctcagcttcaagtcctgggaggccaccaagcccccccgccgttccgccgtcgcccgtggtgcgccgcatccacggcgcccggcctggacggctggccctcagcagcccgacaccggcgacggaaagggacgatggtgccgacgacaccgccgtcctgcgttccccgctccacgacgccgccgccacccgggtgcagaagatgttcaagggccaccgcacgcgccgcaccctggccgactgcgccatcgtcatcgaggagctgtggtggaagctctgcgactccgcctcgctcgacagcacctccatctccttcttctccgccaccgccggcggggagcaagcaggagacgccggcgtcgcgttgggtccacacctgaccacccgcttctccttccctcttcagtgcctaatatgcatgaatgtagcaggcggagccatcccagagctttgtcctactgctggagcctaa

SEQ ID NO: 7634 - DNA, 168 bp, Zea mays
  Peptide Sequence Number=SeqID_49413
atgctcaacgatgcctcccgcaaccgcccgtaccacctcgccatcgacgccacggtcatggaccccaccttccgcgtcatcgacattggtttcagcgccccaaaggttggattggatttggctccagctcctaaggatgataatgctcagcccagcaaggatgagtaa

SEQ ID NO: 7635 - DNA, 216 bp, Zea mays
  Peptide Sequence Number=SeqID_49414
atgtcgatccacaaaagctacatgcccatcgtcttcaacactgttatcagcttcaccgtgggggaggttttcaacttcggatccctctcctacagcgtggaccagaatggcgctctacactgtgtagcggacgtggggacgaaggaccagagatctcctgccactaccttgaccaagaagaatccctcaccaaggcctagggcgaccccggcgtag

SEQ ID NO: 7636 - DNA, 720 bp, Zea mays
  Peptide Sequence Number=SeqID_49415
atggccgtgggggtagagcttcgacgctgcggcggcgcaagtagcctcggccgcgacatctgtgtccgcctcggcgtgctcaagccattagccattgttgccggggaagaagaagctcggagcgaagcctacgacgacgaccaggtagagtacctagcgaatgcagcgatcaacctggccttgtcccctccgactccgactccgactccgacggcgagcggcgctcccagggcggcgaggccgtcgatggagctgaccaacacgaaggagaccaaggcgtgggagggcctggccatcggcgcggtcacgctggcccggaccttctccacgggctcgcacaggttctgcaggtccggcagcgagaggaggaaccatagccggagcggcctgctgaggcgggccttctccatgcgccgccaccccgcgggcctcctcggcgccggggacgggtactggaggatccacgacatggacggggacagcgaccgcggcggtggcggtggcacggtcgtcgtcgaggagcacggcgagggcgaggaaggagacgaagacgaagcagcggctgccgaggaggaggtgcagaagaacaagaagacggagcagcgagacgaggacgcggcggcagggaaagggaaggaggaagcggccgccgagcggagggacaagaagaagcggcggggtggcatcttcaaggcgtgcaagaagcttttccggttgtag

SEQ ID NO: 7637 - DNA, 576 bp, Zea mays
  Peptide Sequence Number=SeqID_49416
atgggtcaggtgtgcgagcctattagccgattaactgggtgcgaccaagggcaggcgagggaggcgattgtgtgggcacaaatacgtctagatcgaatcggtcgcatgcagaggacgcgatgtgctcctagaagactcactgacccccggataagtcgaagctggtttcggagatggggtggaccagtaatgtcggcgtttcgagaccggggggtccctggaccgacgagtgaaatgtcgccgcgtgccccagcccagatgggtcggcgcgagacggagcgcgaaggggggaaaaggcagccagagagagagaggtggaaatcccgtggccttcgtattcgtcccgcgcccaggttgggcgatgtggaggctcgtccgaggtcgaggtcgagtctgtcttccgaggccgaggtcgagtccgagcccctgggtcgggcgaggcggagaccgtcgactgaggtcagggctgagtccgagccctggggtcgggcgaaacggagttcgtcgtcttccgggctgagcccgagtccgagccctgggtcgggcggagcggagttcgtcgtcttccggggctga

SEQ ID NO: 7638 - DNA, 993 bp, Zea mays
  Peptide Sequence Number=SeqID_49417
atggaggacgcttcctctcgcgtctcgtctctcctcgggttgctgttagccgcccactgcgcactcttgctcttgctccgtttggctggagctgctcacggccacggttacgctcccgctcctggcggcggcgtggcgctgagctccgcgttctacgacgagtcgtgccccagcgcctacgacgtcgtccggcgcgtcatccaggatgcgcgcgtctccgacccgcgcatcccggccagtctcatccgcctgcacttccacgactgcttcgtcaacggttgcgatggctcgctgctgctggacgacgatctcccggcgatccagtcggagaaacacgtgcccgccaacgacaaatcagcgcgtggcttcgaggtggtcgatggcatcaagagcgcgctggaggaagcgtgccctggcatcgtctcctgcgccgacatcctcgccctggcagccgagatctccgtcgaactcgctggagggccacgatggagggtgctgctcggccggcgagacggcacgacgactaacatcgagggcgccaacaacctacccagcccattcgacccgctcgacaagctccaagagaagttcagaaactttaacctggacgacaccgacctcgtcgccctccaaggagcacacacttttggtaaagtacagtgtcaattcacacaagagaactgcacagctgggcagccagaggaaacactagaaaacctagaccaggtcacccccaacgtgtttgacaacaagtattacggtaacctcctgcatggcgccgcacagctaccctccgaccaggtcatgctgtcggcggaccctgtcgcggagatgacgaccgctcccattgttcatcggtttgcaggcaaccaagaagacttctttagaaactttgccgcatctatggttaagatgggcaacataagcccgctaactaggaacgatggagagatacggaaattttgccgaaggattaatagcgaaggctattga

SEQ ID NO: 7639 - DNA, 1683 bp, Zea mays
  Peptide Sequence Number=SeqID_49418
atggccgagatagaagacgcgatgggtgcgccgccaatggtgacgacgacggagtccgagggcacgaccacagatgaggacgtgcatctttcgccgacctgcatctgcggcggcgcgggcggagctggtgggggaggccgcatcaagatcctctgcagcttcggcggccgcatcgtgccccgcccgcacgacggcgtgctcaagtacgtcggcggggagacccgcgtcctcgccgtgcctcgctccatctgcttccgcggtgggtgttgttcgctttctccatgcgctgtgccgcgctgcgtgacctgccgccgtttggctctcagcaggccgagatgtctgtcgttgccctgtgcagagttgaagaagaaggtggaggacatgttcaagacggaggtcgcggccatcaagtaccagctgctctccctcgccgaggaactcgacgtgctcgtctccgtcacctgcgacgaggacctggtccacatgctggacgagtacgaccgcctcgaggcgaagcgctcgccgaccacgtccccgcgcttccgcgtctacgtcttcacgccgcaggccaccgcgccccacccgtcggccgccgcacccaccgtgccctcgtctacccgctacgctggtctgtcgcgcctccacccgcatcaccaccaccatcagcagcaccgccaattccagccggagcgctacgtggccaccgtaccagcctcgcccgacgggagcccgccgttctccgcccagccgcacggcgccgtctcggcgggcaactccccgcgcgccaacgcgttgggcgttgggttcgggatgcagcgcgtccggagctcgccgaacctcagcaccctggacgcggcggcgcggcgcttgcatcagcacggcgtggacggcagcatatcgggctacgtgagcggctcaccaaggcacgccggcgcggggcccatgctgttgcagaacaatttccaccactaccagcaccagtacccgacggcgcccgtgcccgtgcccgtgcctgtgcccgtgccgcaccacggtgggcggtacgacgcgcgcgggtacgtccgggtaggcaactacctggcgccgatggtgcccgctgccaggccgctctcgaggggaggaccggcgccgcacagcgacatggtgacgccgaagaaggctcagacttgggctaagtcccggaagacggcgaactccgctccgcccgacccagggctcggacttgcgctcagccccggaagacgacgaactccgctttgcccgacccagggctcggacttgggctcagccccggaagacgacgaactccgcttcgcccgacccagggctcggacttgggctcagccccagaggacgacaaactccgcttcgcccgacccagggctcgaacttgggctcagccccagaagacgacgaactccgcttcgcccgacccagggctcggactccgcccttgcctcagccgacggtctccgcctcgcccgacccaggggctcggactcgacctcggccacggaagacagactccacctcgacttcggaggagcttccacatcgcccaacctagggcgcagaccagccacgtcaacaggaggcgccatcatcaccctaccccaagctgactcgagccacagggaacaagaccggcgtcccatctggctcgctccaccagataggcaatga

SEQ ID NO: 7640 - DNA, 492 bp, Zea mays
  Peptide Sequence Number=SeqID_49419
atggcaccgccacgcaggcgagcgagcaggccgcgctgccgtacgcagggcaccgccacgcaggcgagcgagcaggtcgcgctgccgtacgcaggcgcgcgagcacgggcccagccgctactactgcaggcgaaaccagacatcgccgctccggcaagtgggcgcgcagccgtcgcagcaccacctctacggcacgagggcgtcgcgccgctgttgcttcaaaggtgtgctgacgagcagacgcgaccccatcgtgaccgagcacaggccatcgctgttgcgtacgaagctcatgctattgctgcgcaggccagctcccatgcgcccgccgccgtcccgcggcaagcgcgcaagccaagccactgcgccacgagcacgaacacacaggcaccgaccgccaccggcgacacgacctcgaagatacgcaggctggcgcgggcaccaccgccccgaaggctggcaggcgcgccagccggcgccgcagcctcggag

SEQ ID NO: 7641 - DNA, 414 bp, Zea mays
  Peptide Sequence Number=SeqID_49420
atggctgtcgtggcgcgcgccggtcttgcgatgcccccagcagttgtgccggcggcggcggccgcggccgcggcggaggaggagatgcggtggcggcagctagacagcggcgtgagcgcggtgtcgttcgggttcgtggccaccgccatcctcgtgtccatgttcctcgccatggccatcctcgagcacttccttcgccccccggcccacacgctcgggcacgcgccgccccgggggatccgccgccgactccgcttcttcctcggccgcggcggtgagcgtggcgacgcccccggctcggatctcgaggcggcgaggaagctccaaggccacgcgcccctcgaggtacggctacggcatactgttcccgcacgctctcctcgcctcccgcccatccatggcgccacactttaa

SEQ ID NO: 7642 - DNA, 384 bp, Zea mays
  Peptide Sequence Number=SeqID_49421
atggcggtggcaggcgggcaggagcagcggtcacgtcgtcagccaggctcacatcccatccgggggcagcaagagaaccccctctcacggacaggcggcgtttctggcaggagaagcgggcaacgcttcgccttcgccgaaataaccgcgccgaaaaagggaccgggaaagggggataccccgaaaaggatccttccccatgaaggaaccaggctccgagcctccttactgatcagaggttcgaaggctggccccccgaagggttcaacagccgcctcagatcgcgtgggccctacacccactactggtcagaggttcgaaggccggcccaccgaagggttccacggccgcctcaggctacccgggctccgcgcccattactga

SEQ ID NO: 7643 - DNA, 1632 bp, Zea mays
  Peptide Sequence Number=SeqID_49422
atggatggagctcttcttttgatcgcagcaaatgaaagttgtccacagccccagacatcagagcatcttgctgctgttgaaatcatgcgtcttcaacatatcatcattctgcagaacaagatcgatcttatccaggaaagcgcagcgatgaatcagcatgaagcaatccaaaaattcatccagggaacaatagctgaaggtgcacctgtggtgcctatatccgcccagctgaaatacaacattgatgttatctgtgaataccttgtgaagaaaatccccatccctgaaaggaactttacctcacctcccaacatgattgttattcgctcctttgatgttaacaagcctggttcagaggtcgatgaaatcaggggtggtgtagctggtggtagtattctcaggggagtcctgagggtgaaccagaagattgaagttcgccctggcattgtcatgaaagatgagactggaaacatcaagtgcaccccaatctactcaaggattgtctcactgtacgctgagcagaatgaactccaatttgctgtcccaggagggcttattggtgtgggaacaaccatggacccaactctaacacgtgctgacagactggttggccaggttcttggtgaagtaggttcactacctgatgtttacgtagagcttgagatcaatttcttcctactccggaggctgttgggtgtgaggacgaaaggtacagagaaggcagggaaggtgtcgaagctcaccaagggtgagatcctcatgcttaacatagggtccatgtccacaggcgcccgtgtgctcgctgttaagaacgatcttgccaagctacagctcaccgcgcctgtctgcacgagccgaggagagaaggttgctctgagccgtcgcgttgagaagcattggcgcctcatcggatggggccagatccaggcagggaacaagggggctgcacagttccccacatcgagcgaactagtgatcacgcagtttagactggccgcaacggacggcgcgacgccccctccctcggctacagggcgccccccaacgcggcagcggctcaccctagccagcgctctacgcagagctggtcaaaattctaaactgcgtttaaacaaaacattttacaaactgcagtgcagaccaaagatttctttcccacaaaacaacgaatcaaagaatccggtcgcgacggtcgatcacgacggacgtggccgcggcgagtcaggggactgcgaggagagcgacgacgcgttgcgcaggcggctgggcgcgggccggaagctccacctcctcaggaggacggctcctccggcgcggccacggccacggccgcgcgcggcgggcggcgtgagcgcccgtctcaccagctcgcggttccccttgcccgtgggcacgcgcgcgcccgcggccctggcgctcctcgtccgcctcggcgtcgcctgctgccgcgcggcagcgccccaccagttgcactccggccccgcgcgccccgtcggcgacgaagacgaagagccgcccgcagctgcagcaggtccccgcggcctcggcgtcccgggccgtgggccagctgcgcccggcacgggcctggtactcggccgcgtcagcccaccgcacgccacggtgacgtgctga

SEQ ID NO: 7644 - DNA, 2175 bp, Zea mays
  Peptide Sequence Number=SeqID_49423
atgggcaacccggggcgctcgcggcagttgtcagcgctggttgcttccgccgccatcttgctgtcactgtccgcgttgccaatttgtcggccctacacctacgagcaagatgtgtttgcgataaacggcttgtacacggcacttggagcaccacagctgcctaattggacttcaaatggtggtgacccctgcaatgaaggctggcaaggtgtttcatgtgtagcgtcaaatataacctccataattctcagcggtgcaaatttaggtggacagctgggcaacactttggggaattttacatcattaatcacctttttcctttcagctaaccaactaagtggtagccttccaagtacattgtcatcccttacacttttgacaagcatgtcactcaatagcaatcatttgactggagcgataccagatgtattttcagcactcactggacttgcaaatttacatattcagaacaatcaaatatctggaactcttaatgtgttgcaagatctccctttccaagatttgaacgttgaaaacaaccttttctctggtcccgtgcctgtgaaattactgaacttgccaaacttcaagaaggatgggaacccattcaatacaagcatagctccatctgcgcagcctcccatcgcgccaacaccattaccgtctatcccaccttcgtcagggcatgtcccctcaaaagaacctgcacattcttctagtgttccaggtggtagtacttcaggatcaggaaaacatactacactcaaattagttggatatattcttattggagtggtattagcagtagttcttgtgctaattgcaatgtactgtttatccaagtacaaagaaaaaaggtcgagagatgatatttatatgaaaaacaagataggaagggtacctcagaagcttggagagcctaaaatcaaggagccaccattaaaactcaagaatgatgctgagaaagaaacttcaaatgtggtttatgatccaagtccaagggatgggcagaacttagattcatcaccgacagagcatgtgattgatatggaaaaggctgataattttgttgaggaccaactgcatcctccgcagccgatggcactgcggactgaaaaagtcactgtcaatcccagtgtacgtacaagaaggggaagagtaccttcagttgaaaaggtggaatcgacgactactgtcaagtccttttccattgcatcccttcaacaatataccaatagtttcagtgaggaaaatatcataagagacagcaggtttggtaaggtgtatctggcaaagcttcctgatggagagctactggaaattttgaagattgactcttctaactcaaaagtgccagtagatgcctttcttgagctagttgtgaggatttctgaactgaggcatcctaacatacttggtcttgttggatactgtgcggagtttgagcagcgattacttgtctatgagtactgtagcaagatgaccctacatgatgaacttcgtcatgtggatgactcaagcaagccattatcgtggaatgctcgcctccaagttgcttcagaggcagcaaaagcattgcaacatcttcatgacggttgccaaccaccagttgtacaccagaattttgaaccctctgttgttctgctcaacagcaccttagttgtgcatatttctgaatgtggccttgcatcactagcatcaaaatcagtttctcagttgtctggacacaccttattccattatgaagcacctgaagtgcatgaatctggatcagtaagcgatcgaagtgatgtttacagcttcggtgtagttatgttggagcttctaacaggacgtaaaccttatgacagttcgtatccacgagctgaacaacatctagtacgatgggccacttctcaactctatgatattgatgccataacgaagatggttgatccttccattcgaggacaatgttctgataaggcattatcccgttttgctgacattattagccgctgcattcagcatgaaccagaattcaggccaccaatgtctgaagttgtccaagacttaactcgcatgatgcctttgacgaccattgatgcggtagtaggatattttggccaatgcaaaatgggtggaacacagtggcaggatgcagagactgcaccacgttttgtccactgccagtaa

SEQ ID NO: 7645 - DNA, 1053 bp, Zea mays
  Peptide Sequence Number=SeqID_49424
atggcggatctgagccaggtaggagatgcccaggtggcggatctaggccgacggggaggcggggtgtggtcgcggcccggtggcgcttggaggcgcagtggccgggtcggggatgagggcggtcgtcgtgcacgcacccagagaggagggagggtcgtgcggatccgagcgcctcgcagtgggaggcgcgacctaggggcggcaggtgcaggcgcgttagcgatgcgtagtgtagggagggggttgctggaggagcttgcaggggagtgccgaaacgggaccgcgccgaggccgatcgtggcgcacgacgaggtagggagggccgacgagcaccatggcggaggagaaccagagcaggatagtgagcgcgacgaggttgaagaggaggagcataggctgggaggagggaccgagggagcccccctggggagggaaggaatagcctctccgggggcaaatgatcttatccatggatggggcatcgattacaagtttgggtattgtgctcagggtgacaggacaaagaacattggcgtagttgatagtgaatttatagttcaccgaggagtgcagacattaggaggttctacaataacaaaggcacacctgctggacggcgtaggcgatgtcaggcctggagaaggtcagggagagggcgagaacggcccgaacggtggcgaacttgaagacggggctgaaggtctcatcgtaatcgactctagggcgctgggtgaagccccaaaggacccaatgggccttgtagcggtcgagggagccatacaagacgaggtgcctgggcctcacgtggtgcgggtagaggcgcgagcggtggcgtttgagcctggggagcaaccggggtggaaaaaccggatcgaactcaaggagagagtcgagatcaatgggtggggaggagccaacaagaggaaacacatcttcgtcgaaaaccacatgacgagagatgagtatgaggtgggagacgaggtcaagacagcgataccccttgtggtcaggggagtaacagaggaagaggcaacgagtggagcgcagtgctag

SEQ ID NO: 7646 - DNA, 378 bp, Zea mays
  Peptide Sequence Number=SeqID_49425
atgacgtggagcgactcctccttcgtgggcttgtttgcttcgaagatgaggcatttggcggaggcggggcggtggatcaaggttttggaagtctcactggtgaagaatcggagctgtctcgagtggggtaccattggccatgtggctcatggaaagtccactgttgttaaagctatatctggtgttcagactgttcggttcaagaatgagctggaacgtaacattactataaagctgggttacgctaatgcaaaaatctacaaatgtgaggatgacagatgtccgcgaccaatgtgctacaagaacatgggggaagggacgaccagatttaatgtgaaggccgatggagacgaacatgtcgttgaggctgcgaattag

SEQ ID NO: 7647 - DNA, 405 bp, Zea mays
  Peptide Sequence Number=SeqID_49426
atggatcagctatatggtttgagaagaaagtgggcagctgtttatcgtaactcttttacagctgatatgactacaacccaaaggagtgaagctctggtcgcggtccttgtggtcctgaccgcggcggtggcgtgctccgcggcgcgccccgtccccgcgcagcagcagcagcaggcgggagaggacgtgaagcggccggacacgctgcacgaggggacggtgctgatcccggggatggggcgctacgagatcggcagccactacatcccggacataggcgggctggaccacagcatccccgccgccacccacggccagttcctccccggcgccgacgacacctgggtgcccaaccccggcttcgaggtccccaaccccttcatgcccggcgcggccactccctga

SEQ ID NO: 7648 - DNA, 411 bp, Zea mays
  Peptide Sequence Number=SeqID_49427
atgggcaagggtaacaaacgcaagcgcgagccgactcctccatccgaggacttcggtgactcggaatactcggaggaggagttctcctctgagtccgaggggtctccagctcccgtctctcccccggcatcgtccaacgactcagacgactctcaggggattgccgcggaggtctggacttacatccgggccgtcgagcgctctgggctcgagggcttggatgagtcagagtactcctcagacgaggaggactcgcccgaggaggacggcgaaggtgacgacgacggaggcgatgacggtgacggcggcggcaggggcggcaacggcgatggcaagggtggcgacggcggcagcagcatgggcagcaatggcggcggcagcagcaagggcagcaacaaggccagtggctag

SEQ ID NO: 7649 - DNA, 426 bp, Zea mays
  Peptide Sequence Number=SeqID_49428
atgggcaagggtaacaaacgcaagcgcgagccgattcctccatccgaggacttcggtgactcggaatactcggaggaggagttctcctctgagtccgaggggtctccggctcccgtctctcccccggcgtcgttcgacgactcggacgactctcaggggattgccgcggaggtctggacttacatccgggccgtcgagcgctccgggctcgagggctcggatgagtcggagtactcctcggacgaggaggacccgcccgaggatgatggcgaaggtgacaacgacgacgacggaggcgacggcggcgatgacggtgacggcggtggcaggggcggcaacggcgacggtaagggtggcgacggcggcagcagtaggggaagcaacggcggcggcagcagcaagggcagcaacaaggccagtggctag

SEQ ID NO: 7650 - DNA, 450 bp, Zea mays
  Peptide Sequence Number=SeqID_49429
atgaggcaacgcttgtcgttgtatgcttctgctccatcgaagatcattaggcatcatgttggattggggaaatccacggtggggacctcctgctctaccgatttcgccgactcctccggcttcacctttttggcggacagggaagccatgatactgacacgatgtgtccatcagtttttggaaacattcgccatcatttttggggcggcggcctggcacgtcagcgtcgtgcgggctctttctcttatggaaaatggtccctaccgcatccttcccatcagcggacttggtcgctatctcaagaaggtcggcccaatcatggatggttccggctggcaggtgctcgagctaggctcttgccccctccgcgaggtggatggggaggaacttgatgacgaggaggtcgtctttaattctcgtcacacgacatgtgaggcgttactcttctag

SEQ ID NO: 7651 - DNA, 240 bp, Zea mays
  Peptide Sequence Number=SeqID_49430
atggatgctgacaacatatcaagatctagcagcacatatattggaaagctgaggtcaaacttcctcggcacaaaatttatgatctctaacatgcagccgccttataatggggctgtagtccctcatgctggccggacaaatcggagattcgactccaggaatgtctccctaagggaggtctcccctaaagtgccaactggtctgcaattaggggatgcaagtttttatatattagaatag

SEQ ID NO: 7652 - DNA, 393 bp, Zea mays
  Peptide Sequence Number=SeqID_49431
atgccctccttcccagcggcgcccaaatcccgccatggtcgagggctacctattacagggccttcccattttgcatgccctcgacagcgccgatgtcccgccctcgaccgtgatctccgcagccaagtcgagatccccgtccgccactgccttcgtgtactgtgtgtgagcgccgggggcatgcaaacgcataggaggggagccgatgaagtggtggtgatggaggacgacgatggacgccaaatgtggtgccctaccggcggagacatcggtggaggcgcatcatcacgaagctggacagacgcatcgattccatgttccagcatagggagtcacgcctacacgcccagcgtgttcagccctaggactgtctctacgccattcctctggtag

SEQ ID NO: 7653 - DNA, 1725 bp, Zea mays
  Peptide Sequence Number=SeqID_49432
atggcgctccactctgctgcagccgccgccgctctctcggccctcctgatgctctccttctcaggccttacgctctccgacacgacgccgtccacgccggtgtcaccgtcggccgcgtgcaacgccaccactgacccgaccttctgccggtccgtcctcccgccgcgcggcaagggggacctctacaagtacggccgcttctcggtggccgagtccctggcgggcgcgcgcatgttcgcggccctcgtcgaccgctacctcgcgcgccaccggcacctctcctcgagcgccatcggggcgctgcgggactgccagctcatggccgacctcaacgtggacttcctcacggccgccggcgccacgatcaagaccacggacaccctcctggacccgcaagccgacgacgtgcacacgctgctgtcggcgatcctgaccaaccagcagacgtgcttcgacggcctgcaggccgcgtcggggtcgtggtccgaccgcggcggcctcgacgcgcccatcgccaacggcaccaagctgtacagcctctcgctgtcgctcttcaccagggcatgggtgccaacggcgaagccggctcactcgcacaagggtggcagcaatgacccgcaccacggccacggccacggccacggtgacaagaacaagaagcacccggcggcatccgcggcgaggaggggcctgtttgacgtgaccgacgacgagatggtgcggcggatggcgatcgaggggccagaggcgacggtggaggtgaataccgtggtcacggtggaccagagtggcgccgggaatttcaccacgatcggggacgccgtggctgccgcgccgagaaacctcaacggcagcaccgggtactacgtggtctacgtgcttgctggcgtctacgaggagaacgtggtggtgcccaagcacagcaagtacatcatgctggtcggcgacggcatcggccagaccgtggtcaccggcaaccggagcgtcgtcgacggctggaccaccttccaatcggccaccttcgccgtggtggggcaaggattcgtggcggtgaacatgacgttccgtaacacggcggggccagccaagcaccaggcggtggcgttccgttccggggccgacctgtcggcgtactacggctgcagcttcgaggcgtaccaggacacgctgtacacgcactccctccgccagttctaccgcggctgcgacatctacggcaccgtggactacgtgttcggcaacgccgcggtcgtgttccagggctgcaccttctactcccggctgcccatgcaggggcagtgcaacacggtcacggcgcagggccgcagcgaccccaaccagaacaccggcacctccatccagggctgctccctcgtcgcggcgccggagctcgccgccaacaccgccttcacgacgctcagctacctcggccgcccatggaagaacttctcgcggacggtggtcatggagtcgtacgtcggcgcgctcgtcgacccctccggctggatgccctggtccggggacttcgcgctcagcacgttgtattacgcagagtacaacaacaccggcccgggcgccgacaccagccgccgggttgcgtggccggggttccacgtgcttggcgacggcaccgacgccggcaacttcaccgtctcaagcatggtgctaggcgagaactggctgccgcagactggcgtgccattcaccagcggcttaattccttga

SEQ ID NO: 7654 - DNA, 258 bp, Zea mays
  Peptide Sequence Number=SeqID_49433
atggtgcgtactatccagaccacccgtgtgaacaccaactatatccctctgccacagcatgttcttgtctacccagtggtagtggaggaagtccctgtggatctccatcactttcctgtggagaatggagtgattctggaggacagctcagaggaaaattctggcgacgacccagatgattctggtgatgatgaagatgatgaagaagaagaagaagaggaggaggagaacaacaatgaggaagccaatgatgagtag

SEQ ID NO: 7655 - DNA, 219 bp, Zea mays
  Peptide Sequence Number=SeqID_49434
atggcaagggcccacatgtcggtggccaatgtggggggtaagagtctggtgatactaacggcgcggtcccacaggataggcagagccgaagccacggaaacgaggatcttaggtgcgcagtggggcccacctggaagtggccgcctggggttagtgtatatcatcgggtttgggaatatggttaagatagatatggatgagatggactacatgatttag

SEQ ID NO: 7656 - DNA, 255 bp, Zea mays
  Peptide Sequence Number=SeqID_49435
atggctatcaccggtgaggggcgcggccgcaggaagaatcgccgccgtggtggattttggcagagaccctcggcgttagatctagcggccaggaaccgtgcataccccttcgccgctgcagttttgcacataagatcctctgttttattaaaactaacccgtcgtcctaagcgcatgtgctctgtgtctgggatgtcttacaccaaggcccctgcctttctcagatttaatgcgtccagtccagagcctatttaa

SEQ ID NO: 7657 - DNA, 546 bp, Zea mays
  Peptide Sequence Number=SeqID_49436
atgtcttcgcccgagctccgagaatcttcggcgcgaatgctggaggttaccggtggtcgctggcctaggaatgttccgatcccctgggcgaccagcgaggacatgtttacgtctcgcttagcccgtgagatgaagatttttccttatggacggaatattgctgatgttgtatcggcagtgatggataaggatcgccaagatgcgaagcggaagcgccgggcattcactagggtcagggaccctagtcgcgaggtcaaaaaggcgcgtggaatcgcgaagtctgttgccctcggcagcagcaagccatcgccggttgcaaagcctgccgtccccggccccagcaagccttcatcgggtgtgaaggccaacagtttgtatcaggcgagatcgagatcaggtttcgattccctgttgtcgattccaatccagggagaccaagaaacaaatcatggagaccaagtcgattccttctgccttccaatttcctcagcatcatggagcgaacaccatgctgcccatgccagcgccggatatgcctgcatttaa

SEQ ID NO: 7658 - DNA, 834 bp, Zea mays
  Peptide Sequence Number=SeqID_49437
atggacactagtgcgtcgtcgtcgtcgtcgccgccgccgtctagctttgcggcggcggtggcggcgctgctgctgctgctgcttcttccggcgctgtcgtcgggcggcgacgactggcagcagtggcaggacgcgcacgccacgttctacggcgacgaaaccggagcagagaccatgcagggcgcgtgcggctacggcgacctgttccagcaggggtacgggctggagacgacggcgctgagcgtggcgctcttcaacgagggctggtcctgcggcggctgctacgaggtgcgttgccagggcagcgcgtactgcgcttcgggatcggcggtgacggtgacggcgaccaacctgtgccccgccaactactccaagccgagcgggaactggtgcaacccgccgcagcggcacttcgacctgtccaagcccatgttcctgcgcctggtcaccgacttccgcgtgggcatcgtgcccgtgcggtaccgccgcgtggcgtgcggcggccggcgcggcggcgtgcggttcgagatgcggggcaaccggtggtgggtggccgtgctggtgttcaacgtcgcgggggccggggaagtcagggccgtcgccgcccgccgggacgacgacgacagcggcggcgcgcggcaggggcagtactactgggccgacatggcccgcagctggggccaggtgtggacgaccggggacggcagctggagcgtcggccagggcctgtcgttccgcgtcgtcgccggcgacggccgcgccctcgtaatcgatggcgccgtccctcccggctgggccttcggccagagcttcgagggcaagggccagttctga

SEQ ID NO: 7659 - DNA, 477 bp, Zea mays
  Peptide Sequence Number=SeqID_49438
atgggcaagaacaagaaggatggaggttcgtcgcaccactccggcgataagcgaaagcgcgagccaagtcctccctcggaggactttggtgactccgagtactcggaggaggagttttcctccgagtctgaggggtcgccggtctacgcctctcccccggtgtcatccaatgactcggacgattcccaagggatagccgccgaggtgtggacgtacatccgggccgtcgagcgctctgtgctcaaggcctcggatgagtcggaggtcttctcggacgaggagaactcctccgactcgtctgaggaggggagcggcggtgacgacgacgaggagggcgacagcggcgatggcggtgacggcggcgatgacggcgacgacgacggcaagggtgacggaggcgacggcggcaagggcgacgacaacggcaagggcagcggcgacagcagcagggccagtggcaaagcgccactggcttaa

SEQ ID NO: 7660 - DNA, 681 bp, Zea mays
  Peptide Sequence Number=SeqID_49439
atgtgctggttgggcgccgtcgtgggcgggcccgacgcgcgcgacggattcgtcgacgaccgcgacagctacggccagaccgagcccgccacctacatcaacgcgccgctcgtcggcgtgctcgcttacttcgccggcaccaccaatgtgggagcgccggagcaaaaggcttggtcgagctcccccgtcagtagtgccggcggcgatagtgcctgcgctcagcaccttgaagaagaatttgaagtggaagtggaaggggaacttgttcctccctctgaaacttctcaaactgaggttgtcactgaaggtcctccagaagagggacagcgccgcctgcgccactccgactgcagcaccactcgacagagtgagtctgaccggcagtcaggtcttgacaaaggcgccacggcgaactccgctccgcccgaccctagggctcggactcgggctaagacccggaagacggcgaactccgctccgcccgaccccagggctcggactcgggctgagacccggaagacggcgaactccgctccgcccgaccccagggctcggactcgggctaagacccggaagacggcgaactccgctccgcccgaccccagggctcggactcgggctgagacccggaagacgacgaactaccgctccgcccgaccccagggctcggactcgggctga

SEQ ID NO: 7661 - DNA, 147 bp, Zea mays
  Peptide Sequence Number=SeqID_49440
atgacgatagagctgtcaggggcggttcaagcagttttggtcaacatgaccagattgtgcagcagtctaccagtcagaatggtagacaggctgccaggtctaccaggggcggttcaatcaccccctagggtggttcaacaggtttag

SEQ ID NO: 7662 - DNA, 588 bp, Zea mays
  Peptide Sequence Number=SeqID_49441
atggagaccgtgacgcagagagggaggaaggataacaaagattctattgtgtccttgcgttggtgcagcgaagaagacgacctcatcgagctgctctggtgcaacagccatgccatcatgcagagccagagacactggaaggtgctgccgatgctggagaaagcggcggtggtggcggcaccgctagcccccgcgtccgtgccacaggaagatgagggcggcctatggttccccttcacgctggccgactcacttgacaaggacatcttctcggagttcttctgcgaggcaccgacgccggcggatgcggcgccggcggcctctagtggtggaaccggcaccgaagccggcgacaagtcacgcggcgtggacgttccagcggcggaggacgacaggcgcggcggcagcggggcgtgcgcgatgtcggcgggggacccgtgcgacctgattctgcctcccaagtcgacgcccgcgtcctgctccaggcagcacacgatgatgagcctggccaacggcggcgacaatgccggaggggacttgccaggcctcgttcgtgcggggtggaggccggcgcgtcgtcgatgctaa

SEQ ID NO: 7663 - DNA, 375 bp, Zea mays
  Peptide Sequence Number=SeqID_49442
atgccggcgtttctattatttatttatactagcgacaaggacgcccaggcggaggcccccaggtccgccaactgcaacggctcggcgagcggcccgccgtggtgtcctgctgtgcctggagaaccgcgccgagccgtggttggtggtgcagacgagcggacggagccgtcccctccatcgatgactgccacgctcaccgcagcgcacggaggccgcagcgtggagctcgggaagcgcgccacggacgcgagagagtcatctgtggacgctagtgagtcttctgttgactgttgttgcggacgcgagcatgggcagcacggcgctattgcacggaccgcggcacacgtcgctgcacgagaggagaaggtcccgtga

SEQ ID NO: 7664 - DNA, 1092 bp, Zea mays
  Peptide Sequence Number=SeqID_49443
atgcccgacataccgagggatgtcgccgagcgctcgctggatatccgagccggatcccgacccgtcaagcagcctctgcgccgattcgacgaagagaagcgcagagccataggcgaggagatccacaagctaatggcggcagggttcatcaaagaggtattccatcccgaatggcttgccaaccctgtgcttgtgagaaagaaaggagggaaatggcggatgtgtgtagactacactggaatgcaaggcgcgacgtaccagcggtgcatgaaccatgtgttcggcgaacacattggccggacgatcgaggcctacgatgatgacatcgtagtcaagacgaggaaagcctccgacctcctttccgaccttgaagtgacattccgatgtctcaaggcgaaaggcgtgaagctcaatcccgaaaagtgtgtcttcggggtaccccgaggcatgctcttggggttcatcgtctccgagcggggcatcgaagccaacccggagaagatcgcagccatcaccagcatggggcccatcaaggacttgaagggcgtacagagggtcatgggatgtctcgcggctctgagccgcttcatctcacgcctcggcgaaagaggtctgcctctctaccgcctcttaaggaaggccgagtgcttcactgggacccccaaggccaaggaagccctcgggaacttgaaggcgctcctcacgaatgcgcctatcttggtgcccccagctgccggagaagccctcttggtctacgtcgccgtgaccactcaggtggttagcgccgcgattgtggtcgagaggcaggaagaggggcacgcattgcccgttcagaggccattctacttcatcagcgaggtactgtccgaaaccaagatccgctacccacaagttcagaagctgctgtacgcggtgatcctgacgcggtggaagctgcgacactacttcgagtctcatccggtaactgtggtgtcatccttccccctgggggagatcatccagtgccgagaggcctcggataggatcgcaaagtgggcggtggaaatcatgggcgaaacatgtggcggaactgtccgaattattccaacttaa

SEQ ID NO: 7665 - DNA, 123 bp, Zea mays
  Peptide Sequence Number=SeqID_49444
atggagaaggggagcgcgccggcgatggccctggcgctcgccatgcttctcgcctgctccagcatcgctgccgtcacggcgcaggagaccgagcggatcgaagataaccagaatgcaggttga

SEQ ID NO: 7666 - DNA, 663 bp, Zea mays
  Peptide Sequence Number=SeqID_49445
atgcaggcgcgcgggacgcgagtcgccagggcacgggtgcaggcacgggcgcggccgagggcgggcgaccagggcccggggcccggggccgggcatgaccgctggggcgcgcggcgagggcgcagccgccggggcacggctggggagcagggactcacggtgggggcgggctcggcggggcgagggcacgcgggcaggggccgagccgccggcgccgggcgcgggcgcgcagggggccgcgggcgcggggccgggggaggggggctcaccggggaggggggctcgccggggcggggagcagggcacggccgaggggcggcacggagagaggctcgccgggcgcgctgggaggtcgccgagggtgcggctcgctggggcagggagggcgcgggactggggcggggcgcggcgcagccgcgagggctcgccgggcgcgagacggggaggggctcgccgggcgcggccgagccgccgccggggcgcgggacggggaggggagcgcggggccggggtgggcgcggccgcgggcggcgcagggcgcgcgggcaggagggtcgcgcggggaagaagaaggggagggggtggagagagagaaaagggaaggggagggaaaaactcacctccggggatccaaactccggcgatctcgactctaaaccctag

SEQ ID NO: 7667 - DNA, 267 bp, Zea mays
  Peptide Sequence Number=SeqID_49446
atggccaccgttatcgaccgtggttctcaaccacaccgcgtcctcggagggtggtcgcataaccttttcggtgctcctcgtccgtggtcgcagtcggttcaggcgggaattggccaccggtgctcaggatttcttgctgacggtgggggagcgccgctgtttcttccccaatccatggacagacaacttcatcgccttatagccggattaaatgaagcagagagtgaaggcgccaaccgtaggatgtgtacgagcggttcagattag

SEQ ID NO: 7668 - DNA, 222 bp, Zea mays
  Peptide Sequence Number=SeqID_49447
atggcgtgcccgccttgcttctccagcgtcgcgtccctccccatctccgctgctccctcttccgtggtccctggctcgtctttggtgctcgcctggctgcgccccttagctctcgaccatggtacgttaattaatcgcgtgatgccgaagataagccaagtcgaccctaagcacgggctaatccgcaagataaagctgatggaccaacttgaagatggttaa

SEQ ID NO: 7669 - DNA, 450 bp, Zea mays
  Peptide Sequence Number=SeqID_49448
atgcgacagcgatggagttttgcatatggttctgacgaggggccttaccatgggcgaacggtgatgaacgatagtgacatgggcggtggagcgcgaacgaggcaggcatcacacacgcagggatggtctgatgcggtcagggacaggagccacgcatgtcgcacggactgcgccgaagaccctgccaggcgcacgccgagcgctaccagcaccacggccgagcgggtcgcgccaaccgcaccgcgagccgagctggccacgctggccacaacgcgcaggccgcgctaccgtgccgagcgccagccacgccggggaagaaggagaaaggaggatggatgcgagctcaccacggtgacgaacaacgactccggcaaggcgagcttggacgccgacgaggatgggggcgctaggcagcgctgtcgcgcgggctgggaggggcggttcggctag

SEQ ID NO: 7670 - DNA, 1161 bp, Zea mays
  Peptide Sequence Number=SeqID_49449
atggacggcctccacaccgacctcgcgctggggctgctcgggtgcggcggcgtcggcgttggtagtagcggacgaggcgagcagctccagacagcgcccttcgtggccaagacctaccagatggtgtgcgacccgcggacggacgcgctcgtccggtggggcagcgagaacaacagcttcgtcgtcgtcgacccggccggcttctccaggctgctcctcccctgcttcttcaagcaccgcaacttctccagcttcgtgcgccagctcaacacatacgtaagtgcgccagtcagtgaggcgaggctaccacagccatggatcctccgatccctcacagcctcacacgctgtcctgtacacttacctggagccatggtcctccggctgcatgcaggggttccggaaggtacacccggaccggtgggagttcgcgcacgagtcgttcctgcgtggccagacgcacctgctgccgcgcatcgtgcgccgcaagaagcgcggcgagggagcctgcacctcctccggcggcgatgcgcaggcgcagtacgcggcggcggcggccggctgctgcatcagtatgggcggcgaggaccatcgtacggagggggaggcggaggcggcggtgctcgaggaggtgcagcggctgcggcaggagcagacggccatcggggaggagctggcccagatgagccggcgcctgcaggccacagagcggcggcccgaccagctcatgtccttcctcgccaggctcgccgaggaccccgacggcgtcacgcgccacctcgtcgagcaggccgccgagaagaagcgccgccgcatgatgcagctcgcctcccagcccgtccgccgcctcccgcctccgcctccgccaccgccagtactccaccacccgctgctggcgctcggaggcgccgccgccgccgccgccaagggcctggacggcggctgccaatgggcggagcagaagaagccgtctgtcgtgctcaccgccgccttcgatcatcccgccgccagctactgcggggcgcagcatgctgtgccgaatctcggaggcggcaacggcggcggcggcatcaacggcatgggcctgaccgctgacgagaccgcggtagagaccacgacgacccccttcccgttctgcctgctcggccagggtttcttttga

SEQ ID NO: 7671 - DNA, 342 bp, Zea mays
  Peptide Sequence Number=SeqID_49450
atggacgccggacccgacgctgccgtgccctgcatcaaggtggccacgcccctccccctacgcttcctccacggcggcaccttcaagatcttggcggtggtgcgggcgagcttggcggcggtccagttgttggccgccgccgccgcgagggaccttgaccatggcgttaccgtggcggcggtcgatccgagagatggtgttggagaccatggcgcttaccaccaccagcagcagaccaggcagaagctgctcaagagcctcaccttcgttttctcgctctgcgggcttgaaaacgatgaaccctactgggaggagaaggaggacaccatcgagctcatctag

SEQ ID NO: 7672 - DNA, 378 bp, Zea mays
  Peptide Sequence Number=SeqID_49451
atgtcgggaggatccgccaagagggagatggaaacggccacaagccacgggaaggctccatcaaaggagttcggcgccaaaggaagggaggagtcacctccccgcgtcaagtcgcatcggagtggcgacaagaagaaaaatgtgacggaacctcccaaagcaatactaagcatagaaaaacctttttataaaaacaggatttcaaggagggtaatcaagttcaaggaagggccttaccagagagggctggccacggagcgcggaagacttagacttgccggtgacagagaaaggggagaattggtgttgcggcggctctggttgaaattggggttggggattgaggctactcggccgtctacaagtttgatgtggtga

SEQ ID NO: 7673 - DNA, 2205 bp, Zea mays
  Peptide Sequence Number=SeqID_49452
atggctcccacggtcccttcggcggcgaagtctgcctctccttcccaaccttccgggaagagcgaggtggcagatctgaagcagcagctgcggcagctggcggggagccgcgctcccgatgcggacgaccagcgccgtgatgtcttcaagagggtgatctcctgcatgacggccggcatcgacgtgtcggccgcgttcggggagatggtgctctgctccgccacctccgacgtagtaaccaagaagatgtgctatctctatgtaggctcccacgcgcgcgcgcacccggacctagcactcctgaccatcaacttcctccagcgggactgccgtgatcaggaccccaccattcgcggcctcgcgctccgcagcctctgctccctccgtgtccccaaccttgtcgagtatctcgttacgccactcacgaccgggctgaaggatcctagcgcctacgtccggacgatcgctgctgttggtgctgccaagttgtatcacatatctgccacagcttgcattgatgctgaccttccggcttcgctcaaggcgctcatgctctccgatccagacgcacaggagatctggaccctagaagctgctaactcagaggcagcagcaagagagattgagacattgtatagcaagccagtggtattttacctgttaaacaagatcaaagagttcagtgaatgggcacagtgtattgttcttgagttggcatcaaagttccttccatctgataataacgaaatatttgacataatgaatctgctggaggatagacttcagcatgcaaatggagctgttgttttggcaacgattaaagtttttctccatttgacaatgtctatgactgatgtccatcaacaggtttatgaacgtattaaagcacccttgcttactctggtgggtgctggcagtcctgaacagtcatactctgtgctatgccatctacatcttctggtgatgcgtgctccaatgttattttcctcggactataaaagcttctactgccaatttagtgatccttcatatgtgaagaagttgaaacttgagatgttgactgctatagcaaatgaaagcaacacatatgagattgtcactgaactatgtgaatatgctggaaatgttgatgtaccaattgcaagagagtctatccgggcagttggaaaaatagcactgcagcagtatgatgttaatgccattgtggacaggcttctacaatttcttgaaatggataaggattatgtgactgctgaaactctagtcttggtgaaagatcttctcagaaaatatcctcaatggagtcatgattgtatagcagttgtgggaaatatcagcagcaaaaacattcaggagccaaaaggaaaagcagctctcatatggatgttgggagaatattcacaggacatgcatgatgctccatacatccttgaaagtcttgttgaaaactgggatgaagagcactctcctgaggttcgcttgcatctcctgacagcagtgatgaaatgtttctttaaaagacccccagagacacagaaggcactaggggatacattagcagctggtctatctgacacccatcaggatgttcatgacagagcacttttttactacaggcttttgcaatacagtcctaatgtagcagaacgtgtagtaaaccctcccaagcaagctgtctctgtatttgcagacacacagagcagtgaaatcaaagatcggatattcgatgagttcaacagtctatcagttgtatatcagaagccatcgtacatgtttacagataaggagcatcgcggaccatttgagtactcagaggatcttacaggcttgactgaggatccagaaaatgtaatttctgcccaaagatatcaagaaaatgataatgatcttttgctaagtacttcagataaagaggacaatggtacaagagccagcaatggttcttccacctctacatacaatgctccttccgatttgattagtccttcattgataagctcgcaagcaccagctgaaacttcactagtaaatactggtgggacatattcctcacaatcaaacttcagtctcgatgaccttcttggccttagcgttactgaagctcctgctttaccacaaccaacactggcccttaactcaaagcctgtgctagatcctggtacgttccagaggaaatggggccagctagcattggcactgtctcag

SEQ ID NO: 7674 - DNA, 352 bp, Zea mays
  Peptide Sequence Number=SeqID_49453
aaaagaaaagagtgccaagaagtttcaacatgtgattcctgcatacattgaacaattagcagaaatgttccatggaattgttgttgatgggtctagttcctgtatccctagagatgtacacagaccatcacaagaggtgtacgaagaacaagaaggagaagatggatacggggaagaatttttgaattctaacttggcagtagaatctggagccgacaaagagttagatgagtactttgtggcaaccaaactattcaaggatgagtacaacaagactattttcaatcgctttgatactacaacacaaaggatgaaatggctacaaaggttttgcaaggaatattgtggttga

SEQ ID NO: 7675 - DNA, 948 bp, Zea mays
  Peptide Sequence Number=SeqID_49454
atggcggagaaggtgccttcagtagagctcgagagatctttgaagatcaaggagcgacttgagacttcatctatgctaaaaaagctgcttttgatgcttgttctttttggtacttcgatggtaatagcagatggtgttgtcacatcagcaatgtcagttatgtctgctgttaatggcttgaaggttggaattgctagtgttaacgaaggtgaagtggtcatgataactgttgcatttcttattgttctgttcagtctgcaacggtttggaacaagcaaagtagggcttgctgttgggccagctttattcgtatggttttgctgccttgctgggataggaatgtataacctcagagtatatggtccagaagtactccaggcattcaatcctgtttatatctactattattttgaaagaaatcccactgaagcttggatgtccctggggggctgtcttttatgtgcaacaggatctgaggcaatgtttgctgatttatgctacttctctgttaaatctgttcagcttacctttgtgttccttgttctgccatgtcttctactgggatacctagggcaagctgcatttcttatggagaacttagataaaagtcagcaggtcttctttttgtccattccaagtcaggcattttggccagtggtattcatagctactctggcagcactaattgctagtcgtgcaatgacaactgctatattctcaactataaagcaggcaacagctctgggctgtttcccacgcctcaagattatccacacctctagaaagttcatgggccaaatatacatcccggtgatgaactggttcttgctggtttcttgtctggcatttgtcgcagtatttgggagcataaatgagattggaaatgcatatgaaaaaggaaatcagggtggcgaatatgttaaggatgtaacaaaagaacagagctaa

SEQ ID NO: 7676 - DNA, 273 bp, Zea mays
  Peptide Sequence Number=SeqID_49455
atgaggaacgcatcgtcaatgccagtagcagcggctgcggtgcgcgtcatgacgaatgcgatgttgccgatgatcacgagaatccatgcgatggagacggtggtttatttcagcaaggaagagttcgtcgcgttcatggagagaatagctggaacattgcagttggccaagctccacaacaaaaggccatccatgctgtccaacgatgacctgatgaggttgctcagcttgttcatcaagcggcgggctgccgaactaccatgccacatctga

SEQ ID NO: 7677 - DNA, 1104 bp, Zea mays
  Peptide Sequence Number=SeqID_49456
atgcattcgatgatcatttttgtctgcatcaaatgggtcccagttccagttgtgcctcagaatgaaaggttcctcttccgtcgtgtgtgcccaaagaactaccatatgttccgctgtattgctaggaagggccacaggctggtgctctttttggagtgtgcagtagttttactgccccctctgaagttctgtagcgctgagtttgctcttatagtgaacccagatgcatttatattaattgaagtcattagctcgtttcatctcctgatatttgccggcactgttatcatgttgctaagagttctgttcatgaaatggtatgggtataaggatgtacgcaaggagaaccaccaagcattcgaacagcttctgatagaaagccttgaaaagttcatacgccgagaggcccaggaacgctccctggaacgctccctggagagcgaccataatgacgacaaagactctgaagaggagattgcttcttcatcatcaagagttattgacgagtcaggcggtgctgacaactcagccctgggatcaagcatgtcgttggaggagggatcaagcatggacaacgagctatctttcatccacaaggccaaggagtcgggcgtggtgtaccttcttgggcacggagacatcagggcccggaaagagtcgttcttcgtcaagaagctggtgatcaactatttctatgctttcctgaggaggaactgcaggaggggcatcgcgacactgagcataccccacacgaggctgatgcagcaaggtaacaagcctgctgctgctcacacatattcatcctaccctgatgtgcctggtggtttctgcttggctgcttgtgctgagaggcgggaacagacactgatattgattgcccagctgcgcctatcaggattcgagatcggcgttctgagctgtgcatgcataccgcagactggtcctgctagtactttggcgtggctgacttatacttgtcctcctgctggcgcagcagaagcaccggatcacatcgcaatcgccgggctgcggggtggatggatggatgggtggcagggtgaggcgctagtgtccccgagaatctccgggaattgcgagacctga

SEQ ID NO: 7678 - DNA, 447 bp, Zea mays
  Peptide Sequence Number=SeqID_49457
atgggatggccggtgatccgggcgggagagagcagggattgcggcgagagaagaggagtggggcgaggacagccggatcttgcgcgtcgaggaggagatctgcgccgcgacatgggaggggatcacgcggacgagtgcgggagcacagcgaggagagctgaggtcgggagcacagcgagccttccatcaacggagcgtgagcgtgggcaccgggcgtcgccgtcgccggggcttgatgccgcgccgccgccagggatggggctcggggccggtgccgccatggcccggtctcttgcacccgcgccgtggctggggccggggacgtcgcgccagccgcgggcagccgcgcccgtgccgccgtggagccgcgccggccgtgcctgcgcgccagggctgccgcggatgcgcccacgccccgtcgcgggggtttgccatacgaaatcctag

SEQ ID NO: 7679 - DNA, 591 bp, Zea mays
  Peptide Sequence Number=SeqID_49458
atgggcaagagcaagaagggcggaagttcctatcagcattccggcgataagcagaagcgtgagccgactcatcccttagaggacttcggcgactccaagtactcggaggaggacttctcctccgagtccgagggatcaccggtccctgcctctcccccggcgtcatctgacgatttagacgactcccaggggattgtcgcagaagtgtggtatgacggaacctcccaaggaagtgaccaagtcttcataaccgcgaagaagcactcggccccgacactgcccgctcggactccggtgacccagtgccagctcggccatggtggcgcaataccggcgacggcgatggttggtcacggcaaggaggggtgttacatgtggacctacatccgggccgtcgagcgcgcccggctcaagggctcggatgagtcggaggtctcctcggactcgtccgaggatggcggcggcgacggtgatggtgagggtgacgacgacggaggcgacggcgagggcgacgagggtggcggcaaggacgacggcaagggcgacggcagcaagggtagcagcaagggcagcaacaaggccagtggctag

SEQ ID NO: 7680 - DNA, 501 bp, Zea mays
  Peptide Sequence Number=SeqID_49459
atgcagatcttcgtgaagacgctgacggggaagaccatcacgctggaggtcgagagtagcgacaccgtcgccaacgacaaggcgaagatacaggacaaggaaggcatcccgccggaccagcagcggctcattttcgccgggaagcagctagaggacgaccgcaccctggccgactacagcatccagaaggactccacgctgcacctggtgctccggctccgcggcggcggcaggggtggctaccccctcatgagcgtcccgtgggacctcatcaaccttgcccgcaagcataatgaggacaagatgatctgccgcaagtgctatgcgcgccttcctcccaggtccaaaaactgccgcaagaagaagtgcggccacagcaacgagatgtttgatctggagcattcaatcgttagtgacgaactcagcatggcgatggatgaagttgatcataccattttagccctcgctgttgatcatagaatagcgatagataaagtttaa

SEQ ID NO: 7681 - DNA, 1032 bp, Zea mays
  Peptide Sequence Number=SeqID_49460
atgagcttgatggtgagcgacgctaggcagcctgtgcgcgagtccgggcaccgaggcgcaggcaccagcgacagcgagggcgaggacgcgactccggagcctgcggtttcgtcctggggcttcttgggctcctggcggaagccctgcttggagcagacgaagaggcggcgggtgacggtgtgcctacgtccccacgcgcgggggaggtggggggcatcggcgtctgtgtcatcggcgagggcggaggttggtgctgtcagggcgaggttggtggcggcggcatcggcggcgccagaggagtgggaggaggagccggaggacgtggaggacgacggcgaggactcgccggagaggcgggaagggtccccggcggtggacattagggtttgcgccagggtttggaggaaggaggagggagaagggaacctgtggggtggagggatcgcctgcggaggcggccggtgtgggttaatgtgtgcggttgagcctcccacggcccacgggggcgaccgagttggtctgcgacgtggtcatggcctgatggcaacgtcataccctggaacacaacagctggctccgctgcatcccaaggctgagctcagccacttgcttcgtcttcgcttcgatcgtcgagttggtgccgtcgagcctgctccggcctcatgtgtctctccgtgtctctctctacgtctagttatcccctgctctgggattgtgctccctgaagaactctgggtttggccagacgcgcgcgacgacagcaatgaatatctcctcgccgccgcggccacgatggcccacgcgtcagccgcattggttctacaacgagttagtgcagccttgagctgcgcgcaaccgttgacatcgtccgtgacaaacatcaagaaggtcggtcctggtcctggtcctcctaccacagctagtcgcactggttcagattggttcctctcacttggtttaatctcttgtattatagtactagagaaacaagataagaggaacctcttacctttatatgtcattgatcgttag

SEQ ID NO: 7682 - DNA, 2355 bp, Zea mays
  Peptide Sequence Number=SeqID_49461
atgaaggcgatccctccaccccacaggttcccttctccctcctccttcctccaaaccctggcgcaaaccctaatgtccaccgccggggacccttcccgcctctccggcgagtcctcgccgtcgtcctccacacgccgatgccccccacctcccccgcgcgtggggacgtactttgagaccgaggacgacgcgtacgagttctacaaggcctacgcggcccgtctcggcttcgtcgtccgcaagtccaacaagtccaagaactcacggcacaccgtcacccgccgcctcttcgtctgctccaagcagggcttccgccaggagcccaagaagccccaggacgaaaccgcaggctccggagtcgcgtcctcgccctcgctgtcgctggtgcctgcgcctcggtgcccggactcgcgcacaggctgcctagcgtcgctcaccatcaagctcattccttccgcaaacgccttccgtgttactgacttcgtcgccgatcacaaccacccgctcgcctcttcctcgccccgctgtgtcactagccttgctgtcgccgagctcttcaccccacagcattgtagcagtggccagcttgcccggacccaagggatgggccgcgggccgatatgcattttgagacagaggaggatgcatatgtcttctataacagatatgccgaacatcgtgcataagctgcggtctcataaaatgagagcccgtgcacatgagcttggagcaggggaaatgcatcgaaggaagcaagggaagggtgtgcagcttggggatgttggcgcagcattgcaatacttggaggagttgcaggtagaaaatccttcagtttattacgcggtaggagtggggcctgatgggaaatccgctgtgaatttcttctgggctgatgcaaaatcaataattgactacaggagttttggggatgttgtttgctttgatacaacatatgcattgaacatttatggacggccatttgcactctttgttggtgttgacaaccataagcagttacttgtgtttggcgcagcactgctctatgatgagagcattcagtcgctgaaatgggtatttgaggtgtttgctgatgccatgcatgctaggcacccacaaactattttgattgatgaacgtcctgagtgtgccattgcagcagcagaggtgtggcctggcaccaatcactgcacaggggtgtggcatatctaccataattcaaagaggcacttgaagcaggtgtttgaaagctcaaaaagtttcagcaatgctttgaaccattgtctctttgaatgtgaggatgagattgagttcttgtcagcatgggaaaagctagttgagaaacatgacattggtgagagtgagtggctcagcagactttacctggagaaagaaaaatgggctttaccttatcagagaaccatgttttctgctgatatactctcaacccttcgtaaggataacatgattaatgaactaagacgagacctcagtgagcaagaagatatcctgcagttcttcaggcgttatgagtctattctggaagagcatcgatcaaagaaattgcatgctgatgttgatggcagccaggttactctgcctatcccatcgttgcgaatgctaaaacaatcatcaaatgcttatacacctgaagctttcaagatgttccagggagagtttgaggcttacatgaattgcatgtccttcccctgcggtgtggttggcacgatctctgagtacaagattgtgcttgatgagaagccatcagagagttttgtcaaatttgatgcactagatggctcgaccacttgcagctgcaagaagtttgaagctgttgggattcaatgctgtcatgtactgaaagtgctggatctcaagaatatcaaagaacttccagaacaatatattttgaagagatggaggaaagatgctcgttctgttcaaattggggaggaacctacctatgggtctggcagtgtcatgcgatcaacctcagaagctcgattcagtaacatgtgtcggttggctagcttgattgcttcaagagctgccaaatccgaggatgtgatgtcatacatcgaaagtcagtcaaatgctattcagaaacatctggatgatattctacacacaagctatcctgatatgggaaatcacactgttgcttcaagtagtcaagcaatttcctttgtaggcacccaacatcctgaccattccacaccagtagtggttgcacagacaacaaatggtatatactctataatgttcgagtatttccaacatatcatcatttttaccgctttattgaatttcacatgggtaaatggcaggcctgatggggctttgacggcgcacatttga

SEQ ID NO: 7683 - DNA, 1440 bp, Zea mays
  Peptide Sequence Number=SeqID_49462
atgtcgtccatctcgcggaatctccggcgatccctcgccccggaccgcctgcgccgcctctcccagcacccgcgagagtatgtgacgtcggagtgccaccgccccgtcgtcctccacaagcgcggccccgacatcctccacgacccctggttcaaccggggcacggcgttctcgatgaccgagagggaccgcctcggcctccgcggcctgctcccgcccaacgtcgtctcctcgcagcagcagatcgacagattcatgcttgatctgaaacggctgcagagatatgcaagagatggcccgtctgatacttatccattggcaaaatggcgcatccttaacagattgcatgacagaaatgaaacgatgtactacaaggtactaatagataacattgaggagtatgcacctatcgtttacacaccaaccgttggacttgtttgccaaaactacagtggtctgtttcgacgccctaggggaatgtactttagtgcagaagatcgtggggagatgatgtccatggtgtacaattggccagctgatcaggttgacatgatagtggtgactgatggaagcaggatattgggtcttggtgatcttggggtgcatggtattggcattgctattggaaaattggatttatatgttgctgctgctggaataaatcctcaaagggttcttcctgttatgattgatgtcggaacgaacaacgagaagctccttaaggatcctctttatcttgggctacaagagcaccgtcttgagggagatgaatatgtttcagttattgatgaattcatggaagctgtttttactcgctggcctaatgttattgtacagtttgaagatttccaaagtaaatgggcctttaggttgttgcagcgttacagaaagacttatcgcatgtttaatgatgatgttcagggaactgctggtgtcgcaatagcaggccttttaggagctgtacgggcacaagggaggccaatgatagattttccaaagcaaaggattgttgttgctggcgctggcagtgctggtattggagtggtgaatgctgcaagcagaaccatggcaagaatgttgggaaacaatgacgttgcttttgagagtgcgaggagtcaattctggatagtggatgcccatggcctaataacagaagaccgagaagatatcgatccagatgcacggccttttgctagaagaaagagtgagcttggtcaccagggcctaagtgagggggcaagcttagttgaagtggttaaaaaggtgaagcctgatgtcatacttggattatctgctgttggtggtttgttctcgaaggaggaaaacaacctggccaactggagcaatgtaagcaaccctagaccaacaactaagactcaataccaaagggactccaactcaatggcagcggcagagttccacaaagaggattcgtgctga

SEQ ID NO: 7684 - DNA, 2076 bp, Zea mays
  Peptide Sequence Number=SeqID_49463
atggatcttgacctggacgactacgtggacccctacgaggaggccgaggccgaggctgccgcggcggaggacggctccgacgaccccgacgaggacgactcggatgcggagagcgactacgaggaggagtcgtttggcctcctcaagtccggcaagcaccgggtgcgcaacccggacggcaccttccgctgccccttctgccccggcaagaagaagcaggggtacaagataaaggacctcctccagcacgccgacggcatcggcgtctccagcaagcaccgccgtcacggccgcgagcgcgcgaaccaccgcgccttcgcgcgctttgtccgcaccgagccgtcatttgcggaagacctcgtcggtatcactggcattcaaggtgccattaaacccacccctgctaatagagatggcagtaccaatggcgacgggaaggccaaggctaatgtagatactgctggatccagttctgtggcggcgaaagtgggtctgccgcgggaggttgagaggttttcttggccgtgggcttgtgtccttgcggctggggcagggttcaatactgaggactttgctggtagagtagccatgtttagttcggttgaggttgtgcctttgtttgtcgatgaggtcgaagtcgcagaaacctttgcagttgtgaggtttaccaatgattggagcggattcagcgacgctcttacgctggagaaccatttcagcatcaataagctagggaagaaggaatttgagatgagagataatggtataggttccgtggagggagatggtggcgaaggtgaggtcaaggtttatgggtgggttgcccgagctgaggattatgattcgccgagtgtggtagggagattcttgagaaagcacaccgtcctgaaaacaatagacgaggtttccaagactgaattagagaaatcaggggagatggtggcaatactggcatccaagatcgaggaaaagaaccgacacttgcaggatttggaaacaaagaagaatgcgacagaactctccatctcaaggcttgaggaggacaacaggaaactacatgaggcatataatgaagaaatgcgcaatcttcatcgtagggctcgtgaaaatgctttgcggattttccaagagaatgaaaacttgaggattgacttagaaagtaagaagagagaactgaacttgcgagctaaggagcttgacaaaatatcaactgagaatgctaacgacaggaagacacttgataatgagaagcagaaggcaaaatacgataacagtgaacttgagctagcaagtatagagcagcagagggctgatgcagatgttctgaagctattggctgaccaggagagggaaaaggaagatgtacttgctagaatgcttcaactagaaaaagagctgcatgagaagcagcagcttgagctcgaagtagaacggttgaatggtacactccaagtgatgaaacatttagagggagatgatgacgggggagatatccatgagaagatggagaagctgagcgaaagatttgagcgtgaaaagaagcgtctggaggaattgagtggggatctcgtgaggaaggagcgtgaaagtaatgatgagctacaagaagcccgaaaagaactgataaagggtttggaggaagagctaaatggacggacagctatcggggtcaaaagaatgggggaactcgatgaaaagcctttccaaaatgcatgtaaaacaaaatacggaaaggatgagtacgagatcaaagcagcagagctagtcacaagttggcaggatgaactaaagaagccatcctggcatccttttaagatggttgaggttaacggagaaaataaggaaattctggatgacgatgacacaaaactgaagttcctgtggatcgagtacggcgatgatgtgtgcaatgcggtgaagaccgcactgatggagattaacgagtataaccctagcgggaggtatgttgtgccggagctctggaactttaggaaaggccggaaggcgacggtgaaggaggtgctcaagtacctgttcagtcagatggacacgacgacgaagcgcaggaggggctga

SEQ ID NO: 7685 - DNA, 1770 bp, Zea mays
  Peptide Sequence Number=SeqID_49464
atggggcccatcaaggacttgaaaggcgtacagagagtcatgggatgtcttgcggctctgagccgcttcatctcacgcctcggcgaaagaggcctgcctctgtaccgcctcttaaggaaggccgagtgcttcacttggacccctgaggccgaggaagccctcgggaacctgaaggcgctcctcacgaatgcgcccatcttggtgcctcccgctgccggagaagccctcttgatctacgtcgccgcgaccactcaggtggttagcgccgcgatcgtggttgagagacgagaagaggggcatgcattgcccgtccagaggccagtctacttcatcagcgaggtactgtccgagaccaagatccgctacccacaagttcagaagctgctatacgcggtgatcctgacgcggcggaagttgcgacactacttcgagtctcatccggtaactgtggtgtcatccttccccctgggggagatcatccagtgccgaggggcctcgggtagaattgcaaagtgggcggtggaaattatgggcgaaacaatctcgttcgcccctcggaaggccatcaagtcccaggtcttggcggacttcgtggctgaatgggtcgacacccagctcccaacagctccgatccaaccggaactctggaccatgttcttcgatgggtcgctgatgaagacaggagccgacgcaggcctactcttcatctcgcccctcggaaagcatctacgctatgtgctacgcctccacttcccggcgtccaacaatgtggctgagtacgaggctctggtcaacgggttgcgcatcgccatcgagctaggggtccgacgcctcgacgctcgcggtgactcgcagctcgtcatcgaccaagtcatgaagaactcccactgccgcgacccgaagatggaggcctactgcgatgaggttcggcgcctggaagacaagttctacgggctcgagctcaaccacatcgcccggcgctacaacgagactgcggacgagcaggctaaaatagcctcggggcaaacaacggttccccgggacatcttctcccgagacctgcatcaaccctccgacaagatcgacgacacgcccgagcccgaggcaccctcggcccagtccgaggcaccctcggctcagtccgaggcaccctcggctcggcccgaggcaccctcggttcagcccgaggtaccctcggcccccgagggtgagacattgagcgtcgaggaggagcgaagcggggtcacgcctaatcgaaactggccgaccccatacctgcaatatctccaccgaggagagctacccctcgaccgagctgaagctcggcggttggcgcgacgcgccaagtcgttcgtcttgctgggggatgggaaggagctctaccaccgcagcccctcaggcatcctccagcgatgcatccccatcgccgaagggtgtcagttctacgcgaggcagacccacctgcccgctcaggctctgcagaccatacccatcacctggccttttgctgtgtggggtctggacctcgtcggccccttgcagaaggcacccgggggctacacgctcctgttggtcgccatcgacaaattctccaagtggatcgaggtccgacccctaaacagcatcaggtccgaacaggcggtggcgttcttcaccaacatcatccatcgttttggggtctcgaactccatcatcaccgacaacggcacccagttcaccggcagaaagttcctagacttctgcgaggatcaccacattcgggtggactag

SEQ ID NO: 7686 - DNA, 672 bp, Zea mays
  Peptide Sequence Number=SeqID_49465
atggcgggggtcatgcactcgcgatgggatgtgggccgatggtggttctgtgcgctggatggcgacgagggaattgggttgattccttccatggcggcgaggcatggattgtgtttggggcgtgggggatatgggcggggcatccgcggtgcatgggaagaacgattgggcggggtggtcctgcgcgtcgtcgcgatgggattcctgcgagttgattgttgcgagctaagtccagcctcgggcaccataggaagctccgcctcgcctgaccccagggctcgggctcaacctcgacgctggacgacggactccgcctcgcccgaccccagggctcggacacagcctcgacctcggaagacagtctccgcctcgcccgacccagggctcggactcaacctcaacgctggacgacggactccgcctcgcccgaccccagggctcggacacaacctcggcctcggaaaacggtctccgcctcgcccgacccagggctcggacttgacctcgacctcggaagacggactccgcctcgcccgaccccaggggtcggactcagcctcgacctcggaagacggactcgacctcgacctcggaggagcctccgccttgcccgacctagggctcggatcgaccacatcacaggggggccatcattaccctacccctagctag

SEQ ID NO: 7687 - DNA, 369 bp, Zea mays
  Peptide Sequence Number=SeqID_49466
atggctgctccagatcctgctcgcgagtttcccagcgccgtcagcttgccggcatccagctcgcctgtatcatggccgtcgcgccgtctttactcgttggccgtgcgttgccgcgcacacgcgcccgacaccccggttcctctgtacgccttggttgcgcgcgccgaactgcgtccttcgcagctcgctggctttagctgcaggacaccaccagccgtgccttcgtatcctgtgtcctcgactcgtccacagtgtcactcgcgaggtgctcgaggtacgataattgatcgtgtgatgcggaagacgagccaagtcgaccccaagcgcggactactccgcatggagatgctgataaacgaacctacctga

SEQ ID NO: 7688 - DNA, 756 bp, Zea mays
  Peptide Sequence Number=SeqID_49467
atggacacacctgaatgggatgtggctgcgacggcggcagcaggtgactgcggaggcggcatggatgttgacggtgacagcgatggggagaagccgcgacgacgactaatgcggcagcagaggtggccgcagatgcagactggatggcaacaatttaatgcaggccattcaaggggacatcaaaggagtttgatgcaatcacttatagcacggaagaaaaccaccagtgctacagcgatgtcatggcagccaagtaaaaagtgtccaaggggcaaccctaactctacttcaggagcaggagcagctcaccaagcggaccaagcctgccctggaagttgcagcaaacggggagcacaacaacatggggcagctgccaggcgtgccacatcggaccttggcgggtcttggcacttctggctgcgagccaggccagcccagggcgcatggagcaagaagctagtccagcggtccttgaaggaggaagagaagctgcagcatatgcttgcgaacttaccttctggaatgcgcaagaatgattttgctaatcagcacgaacagagctcatcaaggatgctgcctcattttaactcttcttttactgaagctaatgaatgtgaactgaagattaaggatgaaccagttgcagctcctaggctgcacatctttatattaagaagaggggaatttaaggtccaagaggtccagtacaataaccaccctatggtggccagcaacaagcataacgaatcaagctga

SEQ ID NO: 7689 - DNA, 1311 bp, Zea mays
  Peptide Sequence Number=SeqID_49468
gtcaatgatggctcttgcttgtccaatatgcaatgtgtgttgactcctgaaacagaaggctatgaccagatagactctgtcactactggagcatctgtactagttgagggagttgttgcaagcagccaaggcggtaagcaaaaagtggagttgaaggtttcaaagatcactgtgattggtaagagtgaccccacatcttttcctatacagaagaaacgggcatcaagagagttccttagaactgtagcccatctccgtcctcggacaaacacttttggtgcagtggcaagagtgagaaatgctctggcatacgcaactcataaattctttcaagacaatggatttgtttgggtttcaagcccaattattactgcctcagattgtgaaggagctggggagcagttttacgtgactactttgaactttcttaaagttgcacctgtcaaatatccggtgtatggaagtcctagaaatggtataccaggtttactgttagataagctttcgaatagcaccgaaggtggttccctactcaaagatattcctgcgaccaaggatggaagggttgattggtcacaggatttcttctgcaaaccagcatttctgacagtatctggacagctcaatggtgaaacatatgcttcagctctatctgatatttacacatttggtccaacgtttagggctgaaaattcaaacactgcaaggcatctggctgaattttgggtaaagtatattctagagaactgcaaagaggatatggatttcttcaatacatgggttgagaaaggcatcatagatcgattaaatgatgtagtagagaagaactttgttcacttgtcttacactgatgctgtcgagctactacttgggtccaagaagaaatttgagtttccggtaaagtggggtttggatcttcaaagtgagcacgagcgatatatcacagaagttgcctttgatgggcgccctgtaataatcagagattacccaaaggaaatcaaagctttctatatgagagaaaatgatgatgggaagacagttgctgcaatggatttgttggttcctcgggttggtgagcttattgggggaagccagagggaagagcgtcttgattaccttgaagcccgactagacgagcaaaatctgaacaaggagagctactggtggtatctggacctacggcgatatggatcagttccccacgccggtttcggtcttggatttgagcggcttgtacagtttgctactggaatagacaacatcagagacgccatcccatttccccgagttcctggctcagccgagttttag

SEQ ID NO: 7690 - DNA, 3195 bp, Zea mays
  Peptide Sequence Number=SeqID_49469
atggccgctcgaaccttgctgctcgtgctgctcttgcttctgctcggtgacgccacctcggcttccgtcagcggccagcgcgaagcgttgatgaagttcaaagcggccgtgacggccgacccgggcggcctgctgcgcggctggtccccggcgtccggggaccactgccgctggccgggcgtgtcgtgcggcgcttccggggaggtggtcgcgctcaacgtcacctcctcgcccgggcgcgcgctcgcgggcgcgctgtctccggccgtcgcggcgctgcgggagctccgcgtgctcgctctcccgtcccacgcgctctcgggcccgctcccgcccgcgatctggacgctgcgccgcctccgcgtcctcgacctctccggcaatcgcctccagggcgggatccccgcagtgctcgtttgcgtctccctccagacgctggaccttgcctacaaccagctcaacggctccgtgcccgcggccctcggtgcgctccctgtgctacggcggctgtcacttgcctgcaaccgcttcggtggcgccatccctgacgagctcggtggcgccggttgccgcaacctgcagttcctcgatgtctctgggaacatgctcgtcggtggcataccccggagcctggggaattgtactgagctgcaggcgctgttattgtcctcgaacaatctggatgacatcatcccgccggagattggtcggctcaagaacctgcgtgcattagatgtgtccaggaacagtttgagtgggcctgtgccagcggagcttggtggttgcattcagctgtcagtgcttgttctgtccaatccttatgcacccactgctggttctgattcttctgattatggtgagctcgatgacttcaactacttccaaggagggattccggatactatcgctacactgccaaagctgaggatgttgtgggcgccaagagccacattggagggagagttgccgggtaattggagttcttgccagagcttggagatgataaatttgggggagaatctgttctctggtgggattcctaaggggctggtggaatgtgagaatttgaagttcctgaatttgagcatgaacaagtttacaggttcagttgattcttcgctgccagtaccttgcatggacgtgtttgatgtcagtggaaatcagctgtctggctcgttgccagtatttatgtcaaaaaagaattgtctttcatcccaggccccacgggatgacttggtgtcggagtattcttccttcttcacatatcaagcgcttgctggctttatgtcatccccatcacccttggatgcacatttgacaagctatcatagtttttccaggaacaattttactggtccagttacatccttacctcttgctactgaaaagttggggatgcaggggtcctatgcattcttggctgatgggaatcatcttggtggtcagcttcaacctagtctatttgacaagtgcaacagctcaaggggcctcgtcgtggaaatcagtaacaacttgataagtggagctattcccacagacattggctcgctttgcagttctcttcttgttcttggtgttgctggtaatcagctttcaggtatgataccatcaagtatcggggagttaagttaccttatcagcttggatttgagtaggaatcgccttggtggtgtaattcctacttctgtgaagaacttgctgcatttacagcgcctctctttggctcagaaccttctgaatggcacaattccacctgatattaatcagttgcatgctctcaaggttttggacctgtcatcaaacctcctcatggggatgatccctgatgcccttgctgacttgagaaatctcactgctctcctccttgataacaataaacttactgggaagattccttcaggatttgctaactcggcatcccttaccacgtttaatgtgtcattcaacaatttgtctggtccagtgccaacgaatggtaatacggttagatgtgacagtgttattgggaatcctttgctgcaatcttgtcatgtgtacactctggctgtgccatcagctgctcagcagggtcgaggtttgaattcgaatgacagcaatgatacaacaccttcaaactcacaaaacgaaggagcgaacaattcatttaatgcaattgaaattgcttcaataacttctgcaacagccatcgtttccatcctccttgcactgattgcactcttcatatacacaaggaagtgcgcgccccggatgtcagctcggtcttctggaaggagagaagttacactcttccaagatattggtgtcccaatcacttatgagactgttgttcgagccactggaagtttcaatgcaagcaattgcatcggaagtggaggctttggagccacttacaaggctgaaattgcacctggagtgttggtagctattaagagactctctgtcgggagatttcagggagcccaacagtttgacgctgagataaaaactctagggagattaagacatccaaatcttgttaccttggtaggttaccatctaggcgagtctgaaatgtttctcatatataactacttgtctggaggaaaccttgagaggtttatacaggagagatcgaagagaccggtagactggaaaatgctgcacaagattgcattggacgttgccaaagcacttgcttatctgcatgatacctgtgttcctcgcatccttcaccgggacgtgaagccgagcaatattttgttggacaccaactatactgcttacctctcggactttggactggcgagactcttgggaaattcagaaacacatgcaaccactggtgtagctggaacatttggatatgttgctccagaatatgctatgacttgtcgtgtttcagataaagctgatgtgtatagctatggtgttgtcctgatggagctaatctcagacaagaaggctttggacccgtccttttccccatatggtaatgggttcaacatagttgcttgggcttgcatgctgcttcgtcaaggccgtgctcgggaattctttattgatggtctgtgggatgttggcccgcatgatgacttggtagaaacattgcatttagcagtgatatgcactgctgattcactctctatacggccaactatgaagcaggtcgttcagagattaaagcagctacagcctccaattcgtgaacatcgatag

SEQ ID NO: 7691 - DNA, 979 bp, Zea mays
  Peptide Sequence Number=SeqID_49470
gtgggacggggccccctcgaggtccgacaccacgctcgacggcaccaccgacgtcgccgaccacccggagttcgtcggccgccggcgcaccctcgaggtgcagtgggccaacgtcaccggatacttcgtcagtacgtggacagtacgccgcccgttgcatgcatcctgtcgatcggtagtttgtttcacttccgtctcattgtcgatccatcttgtggttaacacgaagccaactgtcgcagctgatttcacgctggtggagctcaagacgctgcgggcgaagcagcgatgggacttccgtgacaagtcccacaacggcgtctcgccgatcatcacgttcgacgagttcatcgacgtcgcgctgaacgccaagagggtggtcgggatctacccggagatgaagaaccctgtgttcatgaacaagcacgtgcagtgggctgacgggaagaagtacgaggacaagttcatcgcgacgctgaagaagtacggctacggcggcaagtacatgtcgccggcgtggcgcgccaggccggtcttcgtccagtctttcgcgccgacgtcgctggtccgcgcggccggcctcacggactcgccgctcgtcttcctcgtcgacgacgtgaccgtgcggaccgaggacaccaaccagccgtacgacgagatcacctcaggcgagcacctggactacatgaagaggtacgtggtgggcatcgggccctggaaggacacggtggtgccgccgaccaaggacaaccggctggccacgccgtcggacctcgtcgcaatggcgcacgcgagggggctgcaggtgcacccctacacgtaccgcaacgagaacaagttcctgcacttcgacttccggcaggacccctacgccgagtacgactactggatcaacgatgtcggcatcgatggcctcttcaccgacttcccggcgagcctccgccggttccaggagtggaccgccaagaacaaagactga

SEQ ID NO: 7692 - DNA, 609 bp, Zea mays
  Peptide Sequence Number=SeqID_49471
atggaggcaagaaaagctttgaggtaccgagtgcacgggagaaggtcaaagaggctgaggaacccaaagccaggggtgaagaagaagacttgcaaagccaaggttgatcgagttaagaaaaggaccaatttgagtcaaatccaaaagaccaaaggaagcccagctgaaagaccagtggggtacctgctgcgggtgcaccaaactgtccggtgtgcactggacagtgtccggtgtgcactggacagtgtccggtgccccaactgctcgactagcgaattagccgctctcgtgaatcgatggggcgctgtggctaaaattcaccggactgtccagtgtgcaccggactgtccagtgaaccaacaacgcccacgcaaacggtcgacagcgcaatcagcgggcaacgcgtggcctgagccaacggtcagttggcgcaccggactgtccggtgtgcactggacagtgtttggtgcgccaaaaggaccgagggcacaacggtcgacttcgccagaaaagaaaggagatcgggcaccggacaagctactgttcatgtccggtggtgcaccggactgttcgatgcgccacccgacagaatgcaaggatagcttttga

SEQ ID NO: 7693 - DNA, 1092 bp, Zea mays
  Peptide Sequence Number=SeqID_49472
atgggtggcggcacggtggtgtgtgtcaccggcggcagcggctacctcgggagctggctcgtcaggaagctcctcggcagaggctgcgtcgtccacgccaccctgcggagcctcgcggacgagaagaagacggggctgctccgggcgctccccggcgcggcggagcggctgcggctgttcgaggcggacatgtacgacgccgacaccttcgagcccgccatcgccggctgccacttcgtcttcctcatgggtgccggcgctggcgctgctcctgggacgacgagaacacgacgatcagccgcgcgcgtctatatactgcagtacaagaacacgacggaggcggcggtggacgcggcgcgcatcatcctccggcagtgcgcgctgtccggcacggtgaagcgcgtcatccacacggcctcggtcacggccgcgtcgccgctcaaggaggacggcagcgggtacaaggacttcgccgacgagtccaattggacgccgctcaacctctcctacgaattcaccaacgcttacctggacgactacgtgcggtccaagacgctgtcggagaaggagctactgagctactcctctttctcatcctcctcctcctcctcctcctcctccaaggaagacgaccggccccaggcgttggaggtggtcaccctagcgtgcgggctcgtcggcggcgacagcatccagacgtacctgtggggcagctacgccgcgatcgtcgcgccgctgacggggcaggcggtcagtcacaacgccctcctcttcttgcaggcgctgctgggctccgtgccgctggtgcacgtggaggacgtctgcgaggcccacgtcttctgcatggagcaggagtccatggccggccgcttcctctgcgccgccgggtaccccaacatgcgtgacatggtcgaccactttgccgcaaagcaccccgacctcaagatacagctgactcaggtgaccggagaaggtgtcaggattcagcccaacaccagcaagctggaggacttggggttcagattcaagtacggagtggaggagacgctggactgcagcgtcgagtgcgccaagaggctgggagagctctag

SEQ ID NO: 7694 - DNA, 1203 bp, Zea mays
  Peptide Sequence Number=SeqID_49473
atgaacaccgaggtgacggggattgtctggagcgcctgtgcgagcagacagttgaagaatgagctgggccacatatgttacttcttaatgggcctatccagcagacaagggaggggactgagaactgggaagccgacgctccgctcggcaaagcctgaggcggcgacgacgcttgatcgcagcccgactcacaccggactttcttttgccaccgacgaaaccactctgaaggatgcattttctgagtttgggaatgtacttgaagctcggatcatcattgatcgggaatcagggaggtcaaggggttttggttttataacttttacatccactgaagaagcctcagctgcaatgacttccatggatggcaaggaacttcaaggacgaaatataagggtgaaccatgccaatgaacgcgctggtgggatacgcgggggtggtggattcggagctggtggtggttatggtggtggaggtggatatcctactggtgggtatggcggtggtggatatagttctggtggtggtggaggatatagttctggtggtggaggaggatatagttctgggggttatgctgccaatggttacggtgttggatctggcagtggctatggtggcacctacagcaatgcatcaggtggtggatattcaggcagtgatggttacggcaatggagctgccagtggtggttatgctaacaacttgagcagcggatacaacagcaatggaaggtacaataccattggcagttctgatggaaacactggtgggtacaattcgtctcccaacccgtatggtgtaggcaactacaatactggaggttcgagttccagtggtggaaccttaggagagtttggtggtggaggttttggtggcaacaactttgctggaaatgttaccggggggttttctggcggtggggcaagctatggagctaacaagccgcaatacaatggcgacgacgacctgctgggcgaaggtttcttcgacaaggaagtggcagaacaaggcacgcagattctgcgggccctcaactcgccggagctgccgcttgggcacgcggcgcggctggccaagaaggccgagtgccgggccatcttcatcttcggcgccgaggagaggtcgctccacaacatccgtgacctcgtcgaggctgcgcgacacacgcttgggctgctcaaccgtggccgcctcccgtag

SEQ ID NO: 7695 - DNA, 569 bp, Zea mays
  Peptide Sequence Number=SeqID_49474
gcgtgattgaagctggcatgtttatccagctatccgcccctcctgcaagtctgcaagatatttacgcgtacgactgtggggccgagtactcctccttagcttgcatttcaaacttcaaaccggaccaaacgccctgctccaacccaaaaccatcatcccttttttcgcagcagacgcatttattaagcgcgcctccgccaaccgcactctgcccgccgaaagcgtcgtcgggccacctcgcactcgcgcgcgcctcaaagatgcacaggcagctcagcctctccgccagcccgaagcagcagcagccgcctcctgacggcaccagcaccggcggcggcgacgcggcgaaggcgatggcggcggcggaggacgagtcgtcggcctcgcactccagctccaaggccagcagggggtggtcggcgagggacgagagggccatccacctcgtcccgctgctcaccttcctctgcttcctcctgctcttcctctgctcccacgacccgtcccccgccgcttcgctggaggcggcggcggaggaggaggagcgagatctgggaaccggaggttaa

SEQ ID NO: 7696 - DNA, 366 bp, Zea mays
  Peptide Sequence Number=SeqID_49475
atgcctcccaagaaaaacactcaccctagtccaccatcaaacaacgaagacgccaagatctccctcgccgccaaaaaaggcaaggtcgccctcgcctctaaccattctccaccacctaacctgaaggccaccaccgacacacaaggcgaaggctacaccgcaaagccaaaacagaacgcagtctccaccgagcaagatgactcacaagaccctccgctgaacccaaaaattctaccttaccaagccaacatctggccagaattgacgaggaatctacccttggctcccccaggtttcgacgctgcggcatgccaccatcatcacctatttggaatgcttatagaagatgacaacatagacctttag

SEQ ID NO: 7697 - DNA, 2436 bp, Zea mays
  Peptide Sequence Number=SeqID_49476
atggggagtgatctcaaggagatgaagtacaggcggaggatcggggcggaggagcggccgcaatgcagcgaccggaggggcggcgcgggctgggccgcgctgcagcaggaccccgtcgagctgctgcgcaagctggacgagctgagggaccagatcgcgcgctcctgcaacgtcgtcgcccagcggcgggagccccgcagggccagccgccgcgcggtctccatgctccccgccgagcatctggaggagccaccgcctctgccggggtaccaccgctcccgccatggcgggcggtttgggccgggcttgccgcctccaggcccatacgcaccgccgcgccctgaacatggggaaaggtatgtgaggcagtctagcgggcactaccgccagtaccctgggaggcagtgggagaacggtgggatggggcctgggagcttccatcactacgggtgtgcctgtccacactgtctgcatgggcagaggacttcgccgcaagaggagaacatcccgatggcgaggtacttcgccaggcagcatgaatcgtaccggttcgagaggtcaccatctgtttcatccgattatgatcggaggtctgtggcgtcatcactttactcgcaccggtctgtatcgaagaggagagcagagtacttcaggaagaaggcggaacatatctgccgtccagtggatggtgctgcacctttctctgtgtgcagttcatgttataaactactgcagatgcctacagaaaaatgcatagggcggaagcagaaccgatttcaatgcgggtcttgttgtcagatagttagtctgaagcatgatgaagaaaatggtattccctttgcaccgtcattatccttatatgcgcctgaaacagagcaaagctcaagtgaccagatgaggcgagatactgtccatcaacatcatgaggattttaattctatgttctacaattcaaatgatcatagcaacatgcaaaacaacatggattccactgatgataattcactttcttcgaccatgagtaatgacaggattggcaaagattgtggttcaactagaagcattcagtcaaaagctgaggatctccctttctctccaagtaggtctgtagacaatggaagcccaaaggatatattgtgcgagagggacacagactgcaaggtggagccttctgtaggtggtccagttagcccacggtctccagctttagaggacaaacttgttgacccattgtgtgcccaagaaaaatgtaacgacgaggatgatcaaggcatggccatggcttacaaatcagacctaacttgcaaaggagaatatgatgttaatgatcagtatgatgggggcattagtacaagaagcaaacaggagagcaatgaagatgacaaagatgccactgaagatgaaatctcatgcagaagttatgaacagaagagcaaggaagataactcatgcaacattgaagatagtagcaaaacatatgagcagaatagtggagaagatgacactagtagtctagtaaatggaagtgaaaagtaccagtgtatgaatattaaagatgaagatagcagccccggaggcgaggacacatgcaataaatatgagtcaaaggtaaaaagagatgaaaattatgttcttggagctgagagcattagaaaaaactgtgatgaaaataatgcagatgtcatggaaactggaagcataagtgagagacatgatgggctgaaaatcgaagaagataatgagaaattgcagcagccatttattgaagatgccaattctcaaacagggagtggttcatcagttaatgagcggacaaattctgggttttctcgtggttcatcagaggctgggttggatgaagatcagtcctctaccggtaagagtggggattcatcattttttgctggttttctgaagaagggttttaaggacctttctttattaaataagtccatggacaatgttaaggtttcaattaatggtcatccaatctctgaaaaagcccttaagaaggcagagaagaaagctggtcctgttgacccaggtacatattggtacgactaccatgctggtttttggggtgtcatgggacgggaatgtattggcattgtccctccatttattagagaatttaattatccgatggccaaaaattgtgccggtggggatacaggtgtttttgtcaatggcagagaactgcatcaaagagatttagatttacttgtaggaagaggactaccacggacatctggcatgtcatattctattgagatgtcaggcaatgtaatcgatgaagcaactgggaaaaaactgcgcagtcttggaaaacttgctcctacgtttggttattacaatatggtcacctacttgttattgaataggattgagaagttgaagcgtggttttggcatgcacgtccctgaagagttcagataa

SEQ ID NO: 7698 - DNA, 315 bp, Zea mays
  Peptide Sequence Number=SeqID_49477
atgtccaccttctacttcttcaccgacggtatcatggagctcttgggtgttgtggcgctcttcccgcgctcctggcgtctactctacgtcatggctcccctcactccatcgctcgccttagccgttgttgttgtgccattcgtcttccagtcgctgagttggtacctcgtgcgcctctgtctcgatgacgccttatgggtcatcagcgccatcgtgaccactaacaataggtccaccctgaggatctcatgccctagctcgacgacgaggacgaggatgataatgggggctcgagctcgacgacgaggacaatga

SEQ ID NO: 7699 - DNA, 276 bp, Zea mays
  Peptide Sequence Number=SeqID_49478
atggcgagcagccgaatccccggcctagcaacctgcctagcaacgcgcccccctgcagcccgcgcatgggctagagcttcgtcgcgttctgtcacccgcttcgccgagcgccgccacaccgcgtccccgtcggtcgtcgagacgacgcctgtctaccccgtctacctcgtctaccccctgcaccgtgcgcgcgttcacgtcgttcgcacgggtaaagaagaaggcgtcgaggcggatctccaggagttccaggacttcggcgagttcgaggattag

SEQ ID NO: 7700 - DNA, 2352 bp, Zea mays
  Peptide Sequence Number=SeqID_49479
atgcatagagttagcgacttcgatgttgttgggtcgttcatctacaacaccgtcaataagacatcgatgcacaagctaggctacaacagacctaagaccatcattgagctaatggcgatctccagcgaccaaacgtctggtgaggaagtggttggtgtgatcttcagcgatcggacaaaggggcaccttgactacgaggttgagccacacgttcctcgctatcgaattgttggtcttgggagagttgggagtgagcggctgccgccaggccggggcggctataaaagcagcggcaagctcctcgaggcctcgtccccacgcacgcagcaagcacacccgcacaagcagctacaaggttctgacctacaagttccaatgacaatctgcagtagtgaagaaatcattgatgagtttgagttgctaacgcgtgatgctaggcgcgtgcagcaggatacactgagaaagattcttgaactgaatggtgatgccgaatatctgaatcgcttcaatcttggaaggagaacagactcaaagagctttaaatcctgcattcctctatgtgtgcatagtgacatagagtcctacatccagaggatagcggatggagatgactcgccggtgctaactgggaagcccatcacttccctctccttaagttctggtacgacgcaggggaaacccaagtttttgccattcaacgatgaattgcttgagagtacatttcaaatattccgaacctcatatgcctttagaaatcgtgaatatcctattgtcaatggaaaagccctgcagtttgtttacggtagcaagcaagtctttacccaagggggcattcttgcggcgactgcgacgacaaatctgtacaggagtcaacgtttcaaggaagcgatgaaggacgtcatgactcagtgctgcagtcctgatgaagtcatctttggtcctgacttccatcagtctttgtactgccatctattgtgtgggttaatcaactcagacgaagtccagtttgttttctcaccgtttgcgcacagcctcgtccatgcatttcacagtctcgaggaggtatgggaagatctgtgtgctgacataagagatggtgttctctcaaagagagtcaccgcgccatctatccgccaagctgtttcgaagatcttgaggccgaatcctgagctggctagctccatttacatcaagtgccagagcttgagcaattggtatggggtgatcccaacactgtggccaaacgtgaagtacatctatggcattatgacggggtccatggagccatacctgaagaaattgagacactatgctggtcacttgccgctgctgagtgctgattatggtgcatctgaaggatgggtcggctctaatataaacccaaccctgccacctgaggaggtgacgtacgctgttcttcctaacattgcttatttcgagttcattcctctggaaaaaccaaaatgggaagaaacggagatctgttcctctgttcactacatagagtcggagcctgtaggcctaactgaggttgaggttggcaaaatctacgaagttgtaataacaaattttgcaggtctataccgatacagactgggagatattgtgaagatagcaggcttccacaacgcaacaccagagctccagttcatctgccggagaagcctagtcctcagcgtcaacatcgacaagaacacagagaaagatctgcagctggccgtggaagccgcggagaagctcttggccgcggagaagctggaggtggtggacttcacgagcctcgtggacaggtcgagcgagccagggcactacgtcatcttctgggagctgagctccgacgacggcgccagcgaagacgtcctgagcggctgcgcgagctgcatggacctggccttcgcggacgcggggtacgtcgggtcgaggaagacccagaccatcggcgccctcgagctccgggtcctccggaagggagccttcgcgcaggtcatgaaccactacctgagcctcggcggcgccgtcagccagttcaagacgccgcggttcgtgagccagtccaacagcaaggtgctgcagatactgagccggaacgtcacccggagctacttcagcactgcgttggctgaggtccgcgcagcggacaacgacgaggtccacgtgctgctggcactacgggcttgctccagttattggcgccctaccgcaactcctgagaaggggctcgccgacacgctcccaaccgccgtcgcggaactctgctccctaaccggcctctacctccactacaacgcgctctcccgttcttcttttaatcctcctccgattcctcacctgcgtgtggaatcccctccgtag

SEQ ID NO: 7701 - DNA, 2136 bp, Zea mays
  Peptide Sequence Number=SeqID_49480
atggagcagctccggcagctcggcgaggtggtgggcgccatcgacgcgctcatggcgttcgagcccgagctccgcgtaaacccgcgccagtgccgcctcctggccgacgcgtgcgcccgcgcgctcgccgccgtcacgggcgaggtgcgcgcgcacctccgcttcgaggagcgcggcgccaagtggcgcgccgtggaacccgcgctccgcgagctccaccgcgcgttccgcgacgccgagggctacgtccgtcagtgcctggacccgcgcggcgggggcagctggtgggggcgcgccgcggcggcggcgcactgcactgactgcgtggagcagcacctccacggcatcctctggtgcgtcgccatcgcggtcgaggccgtcgaggccgccgcggagatcgcaggtcacgacgccgacgagaccgcgcggaggcgtctggtgctcgccaacaagtacgacagcaggagcatgctcgagcccaggctgttccagcacgcgtacggcaagctgtacctggtgtcccaggagctcgttgcgcggatggacacggtgtggaaggaggacaggtggctgctattgcagctgctcgacgagatgaagtcgccggcggcgccgaagccgctgacgaagagcgagcagcggctcgccgacgtcctggcagcgccgcggggaaagctgcactcggcgtctgtcctgctcaacggcgactacagcgtgcggaggcgcctcggcggcaacctcaaggaggcgcattggatgggggagagcttcgcggtgaagcatttcatcggggactccgaggccgaggtctcgatgctgtcgtcggtggcgcacccgaacgtggcgcacgccgcgtactgcttccacgacgaggagaggaaggagtacttcgtggtcatggaccagctcatggtcaaggacctcgccagctacgtcaaggagatgagcagcccgcggcggcgaatcccgtttcccctcgtcgtcgctgtcgacatcatgctgcagattgcgcgcgggatggagcacctgcactccaagaagatctaccacggcgagctgaacccgtccaacgtgctcgtgaagccgcggcagcccgacgggtacgtgcacgtcaaggtcgccgggtttgagcggcggggcgccgtcacaaatggcgcaaaggcgtctgctaatggcagtggcaatgccagcgcagccggcagcggcggcgacgacacctgcatctggtacgcgccggaggttctcgagcatcaggagagccgcgacaggcacaccgagaaggcggacgtgtacagcttcgcgatgatctgcttcgagctgctgacgggcaaggtcccgttcgaggacaaccacctgcagggcgacaagacgagcaagaacatccgcgccggcgagcggccgctgttcccgttccaggcgcccaagtacctggtcgccctgacgaagcgctgctggcacgccgacccggcgcagcgcccgccgttcgcctccgtctgccgcgtcctcaggtacgtgaagcggttcctggtcatgaacccggagcagcagcagggccaggccgacgctccgccggccgtgccggccgctgactacctcgacatcgaggcgcagctgctgaggcggatcccggcgtggcagcgtggccagggcgcaccaccgcgcgtggtggacgtgccgttccagatgttcgcgtacagggccgtggagagggagaagaccgccggcgcgcacgccagcagggacagggtcacggattccggcagcgaggaggactcgctgtgcggcgacgagaacggggtcggcgccaccacgccagacgacgacgcgtccaccgtgtcaaacggcactgtgaggtcgcgcccggacagctgcgacggcaagaagactccggtcaggaaggcagacgtcaaggcgccgcccagacaaggaggcgcgttgcatcctgtcgccacatcttcttcgagaaaacttgagaggaccgattctgaacatggtacttctggattctctgcagggtctcaacagaaggtgaaaccggcgagcgcggtgaagcctccgccggcgacgaggaaaacggtgggcgtgaagcccgagcatccggcgcggcggccgaagtccgggcacgcctcggactag

SEQ ID NO: 7702 - DNA, 408 bp, Zea mays
  Peptide Sequence Number=SeqID_49481
atggccctcggccccggcggtaggcgggctcgactctccggcgcgcgcggcctagagctcgcccggcgtgggcacggccccggtctcggcacgggcgcggccccggcgcaggcgcgaccagtcgacgtcgcggtggctcggtgcggcccgccggcgtggaggcctgcggccggccagtgcagccagtcggcgtcgcggcggcccgacgtggccagcctgcacgcggctagccgccccgtgctcgccatcaccgccgtttgccacagcagcgtctacgtcgctctagtcgtcgccaaggtgaacgtcgtctacctgtcgtcgtctacccatggtcgtagtccattgtcgcctagatggtgtgttcgcgccacgcgccgcagctcgcgcgttgtcacgtgtggcacatag

SEQ ID NO: 7703 - DNA, 387 bp, Zea mays
  Peptide Sequence Number=SeqID_49482
atgggttctactggtggttcacctttccatactgagtacgcggatgggcatggttgtttgcttcctgctgaggtgcattctatcttgctgggggattgggagctgactgttgctgagctagtttctttggacattgcatcaactggtggccttgctctccacagtggaaacatcctctgcctccttgcgctggggctatctggctgttctgattggttgctaggacaggaaggcgaggtgtctggttgttcttcctctagtactgacttcttcccaattgattgtgctggtggtactactgctgctgctgagggaactgcctctggaattgcaactaatgtgggtgctggttctggtgctgatatccctgagggtgactctgcttga

SEQ ID NO: 7704 - DNA, 615 bp, Zea mays
  Peptide Sequence Number=SeqID_49483
atggacccttatttcggtgttattttccttgacaccgagattacatgtctcagcgtcaatattgatgatgctaaggtctcgactctacatgacgacgtggcatctatgcggcctgagctcagtgtcaatagacgtggcgtcgaggtccctaagtccgtgttcaacggtctctatatttctccccctaaatcccactatcttgccacggtagttgagtacatagggggagacgatgaatggttcaacacatcaccttgtctcttctgcacccttccccgcttcgacctctggcaggtggaccccggcaccagagcattcttccccgttgcaacagagaccccctccctcttccccattgctgggaacccaacagcaatgggagcacaacatagggataggggtgcaagtattagggccatgatccattactacccctacatagggagccgagaacagttggcggccgccaccatggaaccccaccaagcgtctgcaattggagagcatgatatggtcagggagctacgtcgggtcacgctggggcgaattgagctgtcttcggaagagtggggtgccacagaggcctgggatagctcgctgtggaccctcctctag

SEQ ID NO: 7705 - DNA, 237 bp, Zea mays
  Peptide Sequence Number=SeqID_49484
atggggggcaggcacaagcgggcgaccaagtgcagttccatgttctgcgcatcgcggacaatccggttggcactaccagtacaagaccgaatgagtacacctaattctggtgaccaggcacaggtccagcaaggatgccaaacttctcagccgcaaaggctgaccaatcaggtaggggacatggagagaaaatgtccacgagcaagagaacaacaaatggagatatcatcaagatag

SEQ ID NO: 7706 - DNA, 582 bp, Zea mays
  Peptide Sequence Number=SeqID_49485
atggcgcccaggcctagccacggcgattccttgccggagaggggtcaacgactgcctagtgaacaaatcgtgttcggaaaacgtgtaaaacaaaattcaagcaccaacaaacttgatagcagagtcttaccatggcatagcttggtggtgaggccggtccatgccgcatggccatccgcagcggaggcgggtcaatggcgagctatcctaggcctccacggtgcccactcttctgaagagagctcaattcgccccagcgtgacccgacgtagctccctgaccatctcatgctctccaattgcagacgccggtggggttccatggtggtggccgccaactgctcttggctccctgtgttgtgctcccatcgcggtcgggttcccagcaatggggaagagggagggggtcctaggctcccacttatacgctggtaaggcagggaatcataacaacttcatcccatactggccggtgaagatcaaaagttgcggtgaactctgttgcaactgggaagaaggccctggtgtcggggtccacctactagagatcgaagcggggaagggtgcagaagagataaggtga

SEQ ID NO: 7707 - DNA, 216 bp, Zea mays
  Peptide Sequence Number=SeqID_49486
atgacgacgcggcacgacaagctgaaatatggacgcgtcaacatgaggctggattcggagagcagcgacacggagagcaaagcaaggtgcgacaaggtaactggaagtctggaaggggcgaactccgtggcggtgctcaggtcgaggtggaggcgacgaccaccaaagctgggcgagcttggagctgagcacgaggacaaccggcgctgcacttga

SEQ ID NO: 7708 - DNA, 480 bp, Zea mays
  Peptide Sequence Number=SeqID_49487
atggcgtggacagccgccgagccccctccgcccgtcttccctctgttcagagcgccgtcacctggagtccctacgcgctccatctctgcctggccatggagctcgcccctggctcggattccagcgccccgctccctgtttgccccagctcgcctggccgctgcgcagccccctcggcttctcctccctcagctcgtctctcctgccccgccggttgtcctcgtgctcagctccaagctcgcccagctttggtggtcgtcgcctccacctcgacctgagcaccgccacggagttcgccccttccagacttccagttaccttgtcgcacctgcgttcttgcccctgcccatagcacagcagtggcgatgtgcttcatccagctcttccctagtcgtcgagctccgagcacaacccgagcaccacccttgtccgcgtgagctcgactggatccccaccttcgcgacctcgccatcgatttag

SEQ ID NO: 7709 - DNA, 993 bp, Zea mays
  Peptide Sequence Number=SeqID_49488
atgggatctaacaagaccggagttgtaccggtcaacaaattgagaagcaaggagtttgagaagcaagaagggaagataagaacacagacctacagattgatttgtggcaaaggtgtgcaggcagacacaaaacacaccaacgtcgacctgtggatcgatgggcgtcactgtgacatggatcggcgacaatggccacaaacccacagtctggcagcggcagctacagacccaccaatcatcgggcggcaactccaatcggcaactgatgaccacatatcgattgcgacagcagccacgagcccacggctcatcaggcggcggctccaatcaatgaacggcagccacagacctcatggcggcggcaccaatcgacggctggattttggtctcataccaatcaaggtggctacttggggaccttttgtgttgatcagatttgatgatgagtccactgaagataatgtttatgacacagttggaaatgaatggttgggtagtgcttcagatctgttgggtacaaatggcattgacacttcactgccgcatatttgcaggcgagaatatattatcaactgtaactggaaggtcttctgtgacaattacctagacggtggatatcatgttccatacgcacatggggatcttgcatcgggtctgcagcttcaatcctatgaaacacttgtattgtccgtaaatcccttttctcgatatggtccatggatggacactaatctagctgtcccattagattcaaccagatgcaaggtggtatttgattattttcttgacaagtctctgctggatgaccagtgctttatcaagaaaagcctcgaagacagtgagcaagtacagatagaagacattgcactgtgtgagggggttcagcgtggcctggaatcgccggcctacagtgttggaagatacgctccgtctgtggagatggccatgcaccacttccaccgcctcatgcatgctaaccttagtgagtactga

SEQ ID NO: 7710 - DNA, 753 bp, Zea mays
  Peptide Sequence Number=SeqID_49489
atgtccgttgtggcggccgtggggcccggcgccgcggtggcggcgtacgggcacgggcacgggcacgggcagccgctgtgcggcggcggggcgaggaagaggaaggacgtccgggaccatgaggttggattgccgggtagcgacggccgcgcggcggcgcggcgtggggccgggctgttcgtgctggagacggtggaggaggaggaggaggaagaaggggcggacgcggagaggtcgtcgtccgtcggcgcggcgtccgaggacgacgcggaggaggaggaggacggggacggggacgaggtggacagcggcgggacgaggtggacagcagggaggaggaggaggagggagggcggcgcgctcgaggccgccatggacatgggcgccctcgacgacgcgctccccatcaagtcgcggtcgttcgcgaaccttctggacgcggcgtcggcggtgggcagcgcccgcgacctggcgaagccggagaacccgttcaacaagcggcggcgggtgctccggtgctgctccgtcgtccggagggccgcgtcgaccacctcgctcgccgcgctgccgcccatagccggcgacgacgacaacgacgacgatggccgcagtggaagtgggacacgtacggaaatagacgacgtccgccgcgccgcgtatgcatggacgtcgcgtgtcgcgctgcccgatcttatccgcttctgtagccactctcaaggcttccctgtatttggtgacaggaaagtggactga

SEQ ID NO: 7711 - DNA, 381 bp, Zea mays
  Peptide Sequence Number=SeqID_49490
atgaagcggctcctgaggcggctctcccgcacggtatcggtatcggtggcgggggaggacggaggcccggcggcgcggcccagcagcaaacacaagcaccggaggaggaggaaggggaagaaggcgggggcggtgccggagggccacgtgcccgtgtgcgtgggcgaggagggcggccccgcggagcgcttcgccgtgcgcgccgagctgctcggcgagccgcccttggccgcgctgctccgccgcgccgcgcaggagtacggctacgcgcaccctggcgcgctccgcatcccctgccccgtcgacgacttccgccgcctcctgctccgcctctcccacggcccctcgtcgcccgcgccggatgctatgcctagggcctag

SEQ ID NO: 7712 - DNA, 840 bp, Zea mays
  Peptide Sequence Number=SeqID_49491
atggcgcaggatgatccggttgtttctgctcagtggctgcacgagcacctagggatgcctgatgttaaggtggcacacatccccggtgcgctattcttcgacttagatggcatagttgatcggacaactgatttgaagtatagatacagcgacgattttcctaggattgtggtggttcatacatctttctgcaaatctcatttaccgcacatgctgccatcagaagaggcttttgcagcagcaatttctgagctggatataaaaaaccaggataaagttattgtctatgatggaaagggattcttcagtgcacctcgtgtttggtggatgtttagagtgtttgggcacaagaaagtctgggtactagacggcggtttgcctcagtggcaagcttctgggttcaacgtggaaaaggccagccctgacgatgacgcagttctgaaatcaatcgctgcaaacagggctgtcaaaagggtttataatggtgaacaggtcgcacaaaacgtcactgctaagacgtaccaacagatagatgccagagcaaagggcagattcgacggcgtggcgcccaagccacgggaaggggtaaggagtgggcatataccaggaagcgtctgcgttccgttccccgaggttggtatggtccaaggattattcggaatctccctggaccgacccatcgtcgtgacctgcggatccggcgtgactgcctgcatactcgctctggggctgtacaggatcggaaagcgtgatgtgccagtctacgatgggtcctggacggagtgggagggtcagtcggactccgattaccccaaagtcaccgctcctggtacagcttga

SEQ ID NO: 7713 - DNA, 198 bp, Zea mays
  Peptide Sequence Number=SeqID_49492
atggtggtggggtcggtcaccgcgacgcgcggatctggcgtcatggcgaagacggccaggaagactctgacccgtgggggaccatgtgccatgcacaggcgggtgatgaaagggctggcgcggctatgggccagcgcggggtgtgaagtgcccaattgggccgaccgagggaagaaacggcccaagtgcacaggttga

SEQ ID NO: 7714 - DNA, 438 bp, Zea mays
  Peptide Sequence Number=SeqID_49493
atggcggagcccgtaggagctctgcacctcaccgtcgtcgcccttaacctcctcctcgtcccactcccactacaccaccgtcacggggtatcactgtccagcccactgaagacgagcgcagtgtgggcattggcagcgaggtcacggaggtcgggcatcaggctagcaccgcggcggtggttgtgcgatgtggtggccttcagcatcgtagtagatgaccccagagaagtccatcggctggcactgctcccccatcatgatctccttcctcccatagaccgtgacctcacctccgtcctcggcgcctccacccccaacttcgaggttggctcggaggagatcgcatgggtggtcgaggccgtctctagtggtggccttgctactccctgtcccatcaggggaggggagggggcaggtcgcgaatgggtgatcacatga

SEQ ID NO: 7715 - DNA, 390 bp, Zea mays
  Peptide Sequence Number=SeqID_49494
atggcgtggccacgatgcgcgaccaccttgctgcggcggaggtaccacgacgtgaaattgccgccggaccacccagctaagtgcccgcagatcccagacaaccctctccgagcaccagtgagcacccccgggccaaggctggtactccaccgccccgtgagagcaatgcggtggcgcgtccttcacccacccatggcgcgacacggttgcaagaagtttcagggggaagatggcctgacagcgcggggccctcgtggcagtgtccaggcgcgcgcgcagaccccagctgaggccgctgacctgtgggccacacgacacggtgaacccccgcgcgggagaaaaggaggtaacagtggtgaggctcgctgcgctaggagtgggccgaaatag

SEQ ID NO: 7716 - DNA, 639 bp, Zea mays
  Peptide Sequence Number=SeqID_49495
atggtgaagatgatggctccgtggccgtcgatccggggttctgcgatagggattacaagggggacgcctaccgatgggccctacactctagcaccatcttctagccatgcccgacactgtaacaaattccgagtccgcacgttgccgcaacaaaccaaggaaactccgctcaagtcagcctcgggcaaggccaatggtcgactcctgcccttgggtatatatgtgagcgccttgtgccccaatcgccaccaaagcagagaggacgtgagattgaggagcgcgtcgcatgactggagcgagaggagatcgggctacaccggaatccctgtcttcgtggtcgtctggagccctattggtggcggaggatcatcaccgtggggttgcaaacaccctgatggcgttcgtgggagccagaagccaccaatgcgcgacatcgccgagagagcaggaaagtcaccgaagggagcagccatcgacgcctcgggggctaggtggagtaggaaccggagcgccaagatcagtggtgggtggctcgccggcgtgtgcgccggcgtgggaaaacaacgtcgccgttcagtgccatcggaaggaggacgaagcactgtgttcgttgatcttgtatgggacgaccatgattag

SEQ ID NO: 7717 - DNA, 720 bp, Zea mays
  Peptide Sequence Number=SeqID_49496
atgcccagtggcctgtttcaccatagtggaaacattcacggcctcctccttgtgctagagctgcttggttgctcggattggttgctggggcaggaaggcgaggtgcctggttgttctgtcgctgatactggtttcctccctattggttgttctagtggtactaatgctgctgctgagggaactgtctctagtactgctgttgatgctgacattgatactggcgttggtgttgatgtccttaaggtcttccatctcccgacgctttctctcagtcatgatagctctatcgatcagatgctgaaaggtagggaagttgatgttgaggtggaggttgctgttgctacacctattgcatggctgccagagtctggccaatcacttggactggttgagtcaacatcagaaagatctgctcgattgtcattgggcgtggtggtagcaactgctgttggggtgcctcatccagtggtgcctactactcttgctgggcacgccttccaccttgactccgactctatcgatctagggctccaagtctatcttggtcctacagtcagggatgccataagcatgataaccacggggcggcgagtgcacacagttttgcaatctccgcccaagccttgcccaactcatcaaggcgtggtcctgctcggtgttgagaacggcgaccaggttcaccatgttgctcaatctaagattgcccccaccaactggtga

SEQ ID NO: 7718 - DNA, 219 bp, Zea mays
  Peptide Sequence Number=SeqID_49497
atgccaggagcaggagcagcaggactcttcccccacgcctcatcaggaggtggagtctgggaggcagccctcccctacgcctcagctagagaccaatgggaggctacctgcctggtgcgccgtctggacgatgatctctggggtgcagaggcctactcagagcattattttatcactaagcgagacactgccgaggcatccatgcaggatgctgcatag

SEQ ID NO: 7719 - DNA, 165 bp, Zea mays
  Peptide Sequence Number=SeqID_49498
atgaacggctacagggtaccccagagagaaagagagaaggatacacagtggtacacagatccgggtgctcctggcctcgtcgcgcaggatttgcgactggagaatggatccaacagccgagatagcatacccccttcacgatttgatccgcaccgtcgatcttag

SEQ ID NO: 7720 - DNA, 255 bp, Zea mays
  Peptide Sequence Number=SeqID_49499
atggccggtgttgtttgggtgggcacaagcatggtgactcgggaggcatttgctagaggccttgccttggcttttatggacaagggcgaggctgcgacacggctgagccgaacaagctttagttggggtttgagtgtcaagaccatatccactcatcttcctcacctattttggatgattaccgaggtcgactggacccaacagaggaggatgtctgcctactataacttcggcggtccacaacgccatcgctga

SEQ ID NO: 7721 - DNA, 298 bp, Zea mays
  Peptide Sequence Number=SeqID_49500
ggaagaccaccaagagtatgctcgcgacctcaacaagatccacaacaatgtgttccttcggttactaggcaagggttgcagtgcgctcacgctctcggacagcagccacaacgaccttggtggtcgcaagagccgctacgagggtggagtgagcagcagcgacatagaagccgagtccatgtcccctgagacaagcagtacacagggggccagtcagggctgggtctccaatggcaccaggatggtgaagtcctggtgggctacgcccatgctaaagacggttgcgctagggccaccg

SEQ ID NO: 7722 - DNA, 1107 bp, Zea mays
  Peptide Sequence Number=SeqID_49501
atgctgctggcgcgcctccagaccgtggccatcaagcagctggacaagcatgggttccaggacaacaatgcgttcctgagcggggtcgccaagctcagcaagctccaccacgagaacctcgtcgacatcattggctactgcgccgacggagaccagcggctgctggtgtacgagtccgtgcccgccggcaccttagaagaccacctgttcggtacgcgcgccacgcgccctcaattctcaatcagcggctcctgtagaattgttagctgcatctctatctgcaaagctgcttacacgcacggtgcttttcttctgcgcgcgccagatctgccggcggacaagaaaccgatggactggtgcacgaggatgaaggtggcgcacggcgcggcacaggggctggagtacctgcacgagacagcgaacccgccggtggtgtacggggagttcaaggcctcccacatacttctcgacgagaggtccacgcccaagctctccgacttcgggctcgcgcagctcggccaggcggggggcagcatgccggtggcgtcgcccatgatgggctccttcggctgctgcgcgccggagtacgacaggaccgggcaggccaccatgaagtccgacgtctacagcttcggggtggtgctggtgcagctcatctccgggaggagggccgtcgacaccagcaagccggtggacgagcagaacgttgtcacctggcttttatgcatttttgctttgctaagccgcattggcatctgcggcacgacaccttttcaggccatgccgatgttcaaggaccagaagagataccatgagctggttgatccactcataaaaaaggagtacgctgccaaagcgctgaaccaggtggtcgccatggctgcgatgtgcttgcaggaagaggactccgtgcgaccgctgatggccgacgtcgtcatgacgctgggcttcctcacggcgatgccgccggatccaccggcccctgctgctccacctgccgccgcctcggagccgaagaaagacaaagcagaatcggatcattcagactcatcgtcatcttcttcggacgacgaagaggacgaagaggaggaaaccgaggagcaatga

SEQ ID NO: 7723 - DNA, 876 bp, Zea mays
  Peptide Sequence Number=SeqID_49502
atggcgagccacggcatcggggcggccgctggatctgacgccccgcacgctgaggtcgtcactatgggacagacaaatccatctccttatcctcctgtatcttccagtcatcattcatggtcctctgcaactgggtcagtttcatggaacaatacagtggacaaacttagccaagatacagtttattatgatccacaaagggatgtatcggtttcaggagggaatcaaaatgtaggaagcagtgcgcctcatgttgcccaggcgagtatggggataacagacgcagctcattcccatgtaccttactctagttcagatcaacatggctataaccctgtagaatatgccaattattattatagctacccacaagcggcaaatgattcttctgtccagcaaggagcaaaccaacatccaggtgcagcttatcagcctcttacttcatttcaaaattcagggtcttacattgatcctacaagtaacacatattacaatgctggggatcatcagactgtgccaggatatggaagcagcagctactattttcagaacaacacatggaatggtggaagcacagggaataattttgctcaatcataccagaactactcaccatctgatacaaatgcacaacagagctctacttcagtgcctgccaattctttaccgtatcagcagcagtataaccagtggccgtactattacaatcaatctgtgccaagtgcttctagcaatccagttgctgggaacagtactacagataacttagctgttaacaccccttctagctactcctatcctaatagccagccacctccaccaggaacaacatcatggaaaagtaattcaagtgcttctgttgcgcctcctatgcag

SEQ ID NO: 7724 - DNA, 402 bp, Zea mays
  Peptide Sequence Number=SeqID_49503
atgggtaaaagtaagaagggtagaggttcttctcctcgctctggtgacaaacgcaaacgtgagccgactcctccttcggaggacttcggcgactcggagtactcggaggaggagttctcctccgagtccgagggatccccggctcccgtctggacctacatctgggccgtcgagcgctccgggctcgaaggctcggatgagtcggagtactcctcggatgaggaggactcctcggactcgtccgaggaggacagcggcggcgatggcgatgatggcggcgacgacgggggcgacggtgatggcggtggcgacagcggtaggggcggcgacgacgacagcaagggcgaccacggcagcggcagcaagggcagcagcaagggcagcaacaagaccagtggctag

SEQ ID NO: 7725 - DNA, 1371 bp, Zea mays
  Peptide Sequence Number=SeqID_49504
atgtccgcgcccgtgggccggcttctactgctggtctccgctgtcgcggtaggcctggcgctccccgtggcggccgagatcaagaaggagtccttcagggaggacccgcgctcgtccatcatgttcgagaaattcggcttctccaggtccggcgaggtccggatcatcatctcgggcgcctccgtctcctcccccgtcgcgcgggccgacctcaagcagctcgggttcttcctcgtctccgacgagtccctcctcgacgccatcgacgaggcgcgggaggaggggccgacgccggagaagctcgtcgcggcgagcgacgacgaccccgacgacggtgccgctgccgggtgcgtgctcgacagccccagcccctacgtgaggaagctcttcaccttcaagaacatgaagggcgggcactacaacaggtccttcccggtgacccgccccgacgagtacgcgctcttcttcgccaactgcgccccggggtcgctcgtctccatgaccgtccgcaccgagatgtacaacgtcggcgccgacggctccaaggactacctccccgtcgggcaggcgccgctgcccgccatccacggcgtcttcgcgctctgctacgccgcgttcctggccgcctgggggtacctgaccctctcatccgtctccgcgcagcagatccaccacctcatgtccggcctcctcgccgcgcgcctgctctactgcgtctcggccgccgaggaccagcaccacgtccgcgccacggggacgccgcacggctgggaccacgtggccttgtacctgttccagctcgtgaagggcgtggtcctcttcgcgctggtcggcacgggctggtgcttcctgaagccggtcctgcaggggcgggagaagaaggtgctcgtggccgtgatcccgctccaggtggccgcgaacgtcgccgccgcggtggtcggggaggccgggccctccctgctgctgcaggggtgggcgacgtggtggaaccggaccctgctcctcgtggacgtcgcgtgctgctgcgcggtgctcttcccggtcgtgtggtcgcactcgcaccgggagacgtcgtccaagaccgacggcaaggcggcgcgcaacctctccaggctcaccctgttccagcggttctacgccgcggtgatcgggtacctgtacttcactagggtcgtcgtgtacgcgctcaggacggctgccagctacaggtaccggtgggcgagcgtcttggcggaggagacggccgccctggcgttctacctgttcatgttccacacgttcaggccggccgagaagagccactacttctgtctccatgacgacgacgacgacgacgagatggtgctccgagaagaggaactcgagctatga

SEQ ID NO: 7726 - DNA, 471 bp, Zea mays
  Peptide Sequence Number=SeqID_49505
atgggcaaggacaagaaaggtcggagttctccgcgtcgctccagcgacaagcggaagcgtgagccaaatcctccttcggaggactttggtgactccgagtactcgaaggaggagctttcctccgagtccgagggatcgccagtctatgcctcccccccggcgttgtccgatgactcgaacaattcccatgggattgccgccgaggtgtggacgtacatccggtccgtcgagcgcgccggactcgagggctcggatgagtcggaggtctcctcggatgaggagaactcttccggcttgtccgaggaagggagcggcggcgacaacgacgacgaaggcgacgacagcggtggaggtggcgatggcgacgatggtggcaagggcggcggtggaggcaacgacggcggtaggagcggcgacgatggcaagggcggcaacagcagcaaggccagtggcaaagcgccactggcttaa

SEQ ID NO: 7727 - DNA, 813 bp, Zea mays
  Peptide Sequence Number=SeqID_49506
atggcgacggcggcggcgcagtcccatccggcatcgatggacgcgcgccggtgggacgagtcatcgtaccgccgcggcatcctccgtgcccgcgacctctcgtcccgcaccctcttccgtgccgtcttctttgaccacagcgacgacccggataccgacatcctactcgccgccgcctccagcgacggctccctcgcttccttctccctttcatcctgcatctccgcatgttccgctacctcccaggtggagaccgccgccactctggtagatcctgtctgcatcgtgcaagcgcacagcggacctgcctacgacgtcaggttttaccccgatcaacagcagccgctgctcttcagctgcggggacgatggccgcatcaagggttggaggtggcacgagatgcagagctgccttgtcccgctctccctgcaaggggatcatctggaaccagcacttgacttggtcaaccctcagcacgagggtccttggggtgctcgatctccagtacctgaaaacaatgccattgcaattaataaacaggatggatccattttggcagcagcgggtgatgcatgtgcttactgctgggatgtggagaccagtaaatgtaaaatcacattcaaggggcatgctgattatttgcacagcattgcagttcgtgagtcaaaccgccaggttgtaacaggatcagaggatgggacagctcgtatctggggtgcgggtttcaaaccatcatcctttcctgtcttgtgcattgtattttttttttctcgaaagagcgcaggaggactgcgcacccatatattaaagtag

SEQ ID NO: 7728 - DNA, 504 bp, Zea mays
  Peptide Sequence Number=SeqID_49507
atgcctggagcttcatcaggagctctaactctgctgactcctcatgtggcgtgggaagcactggctccaccaactcctcacacaataggtcaggtcacgccagcctcgtcggacctcccacttgtgggttgggaggggccagtcacttcatggcaagacctatcagctctgccaagggctgggggacaaccatcagtgttcaaccccatcccttttcatccaagcttcgacacaggctccttcactagcctatacgctggttttcccttcccctctggatgtcttgattctgaggaggaggatggtccgggccctagactggacttcttcgggcttcgcgaccttgaggccatgctgcagttcctgttcgtgtgcgataaactgctctccgacggctcagacgactacaatgccaatgaggagggttacgaaccaactcgagagtgcttccacacgggtcatgaggagcatgacggaccaactcggcatgtctcgggagaatga

SEQ ID NO: 7729 - DNA, 474 bp, Zea mays
  Peptide Sequence Number=SeqID_49508
atgaacaaagacaaagttcatgacaaggagactcacggaacaagtagtgatataactgagaaaacacctgtggaaacggtgaagggtcccaatctgcttgagcgagcaaaggaagagatcgaggcccttgccggagctgttcatactaagatggagcaccattccagtccccacgcgaagaaggatgaatcacataaggaaggcaaggaggggagcctgcacaaaataaaagcccacacggatgaaactcacggaacaagtgctgacataaatgagaacacaccagttgacaaagtcaaaggtccgaatgtgtttgagcgtgccaaggaagagattgaagctattgtggaagctatccatccgaagaatggatctgacagacattatattgtgccaccaactcgccatggtctggaagttgtaataagagtgatcatgaaacagggcataaatctattgctagtacttttttag

SEQ ID NO: 7730 - DNA, 582 bp, Zea mays
  Peptide Sequence Number=SeqID_49509
atggatccgcagttcaagctagctctggaggcacaaaccaagttgttcctcgccgagcttgataagaagttcgtggcccacgacgccaactgggaagctcgtatcgtcgacctggagcacgccgcagtgtccgcctccgacaagttctacgacctcaaggcggatattcacaccgatgttgccgctcaattggagttccaccttacgactgcggcggatcgggcggatcgggtgtctaccgtcatcgagacacgcgttgcggccctcgaatcagcctcggtggccttcgattcatggtgtcccgtcatcgaatcaacaatcgacgacatcaagcacggagtcgattccgtacaggccgtcgtcgccagaattgcttccccgtcgcgtctagagccccgggatcctccacatcttcaacctggaatcctcgacgcgtacgggtcagccgccgcgcgtactcctgccggacctatgactgacagcccaatggggcactgcggcgactctcaacgccgggaggctggctttgggcatgtattcgcccaaactcacctcccgcacaatggtagacttccaccatag

SEQ ID NO: 7731 - DNA, 219 bp, Zea mays
  Peptide Sequence Number=SeqID_49510
atggaagctcgcttttgggaactgaggctcgcttttgggaactgtcccagttcatctaggttactcttagaacttgcctccctgctgtgcaaggagtatggttttatgcttgtaagatatgagcagtgggtactgactggttatagctatggttctcattacttgtattatttgtcaagtgttcctagaaagctctcagaggtcagagttgttctttga

SEQ ID NO: 7732 - DNA, 306 bp, Zea mays
  Peptide Sequence Number=SeqID_49511
atgtcacctaccctagcggtcagcgatctgatcgtcaggtggggctatcgatcgaaagtgcagccaggcactattcattccatgaaggcatcggtaatgctcatgaggtgctctcaatggagttctgatagtacagtgtttgaagaatatctcaggtgcagcgcacctcaccgccgactaataccagaaaggccaacacgcaatgggagtggagagatggcgagagtagcgtgtaccctctgtggcaagaggctagacggtggtgtatctgtgctctcggttggcgtgaacccgatctggtcttaa

SEQ ID NO: 7733 - DNA, 324 bp, Zea mays
  Peptide Sequence Number=SeqID_49512
atggtggcttcgacaaccctaggaaggcgtcggaagagagcacccatatatgtagcagtcgccactgccacatgcgaggagaagaagcaagaaggcgctcaggctctaggcgggtgcgtcgccggcaagcgcaagaaggtcgccacgagtggtaagcccaagcacccaccctccaccttcttcgtcttcatgtctggattcaggcaggagtatcaggttcagcaccctggcaacaagagcgttgcgaccatgtcttctttgttcgtgttggtggatcaggtgagcaaggcagcaagagaaaagtggcatgctatgtcagattaa

SEQ ID NO: 7734 - DNA, 615 bp, Zea mays
  Peptide Sequence Number=SeqID_49513
atgccgcgtgttcttgcacctaatttcacaccaaccgggtgtgtaccaaccgtaacggcttctacagatgccaagagaattattgacgaagaaagatctaatgctcggttggagataggaattgaagtgctaaagcttctgtacaaaaaattcaatcagcacttaaagagcaggaaaaattttctcacagaactgggaagcagtatttcttctcaactatctatagacatgtcttattatggaaatttgaagttgctagtgagtatcgacaaaatgcaaatggatgtcgatgaactaaaggaagaagttcaagaagcaccaagagtgaaaatgttgcattgcccaagcaaggcaatggacattgagaacgagatccaagttctgtgtgatcaactggctaaaaaatcttcagattctcttcgccttttgaaagagttggagctgcatcgaagttacggggaaaatgacatgcccttgtatgaactaaagggtctagaaactttaggctcaacgttgcacatagttgttcacgactgtgcctctgtagatttctggaacagttcaatccaatggtttcgcatacagcctgaaggaagcaagaaagaaattatttga

SEQ ID NO: 7735 - DNA, 1017 bp, Zea mays
  Peptide Sequence Number=SeqID_49514
atggaaatcaccataaaggtgaataaccaacatcacatctccaacatatctacttgggagaacacacaggcggcccaggcgccaccaggccgacgtggcccacattgccagcctcaaggccggggcggcccaggcgcgcctgccaggccgagcggcctacgcgcgtcagccaaggccgggcggcccacgtgcaggcccacgcgcggccaggtgctccttgcgcccaataaaaaggggaggcggttagggttccgccccatgcctagccgccgccgccgcatggtgggttgcccagccgtccctgccttgtcgagccgccgccagtggggccgcgcctgtgccggggggggggggggcagcctcgcccgcgcgctccggcgagccgagccagcggcaccgaggggctcgcccgcccctgccggggtcgaggtcggtcgtgccctttgccgggtcgccgagcgccccttgccggggcctaaccgagccgagcgcccgcagccggcgaggccgagcctcgtctgcgccagggccgtgcgttccggcgacgtctgcgccgagcatcggccgcaaccgggcagcgccggcagcgcccgcagccggcatggtcggggccgcgcgcccgcgacgtccgtgccgtgcgtcgcccgcaaccgggcagcgtccgcagccggcttggccggggccgcacgctcgcccgctgaggcccctgtgcctggagccgccgaggagccggatgcgccgccgttgccagacgtccgtgccccgaggccgcacgcgacaaggggcccgcctgcccctaccggggtggccaagcccgaggcagatgccggtagcccacgcccccgtgcgcagggaagccaaaccggagcaacatccgcgccggccacgaccgcgctggaccggacttgccgggtcaggcagcgcccgcgcaccgagaagtgccatggaagtatcgtctgcaacaacctagcagagtctttgaagcgtaaacgcaatcacctgatacgggcgccatag

SEQ ID NO: 7736 - DNA, 234 bp, Zea mays
  Peptide Sequence Number=SeqID_49515
atggcgcgcacgtacttgtacatgaagacatcgcggtcgcggggcgatgctctccttgcagaggtagcaggactcgagaccacgcacccctgggtctatgtagcgagtatgagcgcagccatagattatgttagggccgtcccggagctagtggcattaaatggctacgaaataactgaagaagacctggtggacctacgcttccctctgggtctccgtcagcagactgaatga

SEQ ID NO: 7737 - DNA, 411 bp, Zea mays
  Peptide Sequence Number=SeqID_49516
atggcagcatgcagcaagcgtgagcatgtgcgcgccatcagcgacggtgtatcagcgtgtcgtcgcctctacctccatctgcagcagcgacgactcaaatcggcacgaatccggtggaccaccatagccatcaacacaaacacgagacgacatggtgggctatcctatcgggttccgtcccaggtcccaacaggttttacccacggagggtcaagacctaagatggttattgtgaagatgagacaccatctctatgatagtcaccacctatttgggactaaacaacaacgaaccctagagccttctcgtgatgagttagctctgcgatgtggacggcgcggcggtcggcgatgggtcactaggttgcctggcggtgctcgctgcgggggcacggagggtccacaactctag

SEQ ID NO: 7738 - DNA, 174 bp, Zea mays
  Peptide Sequence Number=SeqID_49517
atggggaccccgttgacggattctttgtcgagtgctggccagcagacactcggcaaaggtcaaggacagatactacaagatgaggagcatgaaggatgtcgcgatgggttcgtgagaggtctaggacgtcgtctcccagtcaactacggttgttggattgttgtcttcgtatga

SEQ ID NO: 7739 - DNA, 1410 bp, Zea mays
  Peptide Sequence Number=SeqID_49518
atgcatcaaccctccgtcaagaccgacgacacgcccgagcccgagaaggccttggcccagcccgaggcaacctcggctcagtccgaggtaccctcggcacagtccgaggcaccctcagctcggcctgaggtaccctccgcccccgagggtgaggcactgcgcgtcgaggaggagcgaagtggggtcacgcccaatcgaaactggcagaccccgtacctgcaatatctccaccgaggagagctacccctcgaccgagtcgaagctcggcggttggcacggcgcgccaagtcgtttgtcttgctgagagacgggaaggagctctaccaccgcagcccctcgggcatcctccagcgatgcatttccatcgccgaaggtcaggagctcctacaagagatacactcgggggcttgcggccatcacgcagcacctcgcacccttgttggaaacgctttccgacaaggtttctactggccgacggcggtggccgacgccactagaattgtccgcacctgcgaagggtgtcaattctacgcaaggcagacccacctgcctgctcaggccctgcagaccatacccattacctggtcgtttgctgtgtggggtctggatctagtcggccccttgcagaaggcacccgggggctacacgcacctgttggtcgccatcgacaaattctccaagtggatcgaggcggtggcgttcttcaccaacatcatccatcgctttggggtcccgaactccatcatcaccgacaacggcacccagttcaccggcagaaagttcctggacttctgcgaggatcaccacatccgggtggactgggccgccgtggcccaccccatgacgaatgggcaggtagaacgtgccaacggcatgattctacaaggactcaagcctcggatctacaatgacctcaacaagttcggcaagcggtggatgaaggaactcccctcggtggtctggagcctgaggacaacgccgagccgagccacgggcttcacaccgttctttctagtctatggggtcgaggccatcttgcccacagacttagaatacggttccccgaggacgagggcctacgtcgaccaaagcaatcaagctaatcgagaagactcactgaaccagctggaagaggctcgggacatggccttactacactcggcgcggtaccagcagtccctgcgacgctaccacgcccgaggggttcggtcccgagacctccaggtgggcgacctggtgcttcggctgcgacaagacgcccgagggcggcataagctcacgcctccctgggaagggtcgttcgacatcgccaaagttctgaagcccggaacgtacaagctggccaacagtcaaggcgaggtctacaacaacgcttggaacatccaacagctacgtcgcttctacccttaa

SEQ ID NO: 7740 - DNA, 384 bp, Zea mays
  Peptide Sequence Number=SeqID_49519
atggtgtctccttcactagtcgatactcaactcatccaagcgctggagcaccaaacatgggttatcctcgccgagctcgatgccggtgctctagagtctcaggcggtggactccgatcagcaccgcgatgaattctcatcagccctccgcgcagacgtcgaggcacatctcttggcggacgacgcggatctcttggatcggatttactgggaggcctctacgggtggtgccgcctctcgacatgacatggccttcgaagactgtgacatcaatgaacagctcgccggagcctgtggctgcctcgacaacctcaccaccacgtcctctgcaactgtggctctgtgttgcatgatgacattaagattggagctcaaaagtctatga

SEQ ID NO: 7741 - DNA, 834 bp, Zea mays
  Peptide Sequence Number=SeqID_49520
atgccacgttcttcatctaggcggcacgtgttggacggctggctggctcatgagccgcgagcccgacaatataaagccacgttcattcccgcagagcccgtcacgcagtttctcgcgccatctgaagtcagctggggcgacgaagaaatgtcctctagcgatcaaaacccagctgccacacccgcgtcgtcgggccccgccgagccctcgccgccgggcaggccaacggcggtgtcctcgcgtgtcctcgacatgggcgcgcagctggcgcaggcgctgaagccggtgcggcagatgaagcagcacgcgtgcagcttcgcgctgtacgcccacgacttgcaccgccaggtggaggtccaccacttcgtcgcccggctcaaccaggacgtcctccagtgcgccgtctacgactccgacaagccctcggcccgcctcatcggcgtggagtacatcgtctccgacaccatcttcgagggcctggccccggacgagcagaggctgtggcactcgcacgcgtacgaggtgaaggccgggctgtggaccgacgtcgggcgtgccggaggcgctgcagagctcggagatggcgagcctcgcaaggacgccgccgagcccggccgcgtgcgcggcgagctggtgcgcggccgtgacgagaggtacgggatcgacagctcggcaggggggctcaaggcggcgagggtggagatggacgagccggagtggatcaacccgaacgccgactactggcggctgcacggcaaggggttcgcgctgcagtctaaaaagagcacctgcgtggctgcgtcaaccccgattttagctattggctttgattaa

SEQ ID NO: 7742 - DNA, 676 bp, Zea mays
  Peptide Sequence Number=SeqID_49521
atggcgcctcctgtcgacgtggtcggtccgagccctaggttgggcgaggtggaggctcctccgaggtcgagtccgggcccctgggtcgggcgaggcggagaccgtcggccgaggccagggctgagtccgagccctggggttggacgaagcggagttcgtcgtccttcggggctgagcccgagtccgagcccaggggtcgggcggagcggagtttgtcgtcttctggggctgagcccaagtccgagccctggggtcgggcagagcggagttcgtcgtcttccggggctgagcccaagtccgagccctagggtcgggcggagcggggttcatcgtcttccggggctgagcccaagtctgagccctggggtcgggcggagcggagttcgttgtcttccggggccgagcccaagtccgagccttggggtcgggcggagcggaattcgtcgtcttccggggctgagcccaagtccgagccctggggtcgggcggagcggacctcactctgccgagtggcacagcagtcggagcggcgcaggcggcgctgtcctcttgtcagaccggtcagtggagcggcgaagtgactacggtcacttcggctctgtcgactggggggcatgtgtcaggataaagctttgtgctgatgggggttaccagctgagatttaggagtcttgagg

SEQ ID NO: 7743 - DNA, 1077 bp, Zea mays
  Peptide Sequence Number=SeqID_49522
atggctctcgtcgccggctcctacgagcgcttcatctggggcttctctctcaaaaccctgacgtccccctccgccaccggcgcctcgccctccgagaccctcaccctcgcgccgctcttctcgtacccggcccacacgggcccggtgcgctgcgtggccgcggcgccgcgggcggggctggtggcctccggcggcgcggacgattccgtccgcctctacgacctcccttccgccgcggacctcggcccgctcctggacccctcggccgccgtctccgcgctcgccttctactcccggggccccgtgccgcggaacctcctggccgcctgcgacgacggctcgctccacatctacgacgccgacggcttcgcgctgctctccacgctccgcgccttcccgcgccacgaagccgccgaggcgctcgccgtgcacccgtcgggccgggtcgcgctcgccgtcggccgcgcgggggcgcttgccatgctcaacctcgtccgcggccgacgcagcttcgcatgccgcctcgagcaccctgcgtccgcgatcgcctacgccgaggacagggacggcggggaccgattcgtgatggctgccgagaacaaggtcagcgtgcacgactccgtggatgccagggttattcatgatatggactgtggcaagaaggtgctcgccatggcgcccgcaaagagtggggtcctttacactggaggcgaggaccgatgtattactgcttgggatctgtccagcggcaaggtctcctcacgcattgagggtgcccatgcaactcgtgtaaaaggggttgttgtttttggtaatagcaatgatggatcacagctctccaatctaatttcttctgcttcgtccgatggtgtcataaggatatgggacattcgaacaatcgggaacggaaagcctactccattagcagaggctaatacaaaagcaaggctaacttgtcttgctggaacgtcactgaaatgtgcagtggtgagagatgtcatatttgtgggggaaggctttccttatcccttccctagaccccactcatgtgggagccttcggcagccccctttataa

SEQ ID NO: 7744 - DNA, 954 bp, Zea mays
  Peptide Sequence Number=SeqID_49523
atggactgctgctcctgcttcttttgtttgcttgttgtgcttgccattcttcttctgaaagaaaataaaaatgcatctgcccttgcacgcgcagacatggacgacactctgtacccgctgagccttggcatcaacctagcatgccgcaagaacatacaggagtacatgctgaacaagctgcggatcgaggagagccaggtccccaggatgtgcctggacctgtacagggagtatggaaccacaatggccggcctcaaggttttggggtacggtttcgactacgacgacttccacgcctgcgtgcacgggacgctgccgtacgagaaggtgaagcctgacccggtgctcaggcagctgctgctttccctgccgcagaggaagatcatcttcaccaactccgacaaggcccacgcggccagagtcctggagaagctcggcctccaggactgcttccaagggatcgtctgcttcgagaccctcaacccgcgaccaccaaccgagaccgagaagaacagtagtggcagtgctgggacgatcctgtgcaagccctcgctggcgtccatggaagccgtcatcgagatcgccaagctcgacgccgagagaacggtgttctttgacgacagcgcgcgcaacatcgccgcagggaaggccgccggtttccgcaccgtcatcgtgagcgttttctctgtttcttctccccgcgtcgttcgtgcgtgcgttctgcaatcgacagctgatgctgacaaccggcaaccctccatgcatggtaaccttcgcatgcaggtggggagctcggcgctggtgccaggggcggacgtggcgctggagagcatccacaacatcaaggaggcgctgccggagctctgggaggttgccgccgccgctgccgccggcgaccgcgtcgacgccgtcctccggtccaccaccgccgtggagaccacagtgattgcctga

SEQ ID NO: 7745 - DNA, 1359 bp, Zea mays
  Peptide Sequence Number=SeqID_49524
atggaatcgcctcaatcatttccggcggaaccctttgtgcgttatcgtctcctcttctttactgaaaaggctgcaggcgtcgcagcaccggcccgagtactccgctgtccgctcccactccactccggcccagctgcgtgctgctccggcaccggcaggcggataagcccagcaggtaaagcaggcaggagaggaggagagctcagcactgcacgcgcgctcccctccccttcccttgctggccaaatcgatcggtccccttcaggctccaggctccggagcttgctttacttcagatttgcgcgattccccttccaaaaagaaccaatcggtttgctactagatcggtgcgcgaggctagactttttctgggaattcaaccggcgaatgggcagggacggcggccgcgtgcgcatgagccgcgtattggcaactggggatgagcgcggcatgggcgaggtagcaggcgtggagcgcgccgcctgcaagcgcccgcgcggcgcgctcgacggcggcgggtcggggtctgcggccgcgtggccggcgtgccgggtggcgcgcgccgcggccggcggcaaggaccgccacagtaaggtggtgacggcgcgggggctccgggaccgccgcgtccgcctctcggtgcccacggccatccagttctacgacatccaggaccgcctcggcgtcgaccagcccagcaaggccatcgagtggctcatccgcgccgccgccgccgccatcgacggcctcccgtcgctcgactgctccttcgtcttcccccacgccgccgcatctccgccgggcggcgctgccgacgacgccgagctcagcacctccgagaccagcaagagctccgttctctcgcttgccaacgccccggttgacaacaccgccgctcactctcagcaagacagtcacgcctacaacaacaacgccgccgccggtggtggcgcgttcgccgacctgatcctgcactgctccgccaacaacagcagcaagccagtgcagcagcagccgacgctcgcttactacgccacccagcccccgaacgcgcactccgcgtcggccatatccttcgagacgatgctgccccacttctccttccttcaggagcagcctcaccacgcaatcgccttcgaccggggcacacttcagtccaatgccgccgttgctgcgccgctgtggccgacgtctcagcatgcgtgcctgctgcagaggttcgccgcttctccagctgatgccaccggactgccgtcgttctttcttggaagcggtgctgctggtgcttctccggtggtgccggccaatgcagagccgaggcttcagctctgggacttcaagcaggaacggaagacctga

SEQ ID NO: 7746 - DNA, 372 bp, Zea mays
  Peptide Sequence Number=SeqID_49525
atggatcaggcgcaatttgaaggttggcgcccggacgtggagaaacgcctcgacaatctctccctcgagctaaaccgggcgaacaaattcatggagcgcgacaccttcgcctccgatttcgccaagccaggaatcattccttcatcggggtcggtgttcaggcgcccatatgtcggaatcagtggagtcgacgggccagatggccaccacatggatcacaaccaccgggagtgtgagtttggtcgaatctcgtcccaaactcatgacctggtcaagggtaagctccatgagacttcccccatgacaatctgcaatttcctgagggtgacgggtccggatgggtctcgagggggttacgacagccctccctga

SEQ ID NO: 7747 - DNA, 414 bp, Zea mays
  Peptide Sequence Number=SeqID_49526
atggcgactctgttctccaacccacttggatgccaacgaatcccccactctatgtgctctccatgcatccctcatggtcaacgcgtccaaaatggcctaggcatggaagtaggccagcgtgagacgggattagtcgctgaaaccaccaaccttgtggcaccaaacaaggatattcgtagtgccactagtggatctgtgaatggattctgtatgatgaggacacggaaactgcaaaaggctgggctcctgtccatatacgcggaaaaatacaaatacgagccggtagcaggtgtcagtcaggccacagcaaagcctgcagcagcagcgctgtcgtcgcttgacaagatcactgagaacttgtcctcgctcccgctgtgctctcgtcctgttatatccaacgacaaggttttctaa

SEQ ID NO: 7748 - DNA, 1140 bp, Zea mays
  Peptide Sequence Number=SeqID_49527
atggcctcctcctgggttcttgccctggttcttgcgctgtcggcaggcgcaagcctggcgcgtggctcagagccgtggtggaacgagacacaggtgtacgccaccaccgccaactccggtggcggcaacggcgtcttcgtcggcctcacgctcatccagtcggcggcggccaagggagcggtgtgcttggatggaagcttaccaggttaccacctccacagagggtttggatcaggagcaaacagttggctcgtcaatctcgagggtggaggctggtgcaatgatcgcagcagctgtgtgttccgcaagggcagtcgtcgtggatcatcaaatcacatggagaggcaactccagtttacagggatattgagtaacaaacctgaagagaatcccgatttctacaactggaatagagtgaaggtccggtactgtgatggtggatctttcactggtgatggctctgatgcggctgcaggcctttatttccgaggtcagcgcatttggcaggccgctatggatgacctaatggcccaaggaatgcgttatgctaatcagcttttcagaggtcattttcatgtccctgatgcaatttatcgtataccaggcccttctttctggatgctctgccggtgtgttgatgtttctggccgtcgggaaatgagatcctttttcaatggcattgtgagattgcagtgctttttcccccagaatgtgttgccaaccatccgaaccccaacttttgttttgaacactgcctatgacgtgtggcagcttcaacaaagtgtggcccctagaacagctgatccccaaggtctttggtcaaagtgtaggacgaaccatgccttctgtaatagcaaccagctccagtttttgcaagggttcaggaaccagatgcttgatgccgtgaggggtttctctgcatcaaggcaaaatggtctgttcatcaactcatgttttgctcattgccagagcgagagacaggatacttggtacgcgaacaactcgccacgtcttggtaacaagaaaatcgctgacgctgttggggactggttcttcgagagggggaacgccaagtacacagactgcccatacccttgcgatggcacttgccatcaccttgtgttcaggggagaccactaa

SEQ ID NO: 7749 - DNA, 231 bp, Zea mays
  Peptide Sequence Number=SeqID_49528
atgagccagtgtcccagttctgaatggagctgtcgaagggcgtctagtcaggcaacaagtttgaataccaacaagaacagtggatgctggaactggctcacgactatttcgaggaatggtgccaaaatctgttgcgttgtgagtggggcggcggtgagcggtggccagccgcgggaggacgacaacatcctgggggaggacgacgagggtggtgacctcccgttgcgttga

SEQ ID NO: 7750 - DNA, 144 bp, Zea mays
  Peptide Sequence Number=SeqID_49529
atggatgtgtctactgctaacactagtggtgcactagacatgtttggtgcccccaatttgggtcaccaagagtgtcctaattgtaggcttggtatgtggtgccaattggcgtatgaaccatctagcttggacttgacacaatga

SEQ ID NO: 7751 - DNA, 276 bp, Zea mays
  Peptide Sequence Number=SeqID_49530
atggctaatattcgacttgtagggatggttaacagcaaggtggagcaggagaccgatgtgacattcacgctcgacaatagcaccggacgcctcgatttcaacaaatggaatgagcacttcttggattttgctcgtgctgaagttgaatcagagatggaaaccgtgattgccgcaaagaacttcgagattgcaaggctgtcggatagggtccagtactatgaagctgcaaacaggggaatgtcccaaagaaaccaagaagctatcgattggttctga

SEQ ID NO: 7752 - DNA, 147 bp, Zea mays
  Peptide Sequence Number=SeqID_49531
atggcgctcgatctctgtctgccctgccggctgatcggtttgtgcaacactgtatctgtgcagtttgatttccgagctgcagaccagtattatgctgtccaagtcaggagggctgcgagttgtttggtttcgacaactagtagctag

SEQ ID NO: 7753 - DNA, 132 bp, Zea mays
  Peptide Sequence Number=SeqID_49532
atgggggtcggcctcgtcggcggactcctccccatcctcagcgccctccccgacgctctcctcgtggtgagggatatactggatctggagtatgtgcatatatgttatattactgatgcacttgacatgtga

SEQ ID NO: 7754 - DNA, 243 bp, Zea mays
  Peptide Sequence Number=SeqID_49533
atggcgctcgatctccctgtctgccctgccggccggctgatggggtcagctcgatcgatggagactgctcgtgtctgtttcgtgtggaatgcattccgcgtcgggtgcctgattctcatcatcatcacgtgtccggcggcgccatcgcagtcaactccaaccgccacgatccaaccatttgtcttcttctgtcaactggaggcaaacaacaagaatgaccgtgcattatttggtgttttataa

SEQ ID NO: 7755 - DNA, 297 bp, Zea mays
  Peptide Sequence Number=SeqID_49534
atgagagcctccggtggccggccagaggacgaagtggcagttcaccggcacgggcgactccgatcgccactccgccacaatcttgacgaaggaggaggtgccggccactgtgtcctcgctgtcatagcaaatgtgacgtcagatttcattgaagaaagtggtcccctacctttcaaccaggtgaggttgagtgactgcgcatatgttgctaaaaatacggtgaaggttgaggccctcgcggcgaagggggcgcatcaacctcttaagtcctcactccaccgtcttctattggggtga

SEQ ID NO: 7756 - DNA, 3078 bp, Zea mays
  Peptide Sequence Number=SeqID_49535
atggaaggggcggcggcggcggaggtgggcggcggcggcgaggatgtgcagatcaagggcgccaaggagagtgggcagcccgcggcggcggcgcagcagccgccgccgctgccgtccggcagcgaggcgctggagatgccggccacgccgcttccgcgggacatggactggtccgagcacttctccttcttcacctcgccgggcgggttcgcgggcagctcggacggcgcgaggggcctcgccagcgtcggcctgtccaactccgagtccaggccggacagcgtgacgcagcgcggcgtggaccacggcgcggaagagagggtggaggagctcacattgaagaactgcattagcgctgatgctgcccagcccgaagcctctgctggtgggagcacgagcggtggggataggcctgctgttattaagggcctgtggggtaacttcacacggatggcccggagaaccagctatttggccagcagggaaaacgccgcactgagctatggcgacattgcaagctcgagggctggtgatgcttctagcagggaaaatctggcgacgagccttgccaacaatatcatctcaaggaacaacgatgtgtctggcaatgaggcacctacgagtcgtgtcggatatgtgaataatgagttcaagacgccatttcacagccagcagattctcttgtccccttggtctaatcaggacaacgctcttaaagtaagcagcttctcgaataggattcttgatcagatgagaagtaagactgtggcacccccatctggggttctagggtcaccgcttaaaagcaaatcaaaaggtaaaggggttgcataccaacgtgcacgggaggagatccgagtgcaagctaatgcaagacccagagaccctctggacaagatcccgacaattcctacctcaattcatgattctgtggccagagtggacatgcttttcagtactagtggagatgtttcaaaatcccactctgagggaactagcctgagggaactgattaagcctgggcggcaaacgatgtccaagtttgagaaattgcatttgtttaagcagatccttgatcttgtggataactgtcatgcacagggttttactttacaacatttgcgaccatcatattttacgatcctatcttcaaatcaagttaaatatatcggttcttataccacacaagatttgccaacatcaatcaaacaagagtttgctagagaagatcttgtgagtagaaaaagagcttttggccatagaattgattaccaagactctaatggccatggaaatttgatgctgaagcatcaaaaggttggtgagcaaggcttagttgctgtcaggcggctggcaaatacatttttgactgacaaaatacgcgacaatcaaattgaagataacgatccaggtatttcaaggcaagaaaattttagttacactaccagagaacattttaagttcgtcgaatcatatggcagcaatatgtccagtgctcagcatgtatctagttctggaacccaacaaccagcatttgaattgaggaatattgaggaaagctggtacaaaagcccagaggagctcagtcaatttaaaggcacacccccatcaaacatctatagccttggggttcttctatttgagaaagtcccaaggaggctggcttctgcctttggttactgcatccagatccttgttcaagaccaaaagcaaaataagtcaccagtttccatcagtgaagatgacactgaatctagtttgctacttaacttcctttctcaattgaaagaagaaaaggagatgcaggctgccaagttatcggcagagcttggaagcttacaaacagatatcacagagattgacagaagacactcagcaggaatgagattgagtttagaggatatggatgtactgccaagttctagtttgccaggagcttctgtgagtgccctacagggtgcattgctgtcaggtttgctaccggcatcgtgcaagtcgagcatatatgaggagagggtaatgaggaatttggtgcagcttgaaaatgcttactactccatgaggtcctctgtggacacctgtgaaactaatgtaatcaaacgtccagataacgaggctttgagggtccgtgaaaatttccatcagcgtcacagtgattctgatgcaaagggagagaaaacagaccgtcttggatgcttttttgatggtttatgcaaatatgcccggcacaataggtttgaagtacgaggaattttgaagaatgcagatgtacttagctctccaaatgtcatctgttcattgagttttgatagggatgaagaatattttgctgctgctggagtttcaaagaaaataaaaatatttgaatttgatgcactcttaaatgatcgtgttgatattcattacccactggtagaaatgcctagcaagtccaagctgagctgtgtctgttggaacagctatataaagaactacctggcatcaacagactatgatggtactgttcagaaaaactctattgatacaatccgaaacgtggccaatgtatgctgtgtacaattctctccatactcctcccgcatgctagcttttggttcagctgattacaaaatatactgttatgatctgaggaacacaaggataccttggtgtactatttcgggacatggaaaggctgtcagttatgtaaggttcttggatccagaaacacttatctctgcatcaaccgacaacacattgaagatatgggatcttaaccagactaattgcagtggattatctgctgattcttgcagcctgactctgaatggtcatagcaacgagaagaattttgtagggctatctgttcatgatggatacataacttgtggctctgaaaccaatgaagtgttttcttactacaaagatttccccatgccaataacttctcataggtttggttccattgacccgataactggacaagtgacaaatgaagacaaccagcagtttgtgtcgagtgtttgctggagagggaagtcaaacatggtagtggctgccaactccagtggcagcatcaaagtgcttgagcttgtgtga

SEQ ID NO: 7757 - DNA, 138 bp, Zea mays
  Peptide Sequence Number=SeqID_49536
atggcgcggtgcggcatcgtggtggcagagcaacttcggcgagaaatcgccgcctcccagagagcacagcaccctgagacatttcttcagctgagatacatgaaagacatcgtgaacatccgcgagatgatccggtaa

SEQ ID NO: 7758 - DNA, 162 bp, Zea mays
  Peptide Sequence Number=SeqID_49537
atgaggaagctgcattttgttggtccacctctgaagcttccacccgagtcccgagttttgataaagccaagtggaaagacttggattgacgactcgttaataggaactggacactacaggaagaaacggtacaagtttccggaagatgggtcatatgattag

SEQ ID NO: 7759 - DNA, 129 bp, Zea mays
  Peptide Sequence Number=SeqID_49538
atggatgttttgatgattaggtaccttggagaggaccagcaaggacttgggaaaggccaagggataagccttcgtggcgaggtcattcgtgtgtcatgggtgataaccaacggagccttgttatcgtga

SEQ ID NO: 7760 - DNA, 417 bp, Zea mays
  Peptide Sequence Number=SeqID_49539
atgggcagaggcaagaggggcaagggatggcctctccgcgctgacgacaagcgcaagcatcctccaagtccacccttagaggactttggtggctcggagtactcggaggaggaagcttcctccgagtatgatcggtcgcccgctccagcgtcccccgcggcatcgtccgaggactcaaacgactccatggggctgtccacccacgccgggctcggtgggtcagatgactcgaaggatacctcctcagaggaggtggaagactcctccgactccgaggagtggagcggcggcgagggcgacgacgtcgaggatgatgacaacagcggcgatgacgacggcaagggcggcggcaacaacgacgacgaagatggcaacggcgaggccaacgacgacagcaaaggcgatgacaaggggtga

SEQ ID NO: 7761 - DNA, 210 bp, Zea mays
  Peptide Sequence Number=SeqID_49540
atggcgacgtcggcgagcacgtccggcgagtggctcaagggcgcgctgcaggaacttcgggagcgtaagggcagctcgctggagttcgactcggatctcatctcgggcctcgtctccttctgcgagctcgcgcctccctccgacgccaccagctatctcgagtgtctagggcataacgagatgctgatcattgttctgctgctggtgtga

SEQ ID NO: 7762 - DNA, 990 bp, Zea mays
  Peptide Sequence Number=SeqID_49541
atggcgtcttcctcactgtcgtcgccgccgctatcacttatcctcctccggccgctcccgtgcatacccgtcctcctcttgagacaaaggaagccattcccagctgtccgcgtagaagcaaggtctcagcagcggttgcagcggaggccggtgactggccagtggaggaggagctgcagaaggggcggaggctacgcgtgtttctcctacaatgccaagaacaagacgcccccgccttcagataagatgcatttcgcctattccaactttcatcatgtttttgtggtgactggcgtggatcttgtgacattatctgtgcctaagcagagttcagacgagtgggcgatcgttcgccgatgggatgtgccatgggaatggcaaactgttgtgctcagcatggtaggctgtggagtaagctttgttctgacaggattggttgagcaattggctttgcaagaactgggatttaaagctgtggaggcaactatagatgagaaggcagaaatactcttctttgggcagctgagtgtgacagtagtagtgcttggtgttatatttggcatcaccaacacttttcgaccattcccagatgatgtgtttcgttatgatattaaagaaccgttcaagctgcaaaatggatggcttttgtgggctggaattggtctctttggagcagtaatttctattgccttagccggagctgctatgacttatctgaatggtgaaactccagcgagagagactgattcactagtccttttgttgccgctgattggctcatccactaccagtactgcctttttggtgggaatcactggagttctagcaccacttctcgaggagacactgtttcgaggatttctaatggtgtccttgactaagtggtttcctactccagcttgtgtacttgtcagtgctgctgtatttgcccttgctcatctgactcctggacaatttccgcagctgtttatacttggtaattctctatag

SEQ ID NO: 7763 - DNA, 1260 bp, Zea mays
  Peptide Sequence Number=SeqID_49542
atggatgacgacagagctgatacgaacaagccagatgaggttcttcttccaggcttccggttccatcctacagatgaagagctcataagcttttacctcaggagaaagattcagcaaagacctctgtccgttgagctcattaggcagctggacatctacaagtatgatccatgggatctcccaaagctttcgagctccggggagaaggaatggtacttctactgcccaagggaccggaagtaccggaacagtgccagaccaaacagagtcacaggagctggattctggaaagcaaccggaacagataggccagtttactcttctgaaggggccaagtgcataggcctgaagaagtctcttgtcttttacaaagggagagcggcgaaaggaatcaagactgattggatgatgcatgagtacaggcttccttcactcggcgacccctcacgccctaataaaacaccaaaagacaaaaatattccagccgatgatgcatgggccatttgcagggtattcaaaaagcctaattctgtggcacaaagagtgctatctcgctcatggggtcctgcatcaattgcaacagcagacccagagctgttacctgctttgcagtccatacaagcttcccgttttgcattggaaacctccacttgctcagcaaatcgattcaacagccaacagcagcagaatcttagcagttcacaggatggttcttcatgtaaagtcataactttcaaccgtagcccatatctaccatcagagaaagacatccacagtagttcagtcgtcatcttgccgttagaaatacaatctcagcagaaatcatcagatgtcacatcagcgctgctaagcatggcccctggaatactcagcagtgcgaatgaagctataccaaacacagagtttggactgcttggaccatctaatggatatcccattgattgggctacagacacgagtggaggtattgtaaatagtgatgatgacccatacaaaagaaaatctggtaacggatacagctcaggctacgagtgtggaatcccacgaaaaataaaattcccatttaatttagggaacgatatgatgttcctgatggttcatggtggagaggttattattgatggtggtacaaagtcatcgatgggtggtggacgaagagcttggaacagctcacaacaaatatggtcggacatagcaccgtatgacttggacggaagactgatagaatctagatggctagaagatgtgaatagcctgtaa

SEQ ID NO: 7764 - DNA, 495 bp, Zea mays
  Peptide Sequence Number=SeqID_49543
atgaaaccgtgcactgctcgccgtgaattgaacgcgaactggaacctgggcacgcgcgcacacaggagcacgacggccaagtgtcagagagccgagcaggacgcgacccaacgatctaacgcgcgcgggatgaacgaatcgagccgcggcgcgcagagacttcacggcgaagcagaacgcgcgcaggaaacatggccaggacgcggcttccaggggcaagcagagaagacgggacacgagccgagctccgcgacgcacaggaagatgaagaaaaagcggctcggctgggagattggagaccgactgggcagggaggacgcgtgcaggctataccgcggctgggagcttgagggtgcggcatcagggcgagctcggccagggactaggcgccgagcgcaagggctaagggacgcgagcagggagaaggcaacggccatggcgacgagctccaagcagagggaggtcgatggtctggtcgagcagggaggaagctag

SEQ ID NO: 7765 - DNA, 495 bp, Zea mays
  Peptide Sequence Number=SeqID_49544
atgaaactgtgcaccgctcgccgtgaattgaacgcgagctggaacctgggcacgcgcgcacacaggagcacgacggccaagtgtcagagagccgagcaggacgcgacccaacgatctaacacgcgcgggatgaacgaatcgagccgcggcgcgcagagacttcacggcgaagcagaacgcgcgcaggaaacatggccaggacgcggcttccaggggcaagcagagaagacgggacacgagccgagctccgcgacgcacaggaagatgaagaaaaagcggctcggctgggagattggagaccgactgggcagggaggacgcgtgcaggctataccgcggctgggagcttgagggtgcggcatcagggcgagctcggccagggactaggcgccgagcgcaagggctaagggacgcgagcagggagaaggcaacggccatggcgacgagctccaagcagagggaggtcgatggtctggtcgagcagggaggaagctag

SEQ ID NO: 7766 - DNA, 837 bp, Zea mays
  Peptide Sequence Number=SeqID_49545
atggttgcagggttcatcaaagaggtattccatcccgaatggtcagctaaccctatgcttgtaaaggaaaaaggtgggaaatggaggatgtgcgtagactacacaggtctaaacaaagcatgtccgaaggttccctaccctctgcctcgcatcaatcagattgtggactccactgctgggaatgcaggtgccacctaccagaggtgcatgaaccatgtgttcgaagaacacatcggcagaatggtcgaggcttatgtcgatgacatcgtcgtcaagacaaggaaagcctccgacctcctctctgaccttgaggcaacattcagctgcctgaaagcgaagagcgtaaaactcaatcctgagaagtgtgtcttcggagtcccccgaggcatgctcttagggatcattgtctccgaacagggaatcgaagccaacccggagaaaatcgcggccatcaccaacatggggcccatcaaagatttgaaaggagtacaaagggtcatgcgatgccttgcggctctaaaccgcttcatctcgcgccttggcgagaaagggttgcccttgtatcgcctcttaaggaaggccgagcgcttcacttggacccccgaggccgaagaagccctcggaaacttaaaggcactccttataaatgtgcccatcttggtgccccctgctgcgggagaagccctcttgatctacgtagccgcaaccactcaggtggtcagcaccgcgatcgtagtcgagagacaggaagaagggcatgcattgctcgtccagaggccagtctacttcatcagcgaagtgctatccgagaccaaagtccgctacccacaaatctag

SEQ ID NO: 7767 - DNA, 342 bp, Zea mays
  Peptide Sequence Number=SeqID_49546
atggcatccgcggtgttcggcttcgcggttgaggacaaagctgatgaagtcggcccacagatcagtggcagagaaaacgagaaaggcttgggcgaggaggtgaagcctgggcgcgcgcggggagaaaacgggagtgggccgaatggttggtctgcggcccagaggttgcacatctttacccacaagtcatgttacccatctgccaagagactgccaatcccatacacctctaccgaggaggcgaggcagggaatccctcgccggaccgccatcgcagcaaaatcaacccaaggacctccctacactgaccactcccttactgcccttgcccctttcgggtaa

SEQ ID NO: 7768 - DNA, 225 bp, Zea mays
  Peptide Sequence Number=SeqID_49547
atgaacagagtttttgacgccatcggctttgtctacaccgactaccgctacccgctgtggggacaggggaagaagagaaaggctgttgcttcggccaccccagttgagcctatgccaaagggcaaaaagttgaagagcactgaagagccggttataatgctgaagttaccttcagttaagttggttgagatgaaggctgataaggataaggggcttaattcttag

SEQ ID NO: 7769 - DNA, 240 bp, Zea mays
  Peptide Sequence Number=SeqID_49548
atggctcaccggagtttctctggcccgcccgagaccttctcacagccgttctaccctctctgtccgtggattcatggtctgttcaccaccactgagttcgtcgtggcgccctcttcccctctgcccatctccggcgaccctggagacaccctagcttgcgccagcctcaactccggtgaactcaccaccgcggagaggagtggcaccgcccgcagccgtctgtttccccggtcacaataa

SEQ ID NO: 7770 - DNA, 348 bp, Zea mays
  Peptide Sequence Number=SeqID_49549
atggaaggcctcgtcccgctgctctacaaggccatcaaggagcggcggagcaacgcgggcggccgccgtggctaccgcaccggaggtgccctcccctcctccgcgcccgtggacctggacgactccgagcagaggaggcagtggctgcagctgcaggagctgcggtccccggcccacgcggcggcagcggtggcggtggcggagaccgaggggtcgctgctgcaccggcggaacctgtcgctggaggagctggccggcgaggtgggattctcgcccgaccggcggctccgggtgccgctgcccaaggccaggagcgtccgcgccttcgcctgcatgggcgccgcctga

SEQ ID NO: 7771 - DNA, 147 bp, Zea mays
  Peptide Sequence Number=SeqID_49550
atgagggagatagatggtggcggacgcaaggttgtagaggggagtcagggcagcggcggggagctcatcctcttcctgctctatgatgcgctcaatggcagcgacataggtgtcctcgtcgagcagccccagccgatggcgatttga

SEQ ID NO: 7772 - DNA, 1449 bp, Zea mays
  Peptide Sequence Number=SeqID_49551
atggggaacacgccgtcgtgcataccgctggcgcccgcggggggcggcggcgcctcatcatcctcgtcggcggcggccaccaccaccaaggtgatccacgcagacggcgccgtcacgcggctggcgcgcccggtgcgcgcgtcggagctcatgctcgagcacccgggccagttcgtctgcgacccccgccgcctcgcggtcggctgccgcgtccccggcgtggccgccgccgagctcctccagccgcgccgcgcctacttcctcctgcccatggacatgctctactccgtgctcactgacgaggagatggccgcgctctccgagtcccactcccacgccgcgtcctcctggaagaggatcgctgccgccgcccgccgccaccacggacgcctgcggaggtccgggaaggacgaggcctgcggcggtggcgccagggtgtgcccgatgctcggcctgctcgagaccggcggtctcggcgcagataatagcaagcgtgatgaattacgcgccagccctgcaggcaagtcgggcggcggcggcgccgggttgaggcggcaccggtcgtggcagccggtgctggacaccatcgaggaggatactaaaatttgggacaggatgtgtctcccgcccctctgcccgcctccaccccttcatcccgatgctcaaaccagccagagccccacgccgacgtctgctccaggcccgacgaccacaaccctcccctccccagcgtcgggatccccctccccctccctctctccgccttcgttgcctgctagccgttccaacgcccagcgttggagcgatggtggtggcaaccatgatggtcggctgccttcttataaggatgtactcgtctcctcctcctccacccccttgccactcacccttgctggtgatgactgggtgacggtcgtcaatcgtcgtgctcgctggcgtcgtccttgcccgctgaagcctccacccaggcccgtccctgccgacctgcgtggaaagtgtttcaattgcttctccccctctcatcacgcggtggtgtgtcatcggccggtgaggtgcttcgtctgtaggctgctggggcaccgtgctcacatgtgcccacgccggcggacgacacctccgagaccacgacgttccaaggtgtggcgccctgtctcccacgctctgcctcccatggatacctcggactgcgctgctagcgatcatgagggtggcagcggtgctggctctagtggtggcgctggctcgggctctggtggcgggggacacaggcgcactcgccggggacatagacggcaaagggccagcagcgcggctggtactgatggtcatggtgacccttcggatgggctaccccccagccccctctggaggacgttcgtgccaattctgtgcccccttccccgcctcgtcgtttcatcaaacgcaccaggtggtatagatggccaataa

SEQ ID NO: 7773 - DNA, 564 bp, Zea mays
  Peptide Sequence Number=SeqID_49552
atggacatcacaagtaacatggacattgcaaaagtgatactcgagtgcgtagctcggagacaactgatcaagccaaggacggaggcaagaagagcttcgaggtaccaagtgcacgggagaaggtcaaggaggctgaggaacccaaagccaagggtgaagaagaaggcttgcaaagtcaaggccaagattcagctcagtctggtgcaccggacagtgtccggtggtgcaccagacagtgtccggtgcgccaggttgaactccgtcgaaaaggtcgctctcgggaggagtctggcgacgtacgtctataattcaccggactgtccggtggtgcaccggactgtccggcaccggacagtgtccggtggtgcaccggactgtccggtgcgccacccgacagaaggcaagatttgccttcctggattgcttccaacggctcctaggccccttgtgcctataaaagggacccctaggcgcctcaagcaaggacattttgagacaggatcttctattccgctgcaacctactcgaagggtcttctcattccactgcgtgctaagtctttga

SEQ ID NO: 7774 - DNA, 333 bp, Zea mays
  Peptide Sequence Number=SeqID_49553
atgggcgggtccgaagccgccacatgtccagagaaggtggcatactccaaagcatcaacagtgggttcggacccccacgggagagcgccagacccccggatatacaatctggacccccaaggttggtcccggacccccggacatacagtccagacccccaaggttggtctcggacctccacgtgtgcaagccggacccctggaatgggatcccgatcccccgtatggggtccgggcctcccacaggggggtcccaaggtcccaggacagaacatacctgggccttgaacaggacccaagcgggggtccagtaccgacatgtgtccagacctag

SEQ ID NO: 7775 - DNA, 171 bp, Zea mays
  Peptide Sequence Number=SeqID_49554
atgtggtttgacggcggagggagatctacggcgaggaatttccccgcgctccaacagtcccccacggttgacaacccctcaaacatgttccccaggagagttgtgtatcattatattaagaggaaaaaggtatcttcggactcaagtcggaatcgcagcggaccagaataa

SEQ ID NO: 7776 - DNA, 522 bp, Zea mays
  Peptide Sequence Number=SeqID_49555
gcaggccgggcgacgacgagccggttctcgggcggcgcaaagcacgaccgggcgatcacgattgggcgtatcatcttcgggaccggaacatcacgagacgagccagacgtggcgcagcggagcggaggcgaactcgccgtgacagccgaggtcggggacgacggcggctcgctggacgcggccgagtctagggcgggaaaggggcgtggcggctcgccggagcggggccgggcacgggggcggccgagccgaggcgcggcggggcggggccgggctcgccgggaccgggcggggtcggggtggggcggcgcgggggcggccaagccggggcacggcgagacggggccggccgaggtcggggcgcggcggggcgggctcgccgggcgactcgccgagcagccgggcgagcgagggagggggagggagaaggggaaaggagaggggaggagggggggcctcaccgcggcgggggagggcggcgcggcggcggcgctggggagggagcggcggcggcggcgctag

SEQ ID NO: 7777 - DNA, 474 bp, Zea mays
  Peptide Sequence Number=SeqID_49556
atggcccgatgctcgcccgcgaggaaccacgccttctggtgcacgacgacgtacgtgtacacctgggacagcgtgttcgcgacgcctcagaacaccagacaagtacatgggtgtcggcataaggatggcggcgccagtgaacgtgcagtcgcgcacttcgtcggcctccccagccaaagtcgtcagatcgagtgccacgcacgcgacgcggggtgggtgcgaggaggtgcgtggggagggggcatgggcgagcatcgcgacgatgatgctgctgcgtcacgggggcagaggcagggcaggcgaggctggttgtcgcggctgggagagagggtggggcatgtcgtggacgccgactatggaagtggggtgtcgaagatggaaactccacctatggatcgtcgacgatgtgcgaggatcgaaggtgggcgcggttggaagggggcggggatcacagtgtggcatgcagtgcgatga

SEQ ID NO: 7778 - DNA, 630 bp, Zea mays
  Peptide Sequence Number=SeqID_49557
atggcttctggtgccgccgccccggttaagatgtccactgcagtgactgcctgcatcctgctggcggtcctgctgcccatggcgcccaagctagtaatggatgacgtttgttccgaccgttgtggtaccctttgcgacacctttgctgatgggttctgcacgggcaacgccaacgaccccgggctttgtccaacggcattggaggagccatgcaagcccacgcttgtcacaggcggtggcttccatgcgggcccgcaactcagccagacaccccagcgcgactgtggtattatcgtcgctgccatgtgggctcgcactgtcagtcctccttcaacctcccatcgccgaatctgccgcgtggacttccttcctcgtatctcgctccggttgttgggactccccgaaaaccccgcctgtgacggccattgggggggtgacagcctcgcttcgctaggctataaaatcgtcccgcgccactccttagaccccccatcgaaagaacccgaggacctcaccagagtacttcatcatcagatcattgtgcgttcatgggcatgtgactgggtgttcggacatggcaccgccgtgctggagtcctatgcagctccggccattgccgtcgagtattag

SEQ ID NO: 7779 - DNA, 318 bp, Zea mays
  Peptide Sequence Number=SeqID_49558
atggcttctggtgccgccgccccggttaagatgtccactgcagtgactgcctgcatcctgctggcggtcctgctgcccatggcgcccaagctagtaatgggtgattgttccggcagttgtgttaccctttgcgacacctttgctgatgggttctgcacgggcaacgccgaccccgccttttgtccaccggaagtgcaggagcaatgcaagcccacgaataaaggtgagtgcaagagcagccagcaggcctcttccccatgcatacgcacactgcagcgcgagctgagggaggaagcatgcaataagcttccacggtga

SEQ ID NO: 7780 - DNA, 312 bp, Zea mays
  Peptide Sequence Number=SeqID_49559
atgccgtggacgacagtccacatcctcgtcttcgctatcgtcccattctcgaccatccgcccaagagatagagattgtggtgttgcgtcagcaggcagattatcatcaatcagttttgaggcaacaaatggagtaccagagcaactggaacaacaagcgggtgtctcgatgccaacatatatatgggatgccacctccggactttgcactgccgccgccaatgctgtcgcctccacctccaccacaattccctgtgtgaatagccttatgtccgacgcctttgctaagccgtcagacataaggttcccttaa

SEQ ID NO: 7781 - DNA, 150 bp, Zea mays
  Peptide Sequence Number=SeqID_49560
atgtccgttgcctcgtgtgccagtgtgttcgccaggccctctggacccgttctagccctcctcggtaaccccagcccgcctggtgatcgcgtctgcctcgtctccggcgacctcaccgccgtgaaggagacaacgccggccaccaagtag

SEQ ID NO: 7782 - DNA, 288 bp, Zea mays
  Peptide Sequence Number=SeqID_49561
atggcgtggccgcggcccgcggtcggtctggactccgggctggcgcgaccggcggatgctggccgcgtccctcgcgcaggccgccgacgcctgctggctcgatcaggctcctctgttacatgtgattcagagtttggactttggagtagtcacatgcacaactgttaccgtgccaagtctgaagaagccatggatgagtgcaagggttggaaggaagaatgggggtggagtatgagtatgatccgcatccgaagtgcggccataggactaggaggggacctcccctag

SEQ ID NO: 7783 - DNA, 2384 bp, Zea mays
  Peptide Sequence Number=SeqID_49562
cggcggccagcgcggcagactcgtcatcaggctgctggcccaagacatgcggggacctcaatgtcacctacccgttctgggtggaggagcccgtccggcccccgtgcggaccgccgtccttccagctcatgtgcaacggcagccgcgcgttcctgagcagatccgtctaccaggcctaccaggtgctcggcatcttccccgagaacaactccttccacgtggtggaccacaacttcccgctcgtcaccggctgcccagcgccaacgatgaacatctcgcttcccggggcattcgtatttagcagagccaacaaagagctgctcttccttgggaagtgcacggggttcccgccggcggagtcggccgggtttcgcagcctgccttgcgacaacagctcctttgtccggctcggcgacggccggaatttctccagccaaagcatccagggcggcgtgccacaaggctgtctgttcacagtattgccgactctcggggctcctgatggaaatggggacgactacgtcgccagcatgaagaatgggtttctcgtggattgggaagcggtgccaggtgattgtcccaagtgcatggcacgcggcggggaatgcacgtacggcggtcccgacgccgagttcgcctgtgattgctccggtggcaagcaaaaactggagttttttctatgcaagaagaccagcagtgccatagaagagaacattgaggccctaatattagcacatggatcactagctccaaaaaggtacaggtactcagaagtaacaaagataacatcttctcttaatattaagcttggggaaggtggttatggcatggttttcaagggaaggctagatgatggtcgtctagttgcagtgaaattcctgcatgactccaaaggtgacggtgaggagtttgtgaacgaggttatgagtattggcaggacatcacacattaatatcgttagcttatttgggttttgtttggaaggctcaaagcgggccctaatatatgagtatatgtcaaatggttctttggataagtatatatacacagagaatccgaaggcagttttaggatgggataagctctataccatagcaattgggattgctagagggttggaatacttgcaccacagttgtaatacacgcatagtccatttcgacatcaagcctcaaaatatccttctggatcagaactttcacccaaagattgctgattttggtttggccaagttgtgtcatatgaaagagagcaagctttctatgactggtgccagaggtacgcctgggttcatagctcctgaagtgcactctcggacattcggggttgtttcaacaaaagcagacgtttatagttatggaatgatgctgctagagatggttggaggcagaaaaaatgttaactcagcggctcaagagtcaagtgaaaagtattttccacattggatttacgaccactttggccaagaggatggactgcaggcgtgtgaggtcacacgtgaaaatgaagggatcgcaaaaaaactgagtgtgattggcctatcgtgcatccaaatattaccaatgcatcgccctaccatcggaaaggtcatggaaatgttcgagagaggatcggatgaactggacatgccaccaaggcaaaacttcagccaaatattcgaagatccagtacacagtttgaatgcggaaaccatgagcatgattagtggcaccaaagcaaaagcttatagtgaagtgctaaagatgaaggagataagcgtcactgccgtggtggtggtggcggcgctgctgctccacctctccgccttgccgcgcttaggcttagccacggccacggctgacacaaaccagaccagcggcaacgacacgagctgcacgtcggcgagatgcgggaacctgagcgtcacgtacccgttctcgctcgccggcgtgcagccgatctactgcggcttcccgtcggtccttccagatgacatgcgacgacgccaaccgcacctacctcagcaggacgttcagggatcgcctctacagcgtcctccacatattctacggcaacagccaacaggtctctggtggtcgccgtcgaggccacttttgccggcgacggcgaatgccgcgtcccggacttcaacgtgtctgccagcctcgacctcttgcccgtcgacatcagtgccacaaacaagaagctcactttcgtctacggctgcgatgtccctccgaggctacgacttcaaccgacatgcgacaacacgtcaacactactctgggagcgtacacctccgacgacgccgagccgtccctcggttcgacgaactgcagcagcgtgagcgtgccgtgcatgtgcatctgccgcgacgggaggccctgcccacgttctcgaggtaa

SEQ ID NO: 7784 - DNA, 696 bp, Zea mays
  Peptide Sequence Number=SeqID_49563
atggcctcgacctcgttcgtctggtcggtgtggaccgtcgtgtcgctgacgctaacgcttgcctcggcatcagcagacgaccaagagggaggagcacactgcccgcccgtgctatgcggcggcgtgaagatcgccttcccgttcggggtcgtcccggagcaggcgacggccaccaactgcggcgcaatcgggttccaggtccgctgcgtcaatggcacgccgtacctcggatacagccggtacgaccactggctccaggtcctcagcgtcttctacaacaacgcctccttgatcgtcgccgactctcacgaactcgagacgctcggagcctcggacggcggcggctccgttgtctgccgcatccccgagaacaacagctccaccaaggtcggcctcccgttctccatcagccctctcaaccaggacctcatcctgtacaactgcaccaaggcgccggcgccggacgaggaggggcttgtggagatgacgagatgcggcaaccgcactttcgcccgcatcggagggcgttacggcgagccggacggcggcggatactccttggacggctgcggtgccactgtcgtgcccgtgcttgtaaaggacgatggcaaggcgaacgcgagcgactacgagcaactcataagtggcggcttcctcttgacatggcagtggcagacaagaaaccgaccagtatag

SEQ ID NO: 7785 - DNA, 990 bp, Zea mays
  Peptide Sequence Number=SeqID_49564
atggaggggcggtacaacacgccgacggcggcgtgggggagaggagcacgtaagctctctgcggcgaggcacgcccgaaccagtgttgcggttgtgataatcgcaaatatatctcgaaataaaattgcatttgcgaacctggctgaacaggagacaaccagccgtcccgccagaacgaggcggcagctcgtgcgacgccaccgccgcggcgggcgcatccatgaatgccacctccaaccaaacccacctacgacagaattccgtgggagaaattccgtcgggcgctcccacacgcacgcgaaagagggaacaactgccgagatttcgtccgcagattccgctccaaatcacccgggtctaggccgccaacgcggcaacgccgccgctgccacctcgagggcgcggaacctggccgcagcaccagccaccatccggcaaggcagagctcggtggtgcgagtgcgccgcgggatgcctggccgccgccgccccgaccactctggcgagaacgacgccggagcgagcgcaggcaagacccgcgctgggccggccgccgccgcctcgggcgcgcacgctgctacatcacccagtgcacaagtctgggacttggacctcttgcgccattcgccgccccagccccctccactgcctctctcccgctgacgacaacgctcctgcaacgcaacgcaccgcccctgccctcgccgacgctgacgtcctgctgcgccgcccggtccagctctatgcgacggactgcggcgctggcaggcccacggccgccaggaggaggtggtcgtctccagcagtctcggcaggaggaggctcctcctcaacgccagaattgaagcacagtcgtggcgtggcagcagtcgcgggatgttctgctgggagtgcacgaggagatccagagcatgatgcctgcgaaagcaggcttcccttgcggctcagaatcccgcatcagaaccttactatagttgtaaaattttactga

SEQ ID NO: 7786 - DNA, 2037 bp, Zea mays
  Peptide Sequence Number=SeqID_49565
atgggttgcggctccgtccttgtcgcggcgcggctctccctcgtgtcctgggtctggatggctgcatggccgtggcagtggcactgccacccggtgccacccgtgacgctctgccccccgacgcgacgcggcggcgtgagcatcgccctcccgttcgggctcgtccccgaccacgcgatggaggccagctgcggggtgatcgggttccacggcggatgcaacgccaccgtcgtgcccatgctcgcgaggaccggcgacgtggacccagcgaactacagggagttcgtccgtgagggattcctcttgacatggcaactgccgccgcggtcgtcgccgccatcaccagccggcgttgaccacgaccggtcaaaggcgttctccccttcatcatcatatccgtcatccgggcgcctcgctggcttgttccattccgtcttcgggtccggaggctgctggcccaagacatgcgggcacctcaacgtcacctacccgttctgggtggaggagcccgggcgggccccgtgcggaccgccgtccttccagctcaagtgcaacggcagcggcgcgttcctgagcatatccgtctaccaggcctaccaggtgctcgacatcttccccgagaacagctccttccacgtggtggaccacaacctcccgctcgccaccggctgcccggcgccgacgatgaacatctcgctcttctcgcccgggacattcgtcttcagcgggctcaacagggagctgctcttcctggggaagtgcacggggttcccgccggcggagtcggccgggtttcgcagcctgccttgcgacaacagctcctttgtccggctcggcgacggccggaatttctcgagccagggcatccagggcggcgtcccgcacggctgtctcttcacagtggtgccggttctcggggctcctgatggaaatggggacgacgacgactacgtcgccagcatgaggaatgggttcctcgtggattggaaagcggtgccaggggattgtcccaagtgcatggcacgcggcggggaatgcacgtacggcggtcccgacgccgagttcgcctgtgattgctccggtggcaagtgcgggaaactccgggacgggagagtcgttgcggtgaaacgcctgtacaagaacaactacaaacgggtggagcagttcataaacgaggtagacattttgtcccgcctcctccaccagaacctggtcatcctctatggctgcacatcccgtagcagccgcgacctcatgctcgtgtacgagttcatccccaacggaacagtcgcggaccatgtccacggatcccgtgcgtcggagcgcggcctcacgtggcctcgaaggatgagcatcgccatagaaacagctgaggcgctggcgtacctccacgcggtcgagatcatacaccgtgacgtgaagaccaacaacatactgctggacaacagcttccacgtgaaggtcgccgactttgggctgtcgcgcctgtaccctcctgaagtcacccacgtgtcgaccgtcccacagggcacgccgggctacgtcgacccggtgtaccaccagtgctacaagctgaccgagaagagcgacgtgtacagcttcggcgtcgtgctggtcgagctcgtgtcctctaagccagccgtcgacatgggcaggagccacagcgagatcaacctggccaacatggctctcaacagaatccagaaccacgaggtgggccagctggtcgaccctgagctcgggtacgagactgacggtgagacgaagagatccatagatctcgtggctgagctggcgttccggtgcttgcagctagaaagggattcacggccgtcgatgaaggaagtggtggaggccctgaaccgtatcaggaacggggattcactggagaataacaagacggacaggagctcctcgtctcctaaggaagacgcacgcctgctgacgagtagcatacagtactctcctgactcggtaatccacagattccatagccaatcaaccacgcactcggcagcgtcaaatgctagcgggtga

SEQ ID NO: 7787 - DNA, 393 bp, Zea mays
  Peptide Sequence Number=SeqID_49566
atgtcgccgactgtagcaaaatggttcgtgccagatgcacgagggacaatggacagcaggaggagttctcctctgagtccgaggggtctccggctcccatccctctgcgtgagtcgtctgatggggcttgccgccgaggtctggacttacatccgggccgtcgagcgctccgggctcgcgagctcggatgagtcggagtactcctcgaacgaggaggactcgtccgaggaggacggtggcggcgacggcgaaggcgacgacgacgacgatgacgacgacgacggaggcgatggcggcggcgacgacggtgatgacggcagcaggggcagcaacggaagcagcaggggcggcagcggcggcggcggcaggggcggcaacaaggccagtggctaa

SEQ ID NO: 7788 - DNA, 438 bp, Zea mays
  Peptide Sequence Number=SeqID_49567
atgaacgagatcaaaggcctgagcagccctggatgtggaagtggaaaatggaagacgagaatgatgaccgagcggacaaggatgacagaggcgctcagagggtccccggttacaagagccaaccgttggggtttggagcgtttgaccgttgaagtcttttgtcctattgccgcaccgtacagtccgtcgaccattggcgaagttggtcgttgctccgttcgcacaccggacagtctaatgaattatagcggacgcacgctgagaaaacccgagagcgaccagttcatgaggtgcctcggcttaggcaccggacaatgtccggtgcgccgctggatgcaccatttacttgtttttgccccatactttgtagagttccccaactcattttctttgttggtttatgttgaactttatgcacctgagataaatgacaactag

SEQ ID NO: 7789 - DNA, 375 bp, Zea mays
  Peptide Sequence Number=SeqID_49568
atggagcaccgccacaccattagaaaccagagagggagaagaaggagaaggtcgtacccagctcctagcagccagcgagctccacccttgcctacacgctctgtctttctcccatgcgcgtcgtggcacagctgccctgaccgcgggcctccgcctccctgcaccatgggtgtcgagttcagcccagtccctgtgcagcacgcgtctgctgttgctgactcctgtcgcgggccaccgccactcgcagctccggcgagcaccaccaccttcacccggccgcccgcaagcctcaccgtgcatccagcgctgccgcgggggtcacgccggcgtgctcatctcggcagctgcacgggtgccgctgttctcagagcctag

SEQ ID NO: 7790 - DNA, 414 bp, Zea mays
  Peptide Sequence Number=SeqID_49569
atggtgcagggaggcgaaggcccgcggtcagggcagctgtgccacgacacgcatgggaggaagacagagcgtgtaggcaagggtggagctcgctggctgctaggagctgagtacgaccttctccttcttctccctctctggtttctaatggtgtggcggtgctccatctttctctgcttgctatcgcttgacgatggcgctcggcggatggctgcatcgaggagaggcggcgtgctcatatatatgccccagcttaatcccaactacccacgaggaacccgcatcaacacagttggcagcaacaataggcgtagtgcacgcgatttcgttgagatccgattgtccgaagggaaaaacacagctacactgtggcccacccgtcatacacgggaaaagctacatatgcaaggatga

SEQ ID NO: 7791 - DNA, 663 bp, Zea mays
  Peptide Sequence Number=SeqID_49570
atgactagtgtgaagtgctgccttcgtgtcctggaacagagaaattcttatttgcagaagtttgcagttaatctgatttccttttcgcatcttcttttcgtcgtggttggattccattcactgacctcacggtactcccagcagtactgtgtcctcattgtgccagagctgatccagcagatgtgggactccaagaacgtgatgtgtgctaagatggacaagagtagctgctatgaggtggttcttcttggcaccataactagggtccaacaactgttacaggatctcttcaatggcaaggagctgtgcaagcacatcatcttcgatgagatggagtttagggaggtagagagtaacatgatttgtgtctgtttgcatgaggaggatcatgtgatcctttgggaaactccaagactagagaactggttttgcaggaccaagatattcctcaagctgttgatcaacggccagaaatgtcagagctctctttgtggacagattttcatgcagcgaagacttgtttctttaatattgccttgcttggggacaagcaagttttggcgagggggcatatgtcatggccgatacctggacgcgggccagacctcacgccgtggttgctcaccaacggccaaggggaacggcgaacgtgacactctgtga

SEQ ID NO: 7792 - DNA, 378 bp, Zea mays
  Peptide Sequence Number=SeqID_49571
atggacgcggccgccgcggccctgcacgccgtcgcgggcgagcacgcaggtgcggaccgctgccaccgctgccgcaagcaggcacaagggcgcgggctgccaccgcgggcgcacgagcatgagcgccgccgccacacaggcccgcgggtgcgcaagcgcgtggacgccgacgccgcaccccggcttaacggtgtgccaccgccgtcgcaggttactcccgggggcggccccatctccttcctcgccggtccggcgcaggcccctgcccggctggacccgccctgccgcgtgccttccttcttcgttgccttcgttggatccgtcgctgccgcagcttcctcggccgggtccaccgctgtcgtgacattccccggctag

SEQ ID NO: 7793 - DNA, 522 bp, Zea mays
  Peptide Sequence Number=SeqID_49572
atgggatggcctcgtcttcctcctccaacgggagggcctaatggccctcgatccggccgccacgtcggccgtttggggggagagggtggggagtggcgcgacaagcctcggcgcgggcgctgcactgcgcagaaggtcggtactcggcgcggctcggccggcgaggcgcgggctcgacgcagcgccccaccccggcgctcggcgcgggcgcggacaagcccccagcgcgggcacggggaaggcctcaccctcggcgactgcggtcgcggctacgcgactcgacctcgggcgcggtcggacgtcctggctgcgggcacggcttccggccaggcgcccggcctagcggctggtagagcgcgcgctcggcaacggccggcgcatggcgcggccgcacgccccggcgtgggtggctccggccagggcacatgcctggcacgctcagcgcggcactcggccggcgcatggcgcggcttgcgcggcgccaactcgttggcgctgtccgatctcggacaaggcgcgtag

SEQ ID NO: 7794 - DNA, 273 bp, Zea mays
  Peptide Sequence Number=SeqID_49573
atggccgctcggccacatcgccggcaagtgggtacggcgtctgggcagaagagtgtcccaacttcatcccaggcgcgagatctttttcccagagttgttatccgcgcgtcaccgggcgcgaatcacaacgccgacgtgaatccgggcgcaagggtcaccgacggcgagggcaaaattctcatgaatttagaaatacaaagctccaaagttgtcctaattccactaaaatttagagttagctacttaggggttcttgggtctttttgcaattaa

SEQ ID NO: 7795 - DNA, 699 bp, Zea mays
  Peptide Sequence Number=SeqID_49574
atggcgcctcctgttgacgtggtcagtccgtgccctagtttaggcgaggtggaggctcctccgaggttgaggtcgagtccgtcttctaaggtcgaggtcgagttcgagcccccgggtcggacgaggcggagaccgtcggctgatgccaaggctgagtccgggccctggggtcgggcgaagcggagttcgtcgtcttccggggctgagcccgagtccgagccctggggtcgggcgaagcggagttcgtcgtcttccggggctgagcccgagtccgagccctggggtcgggcgaagcggagttcgtcgtcttccggggctgagcccgagtccgagccctggggtcgggcgaagcggagttcgtcgtcttccagggctgagcccgaggccaagccctggggtcgggcgaagcggagttcgtcgtcttccggggctgagctcgagtccgagccctggggtcgggcgaagcggagttcgtcgtcttccggggctgagcccgagtccgagccctggggtcgggcgaagcggagttccctatggcgcctaaggccaaacttggttgctgtcagcctcactctgtcgagtggcacagcagtcgggacggcgcaggcggcgctgtcctcttgtcagaccagtcagtggagcggcgaagtgactgcggtcacttcggctctgtcggctggagggcgtgcgtcaggataa

SEQ ID NO: 7796 - DNA, 789 bp, Zea mays
  Peptide Sequence Number=SeqID_49575
atggcttctcctgcgggggctaacagcggggcctcctcctcgagagggacacccttgcctttgcccttccccttccccgctgcggcgcacttcccctcccgcggcgccggtcccttcctgtcgcagcactatcacccgccctccacctccgacggcgacgatgaggtcgaagaagacgagggaagcatggacgacggcagcgccgaagaggatgatgccgagctgtccgacggaggggctctcggctcgccgcggcgacgcgccttctccgctccaggtattggacgtatggagataaatgggggaaatggagtgaggtcaatccaagaggggcagcaatggcatttatgtaaccatggaatcgagattgggcgtccatcaccaggaggggatgaacctggtaccatccccagagatgtgagagtggagaatgggcatggagttgttggaagaagagacgggggtcctgcatccagctattgggacctgttgagagcacacctctctgatcctttaacattaattggatggatggcaacgggtttgaaacccgcggtagaggttttagaaacttgcacctgtggctgtgggtttaatatcaaacccacacccgtgcccgttacctgcgacagaggtgttctcatggatgatgcattgattttatcatgtggccattcatatggaagtagtggaatgcaacatgtctacagaatgaaagcttgtggtaagtgtggcatgccaattactgaggccgccattcgaccaaacttgggtatggatctaaactga

SEQ ID NO: 7797 - DNA, 666 bp, Zea mays
  Peptide Sequence Number=SeqID_49576
atgacgttcaagcggaggaacggcggacgcaacaagcacgggcgcggccacgtcaagtacatacgctgctccaactgcgccaagtgctgtccaaagctttgcgtttactatgacattgtaatattggaaccaaatccagcgttctgcgttcttggatattttgacctgcgttgcaatatttgggctcaattatctgtcgaaactgttgtggaaaatgataaggctatcaagcggttcttggtgaggaacattgttgagcaggctgctgtgagggacgtgcaggaggcctgtgtgcatgatggatatgttcttcccaaattgtacgcaaaggttcatcactgtgtctcatgcgcaatccatgcgcacattgttcgtgttcgctctcgtgagaacaggaggaaccgtcggtcattattgcttgaatgcacacattggtatataatttcgacacattttggcatgccactatttgtccagtttcctgtagtattgcatgtttctttggtacttgataaagctatttctgttgtcttgatgatggcccaaggccaggtcagggcccaccgcgcccaggtgctgctgccacagcagctccccctgctgccgctcctcgtgcctaagttcaggaatgcgattcggggcttagttctctcacctatgggataa

SEQ ID NO: 7798 - DNA, 516 bp, Zea mays
  Peptide Sequence Number=SeqID_49577
atgccggggcggagtccgagccctggggtcgggcgaagcggagttcgtcgtcttctggggttgagcccaagtccgagccctaggtcgggcgaggcggagatcgtcgtcttctgggacttagcccgagtccgagccctgggtcgggcggagttcgccgtcttccgggacttagcccgagtccgagccctgggtcgggcggagttcgccgtcttccgggacttagcccgagtccgagccctgggtcgggcggagttcgccgtcttccgggacttagcccgagtccgagccctgggtcgggcggagttcgccgtcttccgggacttaagcttcctatggtgccttcgaccgggcctggttgcctgtcagcctcactctgtcgagtggcaccgcagtcggagcggcgcaggcggcgctgtctttctgtcaggctggtcagtggagcggcgaagtgacggcggtcactttggctctgggggcgcgcgtcaggataaaggtgtcaggccacctttgcattaa

SEQ ID NO: 7799 - DNA, 1179 bp, Zea mays
  Peptide Sequence Number=SeqID_49578
atgtcagtacccgccgctgctaccgaaaagcaggttcagtgcacggggacacggccacaaccagcactcacacccgacagcgacggcggcaccacgcggccccgggacggagaaaggagtcaatcagccaaagccacccaccgcttttacccaccgatcggcgttgccgccgctagcattgtcggcttcagctccatccaaatccaccgccagcaagcaagcaagcaagccggcgccatgggtctgccgatgaggagggagagggacgcggaggcggagctgaacctgccgccggggttccggttccaccccaccgacgacgagctggtggagcactacctgtgccgcaaggcggcggggcagcgcctccccgtgcccatcatcgccgaggtggacctgtacaggttcgacccctgggacctgccggagcgcgcgctcttcggggcccgcgagtggtacttcttcacgcccagggaccgcaagtaccccaacggctcccgccccaaccgcgccgccggcaacgggtactggaaggccaccggcgccgacaagcccgtcgcgccgcgcggccgcacgctcgggatcaagaaggcgctcgtcttctacgccggcaaggcgccgcgcggggtcaagacggactggatcatgcacgagtacaggctcgccgacgccggccgcgccgccgccgccaagaaggggtcgcttaggttggatgactggggtgctgtgccggctgtacaacaagaagaacgagtgggagaagatgcagctggggaagaccgccgtcgccgggcgtcggcgccaccaaggaggaggcgatggacatggtcgacctcgcacacgcactcccactcccaatcacactcgcactcgtggggcgagacgcgcacgccagagtcggagatcgtggacaacgacccgttcccggagctggactcgttcccggcgttccaggacccggcgatgatgatgacggtgcccaaggaggagcaggtggacggctgcagcgccaagagcggcaacctgttcgtggacctcagctacgacgacatccagggcatgtacagcggcctcgacatgctgccgccgcccggggaggacttctactcctcgctcttcgcgtctcccagggtcaaggggaaccagcccgccggagccgccgggttgggacagttctga

SEQ ID NO: 7800 - DNA, 1137 bp, Zea mays
  Peptide Sequence Number=SeqID_49579
atggcgaagccgccgcgggcgccgaggcccaaactgcagacgccgcgggcgccggcccggcggctcctcggcctcggcgggctgggcgtcgcggcggcggcgtacgtgggcgtggactacttgcggcacctctcgccggcgtggcacggccggctgcagccggcgctgtgggcggtgctggcgctcgcggccgccgcgcgcgcgccgttctaccgccactggtccgcggagctgcgcgccgcactgcccttcctgggatccatcgccttcatgctcgccgccttcctctgcgaggccatctctgttcgcttcgtctccgccgtcatgggactgcactggcacaggtcgctcctcctcatcttgcctcggcttccttcacctagtgatggcttgctgctttgggttctgttcgactgcatcaaagctcctggtcttggtattgccacaagatacatgttcactatggcaattggtcgtaaatattatgttccatatgcttctgactcgaatgctattcgcagagtcataacacaggatatggcatatgctgctgttcaagcttacccagatgaatataagcccgattggggacgtatgagcttccttgtagacattttgagaccaactcctggagaagggccttcgtggtaccatcttctgaagaaagctagtggcggctgcaatgaccttatgtacagtggacatatgcttgttgctgtcctgactgcaatggcgtggacggaagcatacgggggctggatctctgtcgcgatatggctcctcgtcctgcacagcgcgcagagggaggtacgcgagcggcaccactacagcgtggactgcgtcgccgcgatctacgttggcgtcctcctgtggaggatgacggggttcatctggtccgccagagacctggcccgagctagacggctagccaagctcgaggaggtccagagcaggctggtccacgccgccaaggacagcgacatcgatgagatcagaggcctgctgaaggaggtggagctatccggccaggagaggcagggcttctcgcagagggcgatcctggccttcgccgcaggaacgatcatcttcaccttgtcttgtgtcctcatcgccttcacagctactagcgacggctga

SEQ ID NO: 7801 - DNA, 444 bp, Zea mays
  Peptide Sequence Number=SeqID_49580
atgttgggccagccctcggtgtcactggtgtcgtcgaccaagcccacggtgaccaggccactaaaggtcggtgtcgtgctctctggtggacagacgccgggcggccacaatgtcatctacgacatctttagagatcctatatttttttgtatgatgcaaggactgaccccaacaccagtttttccgcttattgttggagtttatgtggttgcactcgcgatcagccgatcactatgccaaggtttgctgctatcttacagtgatgaatctcatggtgcaacctttggtaactatgggttaaatgacttgtaccagagagatgttttctgtgctgattataaagaggaactaggaaaaaggagactaggagagctggatatgaaaaaggactatgaatatgcgagtgttaacccaattgctcatagggacatcactctctactga

SEQ ID NO: 7802 - DNA, 204 bp, Zea mays
  Peptide Sequence Number=SeqID_49581
atggagaaagttggaaaggaaagagatccacacattcaaggaaacagagcagaggaaaatatagaaagagatccacctcagctaaaattacggagattggccagtgataaggctgctggcaaggcatggtacaagaccatggtctcggacagcgactacaccgagtttaagaacttctcaaagtggctcggcgtgactcagtga

SEQ ID NO: 7803 - DNA, 1215 bp, Zea mays
  Peptide Sequence Number=SeqID_49582
atggtcgaggcgccggccgtcgtggtggtggtgcgggcgtacgacgccgcgcgcgaccgcgtcggcgtggaggaggtggagcgcgcgtgcgaggtcgggtgcagcggcggcggcaagatgtgcctcttcacggacctcctcggcgacccgctctgccgcattcgccactcgccggactccctcatgctggtcgcagagacagcaaccggccccaacagcacggagatcgccggagtcgtccgcggctgcgtcaagaccgtcgtctctgctggcaccaccaccacccagcaggctaataaggacgaccccatctacaccaaggttggctacatcctcggcctccgcgtctcgcccagccaccggaggaaaggggtggggaagaagctggtggatcgtatggaggagtggttccggcaaaggggggccgagtactcgtacatggcgacggagcaggacaacgaggcgtcggtgcggctgttcacgggccgctgcggctacgccaagttccgcacgccgtccgtgctggtgcacccggtgttccggcacgccctgaggccgtcccggagcgcggccatcgtggccctggagccgcgggaggcggagctgctgtaccgctggcacttcgccggcgtggagttcttccccgccgacatcggcgccgtgctatccaacgcgctgtcgctgggcacgttcctggcgctgccgtcgtcgccggcgcggtgggagggcgcggaggcgttcgtggcggcgccgccggcgtcgtgggccgtgctgagcgtgtggaactgcatggacgccttccggctggaggtgcgcggggcgccgcgcctgatgcgcgccgcggcgggcgccacgcggctggtggaccgcgcggcgccgtggctcgggatcccctccatccccaacctgttcgcgccgttcgggctctacttcctctacggcctgggcggcgccgggcccgacgcgcccaggctcgcccgcgcgctgtgccgcagcgcgcacaacatggcgcgcgacggcgggtgcggcgtggtggccaccgaggtcggcgcctgcgagcccgtccgcgccggggtgccgcactgggcgcggctaggcgccgaggacctctggtgcatcaagcggctcgcggacggctacggctccggcccgctcggcgactggaccaaggcgccggccagacgctccatattcatcgacccgagggagttttag

SEQ ID NO: 7804 - DNA, 279 bp, Zea mays
  Peptide Sequence Number=SeqID_49583
atggaagccgtttgcggaaatttgaaacgtttggttaatctttctgagacctactcctacgcctactctggtcgtgggctcgtggccttcgtttgtcgtcgagtcacatatggcgagctcagttcgagcggtgcgcctgttaaggtgctgcttgagattaatggcgagtcgcttgaggtgtcgcttttccgccttgcgcccgacgtcgacaacctcgccctggccgagcttgctagaaggcagcaggatgtcatctcaatcgaggggcctaggctttag

SEQ ID NO: 7805 - DNA, 207 bp, Zea mays
  Peptide Sequence Number=SeqID_49584
atggcgtgggcgacccgccaccggtcccgcgacggtggtcagttcgctctacgatgggatggattcccggagctgccatttggagcaccagtgctgctgcccaacatggcaagtccaaaagcaggagaattccgatccacccttccaactgatgatctcacgaggttgacgagtcgtgaaatggttcggctacatgtgctgggctaa

SEQ ID NO: 7806 - DNA, 957 bp, Zea mays
  Peptide Sequence Number=SeqID_49585
atgctcgcgggcctgctcgtggagctccgcgacaccacccgcctcgtcgcgttcgtgaccgaccagttcgggataaccttcttcaccgctgcgcatgacgccagtgtgaccgcacagtgcctcttcatgcccatgaacctccatgcgctctcacttgtcctccacctccccgagcaggcctccttcatgcccggcgagtttcgggaccttgccgagccggtgcgcctgcccgactgcgtgtccatcccggggcccaacatcgtcttgccattccagtccctgtggacgcggacagggccgggactgccctcgacgccgtcggtggcggtcgagacgcgggcagagagggcccgacggaggtggagcagcggaaggtgcatgcgggcaggagcggaagggcgagggcgcccagggaggcgtggagcacgggcatcggccccgacagtattccgagcatcgcgacggcggggtgggggaatggacctatgcggggcggtcgcagagtgtgggcgaagaagggggtggttgtggacgagacggagcgacggcggggtgggggaatggacctatgcggatgcggggggagcgggacgcggctgggggagcggggcacgcgggctgccatggattggtgcaatttgtgggctcgcgtcgcacaaggaaagggggagcggggcgcgggggaagccgacgctgttgggggagcggggcaaggctgccacgccgtcccacgatttgtgggcattctcgccgatctcgcgtcgcgcaaggaaaggggagccgggcgcgcgggcagccatggatggaagctggcgctgctcccgcggctgggggagcggggcacgcgggctgccggagcgggggactggtttgtggtctcgcgtcgcgcagaaaggcagaatgcgatgcaaaggcagaaccgtgcaccaaagaaaatatggacgtctacactactga

SEQ ID NO: 7807 - DNA, 372 bp, Zea mays
  Peptide Sequence Number=SeqID_49586
atgagcggtgtcatgatgatcccttttttaccatgtcgccacgataactatctcaagacgaccaaggtaaaaatcgaaactcaccccgactcctcacgtagagcgagggatggaccaacaaagctcccaatgagccgcaagcttggtgaccgggccataggtcatttgctcgtcttcacgtccccctttattggcaagaccgaccaaagggccgatacgagattgaataaagaagggctcaatgagatgcccccagcgggtcgagccccccagcgggactgctcgttgacactcaaccccaccaaagggtggtcagatctcacttggataacccgcttgcagctctgtgacctccttccctgcgccgactag

SEQ ID NO: 7808 - DNA, 357 bp, Zea mays
  Peptide Sequence Number=SeqID_49587
atgaccgttggtgaaggcttctgtcgtatggcgcaccgaacactgtccggtgcgccagccacgtcaccaggccgttgggttccgaccgttggagcttctgacaacggggccaccggacagtccggtggtgcatcggacaggaggtcgtctgatccctgtagtttgatggggcagagagctgaggctgggctcgggagcatgagtgtgtgcccgagccctagcctatacagaggtgcggatgtcgagttgaagtggttattacagtgctcggcatggtctcttgcgagattcacgagagagtatatggcatttaatgcgcttctactagggcagttggtcgaagccgagctcgggtga

SEQ ID NO: 7809 - DNA, 756 bp, Zea mays
  Peptide Sequence Number=SeqID_49588
atgggtgaaggtacttttggtcaagtactggaatgctgggaccgagaaagcaaagagatggtggctattaaaattgttcgctctgtaaagaaatacagtgatgcagcaatgatagaaattgatgtcctgcagaagcttgcaaaaaatgatgctgcaggcaaacattgtgttcaaatacggaactggtttgactatcgtagccatatttgtattctaattcatactgatctgaaaccagagaacatcctcctcgtttcttcagattatgtcaagttacctgatcccaaggacggatcattctcaaggaaactgccaaaatcaagtgccattaaattgattgactttggaagtgcagcataccatcaccaggatcgcagttacattgtatctaccagacactatcgcgcccctgaagttattttgggacatggatggagctatccatgtgatatctggagtgttggttgtatacttgttgagctttgctcgttgtttgccttccgtatactcagccagcatgcggagaagtacgtcagaaaaggaggattgaactggccacaagcaataacaacagtagagagcgttagagctgttctcaaactgcctcgccttcagaacctggtgatgcagcatgtggatcactctgcgggggacttcattgaccttctgaagcgcctcttagcctatgagccctcgggaaggttgactgctcaagaagcgttgggccatgtcttctttaccagataccggcaataa

SEQ ID NO: 7810 - DNA, 530 bp, Zea mays
  Peptide Sequence Number=SeqID_49589
caccggactgtccggtatgccaagcggagcaacggtcgtccacgccaacggtcgtctgcaacgctatagtgaacagtgaacagcgcacctacgcgcagaagtcagagcaggcgccagaaggcgcactagacagtgaacaggacctgtccggatcgggggaattccaggaggcaggcgagcgcagcatcggcgaaccccgattcctcaaacagaaactaggcgtgcgccgcatttgcgagatgagagccactgcgccggccgccaggagatcatcgtgcgtccgtgctgggagccaggtgccccagcccttccaccttccacggctccacgccttcgtttgcagcgcgcagcgcgcccggccaccgccctccgccggcgcttcgcctccgcggccgagcggcaccgcccaggccccaggcacccacaccggcactgcccaggccaggccttggctctgtctctacggccagcttgtgtatctgttagtcagctctctcacctacagcttccgtagcctcctaggcttgtag

SEQ ID NO: 7811 - DNA, 636 bp, Zea mays
  Peptide Sequence Number=SeqID_49590
atgagggacgccgcggtggtcgtggcggtgcccgggcccggggccgcgacaagaggaggaggagcgaagccgggggcagccggggcggcgccgtgcgcggcgtgcaagctgctgcggcggcggtgcgcggccggctgcgtcttcgcgccctacttcccgcccggggagccgcacaagttcgccagcgtgcacaaggtcttcggcgccagcaatgtcagcaagctgctgcaggagatcccggcgcagcaccgaggggacgcggtgagcagcatggtgtacgaggccaacgcgcgcgtcagggacccggtgtacggctgcgcgggcgccgtctcgtcgctgcagcagcgggtggaggcgctgcaggcgcagctggcgctggcgcaggccgaggtggtccgcctcaggatgagcaacgactacgtcctgcgccgcctcaaggcggccggcgccggcgccggcgccggcgggggcagcagcagcagctacgccggctcgccgtcgtccatgtcctcgctcaagaccgcggcggcggcggagccggacgcgcgctgcagggccactacgccggagctgctggtgctggacatggtcgtggaccagcccggcatggacgacgcccacttctggtcctactag

SEQ ID NO: 7812 - DNA, 528 bp, Zea mays
  Peptide Sequence Number=SeqID_49591
atggcgtgggttttccctccccttatccctctcctctgggctcctcctcggccacagccccagatagaatccgcagatcctctgtggtctcgggcatcttcgcagaacgaggcacacaggatgggcggaagaagaacccagccgccgccgtcgttcttgctggaggggccagcttcgggggagctcctcttccccggtgcacgtggaaagaccatcgccatggccagaaacgaccgcttcggtcgattcaaccctggggcgaccctacggccttggcatgtggaccttggggcttcgcttgatccccgcggttgtatgcgtggcctctccggtggcgattatccactgggatcaccgcgattgctcgtcaacttcatccattgccacagatccgtggtgaagccgtcgggtcacgcgggctgccctcttccagttgctgtaacagtcaccggcgtctgcgccgccgttagcttgggggcgctgccgctacagggcatccggttggggaagaatgacgccaatcgttga

SEQ ID NO: 7813 - DNA, 528 bp, Zea mays
  Peptide Sequence Number=SeqID_49592
atggcgtgggttttccctccccttatccctctcctctgggctcctcctcggccacagccccagatagaatccgcagatcctctgtggtctcgggcatcttcgcagaacgaggcacacaggatgggcggaagaagaacccagccgccgccgtcgttcttgctggaggggccagcttcgggggagctcctcttccccggtgcacgtggaaagaccatcgccatggccagaaacgaccgcttcggtcgattcaaccctggggcgaccctacggccttggcatgtggaccttggggcttcgcttgatccccgcggttgtatgcgtgtcctctccggtggcgattatccactgggatcaccgcgattgctcgtcaacttcatccattgccacagatccgtggtgaagccgtcgggtcacgcgggctgccctcttccagttgctgtaacagtcaccggcgtctgcgccgccgttagcttgggggcgctgccgctacagggcatccggttggggaagaatgacgccaatcgttga

SEQ ID NO: 7814 - DNA, 474 bp, Zea mays
  Peptide Sequence Number=SeqID_49593
atgaccttcccgctggtttgctactgctacgcggtgccgcgccccgtggccgcgctgctcaagctcctccacgccgccgtgctcgtgttcgtgctgctcctctccttcctcggcctctacgagttctcctacgaccccgaggatcacgcgccaccagccatcaacggcggccgccccaggccagaggcggtgaagcggcgcctcccgctcgtcgagttcctggagctggtggattcgtcgtcgtcaccgtcgtcggggctgggggcggagccgacgtgccgggtgtgcctcgagtggcttgaggccaaggacgaggtgcggcggctgggcaactgcacccacgcgttccacacgcgatgcatcgaccgctggatcgacctgggcgaggccggcggcgcgcggccggtacgcgcgcagatgccactgggcactggtgccggatgggggcagaccatgagaccaaccgtgaactag

SEQ ID NO: 7815 - DNA, 450 bp, Zea mays
  Peptide Sequence Number=SeqID_49594
atgccccgcctccccctctgcgctcgacttagcccgaccccgtccatcacgcaagcaacccccgcccccgatgccgatcagcgccgctcccccgttccctgcaccgcctctccctccgcgctcccgaccccgttcaccgtgcatgcaccccccgccctggacgccgatccgcgccgctcccaccgtcccggtcaaccacgagacgccgccaattgctcccccgatttggtaacgccgctcccgttccccgatttccgatgcacgctctctcgttccctgatttgcgccatctccaaggtcgacggatcatccaccgtcgcctcgctccccaaaatgtggcttgtgccacctccaaagtcggtgcatccaatgccgctgctgccccatctccaagctaaatggggcacgtacaagggtgctgagccccgacatacgggcccagggacataa

SEQ ID NO: 7816 - DNA, 876 bp, Zea mays
  Peptide Sequence Number=SeqID_49595
atggggaatgcttccccatccccgtccccgtttacccgtcgggggagaacttttccccatttacatcgccgtggggaagaaacttccccatccccatcccctaatagaggaattccccgcggggaatcggggatcgggtccccattgccatctctaagcccaaccgactggcgactgcaacgcgcaacctccgctattgatgtgcctgttgttgcagcttataaagaagcgcctgttgcaagcaagaattccacgcaggcagcagcacgcggctgcgctcgatcaggcatcagtgatgtgctaccacagcctaccgcgtatgtatcgccgatgagcaaccccagcttcgaccacagctacgagctccctctgcggcgaaacctcctgcttctgcgcgacctcctcgacctcctccgcttcatcgccggggtgatcctggaccgcctcggcgtcgcgccgtgccagggcgaggtgcatctgccaggacaggctttaggcggcgtcggcgagcatgtcaacgatgttgacttggaacgcctcctggaggcgatgctgtgggagaccgtgacgcggtcgctcacggctccacggtacaggcggcggcgggttgcgcagccggcggacgtccagctggacgcagaaggcgacgccgagggcgcggccgtctgcgcgatttgcttggcgggtctggaacagggagatttccaggcggtcgtggagctgtgcggctgctcgcacgcgtttcacgccgcctgcatcgatgcttgggtccgcagtggcgacggtgcggccacctgcccgctgtgccgcgcgcccatgttgcccacggcgtgggacgacgtgcagagttcgttcggcgctcgccggggtgactga

SEQ ID NO: 7817 - DNA, 318 bp, Zea mays
  Peptide Sequence Number=SeqID_49596
atggagttaagggtgtcacagttgggagaggctcccacttcaggtggagcttcttcaggtggtgattctatggcagatcgggtagcacagagggtaacatttaaggtggagaattcagtgaccaagtctactacaactaacattcaacagcagcaccagccattgttgacagagtctgcaagtggtgttcataatgacacaaatgaggcagatgatgagtcagatacaattgatggtcagttagatgatatattttcaggtggagtttcaaagggttcaaactatcgtattgtacatcgtattcaaagacagaaatag

SEQ ID NO: 7818 - DNA, 1056 bp, Zea mays
  Peptide Sequence Number=SeqID_49597
atggccccagccatttccaagcctctccttaccgatctcgttgcacagatcgggaaggtcccatcgagccacatcaggcctgtcggagaccgcccggacctcgccaatgtcgacaacgagtccggcgccgggatcccgctcatcgacctcaagaagctcaacggcccggagcgccgtaaggtggtggaggccatcggcaaggcctgcgaatccgacggcttcttcatggtgacgaaccacggcatcccggcggcggtcgtggagggcatgctgcgcgtggcgcgggagttcttccacctgccggagtcggagcggctcaagtgctactccgacgaccccaacaaggcgatccggctgtccaccagcttcaacgtgcgcacggagaaggtcagcaactggcgcgacttcctgcgcctgcattgctaccccctccagagcttcgtcgaccagtggccgtcaaacccgccgtccttcaggcaagtggtgggcacctacgcgacggaggccagggcgctggcgctgaggctgctggaggccatatcggagagcctgggcctggagcggagccacatggtggcggccatggggaggcacgcgcagcacatggcggtgaactactacccgccgtgcccgcagccggagctcacctacgggctgccgggccacaaggaccccaatgccatcacgctgctgctgcaggacggcgtctccggcctccaggtgcagcgtggcggccgctgggtggccgtcaaccccgtgcccaacgcgctggtcatcaacatcggagaccagatgcaggcactgagcaacgaccggtacaagagcgtgctccaccgcgtgatcgtcaacagcgagagcgagcggatctcggtgccgacgttctactgcccgtccccggacgcggtgatcgcgccggccgacgcgctggtggacgacggccaccctctggcctaccgccccttcacttaccaggagtactacgacgcgttctggaacatgggcctccagtcggccagctgcctcgaccggtttaggcccggaggatcgttggagtga

SEQ ID NO: 7819 - DNA, 432 bp, Zea mays
  Peptide Sequence Number=SeqID_49598
atgcttcaccgcttcagccccgccggcgccgagcggccgactcgccgacggccgactccaatccccaggcttcagccccgccgagcggccgactcgtcgacggccaactcgcacgtgcttccgccggcagcctggcacagcaagcaggaagcagcaagcaagaatcagcggtcggtcgggcgtacgacagcaagcaggaagcagcacaggcgtctccatcctacagattctaaaagtgttatttcaattgtggctgaactaaaaccctcagagacaaatcctctatcccctaatgcgagccacttgatggatgatgaggttgcttgctacttgatgcttcctgcgaggctgctacctatcatttgcaaatacttatacatatgtattctaaaatgtaggaacatgaccgggatagtgattcctaattcatga

SEQ ID NO: 7820 - DNA, 333 bp, Zea mays
  Peptide Sequence Number=SeqID_49599
atgtggtgtgaagaagcagccagccaggcgccagcagcagatgcgggggcgtcaaaaaggcagggcgtcatcgtggttgcattgccaatgccaatgaatatttccaggcgcacggcggcgtgctacagggaagcggaggcggaggcggaggcggaccgctgggcaacgccgccgacacggagccgcggcgcctgggctctgcgcattcgaatttccacgcgcgggggcatgcaaaagcctgcggcgtggcgcccttgcgtggctgtggatggctatggccagacaggcagaggcgcgcccagctcaaaagcgagcggaaggcggaagcaatag

SEQ ID NO: 7821 - DNA, 1464 bp, Zea mays
  Peptide Sequence Number=SeqID_49600
atgacgacaggtgttctgcgccccgaaggttttctcctgctgctgctcctccaggcgaccgttgcgcttgccgttccgcagcagcaggtgctgcagctgcaggacaccgtcctgatagacgacgtcgtgcaggaggccgccgaggagtggtaccacgggcggcaccggaggacgggcgtcgcgtacccgctctcgctaccggggagcctgtcgggcgtcgaggccaccgtggcgcggttccgcgccggcagccttcggaggtacggcgtgcgccggttcggcgagttctccgtgccgccgggcctcgccgcgcgcggccgcgccgcgcacctgatcgcggtgcgcgtcaatctggggaacctctcctccgtgtacgacgagtacgcggtgggcgccgggtaccgcctcgcgtcgccggtgctcgggctcatgttctacggcctggcgcggcacaacggcacggcggcgctggagatcgacctcacgggcgccgccatccgcgtcaacttctccgtggccatcccggcgctccagccgggggccgcgccgctctgcctggccgtggggctgaacggcagcgtcaccgtgacgaacgtggaggacgggaccaacacctgccacgcgtcggaccagggccacttcgcgctcgtcgttgggggagctggcgacggcgacggtggcggcggcggcggggaagaggcggatatcggggaggtcagcaagtggaagctggcgctgttcggcgcggcgctgggcgcgggcggcaccgtgcttctggggatggtcgccgtggccgtggtaagcatccagcggcgcaagtcggagatggcggagatggagcgtcgggcctacgaggacgaggcgctgcgcgtgtccatggtcggacacgtgcgcgcgccgtcagcggccggccacacactagcgcggactgaggcgtcttgcgtataccatccaccgatccacgcgctgctctcgtctgctggtatggcttccggaggcgtcgcccgcgcccgcctcgccgaggagcgcaagtcgtggcgcaggagccatccccacggcttcatggccaagccggcgacgctgccggatggctctgtaaatctcatgctctggaattgcgtcgtccccggcaagcaaggcactgattgggagggtggtcatttcccattgaccttgcattttgatgaggactacccaagtcggcctccccactgcaagtttccagcaggtttcttccatgtcaatgtctacaacactggttctgtatgcttgtcgatccttggcgacgcatggaagccttctatcacagtgcggcagactctaatcggcatccaggaccttctagataatccaaatccagcctccccagcgcagaatttgtcctacgtgctctttacacagaatatgccggagtatgcgagtcgtgttcgtcaacaggccaagcgttacccttcgcttgtgtaa

SEQ ID NO: 7822 - DNA, 1062 bp, Zea mays
  Peptide Sequence Number=SeqID_49601
atggccaccccctccacctccgctccgtcgccgtcgccgtcctccgccttcccactcaccaccaccacacgcttcccccgctcatgctcctgccccgtgcgagcctccgcgctcgccgagcggcggcgcacgcggcggcgccgggcgcccgatggtgggggcgccggtggggaccgctcggcggccgccggggcggtggagaagggcctgcgcctggtcttcctcgagcagctcgcggagcgcgcgagggctgccgacgccacgggcgtggccgacaccatctacgacatggtcgccgcggggctttcgcccgggccgcgctccttccacggcctcgtcgccgcgcatgtcctcgctggcaacgctgaaggcgccatgcaatctcttagaagggaactcagttctggtgtgcgccctctacatgaaacttttgtggctctggtccgtgtttttgccaagaagggtctttctaccaggggcatggagatccttgctgccatggagagatataagtatgatattcgcaaggcctggctaattcttgtagtagtcttcattgaaacagaggaactagtgaagaatcattatctcgaggatgccaatacggtatttctgaaaggggcaaaaggcggtctacgaggaactgatgatatttatgatcttctgattgaagaagattgcaaagctggagatcactccaatgctttgacagttgcttaccaaatggaggcttatggaagaatggcaaccacattccattttaattgccttctcagcgtgcaggctacttgtggaattcctgaagttgcctttgcaacatttgaaaacatggaatatggaggtgaagttttactaccgggtgttgcatgtgtgaacccaagttgtgttcatggttatgtggtactagtagtttcattggatagatgttctgttctgttttgctttgagcatgatactgcgtttcccccttctctttcagattacatgaaacctgatacagagtcttataactgggttatacaagcatttactagagctacgtcctatgacaggtatacttaa

SEQ ID NO: 7823 - DNA, 711 bp, Zea mays
  Peptide Sequence Number=SeqID_49602
atgaagcggcacaacgcgggcgagttgccgctgtcgtcgccgccgggtgacggcaggcggctgctgccgaaggaggaggcggaggacaagatggacaagtacgacaaggggcgggtgcgctgctccaggctctgcttcctcttcgcgctcgccgccacggtatccatcctcgcgcgccactgctacgacgccggcctggccggcggcgatggtgccggcgtggtgcgcatcgagaccgtgcctccgtcggtgcgtcgagagcggaagatcgttccgatcgctcgcggcagcgggccgtcggagtccgggcactcccactcggctcctgtggacgccagcggtgccggacatggtccagaattgcgacaagctgtctccgtggacggacatgtgcagggcaccatcgccggctggtacgacaccgacgagcacgcgctggacatcgtcttccacgagcggatcaagcggtacgagtgcctcaccgacgacccttccctcgcggccgccgtcttcgtcccgttctacgccggcctcgacgtcgcgcggcacctctggggcaacaacgcctccgcgagggacgagctggcgctggacctggcgggactgctcgccaagagccccgagtggcgcgccatgggcggcccgcgaccacttcttcgtggccggccgcgccacgtgggacttccggcggaaggacgacgcccatgctga

SEQ ID NO: 7824 - DNA, 1860 bp, Zea mays
  Peptide Sequence Number=SeqID_49603
atgtaccgcgcggccgctagcctcgcctccaaggcgcggcaagccgggagcagctccgccgctcgccaggttggaagcaggcttgcctggagcaggaactatgctgccaaggacatcaagtttggtgttgaggcccgtgctctgatgttgaggggtgttgaggagttggcagacgctgtcaaagtgacaatgggtcctaaggggcgcaatgtggttattgagcaaagcttcggtgcaccgaaagtcacaaaggatggtgtgactgttgcgaagagcattgaatttaaggatagagtaaagaatgttggtgcgagccttgtgaaacaggttgctaatgcaactaatgacactgctggtgatggtaccacatgtgctactgttttgacaaaagcaatatttactgaggggtgcaaatctgttgcggctggaatgaatgcaatggatttaaggcgtggaatctcaatggctgttgatgctgttgtgaccaatctgaagggcatggccagaatgattagcacttcagaagaaattgcacaggtgggtacaatatcagcaaatggagaaagggaaattggtgagcttattgccaaggctatggagaaggttggcaaagagggtgtgatcactattgcggctattcgtctatggctctatggacccttctgtttccactatatgggtagtccacttgccctagtatctaaagatggcaacaccctttataatgagcttgaagttgtggagggtatgaaacttgacagaggttacatctctccgtacttcattaccaactcaaaagcccagaaatgtgaactggaagacccattgatcttaattcatgacaagaaagtgacaaatatgcatgctgtggttaagtttagaaatggctctaaagttttggttctgtggggccctttgctgattcttttttttttcattctttgctggaaacaaaaacaaaggcctctactgattgtggcaaaaaatggggaaagtgaagcattaggtactctgataattaacaagcttcgtgcagccatcaaggtctgtgctgtcaaagctcctggttttggggaaaacaggaaggcaaacttacaggacctcgctatccttaccggaggagaggtaataactgaagagctaggaatgaaccttgagaatgttgagcctcacatgctgggttcatgcaaaaaggtgactgtctctaaggatgacactgttattcttgatggcgctggagacaaaaagtctattgaagagagggcagaccagattagatcagcagttgagaacagcacttcagattatgacaaggaaaagctccaggaacggttggcaaagctctctggaggtgttgctgttctgaagattggaggagccagcgaagcagaagttggtgagaagaaggatagagtgacagatgcactgaatgctactaaagctgctgttgaagagggcattgtaccaggtggtggtgttgctcttctctatgcatcgaaggagctcgataagttgcagacagcaaattttgatcagaagattggtgtgcaaatcattcagaatgctttgaagacacctgtacacaccattgcctccaatgctggggtggagggagcagtagttgtgggcaagcttttggagcaaggaaacactgaccttggttatgatgctgctaaagacgaatacgttgacatggtgaaggctggtatcattgatccgctaaaggtcatcagaactgcattggtggatgctgctagtgtgtcgtccctgatgaccaccacggaatccataattgtagagatccccaaggaagaggcaccggctccagcaatgggtggcatgggtggaatggattactaa

SEQ ID NO: 7825 - DNA, 1497 bp, Zea mays
  Peptide Sequence Number=SeqID_49604
atggctaatgataaccaaagtattgcacctcgagcaatgatcttaaacagaaaatatcgcacattggtgagctcctggatagaaccattacaagaagaagctgatgttggttttgaaattgattatgtggccagatatattgaagaaggaggtcttacaggagagcgcaaacgttgggtgcctcgcagaggaaaaactcctttggatccagatgaatttggatttgcctattcaaatccgatagaaacatcctttaaacagcgatgctttgaggaattgaagttatatcatcgaaaactcctaattacgttgagaaatgaaggccctggtattttgggtgatgtctctgaagaagatgtacgcagagttattgaaaggctaaaaaagttagttgtagggccaaagaaaaatgttgttaagcccaaggcggcaagcaaaatggtagtatctgaactgaaaactgagcttgaagctcaaggattacctactgatggaactagacaagtgctttaccagagagttcaaaaggctaggagaatcaatcgctcacgtggtgtaccactttgggttcctcctgtagaagacgaggaagaggttgatgaagatttagatgagctgatctcacgaatcaagccagaagatgggaacacggagttctggaaacgccgttttctgggagaaactcgaaactatctttgtgaagaagatagtaaagaagacggtcaagatttagatgatgaattggaagatgatgatgacaacgatgatgatgaggatgacgatgaatctgtaaaagaagcagaagaagatgagatagatgatgaagaggttgttgagcaaacagaaaatcaagttggtgatgacactaaagataaaccagcaaaagaacccaaccatcatcttcaaatgataggggtacagttattgaaggatatagagaggacacctgtttcttcaaagaaattaaagcggatgccagagattgatgatgatgaagactggtttcctgaagatccaattgaagcctttaaggttatgcgggaggagaggatgttcgatgtatcagacatgtatactactgcagatgcctggggatggacgtgggaaagagaaataaagaacaagatgccacgtaagtggtcacaagaatgggaggttgagttggctatcaagataatgcacaaggtaatagaactgggtggtactccgacaattggtgattgtgccattatattgcgagctgctatgagagcaccactcccatctgcttttataccaatattgcaaacaacacacagtctaggttataagtttggaagcccactgtatgacgaagtagtcctattgtgccttgatctggaagaaattgacgcagccattgcagtagttgcggaaatggagacttgtggggttaaggtgccagatgaaaccttggacaaggtgcttgcgtccaaacggtctggaaattctgccctcccaccacctacggaggagtaa

SEQ ID NO: 7826 - DNA, 177 bp, Zea mays
  Peptide Sequence Number=SeqID_49605
atggaacaccaaccaacgagtaagtggtggatttggatggagtctcgcagaagaagagtacgcgcgctagcgcgccccaagacgtcagtcctttttctgcttgctggccaaggtattcctttgaataactcatcttttcagcctctgactctcgtgggtaaactcctacttgattag

SEQ ID NO: 7827 - DNA, 798 bp, Zea mays
  Peptide Sequence Number=SeqID_49606
atgagcacatctggaaaccttgacttcctctggatgcggaccaatatatgcataaaccttcgttggctgggttctcgtttctcatcgagagtgttgagactatctttcaaggaagcttcccagcatgacctttccctgaattggcgtatagtgagtcatttcattcattctatcgagggtgcggaagtcctgcaaatagcggatcaactctcttcgaaggatagatccgatgagtatgtgaattggttcgtggatcgtagtcaaacaagtctttatgccaatgggaaaacggaattgtccataagaaaggaccagaaaatgcacattgagaattcggagatttccttaatttcgaatcattgtgtccactttgggaaagataaattcgcaaacagagtccgccaaagtcaaaagacagtaggaaaccccggaaatcaaaaggtgcttcaagggcgcgactacccgaatagagattgtctaagggcaaagcaaaggttccgcctcaggcttcgatcacatggaggagggtgtttgtgctgcaagggaaactcttttggcgggtctgatctggcgcattggagatggtttaagcacagcaagtttgggtggactactggatcccaaggttcgaagagagagaaattccctaatcggcctaactcgattgtgagggatctacggaaagctgatgggaagtcatgggatgagcaagtagtgcggaatgtgtgtcttcgttgtgatgccgacgatatccttaagatagattcttctaccgcgggggaagctccaaggacttaa

SEQ ID NO: 7828 - DNA, 117 bp, Zea mays
  Peptide Sequence Number=SeqID_49607
atgagacgtggatccctgggatttctactggtggaaaaagaaggtatgggagtcaccttcctgcagacagagatcgaagagcttgtattggaaccatctcatcccattggtgtttag

SEQ ID NO: 7829 - DNA, 354 bp, Zea mays
  Peptide Sequence Number=SeqID_49608
atgcaacgaagtgcgtctttcataccaggagaccccactgcagctggcaaggtcaccgggatacggccgtcctttcttaaagaatggaaaacatggcgctattgtatccccatccccagcctgttcggatcatcttggcatagcacacctcaaatgctttccattcattactggaagaagaacagcatttctctatgcgccaatgggaatgccactgtcttttctgaacggaagggtgagaatagagcctatccagatcgcgattctacatcaggagaagcaaatacatgggatgggctacacacactcatgactaagacaagcaaggtttccggtgaaaagacagattcctag

SEQ ID NO: 7830 - DNA, 366 bp, Zea mays
  Peptide Sequence Number=SeqID_49609
atggagactaggatgctgactcgaaagagacaactctatttgcttgcttatcagctggtgatttgtgattatcctttggccagagatcctgatcatggagatatgcaaattttcaacacagaactgccttacccgtccctctacaaattcgccgtatgccccttaccatatgatatgatgatgaagctccttctgatgaaagattatggcgtgtgccgtcggagtgtgaaagaatggatagctactaagctgtattcatgtcaagccttccttcctcggggaatatacatattgcaaagggccaagccaagaatttcagtgataggaaagccatttgtcggacaacctgcctaccctagcttgtag

SEQ ID NO: 7831 - DNA, 270 bp, Zea mays
  Peptide Sequence Number=SeqID_49610
atgaaccctttttcagcccagcaagccaagtcctctaccgagcaagtctacgaggatgggcggatgaccaagctccctgctgagcaagtctgcgaaacgggacggacgatcaagtttcccgctgagcaagtctatgagacagagtggatgaccaagtccccggtcgagcaagtctgcgaggcggggtggacgaccaacccccgccgagcaagtcggctgggtggaacgttcgacccgacatccgtggagcgagaccaagcggtaggctag

SEQ ID NO: 7832 - DNA, 1107 bp, Zea mays
  Peptide Sequence Number=SeqID_49611
atggtcaaacccagcgccgtctcccggccttgcttcctcctcgtcaccgccgcagcgttgtgggccttgacgctctaccttcgcctgctcgccctcatgagcgtgcccgtcgcgttcacggggcgcgtcgcgtcgttcgtccctgacgacacgacgaatgccagcgtcgccggcgacgatccctgccgcggccggtacctctacgtccacgacctgccgccgcggttcaatgccgacatcgtccgcggctgcgcggaggccaacgaccggtggcaggacatgtgcgaggacatgcgcaacgccggcctcgggaggcctctctccggcggcgcgctcacgggcgctcgcgggtggtacgccacgcaccagttcgcgctggacgccatcttccacggccggatgcggcagcacgggtgcctcaccaacgactcctccgcggcggccgccgtgttcgtcccgttctacgccggcttcgagttcgcccgccacgtctgggggtacgacagcgcggcgagggacgccgcctcgctggacctcgtgcgctggctcgtgcagcggcccgagtggcgcagggccggcggccgcgaccacttcctcgtggcggggcggacggggtgggacttccgccgcgaccgcaactccacctggggcaccaaccttttcctgctcccggccgtcaagaacatgaccttcatcgtcgtggagacggccaccatgggctggggcaacgacatggccgtgccgtaccctacctacttccacccacgcacggacttcgacgtcctgagctggcagcagaggatccggaactcggaccgctggtggttcatgtccttcgtgggcgcggcgcggcccagcgacccgcggtcgatccggtcgcaggtcatggcccagtgcggcgcgtcgcccgcgtgccggcagctggggtgcgccttcgggagcgcccagtgccactacccgggcgacatcatggtgctgttccagagctccaccttctgcctccagccgccgggggactcggcgtcgcggcgctcgacgttcgacgccatggtcgcggggatgcatccccgtgttcttccagccgcggtcggcgtacctccagtatag

SEQ ID NO: 7833 - DNA, 177 bp, Zea mays
  Peptide Sequence Number=SeqID_49612
atgaggaaggaggtcatcaagctcgtgccaaggctgctctacgctgacccgagatacaagctcgagacgatgaaggatgcgttcgacgtcaccgtggatggcgtcttagagagaatggctgaaacagacgacagccagacagggtcctactggcgaatatattttgatttacgataa

SEQ ID NO: 7834 - DNA, 435 bp, Zea mays
  Peptide Sequence Number=SeqID_49613
atgtatcgtgggggccttgaccgcttcgagaaggcacaagccttggagcccttctcagtgaagtccaagacaggcaccaagaaggcacctgcagctgcaggaacaactaaagcactggctctattgacgctgccacaaaattctaattttttgccgggacctcaacaaccatccataagagaaactccaagaaagaagatacaattgtctacagaaacaataaacattttttcttctcggatgctcaatctggacaattgctgtctagaaggacaacaaatgcataatgtgcctgacgctacacaacaacgaggggaactacctgggaagcggcgccagaccaacctcgccaagcgcgctgcctacgaggccaaggacgcgcccgcacaactgctgcccaacaaggtcaagatcgcccccaagtctggtgcatga

SEQ ID NO: 7835 - DNA, 477 bp, Zea mays
  Peptide Sequence Number=SeqID_49614
atgaccactcctttgttgggtaccagaagaacacctacaggtattcatccacggatggttgtaatggaagctgttaataatctatgcaatatccactgtaaaggtgttgcagacttggtgacagatgttctcttccgtggaaagcctgctgctttcactttgctttgtttgatcgaggcatttctttctattgttagtaatttattagatttcaagttcggctccaaggtgatctggctattagttttcagtgtggcgtgctttggtggaatgtctctaataatggggcgtgtatcagcgatagaagaacggctcggggtgacaatcaccatcatcatcctgcaacttgtctttctcaagtttgaccgcaaaatattgcttctaattgattctccatctaggatctgggacatcaacactattagttaccttgtcacgattatatgtttccttgtcacgagcaattgcgagaagtaa

SEQ ID NO: 7836 - DNA, 1413 bp, Zea mays
  Peptide Sequence Number=SeqID_49615
atgaagccaatgaagccgagcttccagaaagacggcgccgacaaggttgatggcggcacaggtggcgtactctggccgtcgcggatctgctacctcgtcgttctcgccaccactttgtgggccgtggcgtccatcttgttcccgccgtcggcgttcccccaccccctggtgtccagcgtcaccgtcagccaccaccctgctccgcacgattcggcgtcggaggacaaccggaccgcgaccgagaccgccgaccgttgcgcggggcggtacatctacgtgtaccgcctgccgccgcgcttcaacgacgacatcgcccgcggctgccgcacgctccgcccgtggatggacatgtgcccgtacatgcccaactgcggcctgggccgcctgctgggcgacgagggcggcgtcttcccgggccgcggctggtacgccaccgaccagttcatgctcgacgtcatcttccgctgccggatgaggcgctacgagtgcctcaccggcgaccccgcccgcgccgcggccgtcttcgtgccggcctacgccagcctggacggcgggcggtacctctggaacagcaccgcgacgcgggacgcgctggcgctcgacctcgtcgcgtggctggcgcggcgcccggagtggcgcgccacgggcggccgcgaccacttcctggtggccggccggaccgcctgggacttcctcaggaagaccgacggcgacgacgactggggcaccaaactgctcagcatcccggccgtccggaacatgacggcgctcgtcctggagatcgacccgtggacccggtccaacaacctcgccgtgccttacccgacgaacttccacccggccacggccgccgacctgcgcgcctggcaggagaaggcgcgcgcgctggaccgcaggtggctcttctcgttcgcgggggcggcgcggcccgggagcaacaagaccgtccgcgcgcagattttccagcagtgcggcgcgtcgagtcgctgcgggatgttccggtgcaaaaaggggtccgaatgcgaggcctccccgggcgccatgatgcgcctcttcgagagctccaccttctgcctccagccgcgcggcgacacgacgacgcggcggtccacgttcgacgccgtcgtcgccgggtacgcggaccacatcccggcggatcccgagaggtggtcggtgctcatcatgcacaccgacgtgacggaccggaacgtgagcatcgaggaggcgctcgccaagatcccgccggcggccgtgaaggcgatgcgcgaagaggtgatccggctcatcccgagattggtgtacgcggacgcgagatcggcgcgtgcggacttcaaggacgcttttgacattgcgctggacgtcgtccttgaccgggtggccaagcggcggcgacgggatgtggacggacgctga

SEQ ID NO: 7837 - DNA, 1467 bp, Zea mays
  Peptide Sequence Number=SeqID_49616
atggggtggattacagttactattaggattgtatgtttgtttaccttgttgtggagtgtgaacggaattggtgtgaactggggaacacaggcatcccaccttctgcccccagacacagtagtaaggatgctgagagagaatgggattcaaaaagtgaagctttttgatgcagattatggtatacttaaggctctaggtaagactgggattgaggtcatggtgggtatcccaaatgacatgctcgcttctgtgggtggcagcatgaaggctgctgagaaatgggttgccaaaaatgtctccgaacatatctcctccaataatgtcaacatcagatatgttgctgttggtaatgaacctttcttagagacatataatggaagctatcttcatataaccctccctgctcttagtaatatccagtctgccctgatcaaagctgggattggcagccaagtaaaggttactgttcctctcaatgctgatgtttatgcaagttcaaatacctatccgtctggtggtgatttccgtactgatatctttgaccccatgcttaaaattgtcaagttcttgaatgatagtaattctcccttcacggtgaacatctatccttttataagcctctatactgattccaatttcccagttgagtatgcattctttgatggcaacgcaacgcctctaaatgatggtgggacattatattacaacatgtttgatgctaatcttgatactcttgcacatgcattacaaaagaatggatttggaaatctgcccattatagttggggagattgggtggcccactgatggagaccgaaatgctaacatagaatatgctcgacgattcaatcaaggttttatgtctcatatttctggtgggaaaggaaccccaatgagacccgtaccgatagatgcgtatttatttagcttgattgatgaggatgaaaagagcattgacccagggaattttgaacgccactggggtattttttattttgatggacaggttaaataccctctcaaccttggaactacaaacagtggagcattaattcctgcaaaaggtgtacagtacttggaaaggaagtggtgcgtgatgaagccttcagccccacttgatgacccacaagtggcacaaagtgtgagctatgcatgtggccttgctgactgcactagcctcggttatgggacatcttgtggaaacctagatgctaggggaaacatttcttatgcctttaacagttattttcagaagaataaccagtttgaaaaagcctgcgaatttccaaatgtttcagttataacgaaaacggatcccacccctacgaaaagttgggtatttacacttccaggtcgattttttgaaaagttacgagaatggactgtttttgataaaacgcttctagttggtgtcgtttttaaggaaaactcaaaaacgcttccagctggaagcgtttttccgctctaa

SEQ ID NO: 7838 - DNA, 1536 bp, Zea mays
  Peptide Sequence Number=SeqID_49617
atgtctcaaatcaagcagatgcactctcatctcatcgtctcagccagtcgtttggacccttttgcggccggtaaaatcatttccctcttcgctgtctcttccaacgctgatatctctcatgcttacaaactctttctttctcttccacaccgcaccacctttatttggaacaccatcatcagaatttttgtggagaaaaacgaaaatgccaccgccctttctttatacaaaaacatgcttcaaactggcttcttgcccaacaactacaccttctctttcgttcttcgagcctgcactgacaattctcctgtgggcttagcttctcatgctcaagtgattaagttgggttgggaatcttatgattttgtgctaaacgggttgatccatttgtacgccaattggagctcagtggaagcagctcgtaaactgtttgatgtaagtacttgcagagatgtcattacgtggaccgctttgattaatgggtatgtcaaatctggccaccttgagtttgcaagggaactgtttgatcaaatgcccgaaagaaatgaagtttcatggagtgcaatgattactgggtatgtgcatatggggatgtttagagaggctttggaactctttaatgatatgcagcttactggtcttcgtccaaatcatgccgggatcgtaggagccctcactgcttgttcatatcttggatctttggatcatggaaggtggatccatgcatatgtggatagaaatggaacggagttagatagggttttaggcaccgcccttgttgacatgtatgccaagtgcggctgcatcgagatagcatgttcggtatttgaaaagatgccagataaggatgtatttgcttttacttctttgatttcaggcctagctaatcatggtcaaagcgcagatgcaattcagttgtttggtaggatgcaaagtgaaaaggttattcctaatgaagttacttttatatgtgtcctaagcgcttgtagtcgaatgggattggtggatgaagggttaagaatcttcaattgcatgagtgtggtttatggtattgagccaggtgtccagcactatggttgtatggtagatcttttagggagagctggtctgcttgaagaggcaaagagattagtaagagagatgcctatggaacctgactcttatgtgctgggtgcattgctcaattcttgtagggtgcatggtgatgttgagttggggaaggagacagttgagagcttggttgagcgaggtctcgaccatggtggggttcttgtcctgctgtctaacatgtatgcctcttctaaccaatgggattgggtagtgaaggtgaggaaggagatgggggctaagaaggtcagcaaggtaccaggctgtagttcgattgaaattgatggcagtgtgtctgaattcattgcaggagacatgtcttatttgcgtgtggaggatgtcatgctggttctgttagggattgataatcacttgaaattccttttgcttgctgatgataatactaattccaatatgatcgcctattaa

SEQ ID NO: 7839 - DNA, 123 bp, Zea mays
  Peptide Sequence Number=SeqID_49618
atggaggtcgaagacataaggaatgccttgtgtaagaaagggcacttcaaggcaaactgtaaagagtggaaggaatacctagctaccaaaggaaaaggggttcgaggaaacgaaagaccttag

SEQ ID NO: 7840 - DNA, 174 bp, Zea mays
  Peptide Sequence Number=SeqID_49619
atgggcagatcccaacggcggcgcaaccgaaaaaacgaatcaggtgatgtgatgatggcggtggagttggtggctaccagaggagtggcggtaggtctggggcaagtggccgatgggacatgcggcggcagtactaggtgcggcgctagggtttcagactttctgaaaccctag

SEQ ID NO: 7841 - DNA, 1098 bp, Zea mays
  Peptide Sequence Number=SeqID_49620
atgcagcttgggctcccaatccacgggactcccataacgggagtatctttatttaccgatccagctgcactttgttatcagctacttagagacttgccagaggacgaagagtcaaattttacgagcttaaaatttacatggctgaaagccaaatttggacagttatcagcgaatgccactgaaggcgagctgatgtgcgctgctcgagtgtacatcatgcatatcctagggggagtactgatgcccgatgcgaacaacaacaaggtgcatatgatgtacttgcctctattagctgatttgtccaatatccactcgtatagcaggggctccgttgttctagcagtgttatatcgggagctttatcggacgacaaagccggatgttgtagagatgggaggatgcctcacattgctgcagtcctgggcgctctatcggatgccatttttggaatcggttagtcaccaaccgtggagtctttatccgggtatcgggaggtcgcacactgtcccgacataccgactcatgatcgaacaacatgtcgaggaaggtttatatcgatgccataccgtaggccagaaattacagatgtggtaccctcgcctgcatacgttcattctgacatatggccagtcgactgtagtccccccgcacatgcagcgacctgggagatcgtacccagcggccccgatagaggcggagtctgtggcatattatgctccggaaccagagcccgagcaggagcctcagtcagatcccgaacaatcatattcacatgtggatccacatagctatcatccggatttggcgggcagtgactatatttcgagcttctcaaggggcgaatacgcatacaagtttgaactctttggatcctacctgcggcagtactgcatgcccggcccgtatccgcagcatcatgggactctttccggttcaagttcgtcgatgccgaatgagccacaagatttttcctctatgtttgctacacccccacgtgcgccgaatgatgatgttggtcgtcatgaacacccagaacatgaccgtcaacctccaaataggtatacccctaggaccacaccatcgaaccatcaattttag

SEQ ID NO: 7842 - DNA, 822 bp, Zea mays
  Peptide Sequence Number=SeqID_49621
atgacgactcctgagtacgatgaatggagggttagaagaatcaatgacaatattcccaaatcgagtcatgaaggcagtcagtcattagaagaacatttaaaggtcgtcccttctgaactggaaattttaaaacaggatttcgaaagaagaactacagagttggaaaaacagatagagcaaatggaagaggaaaagatgaacttaagattggatgcagacgttcagaagctcgaggctgaacgattaaaaaagaggaaagctagggctgaagaagatcttgatagtttgaaaacagattataagaagttgcgattatcaataaggactgccgggttgggaaaatcttctgaacagtggcgcaaagagattcaagaagaaaagaataaggctgatgaatgggaaaggaggttccaagaaattcaagcacagaacgagactttaaagaggagtttgtcggagaatcagaaagagaaaggggagctggagaatagagtgactgaattagaaggatctcttcatcggcatcgaaatcggaattctgtgatggaattgagggcaagcttaaatagaattgaagaaatgaaggaaagaattgaagagttagaagcagcattgcgaaattgcgagattcagattgagtacttggaatctaatgaagatcgtcaagccaagcagttgcactactttcagaaccaagtaagagatagggatcacattatgggtgaagccgtacttcaaatcagagaggtggctgaccatttgcagacgttagcagtacaagctgatgtgttgagcgtgaagtacgaattagagtcaagttaa

SEQ ID NO: 7843 - DNA, 684 bp, Zea mays
  Peptide Sequence Number=SeqID_49622
atggatgataagttttttgtatacgtttatttcgatggagtcatcttgacaacaagtgttggatgtgtacttgaatgtcggcaacaaatagcaatgagatttaatagaaatgtctcgttggatggaatgaaggcaaggattaatgcaaaaattcttagacgttgtgggagaaggatatcaaaaattttctacaagtttccagtttcgacaaattcgatcaaattcaccaaaatggaacttgtagacgacgaagacgtggagacaatggtcgctctttactgtgggaatgggagtgacaagaatgcaccgattcacttatttgctgagttagccggtatggagcaaaatgaagatgtcaatgcatctgatgaagaacacggagctcaagaactgtggatggtggctctaatatcatacgttgatagtgaatcgactatgggtgggatcggtatcgatctgaatattacacccgatattgatgtggttggtggtgaagaagaaggtggtagcgatcattgggagaaagaggtcgatagtgacgatgatcctgatgtggacgatgtacctgatgatattgacgatgaagatgtcaacaacgatggaaacattaacgcttcttcggtcggggaccagatgcggcgtattttgatacacaataatcttgggccacacattcgttcatag

SEQ ID NO: 7844 - DNA, 1062 bp, Zea mays
  Peptide Sequence Number=SeqID_49623
atgccctgccttttcctcacgacctcgccgccacgctcgcgtctcgccgctgattgcagtcccccatggagccaccaccctctcaatccgcacgccactccatcgtcttcatgtccgtgcctcgtcttcatcctcgtgtcgccaccccatcccgaggtcgtcctcctcgcgcagtcgcagttggtgcctctcccccaccctattgtcttcctccccggcccgacgccgctaccgccgcccctcgcgcatgcgtctcctcgcttgtcttggtctagaataaaacgggccagggcaagaacaagaggagggtgggagctcgcgcaagcccccgtggtggcgctgacggtgatgctgattgaggcaaaggagtacggagagatgatggagagcgtgaacgaagtcatgttcacgttggacgggctccgccctatcgcgcagaagcggatgaggagggctagcctatctgctactctgccgagcgttgccacgtgctatggtcccaagggtgagtgcatcgaaggcgcctatttcccttgtgcacagctaagaacatcaattgggttcttgcttatatttcttggcaattttgaccagaaaatcgagaagcgtgatgtggaggaggagcagggtcttggtcctgaagcacgggaggaagggcacaacgtcacggttactctggcctcctttataatatcttgtttattgttagttgcacatgaagattttggattgctatgcttggtgagtattctaaagtcattagctgattgggagcaacttcaaagatattcattaaagcaagggagcattgttgaatctcatgaagaggatgcttcgaggagagtgataactgatgaaacagagagtcaagaggatggtcaagatcagtttgagagagccaaaactcaaaacatggaaactgcaatctcagagatcatgcttctatggtccatatacatgatgagcttggagccttggagacttgaacatattgtgaaacaggagtaccaatcggtgtcatatgacatgttgcggtatctaaaaatttgcagtgtggattag

SEQ ID NO: 7845 - DNA, 393 bp, Zea mays
  Peptide Sequence Number=SeqID_49624
atgtcgatttttggtttaagtccaatgtatgcaacaagcgcaagatcattgtttttacaactggttccatcaactcctatgccacaccaagagctagtggacccaaggatctccgacaaatttgtcccaacttttgatatgcacttcgacaacatggttgaagcgtatgatttctatgaaacatacactatgctggcaggttttgatgtgaggaaaaacaggaagagaaagggtggtcgagcacaagactttgaatgctcgtttgctggtaagttcattgatagcataggtgcagaccgtgaccgtgccaaaacaagcaagaacaaggattgcaaagtaatggtgtgcacaatgatggcaaaagatggaggacgtgtttttttaaaaaggtag

SEQ ID NO: 7846 - DNA, 2691 bp, Zea mays
  Peptide Sequence Number=SeqID_49625
atggtggacatcatcgacgcgtacccggcggtgcccgagcccgcgccggcgcacccggacccctcgtcgatcccccgcgacgcctggcggcgcttcgagagcgccgcgctcggcatactctacacgatccagcccagcgccacctccgagcacctccgcgccgccatcatcgactacgtccagcgcctcttggcgtcccactccggggttcaggtcatggaatccaagtcaggctttcatgctgggtgtgtccctgctgcggagttgcttgctgccattcttgctattccatttttatgtactgtaataattgctagcatgcggttttcggcgcgaaaccggtgtcaagtgtttattggtggtgacgagtataaacgtgtaacggtgtggatatactttgtcggttgcgcgcttgagtctccatgtgatttggtgggaatgacctttaatgtctttccatttggatctgttccattgaaaacttatcttcctgatggagacattgacttgactacattcggccctgcaatttctgatgaaaaattagcaaatgaagtatgtgctattctaaaatcagaagagcataggaaagattctgaatttgatgtcaaagatgtccagtatatccatgctgaggtcaaactggtgaaatgtgtagtacagaacattatagtagatatctctgtgaatcagattgggggactctgtacactttgttttctggagaaggttgatgagaattttggaaagaaacacctcttcaaaagaagcgtaatgctgattaaagactggtgttactatgaaactcgcattcttggtgcacaccatggattgatatctacctacgctttggagattttagtgctatacattttccatatcttccataagtctttgaatggcccattagctgtcctctataggtttctcgattactatagtcaatttgattgggatgctaagggaatcagcttgtttggtcctgtttccttatcttcactacctgatctagttactgaccctccagttattcatgatgatggttttcttctgcgggaaaagtttctcagagaatgtgcagatgcatttagtgtcccccctagaaactctgagaaagatgcacaactattttctcggaagtttttaaatatagtagatccactgaaacaaagtaataatcttggacgcagtgtcagcagaggaaatttttaccgaatacgtagtgcatttgattttggtgctcgtaagcttgggaagattcttcaaaggcctgtctgttatactgttgatgaagtgaatcagttctttgggaacacattaaagagaaatcgtattgggttcagacaagatgttttagtgagctcatctgatgatggtacattgacttatcatgccaccaacggttccttgtctctaggcttggattgcaaaagagtcaacaactgcagtgcacctttatacagcaatccctgtggtgatttctcttatcggtttaataacatcaacatttcagattccatcaatcatgatgactcaataaaacagaaacaatgtaactctattgctggagagaaagcgataaagtctatttctgatgggttgctagatagtgaaggctcaagtcatgctagtactgatgattcagtaagtgtgaggaacagtggtgacttctatgaagctttaacaactatctcgccatctgggagacgttatgccccacatcaattttaccaattagaaaatggtaaggtggttgttagacataacacaaacatgtcacaccatgggatgccaacaaagcagttcacaagcagatcttaccactcttttgaagatgccaagtatcacaatgagttttcaggaagctttctgccacccattgagcataatgcttactcttctgctggctttgttaatgttctggccacctctaactcagcatgtacacatgaaaattcacaacttggtggagccaataataacatcttgaaagatctcactggagattttgagacatacttccataatcttcagtatgcgcaagggttccagcaagataatccagtaaacccgttttcctctggaaggcctgctccaccatccctgcaatgtcagaacacgtgcccttcaaatggtcgaggaagaaaaaatccatattcatatgctagcatgaatggtgcagtcccttgccctccttacccatctggctatcttgtgtggagtccatttattcaaccagatgatcctatggctatgaggacccgtggaacaggcacctacttttctgaccgaaaattgcgcaagaataggccacccactggacgtgtggagagaggaagaaatcagttcgcttcaaataattatcaaaggttccatcaccatgtcagaacagatatgcctgcagatatgggatctggtctggaattgaggcatgagctaccacagatacatattcctggtgcaactgatcatggaatgccatctccaatgagtataccaatgtcatcgtcatctcttaactctccaagagatcaattgaagatcatgttttgtgctgagtttactgcgtttattacaacgtctgaccctgcactgtacaattcacagggatggcgctcaatcatatcgcctcaaggacagcagagacttccccccactgtccagttgaatgttgatggcggtacactgtag

SEQ ID NO: 7847 - DNA, 1446 bp, Zea mays
  Peptide Sequence Number=SeqID_49626
atgaactggaagaaatctcctcccgctgtctccgacggcgcccccgacgacgccgacgacggtcgcctccgcgagctcgggtacaagcaggagctcaagcgccacctctcggtgctgtccaacttctccatctccttcaccgtcatctccgtgctgacgggggtcacgacgctctacaacaccggcctggccttcggcgggcccgccaccatgacgctcggctggttcgtcgcgggcgccttcaccatggccgtcggcctctccatggccgagatctgctccgccttcccgacctccggcgggctctactactggagcgcgcgcctctccggcagacgctgggcgcccttcgcctcctggatcacaggatggtatggcaccgccagcatcgacttctccctggcacagctgatccaggtgatcgtccttctcagcacggggggcaacaatggcggcgggtacctggcatcgaagcacgttgttttcgccttccacgcggggatcctgctcagccacgccgccatcaacagcctctccatcacctggctgtctctgctcggccagttcgcggcgctctggagcatgctaggtgtccttgtcctgatgatcgctgtgccggttgtggctaccgagagagccagtgccaagtacgtcttcacccatttcaacacggacaacagcgctggaatccacagcaacctctacatcttcgttctggggctcctcatgagccaatacacgctctcagggtacgacgcgtcggcgcacatgaccgaggagacgaagaacgcaggcaggaacggcccggtcgggatcatcactgcgatcggcgtctcgctggtagtgggctgggggtacatactcggcatcacgttcgccgtgaaggacatccccgccctcctgagcaccggcaacgacgcgggagggtacgccatagctcaggtgttctacctcgccttcaagggccggatgacttatgcgttctcgagagatggggcgatgccgttttcgtccgtctggcacaaagttaacgagcaagaggtgccggtaaacgccgtctggctctcggctttcgtctccctttgcatggcgttgccgtctctgggcagcctcgtcgcgttccaggctatggcgtccgtcgcgacgaccgcggtctacatcgcctacgcgctgccgatcctcttccgcgtgacgctggcgcgcagccgcttcgtgccggggcccttcagcctcggccgctacggcgtgctcgtgggctggaccgccgtcctctgggtcgccaccatcaccgtgctcttctcgctgccggtgtcgtacccggtgaccaaggacaccatcaactacaccccggtcgccgttgccgggctgttcgccctcatcttgtcgtcctggatcgtcgccgccaggcgctggttcacgggccccgtcaccaatttgggagggtag

SEQ ID NO: 7848 - DNA, 330 bp, Zea mays
  Peptide Sequence Number=SeqID_49627
atggcgctaccagctaccagctttgactcatcacatgtggccgtcgatcgtcggacgcagcaacttatattcctttgcgccgaagacaaaccgcatgagatcccaacacaagctgctcgacctctgcgccgcacagccagtcgtcaccacgggttctgtgaatctgagaactttgagccagttcacgtctcagctcagcagcttgtgataatgtttctggcagaaggcagagctagtacacattcttctgcgcacggcaaacagcagaaggcagagctacagacatcagggaaaagcaaaggctggctggcaacgcccactacattttga

SEQ ID NO: 7849 - DNA, 378 bp, Zea mays
  Peptide Sequence Number=SeqID_49628
atggcccctcctcctgcctccaaccaagacgacccaaccagatggtccggcctgtgcgaggcgcctgagctcccaatctggctagttttctccgttcccgcgcacggcgcaccagaggttttccttcgcgcctccactgttcctccccaccactccatttcgcgcacgagggagcacgacacacggttcatccggctgctggatctctcaaccaagagctcactctcatcgacgtcgtctcgaagtagcaagtctccgccggaatcttcttgggcgatgccgatgcaaaatccatccgcctcggcggatgattttgaggcatggatgaacattagtggaagtagctttggcggtactaaggacctggatgtcgcctaa

SEQ ID NO: 7850 - DNA, 552 bp, Zea mays
  Peptide Sequence Number=SeqID_49629
atgctccacggcgccaggttcctgtgctctgccgtcgcccgcctcgcgcacgcgctcatccgcagcatcctcctcctcatgcccctctgctccccgacgtcgacctcagcgatccccgcgccaacatggcagcagccggcgagggcggcgccctacatgaaggtgcacccggcgggcccgctgatggctctcgacgaccccaaggaccagctgacagcgctgtcgtcgtcggcgcagccagcggtcgtcgtcgttgtcccggcgctcaagcatcagcagcctgccgagagagttgcggagacgaagacggccaaggcggcgaggggaaggccgaccagacttgccataccgccgcccttgccctgcgctcccggggtcgacccgttcggcgcggtggaggcagagttggccaccgaactggaagtgcagggcgagggcttctgcctggcgagcaggagaggggtcaggcacgccatggaggatggctatggggttgtcatcactgatcacggagcctcccaattggtacggtacgcgcattttatcagctag

SEQ ID NO: 7851 - DNA, 450 bp, Zea mays
  Peptide Sequence Number=SeqID_49630
atgtggcagtatggtggtgagagcgaccctgactgtcactctattgaagtcctctcaaagggggaggtcgaggcccacgtcaacaaagtcaccctaggggtgacatcagatttcatggatgtgggaggatcttgtagaggcgtggatgaggggaggcttgggtccatcaatccctcccttcctcctatccccgaggacatctccctcaaggcggagaggaaatggaagagggagaaggatgaggagaccctggcgccatgcaagaagagccgccaggcgagaaagaagaagaaggttgagcatgtggctcgcgctgggcgtgctcttccgagtacgtggggcttgctccttccctttttcaatgcttgtttggaattcttattttgtcatctcctcaatgcatacatgtcatggaagacgatgaaggacgtggcttttgtgacgaagtag

SEQ ID NO: 7852 - DNA, 789 bp, Zea mays
  Peptide Sequence Number=SeqID_49631
atgttgacttacaagcgatttataccctctcaaatctcatttctgtccaacttgatcctgggattattaggaactgttcaaggcctgaagaatttacatgtgcttcattatattgccgatactagaaatttgcatatgataattactaatcgtactcctgtgtgttatgaatgtataattacgaagggtgtacgcgatggcgcatgcgcggtgacggcgctggtaaaggacggcgagctcttcgtggccaacgtgggcgactgccgcgccgtcctcgggagccacagcggcatcgcgaccgcgctgacgagcgaccacaccgccgcccgcgaggacgagaggcgtcgcatcgagagctcggtatgtggcgatcgagacggacatgccggcattgcacaagtgatcccctcgcgcacaagcttctctggcagtcgagccgggagggtacgtgagctgcgccagcagtggcgtgtggcgtgtgcaggatcgcctgcccgtgtcgcgcgcgttcgccgacgcgtccatgaaggccctgggtcacctgtgagccggaggtctcgcggcgccgcctcaccccgggactgccgcttcctcgtcgtcgcgtccgacggcctctggaacaaggtgtcctgccaggaggcagtcgacgtcgtcgtctccgccccgccaggtggagctggagcatcgtcctccgtggaatcgtgcaaggacctggtcgccttggccaggaaaagggggagccgggacgacatcaccgtcatgctcgttgatctgcagcgattcatttga

SEQ ID NO: 7853 - DNA, 612 bp, Zea mays
  Peptide Sequence Number=SeqID_49632
gcgtccacactcaatctggtgcacggttctgcctatcgcgccgccgatcccccaccctccttccctctgctccccgccatcaacggcgagagcgacgcattcgacaagatgttccgccgcgaggtccgctgcctcgaggcgtgccgcggccacccctgcctcgtggagctccacgccgcgcaccacgtctcccactcctccccgtcctgcccctccctccgtctctgcgctcggatctgcgctcggcctcctcccttcctccgtctctgcgctcggcgccctcaccgcctctccctccgcctctgctccacctccccagccgcccacaaccacgcgtcctcgcctccccgaccagcctccaccgtgacatggttgccgcctcctctcacctcctcatctcccactcctcctagcgcaaccgacggtgacagggatgaggttgggtgcggtgtggtgccgctcgatgcgctctgctcctcgcccacgctcgcgcaacgcaggaccttccccaaccgcgacgacagatcctcatccacacacccgcgggcgcctccacctccctgggttcccctctgctcctcgtgccccgcagtagagcagccacataattag

SEQ ID NO: 7854 - DNA, 219 bp, Zea mays
  Peptide Sequence Number=SeqID_49633
atgggcattgctttcccaactagtatagttgtctacgagacagtttgccacttctcaccacttgccacagacgatgcagttctagaagaatttgatatggttaaaatgatctatggaataatatgctctcctaatgcagtggcaactcttgtcatctctacaagaatatttgatcagactattaagggggtgtttgaatgcactagagctaatagttag

SEQ ID NO: 7855 - DNA, 420 bp, Zea mays
  Peptide Sequence Number=SeqID_49634
atggcccaaaatacctcctgctcagccgcggctaccgtcgctgctcctccgggcgaactcgccgtcaccccgcccgtgtccacagcgtcctgctacgcctacttcgaagaccttgacccgctcccctccccgtcgcctctgcgccaccccgacgcgccatggacgcccagctccaatagatgtgagatgcctcacgcgctgcctcctttactcaacaagcgaactcggccaggcaacccacaacagaggagaaggggaagggcggcgagggaggacttcgcgtcgtgtcctttcctcttcttcctcctccctcctctatctctagcaccccatccatcagcactcctccgcattgttcttgatcccaaccagtactacgattctcccccaagatcaaaggccgaaggagaaggaagaaag

SEQ ID NO: 7856 - DNA, 219 bp, Zea mays
  Peptide Sequence Number=SeqID_49635
atggctgacaagtggggccagggctccagtgagccagggcaggctgaccggcagggcccaggggcagagacgcgggtgagggagaagagaggggcggcagatcaagagggagggcgaggtagctgggcagaggtcgcaaatgagagaggggaggtgggcgagcagggcgcggggctcaaaaggggcgagggggctcagacgtggccgaagaacgcgtga

SEQ ID NO: 7857 - DNA, 234 bp, Zea mays
  Peptide Sequence Number=SeqID_49636
atggatgtgttggatgagcttgatggcgttctatgccgattagagccagacattggatgtaatgagtcatgtgatgttagtgatgatgaggaaaaccaggaaggagaaataaataataataatgttggcgatggaatggaagatgacaattcaattatatgccacaaaatagatgatcataacaccatgataggatgtgaacatgcgttaaaattaataacagctggtaaccag

SEQ ID NO: 7858 - DNA, 330 bp, Zea mays
  Peptide Sequence Number=SeqID_49637
atgacgaaggtcgatgcttgccgaatgtggtcggaaagggttcaccggaggaaaaatagaaatgataacaagttacaaaagtaccttcggcttgaaagaaggcaaaagtacaagcgtaactcaaaaacagatgccaagtcagcccgaacacttcggctttgttccatcctttgtatcgcttgtgcttcttcacactatgattttgactcaagtccgaagggtccaagttctaagatgaccgttgcagattcatggcggttggtgcaccagacacagtccggtgcacaccggacagtccggtgcaccaccggacagtccggtgaattatag

SEQ ID NO: 7859 - DNA, 564 bp, Zea mays
  Peptide Sequence Number=SeqID_49638
atgaccgcatcaaaaaagggaccgggaaagggggataccccgaaaaggatccttctccgtgaaggaaacaggccccgagcctccctactgatcagaggttcaaaggctggcccctcggaggggtttaatagccgcctcagagcgcgtgggctccgcacccactactggtcagaggttcgaaggccggcccctcggaagggttcaacggccgcctcaggccactcgggctccgcgcccactactgatcagggcgggaacgatcttgtaacggaatcccatcagagggaggcatcgagccctcggaccccgtcgaaaggggaccgggtccggcagatcacccgcagcgccgcctgcgccgctccgactgctgggccattcgacagagtgaggctgacagcagccaggcccgacctcaggcgccataggaaactccgcttcgcccgaccccagggctcggactcgggctcagccccggaagacgatgaactccgcttcgcccgaccccagggctcggactcgggctcagccccggaagacgacgaactccgcttcgcccgaccctag

SEQ ID NO: 7860 - DNA, 1161 bp, Zea mays
  Peptide Sequence Number=SeqID_49639
atggcgttcgagaagatcaaggtctccaacccaatcgtcgagatggacggtgatgagatgaccagggtattctggcagtctatcaaggacaagcttatcctcccatttctggacctggacatcaagtactatgatttggggatactgcaccgtgaagcaactgatgacaaggtcacagtggaggctgcagaggctactctcaagtacaacgtggctattaagtgtgcgaccattactccaggcactgtgttcagagagcctattatatgcaaaaacgttccaagacttgttccaggatggactaagcccatctgcattggaaggcatgccttcggtgatcaataccgagctaccgatgcagttctgaaggggcctgggaagctgaagctagtttttgagggaaaagaagaacagattgatctggaggtattcaacttcactggtgctggaggagttgccttgtctatgtacaacaccgacgagtcaatccgagcttttgctgaggcttctatgacaactgcttatgagaagaaatggccactctaccttagcaccaaaaacacaatcctgaaaaaatatgatggcaggtttaaggacattttccaggaggtctatgaagctgactggaagtccaaatttgaggctgctggaatatggtatgagcatcgtcttattgatgacatggttgcgtacgcgcttaagagcgaaggaggctatgtgtgggcttgcaagaactacgatggagatgtgcagagtgatttcttagctcaaggttttggatctttgggtttgatgacatcagtgttggtgtgccctgatggaaaaaccatcgaagctgaagctgcccatggcacggttacccgtcatttccgtgtccaccagaaaggaggcgaaaccagcacgaacagcattgcttcgatctttgcatggacaagaggacttgcccacagggcaaagctcgacgacaacgctagactactcgacttcgctctcaaactcgaggctgcttgcgttgagaccgtggagtccgggaagatgactaaagatctggcgattcttgtccatggatcttccagcgtcacgagaagccattacctgaacaccgaggagttcatcgacgcagtcgctactgagctccgatcaagactgggagccaactga

SEQ ID NO: 7861 - DNA, 261 bp, Zea mays
  Peptide Sequence Number=SeqID_49640
atggattcggacgccaacacgacaatagtggggatctctgacgtcggctacggcgagtgggcgacggcattgtccccgctacgatggaacctgcggctgtgtggcgggtacaggatgcaggagatggtggaggttgcaggagatgcaggatgtggctttgcgcgactcatgaatgggttagggtttgctgctgggctgagaggcacatgggagaaggccacaggggatgaggaaggtggacgaagcgtgtcgatagaatag

SEQ ID NO: 7862 - DNA, 240 bp, Zea mays
  Peptide Sequence Number=SeqID_49641
atgaagaatgaagtgcaaatcaacaagaagaatcagagaaaagagaaagggaaaaggagttggctggaagcagccaagactctgctcggtctggcacaccggactgtccggtggtgcactggacagtgtccgggcgagaggctccaagttgtggagattcctcgcaaacgggaaagagtaaaagaaagaaaaaacaccgtggtattcaagtcgatcattggatcacttgaaaggggttga

SEQ ID NO: 7863 - DNA, 2166 bp, Zea mays
  Peptide Sequence Number=SeqID_49642
atgccgcggacagcggaggcgaggacgagggggggaggcggcccccgcccgaggaagaggcggaggggcgacgagttcttccccgtcgacctgctcggcgacgtcccagcctccagcatcccgtacgctgccttcgggctccggtggagcgaggcgcccgaggcaccgccagaggccgcgcaaccgccgcccgcggcgaggccgccggtggtgcgctcgtcgcggggccgcaccctggtgctgccctctaggttcaatgactcggtacttaccgacccctggaagaaggagaagccggccaggccgccgcctcctgtcaagacagagcacttggcgcgcagaaacgagctgctgcacaagaaaggtgcaaattttgacagcagcgttgcattgtccgaggtagatgacgacgatgaggaggaggccatggtggaacgttaccgagcacgccgcagtttcggtgcctccaggaagcacttagcctcttggagcacgcttacctcggtacatgatgaaccatacagcaatcaccacaggaaggaagtaaagcttaggcattactatgaggaagacgaggaggaggaagaggagaaagaagatatttttcactgtaccgaagaattggtgtatggggacattgtgtgggcaaagcttggcaaacgccagccaatgtggccaggagtggtggtcgacccaactcagcaggccgctgccgatgcaatgccaccacaacctcgcggtgtcgctgtgctttgtgtgatgctatttggctggcgcacagagttcagtggcgagaagaagtacgtgtgggtgaggcaggggttgatatttccattttcagactacatgaaccgatttcaagggcagacagaactaagcagttgcaaacctgctgatttccggagggcagtagaagaggcctttttggctgatcagggattctcagaagtagtggtacattgcagcaccaagggccaatctgtgcagtgcagaagagtgctgcagtgtgagagttgtggaaactgctttcccaacaaggatacaaacaagatggtgtatgtgatggagcaacttgcttgcagactttgtgccaggatcttagcattaaaaaagtactgtgggatttgtttaaaaaatttgcaacataaatatggcggaagaaggctgcaaattctcacgggaataagtaatgaccaggtttgctgtcatggctgtgaaagttgggttcatgcagaatgcgatgaaaactgcagcaacctcaaggatctacaagacaagaaatatcactgtccttactgtagagttaaaatgaattcaactctccccgggaagaacacaaaaatttctgatgtgagaaaagatagttctgcacagaaaggaagcaagcctgacaaagttgcactggtctgttttgacatggaaggaacatacgaaccagatctcgaattaatttcttgccattgtggcccttgcaagggacagaaatttttgttcaatgaatgggagcggcatgctggctgtagaagtaaaaattggagatccagtattaagcttaagggctcgttgatgccatttgggaaatggatagatcgacatcagccaggcgtgtgccctactaatcctccaaaacgctcatctcagaaaatgaagaaacagaagttaattgatttactgaatggctcaatttgttttgaaatatggtggaaatccgaagctgcaactaacaacactcatgttcagatgtcagatagcagttcatcaggaatgttatggtgtgaggggtgctctacttactaccatgccatttgtgcatcaagggcaggctatcgaatggagcttcactgcttggaaaaaaatggcagacagacaacaaagaagatttcttactgtgcccaacatcggagccctaaccctgataatgttttgataattcaaactcctgctgggactttctcatcaaaaaagcttgttcatagcaatggcaaggtagctgcatcgaggctgatcaggaaagatattcccttggatttgccatcagaagttaaaatttcagagaacttatcagcggcgagatgtcgggtttatgttaggaaagatctaaagggactatggttagaaattattgttgcaattcaaccaatgctagaaaagttgtttgacacttaa

SEQ ID NO: 7864 - DNA, 516 bp, Zea mays
  Peptide Sequence Number=SeqID_49643
atgtcctgtactgcaactccatggctaggcgtatacttctgcggatctgttgactgccatttattccatgccttaaggcttaacccgtgccaagtcttccgagtttcaccttcggagatccgcccctggcacgtggcggcgcggggcatccacgaggagacgctgttgcgtgtcccgggcgcgtccgtgcacctcctggccagctcatccgacggcccggtcgagctcgtgcgcggggacctcgccgtcgtcaggctgaccaaggacgacgtggccgtggccaccgcggtgcgcgtcggcagggacctgggttggccgctggcgcgtgacgagcccgtcgtcaggctcgaccccctgcactacctcttcacgctgccggcggacaaggacgtgacgttcctcaactacggtgtctccttcaacgccgtcgccaacgcctccgcgctggtgtcaggggcgggcccaggggtggttcatgagtattcattgaatgcccaaatttttggtgatctatag

SEQ ID NO: 7865 - DNA, 981 bp, Zea mays
  Peptide Sequence Number=SeqID_49644
atgggacagggagcagcaaggtcaccaccggagacgacctcgatgggtggcggcgccgaggacggaggtggtgtcacagtctatgggaggaaggagatcatgatgggggagcagtgccagtcgatggacttctctgggtgggagtgggacggcgaggaggttaagggcggcgacggcgaggtgcagagctcctacgggctccgccatcaacactatggatacactccaagaggccccttcagcttggacggatggatgaagctgagagagctgcttgataaaaatgacttctggtcacagcataatctgactgtaccagaaggttctttttgcaacctcaatttgagatttaaggtcggattaccaccagaggcagtatacaatatcataatcgaggcgggcaacaagggcttgtggatgctggacatcctcaagaagttgctgatggcccccaacatcgccaccaaggtcgtgcgcaccctcgtggcaagcgggcttctcaaagaggtcagcgacgtgcgccaccgcagcaggaagatcttcatggccaccgacttccagtccttcgccgagatcaccgggggcacctggtaccacgacggtcgcctagacaccgacgccgtaagcaccgcgcgccgctgctgccaggcgcaggtcgagaggctcggcgccgcgaccgcgcagatgatccaccacgacattctcaaggaagaccccagggccgggtacactatcgacaaggtcaaggatatcatcaagaccatggtgctcgaagaggtcaagagcaccggcacgcgggattttagcgccgttatggccggcacaatgtgctatcggctggtgactggggctccgcagggagggatgatggagggaatccattgtgggatttgccccaggactcatgagtgctcgccggaggggatcatctcacccagcacctgcgtttactacaagaagtggttgcagatggacttctag

SEQ ID NO: 7866 - DNA, 219 bp, Zea mays
  Peptide Sequence Number=SeqID_49645
atgggcggtgtcgacaacttcctgctggagatggcgctcctcagcggcgcggtggtcgtcagcggcacgacgagcatcggtagcacgtcaggcagcggcatcagcatcggaagcatcggtggccatggtgggaagatggggtgcagaagggtgggtcaagggaggaacgcgaccttctatgataccatgaagacgtacaggaaatgggtaatgtactga

SEQ ID NO: 7867 - DNA, 213 bp, Zea mays
  Peptide Sequence Number=SeqID_49646
atgacgctcgagaagaagcaaaacgagctgaagaggctgcagaacgtgaaaggcgctgcagtggtggtggcggtgggagctgaggccaagaagcttgtgaatggcttgccgaagcaacagaagcagcaggttggttgcccacttattctggctgatccccatgtcttcctccgaagcccctgccgcctctgccccttggagctggtggcctga

SEQ ID NO: 7868 - DNA, 591 bp, Zea mays
  Peptide Sequence Number=SeqID_49647
atgggggagactgccatcctcatggaccgattcgacttcatcgcagcgctgcgcgccatcgagcgtggtggaagccagagggttcattttttgtcctcctatcgctttagccatcagtggaaatttgtatctttgaggaagccgaagaaattgtcagcgctgcacaccatcgagcggtaccgcgtcacgctgctgcccacggcgcccctggtgctggtggccatgatcaagtccgaggaggcgcatcgctgcgacctctcctccctcctcttcattggcatcggtggcgcgcccctcagccgcgaggtcgctgagcgcttcgccgccatcttccccaacatagaactcattcaggttccatgccttaaaggtgaggtgatctcggaagaaaaatctctggaatttggcactgataagatatctctaattttatggcattttcgcattgatctggatctagatgctgtggattctgctgtcatgttctcaaagtttggtgccgatgctgacggaaacaagaaaaaatgtgttttcaggttgctgcgattgcggtgggtggagtggcggtcgcgatgggcaatcctcgactga

SEQ ID NO: 7869 - DNA, 792 bp, Zea mays
  Peptide Sequence Number=SeqID_49648
atgggagcgaccaaggatgtcctgtccctctacgccgtgaaccatctgtgcgccgtggcccaacttttctccacgtccgctggagcggaggcccaggcaagcgacaaactgtccaaccctaaacaactgggcccgtttgtagcggagacaaagcaaccaccacctccggagacgcgggtggcgtggccttcgtgcgactacctcttcaagctgctcctcatcggggactccggtgttgggaagtcttgcctgctgctgaggtttgcggatgattcatatctggagagctatatcagtactattggagttgattttaaaatccgcaccgttgagcaagatgggaagacaataaagctacagatttgggatactgctggccaagaacgctttaggaccatcacaagcagctactaccgtggagctcatggcattattgttgtgtatgatgtaactgaccaggagagctttaacaatgtcaagcagtggctgaatgaaattgataggtatgccagtgaaaatgtgaacaagcttttggtggggaacaagtgtgacctggctgagaacagagtagtttcttacgaggctggcaaggcccttgctgatgacatcggaataccattccttgagactagtgccaaggatgcaacaaatgtggagaaggcattcatgaccatggcaggggagataaagaacaggatggcaagtcaaccagctgcaagtggtgctagtaggcctgcaactgtgcaaatgcggggtcagcctgtttctcagcaaagcagctgctgctcttga

SEQ ID NO: 7870 - DNA, 432 bp, Zea mays
  Peptide Sequence Number=SeqID_49649
atgactgttaggaccagtgtacaggtcgcatcaagcataacatgtgccatacagttcagtacatcaggattacatttcgagcgtcctttctgctccaccttaacaccgattgtccatgagaaaaggtcggcaagtcattttggtgatgttttgagttcttccaaccaccaaaagtggtcgttggaaggctgtctgtcgcatggcgcaccggacagtccggtgcgccaccggacactgttcggtgcgccagccacgtcagccggccgttgggttctgaccgttggagctctgactggtggggcctctgggctgtccggtggtgcaccggacaggtcctgtagactgtccggtgcaccttctgcacgtgctctgactctggtgtgcactgtagcgcatttaatgcggttgcagtcgaccgttggcgcgaagtag

SEQ ID NO: 7871 - DNA, 243 bp, Zea mays
  Peptide Sequence Number=SeqID_49650
atgcagcaaggtgtcgagagcgtcgtagaagtgacaaccgcaagcggcgtcactagtgatgggtcggacgatccatccctccggctcttggtcctccgaaggctccatgttgtggctcgagctaccaccgtcgttgtctccgtcggggtctcctctagcagatggggtgccctatggtggtgtagggggcacctcaagctggggcctagaggaggatgcctcctagactccaactcctactaa

SEQ ID NO: 7872 - DNA, 219 bp, Zea mays
  Peptide Sequence Number=SeqID_49651
atgcatgtggtgactgaggacgattcaacctggatttttgagttgttcaatgtggcccgaggttttgatctggtgtgcaaagaatcgatttgggtggtgaatttggactttggtgggagaggtgatttggcacgcgacgtggtgggcgcacgggatctggaggaaggactgaaggagcgtgggaggaaagcgctcgcctgttcgctcgcacggggctga

SEQ ID NO: 7873 - DNA, 1159 bp, Zea mays
  Peptide Sequence Number=SeqID_49652
atggcgccgtcttttgacccgtctgctcaacaatcccctgatccgtttccctgcatctttcctctttctttatcgcagttcagcgacgttcttggcaagggcgcgtccaagattgtgtacaaggcgttcgacgagtaccaggggatggaagtggcgtggaaccaggtgaagctgcacgacttcctgcagagccccgaggacctggagcggctctactgcgagatccacctcctcaagacgctcaagcaccgcaacatcatgaagttctacacctcctgggtcgacgtctcccgccgcaacatcaacttcatcactgagatgttcacctccggcaccctccgccagtacaggcagaaacaccggagggtgaacatgtgggcggtgaagcactggtgccggcaaatcctcagcggcctgctgtacctccacagccacaatccgcccatcatccaccgggacctcaagtgtgacaacatcttcgtgaacggcaaccagggcgaggtcaagattggcgacctcggcctcgccgccatcctccgcaagtcccacgctgtccactgcgtgggtacaccggagttcatggcaccggaggtgtatgaagaggagtacaacgagctggtggacatctactcgtttggaatgtgcgtgctcgagatggtcacctttgagtacccgtacagcgagtgtacgcacccggtccagatctacaagaaagtgatctctgtaagaagatccctggaccctatgagccatttggcagcaattgtgattctgggtactaagccagaagctctgtacaaggtgaaagatccaatgctgaggcgctttgtcgagaagtgcctagtatcgtcatctcagagactgtcagcaagagaactgcttgaggatcccttcctacagggcgatgacgtggctgtttctttggatggtggagattatcatgtaccgaccaagtacgtacggcagccttcatatctagggcatacctatagcaatggctccatggtgagtaatggattctcagaaagcatggatgaggacgctctgagtgaagactgcgaggatgatgacatgaaaggccaagatggcattgacctgttcaacgagaatgaggatgaacctcttggcaatgtggacataacaatcaaagggagaaaga

SEQ ID NO: 7874 - DNA, 1077 bp, Zea mays
  Peptide Sequence Number=SeqID_49653
atggcagcggcgagggcgtgcatcgtcgcgctggcgctggtggcggcgctcttcgtggccggatcggcggcggcagcggcggggaatgccggaggccggccgcagctgtcgctcaggcagcggcgccggcagctgctgcggcagcggcaggtgcgcagccacctcaagaggctcaacaaggcgccgctcgccaccatcgagagtccagacggagacatcatagactgcgtgcatatctccaaccagcccgccttggatcatcctttcctcaagaaccacaccgtccagcagcagctcttctacccctcactatggcagcagcactcaaacatgcatgctcccccggcccctttgcagatgcggcctgcataccacccggaaggtctgtacgacgacgagtccaaggttgcatcgcagcggaacgcgcagacgatcacccagatgtggcatcagaacggcaggtgccccgagggcacgataccgatcaggcggaccaaggaggaggacgtgctgagggccagctccgtcaggaggtatggcaagaagaagcgcaggagtgcccccaaccccatgtcggttgaccctgacatgctcaacgagagcgggcaccaggttagtagagagcagcacgccatagcgtacgtggagggggacaagtactacggcgccaaggctaccatcaatgtgtggcagccgaagatcgagcaggccaatgagttcagcctgtcccagctctggatcctgggaggctccttcggccaggacctcaacagcatcgaagcaggatggcaggttagcccagacctgtatggggacaacaacactaggctcttcacctactggactagcgatgcctaccaggcaacaggatgctacaacctgctgtgctcggggttcatccagataaacaaccagatcgccatgggcgccagcatcttccctatctccaactacggcggctcccagtatgacatcaacatcttggtctggaaggctcgcttcagtcaagggctcacaactgtagctctggccccctcccccagtctgtttgtggacgcactcgcggtcgcggagtga

SEQ ID NO: 7875 - DNA, 319 bp, Zea mays
  Peptide Sequence Number=SeqID_49654
atggctgacgggatggctctcgtccttgtgttcgagctttgtagcggcatggccagcgggatggctctcgtccttgtgtccgagctctgtagcggcatggtcggcgggatggctctcgtccttagagttgaggctgggttcgggaacatgggcatgcgtccgagccctagtctgcacagagcgcagatgagacgttttcccaattggccaaggccgggctcgggcgaggcagagatttctcccaaggccgaggccgagaccgaggccgagattagattcgtgtcgtcctttattgactttggcaccctcagtggggcag

SEQ ID NO: 7876 - DNA, 381 bp, Zea mays
  Peptide Sequence Number=SeqID_49655
atggacatccgtcaggctgacgccgccgctgccgtgccggattcggccagccagccggccgggagccgcagcgcacgcagcttccacgcactcatcagatcacgtcggatcatgccacctctagagcctgctccggtttctgtagcacagcacgtagagtgtaggctttctttaggcatgagagtgcagttgtcattcgtctgtcgagtctttcaacgtctgcccgcacagcacctgcacggactgaactggttactactccgtgcttggcattccagtgcaggcctgcttcatgatacaaccgctttcaggaacacgatgatggtgcttgcgccgcggcttatccgaggcgcgcgccgtggacgctgctttctaggctag

SEQ ID NO: 7877 - DNA, 277 bp, Zea mays
  Peptide Sequence Number=SeqID_49656
atgcatgatcgattagctccagctagctacgtcctacagctagggatcatcaccatcgtcctacggagttcaaatctgttcagagatgagatagatcatcagaatgcgatgctcaataatacattcccatcaagactgcagcgcatgtgttctagaaaaactcaggcagaggttggaatcagggaactaatatatggtaggctcaggtatattcccagcccaacgaaagcagcaaagcacagcataacaaagagcttcaatgactgtaattttcatg

SEQ ID NO: 7878 - DNA, 291 bp, Zea mays
  Peptide Sequence Number=SeqID_49657
atgggatctggtcgcgcctcctctggtgcacagccgccctattgtcgccaccgtggggctctactggcggccatcgtcacccatcagccatgccgtcgcgagctcgttgccgagagggagtgcttcgatgccgctgacaccgctatcgccatgcgctgggttacaggtgtaccggaggcgcatgctgcggctgggtcaacgcactgcgcaatcatgggtaatgaccttatcctcgtattcctcatcttctttgctctgtgtggctatgtcgaattggggagggatcactag

SEQ ID NO: 7879 - DNA, 435 bp, Zea mays
  Peptide Sequence Number=SeqID_49658
atggcacatgagggattagagagcgacgaccttgccgaccaggaatgtggcacggccgtcgcaacagcctcctcgtcgccaggggtgctcgaggcgggatgcgaccgggtcggggaggtggcgagggggagggagtggtggcacggtggggcttcggcctcgtgtgacgacgacgacatgcgtcgtggctgtgggggttcggggaggcagcaatggggagggaatggtggcacgacagggacacgcgcgccgtggctgcgggactcgaggaggaggcgagggggtggcgcgatgggtgcgacggcccggaggcgggacatagcggtggcgcggcctcgtgcgacgacggtcgcagccgggttagggaggtgtgtctgtgtgcttggcaagcgggaatgggaatgggctgtgcgagagtgggaatgtgaacggtag

SEQ ID NO: 7880 - DNA, 291 bp, Zea mays
  Peptide Sequence Number=SeqID_49659
atggcgcaaccgaccgttgaagatttggagccgttggcgcaccggacactgtccggtgcacactggacagtccggtgcccccatcagaccgttggctcagccacgcgtcacgtgcggattgcgcggccgaccgttggcttaccggacagtccggtgttggatagtccggtgaattttagcccattcgagaacaaggaccaacataacaccatcttaaggaacacaatcttaagctctctccgtggaacacaatctaagtccattgaagttatcaaatcatgtctctgctag

SEQ ID NO: 7881 - DNA, 1203 bp, Zea mays
  Peptide Sequence Number=SeqID_49660
atgacgggggagaagaaaatgttcaccttctatgtcaagaacagggattcccaagacactatcatctttggagatgggaaccaaggcaaggtcaagggcttaggaaaaattgccatcactgccgagcattcaatttcaaatgtgtttctagtagaatcgctcggaagaagtgatggttcattagcatttaagggtgtattagatgacaagctctacttagttgatttctcaaaagagaataccgatctagatgcatgcttaatcgctaagactaatatgagttggctctggcaccgccgtctagcacatgttgggatgaagaaccttcataagcttctaatgggagaacatgtgttaggactaatcgatgtctggtttgagaaagacagaccttgtgcagcgtgccaggcaggaaaacaagtaggaagtactcatcaaagcaagaacatcatgatgacatcaagaccactggaactcctacatatggatctcttgggacccattgcttatcctagcatctggggaagtaagtatggtcttgataagtctgaaacccaagaaacattaaagcgcttcctaaggagagctcaaaatgaatttgacttaaaggtgaaaaagataagaagcgataatggatctgagttcaagaaccttcaagtagaagagtatcttgaggaggaaggcatcaagcatgagttctccgctccctacacaccacatcgaaatggtgtagtagtgaggaagaacatgacgctaattgacatggcaaggacaatgcttggagagtacaagacgcctgagcggttttggtcggaagctgcgaatacagcttgccatgccataaaccagctctatctacatcacctcctcaagaagacatcatacgaactcctaactggtaacaaacccaatgtttcttactttcgtgtatttgggagcaaatgctacatcttggtaaagaaaggtagacattcgaagtttgctcccaaagctgtagaagggtttttacttggttatgactcaaatacaaaggcgtatagggtcttcaacaaatcatcaggattagttgaagtctctagcgatgttgtatttcatgagactaatggctctccaagagagcaagttgatcttgatgatgtaaatgaggatgaggttccgacggttgcaatgcgaataatggcgataggtgatgtacgaccgtag

SEQ ID NO: 7882 - DNA, 1443 bp, Zea mays
  Peptide Sequence Number=SeqID_49661
atggcgcgaccgagcgcgaatccctctgcccccgacgctgtggcgctgtctgcttgctcggtggccgcgacaaccgggacgaagggtgacacgggggccctggaggacccgtggtctaagttctgcgtcggcagcaagattacctctattgtcgctgcgaagggcgtggctgcatcagttgcgcagccgctgaaatatgcagtcagggacaagtcggcaacgaagaataagagccgcaacttgcttgagaagctgacggcggcggagacagagaaagaagacctcatctatcggcttgcagaggagagggagggcgcggaaaaagctcgcgtagaggcccaagctgccggcgctgaggctgacgccgcgtgtgccgaggtcagccttgccctcaagcgcgccgccgatgcggagttggggctgaagagcctgcgtagctacaccgagaagatggaggcctccacccgcgctagggttgaacgggcgcacacgctattcgtggatgcgtaccacgatctcggcgcgcggaccgccccttttgataggtctagcaaggaggtaggtctttgctttctcgggtggctgcaggaggagctggagtcgctctcgtctatcatgatgggcctcatgtcctacgcctcgcttgttacctacgagggggtggcgaatgccttgtcccgtgagggatgcaggcatttcgaagtcttcgactggccaacggaggacttagaccatggaatcttccaggttgaagaagagatgatgaatgaagaagaagtcaaggacttcgctggtcttgatagctcgatgatccggacagatggcgcgaaggcgagagctaaagggcacttagcgcctcaagctggccctgttgaagaccctgcagcggcgtctgctccggcgcaggttctgacgtccgggcctacgcaagcaacccccgatgatgttgatactaatattttgacggctgcgaatgcaacgccttttaatggaaatgtgtttgagggttctgaacctaggtcgtggtcctcagacggggaagattttgggagccctttttcgtgcattgaggagtcttctgaggaggatttagactattttgttgtgttggatttggccgcattggagtctccgcagcaacctgatgcgcgcgaagtgtctgccaccccggccagggcgacaatcgaagacacacgcgggcgaagggtggtgtcgaaacagagcattggtgggacgtcacgaagtggaagacatcgccggatgggtatggaccgatcccgtcttcgactagatcggggtaatcaacgcgatctactatcctcgacgtccggaatgtgtattggtgagggggacttgcggaatctgtttgagggcgaagagtttaggatgatgttgtttaatttctgggaggcgggtcttattccgaaggcggagcctatgtag

SEQ ID NO: 7883 - DNA, 318 bp, Zea mays
  Peptide Sequence Number=SeqID_49662
atggatcctaaaggtaagggaatggtgattaatgacaaggagaaggaaaccctctatgtcgacgagccaaaaggcgacaagcccactgactcaggctcaagtcacaagaaaagggatgggaagaagaagaggcacataaagaagatcatctactacgacaacgacacctcctcttcttcaccaagggatgacgatgacaaagactcttcatcgaaaaagaaaacaattaatcactattactcttttgattattatcacatcccttatttaaaaggctcatttgttatctattctactcagaaaacccccacactttga

SEQ ID NO: 7884 - DNA, 597 bp, Zea mays
  Peptide Sequence Number=SeqID_49663
atggcgtcatccacttccagaccccaaccgcggcaggacggactgcccgcggcgacgcagcacgccgaccaagacgaagggtgtggagaggaatcataccggttcccggagggctctagcgtggggagaacggccgcgacagtctctattctccgtcacggcagggatctagtggtggcctggtgggcgcctacggttgtgggcgtcggcggtggatgcccagcggcctcaggcctagggatgggtggccggaggccagcgtttgctgccttgctggagggcggcggtagccaggctggggttaggcgactaaagtcttgctggagggctggaggccgcttcgatggcttgggtagatggtcaaggggatcggagccacaactttatagcagcagagtccgtttccaagggtatactcagccaaatctcaacaaccttggtccagattccttgtcgcccacatcgcaacacccgattggcaagcagagttcgagttctggagagaaaccaggcgagtgggacccacccgacggtgatctagcacgcgtgggcacgttcggccaaacaggatttaatttgcatgcaacgtcgtcatga

SEQ ID NO: 7885 - DNA, 1167 bp, Zea mays
  Peptide Sequence Number=SeqID_49664
atggatgacttctctatgatcagtgaccacagcatgctactccaaggccacggcatgctcggtgccgaaggatgccttggtacccgaggttcttcaggcgttcttccgactggaggccgcaggaccgtcccagtcccagcgctccaactccaagatgaccgcaacaacaagggggaagacatgttcttctccgactggcctgagctggccagcttcgacgatctcgaggctagcctgagaaatttcgatcctacgtttgagattgggagcagttattttgatgacatgctatggccctcaaattgctcaccgggagctcagctagcacggaacggctactctgacgatattgatttctcaatcgatcaaaaagacagcaacagcactccgaaggtaaatacgacaaaaaccaagcaacagtccaggagaaacggagctagtggtggtagcagtggtacagcctcgaaccacgaagcacatgccagctcctcttccggtctttcggacgccgaactcttcctccacccgttcgatgatactacagcactagcgagccaaacgtgggaggaggacctacaggccattctttgttcgattccggaaacgcgagcagtcgtcccagcggcgtcaaccgccatgtgcgccgatggctcgtccacctgttgctcggggccagacatcgttgccgctcaccacgttcctcgctcggcgacggcgacgactaaagacgccgcctttagtgggtctccggacacgatcctggaggagatggctgagaacccgctggacatgtacttccctccactgccaacaacatccggacagtccggaacgatgatgatgagcgacaccacttgggcgccggaacatcggttccgagaagagttcgcgggcagctgcgctctggggtgcgcggagctacggttctgctcggaggacgtggcctccgcaggagtatttcataagcagcctggctcggcgacggcggtcgtcctggatgccgtgccagtgaaggatctttcgtttcagaagcttcagcatggcatgaaccagcttgatctggccaccagaggacgcatacgggattccctgtaccggttggccaacaggcttgaacaaacgcattgcgttgccagaacaagcggaagaatgggttcaaataggtaa

SEQ ID NO: 7886 - DNA, 1842 bp, Zea mays
  Peptide Sequence Number=SeqID_49665
atgtccggtgcacaccggacagtccggtgcacaccggacagtccggtgcccccttctagtcgttggctcggccacgtgtcccgtgcagatcgcgcggccgaccgttggcccggccgaccgttggctcaccggacagtccggtgcacactggacagtccgaaatggcccaagggcacatttccctttcagtaccgcctcttgaggaaggccgagtgcttcacttggacccctgaggccgaggaagccctcgggaacttgaaggcgctcctcacaaaggcgcctatcttggtgcccccagctgccggagaagccctcttggtctacgtcgccgcgaccactcaggtggttagcgccgcgatcgtggtcgagaagcaagaagaggggcatgcattgcccgttcagaggccagtttacttcgtcagcgaggtactgtctgaaaccaagatccgctacccacaagttcagaagctgttgtatgcggtgatcctgacacggcggaagttgcgacactacttcgagtctcatccggtaactctggtgtcatccttccccctgggggagatcatccagtgccgagaggcctcgggtaggattgcaaagtgggcggtggaaatcatgggcgagacaatctcgttcgcccctcggaaggccatcaagtcccaggtcttggcggacttcatggccgaatgggtcgacacccagctaccgacggctccgatccaaccggagctctggaccatgtttttcgacgggtcgttgatgaagacgggagccggcgcaggcctactcttcatcttgcccctcgggaaacacgtacggtatgtgctacgcctccatttcccggcgtccaacaatgtggctgaatatgaggctctggtcaacgggttgcggatcgccatcgagctaggggtccgacgcctcgacgctcgcggtgactcgcagctcgtcatcgaccaagtcatgaagaactcccactgccgcgacccgaagatggaggcctactgcgatgaggttcggcgcctggaagacaaattctacgggctcgagctcaaccacatcgcccggcgctacaacgagactgcggacgagctggctaaaatagcctcggggcgaacaacggttcccccggacgtcttctcccgagacctgcatcaaccctccatcaagatcgatgacacgcccgagcccgaggcaccctcggcccagcccgagaaggcacccgggggctacacgcacctgctggtcgccatctacgatttcttcaagtggatcgaggtccgacccctaaacagcatcaggtctgaacaggcggtggcgttcttcaccaacatcatccatcgcttcggggtcccaaactccatcatcaccgacaacggcacccagttcaccggcagaaagttcctggacttctgcggggatcaccacatccgggtggactgggccgccgtagctcaccccatgtcaaatgggcaagtagagcgtgccaacggcatgattctgcaagggctcaagcctcggatctacaacgacctcaacaagttcggcaagcgatggatgaaggaactcccctcggtggtctggagtctgaggacaacgccgagccgagccacgggcttcacgtcgttcttcctagtctacggggccgaggtcgtcttgcccacagacctggaatacggctccccgaggacgagggcctacaccgaccaaagcaaccaagctagccgagaagacttgctggaccagctggaggaggctcgggacaaggccttactacactcgacgcggtaccagcagtccctgcgacgctaccacgcccgaggcgtccggtcccgagacctctag

SEQ ID NO: 7887 - DNA, 777 bp, Zea mays
  Peptide Sequence Number=SeqID_49666
atggcgacgctcaccgttccttcctccgtcccggccgtcgccgaggactgcgagcagctccacaaggctttcgaaggttggggcaccaacgagaagctgatcatctccatcctggcccaccgcaacgccgcgcagcgccgcgcgatccgccgcggctacgccgaggcgtacgggaaggagctgctccgcgctctcggcgacgagatccacggcaagttcgagagggcggtgatcctgtggacgctggaccccgcggagagggacgcggtgctggcgaacgaggaggcgaagaagagccaccccggcggccgcgcgctggtggagatcgcgtgcgcgcgcacgcccgcgcagctctttgcggtcaagcaggcgtaccatgaccggtttaagcgatcgctcgaggaggacgttgccgcgcatgtcaccggcgacttccgaaagcttttagtgcctcttgttagtgcgtaccgctatgatggcccagaggatctgaaagctgaccccaaggatgagtttctttcaacactgcgggcgatcatccggtgcttcacctgccctgacagatacttcgagaaagtcattcgactggctcttggaggcatgggcactgatgaggatgacctcaccagggtcgtaactactcgcgccgaggtcgacctgaagctgataaaggaggcttatcagaagagaaacagtgtgccgctggagcgtgctgtggccaaagatacaactagagattatgaggatattatgcttgccctccttggggcggagtga

SEQ ID NO: 7888 - DNA, 1752 bp, Zea mays
  Peptide Sequence Number=SeqID_49667
atgtccggagcccgtcgtcgttgcgttgcctcgttggttgtcaaccaggaccaaacgcccagcacaccacctggctgcctctccatctttggcactgccccccacatcgtcccctgccttccccccgcccccacgcagcactccgcgggccggggccgcgcggccgcgaacgtcgccacggtcatggtcgccatgacggagccgcgcgacccgccgaccggctgcgccctgttcggcatctacaacggcatgttccgccgccgccgctccgcgtccatgacctccctccacaggatcaacggggccgaggccgaggccgaggccgcggcgccgccgaaccagaagcccgccgcgcaccgcgactcctccctcgcgcgccgccccagcgccatgcccgtgccggcggcggcgcagaacggcaggagcaggccggccgccaaggcagcgcccgccgcggagccggcggcggagtacagcggcatggccgcggagctggacaggatgatcctcgaccaccagagggtcaagggcaccgcgcagctggtgcgcgccacctcgggcaacatgatgctgcaccgcaacctcggcaacctgaacgcgggcggcagggcggcgaacgagcggaaggcgccccacgggtacgcgtcctccggcatggggaacatcgtcagggagccccggccggcacctgcagcggggggccagctgtgccgggcgctgtcgcaccgcacggaccccgagaagctcaaggagatgggcaacgaggagtaccgccaggggcactacgcggaggcggtggcgctctacgaccaggccatcatcatggacgccagccgcccggcgtactggagcaacaaggcggccgcgctcgccgcgctcggacgcctcatcgaggccgtcgccgactgcaaggaggccgtccggatcgatccttcgtacgatcgcgcgcaccaccggcttgccggcttgtacctcaggtaccgcagccgcatcgccaggagcaacgacgcgcgcaggctcaagaactggatcacggtgctccaggaagcgcaggccgccgtggccgacggcgccgactgtgctccgcaggtgatggcgttgcaagccgaggcgttgctgaggctgcaacggcacgacgaagccgactcgcttctcagcggcgccggcgcgccaaggttcggggtcgacgagtcgaccaagttcttcggcaccttcggccacgcctacttcctcatcgtgcgagctcaggtcgacatggctgctggaaggttcgaggacgcggtggcgacggcgcagacggcgtttcagctggacccaagcaaccgggaggtctcggtcgttcagaggagggccaaggcggcggccgcggcgcggctgcgtggcaacgacctcttcaaggccgccaagttcgcggaggcgtgcgccgcgtacggcgagggcctcgacagggagcccggcaacgccgtgctgctctgcaaccgcgcggcgtgccacgccaagctcgggcggcacgagaaggccgtcgaggactgcagcgccgcgctcgacgtgcgcccctcgtacagcaaggcgcggctcaggagggcggactgcaacgtcaagctggagaggtgggaagcgtccttgagagattaccaggtgctggtccaagaactgccggagaatgaggacgtgaagaaggctctctctgaggtcgaagccaagctcaagggccaaaggcatggggccgcagcagccagatctcagcactga

SEQ ID NO: 7889 - DNA, 135 bp, Zea mays
  Peptide Sequence Number=SeqID_49668
atgtctctgggctccagcacagcagcactacgcgccatctgcccacccggatggcggctgctccacgtgtctgccggcacgccaggggctatatttggtttgccatatgagaacttcactggtccagagaagtaa

SEQ ID NO: 7890 - DNA, 375 bp, Zea mays
  Peptide Sequence Number=SeqID_49669
atgggcaagaacaacaagcgtgagccgactcctccatcagaggacttcggtgattcggaatactcagaggaggtgttctcctctgagtccgaggggtctccggctcccatccctctgcgtgagtcgtctgacgattcagacgactccaggggcttgcggcggaggtctggacttacatccgggccgtcgagcgcttcgggctccgagggcggtggcggcgatggcgacgacgacgatgatgacggcggtggcggcaatgacggtgacggcggcgatgacggtgacggcgacgacagcaaggatggcgacggcggtagcagcaggggcagcaacaggggcggcagcggcagaggcaacaacagggccagtggctaa

SEQ ID NO: 7891 - DNA, 582 bp, Zea mays
  Peptide Sequence Number=SeqID_49670
atggcgccaggaagcaaggcggagaggaaagcagcactagacgctggcgcatggatgttcaatgtcgtcacatccgttggtatcatcatgtatgttcaccaccttcaatggaagtactcgcttggctcattcaacctcttaggccatactgctccagcccaggcagcatcgttgttagtattgggtccttttgtggacttctggctgaccaacaaaagagtcgatgcttttaactacacatcaatagttacgttctttatcgtgttgtcgtgcataattgctgtcgggaccaacctaagccagttcatatgcatcggaagattcacggccgtctcgttccaagtcctaggtcacatgaagacggttctcgtgttgaccctggggttctttttctttgggaaagagggtctcaatttccacgtcgcccttggcatgtttctggcagtgatcggcatgatctggtatgggaatgcctcctcgaaacctggaggcaaagagcgccaggtttactccacaccgagtgagaaaactcagaagcatggggtgctgtcatcccaatccgagcttgatcagaaggtctga

SEQ ID NO: 7892 - DNA, 156 bp, Zea mays
  Peptide Sequence Number=SeqID_49671
atggcgccccgcacgctccgtgatgacggcagctctcagcccccttatggaagcaagaggacccaatttagggcatcggccattgcttatcttggccggtacaggttcgccgagctcggttcttcgtcgtgcgacgtcgtggaccttgggttgtga

SEQ ID NO: 7893 - DNA, 183 bp, Zea mays
  Peptide Sequence Number=SeqID_49672
atggcggatcgtagcaggggcgtgcggtcatgtggacctgggttggtgcaccggcacaccgagatccacgggggcagaaccctgaccattgatccgtgtatcaacgatctagatttggtctgggcatacctcttgtgtgggcagatcagaaccgttgatctgcaggcatgcggccagaattag

SEQ ID NO: 7894 - DNA, 504 bp, Zea mays
  Peptide Sequence Number=SeqID_49673
atgtcgacgcctccgcgcagcaccaacagaaaacaaatcgggcgaccgatagatagtcgtgatggagactcccgtgaaagcaggtcggaggtttccaattatgttgtgcacgccatagcccgcgaatccacccctcgggggcgaggctactccgtcagcaccggcggcgaagacggggaagagatggacgtgaaaaccttcccagcagggctgcgcgtgctcgtcgtcgacgacgatcgcgtctgcctcaaggtcctagagaggcagttgaagtgttgcaactacaacgtgatggtggtgacggacgccaggacggcgctggaaatgctcagggagaggaaggatgacggggaccagtttgacctggtgatcagcgacgttgtcatgcccaacatggacggctttgagctcctcgagctcatcggcgtggagatggatctcccagtcattagtaaagcccttgcccttcccatttttatgcatggcattcttttgatcatttag

SEQ ID NO: 7895 - DNA, 348 bp, Zea mays
  Peptide Sequence Number=SeqID_49674
atggcttcagatagaggacaacatcatccgcatgaaaggatattctttgtgcccgacctctcctcaacaaaggttgcaagaacccttgtttacaagcttttcatagtcaaggagtttagaactcataatagaaggggtaacggcggatccgactgggaaggccatgatagcgacagatctagccatgaagatggagatctggctaaagggacgatggacctagccgggaaggcgactgcaatggtggatctagccaggaaggccatgacagcgacagatccaacgaaggcgacgatgaacaagggggatgtcgacggggcggttctagctgggcagaggcctgcgtag

SEQ ID NO: 7896 - DNA, 1407 bp, Zea mays
  Peptide Sequence Number=SeqID_49675
atgggtgtgcgacattcgaggtcagttgtccattcaagtgctcagagagtacatgtggctttggaatacgttagatgggtttttactggtgctagggcccagggatccctaattaatgttcaagtgtgtaagtgggatcgtcttccttctaatggcttaagcttttgggttgaactgggatgtgaacaatgcccttttatgaaattatttgaaatgacaaaaggtgcaaatgattataaaaactcaactgcgggagtgctatccgcaaacagcgagacacggactataatgaaagggataaagcacggggcctgtgattatatcgtaaagccagtgcgcctcgaacagcttaggggcatatggacacatgtggtgaagaacagtaggactgatccacggaccagcatcatcgacagtggcagtgatgatgatgtacagaagctgccatctggggatggtggtgaaggtgacaaggttggagcaaaccgcagaaagaagaagtgttcaaagaagaacaaaccggctgtggatgttgctggtgggcacagcgagaacacatcagcccagaagaagccaagggtccagtggtgtggtcaactacaccgcaagttcgtagaagctgtccatcagattggcatcgacaaggctgttcccaagaagatactagaagccatgaatgtggaaggcattaccagagagaatgtcgccagccatttgcagaagtaccgaatctacctcagaaagctcatcgagggcacattggggaactctaattcatttgctgacgaaaccgaagcattgtggagatacttgaatgtcccatccttcattacctctccgagctcaagcaaccattttacaaatgccggttcctcatctgcaattagaacccaaactttgctacccccacagccaccagttcatgtcatgagctcccagaaaaacttgagcactcctcggtcagacatgccaccattgacctcgaacatgtggttttcttcgtctcgttcttgcagctcctatgcgagcatactgcgtggcaagattctgggatcgagcagaggtattcctttcgaagacacgccagatggtgagatgctggctcctggtaatttgtcatcgcagtctcctgagcttcagtctgtttgggctggttctgcaagcaccagatctgaccttcagatagacaattcgacccaggcgctgaatggcggcggggcaagtgacaatagcctccgtgaaggaggcagcactgttgatcagcaagctgttgttagtgaccaagtgaataacatcaatgcggagagtgatggcttggatgatttccttgcttacatggttaatcgacgggatttcatcaacaatggtgattctttcatcctcggggaccaggactttgccccttga

SEQ ID NO: 7897 - DNA, 579 bp, Zea mays
  Peptide Sequence Number=SeqID_49676
atggcctcaagatatgctccaagcctgggggcttgtgtcaggatcctgctgctggcttacgtcatgtaccataggtcacgtggtagcatcggtaccccgcctgagtgggagcaggagtcaagagtatacacagctgaggtcctagaaagcgcccatggaaagcagccgatgggagcaacccgaatcccctggcaaaagtctggacatgtggcagcactagatgcctctaggccaaaggttcagatagcttcgtacagacatgggactgccccgagccaggggtctgaaaagtgtccggggctggacatgtccagtacaggactgcacacatggcagtattggacccctttaagcctaggggcgggtgacacgtataggcgctcggggcagcccttcgcaagaccgccccctactgtagctgtagagggtccctattctttaggatacatggcagctccaaagcccctatgtcggggattcagagtgctaaccgtagatgttggcccatctcccgagggaagcgtcccttcttggtggccctatccactgagccaggataggctaccattggccttgtga

SEQ ID NO: 7898 - DNA, 315 bp, Zea mays
  Peptide Sequence Number=SeqID_49677
atgacgatcaagaacacgctcaaggacccccacggcgtgctcaagaactgggaccaggactccgtggatccctgcagctggaccatagtcagctgctcgctagagaacttcgtcaccggactggaggtcccaggtcagaacctctctggcctgctctccccaagcatagggaacctgacgaaccttgagactattctcctgcagaacaacaacatcaccggcctaatcccagcagagatcggcaagcttacaaagcttacaaatcatgccttaaacagcgtgcaatcaattttgactaagttttttctagaatag

SEQ ID NO: 7899 - DNA, 300 bp, Zea mays
  Peptide Sequence Number=SeqID_49678
atgttttctggctccgtttcctcgacaagaagagcggagcaggtcaagcagcagcaagtacgtgaggactactgtggagcagcactatgggaagctggccctcaagctcaacttcctcaagcaaccattcagctaacgcaaacgaagaacttcttcaagctcctaaaggtagttcagtatggtattttagaattggttttattggaaattgttggaaatgatactcctccaataatttttggcgacttggaatcccttgattttgggaagaaattgttgggaactcttgagatgctctaa

SEQ ID NO: 7900 - DNA, 651 bp, Zea mays
  Peptide Sequence Number=SeqID_49679
atggcgccactcctcttcgtcccgaacaaaaccttggcaccaccgatcctccacgctcgccaccgcttcgcgcccagacccccatccgccgcggccttcctccgcagattttttcccaccaggccaccggcggcgaaggctgacctcctccgcctcatcgccgaccagggccgcggcctcgagacgcagtccgccccttcccgcctcgctgacatcatctcctgcatcgacgcgctcgccgccgtatcccccggcgcagacaccgtatccgacgccgccaagctctccggaacctggcgcctcctctggaccaccgagcaggagcagctattcattgtgcgcaacgccccattcttccgcactgccgccggcgacgtgctccaggtcatcgatgtcgccagcggcgcccttaacaacgtcatcacgtttcctccctcaggcgcgttcgtcgtcaatggcgacatcgaggttcacacgcgctgctctgagagggaacaactgggaggttccttttccgccgtttggaaaaggatggtcctcaaattactcctgtttgacactgtctatttggatgacgacatacgggttgctaaggacataagacgagactatttagtggttgagcgtgctccatattcttgggatgtgtag

SEQ ID NO: 7901 - DNA, 561 bp, Zea mays
  Peptide Sequence Number=SeqID_49680
atgcttcttctcctcactctctctctcacttactcactcaaacgccgtcacccccgcgccctcaccgtcgccgccgtgccgtatcttcgtgccggccgcgcccgcccgccgtgccccatcgcccgccgccgccggccgcccgtgcgccatcgccgccgcgggtcccgccgccgcgcccgtgcacgcgccgcctccgcgccctcgccgccgcgctcccgtgccgccgcccgcccgcgtcgccctcacgctcgccgaagccgcgtccgccgtgcccgcgctcgccgtgtcgttgcccgcgctcgccgtgccgtgcccctcgtcgtgtcgcgccctcgcccgtcgtcgtgcccctcgcctaacccctcgcccttgcccgtgcccccgccgcggccccgcccaccgcccccgcccgtgcccccgccgcactcctcgtccgtcgtgaccccgccgtttccccgccgtgccctcgcccgccaggcgcctcgcccgcgacccgacgcctcgcccgcgacccgtcgtctcgcccgcgccccgtcgcctcgcccgtgccaaaacctctaa

SEQ ID NO: 7902 - DNA, 864 bp, Zea mays
  Peptide Sequence Number=SeqID_49681
atggcgaaggcgaggaagcagaagggtgacggtagcggtacgggcggaggcgccaccgttctccaccagaaactctgcctctccatcgacatggagaaccagctgatctacgggtacactgagataaaagctcttctagctgaaaacgacacatttgctctacatgctgacaatatgacgatcaggagcattctggtggatggtgaaactgttgagttcgactattcccctcattggaaaaatgaaactgatcaacctaattggtcttcaatatcatgtttgaacactgttgctgatgctgcatgttcaacatatacttcgtctctaaatcgagaagctacaccaaatcttattgtgtcatctgagagatcaatcaagtcaatgattgagcagcagttagatgaaaacagtgaaaaatatgaagaaaatagtggaaggcttgaaaaacatggtggaaagaccatccaaacttcctatgatcaaattgttaatggctgcaatggttctgcagtggaagagggaatagaaaattctgcagtggaagaagggaaaaaaaaggaaaaggaaaaagagaaggaagagaaaaatggaaatgagaagagcaaggaaaatggaaatgagactgaaaatgaaaaggtgaagaacataaaactggttcacatagattatattttggagaaggctgaaactggcattcactttgttggcaatgtcatgcatagcagtaatcagataaggcgggcacactgttggtttccttgtgttgatactgccacacaacgctgtccatttgacttagaatttacagtcagcacagatttcatcgctgtcagcaacggtgacttgctttaccagctgttatga

SEQ ID NO: 7903 - DNA, 162 bp, Zea mays
  Peptide Sequence Number=SeqID_49682
atggcgatctggccaaggttgctcctccgcgaagcctgggcctcgagcgagccgaagtgtcgccacgtctcctgtcagtacgtcgtcaaccgtcaacatcccctgatcgcgctacccgacgccgaccgcctcattgatgaagtcctggaatcccttggatga

SEQ ID NO: 7904 - DNA, 237 bp, Zea mays
  Peptide Sequence Number=SeqID_49683
atggcgggttggtatatcaaaataacaagggttcttatgcaaaaagcgctggccgaaggggtatcttcgactgtggatcacacgatcaagaacggacggaccggattaaaacaatctccatcgaatcggagatcaacgaccagtggccttctcccaacttccggtcaaccagtcgcggcggcgtcgccaacggcggagccacattcggagccaccagagctgattccccccaagtga

SEQ ID NO: 7905 - DNA, 330 bp, Zea mays
  Peptide Sequence Number=SeqID_49684
atgacaacgtcaagaccactggaactccttcacatggatctttttggcctcgttacctatctcagcatcgggggaagtaagtatggtcttgtgatagttgatgttttttcccgcttcacttggctaaagttgaagaagataagaagcaacaatgggtccgagttcaagaatttgcaagttgaagagtatcttgaggaggaaggcatcaagcacgagttctccgctccatacacaccacagcaaaatggtgtggtagagaggaagaacaggacgctaatcgacatggcgagaacgatgtttggagagtacaagacgcctgagcggttttag

SEQ ID NO: 7906 - DNA, 619 bp, Zea mays
  Peptide Sequence Number=SeqID_49685
atggagttgaatgagaaatctgaaaagaatacgcaagaggtagatgagaagttccaaaacacaaacttgtatctcaagaacttagagatggagcttcggggtaccatagggcaaagtgaagaagaaacagaagagttgagcaagatcacgctagagaataaggatattcagcttgatatcaatataagagtgtttgatggagccgaccctatggagctgcatgtttatgattttaaaggacctggtgtaaccttatcaatgtacaatagcgatgagtttattaggccttttgctaagtcctccatggatatggctctttcaaaaaagtcgtctcttcatctcagcaccaagaatacaatcatcaagaagtatgacgacaggcatggatcatctatgtttctacaagctcgcggtaatccatgcagtttcaagtatcctttgtacaacatgcaagctgttggtactaatgtgcatttacaggtcacatttattaggccttttgctaagttcatggatatggctctttcaaaaaagtcgtctcttcatctcagcaccaagaatacaatcatcaagaagtatgacgacatgcatggatcatctatgtttctacaagctcgcg

SEQ ID NO: 7907 - DNA, 786 bp, Zea mays
  Peptide Sequence Number=SeqID_49686
atggcctcacccacggtcgcctccccgatccgggcgagccccgtcgacaaccccaccgtcgcgccctcactggcctcctgccgctgcgccttatcgctagatgctcgacatccccatccgcgcgctcgaggcagaggccagggacaccaagatgagcccgaccgcgaccgcctagccatcagctccaaagaagaagccaggggaccgatggacgtcagtgttccgtcgtggtggcccgctagatccatattcagcaagaaagagctggcggatgctgtaactctgcagcttcctgactatcacaaagtaatagctaaacctgtagctttcaatctcatggccgcagcccgtcaccttcctccccccgcacccgccgtgacagccgcctccccacgcccgcttacccgactggccgcacaagatgcccacagtggcccccatcgcgcccacccgctccccccatccaccgcgacctcagccgccacgccgacgccatccccgtcctctagcgcgttgtcgccgtcgtcacaccgccaaaggtgcctgccccctgctaccgaggtcgacgaccagcagcggcaagctgccgagctcgacgacacgcacgccatgcttggccatatggacgagtccatcgcctgctacgagaaggggctccagatccagatgtccgcgctcgatgagcgcaatccctgcctccctgagacctgcagatttgtctttggtgttacagcacttttgccactgttccgagtagcagagaaggacaactctggcaaactgtga

SEQ ID NO: 7908 - DNA, 639 bp, Zea mays
  Peptide Sequence Number=SeqID_49687
atgggtgaggccatgctggcgcagggcaagactggagtcaggcacagtcgattggaatcgaaggcgacagggacggagggacctcgctgggagggcaggagggcgtgtatggagttatttgtgatttcctcttcgtccgtctcagatcctcgcagcaccgccattcgccattgtcgtcgctcccggctgagaaccatgtcgtggcccctggcttcatggcgtactttgcgtggcgtccacctccctggagttccagcactgcatctgcctcgtgccccgtatgtcgggatccctcggcgaggcgcgggcggctctcgctgtggccgcgcaggacaccgacgacgcggcggcggcggcgctcggcctggtcacagccgccctagagatgtcgtcatgggccaaggcggcgctggagctccgggcgcgcgcgctcctcgtgctcaggcgctaccgcaacgtcttcgtccatggctggagatcgacgagactcgtcgtcattgcgaccggccaaactcgtcaacactcaatgtctggttgacgagaatactgagtcgaggctcagagtggagacagactgggcgaaaagggaagggcaaattagtcagtcgtatgaagtttgaaagctacgcgcgctgttag

SEQ ID NO: 7909 - DNA, 195 bp, Zea mays
  Peptide Sequence Number=SeqID_49688
atgggagcgggagggggagcagtggaagctggagtggtggaggtggtgggtacagcggaagtagtggatggctctagagcagcaggagctggtgaagtgggaggtggagtagagacagtggcggaaggagagaacgacattttggcacttggctcagaaacaattgctataaatgagaaacagtggtgtatttag

SEQ ID NO: 7910 - DNA, 438 bp, Zea mays
  Peptide Sequence Number=SeqID_49689
atggccgggcagccttcgtccccttcaccgtcaatgggttcttcatcgtcgcttctggagggactcagatctaagtctgagtccgtgtggaccaccctgtcagcacgatacgatacgcagtaccgaaacggccttggactccaaggcgcccaccgtcgcctccttctcatccagagagccaaatttgatcagcccagggattctcaagcccgacctgtcgtagcaggggatcgacatcctggcagcatggacgccgttgtcgccggtgtctgggaacctcaaagacagcaggttcgcggcgtacaacatcgtatcaggcacgtccatggcgtgccccacgccaccggcgccgcggcgtacgtccaagtccttccacggttccaccccgactggtcgccgacgatgatcatgtcagtcagccctcgtcacaacaggtaa

SEQ ID NO: 7911 - DNA, 468 bp, Zea mays
  Peptide Sequence Number=SeqID_49690
atggacccgtcgcgcaactcgggcggcggcgagctcgcctacggcgctaggcagctgaacccgtcacgggcgcgcgaccccggcctcgtctacgacgcgcgcgaggccgactacgtccgcatgctgtgcacggaagggtacaactccacgcagctccgggccgtcactgcctcaccagttccaacgccacggcctgcagcagcggcaggaaggggcgtcgccgccagcctcaactacccgacgatggcgcaccacaccaagccgggcaagaacttcaccgtcggcttcccgcgcgccgggctccgtgtacaccgccaaggtctcatcagagtcaccgtcgtgcccaagaggctggtgttcagcaggctcctccagaggctgtcgttcaccgtgacggtctccagcgccctgccagctgccaatgagtccgtgtcggccgctgtcgtgtggccggatggtgtgcgctag

SEQ ID NO: 7912 - DNA, 322 bp, Zea mays
  Peptide Sequence Number=SeqID_49691
atgtcgtccggcttgagtggcggaggtggtaccagtgggggaggattgagcggcggtggaggaggaggccgaggcgacgacgagtattggcagttggatatgcagcctgctggatctgctaattcgaatgagccggcgaactccgtaggtggcagattcccccaaatgcatgtgaccggcagcggtgaactcgacctcgacggcgggggtaccttgcgtgtaggtggagtagctttccgtccgtgtgtgcctagacgggcaagagtcgtcgcagatccgttagattcatccttgttcggcggcagggagttcttcgacctag

SEQ ID NO: 7913 - DNA, 123 bp, Zea mays
  Peptide Sequence Number=SeqID_49692
atgaaggttaagatttctgaggtgatactaaaacttcataccatgtccttgcctgaacagtccttgaataatcggagaagctacctccttccagataatgtaatgaggaaccttaaattttaa

SEQ ID NO: 7914 - DNA, 657 bp, Zea mays
  Peptide Sequence Number=SeqID_49693
atgtggccactgcgtcgaccgactttagaccccggattctccgccttccatgaaatctccgcccagcatggggaacacacatcagcctctactattattgttttgcagtttcattcttttaggcccaatgacacttctaccttctatcactaccgccatcgacaagaagatcatcaggaggaaaggaggaataatgcagacaacctcgtaatgatcctcgcggaggccaagccagaaaccatccttccgcagcttaccaccaggaaaggacagttaaaccaccattctacgtaccaactgaatcagtctttagttgctggaaagctgatggaccatttaaaccctttggagagtgtccacctgattgcaatgcggcatgcatttctagccttgttctgtgtagaagagagaggatgtgatagtgaagggccagaaatagagggtgccatgttgcctctgcacactaattacctccaagtgtacaagttcaacaattacaacctcacagtcacagtgctcattatgttagcaattaaacaggcagcgggcaaatgtgttattgaaatgaacaccagcacaagcaagatagcttttgacagagttcgcagaaggctgctcgtcactgattccttttgggagttaggtgctgggtggtag

SEQ ID NO: 7915 - DNA, 381 bp, Zea mays
  Peptide Sequence Number=SeqID_49694
atgcaggctcaccaaaggggactggggagagaatctcgtgcctaccttggcctccgcgaggatcattacgaggttgtctgcattattcctcctttcctcctgatgatcttcttgtcgatggcgtggccacatcgggaggaggcggaggccgctggctgggtggagaaggcagaggccagaatggatcgggcgctaagtcggtcctgttccacgctggcgttggatccggcaacgacggggtctaaagcacgaagatgctgctgccagaataagtgtcgcagaggaggaaaggtgagtggccatggtggaggagagtatcgtcggctcctcctagttccggcgatggtggggttctgggatggggatggaggcggcggctag

SEQ ID NO: 7916 - DNA, 294 bp, Zea mays
  Peptide Sequence Number=SeqID_49695
atggtggattggtcacctgtgccatcccaattgctcaccggagcagtccctgcagtgaagatccgctatctgtcgcggggcgacttcaccagggtgccttcaatggttgcgggtaaggcgctcaccaactcgttcgctgcgcggtggcggcgcgccgccgtgctctggcgaggcagggttgaagacaagcttgcaaccgtcggtggtggttggatcttacttcgacgctcccgattagatatgggggaaaaagagctcggggttgtggatccagtgttggacgacccaaattag

SEQ ID NO: 7917 - DNA, 477 bp, Zea mays
  Peptide Sequence Number=SeqID_49696
atgcgaaggcgacttcttttgctggtggcagtccatcataggaatctgcgccgacgagtttgttcgtgcatccttcgacttttcctctccgtgctcgtcgcactcgcccccttccactacctcgctccgccatgggccgcctcctcacatttccccccttcccatctcacccatcgcgctgggctagaggaagaggacgaggaggacacagctccggcttttcctggggtggaagcagaggcggaggctaatgcgttgcacagattggatttctttgttcttatggtgttttgtcacgttacaattagccaaatgatgcagtacgcatgcaagcgctacttcgtgctcgaggacaccacgctccgctggttcaagtttgcgccatcctccaagcgtgagcagtggtacatcacccactacagagtggacatcggtaggaagatgcatgttgccaacaaggatgcagctaagggataa

SEQ ID NO: 7918 - DNA, 321 bp, Zea mays
  Peptide Sequence Number=SeqID_49697
atggcgaagtcaggccacggtgtggcacggccggtggttccccaggattccggcgaacaattcgtcgacccgcgcatattaaatcacgcccccaaggtggagatattgagcagtgagtaccaagagaagggctcgacacatcgggttggggagaacgaggataccgcgacgcccgatttataccccggtagcgaagtccgagcatgggcacgagaagcgagatctccggcgaggtggtcgatattctgttgcaacgacaacggggagaaggacccgacagacgcggcccacaagtctgtggcgcggtggaaggggttttga

SEQ ID NO: 7919 - DNA, 282 bp, Zea mays
  Peptide Sequence Number=SeqID_49698
atgaccgccatcgcagcaaaatcatctcaagggcctccctacactgaccactcccctactgcccttgcccctttcggactgcgcatgaaattcagtatagtacagggggccctgcgcaagtgctcccaagactcggaacaacatccgcaaggacggcgggttgaattctatatcactcggggtctcttatgcaaaagatctaggttgaatgggtatggagaaattcgggccgcacgatctgatccggacggctcggattacaacgtggtcataaccgaaccg

SEQ ID NO: 7920 - DNA, 354 bp, Zea mays
  Peptide Sequence Number=SeqID_49699
atgaccgccatcgcagcaaaatcatcccaagggcctccctacactgaccactcccctactgcccttgcccctttcggactgcgcatgaaattcagtatagtacaggggcccctgcgcaagtgctcccaagactcggaacaacatccacaaggacggcgggttgaattctatatcactcggggtctcttatgcaaaagatctaggttgaatgggtatggagaaattcgggccgcacgatctgatccggacggctcggattacaacgtggtcataaccgaaccggggtatgctgattctaatcctgaccgcccacgcagagatcaacgtcccgaaacaatcagctgcacaatttaa

SEQ ID NO: 7921 - DNA, 357 bp, Zea mays
  Peptide Sequence Number=SeqID_49700
atggcgtcaaggtggtcgaacatgatgatgataaatttacaatcaacaatcatggaaggttttcattggtggagttgcccacaatgcttgcaaaatcgcctaaggctatttaggtgggcgaccagcatggaagtagcgtccgggcatttaggggagtgccatctgggagcacaatggggaggaagggcattgaagagaggtgaagagagggagacaagggagaagcaggaggggtccctagcggtgataataccaccatgggagccagcggcagggacagatgctaagtcatggatgtttggaggtaggaaggaaatacttgcgaaagtgtcggggtcacagagtttcaattcttag

SEQ ID NO: 7922 - DNA, 1341 bp, Zea mays
  Peptide Sequence Number=SeqID_49701
atggcaccgcgggtggtggccggtgaagattgccttggttataggttgtttctccttctctgtgctgcttacatccgctgggacccaaatctacgggaaaattgcgcaggttggagcaggcttgtgtctaccataaaatttatcacacagctgaactacaaattatgcgtgaccaattttgaagaaaggtacctctgggtcgccgcgatctctgctactgccgtcatcatatcaatgggattgatcatatttatgaccctcaagttcgcacaatgttggcacaacatggaggtcattgttatcacacttgtgctatttttcatcatgtgtgtgctctcactaatgtccaaggctaacaaatttttcatggagcctgcactaattggtgggtacgctacattcatatgcctgctagcgatgacaagtgaacccgagtcaggctgtggcatgaaaagcaaagcaggcccaggtgctggttggttaaccatttccttttttgtttctggactgctcagcaccgtttattctgcctttaccatgggcaccggctacaaatgtacacgaagcacggtggagtcggaagacgacgtaccatatgggtacggttttttccatttcatcttctcggcgggctgcatgtactttggaatgatgtttgttgcctgggacacacatcataccatggaagaatggaacgtagatattgggtggatcagcacatgggtccatatcgctagcgaggctctggtggtagtatcctacttaacgatactgctggccagaattttgggagtaggctggctccaacacttccttgcaaagatctttggaacagatgaccagccgcacaacgatgaatcccatacgacgaccgatgaatcccatatgatgaccgtgcatggtgatgaaccccagacaacgaccgtgcatggtgatgaaccccagacaacgaccgtgcatggtgatgaatcccatacaacgaccgtgcatggtgatgaaccccagacaacgaccgtgcatggtgatgaatcccatacgacgaccgtgcatggtgatgaatcccaagcaacgaccactaatgatgatgaatcagagacgatgaacacgcatgtcacatcgccgtcctctttgtatcacacagcgtcaccctcttcgctctactactcccccgagcaatcaccgaccaataacaccgaccatcaacctcctccgccgtcgccgccttcactgtccccccctcataccatagaactgcaaatgtccgaggtaccaaacatcggtacctctggcatgaatgaagaggatggcgatgactatatcagagaatgggagagtgaataa

SEQ ID NO: 7923 - DNA, 831 bp, Zea mays
  Peptide Sequence Number=SeqID_49702
atggcagctacttaccaaactggccttgtggccgagccacagttgctgaacactgaaattatcactcgaagggccacctactttgttgctgacactaacagaaaagacaaatgcgtcggctacttggatgtgtttgtacaccaggcacgcgacatccacaatgtttgtgtctatcacaagcaggatgtgaatgcaaagctgtgcctcacgagcagccctgatattttgtgctcaaccaaggtgatcagtcgtgctgggcgcaacccagtatttgaggaaagcctacgccttgatgtgcaaactgtggatgcttctttcaaatgttgtcctcatctcatcacccaaaagtccccatcaacagtggatgattctggaaatgatcatgtggttcctgctcaacttgagaagattgtgttcccagacctaaatgtggagaaggaagatgagatcatggtctcaaagtatctcgagatgacttcagactccgaaacccctataaaagttgagaacgacatgtcgctgcattctacaaatgatgatgatgttccttctaaacttgaaaagatcaagttcatagattcgggaaggacgagcgcggcgtgggactggtggcctctgatgttgtcgcgcggcggggtggtggcgttgctagccgcctgcgccggcagcaccccggcggcgcagtccgcgacggccggggtgctgcggaacctcgtcgtgttcttggatctcctcccggtgttccgcgacgagggtgcactacctctgctcctgcagctggtctccctcggcacgccacgcgcgcaggagctggcgctggcctgcctctag

SEQ ID NO: 7924 - DNA, 330 bp, Zea mays
  Peptide Sequence Number=SeqID_49703
atgaacatgcatgtcacatcgccgtcctctttgtatcacacaacatcgccctcttcgctttactactcccccgagcaatcaccgaccaataacaccaaccatcaacctgctccgccgccgccgccttcaccgtcctcccgtcacaccatagaactgcaaatgtctgaggtaccaaacatcagtacctctggcatgaatgaagaggagggcggcgatgactatattagagaatgggaaaagatcagcggtgaggatgacattggggatagagacctagggttctccaagtgggccgagaaactccatggcgacgtctcaggtttcgtgtag

SEQ ID NO: 7925 - DNA, 318 bp, Zea mays
  Peptide Sequence Number=SeqID_49704
atggccgtcacaaaagcgaggccagtagagaaaaacaaagacataagcttcatcgacagcgtcgtcgaaggctcgaagcaactgtcaacgcacaagccgagcaagattgaagaccccgatcccggccttgcttgcaagttaaaggatacaactgcactatactccctccagatcctaaaacacgtcgttaaagcatccttcctgtcataccaagtcaacgtcatgataagctgccggtactggggacaacaacaaccagcagcggatgcaggagagcgttggtcgaatcgaagctactgctactcgtatctcgcatga

SEQ ID NO: 7926 - DNA, 264 bp, Zea mays
  Peptide Sequence Number=SeqID_49705
atgcagcccgccgtgaagatgaaatggaaagaaaccgtacccatatgttcaatttatctactgacattggacattagtgagagtccacacatgatgaaaaatagcaggagtgtgataacgatgacctccatgttgtgtcaacattgtgcgaacttgagggtaaaaaatatgactaatcccattgatgtgatgatggcagtaacagagatcacggcgacccggagcagagaaaaggccagaattgagaaggagaaaaatcagtaa

SEQ ID NO: 7927 - DNA, 381 bp, Zea mays
  Peptide Sequence Number=SeqID_49706
atgaaggggaagaagctaaaatcttatgcgacaagaaagaaagaaaaaaagacagtgttgcccctgaattatttggccttaagcttggctttgcttagccttcgaagtaccttcaagctatcttgtgcaaagaagtcgaagttgaaaacaagtaaccaacaatggacgttgactaagtgggactcaatgtgcatgacttggagacaactgattgaacttaggacgaagacaaaggacttcgaggtaacaagagcaatggagaaagtcaaaaggactaaggaacctaaagccatagagaagacgtggttcttgcaaaaggtcaaggttggtcaagttgtgatgactctaaatgcattgaatcccacgatatatgagacatga

SEQ ID NO: 7928 - DNA, 345 bp, Zea mays
  Peptide Sequence Number=SeqID_49707
atggagttgtctgccgaggcgtgcgccgccgtacccccagggggaacccatgcgtcgcgtcatgcactgtcgcgcgctgggtcagaaggcctctgcgacaacagccctcgcacgtcccacccaaccgtcggcttcttcaacgatgttgcatcggtcaccgcatccatggaggagaacctgtgtgacgcatcatccaccgccacgcgcaaccggtttagaagggctctgcgacagcaccctcgtgcctcccacccagccgcccgtcgtggaggtgatgatgatggctcacaccatttcatccatatcaagattgggtcaaaagggctctgcagatttggcacatga

SEQ ID NO: 7929 - DNA, 324 bp, Zea mays
  Peptide Sequence Number=SeqID_49708
atggggactcgcctgcgactaatttctagccttgggtggtggtcgtgggtgtctctggcgcgcgtggtgcttcgtcggagcgctcaacgggggttgcgctcttgccgggcgagcctggaaggcggggaactcttgatgcctcagcgacgtggggatcagaggccgtgcgttcctgttctcggcggccggcgtcgtctgcacctggatcaccgcgggatatggggcataggattgtctggggcatcacgccgtcgtgcactggcaaacgccatggcggcgccgtcgctcggcttggataaaggtgggaggaagaagggcctgtag

SEQ ID NO: 7930 - DNA, 234 bp, Zea mays
  Peptide Sequence Number=SeqID_49709
atggcatctggccgaacatgccctagcctgttccgtctcagcacatggagaggggctggtaacgatgctgggttttatgcccctgtgggcggagtccgcacccgagggattcagctaattcctcaacaaattcggttgaagaccctaacaaactcacctggcagccggttcgttcgcaacagacgcgagcaggaagacatatttgatttgcgtgatgatctaattcttgcctaa

SEQ ID NO: 7931 - DNA, 324 bp, Zea mays
  Peptide Sequence Number=SeqID_49710
atggggactcgcctgcgactaatttctagccttgggtggtggtcgtgggtgtctctggcgcgcgtggtgcttcgtcggagcgctcaacgggggttgcgctcttgccgggcgagcctggaaggcggggaactcttgatgcctcagcgacgtggggatcagaggtcgtgcgttcctgttctcggcggccggcgtcgtctgcacctggatcaccgcgggatatggggcataggattgtctggggcatcacgccgtcgtgcactggcaaacgccatggcggcgccgtcgctcggcttggataaaggtgggaggaagaagggcctgtag

SEQ ID NO: 7932 - DNA, 2037 bp, Zea mays
  Peptide Sequence Number=SeqID_49711
atgtccgacatagcgccgtcgccgagctcgtcaccgtcgagcggaggaaatggaggtggcaacaattccacggcgcctgcaccccgcggttcatcaagctcaagctcaccccctaaaccgaggaatggctggcctagtagcagcccacctccaactccaagctcagactcagagggctcaagatcaacgccaccatcagattggcaagatccgtcgtcctcctcctctagccctccgccatcacgatcgtcacctccaccgccgtcctcgcagccgccaccaagcccaccaccttcgccatcttcttggagcggtggcggcaactcgacgtcctcgtcaccgccaactccaccttctcaaccctcaccaccaccctcgggcagatcgtcgtcgcctccgcaacggtcgtcagaaggctcctcaccttcgcctcagtcttcgtcctctaaccaggcccctcccgcaccgtcaggctggtcgccttcgccgtcgagagaatctcctcctcagtcgtcatctcaatctccgccacctcagagcgatgttgaccagccaaactcccagccttcgaatactccacaaagtccaccaccaccaccatctcctccgtcgtcgtcgccgcccgcgccgccgacgaaccaatcggtagtcataatccccgtccccgtgccgtctaataatagcccgccgggagcgctgccgccgcccgggctcgtgcccaccgcgcctggcgccaccgtgatgtcgagtaccagcgtcccgggttctgctgcgtcgtcgtcatcccaagaagccagtaccggcgcgtccaacggcggtggtgggagcacatcaacaagagtagtaggcagtagccatgttgccgcggccattgccggtgcggcgatcacgggcttgatgtttgctctgctggctgttttcctggtgtctaagaggaggaagaagaaaactggtgggctagtttatcacaacgatggcagcaactataacatggcgtcaggtcagttcatgggctcgaacaacccgtcgtacacgcagccggcggcgggcgagtcggcggacatgggcgggggaggagggtactaccactaccagaaccagtcaggcagcatggatgcggcggcggcgccggggtccatggcgtcgttcagctacgaggagctgacgagcatcaccagcaacttctcccgcgacaacctgaaggccggcagcgggcagggcgagcgcgagttccaggcggaggtggagatcatcagccgcgtgcaccaccgccacctcgtctccctcgtcggctactgcgtggcgcagcaccaccgcatgctcatctacgagttcgtgcccaacggcaccctggagcaccatctccacggtcgtggcatgccggtgatggactggccgacgaggctcaagatcgccatcggcgccgcgaagggactggcgtacctgcatgaagactatttcggcctggccaagctcaccaacgacacgaacacgcatgtctccactcgcatcatggggacgtttgggtaccttgcgcccgagtacgcgtcgagcgggaagctgacggaccggtccgacgtgttctccttcggcgtcgtgctgctggagctcatcacgggacggaagccggtggaccaagcgcgccaaggggaggagagcctcgtcgagtgggcgcggcccgtcctcgtggacgccatcgagacgggcgacctcggcgcggtggtcgacccccggctggtggacggcggcgccgcctacgacaggggccagatgatggtgatggtggaggccgcgtccgcctgcgtccgccactcggctcccaagcgcccgcggatggtgcaggtgatgagggcactggacgacgaaggaggcatgtccgacctaagcaatggggtgaaggtggggcagagccggaatttcgactccggccaccagcaagcggccgccatccagcagctccgtgccaccgccttcgcctccgaggagtacaccggggagttcgagcagtcgtccggcatggattaccttaaatcagga

SEQ ID NO: 7933 - DNA, 231 bp, Zea mays
  Peptide Sequence Number=SeqID_49712
atggcggagcaggagaactcaccgccgcgaagaggagaccgcaagcagccgcaagaggaagaagagacgcaagcgatgtcgaccccgagagcagtccaattcggcgatggaggagatgcaacgtgtcgtgtccgactccgatgttgtgtttctgcccgtcaacaacagagccccacgaacgtgacgaacgacaccaacgtgattgtcgtcgtcttagagaccaacatgtag

SEQ ID NO: 7934 - DNA, 654 bp, Zea mays
  Peptide Sequence Number=SeqID_49713
atgtccagtaaccagattcagatgtgggcgccgtgcgtgggtgcaaggccaagccgaggtgaaagagattcgacgattgagaatacatcaaagaataaaaaagtggaactcggatttttagatgaagagcgtgaccaagaacttcctgatttttcatcatttattccattcttacctcctctgagtgcagctaatctaaaggtctactatgccacacgtttcaccatcatagttgggataatggtgttcagtggttttcttgcaccaatcaagtgcactcaggttatacatcaagtaaagagcaagacatttgaaagctcatgggtcatctgtgttgctattgatgcaagcgaaagttggctgattgatactaagtggctgagttgttttgatggcagctcagactctaacgaacaatgccttctcccctttgtttggactggacttaataacaactacaggtgctactcccaaattgtgtgttccgtctccggggaaaccacgaatcctttaatatggtttcgagaaggaggtataatactagcatgtgctgatggacttgactgtgctataaagagcctgcagtcaatttgtcagtttattgagacatccaacttgcatgagttgatcaacaagcccatccctggttcctga

SEQ ID NO: 7935 - DNA, 3159 bp, Zea mays
  Peptide Sequence Number=SeqID_49714
atgggcagcaacaggttcctgtcgcccccctcatacacggcaggtccgcccctgatgagcaggcccaacactcgcaacaagagcaagaggccacgatctgatgaatccattaatccgtctgcggctgttttcaagaagatacactccgccggtgatatctcgaaagacgatatctgccagctttacatggtgtggaaaccgccttgccatggctgccatggcaatactaaggattccccaaattgtttctgtgggttgatccctgctgccaatggggttcggaagactggcctctggcagaaaatgcaggaaatggttcgtggtctcggccccaatccatccaaggacctccgcgattccactgatacgcctgctggattgactaacctgggtgcaacctgttatgcaaatagcatacttcagtgcctttacatgaacattgcattccgctcaggcattttctctttggagctggacgttttggagaagcatcctgttctggatcagctagcacggttgtttgcacagctacactcaagcaaaatgttattcattgattcagcgccttttattaagacactggaattagacaatggtgtccagcaggacagccatgaatttctcactttgtttctgtctctgctcgagcaatcgttaagtcattccaaggttcctggagccagaacaatcgtgcaaaatctgttttgcggcagcgtatcacatgtaacaaggtgctcgtcatgtggaaaggaatctgcagcatcttcaaaaatggaggacttttatgagctggaattgaatatcaaaggtttaaataatttggaagaaagtctgaatgagtactttagcgaggaagcactggatggggagaatcaatacttttgtgagtcatgtcaaaaaagggtagatgccactcgttgtataaaacttcgatcacttcctccagttgtcaattttcaactgaagcgttatgtattcctcccgaagggtactggtgctaacagtggacactatgtggcacatataaaagatgaaagcaatgggcaatggtgggagtttgatgatgagactgtatccaaacttggtttgcatccttttggtgaaaaaccaggaaaggcatcaaacaaagatgatcagaagtcccaaaatacctccacagaaggttctgtcacaaacaataataataatggccaccatgaggcagcgcctagttctaccatgggggagatgttttcatctaccgatgcttatatgctgatgtacaaatgtatcactaaggatgtcaatcccactgaaagcaataaaattgtggagataaataatgatttacttccacaccatcttctagatgaaattaatgaactaaatgcatcatatacaaaattgtgtgtggaataccaaagcaagaaggacagccatttggcatatataacagagaggcgtcaagaagtaaaatctgttctgacagaagcacctgcaggcccaggagatgattcatatttttggatctcaacagactggcttcgtcagtgggcagataatattactcccccctcttccatcgacaatggtgcaattcaatgtgaacatggaaaggttccagcatctaaagtcacatcaatgaagcggttatcatctgtagcttggcagaaattacattcgaaatatggagggggacctatattgaacagtgacgatttttgcatggagtgtcttaaagacggggcaaaaagtgcagtatctgctgatgtttaccgtgaacgaagagcatcattgaaaacactcgcagaagcagcacttgctggtaattgtccagatggtccttcttactttatctcaaagacatggttgactcattggctgcgtagaaaaaatgctgatatcccttctgatggggataacggaccaacaagtgctttaagatgttgccatggggattttctgccagaacatgctccaggggcaaaacgggtatctgtaccagagatcctctggctatttctctaccaaacagtccatgagaagaaggctgatgatacagtgacttttccatcagatagtcatccatgtgaaacctgcagccgagaattgtctgatgttgcttctgtggaggttaatcttagagcagtgaaactcaagcaacgacagaaccatgaaaagttgatatctgggaaaagctttgcgcttcatcctggtcaaaaatattatttggttccttcatcttggttgtcagaatggagagcttatattacagcaactgggaaaaacatttcttcattaccagaacctcaaactctggaagctgttgccaggtcacttatatgtgaaaagcattcaagattgctgcaaaggcctttggatcttgttttaaagcgtgggagcatcattcagaaagcatcaaatactgatgggttaaccataatcccagagtatgattggaaattattctctgaagagtggagtgctacacctggaaaaggtatatctgctgaaattgcttttagcaagagttctcaagacaaactgcatggatcatctgaagcagtgccgattacggatggaaatctaggccagtctcttgatgacacaaacgatgatttgggagccagagagccttatatcagaactgatcccgaggtttgtgaagaatgtattggcgaaagggagagctgtgcattggtggaaaaactcaactatcaaaatgaagatatccacgtttactttgtccatggaaaagaagcaccaaagtctattaaagaagcatctaaagctgttactgtaccagatcgtcggacatcgaagcgttcccggagaacaagctctggaaactcaatcagtttgaaagtctctggctctacatctgtctatcagttgaaactgatgatatgggaatctttagggattgttaaggagaaccaaatgcttcacaaaggctctgttgagattgaagatgattttgctactcttgctgataagagtatttttcctggggattttctctgggtcagagactctgaaatatatgagaaccgtgacattgcagatgagatttcagaacaaaaggatgatatgctacaggctgaggaaggctttcgaggaactctgttgacatcaactgtctcagctcagctttgtcaggatatagcttttagtgaatga

SEQ ID NO: 7936 - DNA, 390 bp, Zea mays
  Peptide Sequence Number=SeqID_49715
atggccagtaaaactcttgtgtacttgcgtgacgccactggcgtgcggggccgtctagacagaatcatccctattctcaagatggttccgtccgatctagtcccaacgatgggcattggagctttgcaagatctctgggagagtgtgctaggggttcttggagtggaacctcccaagatattaggaccacctacacctgtcctcgtcctaaggaccttagacagccatgcagatgtacccaacagcttgatagtcttcccctccgccgaaggtcctcaagacgaaggtgtcattgacaaagagatgttgaggatcctcttccctgtcggaggtcctcaagacgaagatatatctaagggcgttaacaacaaatgccgaagctacggctga

SEQ ID NO: 7937 - DNA, 695 bp, Zea mays
  Peptide Sequence Number=SeqID_49716
cgcgtcgctctggtgctgctcccctctgtgcgcccccacatccggcgctgcacctctcctatctcttcatggctggtgtcatcgacgcctctggcagcatccctgctctagacaccactggcggccccgaagatgacctacgcctcctcgccgcccaatgggcttgcgacgtggccctttcaatggctcgtgaggccgagcgtgaagccgctgaagccaccagggagcgcaacgtggtcgtggtcgtccagaacatccgtgcacttgtcccggttgttcttgacatcgcttccgccttctacaccagatggcgtgattccttccttctcgggcaggcaacctctcccaccttcctggaggtacgaaatgatctgctgcttgaggagctcacccttacgcatcactccatagttttagcttctgctcttctcgtcactaccaccgataagcccccaaccaacaagccagagccaccgcctccacatcatctccccaacaaccccaagcgcgggacgcgtggcggtgtggcccgaaccccggatgtcggctgctccctcggcgccacatcaacagtcagccactcctctgccccaatccctgatcgctggcattcaaggtccctggccacgggggccacagcaactatggtctacaccaccgctgccaggatttccgactcccaccactccatctag

SEQ ID NO: 7938 - DNA, 771 bp, Zea mays
  Peptide Sequence Number=SeqID_49717
atgaaattgctatatgctctagatcagagtgtttgggaggtgaaggtcttggcgattattgagtcgcccaattacgagactctcaccatggatgagctgttcagcaagctcaagtccatagtgattgaccaccagacccggaccaatattgagaaccgtggtgcacccaccatggtcctggtctctggaggtggttcctcgtctcacctcgcacctgttatgtttgctttgtcttctttgttgactatcactgagaagaaggtggagagccttgggatgacgagccggcgcttaaccagcgacgcttgcgaccccgaccacttcatcgatagttgccctaagaagggcaagcaggaggctggctcgcgcgacaatcactctagttggagcaagggcaagcaggagcacacctctggcaagcacaagtccaggaggaggtttgataaggaggcactcaaaaagaagtacctccagaaggcgaagatcaagaagctcgccttccttgcctccttgagcgacttcgaccacgactctaatgagttagcctcttcttcaagtgacgaggatctcgagaggcacgttgaggacaagatcaacaagttgtgcttcatcgccgacactgtagaaggcctttgcaccttggcccttggtgatgatgcgggtggtggcgacaacaaggacatcgacgatgactacgcttctaaggtatcacactccaccaatgatcttgctgctaaggtggaggagctaacaattgttttggctaattag

SEQ ID NO: 7939 - DNA, 318 bp, Zea mays
  Peptide Sequence Number=SeqID_49718
atggcgcccaactcggagcagcctaaaggcaggaccacaacggtaggagagaaatcgaaaacaaatcagaaatcggaaacatggttcgtccccttctctcgtcttcctccacatagtggtatatcgagctatcacgccgaccgtcgccgttcactgctgccggagctttccagtccgttccagccgccggcgagcacacctctgagttcacctgcttctcctccgtcgaagcccctccttcacgcctacatcttcgtcgtcaaggtcgtggccgagcagtcagcaccaccccctgttcgccgtgttgcagcatggtag

SEQ ID NO: 7940 - DNA, 705 bp, Zea mays
  Peptide Sequence Number=SeqID_49719
atgatagcgcttcctgttgacgtggcgggtctgtgccctaggcagggtgtcgtgggggctcctccgaagccgaggttgagtctgtcttctgttgccgaggccgagtccgagcccctgggtcgggcaaggcggaagtcgttcggcagaggccagggcggagtccgagccctggggtcgggcgaggcggagttcgtcgtcttccggggccgagcccgagtccgagccctggggtcgggcggagcggaagtcgttcggcagaggccagggcggagtccgagccctggggtcgggcgaggcggagttcgtcgtcttccggggccgagcccgagtccgagccttggggtcgggcggagcggagttcgccgtcttccgggtcttagcccgagtccgagccctgggtcgggcggagcggagttcgccgtcttccgggtcttagcccgagtccgagccctggggtcgggcgaagcggagttcgccgtggcgcctttggcaaggcctaactgcctgtcagactcactctgtcgagtggcaccgcagtcggagtggcgcaggcgacgctgtccttctgtcagactgctttatgctgatgggggttaccagctgagaattagacgtcttgagggtacccctaattatggtccccgacaccatgtcagccctaggcgcagggagccgttgctgccacgtcatagcccggcgccatag

SEQ ID NO: 7941 - DNA, 1428 bp, Zea mays
  Peptide Sequence Number=SeqID_49720
atgaggtcccgggtgcgaattctcgccgtcacccatgtggctccagccccagcagaggtcctctccaacgacggccatgtcaagctatcgttcacggacgccttattcgtcaacagggtgcccatgcagcggctcttcttctacgagggccccgacgtgccgcccttccagtccctcgtccgctccttgaaatcctccctcgccgccgtgctccccgtcttccgacccctcgccggaaagctcacgcaccgcgcctcgacgggcgacgtcgtcgtggactgcaccccggccgcggtctcgccgggcgtcaggttcgtccaagccgagtacgccggcagcatcgacgacatgcgccgtctcgccgtcggcgacgagcaccacacggaggcgttggtgctgctcgggccggagctgaacgtggcgcgcctgccggccccggtgctcgccgtgcaggtcacgaggcccgccatcggggttgggcgcgccgtcgtggttggggtgtccatccaccacgccgtcgccgacggccactccttgtggcagttcatgagagtgtggtccgcagcgtctcgtgagcccgacctggtggtgacaccgccgccgacatgggatcgggcggcgatcccgtaccccagagccgaggaggtggcccgcgagttcctgcgcacggtcgcgccggcgcttcccgtggcaagaccgccgtccatgtgtgccccaccggaccagcggaggagaagcttcctgctccgcgccgaggacatcaggtcggtgaagcagaggatactggcccaaagcaaagccatcggcggcggacacctgggcgcactcccaagcacctacgtcgcggtgtcgtcgctggtgtggacgtccatcgtccgcgcaaagcccctagacgacaccgccggcagcggcgacgcctacttcctggtgccagtggacctccgccgccgcctcggcccggcggtcgacgagcgctacttcgggaactgcgtggcgccctgcttcgcgagggccgccgtgcgccacctgcgcgacggcggcgccgggctggggcacgccgctgcggctatcagcgaagtggtccgcacgaagctcaaggacccgctgggcggcgcggagcgctggctcgaggacttcttccaggtgcccaaggagaggctcacccacacggggtcgtccaacaggttcatggcgtacgagacggacttcgggtggggcaagccgagccgggtggagctcgtgtcgctattcaccagggggctggtgctgctgctgggtgcggaggagggcggcgtgcaagtcaccgtggcgctcgaccatgcgcacatggaggacttcgcagccaacttgggagcggggacggagcagggctccttgctcataagatacggcgagcctcatgagcccggcacacaacccgctatttag

SEQ ID NO: 7942 - DNA, 564 bp, Zea mays
  Peptide Sequence Number=SeqID_49721
atggtgaaatcatttgaagtttcagaactgccagtgaggtcggcaaaatttatttcaaggaaacaatgggttgtagctggtgcagacgacatgttcattcgtgtctacaactacaataccatggacaaagtcaaagtttttgaggctcatactgattacattagatgtgttgcagtccatccaactctaccatatgtgctgtcatcatctgatgacatgttaataaaactgtgggactgggataaagggtggatgtgcactcaaatttttgagggacattcacactatgtgatgcaggttactttcaacccaaaggatattaacacttttgcaagtgcatctcttgatcgcactacaaagatatggagtttaggttctccagatccaaacttcacacttgatggacatcaaaagggtgtcaattgtgttgactacttcactggtggtgacaggccctatttgattactggttctgatgactccactgcaaagtattatgatggtgcgttttatggcaaagtaggtctgggattaccagacgaaaagctgtgttcagacacttga

SEQ ID NO: 7943 - DNA, 189 bp, Zea mays
  Peptide Sequence Number=SeqID_49722
atgccgctcaggttggagatcaagcggaagttcgctcaacggtcggagagggtcaagtcggtggatttgcaccccacggagccatggatcctgtcgagtctgtactcggggagtgtctgcatctgggattatcaagcacagttctgcaagatctgtatgcttgagtacaaaacgggggatttaccttag

SEQ ID NO: 7944 - DNA, 450 bp, Zea mays
  Peptide Sequence Number=SeqID_49723
atggaagtgagttcaccggaggtgggcgccaatgttggtcacttgttctcaaatgcggtgaatcaagaacaaggcaacacaatcgataaggataagggaccttcgtcttccaaagcattatctccacatgggtataatgctcatcaaacaaagaggaagggaagacttctgtatcattttgttgaaggtgtttgtgtcttgaggaccttcgacggggaagaagacccccaacagttgccgaaactatcaactactgcaacaacaactccaaggaagaggagaatggctagtgttttggatgttgttttgaaattcatgaagatgccaactcatgcttctgtcgaagcttctgacaagaaaattgaagatgcaaggatgcagccgctgcaggcgctgcaggcgcttctcctgtacatgttgaagtggggccttcaggggctacgccagtag

SEQ ID NO: 7945 - DNA, 597 bp, Zea mays
  Peptide Sequence Number=SeqID_49724
atggccgagcgctggcgctcgagggtgtggcgggacccaaacctggacgaagatgcttccccgccatcccgacagccgcaccacagcgggggcgacgaggaggacgatgagctggggaacgaggatctcagcctagagatcatcgcgcgcgcacagcgaaagcggcgcggggaatccgctggcggagtgcccatgttcgccgaccttctttcggtttcctccaccgacgaggagggcgccgtggtggagctcgatgaggcggatgagacccggaggaagcagaagaagaagcagcgccggaagcaaaggaagaagcatcagaaggagactacagaggctgcggcggcggccgccgtaaaggtggatgataaggcgggttgtagcaccgaggaggggcccattgggacagcacaatcgatgctaactgaaaatggggctgatgcccctgcatctgacaatatggttctgcggaaactccttcggacccgtagtaaggattctcagttgcttccaaagatactgacactgcagaatcagcttgctggcttacagcccaatggcaatgggtatactttcaggaaagtatcacttatctga

SEQ ID NO: 7946 - DNA, 651 bp, Zea mays
  Peptide Sequence Number=SeqID_49725
atgggagggattgacaaggaagaaaatattgttaataatgatgatgatggctgggatgcttggccagttcagcaagctcagcctcccgagccggtggtgaatgcaaacaatgtggaggaacaattcagttatcagctctcggaccttgaggatctgccttctgatgagtcggtgggattcttcaatgacatcataatccctcaggagattcacttcccccagcacctggagcaatccatccctgaccctgcatatgaggactacttggctagaaagtgtctcaactcctgggctgatattttcccctgcaactcagaccttgtcactgttccaaaggtgtgggctgcttttttcatgggcctgttgttgaggtcgaattcctttgactgggccaaaaaattcttaacgtcaggtgctatctctgctcttgtggagcccagcatggaaactgtctcgcttaagattcccccaaagtgtctgcctcctcctagccaggagctgcatgtggaaccacagtcccccactgctgcagaagccgtatccaagcataagcaaccaattatggttgaactgaagttagaaggagtgccagacttcgggagaaggctaggggcttcaagaactgctcaaggattggaaaaatgttcttga

SEQ ID NO: 7947 - DNA, 204 bp, Zea mays
  Peptide Sequence Number=SeqID_49726
atgaagatccagacgatcagaaccttggtcgcacggtccgccataggccccaaagactacaacgaggacttcgcttggacggcaaggcgagagttcgacgttcatctaggagcggtcgtcgctttgattgttgggggagctctgctagggctggatatcgagccagcttggctcaggtcgttcgagtttgagttggctcgttaa

SEQ ID NO: 7948 - DNA, 459 bp, Zea mays
  Peptide Sequence Number=SeqID_49727
atgggcgagggcagcaggttggggaggaaaaacagggcgaaggttgggaagacgaatgagacgtccaacgacggcgaaaacgatgggcttctgaccctggcaaggaagcctccaaccgactccaaggagtcacacgaaggctcgggggcagctgtcggagagttgccctgggtcatcggggtgaagccactgacggtgctcgagcttgggggcgcgtttgacggagacaccgggaaccaatttctcgtcgtcgactgtcacacccgggttttaggggtccaaagcccgggcgcgaacataatcaccaggaacatggcgaagcaatggggaacgtccttaccagagatcatcgcaggtaaatctccagccacggtggtgagtagtagtgaagcatcggcgaaggattctggccgcctgaagcgcggcaacgaggcctcccagacacacagcaagccctaa

SEQ ID NO: 7949 - DNA, 432 bp, Zea mays
  Peptide Sequence Number=SeqID_49728
atgcgagggctatgcttcctcgccgcgggtagaataccgaacagggcaccgccattgttgaatcttgttgtacctcatcgttggtcggcctcgccttcacccctgcttggtaaatcctcccctaaccggttcacttccactttcgttttcatgccatcgtcttcggattcggggttcggggtcaccggcaggccgagccggtgtgctcgccgccgctgggcacctggtgccgcttcattcggccactgggtggaagaagtgtttcgggccattggatctattgggggcaccgtggaccgttggatcatggttaagcggataggattagatcagggtatagatggtgtctggaccgttgattcaaccgccaacgcgtgggatttggtcgcgcatactggttgggtcggcgagatcagtgcctttagatcttga

SEQ ID NO: 7950 - DNA, 387 bp, Zea mays
  Peptide Sequence Number=SeqID_49729
atgctaggaaaagtcggcgagggttacgtagggataaactcaagaggtttactatctttcagctacttgttgttatcatatccacgtgtactgccccacggtcgaaccaaagctgtggagaggctgcaaaagtggcagcaagagctcaagggcaaggccagcgacgccgccctcgccgaggagaaactcaaggcgaaggagcggtccttggataggtgggagaaggacctcaccaggcgagagacggatctcaccttcagggaagacatgcttacccggcgaggcgagatgcgggccgagcacgagatcgaagcagaagagaaggagagggagctggaagagcggatccgccagttcaacgcggcacaggcggcgccgagcccctag

SEQ ID NO: 7951 - DNA, 1893 bp, Zea mays
  Peptide Sequence Number=SeqID_49730
atggagacgtggctcgttttgacggcactcctgctttcactctctctggtttacttttttcttcctttcatttcatgtccttggattgatggcacctatggtgacgatgaatcatctacgcatacgcatgtgccgcaggctgccgccgccggcacggagacggtgaaagtgatcaccaccccagtcttcccccacatccctcgacttcaggcaagcaaggatttccaggtgctcgtgcgcgtcgaggcgccaccggcgctgcagcagcatagacgcgtccccgtcgacctcgccgtggtgctcgacgtgggtgccagcaccggcaccggcaccggcgtgccgaggctggatgcggtgaagaaggcggtcaagtttatcatcagccaggtccacgacaacgaccgtctcgccgtcgtcgggccgtccaactatcggctagtcaccgggttcaaggacacctacgacgcccgacacaatgcccagaaatccgtcgagcagctgcagcaccgtggtgagttcacgtcgggcgccggcttggaggaggccatcaagatcctggaggagctaccggcgacggcgagccgtagcagccgcgcgcgcttcgtcatcttggtgacggacagggcagtggcagagggcagcagcagattcagcaagctgccgcgcgagtccctccccccggtgcacacgttcgggctcggcgaggcgcacgaccccagggagctgttgcatatcgccagggaatcccagggcacctactcattcgtggacgaccagaacacggacggcatcaccggcgccatcgccgtctgcctcagcgggctcaagaacgtggtcgccgtcggcgcgcgcgtccgccttgagacgcccgtcgggagcggggtcaccatcgagaggatccagtcggggggatacacatacagcaggactcgccccatcaccaccagagacgacaagacgtacgtcgaggtcgccctcggcgccctatacgccggcgaggtgaagagcttcctcgtccacctcagcgtgcctgctcttcttgcttcgacgtcgaccgtcgtcgccgacggctgctacaggcaacagctgctcaccgccagcctcgtcggccactacaccaccagcgacgaagaatatgctgcggctccagcttctccaagtccaacggtgacacaggcaatcttgtacgtgcaaaggccgccgccggaagccctcgacgtcttctgcggcggcgcgctgcagacagtccccgtccccgtggtgatgaaccacatcgcgcggttcggcgtgctggagatggtggccaccttcgtcgacaccgacatcgggcggcatagcaccgtcaccgcggaagtggcgacgaagctgcgggcccagtgggagaagtttgtgcaggcgcggcagttctggagcggcctggacctgggagtcctcgaggacgaggtcagctggatggttaacatcctagaaaaagcagcaagcagaagcggctcgtcggcggcgacggcctacatgctgtcgtggctgtcgagctaccagatgcagcgaccgacggccatgggatccccggacagcgtcgcggccgctttcgtcaccgtgaacatgcagctcacactgctggaggtgaggaaaggcatcgtcacacttcctccaccacaaccaccaatcgtctgcgtggatccactgccgccgccgctgttcaagccgtccggacggaacgacgacacctaccgcgtcgtcaacaccgcttacccgccgagcgtactggtggacgccatcaacgaagcaatgaagcagatgcacctggcgttggttcaggcgagcaaactccagcgatgcgatggtgccggcgtcgatgcgatgatgccacgggcagctggcgcattcgcatga

SEQ ID NO: 7952 - DNA, 174 bp, Zea mays
  Peptide Sequence Number=SeqID_49731
atggagatgatggaggccaacgagctccaccggcgggctaaggctagatacgaccgtatggcgtcgttcttcctatttgtgatgtacaacaccgttgtgatgaagctcaacctcatgttggtcctgaaggttctcttgatggaggactggcttattaaccttggatgcaagtga

SEQ ID NO: 7953 - DNA, 531 bp, Zea mays
  Peptide Sequence Number=SeqID_49732
atgtccatcgaacagatgttcctgatgcagacccaggcagttcaagccattggtcagactctggctgccattcagcagcagcagcagcaacagccaccacctcagcctcagatgcctcagatgcctagggacaagcgtgctgaattcatgagaggtcatcccccaacgtttgctcactcttctgaccccatggatgctgaagactggctgcacacagtggagcgggagttgcataccgctcagtgtgatgacagggagaaagttctgtatggtccccatctgttgagaggagcagcccagtcatggtgggagtcttatctcgccacccatgtcaaccccgacaccatcacctgggaagagttcagaggtagctttcgtcagtaccatgttcctgcaggtctgatgacggtgaaaaaggaggagttcctggcactcaagcaagggtcatcgtctgtcagtgagtaccgggacaggtttctgcaattgtctcactatgctcctgaagatgtcaacactgatgccaagagatag

SEQ ID NO: 7954 - DNA, 186 bp, Zea mays
  Peptide Sequence Number=SeqID_49733
atggctggacacaacgtcttcttcctacagcacactacggaagcaggttgccgtcttcttccctggcgcgacaccaggcgcacagccgatggtgtgcccgccattcctatgccagcgcgccgcaaagaggggagaacggatcttgatttgaagaggaggaggatgaaccgtaccgtggagaagtga

SEQ ID NO: 7955 - DNA, 423 bp, Zea mays
  Peptide Sequence Number=SeqID_49734
atgacaccatgccacccttacatgatcaaagactgcatcagggcatcctatcgcttaccttggaaaacccttggagaacggatggtgatgcgccgaaaggatgagaagcacccattgcttggagaacgaatggactacgacaagcactacatcgactccaccaaggaggaaatctcctccgatgaggagtcagaggaggtggtggagacgtggtcatgtagtagtggattcactagtgaggagaccgaggaagacctcgactgggatttcaatgatgatttcaacaaggatagcgtccaagatgacaacgacaatgatgatgaccatggcaatgatgacgacgacgatgacaacaacgatagcggtgaggaggggctggagcggaagcgtaggaggtttattagatacctttgccttttgtaa

SEQ ID NO: 7956 - DNA, 273 bp, Zea mays
  Peptide Sequence Number=SeqID_49735
atgcgtatatctgaggctgcaacttgctggctgttgctgcccggcaggcctcctgccccttgtgtgctcccagagggcgcgggcgtgccgctaatccagtgcctatcagagcagcaactgcgatgcagaaagaaagaccatacaaggctagccagctctggaaaatttgaaggtaacgtgggcgatggagtaatggatcgccgtgacgacgttttcccgttgattggccaggctcaggccgagagtgactcgatcgacatgacggctttgtag

SEQ ID NO: 7957 - DNA, 237 bp, Zea mays
  Peptide Sequence Number=SeqID_49736
atggagcaggagctcagccttgagctcaccctcctccacccctcgggcctcgccgcccggagcccaccgggctacttcgtctgcatgtactgcgaccgcaagttctcagctcgcaggctctcgaaggctcctgctgctgatgacgacgctcccgcgaccgcgtcgtcgagcaacatgaagaggtcgtcggagtacggctacggcgtcgaggagctggatctctccctcaggctttga

SEQ ID NO: 7958 - DNA, 276 bp, Zea mays
  Peptide Sequence Number=SeqID_49737
atggctgattctaaagatctcaatggtgtttccccaaacagcgatgcaatgcttactaatttattggccactgagtataagaaattaaaagatgacatgaagaagatggacgaggagatccagcgacaacaacatcaggtactcaaggttgcgaagaagtggtacctctcgcacttcagggtagattgccaccagaaggttgttcgggagaggagcggaccgtccggactaggggcgcggaccatccacggttggcagaaaggaggcaacgactag

SEQ ID NO: 7959 - DNA, 1035 bp, Zea mays
  Peptide Sequence Number=SeqID_49738
aattgtgccgagttaaaatttctcgacttgagtgataatgaattatcaggagaaatacctatgtggatcggtcagaagctttcatcgttggtttttcttagccttcaagggaaccagttcagcggaaggattccccatcaactttgtggattgaaatatctacaaatcttggacctctctgtaaataaaatctctggtaccataccaccatgcctcaataatttcacttccatggtaaaaaaagtgagtttagatagaaggattgagcttcacctgttagataaaccgtatgtggaatcgttgattgatgttaggtatgttgatgaggcattgattacatggaagggaaaaaagcaaaactatccacaacttggactgctactagccattgatctctcgtgtaataaattaagaggagagattcctgaagaattaattagtcttcaagaactggttgcattgaacctgtcaagaaatttttttacaggaaacattcttcaaaagattgggcatctaagacaactagaggtgcttgacctgtcaagaaacaagttttcaggaaacatcccaacgagcttgtctgaattaacatttctaagtatcttggacttgtcttacaatgagttgtcaggaaaaattccaaccagcactcaactacagagctttgatccttcatcattttcccataatagaggactttgtggtcctcctgtttcaccgaattgctcaatggtggaaccacctcctggcaaacctgcagtaggaggtgaagaagattctgatgatcagttcatgaaatggttttacattatcatgggacttggatttgttgtgggtttctgggggttttgcggtgttgtgttcttcaaacgttcatggaggcattcatattatcgctacttggatagtgcaaaggattgggtttatgtttcatttgttttgctggaaacaaggttagtgaggagaatcaaaggtgtttcaacaaggtcaggtctgattagaactgcaactgaaggtgatatttcctgcacctga

SEQ ID NO: 7960 - DNA, 1881 bp, Zea mays
  Peptide Sequence Number=SeqID_49739
atggattcgtcaggcgacgatgccctttttttatgggaaactgaggagtgctgtttttggcatggcgtcgaatgcaacagccttacgggatacgtcgaaattcttgattttagcttgcaatcttgggttgtagcaggtccaattccttctttacttggaaatctttcaatgttggaaactcttagattgggtggtaacggtggagacgagacgtatcgccataatttcaaaaaaatgttcagtgtcggaaaacttgagtggctttcccatctttctcgtttgaaagaggttgatctcagtttcactaacctgagcaatgccaatgattggtctcaagtcattagccaccttcctctgctccaaaaactaactctaagacattgtgatcttccaagcatatcttcttcatcactttcccttgccaactcttctacatctctcatctatctcgatctctctgataataatctcccttcttctgccatatatccatggttgtttaatgttagcagcaaccttgtttcccttaatctctcaagtaacaagttgaaaggtccaattccagaagcttttgggaacatgaaggctattcaagaactttatctgaatgataatcttttggtactagctgagaatcaagttaggggcgattctgggttgaatgaaatcggaaaactacccgattttagggttctagatcttgggtacaaccttttaaatggatccataagcaaaagcattggacaactttccaacctgcatgtcttgcggcttgcagggaattcttttgatggtgatgtgatttctgaagctcatctctcaaatttcaccaatttacaggtgttggatttatcgttcacttctttgactttgaaattcaacaccggatggattcctccttttcatctgagtcaaataatgctttgctcatgcaagttagggcctcgtttcccagattggcttcggactcaaatggacttcctactggttttggaataccttgatatttctgcttcaggaatttcggattctcttccgtactggttttgggacccatttcagagattaaggtatgttgatgaggcattgattacatggaagggaacaaagcaaaactatccacaacttggactgctactagccattgatctctcgtgtaacaaattaactggagagattcctgaagaattaaatagtcttcaagaactggttgcattgaacctgtcaagaaatttttttacaggaaaaattcttcaaaagattgggcatctaagacaactagaggtgcttgacctgtcaagaaacaagttttcaggaaacatcccaacgagattgtctgaattaacatttctaagtatcttggacttgtcttacaatgacttgacaggaaaaattccaaccagcactcaactacagagctttgatccttcttcattttcccataatagaggactttgtggtcctcctgtttcaccgaattgctcaatggtggaaccacctcctggcaaacctgcagtaagaggtgaagaagattctgatgatcagttcatgaaatggttttacactggcatgggacttggatttgttgtgggtttctgggggttttgcggtgttgtgttcttcaagcgttcatggaggcattcatattatcgttacttggatagtgcaaaggattgggtttatgtttcacttgttctgctcaaaacaaggcaaagccttcctagtccagaaaatcaaaaagaaaaggaccctgcacccacttttaaacccaacttcgacgacgaagaaggaatctccgatgatgcggtcacggggcgttcaggtggtggcagagaagtgtcaagcgtatgtggcgacgactggcctagaggtggctgctag

SEQ ID NO: 7961 - DNA, 303 bp, Zea mays
  Peptide Sequence Number=SeqID_49740
atggtggaaccacctcctggcaaacctgcagtaggaagtgaagaagattgtgatgagttcatgaaatggttttacactggcatgggacttggatttgctgtgggtttctgggggttttgcagtgttgtgttcttcaagcgttcatggagggattcatattaccgttacatggataatgcaaaggattgggtttatgttacatttgttctgctgaaagcaaggttagtgaggagaatcaaaggtccttcaacaaggtccaattccttctctacttggaaatctttcaatgttggagacttttag

SEQ ID NO: 7962 - DNA, 480 bp, Zea mays
  Peptide Sequence Number=SeqID_49741
atgaacaatttctataagaatgttctgtgcttcatacttgttcaagcaatagccataacctcattaataactttatcaagttcagaacctaataaaggtggtcatgataatagccgttggattcatccgtggttcaagacatggcatatctacgccgttaatggaataagcaaagatcagacactattagttcattgcaagtctaaggatgacgatttgggcatccataacctcactgtcggctccgagttcacctggaaattcaggccgaggttctttgggggaacacttttctggtgttacatggcttacgacaaccttcatgcttcgttcaaagcattttgggataaccaagtgttgtataatctgtgtgattggggaacttgcttttggattgctaaagatgatggaatttacataagaaatattcctaaaaatcgagatgattattactgcaattgggagcaaggacgattatga

SEQ ID NO: 7963 - DNA, 273 bp, Zea mays
  Peptide Sequence Number=SeqID_49742
atggtggaaccacctcctggcaaacctgcagtaggaggtgaagaagattctgatgatcagttcatgaaatggttttacactggcatgggacttggatttgttgttggcttctgggggttttacagtgttgtgttcttcaagcggtcatggaggcattcatattatcgttacttggatagtgcaaaggattgggtttatgtttcatttgttttgctgaaaacaaggtctggtctgattagaactgcaactaaaggtgatatttcctgcacctga

SEQ ID NO: 7964 - DNA, 825 bp, Zea mays
  Peptide Sequence Number=SeqID_49743
atgggacagtcaaatgaatcaccaactccaatgactactacgtgtcatttaactgctaatcaaggtgttccagttgaagatgcccagttgtacaggagcatagtgggtgcgttgcagtacattgttattaccaggccagacatagcctattctgttaacaaagtttgccagtacatgcaaaaaccctcaggtcaacattttactgctgttaagagaattttgaggtatttgaaaggaactctggattatggcatcaagttcagtcggagctcaaaacttatacttgaagggttctccaatgctagttgggggtctgacagtgatgatagatgctcgacgtcaggttattgtgtttatcttgggggaaatcctatctcttggagttcgaggaagcaacaggttatctcccgttccacggctgaagcagaatatcgaagccttgcacatgtgacatctgaagttctttggattcaagctttgttgtctgagctaggaataattcttaagggcaaaaccttgttatggtgcgatagcactgctgctgtggcagttgcaggtaatccagtgatgcactcgaagtttaaacacgttgaactagatctattttttgtccgggaaaaagttactcaaggagtgttgcaagttggacatgttcctaatcatcagcaagtcgcagatgtgctcacaaagccactggctgcaggatcgttttacaagtttcggaatcaactaagggtaaccactaaagatgattcaaggaaggaatacagtagtacggggaatgttaggaatagtgatcagtcacagtcacccaaagttagttag

SEQ ID NO: 7965 - DNA, 633 bp, Zea mays
  Peptide Sequence Number=SeqID_49744
atggcaaaaaaagtgagtttagatcgaaggattgagcatcacatcttagatactggacctagatttttatctccggagggtgtgaacggagagattcctgaagaattaagtagtcttcaagaactggttgtattgaacttgtcaagaaaccattttaacggaaaaattcttcaaaagattgggcatataagacaactagaggtgcttgacctgtcaagaaacaagtttttaggaaacatcccgacaagcttatctgaattaacatttctaagcaacttgaacttttcttataatgacttgtctggaaaaattccaaccagcactcaactacagagctttgatccttcgtcattttcccataatagaggactttgtggtcctcctatttcaccaaattgctcaatggtggaaccacgtcctggcaaacctgcagtaggaagtgaagaagattgtgatgagttcatgaaatggttttacactggcacgggacttggatttgctgtgggtttctggggattttgcagtgttgtgttcttctggcgttcatggaggcattcatattatcgttacatggataatgcaaaggattgggtttatgttacatttgttctgctgaaagcaaggtctgattag

SEQ ID NO: 7966 - DNA, 1287 bp, Zea mays
  Peptide Sequence Number=SeqID_49745
atggccgaatatgttgcccctgctgctgtcgaaattgtggcagaccaggcaaaggaatacgcatcaccctatctccgttactttttccgttatggagagattgttgaagatttcaagaatcaacgagaagcacttgaattgaagaaagagagggtggacactcgtgtcgatgaggctgaaagccaaaatgagctcatccataaggacgttgacaactggcttacaagcgctgagaaagaactgaaagaaacccagaacttgaaagatgaaatagatcgcgtcaagtgtttcaaatggtgtcctaaatggggctggcgatattccttaagtaagaaactggcagagaagattcctattatctctgaacttttggagacttctaactttgcacaggtgggctatcgtcgtcctcttcaaggaatagagttcatcacatccactgatttcatggactctaaatcttcaaaatcagctttcaaccagatcatggaggctataaatgctaagggtgtcaacatgatcggactgcacggaatgccaggagttggtaaaacaactttagccaaagaagttgggaagcatgctcgagaacaaaagttgtttgataaagttgtaatgtttactatgtcccaaaatccaaacatcagaacaattcaggataaaattgcagagatgtttggtttaaattttcatacaaataccgcagaaggaagagcagaagagctattcaggagtatgcaaggcatgaacaaaatcctcgtaattgtcgacgacctctgggaagaattcaaaatggagagtatcggaattccattcggtgatgaacacgagggttgtaaaattcttctgactacacgtcgtcaacaagtctggactaaaatgaactgtaaggaaattcaacttggcatcttatccgaagacgaagcatgggttttatttcgacataaagctggtttagaagatgattgttccaccttgaatgatgtagccaaagaggttgctgctcaatgtaagggattgcctcttgcaattgttatcgtggccaaagctttaaaaggtgagagtttaaatgggtggagagacgcaaatcagagattcaaggactcaacgcatttgtatgatgaagaagtcctcgggggtgtcctcgagcctcttaagcttagctacgattacttgaagaaaggcattaaccaaatgacgggaaatcacatccaaatgtgtttcttactgtgttccctttttcctgaagatgaagaaatccttattgagatattgattatgtgctga

SEQ ID NO: 7967 - DNA, 1209 bp, Zea mays
  Peptide Sequence Number=SeqID_49746
atgaagacttttctccaagcacttgatctgtggagtgcagttgagaatgatgtcgagccaccaccattgagagcaaatccaaccattgctcagatcaggcagcatggtgaggagcgagccaagaagcataaagccatggcctgcctacaaaatagagtgtctgatgtgatttttactcacatcatggcctgtgattcacccaaacaagcatgggataggctaaaagaggagttcatgggatcagacaagacaaggcagcaacaagtaattaatcttagaagggagtttgaaaatttgaagatgaaggagtcagaaactatcaagcaatattctgataggattatgactactgtcaataatatcagactccttggagaagatttcagtgacagcagggttgttgagaaggttattaccaccttacctgaaagagaagagcaagtaggtaggaggagagttctgaaggtgcttttcaagcaaaggtcaaagaaggctttagctcaagtcagaaagctaagaagccttggtttgaaaaaagggaaagatcaaagaaagatgctgtatggtcaccatgaaaagatttgtagaaatcaagaaaaggcacaaactctgccagtacaagccaagactgctgaggatcttcaagctcaggaggagcatgtcttcactgcctcatgttctgcaaccacaagcaaatccaaatgcagttggcttgtggatagtggctgctcacatcacatggaatcagatgagagcctattcaaggaccttgacaagagttatacttcaaaggtcaagataggcaatgggaatctgattgaagctaaaggcagaggtgatgttgtgatcaacactggttcagatgtctgtggaccaatgaagatcccttcactgaatggcagtgtcaacacctcagtgtacctactcaataggctgccaacacatgctgtgaaggataaaactccttttgaagcatgtagcagcaagaagggctacagagtatttgatccctcaaccaataaggttttggtaagcagagatgtcaaaatcgatgaaggaaggttttggagtctagatggctctaacacaagtcaatttgaagaagagcaagttgacagcaatctggaattggcagaaagtgaagtcagtaatgccaatgttgatgatgctcctgtgagagggaccaggtctattgctgatatctactag

SEQ ID NO: 7968 - DNA, 162 bp, Zea mays
  Peptide Sequence Number=SeqID_49747
atggtaaggttggcagttgatgctattttaatggctgagggtgctgaacggaaagagcatatgggtattaagggtttaacgaagcttctagcagacaatgcgccaaaggccattaaggaacaaaaattagagagctatttcggccgcaagattgccatgtag

SEQ ID NO: 7969 - DNA, 171 bp, Zea mays
  Peptide Sequence Number=SeqID_49748
atggccactggcctggcgattgtagtggccctctcttccttttgccaggcttgtgtagaacgaaaagcgacagggagggggctgccacatggagggccacagcgcaatgctgggcacaccctcaactacgttgctctgaaactgtatcggcgagtccgggacagggggtag

SEQ ID NO: 7970 - DNA, 612 bp, Zea mays
  Peptide Sequence Number=SeqID_49749
atggctgaaaacttggatgccttgaagtgttggtggttgggaggggctgctatcgtatggcgcaccggacagtccggtgcgccaccggacactgtccgatgcgctagccacgtcacccaaccgttagggttcaaccgttggagctctgacaagtggggccaccggacagtccggtggcgcactggacagatcctgttcattgtccgaaagcttcacctagtgtcttctgcccttcttccatcaaagcgtgggttcgaaccccaacaacgggctggcccgacagagtcagcaggctggcatgccgtgcctggaccagagatgtggcatgcgggcgtcgggctagcccgacaaagtcaacatgtcctgcctgggccagagctgtggcccgcgggcgtcgggtccgtgccggacgccatttggccatctatatgtgttttgggacgtgaaggaggtgaggttcgaacccatgccttgatggaagaagggcgtgaaacactaggccagcactacgggccgaggctacagcccaagcacgacacgacgtttttggctcttgcaagcattaggtcgtttctgagaccacattggcgcaatggattacatggtgtttga

SEQ ID NO: 7971 - DNA, 480 bp, Zea mays
  Peptide Sequence Number=SeqID_49750
atggttgttctttttcctacttttcgcgctcgtgcagttcgactaccttatcccaccgataggaatggacaagtgcagcgtgaacagcgtggacagcggcaacatacacaaggcgggcatggtgatgaacgggttgcccatcagtgtgtacacatcggagacgttgaggtgtgcggcggctatgtccatagacggttgatgagcaagatgctcaggcacattggggattcaccgttgatcaggttcgacacatacacatgcagcgcgtgcgccgtgtcgtgcacgctcaagtgggacgtggccactgtcatggagtacaaaggcctacccctgcagcaggtcgtcgactactatgtcagggtgttgacaccttttttggggcgccaatcactcaacacgaaccagtggcagtgctctctggtcaggcgcgtacggtccgcggccaagggccggacgatccacgacctggcgcgaggctag

SEQ ID NO: 7972 - DNA, 567 bp, Zea mays
  Peptide Sequence Number=SeqID_49751
atgaaggccactcaatctgaactcgtacgatccaaccccagggttatgcaggctggggagcaccgggaggataagtgtaacaccctgaatttgggcccacccagcgacccaccagcgtgcagcagccccgccccaaaccctagggcgcgccctcccccagccgccccagccgccgggcccgcggtcaggggcgcccacctcctcttcctcctcccgaaccgccctgccctggttctcgcccacgatgcgcacctcacggagccgacaatccccccgaccctcttctcccacctcgaagcctggccgacccccccgctcgcggccctctggcgcggccccggctcggctgcccggcgtggtggcctggcgcggcaccaacgcggcggcccgatggccagcctaccgtgcgcgcggcctgacggctctcccagcgcgcgggtgtggccccaacacggcagcgcgggcacgcggccccggcgtgcgggcgcgcgaccccggcgcggcctggtcgcggccctctggcgcggccccggcacggtgcgtcccacccctctcgccctggtctaa

SEQ ID NO: 7973 - DNA, 914 bp, Zea mays
  Peptide Sequence Number=SeqID_49752
cccacccagcggcccaccagcgtgcagcagccccgccccaaaccctagggtgcgccctcccccagccgccccagccgccgggcccgcctgtcaggggcgcccacctcctcttcctcctcccgaaccgccctgccctcgttctcgcccacgacgtgcacctcgcggagccgccaatccccctgaccctcttctcccacctcgacgcccatccgacccccccccccccgctcacggccctctggcgcggccccggctcggctgcccggcatggtggcccggcgcggcaccagcgcggcggcctgatggccagcctgccgtgcgcgcggcccgatggctctcccagcgcgcgagcgtggccccggcacgtcagcgcgggcacgcggccccggcgtgcgggcgcgcgaccccggcgcggcctggacgcggccctctggcgcggccccggctcggctgcccggcgcggcgcgtccccacccccctcgcgcccctggtctagccatggcgtcgcggcctcgtcctcggcacggcgccgcagccagcccgacggcgctctcgcccctgcagcccccgtccccgcactcctccctggacccgcggcccctgcagcaggcgcccatgggcagcgcgcggccaacgggctcggcgaggtcccctgcggcgcgcggcctgtcgcggctcgctgtcagcgcggcctgcggcgcggcgcgttgccagcgcggtggctcggcgtggcctgcctgcgcggcggcccggcccggtgcggccagtcagcgcggcggctccggcacggccccgccctgtgcgcagagtcctggcgcggctcgtggcctgcgcggccagcccggcatgccttgcgcgactcgccctcgtgccctgcgtggctgtctcgtgcttcctgtgcgcctgtggcctag

SEQ ID NO: 7974 - DNA, 747 bp, Zea mays
  Peptide Sequence Number=SeqID_49753
atggagtccctggaggccctcgtggcgcacatccaggggctctccggcagccccgaggagctggcgcacctccacagcctcctcaagcaggcggacggcgaacccctgcgcgcccacgccgccgcgctggtccctttcctcgcgcacctcagtccagagacccactcactcggctacatctacctcctggatgcgtgcgcggcatccgcttccaatctgagcgacttcggcggcggggacttcctggtcaccatcgccggcttcctcaccgcgtgctcggcggaccagatacgcctggctcctgacaaatgtgcgtgctgttttttttttgacccccagatcgattctaatcgcaatgcgctgtaccctgttacgattggctgccgtcgttgtaatctgacaaacttcgacctcgccgtgcgctgtcgtgcagtcctgcatgtgtgtaaggtgctcaaggatcaggttatgcagctcaacatgcccatcagagggatcgccccgttgcgggcggcggtccgtaagatccagtcctcgcccgagcagctgaccccggtccacgcggactaccttctcctgtgcttgctggcaaagcaatacaaggctggactcagcgtcctggaagatgacatattcgaagtggatcagccaaaggacctgttcctctactgctactacgggtctggatcgaacgtgcctttgtggttcacttatggttttggagtccttgtggctcatgcttactag

SEQ ID NO: 7975 - DNA, 3144 bp, Zea mays
  Peptide Sequence Number=SeqID_49754
atggcctccagcctcagcatgttcgtggccaacctggtgctggcggagatcagcgagcaccgggccgtgaagggcgacgtcaacaggctcaagaagaactacgagcgcgtggcgctgatgatggcgtcggcggagcgcagggtggcgctggacgaccaggcggccacgtactggctgaagcgggtcacggaccacatgtaccaggtccagatcgtcgtggaccagtgggtcatcaagaacgagaagatgcacagggagggatctctcaaacggacgatcagctgcggcgaccattccggcgtcatgaaactcgctgccgccatgaaggagctcaacgctgatttcgacagcatactggagctttcagctgagaccaataagacgaggcagcctgcagcagttcggtcgtacggaaagacggcgcccggctacaacgccgacatcgtcggcgactacgtcgacagcgacgctcgcggtataatcgagctgttgcatagctccaagagaagatcctgccgtctcatcgccatcgttgggccggttgggatcggcaagacgaccctcgctcgcaggatatatcacagtgtcgacgcccagcgcttcgagacgaagctatggatacgcttctccaacgatctgagctcactgataatctggccggagccgggctggtcgtcagatcgctacaaggaagggccaaccaaaagccactggccggactcagacagccggtcgtcagatcgccgcaaggaagggccaaccagaagccactggccggactcagagtgctggtcgtcagatcgccgctgggaagggccaaccaaaagccagctgatgcacctgggggctgagatagcgagcaagaggttcctgctggtggtcgattcggtctggacggaggacgtctgggaggcgttgctggagggccctctgcagcagggcgacctggaaggcagtagagtgatagtgaccaccaggaacaagcacgtcgcgagacggatcggggctgggctcatccaccacgtcagacggatgagcaacgccgacgctctgcgcctgctattccggagagcgtcggtcagcgagagcgacgaggcggagctgcaggacgtcgggcggcggatcgtggagaagtgcgacggcctgccgctcgccgtccggagcgtcgggcgcaccctgagggggcaggagccgacgcggcacgactgggagaccgcctgccgggcggcgttccaggacctctcgcccgaggagcagtacacgatcggcctgagcttccggaacctgccgccgcacatgcggcagtgcttcctctactgctccgtcttccccgagggcttcttcatcgagaagcagtacgtcgagcagcagtggatatccgagggcttcatccttaataagaggagagtcaccatggaagaggccgcggagcgttgcttcgatgagctggtcggaagaggcctgctccgtctcgcggtcgggagcgatggagccacgggagccaggatgcccatcgtgatccgctccttcgcgaaggacgtgtctgaccatgtgaacttctgcactgagtcggtgtctgcagccaataatcttttcgaggtgcggcggctgtccatcgttgagaacaacgaggctgacgatcgcattggtgatggtgatgacagtgggaatggtgagatcgcaggaggaggggatggcaatggcagcatggaggacgagcatggaaacaggggtgaagcaagaatagccggcgaagacgtaccgctgcacggactagggaggatgaagtgcctgaggacgctagtgcttcgcaagagcacagtttcacagaaaagcatccgtgcggtcaggcagctaaatcttctgagagtgctcgacctgcgaggagtgcaaggcatcagtgctctacccatcgctgtagggagcctggagcatctccggtacctgaacatctctgaaacggagatcgaaagagtccccgggagcatatcgtacctcacgatgctccagtacttgctgctcaggaactgctccaaagtgaaaacgcttccgacgggcatccagcagctaaggtacctgaggtgcctcgacatcgcgggcactggcatcaaagctgtagactggagcttttccgccatggaagagctcgtctctatgcagggcttccctgtgacgaggggagacggcgtcgtcggttcgctgcgggcactgaatcttaaattccccaagaaactcgctgctctccgtctcgacatgctccaggaaatcctggagcctctgccacgagaccggtggccggttagagagtaccagcagctcagggatcttgagctctgctacgccaatgctgactcgccattggtgcaaggaggcacgatagagaacaggatgctagtgcttgacaggttcgtccctgagaagcgccttgtgcgtctcaagatcgagaactacctcgggaagcaatacccttcatggatagcggcggcgacgctcccgaacctgcagcggctccacctccagagctgcgcgtggtgcgaggagctgcctccgctgggggagctgccgcagctcaagctcctggccgtgacgggcttcgacagcctgcgctcgcttggggcggagttcagggggggcaacggtccgccggtcaggacgacagcgttccgccgcctccagcagcttttcatcggtgacatgaaggcgctgcacacgtggtccggcctgcagagccaggacctgccgcagctccaggtgctcaggctgctggggtgcataaacctggtggccattcctctcgtcctccaggagtcggcgacgctgacgaggcttgaggtcgacaccaggactaagaccgtgatcgaggacaagctccgaggcttcaccggaggcatagtagtcaacgtggacaacacatgggaacaagaaccaccgcagcacgaagcagatgtggctccacaagacgcgcagcctcctggccctgggcaagacgaagctgttgaagcggaagttgaggagactgtcggggcactacagaaagaggtgcccaaagcattcgagcttggcgcagttaagcttgtccttactatctttgctatcactgcaatttgctccgttttgtatctactctttgtgccaagatgctga

SEQ ID NO: 7976 - DNA, 321 bp, Zea mays
  Peptide Sequence Number=SeqID_49755
atggaaaagaaatgggaaaagaaaaagaaaaaggagttcctttccttgtgggccggggggggattttggcccacatgggcgcgggcgctcgcgcgggcgaggcaggcggcccagctggcccagctgtgcggggagacggcgggtgacggcgtggaggcgcggacccaccagccagggagaggggagggggctgacggtgtcagcgacaacggagggggtgagggactcgaccggggccgaccggcggtgaggatccacggcggttctccgccgtcggtccggttttgcgactgggaggcggtggcggagcaggagtggtag

SEQ ID NO: 7977 - DNA, 819 bp, Zea mays
  Peptide Sequence Number=SeqID_49756
atgaccacttccggcgcgcccaagcgcccaagcttcaagcgctcctcgcccgggaagaagtcgcggctcagaacccgtcgcgtcgccgccggtggccgagagggcgaggccgaggccgaggcggcggggacctcggcgctggcgagggcattgcttcccgcatcggtggggctagacgcggtgccgcctgttgggcgcgcattgccgcgagacttcttcgaggtggatgccctcgacctggccccccgcctcctcggcaagctccttcggcgcgatgaggttgtcctccgcatcaccgaggtggaggcttataggccaaatgactccgcatgccatggccggttcggcatcacagcgaggacagctccagtggtaggatcctgcgttatgctttctgagcttgccaaattcgaggctttgagatttgagcactttgatcaatttcttgaaactctttcaggtcttgaaactattcagcggcgccggggtcaacaaaccgagaaaccgatcctacttacgggaccaggaaaggttggacaagctctgggcctatccactgactggtcgaaccatcctctctacgcgcctggtgggttggaggtactggacgggccagagccggagagcattttggttggtccccgcgttggcatcgagtacgcgtctcccgagcatgtcgcggcgccgtggagtgtgttcgacaaaaaggcctacgaactctacgagggcgggtgcccgggccgaacattctcaaatgttaaaagcgtggacatgttcttcgccttcatgttatggtgcatgatcttcgagtgcaggtag

SEQ ID NO: 7978 - DNA, 213 bp, Zea mays
  Peptide Sequence Number=SeqID_49757
atggcgggaaccgccgccgccgctctcatggacatcgacgcagccgcgccgcctcccccgccgcctggtgcggcggccaagggcaaggcgccgctctccgctggcggcagggcagcgccctgggtcgagaagtaccggccccagtccctcgctgacgtcgccgcccaccgcgatatcgtcgacacaacatgcgagagcaaggccttctgttaa

SEQ ID NO: 7979 - DNA, 888 bp, Zea mays
  Peptide Sequence Number=SeqID_49758
atgcaagtggtgtgcaaccgcaccacggttgcgcaccctttcggcttcgtcgcattcggcatggaggcccaggcccacacgtcatggaccgggaaaggggatatttcgaaagggatccttctcagcaaaggaagcgggccccgagccctcctactgatcaggggttcgaaggctggcccctcggaagggttcgacagccgccagagcactcgggctccaagcccattactgatcaggggttcgaaggctggcccctcggaagggttcgacagccgccccagagcacgcagagtgagggatgactctaggtacgtccgttacatggccgaggctcgggctacgctcccgaggcctcgacctcggaaggaggtctccgcctcgcccgaccccagggctcagcgcctcagcctcagcctcggcctcggcctcgggaggaatcacgctacaagggaacaagaccggcgtcccatctggctcgcctcggtaacagggttcaagcacttctccgacggccacgttatcgcgtacacagggctcaagcacttctccgacagtcacgttggcatggccttcatgcggggggtcgcgcggggggacgagctaacgaacaggctcactctctctctcgcgcgcgacgcttgtaacccctactacgagcacacccctgggcgcagcaggcaaacgacaccgcccggcgcccgcaacaaggtgcaggtgcagctgagcccccaccgcccactgcgccctcgacacctcgccatcggcatcagcggccaccgttccccgcaccccgtggcgattgctgccagcctgccactgcctgcaaactcccagctggcctccgtcaaacgagtcctatactatactctaccgcgccgaagaatatag

SEQ ID NO: 7980 - DNA, 519 bp, Zea mays
  Peptide Sequence Number=SeqID_49759
atgggtcggcgcgagacggaacacgaaggggggaaactagagggagacaggcgtaaaggggaaacccgcggccttcgtgttgtcctgcgcctaggtcggccctgggtcgggcgagacggaggctcctccaaggtcgaggttgagtctgtcttccgaggtcgaggtcgagtccgaacctcgggtcgggcgaggcggagaccgtcgtccgaggccaaggctgagtccgagccctggggtcgggtgaggcagagttcgtcgtcttccggggtcgagcccgagtccgagccctggggtcgggcgaggcggagttcgttgtcttccggggccgagcccgagtccgagccgtggggtcgggcgaggcggagttcgtcgtcttctggggccgagcccgagtccgagccctggggtcgggcgaggcggagttcgtcgtcttccggagccaaggccgagtccgagccctggggtcgggcgaggcggagttcgtcgtcttccggggccgagcccgagtccgagccctag

SEQ ID NO: 7981 - DNA, 273 bp, Zea mays
  Peptide Sequence Number=SeqID_49760
atggaggccaagtcacaccatcaaccaatcatcctaaggagtacctgcaaaaattatgccacaatgaccgcacttgtacccaccataaccggaatgggagaccacgtctcaggtcgcgtgaggagggcaatctgctgccaggttcactcaggtagtgtttgctgggggaggtactcgcttggcgagcatccactggtccaaaaatatcaaactaggactttctggaaagctgaaaaagtgaactacaactttggtattttcatcacaacatga

SEQ ID NO: 7982 - DNA, 227 bp, Zea mays
  Peptide Sequence Number=SeqID_49761
gtttaattgtgttgccatcaatcaccaaaaagggggagattgaaagctctcttgtgggttttggtggtttggacgacaacccaattaaaggactaacagaaacaactaatcaagccaagggtggaggcaagaagagcttcgaggttccgagtgcatgggagaaggtcaaggagaccgaggaacccaaagccaggggtgaagaagaagacttgcaaagtcaaggttga

SEQ ID NO: 7983 - DNA, 582 bp, Zea mays
  Peptide Sequence Number=SeqID_49762
atggcagatattgtaatttgcagtaacataaccatggctgcaattgatataagtctgcttcttgagtttacaaatctcattatcagaactaagctttcaaattcttatggacttgtggtgaagtggatccatctatctggaagaatacctcgacagatacattcaatgcaagaacaaagttcagagacagattcaaactctaccaatccgattaacatatttgtcaaatcatttcttgatctcctctctgctgtccgcacccacgagacatggaaggacatcgagaatcccgatccttggccaagctctaaatggaaggagatcgaggaatccgcctccgctgcgccctggcaccctctgcgaccgccgcctctccctcgcctgcccgcccgcgagacagtcgccatcgtccccctgccccgcgccgctcgcgatgaccccctcccccgcgattccggggtcttcgcgacccatggcgtgacgctctacgccgacgatggaggggagctacatgaccacctcctccgtccggcacccaagggagccagccgtcgttctagagcaaagctgcaaaagaaataa

SEQ ID NO: 7984 - DNA, 483 bp, Zea mays
  Peptide Sequence Number=SeqID_49763
atgggaagcgcaagtacccccccgagtcttccctcggaggactttggggactcagagtacttagaggaagtctcctccgagtatgatcgttcacccgttccggcgtcccccgtggcgtcgtccgatgatttggacgactccatggggctgtccgccacggagcgggcgtacatccgatccattgagcacgcggggctcggcgggtcggatgactcggaggaggcctactcgaaggaggtggaggactcctcggactccatggagggcagcgatacgagggcggcggcgatgagggcaacagtggcagcagcgatggcgacgacgacagcagcaggggcgatgacgatagcggcgaaggaaacgacgatggcggcggcgagggcagcagcgacgacagtgaaggcagcagctggggcggcgacagcaagggcgacgacggcgacggtaatgctagtggcagagtgccactggcttaagtattag

SEQ ID NO: 7985 - DNA, 177 bp, Zea mays
  Peptide Sequence Number=SeqID_49764
atggcgggtataataggcctatcatttatggatggagcgagcttatataataataatgtgctacgactgaagttctactctgctgcactgttacggtcgattacatctgaagaaccaaattacttgcaaatttcccatcacaccatcacaaaaggtgtcggctctatccctctgtga

SEQ ID NO: 7986 - DNA, 198 bp, Zea mays
  Peptide Sequence Number=SeqID_49765
atgccgtccgtttccgccacgctggcggggccggggccgtccgcccaccgcgtgggccagggcacgcgggatcaggctacagctactgcagcaactgagttgctagccgcgtatctattcgaacttaaccacaaacaactcatactcctacaccacgtatgcaaatacaagctaggacagacaagcaaaacccgatag

SEQ ID NO: 7987 - DNA, 2448 bp, Zea mays
  Peptide Sequence Number=SeqID_49766
atgagtaatcgaccgcgtcacgctgccccccgccggttagcctcgtcgtctaccattcgccgtctcatacaggacggtgacctggccgtccccggctcctctgcggaggacgtcgcccacgctctccgcaaccaccgtcctgagctccgccgcaagaggctcaagcccttgacggaagccgtccgccgtgtactatcctctgactttgatgacgacgatgatgacgactccgcctcccgcggtcaccaaggtgcccacgccaccctctcctccaccacctctctctcggacgaatccgcccacccgccgcctccaccctatttcgatgccaccaagaccatgcttcgctcccagtatgcctcgcagacgtccaaacagaacccaggcactaaccagcagctggaaatcgagatgaccgctgagaaggctcgccgcctcatcacatctgattgtggaggcggaggtggcgatgccaagccagaggctccggtctccgaaggagtggtcaatggggacaagtggccgcgttttgctgatctcggcgggatggatcaggtgttagatcagcttgtggtagaagtggtggtgcccctgtgccatccggagctgccggattaccttggggttaggcctgttgctgggctactgctgtacggaccgccaggttgcgggaagaccacccttgcacatgccattgccaatgagactggtgtgccgttctacaagatctcagccccagatatcgtgtctggagtatctggaggttctgaagaaaacatcaggggcttatttcagaaggcatataggactgctccctcaattgtattcatagatgagatagatgcaattgcatccaagagggagaatctgcaacgagagatggagcgacgaatagttactcagctgatgacatgcatggatgaattccaccagaatattggtggtgatggttctgatgccgattcatctgaaaagaaaccaggttatgttattgtcattggagctacaaataggcctgatgctgtggatcaagctcttcgaaggccaggaagatttgatcgagagatatatcttggggttccagatgtgaattcaaggaaacagatactgatgatgcttgctcggaagcttcgacttgaagggcaatttgactttttaaagatagcaagggccacaccaggttttgttggtgctgacttgaaagcattagtcaataatgcagggtatctggcaatgaagagaataattaataaaagaagagctcagtattgttctgaggtaaaggaagcaacaaaattggtccaaccctctttgaggagggaaggattttcttccattcctgatgtcacatgggatgatgttggaggtcttgattcgttgaggaaagagtttcaccgctacataagatgtattaagagccctgaagattgtgatttatttggagtgagaatgcaagatggcttcctgctgtttggacctccgggttgtggcaaaacactcatagcaaaagcagtggcacatgaggcaggggctaattttattcatattaaggggcctgatatattgaacaagtatgttggcgagagtgaatcagaaattaggaaaatattcaaccgagcacgtattaatgccccatgcattgtattttttgatgagttacttatcgaacttgatggtgctggtcagcgtaaaggtgtctacgtgataggagctacaaacagaattgatatgatagatgatgctatgctacggcctggtagattcgggaagaaacattatgtacctatacctggtgctcgcgaaagggtttcaatattaaaggcactagccagacgcatacccgtttcatcaaccgttgatttggatgtgttggcacttcgagaagagtgcagcaatttcactggcgccgacctagcatcactggtggatgaggcagccatgttagctatggcagagagatggatgtacctcgatagcaggacatcaacgagtccatcttctctgattgagccatcacactttgaagaagccttatcaaaggtgaagccatcaatatccaaaaagttgtggcgtgcctgttcgtccagtagggggaagaagagtcagacgacgccgctgaatcaagcctgcgcttggaagaagtccaagctgaagcatgatgaggtccaggcgttggttgatgctggattcctggccaaatggttctacattgacaaccagcgtcctcagctgccgaagcctagcatgtacgctccagtacatggcgatgactggaacgctgaagcgtgttgcagagctgaagaaggccagctgatagtggagagggtggccttcagtttcatgaagcgccacatccaacctctgatgaagacgcctacgggtatgagtacaccggaagtgatgacgattcgaggttcaccaaggaggagatcagcgcagatgctgtga

SEQ ID NO: 7988 - DNA, 168 bp, Zea mays
  Peptide Sequence Number=SeqID_49767
atggaggccgacggcagcacacgcgtctgcgccggtcagggtggtcgcgtccgaggggagacggatctagccgggaaggtcgcagcagcggtgaatacggccgggaaggctgcggcagcgagggttccaacgaaggcgatgaagcggagggcgacggggcggttctaa

SEQ ID NO: 7989 - DNA, 405 bp, Zea mays
  Peptide Sequence Number=SeqID_49768
atgcacaaaagcaaaccgtgcgctggcgtccaatccaggggcaagggggggacaggaaatccggccagctgccaggtcgcagtcccagaaagctcggggaggaacaaaagtcgtgccttggcgtcgtgcgtccggccgggcaccagagtggccggagaaccgagtgcacgcagcaccgggagcaacaggagtaccgatggtgagaggtgggacgaggatggacaggacgcaccaccaccccgggataaaaagaggtcaacgtcgacgcccctcgtcgtcgacgacgtcgagacaggaatcgcgcttcgtgtccacggagcgtgggcgtgggcggcaagcagatgtatggacctgattgtcgtaggatatgatatcaactttgatatgacgaggctacaaatgtga

SEQ ID NO: 7990 - DNA, 192 bp, Zea mays
  Peptide Sequence Number=SeqID_49769
atggctgcctccccaccgcagtcggcgaagccaccgtgcaagattttcatcaattgtgttggggacgccttgttcatctacgaccttaacggtgattttgaggccgtctttgaggaggtggtaaccagcctcctaccgaagcttcagaagaaccccagagacctcgtggcgcttcggagactaaggctctga

SEQ ID NO: 7991 - DNA, 438 bp, Zea mays
  Peptide Sequence Number=SeqID_49770
atgcagaccgagttggaggggaagtctcggttcgggcggtgcccgtactgccgcgccatgatctaccaggacctcagcgcgaccatcttctactgcagcaggtgccgcacgcccatccgaggcaagaacccgcaacccacggacgagaccgatagttccatgtttatagccccctcttggatcgatcttggatccgccactggtggctggcgccggatggacctgattgtgcgtgctggagaaggcggcggcgtcggcggcggggagcggcacggacaccggactaggcctcgacgctcagtctatggtcgtttatggagaccctctggcgctgatagggattatttcatgaccctaagctacagcaatcttcgacctcaaatgcttcgagcaatcccaaacttagtaactggctaccacctttctttcgtcccctga

SEQ ID NO: 7992 - DNA, 2199 bp, Zea mays
  Peptide Sequence Number=SeqID_49771
atgaacttcagggactggatctcgtaccggctcggttcctcgctgctgtccgccaggccgttcgcgctttcccccggtgctgatgacggcgcctccgagggtgatgctcatggtacagcacacaatgactttgtagatactgttactgccaatacattttcttctaatgatatgcgggcgtcagaggtcacagccaactctggtagtggtgcaatttattctggtattgttcaacaagatgatgataataagaagtcagatccactgatgaaagtcgaggcgcttcaaatcaagtttctgcggttagtatacaggactggagtgtctcccagtgctgatgtagttgcacaggttctgtacagattgcagcttgcaaatttgattaaagccagtgaatcagatgcaaggagaacaaacctagctatcaacaaagctagggttatagcagcacagcaggaagcaccgggtgggcctgatctggatgtctcaatgcaaatccttcttctggggaagtctggtgtgggaaagagtgccacaataaattcaatttttgatgagaggaaggttgctactgatgctctggttcctgctactcataggataaagaaaattgaaggaacaattaaaggaataagagtcacagtcatcgacacacctggcctggtgtctcattaccatggccaaaggaggaacatgaagattctgaattctgtcaagcacttcattaagcgatccccacctgatatcatcttatactttgagcgtttggaccatattaacagcagatacagtgattacccactgctgaagcttatgactgacatattggggtctccaatgtggttcaatactgtccttgtaatgactcactgttcctcatctcctcctgaaggaccagatggttacccattggaatatgatacttatacgcgttactgcaagaatgtggtgcagcgtcacatccaggctgcagtttccaacacgcagttggataatccatttgtgctcatagacaatcatccaatgtgcagacgaaacaccaagggtgaaagggttttaccaaatgggcagcctcactcttcatccagttcagatgccattgacagtcaattgacagaaatgtcagatgaggaggatgaatatgatcaactaccacccttccgcattctaaagaaatctgaatatgaaaatttgaccaatgaacagaagtctgcatatcttgacgaactggactaccgtgagactttgtacctaaagaaacagtggaaagaaggaatcagaaggaaaaagcttactgaagctcagagtgatgaagttggtgatgattatgatgagagtgcatccccagagattgtgcacatgtcagatatggacattccactaagttttgactctgattatcctgtgcatcgttaccgtcacattataactgatgatcagttgtttagaccagttttggatccacaaggatgggaccatgatattgggttcgatgccatcaattttgaagcatctcaagagttgaaaaagaatgtctctgcggcaattacaggacagatgagaaaggacaaggaagacatgtatatccattcagaatgttcagtaagttacaatgctcagagaggctgctccttgatggggggtatggatatgcagacggcaagcaaagatttggtctgtactgttcatggggatgccaagttccacaatctgccttggaacagtattggaggtggcatttctgttactaagtttggcaacaagtactttgctggggctaagttagaagactctgttaccattgggagacgagttaaactggtagccaacgccggtaggatgtctggctgtgggcaggtggcacatggaggtggtgtggagattacagcaagggggaaagattaccctgtgagggaagggagtgtcactgccgcggtctctgctttgtcatttgaaaaggaaaccgtaattggggccaaccttcagtcagacttccgagtgggccgtggatcaaaaatatcagtcagcgctaacctaaatagtagaaatttgggcaatctcagcgtcagaactagcacatcagaccacgctgagatagctttgataacagttgtctccttgatccagttcattcttaggagaagatcagcagcagataataaagatgagcaacagattggcaccaatttggatgactaa

SEQ ID NO: 7993 - DNA, 1215 bp, Zea mays
  Peptide Sequence Number=SeqID_49772
atggaagactttgtgcatgaatattattctgttgagaggtttaggaaagcatactcaagattgattgagccacttcctgacagaacacaatggcctgaagtggacttgccatttgttgttggcgcaccactggacaaaaggtttgctggtagacaaagaaaacttaggatcaaaagttgtttggaaggtggaggtggtggaaaacccaaaaaagatgcaacggtggctgctgtaaaagctgaatgggggacaaagaaacaaatgatccggggaaaaagaaagtgcaaaagatgtggtgaactagggcacggagaaacaagctacaagtgttcgctaaatggaacaaaaaagaggaagaggaagcctcgaaagaataccactaagtatggagagaatgccaaactaccaacaaaaaggagaggccaaaatggggaagagacaaatgctgctgtagaccaaactgcgcaagagacaggtaatgcagacagagatgtgcaagagacaaatgctatcatatcaagtcctatcagaccaaatagagaaacaatattgcaggatagccctattagattgactagaagggggcttgctatgttgcttggggagagcacaagtgagcaagctgacttcaaccttggcagcaacaaagatttgaatgtgtcgccaacaaagcttgcaacaattaagaatgcaaagcctgcaaaaaaaatgacaccaaggaagaagaagaacctgacagcaatcaaacaaggcgccaacttcgttcgtgtacagttaacgccgttaagagcaaagggcgccgctaccgcctcctctcgaccgctcgccttcccgttcgccatgtcgttgctcgccgcggccattcccagcacttcctcccacttctccgcacccttcctcccctcattccacatgccccgcaagaacctcaccgccccactccaccggatccgccgtccgcggccgttcaccgtcgtctcctccgtcccagaccccgcggcggggccggtggaatacacgccctggctcatcgccggcctcggcaacccaggcaacaagtactacggcacgcggcacaatgttagaaccgtcgccacacttgttctttcgtttcccatttcccgcaacttggacgtgatttatgatgatacaagtctgcccaatggtgtactgcggcttcaaaagaaaggtggtcatggtcgccacaacgggtaa

SEQ ID NO: 7994 - DNA, 207 bp, Zea mays
  Peptide Sequence Number=SeqID_49773
atggccgccgcaactggtagatcgtggtatggagcactggaacgcgcgaaacgcggagcaccggcagcgcacaaccgcggtgaattggtagcgccaccgtacggtgctgatcggaggaagaaggagccccctgaccgttcaatcggctatcgacggctgggattagaaggtgcatacctcttcgagtcactaaattatggccattga

SEQ ID NO: 7995 - DNA, 804 bp, Zea mays
  Peptide Sequence Number=SeqID_49774
atgactagccccaggctaaagctcttcggcttccacgtctccgaggaggagcacgagctgggccgggcccgggagacggaagcggaagccgagccggacgaggcgccggcgtgcggcaacgtcggtggcggcggcggaggctccgactcgtcgtcctcgtctaccaccaccaccaccacgaccacggccacggcggccggcgacgcgcggaggttcgagtgccagtactgctgccgcgagttcgccaactcgcaggcgctgggcggccaccagaacgcgcacaagaaggagcggcagcagctcaagcgcgcgcagctgcaggccgcggcggcggccgccggccgggtcgccgcgggcggggcgctctacccgcgcgccaacccgatggtgtccgccttcgtgccgccgccgcacctcttcggcggcggcggagacgcggcgcccacgagctgggtctacttctccccgcgcgccgccgcggccgggggccagcagttccacgtctcccacaactgcgtgttcccgtcgcgcgccgccacgccagccaccgtgacggccgcctcgcccgccgtgttctcgtacgcctcggcgtcctccgccggcggcggcgcctcggcggcctacgtgaccgacgaccagtacagcgggcggagggtccacgtgagcccggcggccgccctgaggagataccccggcatggcagctgggcctgggatggcggtggtggcggagccggtcgtggccgggccggaggacgccctggggctggacctgcagctcagccttgcgccggccggcttgtga

SEQ ID NO: 7996 - DNA, 174 bp, Zea mays
  Peptide Sequence Number=SeqID_49775
atgaacataacagaagaggtggaggagcagcagaaaaatagcaaagtagggagagggaagaacgtctggaatactggattattgggggaagaggagaagggttgtgctgacctggacgattggggaagacccgaagaggacaatcccgcaggcggcaacaacagacttggataa

SEQ ID NO: 7997 - DNA, 1236 bp, Zea mays
  Peptide Sequence Number=SeqID_49776
atgatgagtgctatggctaaaatacgatccaatttgggtgatgatcctatcaacaaaaatctgtgtgatagattaatgcaagtaatcaatagaagacttgactatatgctcaatgatactcttatgcttgcagctactgcccttaaccctaaagcgctatatacttccaaaatggcaagaaaaccaaagttccaacatgttgtgacaatggccataaagaaactttcaagctcatcttcaaaggcttcagctgcaattgatcaatatactttcttcagaaagcaagctgggttatttggaggagaagaggctaaagattcagcacttaatggtcgcgcaagtgcagctgattggtgggatcaatatggtggagactatctagaattacaagagtttgcacgtcgtattgtttctcaatgcatgtcctctagtggttgtgaacgtaattggagtaccttcgctttggttcataccaaattaaggaatcagttgagttatgataagttgcataaactagtttatgttcactacaacttgaagttgcgcattcaacattttgaaactgatatggaaagtcttgaacaaatgaaaaactctaaagatagaaacatagatccatgtagcatcatgatagatgttgctatgtatgatgaaggcaacccgattatggaatggttgtgcagttctaggagtgaatcagtgccgacacttgatgaaaatgatgagtctgaatcgcctaacagaccaagtggattcgttttagaagagttaggaggattgaatgaagaagagatggttcttttaaattctaggattggttctggtaggaaaaatggtaggaaaaggaatgatgtagaagaagatattggagatgatttcttatcagatagtagtgagggaggaggtagcccaacctacaacgaatcaggtgatagtgactctaatgatggtggtggtgatgacgaagatggtgaacctagtggtccatgttttgcagctaggacacaacctaaattagctacagaccaatataatggtcctggtcaagatgaacaagcagtgcctctccgtccaagatcaaaaaggcagaagaagctctccatcaagggtctgtacatgcttcagaagtttcagcacaatattgctgtcatatttggttcatgtggcctaacaatatttataactgtgattgatttctatgcattatttgaactattgactaccaaatatttgtga

SEQ ID NO: 7998 - DNA, 297 bp, Zea mays
  Peptide Sequence Number=SeqID_49777
atggctctcgacacgcgggacaggaatgggctaaagggggcgaactggctaggctcggccgattggcagggcgccagagagagggggaggggcgagcgtgaggggataaagagggtacgggaagatagaggggattcaccttcacgtgaacggacgacgaggctgcagcaaccacctccagtggatgacggcgagcgttgcgacgaggcggggagaagggtgctcggcatgcagggtgagttggggaagaggggtcgagtgttttgttttggtgacgtggggacatggtgctcatga

SEQ ID NO: 7999 - DNA, 684 bp, Zea mays
  Peptide Sequence Number=SeqID_49778
atggatcccaacggtgtgcgcatccagatgcttacagcaggccaagacgtagaacccccctccgtccaggatgatgctacgaagaagaagccacagcagaccgacgacgccgccacgcctaaagcgccgcctgcgcggccggccctgtcaagcgcctcggacctcatgaagctcctgccgacgggcaccgtgctggcgttccaggcgctggcgccatccttcagcaaccacggcgtatgccacgcggcgaaccggtacctggtcctgtcgctcatcggcgcctgcgccgtctcgtgcgtgctcctctccttcaccgacagcctcgtcggccgcgacggcaagctctaccacggcgccgccaccttctggggcttctacccgtttaactacacggggacccgcgagcagcgggaggcggcgttcgatgacgaagacctctcccggttccgggtcacggcgctggacttcgtgcacgccttcttctcggcgctcgtgttcctcgccgtggcgctcgccgacgccagcatccaggggtgcctgttcccggacgccgggccggacgtgcgggagctgctggtgaacctgccgctgggagcaggcttcctgtcgagcatggtgttcatgatcttccccaccaccaggaagagcatcgggtacatggacatggcgccccacgcgcagtga

SEQ ID NO: 8000 - DNA, 135 bp, Zea mays
  Peptide Sequence Number=SeqID_49779
atggcgagctcgacgtcatctctgtccatgcacgtcggcgtgaaccgtagcacgaaggtgctgtgcatttcaggttggggtgtatttttcaatgttccgcaagtgaacctggggccatgcacatttgatctttga

SEQ ID NO: 8001 - DNA, 591 bp, Zea mays
  Peptide Sequence Number=SeqID_49780
atgacgagagttggctcgggtagtgcgaaacggtgggtgatggggaatatgaccgcggcatgcggttgcgaggatgttaagctagcccgcatggcgagggagttacttatcttcccttactcgcataacatccccgatgttattgctgcagcaatggatccgaaggggaaggcctccgctctggtatacggggtggtgaacctggctgaccgatcgaggaaatggaaggtccaggcgtccgaggtttccacccccgcaaaaagtctaaacaggctaaaactgatgtcgggagcggaggcgactgacaaaggcgttgtgcctctgcctatcaaagactatgtcctcgataatgtggaaatacttacgaagtcacccctgatggctaatagtgtgttttcatgttgctcgaggtgtcgactgctgctgggtcatgctgccgagccttcatccgacgctgttgacgttgttgagaaggttcctctctgggggcctgcgcaaagcgactctgaagtccttttgatcaaggaggaagacccattggacgatgttttgtgtgttactcctttagcttgctggagtccgtcggtgtag

SEQ ID NO: 8002 - DNA, 216 bp, Zea mays
  Peptide Sequence Number=SeqID_49781
atgcctagacgaccctctactcttttgaagaggaggttttttactggttatgcgatttcttctgagggagacttggaggaggaagaggcgatggagatgtggccacataatgatggctctaccaccgaggagctcgaggaccttgggtgggattactgtgacgatcccagcaaggagagtttctttgatgacaacgacaacgacgacgatggataa

SEQ ID NO: 8003 - DNA, 1989 bp, Zea mays
  Peptide Sequence Number=SeqID_49782
atgaggctcctcctcgtcggcgccctactcctatgtgccaccgcggcggtggagtccaagccgcccctcgacaccctgggcatacccccgcaaggttcaaccggatctgtccacgcctgctctgctatttctttccatctttccctgtttccttcggtcgatgcgtttcttgattcaacgtttctgggggttgcagatgaggcgtactacagaggcggcgtgattaaatgcagggacggatcaggcaggttctcccgggagcagctcaacgacgacttctgcgactgccccgacggcaccgacgagcccgggacatctgcgtgccctgaggcgaagttctactgcaagaatgcaggccacactccagtcacgatcttctcatcacgagtgaatgacggcatttgtgattgctgtgatgggagtgatgaatatgacagcaatatcacctgtaagaacacttgctgggaggctggcaaagcggcaagggagaaattgaagaagaaagtcgctacatacaaaagtggtgtagttattcggaatcaggaagttgagagggcaaaagaggcttatgctaaagacgaagcagagttagcaaaattgaagggtgaagagaaaatactccaaggacttgttgacaaactcaaagagcaaaagagacttatagagaaggcagaggaagaagaacgtttaagaaaagagaaggaagagaagagaataaaagaagctgaaaagcaagctgctgatgaaaagggaacacctgatgcctctccggatgtagattctaaggaaactcatgaccatgtgcaagaagatgaaaacaaggtagccgaagagcatgatgtacatgcaacggaccatgataatcatgcaacagaccatgataatcatgcagcagaaagcggagcatctgttgagcagcagggttctgtaaacaaagatgacattagcgttgaagctggaactttagatgaattgctgcacaaggagtctgcagtacctacattagagaagcaacttattcttggaagatatgttgatttcatgtctaagggtgatgatcatagctctgacaatcctgagggtttatcaagagaagagttaggtcgcatggtagcttcacgttggactggagaaagtgtaagtgaggttagtaaagatgataagaagggacatgaagatgagcaagaaataccagaacctgcaaaagaagcacttgaagacgaattagaaattccagaacctgctgaagaaaattatgatggttatcattcagaagttgaggatgacaggcataaatatgaagatgaagagtttgatcatgagtcagaagatgaatatgttgatgaccatgatgagcatgttgagtcctataaatctgatgatgaccagaaagatttaactgagccaggacatgcatcgtggttggacaaaattcagcagactgtacagaatgttttccaaaaattcaacttttttaggacccctgtagatttgtcagaggcttctcgtgttcgtaaggagtatgacgatgccaactcaaagctttcaaaaattcagtctaagatatccaatttagctgagaagctaaaacatgattttggcaaagacaaggagttctattccttttatgatcagtgctttgagaccaaggaaggaaagtatacttacaaggtctgtgcatataagaaagcatcacaggctgaagggcacagttccaccaacctggggagatgggacaaatttgaagaatcgtacagagtaatgcacttttcaggtggagacaaatgctggaatggtcctgaccgaagcctaaaggttaggcttagatgtgggctgagcaatgagcttaatgacgttgatgagcctagcagatgcgagtatgttgctgtattgtcgacgcccgcactctgcgtcgaggagaagctgaaggagctgcaaaacaaactggatgccatgtcttcgaagcagcccgggcatgatgaactttaa

SEQ ID NO: 8004 - DNA, 357 bp, Zea mays
  Peptide Sequence Number=SeqID_49783
atgaaccaccgcgtcgtggctagccttctgcaggtcgccctggataacccagaacacgtcggtgtgttctcagttttcgccgttgtcgtggacaaaaacgaagaagaagtgactgttgaagaagaggagactgctccatcaacagaaaatccacctgccagaaaatccacctgcttcacagtggatgggatgttttcaaaaataaaacttgatggtgggtccatcatggccatgatgggttcaacatcggacaagatgtacctctgccagggatccactattagtaagcagtttgcaaatagagtcttgatatttgatcagcattaccttgactcccttaagccagcatatttttaa

SEQ ID NO: 8005 - DNA, 156 bp, Zea mays
  Peptide Sequence Number=SeqID_49784
atggcccccaagaaagcgacctccaaggccatcacctctctggacgacgctacaaagaaagagatagtcacggccaagaggcagcgcaccaacatgcaagccaaagtaaggcagatcatcctagaagaagagcagaaagctagagagctgaagtag

SEQ ID NO: 8006 - DNA, 289 bp, Zea mays
  Peptide Sequence Number=SeqID_49785
acgggtgaacgttcctggtaaggcaggaaagataccgaacttgtcaagtgactcagggacaccaacagggttgtctgagcagcatggatcaagcagtctcattagctgcgagaagcagacgattcgaatcgagtttttaaaccttgcaagtgaccgcacttgtacccaccataaccggaatgggagaccacgtctcaggtcgcttgaagagggcaatctgctgccaggttcaatcagatatcttcggacccagattgtgaacatgaagtacgatcaggacgaagcttaa

SEQ ID NO: 8007 - DNA, 213 bp, Zea mays
  Peptide Sequence Number=SeqID_49786
atgtccgcccagccaaacacggagatgatgccgatgctggagaggatggcgatggggccgttcttttcgacgcctttggtctcctccgtcaggatcatggcgccccaagagaggaatggctctccaaatgtggcagcggttacctaccaccacatggagatcacgtcgaggaatgccatgacttcaagcacgaatgtattgagcatgacctag

SEQ ID NO: 8008 - DNA, 1734 bp, Zea mays
  Peptide Sequence Number=SeqID_49787
atggcgagaggtgacacggcgagcgaggcgctgacggcggactcagccgacgaggaggggcgccgcgggagcagctccagcgccagctccgacgccgcctccagcttctcctgcacgtactccccggccccgcccgacgagtggcacaaggtggccatcatcaagacctgcgtgtctgtgtcggccgacgccgcgggcggcggcggcggcaaggaccagaagccgcgcggcgtcgtcgccgcggccgacaggcacggaggagcatcagagatggagatgatgaaggagcggttctccaagctgctgctcggcgaggacatgtccgggagcggcaagggcgtctgcaccgcgctcgccatctccaacgccgtcaccaacctctgcgcgacggtgttcggccagctctggaggctggagccgctgccgccggagaagaaggccatgtggcggcgcgagttggactgcctgctctgcgtcagcgaccacatcgtggagctggtgcccacgtggcagacattcccggatggtacaaggcttgagatcatgacaagcaggccgcggtctgatctgtacatcaacctgccggcgcttcggaagctagacaacatgctcctcgaaatcctggaaggtttcagggacgtcgagttctggtacgtggaccagggcatctgtgcgccggactgcgacagctccgcgtcctaccggagaacgttccaccgccgcgacgacaagtggtggctgccggtgccgcacgtgccccacggcggtctccgcgaggccacgcggaggcagctggagcaccgtcgcgactgcgccagccagatcctcaaggccgccatggccatcaacagcaacgcactggccgagatggccgtgccggtctcctacctcgactcgctgccaaaggttcatcagagtctgtcgaccggttgtcgaacacctgtgccgcgcgtgccggtgccgaacgggcgcgcggcgctgggcgacgtcatctaccggtacatcacctcggaccagttctcccaggactacctcctcgactgcctcgacctgtcgtcggaataccaggcgctggagatcgccaaccgcgtcgaggcctccatctacgtgtggcgccggaaggggggcggcggcgccagatcgtcctggggcatcgtgaaggacatggtcatggacacggagaagagggacctgctcgccgagcgcgcggaggcgctgctcatgtccctcaagcagcggttccccgggctcactcagacgagcttggacatgagcaagatccagtacaacaaggacgtgggcaaatcgatcctcgagagctactcgagggtcctcgagagcctggcctccaacatcatcgcgcggatcgacgacctgctcaacgtcgacgagctgagcaagcaaccagctgacagcatcccgtccgccggagcggacgcgaaggttgcgtgcaagagcaacggcagcaagcaggccacggcggtgcctgcctcgggcacgccgtacgcgacggcgtacgccacgccgagcttctcgccggcgcagctgtcgagcccgtccaagatcgggagggccctgctggtcgaccgccggtcgcaccacgttgccggagctaagagggcaacggcgtccgcggctgatcgcgctggcgtggaggtggtcaagggaatggtggtcgacggcagcagcgccatattcgatatcatcccgatagctgtcccagcaaagatatga

SEQ ID NO: 8009 - DNA, 426 bp, Zea mays
  Peptide Sequence Number=SeqID_49788
atgggcaagggtaacaaacgcaagcacgagccgactcctccatctgaggacttcggtgactcggaatactcggaggaggagttctcctctgagtccgaggggtctccggctcccgtctctccctcggcgtcgtccgacgactcggacgactctcaggggattgccgcggaggtttggacttacatccaggccgtcgagcgctccgggctcgagggctcggatgagtcggagtactcctcggacgaggaggactcgcccgaggaggacggcgatggtgacgacgaagacgacggaggtgacagcggcgatgacggtgacggcggcggcaggggcggcaacagcgacgacaagggtggcgatggcggcagcagcaggggcagcaacggcggcggcaacagcaagggtagcaacaaggccagtggctag

SEQ ID NO: 8010 - DNA, 390 bp, Zea mays
  Peptide Sequence Number=SeqID_49789
atgggagatcaggcgcatgcaacagatggatgcccggtagccgtcgccgtcgagatcggaaaggacaaggacccggtgaggcgggacgagaacgccaaacgtcgtcgtcggaccgatctgtgcccaaacaaagaaacggtttctccaatggggtcagaactcagaacattggagccggttccttcagaggggcagttgggccactgtcagtggaccagaacattcgtcacgctagcctgtcccatgtcactcccgcacgggaggatagagacggatcatgcccctgccccctcctactgccactgggcacggcaaggaaggagagaactgacagagatcagcccggcaaaaagcagctatgataagataaggacggccgcccgtgcttaa

SEQ ID NO: 8011 - DNA, 438 bp, Zea mays
  Peptide Sequence Number=SeqID_49790
atggcccaacgtctagcgaatagcgatcgttcggtgtcccggtctcctctccactacactacatcaggcatcaggcaaagaggcaatcggccatggccagcgcccgtgacgacccgtccagagcgtctcttcgtcttcggccagctggaatcattgccagacttgtcacttgtgcccggctattgggcccttcggccttctctcatgccccctcggctttactttttcctaccagccacagccgcactatgttgccgcttgatcgccatgctgctctgcttggaatcgaagatgccgccagaagggaggaagaagctacagtactatggaatagggactgctctgaggcgactgagtaaggccacatctcgccataccgagcgctctgcccctatttgtcatactacaagattatggacgtatcttttaatctggtag

SEQ ID NO: 8012 - DNA, 237 bp, Zea mays
  Peptide Sequence Number=SeqID_49791
atgggcggcacttggaccgaccttggtgagagcgctccggagccggacgcttaccgtgatccattgccaaccgacaggaccccaagaggttggaggcctgagtatgcaaacctcccgcagggcactacacgatgggctgtatcgagccccaggctacggaggtcagggatcagtgtagccataatgatgacgcctatgaacattgcctccccgatgtcatctgccatccctaattaa

SEQ ID NO: 8013 - DNA, 324 bp, Zea mays
  Peptide Sequence Number=SeqID_49792
atggcggccccacggtggatgccaaggtccaagactttccaaacacggttcagaatgtcgagcgggtgcaagcgagttgctccacatgcacggattctctgggtcactgaatcgacctcccagcgtagcttcgccaactcggcctcctgccctactcagaagataaatagaaacataagccttagcgtcctccagaggcagaaaggaattgagaaacagaatgagtggcgtactcgccgcacgggcctccacaatggccaatcgtgcctagagacctgcaacacgagaatcaaatgtccgtacggtcgatcgagatgcctctag

SEQ ID NO: 8014 - DNA, 399 bp, Zea mays
  Peptide Sequence Number=SeqID_49793
atggtgctggaggagcttgcgcaagcgaaggagcacctctgggcccttagcgttgagcactctaatctgtccgtggccatcgacctcgtatgcgaccaccttggtgttttgcatttgggggaagtgtccgcctgtactccccggatggcgctcgtctccagttgcattcatgaactggacaccactgcatttcggctcgagtcctctatgccttggtcgtcacttgtcctctcagtgaagactcggctaagaggggttgagcctgcctcggatgtgccttcggttggtcacatggcaagctctaaagacctaagggcattggcaggacccattgtacgacgctcaccctgcggtcactcatttttcgagtttcctagagaaggaaaaataaagaaataa

SEQ ID NO: 8015 - DNA, 405 bp, Zea mays
  Peptide Sequence Number=SeqID_49794
atggccctcgatccggccgtcgtgtcggccgtttggggggagggggtggggaacggcgcggcaagcctctgcgcgctctgcgcgggcctccccggcgtgggcgctcggcgaggcgcggcccaccggcgctcggcgcccggcgcagccaaggcggaactcggctcggccacccggcgctcggcgtggcacggccaggcgatactcggcgcggcctcctgctcgctcggcgccacccgacgcgcgctcgggctgccgggcacggctggccggcggcgcgcgaacccggcgacggcgcgcccaggcgcggctcggcccggcatgcccggcgctcggagcggccagccagagagcaggcacccggtgcggcctcctggggccctcgacgtggcctcccagaggcgctag

SEQ ID NO: 8016 - DNA, 585 bp, Zea mays
  Peptide Sequence Number=SeqID_49795
atgcgtcatccatccgctgctgcgtctcctccttcagcgccgccaggactgtctctggagcagaacagggtgtgggtggttgcaagcgggagcgagccggtcgaggagagagcgggaaaggggcggatgagcatggaggggctgccggatccaggcaacgaggaggagcgcgggcaggccagagctgaggaggttagcggtgggggtacagagcagatggcgctagggctggagatgccactagcaacacatattaagtgtttctacatcctagttaatgaacggatggtgctagtaacacatattaagcgttgccatcaccctaataactgctggagaaatggaggagatggaagggcgtacctgcgaagacgacgatgcgagctgatggtggcggtggagggcggggttcaaaccctaaaggccaacacgtatggtcacgggattgcagtagcttcttcaagacgcggtgcttcggcggcttctggacggtccgttgtggcacggcttcacccggaagcgtggcccacggacgcggcccaagaagttgcacgtttgggaacgctcgacagcttctggtggtag

SEQ ID NO: 8017 - DNA, 423 bp, Zea mays
  Peptide Sequence Number=SeqID_49796
atggcgaacacgggaaaaggggttcctcaccgagatatgcgcagcccaggcccccgcctgcggcgcagtgcggtccagcggcggagatcgggcaccggcgaggaattccgggctgaccggaacgtaatccgtccaatgcgaggcgcaggaaaacagcaccgcttgccccgctccgactgctgtgccacccgccagggtgaggccgacaacagccaagttcagcctcaggcgcaacaggaagctccgcctcgcccgaccttaggccttggcctcggaaggaggtctccgcctcgcccgaccccagggctcggcctcaacctcggcctcggaaggtggtctccgcctcgcccgaccacaaggctcggcctcaaccttggccttgggaggaatcgcgtcctcgaccgaccccggcctcggccttag

SEQ ID NO: 8018 - DNA, 666 bp, Zea mays
  Peptide Sequence Number=SeqID_49797
atgaccgcgtcaaaaaaggcttcgagcctccctactgatcaggggttcgaaggctggcccctcggaggggttcacaaccgcctcagagcatgtgggctccacacctactactggtcagaggttcgaaggccggcccctcggaagggttcaacggctgcctcaggccactcgggctccgcgcccactactgatcagggtcgacagagccgaagtgaccgcagtcacttcgccgctccactgaccggcctgacagaaggacagcgccgcctgcgccgctccgactgttgtgtcgctcgacagagtgaggctgacaggcagtcaggcccggcctcaggcaccataaaaaactccgctccgcccgacccagggctcggactcgggctcagccccggaagacggcgaactccgctccgcccgacccagggctcggactcgggctcagccccggaagacgacgaacttcgctccgcccgacccagggctcggactcgggctcagccccggaagacgacgaactccgcttcgcccgaccccagggctcggactcagccctggcctccgccgacggtctccgccttgcccgacccaggggctcggactcgacctcgtcctcggaagacagactcgacctcgacctcggaggagcctccacatcgcccaacctag

SEQ ID NO: 8019 - DNA, 231 bp, Zea mays
  Peptide Sequence Number=SeqID_49798
atgtcgtgcgcgttcgacgactactatatcaaggactatggcgtcatcttggcgccagacgtgacagtatcactttgcactgtcatgagctacgtcactacagggaagggagagagaatgatagcgtccgacttttcgtggtatagatctgtacccatacccgtacccgccagctatctgctcccagcagatacccgttactcgcccgcctactacagttttagcatttaa

SEQ ID NO: 8020 - DNA, 300 bp, Zea mays
  Peptide Sequence Number=SeqID_49799
atgcagaggggcgtcgcggcggcaaccgcgggcgggggcacgccaccggcgccggagaagaccaccaaggagcaggcgagagcgatcgtgcgcgcggcgcagagggccgtggaggaggaggatgccaggaccaggagagggggcgacgacggcggcggtggcgccgggccgagcctatcgttcaagaagtcgctccagtggttcctggaaggccgcaagaacaagctcgccacggtggccgccaccgccgggatccatcgccagcttgagggcgacactacgctgtcatctatttactaa

SEQ ID NO: 8021 - DNA, 303 bp, Zea mays
  Peptide Sequence Number=SeqID_49800
atgacgggcaagcagagcggggcagcggcggcgggcgtgggccgtggcgtcgaggcggccgccaccgaggagcaggcgagggcgatcatcgccacggccaagagggcggtggaggaggatgcagccaaggccaagacgacgataggggacggcggcactacaccgtcgtcgtcgctgaagaggtcgctcgagtgcttcctgcaaggccggatgaacaaggcgacgtcgtcgtctgccgcaactcgtccccacctcgagacctccaccgcgtcttcttcctcctcctcgtcgccgtctacctaa

SEQ ID NO: 8022 - DNA, 711 bp, Zea mays
  Peptide Sequence Number=SeqID_49801
atgtctgaaaggctattcaaatttccactatcagataacttatgtgcagcacttttcagtgttcttagtggaaccagtgcacaacaggttccccaggaaaattctgagcctgatccatcaagggatagaaattgcaatattttaagcttgccacccttttcccttcctcagattttgatatgcatctttagatttatgcattcttgtaaagattcctcagcacgcacaagaatcttaaatcttcttcttggtttgctggattcaaactcttcaaacatcgaggcattaatggagcacagttggaactcttggcttgaaacatccacaaaacttgaggtattcaaggactacaaatcagtttctaaaggcgaccctgacgatgtgaaggcagatgaaataagtcttgttaggaacttgtattctttggtcctttcatactacctgcgctttgttagaggtggctggcatcaacttgatgatactgctaattattttctcttaaaaactgaccagccttgctgtgataatgttttacattttttgaaccttatacaggagctgcttatcagtcaaatgggaattaggctattggctgttgggtcatggctggggcaaagcaccttggcagccttggtctttccgatcacaatccatgagaagtggcaccagctgatttcagatgagaccttcaatgacagtcatggctattag

SEQ ID NO: 8023 - DNA, 864 bp, Zea mays
  Peptide Sequence Number=SeqID_49802
atggagattagatgccgcatgtcagacatgcgcgattacttcaagtcacagcgtttctctaggagaaatatcagggaaaaagaaaggctcaggccgactgttggggaggggtctcacggaggagcagccccatcggagaagacacgaccgactcgccagctgcaggtctgggcagcaaccatggctgcgtggcgtgcccagattccgccccagcagcaagcgcggccgcggcgaggcatcaccagactcagcaccggaggggcgcgagcaaggccagtgccccggcgaagtggggcccagcgggcagcagcgcgcgtccgtgcaaggtgtggggcgcgtgacaatgtaaccggcaggcgcgagcggcaaacagagaagatgagacgaggagtgctcaccagaatggagaggtggtcggagaagacaacgttggcagcgcgcgaggtcgggcttggggcagtggcgcctagagatggtggccagccagagtcggagcacgatcgttcggatctggagcatgctggtgtcctcacgacggtcgaaggcgagcctacgcgaaggggaagccgaagaggagcagggccctgcgccatggctgggaggaggccggtccgacgactggggagatggagaccgagcagaggtgcgcgccaacacagggctcacgccatgggaaggaggtgcaattggtggagctcggcgctggtgggggatgggagcatgagcggtcgaccaccaggcggcttgggtgattttctcagccgcaacgacgatccctggagactaggagcagacggggatggggagggtcttataccccgtggccagatcttaatcttctcatgctgttgtggatttgactga

SEQ ID NO: 8024 - DNA, 656 bp, Zea mays
  Peptide Sequence Number=SeqID_49803
agctgacgtcccttgttcaccatgcggctattgggtttgtctatccatcgcgcggcatctcggtgcgaatgcccagcccagaaactgcatgcagctggaacttcgaagcaaagcgcatgaattgcgcggacggtccgcggcctggggccggacggtccgcgacctggcgcgaggcggcgacgctctctggtcagacgcggacggtccgcggcacagggccggacgaaggacagcgccgcctgcgccactccgactgcagtgccactcgacagagtgagtctgacaggcagtcaggccttgccaaaggcgccatgggaaactccgcttcgcccgaccccagggctcagactcgggctaagacccggaagacggcgaactccgctccgcccgaccccagggctcggactcgggctaagacccggaagacggcgaactccgctccgcccgaccccagggctcggactcgggctaagacccggaagacggcgaactccgctccgcccgaccccagggctcggactcgggctcagccccagaagacgacgaaactccgcctcgcccgaccccagggctcgggctccgccctggcctcggccgaacgatctccgcctcgcccgacccgaaggctcgggctcggcctcggccacggaagatag

SEQ ID NO: 8025 - DNA, 1071 bp, Zea mays
  Peptide Sequence Number=SeqID_49804
atgggtcgggcgccgtgctgcgacaagacgagtgtgaagcggggggccgtggtcgcccgaggaggacgacctgctgcggagctacgtccagaaccacggcaccggcggcaactggatcgcgctcccgcacaaagcaggtgcgtgctagctcaagctgtaggccgcggcaagccggcaacccggatcgatgcttaccgcgcatgcatgcgactatgcgagcgagatgggctgaaccggtgcggcaagagctgccggctgcggtggctcaactacctgcgcccggacatcaagcacggcggctacacggagcaggaggaccggatcatctgctccctctacaactgcatcgggagcaggtggtccatcatcgcgtccaagctgccggggcggacggacaacgacgtcaagaactactggaacaccaagctcaagaagaaggcagtcgccatgcaggagcagcagaaggagaaggaggaggaggaggagtactaccagcagcagcagcagcacacctcaggcggccgcggcgccgctccccggagccagcaatgcgcctccatgcagccctcgcccgcgtccgcctcgtccgcggtcaccaccgcgagccccagcgacgcgtgcagcttcggggccatgtacccctccccgacgacgctgcaggctccggtgcacgcgcgctacgacgtcacggcgccagtgccgccggtgccgcaacagcaagcgtcgtcgtcttcgctcgccgagttctcccccgcgccggcgccggcgccggcggcgacaccacccgccgcctccatcatcggcggcacctgcacctgggccggcgggccgctactcgacgacatgttcctgcccgagctcctcggggacgtcagcgagttcccgcctggcgacttcttcggcaccggcgggttggccccgctgctgcaggacagggcggcggcggcgtccctccaggagctctccgcgttctactttcccaacgcgcaggccgagatgtgggctgcagcggatcatcacgttcatgccaataacaagcctgcggccggactctgccacagcctgacatga

SEQ ID NO: 8026 - DNA, 333 bp, Zea mays
  Peptide Sequence Number=SeqID_49805
atggacaaccctacgatgagcgatgagttcttgtacgttctccggccaccagggagatgggtggcggcctcgggcctccatcccaagggcaagggccagatcgagagcgtaatgttccaaatattcctgcagtgcgaggacagggacggcaaggagagagatgccaactttccagggacgcaatctcgcaaattaaaggccagtcggaacagatcttctctcgagcgccgtggatcgacgattcgtccatctatcgtcgagttcttcacagcatcgtcgtgcagcatagctattgccagcggggcagggcagggcagggacggaactgaatag

SEQ ID NO: 8027 - DNA, 714 bp, Zea mays
  Peptide Sequence Number=SeqID_49806
aataatgaacttgaagaccagcttcgtaagtccgcacaatccaaagtcccatcagatcccaacatatggcttcagatgcgtgacaactttgagaagataattctcatagatcacgacctctctgaacagagagatgtagagtatctcctatggcagttgcattacaaaagaattgaggacttcaggaggaacattagtgcagctagctcacttgcatctcagagtgggaagagcaacactaacccagatcgagtcaagagaattaaatcagccttcaaaagcttcctttcagaagcaactggcttctatcatgacttgatgttaaagatcaaatcaaattggggccttccactcaattactttccagacagccttgacaatgcaaacaactctgtgcgagatgacatgaaaacagttcaattgaagaaagatcttgctcgttacaagagtttgaatggtgatggtgattctgctagtcgtgaatacacagcggcttctagttactacaaggaggcagcttctatctatccttccagtggcaaccctcatcatcagcttgctatactagcttcttactccggcaacgaggtggtggctgtttataggtacttccgaagcttagctgcagacactccttttgccactgcacgggacaacttgattattctttttgaaaagatgaggttgattgctaaccttgattatactttataa

SEQ ID NO: 8028 - DNA, 492 bp, Zea mays
  Peptide Sequence Number=SeqID_49807
atgcccccgccataccgagaaaatcgtgcacagcaacagctcacctcgcctacaccgcaacagcaacagcaaaatacccaaacccggttatctgtggtttatgcaaatcatgtattgagaaatgcacttgttttagatgagatccacttctccgtgttttcggctctgattagcctgatgctgctttcacaagacagaaatcttgctttctatggagttgaaccaggatcaagcggccttactggcccatttaaccaaggaatcatgcagccaaaattgatgtgcaccattgccaatcctgttgatgttttgcacggagctattcacgacgcgtcaacaatgaaccatgtaattttacagagtgacgtactgacatatgtatatgcagttccatatgtgcttccaaacctatcatctgtcacccatgcccacatcgttgctggcggagagcacgcaagtcatcgtgagttcaacctccatgccccgtgttga

SEQ ID NO: 8029 - DNA, 600 bp, Zea mays
  Peptide Sequence Number=SeqID_49808
atgacctccaagacgagcggcagcataaccaccatcctgagcaccacggggaagctctcctccgtgggcagcagcttcatggcgtccgccggcagccgcagcaccagcggcgggtttgacgagggggccaagtactccgacggccagatcctcgaggcgcccaacctccgcaccttcacattcatagagctcaagacggcccccaagaacttccgtccggacagcgtcctcggcgaaggagggttcgggagagtctacaaagggtgggtggatgagaagaccatggcgccgaccaggaacggcaccggcatggttgttgcggtcaagaagctcaactcggagagcatgcaggggtttgatgaatggcagctgcgattactcggtagtgccgatggtccaatgctgaccaggaacatattgttggaagtgttgtacaatattacaactagccacatgtctatcacaatgcagttactttttgtttgttgccatgcctttgagaagggaaaaaattgttttctgagctgtgtcgtcttcagcaaacacaacaagttcagcaacgtgccacacattcttgcaaattgttatggccacaattga

SEQ ID NO: 8030 - DNA, 171 bp, Zea mays
  Peptide Sequence Number=SeqID_49809
atggcggagaagtggcacaccgttgagaagaacgcgctgatgtgcgggccccacaacatagcgtcacgcgcgtccgcagagtccgcggaacgactgaccaaccggagccatcggccagcggcagagcaaacacgacgcgcgcgtccaaagaactacctttcaccagtttga

SEQ ID NO: 8031 - DNA, 423 bp, Zea mays
  Peptide Sequence Number=SeqID_49810
atggcgtctgcgtgtggagcgatgcgcaagtcaacgtccctggcatcaaaagtgagttgtatgtgggaccacttcgtttgcaccactgagccgcgaagtctccttgtttgggtgcttgcggtgggtggttgtggtgcagagggtttgtgtgatgcagaggcggtggtgatagaacctacacctcttgatggtgctgcagccttgggtggggtattcctaacaacggttgggctctccggctgggtgctgattggatatggtgtgcacctgctaatgattgcgaatgtcccagtcgaagtctggctgcaccagtctagtccaggttctgctggactgcggaggagggatagctcatccaaggcgtctgtgtcgggtcggtacccttggaagttgagcaggaatttgtcgcgaaggcctttctag

SEQ ID NO: 8032 - DNA, 213 bp, Zea mays
  Peptide Sequence Number=SeqID_49811
atggaagtctcaaacagcatcatttaccaccatgagcaatgtccatttgatccataccccctgggaactacaacaggtttcggtgctggccgggtcttgagaggcgaaggcacggtggtggttgatagggctcacggacgggccggtttacaaggcgatggtgacgacttccgccaggcagagcactacgccgacgaccttggctatgcctga

SEQ ID NO: 8033 - DNA, 222 bp, Zea mays
  Peptide Sequence Number=SeqID_49812
atggcagtcggggtcagtgaggcattgtacgtcaaggcggtgagccctgatctgctgacggggaatcgatggggatggttgatgtgtgtggggacggagtgcccctacatgtcgtgttctttggaggacatggttgctggagtgacttggccgtccatcttgccaccgggttggacagtcgagtgggatcctgcctcggctgaggaggagcatgaggagtga

SEQ ID NO: 8034 - DNA, 429 bp, Zea mays
  Peptide Sequence Number=SeqID_49813
atgtggtcggaccgttcgacattatatttggactgtctggcatcatacgtggatggtccgaatgggttatctagggtttgcacggtcggagcgaagccagatctgtccaccttgaagtcagccaggaatttcgcccttgcttcctggatcagtgtccgatgcaccagggtcgtacaggagccaagcagcctctctcaggaaaacgcaggcgtgctccgctataattcaccagactgtccggtgtgccagcggggtaacggctacctgcgcgcaatggtcgactctgacagcgctacagtgtcgcggcagaagtcagagcagcgagtcagaggggcaccggactgtccagtgcaccaccagactgtccggtgccacaagaagacaaatgcgccaacgatcaactgctccagaaccctaacggttgggtga

SEQ ID NO: 8035 - DNA, 2043 bp, Zea mays
  Peptide Sequence Number=SeqID_49814
atggcgaaggctgtggctgtcactgcacttgcagcagcactcgtagtgctgctgctgcttgcatgctgcccatgtcgggcgcgagctgacgaatcggccaacgtcacggcgtcgctcgtcagcttcttgaccgcgctggccggcgacgacggcgggcagacggcgatcaggctgaggtggaacgcgtcgatcaacccgtgtgttcccggcaccaaagcctcactgtggagcggaaccgtccagtgcttcgaccgaggcgtaaacgacgggcacatcaagaggatcgacctcgacgagcagggcctgaacggcaccatcgacgcggcgctgctctgcgccgcgccggctctccgcgtgctgaactttcacaacaacagcctgcgcggcggcctccccgcgggcatctcggcctgctcgggactcacccacctggtcgtcagcggcaaccggctctcaggtaacctgccgtcttcgctcgcccagtccaggagcttacgcgtcatcgaggtttccggaaacaacttctccggcgagctccccgggggcctcggcaggctcaacctagagaggttcttggcgaacgacaaccatttcgacggcaccatcccggacttcgacctcgacagcattgtgggcctcagcttcgacgtgtccaacaacaacctcaccggaccaatccccaaggacgctgtcaggttcggcaaagggaggttctggcctaacgccgctggcatatgcggcgagcccttattcgctccttgcccgtcgccgacgccgcccagctcgggctccgaggccgaagacgacgggaaggggggtgacaaggacaaggagaagaaaagaacagtgcctaagatcgtcatgtatctcggctacgtcctcctgggcgccgccatactggccttcgtcctgtacaggttctgcttcaagaagaagcggagcaagctggggcggaattccaagcccagcggaggcagggccgtgtacgacagcagcaggatgacgacgaccacgaccacgacgtcggcgaccccgagcaagacggcctattcgctgccgacgtcgggcgagcacagcacggtcgccgccgaggcgggcgcgccgtcggcctcgctggtagtgctgcgccgatcgggcacagcctcgatcacgtccaacgccgcggcggcggcggccaagaacctgcggttcgaggacctgctcaagtcccccgcggagctgctgggccgcggccgcttcgggagctcgtacaaggtggtggtgcccggcggtgcggcgctagcggtgaagcgggtgagggacgcggcggtggacgaggacgagttccggcggcggatggagcgggtcgggctcgccaagcacccggccgtgctaccgccgctggcgttctattgcgccatgcaggagaagttgctggtgtacgagtttcagagcaacggcagcctcaccaagcttctgcacggctccatagagagcagccaagcgccgctggattggccagcgcgcctccacatcgccgccaaggtcgccgacggcatggcgttcatgcacaccaccctgcgcggcgacggcgggaccaccaattcctcgtcaggcggcccaatcgcccacggcaacctcaaggcctccaacgtcctcttcacggccggcatggacccgtgcatcagcgagtacggcgtcaccgcgccgggcagggacggcgccgcggcgttccgcgccgacgtgcgcgcgctcggcgtgctgctgctcgagctgctgacggggaaggcgacgtccgcgcagggcgacggcgcggagctggcgcggtgggtgacctcggtgatccgggaggagtggaccgccgaggtgttcgaccgcgcgctgctcgccggcaccggcgtcgggtcatccgagcaccgcatggtgcggctgctgcaggtcgcgatgcagtgcgtcgacgcctcccccggctctgccccgccgccgaccatgcgggaggtcgccggcatgatcaatgccatccgcggcgacgaggacgacgggtccgtctccttcggggcatga

SEQ ID NO: 8036 - DNA, 1233 bp, Zea mays
  Peptide Sequence Number=SeqID_49815
atgtcctccacgctatctacttcttcccctgcaccgattccgctacaccatgctgccacgattcggctcacgaagagcaattatcttctctggcgtgctcaactcatgccctatcttagaagcgcgaagctcattggcttcatcgacggatccacatctgcaccggcccagatgattgcctcctcgacggcgaccggtgctgaccaagttcctaatccggactatggccgttggtgcgatcaagatcagcatcttctaagtggtcttctctcaacaatgactgaagacgttctgcgtgacgtgatctctgccaacacctccaaagaagcctgggatattcttcaacggatgttctcttcatccactagagctcgtacggttcaaatccgtgttgaactcgccacaaccaagaagcatggcttttctgctgctgattattttcgaaaaatcaagaatcttgccatcgagatggctgctgctgatgctccattgcgtgacgatgaggtgattgcctatctccttgctggtcttggtgctgactatgatgcctttgttacatcaatgaccacaaagtgtgagaccctatctcttgatgatgtttatgcatacctaatggtttttgaagcctgtcaatctcagcatcaggctgagatgcagctgcatactggatcctctgttaattatgctggtcgtggtggttcctcgcgttctcgtggtcgtcctgaccgcggcgatctcgcggtggcccctttccccgttcaggtgacaccagaggtgatcgtcgcaatccctctcgtcctccatgccagatttgtggcaaagagggacacactgtcgtgcgttgctggtaccgcatggacgcatcctataatgaagatcccccttctgcagcgttggcagccacatcttcctacaagattgatcccaattggtacagtgataccggcgccacggatcatattacaagtgatcttgaccggcttgctcttcgtgaacgttatcatggtggtgaacaagttcaagtgggcaacggtgcaggatcgcaagacacggcaacatcttctggacggacgttgtgagggaggcctttaccctctcacaccatcagatgcagatgttctcaaacaggctttagctcatgtagaacgtcttttagacactaaaatcaaatgtgtgcactctgattggggtggtgaatatcaaagaattcataacacctttttcgatccttag

SEQ ID NO: 8037 - DNA, 324 bp, Zea mays
  Peptide Sequence Number=SeqID_49816
atgaccacccctagcaacgcagtctggagttctcccacggcgaattgggtgcccggttggttcatcccgcgccacagcgggtgcgtgcgtgcccccacggcggccacggcccaccccggggcccgggcgcgccccctcgtagtcgtgtaccggcgccgggccactagtacgagcgccaggccgtcggctccgacgctccgtcactgtaactcgcgatgggcataccgcatacctccggattcggacggctggctgctgcgcccgccgtcgtgtgctgccactgtgctgtgcaccatgtatcatggcactggcccgcgctggctg

SEQ ID NO: 8038 - DNA, 1224 bp, Zea mays
  Peptide Sequence Number=SeqID_49817
atggcggcggcggggccgaggagggccggcgcccggttccttctcgcgcggggcatcgggagcagcgtcgcccatgtgcattccttgggccgcggcggcggcggcgttacaatgccgcgcgcgttgctggcggactcggcgcccgcgtccgcgccggcgatgaccgggagggccccgcccgcggcctcgtcgtccgcctccgccgcggcgtcgaggatcacgccggcggtgctgttcgtcacggtggtcctggccgtggtgctgctcgtctccggcctgctccacgtcctgcgccgcctcttcctcaagagccaccacgccggcgccggcgccggggagcgccacctgcagcacctcttcttccccgcgcacgacgacggcgcgggcgccggctccgggtccggctcaggcgcaggcggcggcggcggcctcggccaggacgccatcgacgcgctcccggagttcgcgtacggggagctgtccggagaaggcgccgccgccgccgcccccgcaagcaggaagggcaaagagaaggcggccgggccgttcgactgcgccgtgtgcctctccgagttcgcggaccacgaccgcctccgcctgctcccgctgtgcggccacgcgttccacgtggcctgcatcgacgtctggctccgctccagcgccacctgcccgctctgccgcaccaagctctccgcgcgccacctcgtcgccgcagccgcggacgcgccagcgccagcatccgtcgccccggacgtcggggagcagaggccgcagcgggaccacgcgccagaagccgccgaggccgccagcagcagcgtcgtgctcccggttaggctcggccggttcaagaacgccgacgccgaatccgccgaggccgagtccagcaacggcggcgccaccagccgcgtcgagcggcggaggtgctactcgatgggctcctaccagtacgtggtcgccgacgagcacctgctggtctcggtgcacctgcggcacggcaccagcgccgccgtagccgcctcgagcggcgtcgacggcgacgaccggcagcagcatcagggcaagaaggtgttcgcgcgcggcgacagcttctccgtgtccaagatctggcagtggcgcggcagcaagcggctgccgggcgccctgtgcgccgacgacggcctgccgtgggcgccggccaaggacgatcgcgccagcgcctgcacgaggcaacgcggcgacacttga

SEQ ID NO: 8039 - DNA, 198 bp, Zea mays
  Peptide Sequence Number=SeqID_49818
atggcgtgggtggcaagggttgtggcctctggcagcgatgccctacttatacaatggggagctcagcagggaaggaaggacaacgatgaaggctgtgcggctgggtgggcgatgaaggctgccaagatactcccagtcattaatgggcatggagtgatcgggttgggagaaaaggctgatgttgccgttgccgcgtga

SEQ ID NO: 8040 - DNA, 2691 bp, Zea mays
  Peptide Sequence Number=SeqID_49819
atggaggccaaaaccttaacccctgaggcggacgccgccgccgcgccccaaaccctagccgccggggagctcgtctgggccaagccctccaagccccgccggcactgctggtggcccgcgcgcatgctcgccgcgtgccccgcctccgccacccgcggcgcccaagtctcctacttcagtgaccccgccgcccccggcgcgccgtccgcccctcccgcgcaggtccggcgcttcgccgacgccgacgccggcgccgacatgatggcccgcggcagcaccgcgcgcggattctccggggccgtcgcggaggcagaggcgcgcgccgtcgcggcgctgcgcgcccagctcgcctgcgcttgcgtcccgcccacgccgccgcccggagaggatagcagcgtcaccgggcgtcgccaacctggcgcccgcggagttcctggccgcgctccgctcaagagctgggtccgggcggtcggggaggggtggggtccacatggcgcccggcactacccgcggcgcccgctgcacgaccttgtggacaagatcgatcttgatgtgcctgctggcgaagacagagatgctgatggttggcttgccgaggaccagcacaaggcattggagaggccggaggagacaccattgaggcacaagaagcgtggtgtcaccaaagtgctggatgcaggggaggatgagggcaagatggatagccctgagcatgtaacctcaggaaagcgacagcggaagaggagtaagtacctgttgccaccatacaccagcttggttgtggttgacaagattgccctcaaaccggttgatctgccaagggcattggtgaccgaagctgctgaagatggcagcgatatgtcgccattgccagacagcattgttgtggaagatgtcttgctgctggtgcgaagattaggggaggttcccaggcataaggacgactttccaaaggacgctgagggatttctctgtttgtttagaagcacaacatttgttcacggtgctgactatgagtcttgtaaggcatatgaatgtccactcgtgcgtggctctggaaaagttggcatggaaattgttgtcgctctagcctctgattcacatgcttttctgaatcaaggcagttgtgtgttgaagaggaccaggaaaaaagatgaagctgtgagtggtagcccttccatcaagaagaagcgggagaagacctctcttgccagcgctgatataccaatcgctcctgctattcctattaggcagttgaaagcagaagatatgagaaccctcatgaaggctgaaagtggtctaaggggtataggattaggagttaagaataataagggcaaaccttcacctttgaaagttcctatttcagctgcggatcctggagcagtggaattaggacacgaacatgcccaagcaaatgttctggctgtgtgcaatacgttccctgaacagcccgcaaaagaaaacgatgctactaacttggaagcaacaaggtcagaaatgaatatgcaaaatggtactgtagatgtgcctatcagaagtgttcagacagaagcaatgaaattgcaagctaataatcccatagatgtgaatgcacaaagcgttgctgtagatgtccctgtaggaagtgtttctaaggaagcaacagagccagaaactagtgtacacaaggacaagaatgtgcaaagcgatgtttcaggtgtatctgacagaattgtttctaaggaaccaacagagtcggaaactgacgatcacataaacgagaatgtgcagagtgtcgctgcagatatgtcttccagaagtgtttcaaaggaagcagcaatgaccgatgctgatattggcatacatgaaaatacgcaaagtgctgcagatttgcctgacagcagtgggccgtctcctatgcatgaagacatgtctcagcctgtggatggacataaggagcctgggagtgtagaagtctgcatagtccagcaatcttacgcttctctggaagctatggtgccagaaatgcttaagaaagctaacgctaatggcgcaggcacaatcggtgtgaattatacactcaaagacgagtttcaaaaggatggacaacctgtcgagaaagtgaagctaccagcagaagtggcgaaccattcctgtggtggaggtaccaatggcacttggctggaccctgctaaccttacacctaagaaaaggaagaaagtcgcgcagcacttcagcaatccagcagccgtcatagtggaattcgcacccggtgccactgttccgtccagacaggagctgctctccacattcggcaagtacggcgacttgatcgagtctcagaccgatatttcggaaactacccgcagcgcctctgtcgtgtatgggaaaagcgttgaggccgaggaggcgtacaggaacggttgccagtaccttcttggtcagtttgggcctccgttcgctacgctaaggcttgatttctccccaatcgtgccttcaccgtctcctcccgcttcgaaacctccgctccgagatattcggaagaacctcgaggacatgatttcgtcccggcgctcggctttgaacaaggcgacctcgtcggcagacgcccagctggaccctgttccagataagcttctgggggagatgcaggggctgttggcaaaagtcgacaggatgcttaccaggcctcatgctaatgctccttag

SEQ ID NO: 8041 - DNA, 294 bp, Zea mays
  Peptide Sequence Number=SeqID_49820
atgtcgggagaacacgccaagagagagatggtcatcggcgaaaagcccgaagcctcgggaaagaagaacgatgaaaggactccatcgaaggaggccgacgacaagcacaaggaggaatctaccggctccataaagtcacataggaagggtaacaagaagaaaaagaaaatgaagaagacaccacaggtgagcaacgaggactacaactccgatgaggccacccaaataaggcactttaattcccaagccacctctatactcctcgcttcgttatgtcgaaaggagtataacaag

SEQ ID NO: 8042 - DNA, 1104 bp, Zea mays
  Peptide Sequence Number=SeqID_49821
atggacgatgagtggaggccggtgatggccatgctcgtcttcaacctcatctctgctgtgatgacggcgctggtgaagaaggcgctccagcaagggctcaacgccctggtcctcatcactcttcgccagttggtggccactctcttcctagcaccaatagcctacttcaaagaacggaacacaaggcctaagctcacgctagagatctttgtgtaccacttcttcagtgcagcgcttggtgcttccctgtcgcagtacagcttcttctacgggctcaagttgacgactgcgacgttcgccataacatttgccaacatggctcctgtcctcaccttcctcattgccatagctctacgggtggagtcgctcaacatgaagagcaaatcagggtctgcaaagatggtggggacgctcatgtcgctcggtggagtgctgctgctgagcctctacaagggcatggccgtgacacaccacagcagcggcactcctccgccctctcaagtacaactaggcaacgacggcgacaggaaggtctggatgctggggactgtagcgttactggccaactgcctcgtcttctccctgtggttgctgctgcaaagcaggctgacgaacaagtacccggcgctctactccagcaccgccttcatgttcttcatcagcacgctgcagacaggatcgctgacggtgacggtcgagtggcaccacgcgtcggtgtggattgtcacaaagaagctggagatggtcacgatattgtattcgggaatcatggcgtctgcagcaggcttcctgataatgacctggtgcgtccacaagaggggtccagttttcactgcagccttcatccccatcgtccagatcatggtggccatcatcgatttcttcttcctccatgagcagctataccttggcagtgttctgggatccgcgctgatgatatttggactttaccttctgttgtggggaaagaagaaggatgcaatggcggcatgctctgcagaattcaggaaagcttattctaatttccaattccgtgttctaatatctacgttcaaacagggtccaaaaacggggtataagaattattaccggttctttctttga

SEQ ID NO: 8043 - DNA, 396 bp, Zea mays
  Peptide Sequence Number=SeqID_49822
atggatgcactttgtagcattcctcatcaactggcagcagatggtgtggctgctatgctgtctgccttccctctgctagctccacttccaatccacaggtatgctgttttcagtgttcaggatttggatcttggaatttggtttctcaggaatgcagaaccaaagctgacagtggagatcttagcctacctacacgggcatgttactcagcatagacgactaagacttagtccggccagtgctcctggatttgggagtgggagtgccagtgataggctacgtgatgatgacagtcgatgtcgagcactggcgctacatttattatttgttttttggaagaatctaaggggtgtgatgcaaattgaagagctatgtgccacacaattcacaaggtga

SEQ ID NO: 8044 - DNA, 411 bp, Zea mays
  Peptide Sequence Number=SeqID_49823
atgggggcgtatggcatgccatcagccaccaacaatccagatgcctctggtcagtccttcagcgaagcgttgaagagttcgaggaagcatctgttgcagtacgatgccttcgaatctgcagacggtggtccaggcggtaagggcgcaaagaagaaaacgaaaaaaagcaaggaacacaggatcggcggaggcggccagtgccatgtcgctgcggggatgatgcggcacggcaagggcggcaagtgtcgcgcgctgtgttgcggcgcgtcccggctcagcgtgtcctcgtcggcgtcgtgcttgattttgtcgtctagggagcaaccgagcagtggccggaggaatccagctccatcctatgcggcggcggccattccaatgctccctatccaactcctctccagtggctga

SEQ ID NO: 8045 - DNA, 906 bp, Zea mays
  Peptide Sequence Number=SeqID_49824
atggtgtccgtcgttgtggtgttcgcggtgctcaacacgctgacaaagatggccttcaaccaagggatgcacaccactgtcctcatcacgcttcgtcagctcaccgccttcctcttcctcgcaccaatcgcctactaccgggagaggaagacacggcctaagatgacacttgagatctttgtctatctcttcttcagtgcagtgcttgggatggagaaactggacctcaagactggagccggcatagcgaaggtgattggcacagcagtagggttcacaggagccatcgtgcttgcgctctaccaaggtccatcactgaccaaaccctcaccagcccaagcagcagcagcccaccatgttcttgctcaccatcagtgggcgattgggtctgtggccctgctcgcaggcgcagcgtgttggtccttttggttcatccttcagtcgagactggggaagaagtatccggctctctactctggaaatgcgctcatgttcttgctcagcttccttcagatggctgctgtggggctggccacggagaggaaggacctctcggtgtggatcctcagaaccaagctgcagatcatcactgtgctctttgtgcaaagaggtccagtcttcaccactgcattcacgcctctcatacaactcatagcaggagctatcaacgtcgtcgctctccatgaacagctccatgttggaagcgccctgggctctgctctggtaattgctgggttatactttgtcctctgggcaaagaccaaagaggcggcatcagatgctcctccaaccaccaatattgttaaatcaaagcaagcaacgacggaacaaggagagatgatagatgaggtcacgaggatatacaaggagatatcccttgatgtatgcttttcgctgacgatgtaa

SEQ ID NO: 8046 - DNA, 462 bp, Zea mays
  Peptide Sequence Number=SeqID_49825
atggcgcgcctcggcctcttggccctcgcagtggccgtcctcgcgctagcgtccagcgtggcgtcgcaggcgccggggccggcgccgtcgaccgactgcgcgtcggcgctggcgtacgtgcagcaggggagcacgcagggcaagcccgacagggagtgctgcgccggcgtcaaggccgcgctgaagagccccgccaccgtcgcctgcctctgcgccgccgtcgcgcagaactacggcatgcccgtcaacctcacccgcggcgccgggctgcccgcggcgtgcggcgaagaccatgccgccttgagcaagtgcaacaagcccacagcttccggaacggctccggcagtccaaagcccgggctcttccaagtcgtcgtcgtcggcggcggcggcgatccgatccccggtctcagcgttcgccattgtcgtcgctgcgactctgctctcgcactgcctcctctga

SEQ ID NO: 8047 - DNA, 105 bp, Zea mays
  Peptide Sequence Number=SeqID_49826
atggcgacgagcccccggtcggcgacggcgctggcagtaagggcagaatcggcacaagaattcgcgggcccaccggcagttcctcggttcaccatagatacttga

SEQ ID NO: 8048 - DNA, 1302 bp, Zea mays
  Peptide Sequence Number=SeqID_49827
atggctaacagggaagatggatttttggatcacagggaagatgaagttgcggatttgttgaagggcctaattctgacagcagaggaggaagaggttgcggattttagcgacgaggaggacgagggagtccctgatgcgagttgggctctggtcggtaaagttttgtctccgacgattgttcatgccacgtcgattcagggagcgatggagccggcgtggggcaacccggctggtctgaatattcgcatggttggcgcgaaggaagagaatctttttgtggcggagttttgttttaagcaagacatggagcgggcgttgggtggttctccatgggtggtggggaagcatgcagtgattctgcatgagtatgatgagcgactgaagccctcggagatcagttttgacacgttggacatttgggtcagaattcttgatcttccactaggctggatgaataagctgaagggtgaacgggctatgggtctgattggtgaggtgaaaaaaatggatgtcgacggtgggggaaaggccagtggtccatttcttcgtgctcgagtggctatcgaggtgtcaaagccggtgcgtagaggagtgaaactgaaaacaaaaaaagatggttcgcctgagtggtttgaggttcaatatgagaagctttcgttctattgcctggcgtgtggtatcatcggtcattctcaactgaattgtgataaacccctagttcggaatgcagaggggaagctgccttatgatgttaatcttcgggttttcgagcctagaaggaggaagatgcagagtttctcggaagcagcggctgaatcctttgggagggagtcttcctctcattcaaagcgagagcaggctatgggggactctgggggatctgggagttcagatgctcataaggataaggtgaatcaagaggagaatagggaggtcccagggccacagtttgatgattcaagagttgggaaagggcaggcttcaaaccccctgaatgctcgccatgttatgttcaagaagagttcagagggaaacaggggccttccaaggaaaaggaaatctaagatgtcagaaccgggttcggataattcaccgggtcacagccaactgcctatgaacaacatggctattgtaccggcagattcagtgtccattcaggtgaatcaactttttgatgatgagggggatggagatcctcctgttgtccctgatgagttatcgaagaaacaaaaaaaggagtattcccaaccaaaggcaagatcggtggcggctgcgatgggcagcccccgccgggcacaatga

SEQ ID NO: 8049 - DNA, 378 bp, Zea mays
  Peptide Sequence Number=SeqID_49828
atgacgggggaaagcgaagtctactccaaccaagcgaagtccttaggacggagggaccgacaaggacaagcgaaggctttgccgaacgtctcctcgttcaagaatctcccttactggtgtgcaccacataccattgcaacggctgagcaggccatggcgaagcaagatgtcttctcatttgatttcgtaggtgccaacttaactacaggcctcaaatctctaccagaagcagaagtgaaagcctccgaacaaacacgaacctgcttcattgctcagagcggtggcgacgagtgcgaggggaactttccgagagaactgcgcatcattttaattagagaagaaaaaaggtccaaaatggaccaaggtacaaagccctaa

SEQ ID NO: 8050 - DNA, 912 bp, Zea mays
  Peptide Sequence Number=SeqID_49829
atgaatcgtccagtgaagccatcaggccctggggctttatcagaggccagggaagtttcagtttggagctttgcaatgaaattcttctttctaaagcgggcctgctggtggaaaaaggaagtgttagcaatccccctcccgaaggcctttaccgaggcgctgcaacttaaggaaaaggcgctcaaccgcgcagttcatattagatctatgtgcaagggatatggaccacaaacaatcgaggagaaacagaagctttatacattattgaggagcctaaatgttaatggtggattagcatctgcatctatatccgagccctatacttcaacaggacagagctttgctggtggtgctcctgtagatggattttattcacctgaacttagaggtgaatttggggctggccttttggatcttcatgcaatggatgacagcgagcttctttctgagaatgctgcatcagaaccatttgagccttcgccttttatgccaaaagaaatggatgatgacgactacgatgtaatagcagaaaaccaacaaggtctagtagacaaccagagtgccttcaccaacgaaaaagaaaacactgtggtcagtgcaagagaaagtaatgtagcaaagattaaagtcgtggtaaggaaaagacctctgaacaaaaaggaggtatctcgaaaagaggaagacatcatagatgtacacaattctcaattcttaactgtccatgagcctaaactaaaggtggatttgacagcttatgtggaaaagcatgatttctgctttgacactgtcttgggcgagaatgtaactaatgatgaggtgtaccgtgagactgtggagcctattataccattaattttccaaaggacaaaagcgacatgctttgcatatggccaaacaggttatataagctaa

SEQ ID NO: 8051 - DNA, 459 bp, Zea mays
  Peptide Sequence Number=SeqID_49830
atgggtatgggtatgggggtaaatccatacccgccagtgtatatgggtgacccgatgagttttttttttgtcgtgggtatgggtatgagggatgaaaacgggacggatacaggcggatatagggtcatcccatatcctactctaatgtatttctctcggatacaggaccagctgcagttttgctttagacttgggcacatatcgttaatgggccacattgagccagcagagagcaccgtagcagaccaaaccgccaatgcgcaaggcaagatgcaccgccaggccagttacccgaacgtattttacccgtatccgacccaaggtatccgggtagttgccagtgtcaacataaatcttaatagtttgcactggtatgaaagcgaccagccatatgcaagaacagttcaaacctacgcggttgcacctcctggattgttcatttgccgtgctacaacataa

SEQ ID NO: 8052 - DNA, 216 bp, Zea mays
  Peptide Sequence Number=SeqID_49831
atggctatcttcttcaacatcccgatcaccttcaataccggggagatcttctgctttggatccctctcctgcattgcagatcagaaaggcatcctgcaccgcattgtggacccattcaggaagaaatcttctcaggtggcaccaaaggggttgcacttttgtgaagagcaggtggacccagaggaggactattatgatgagttcgacgaggtctag

SEQ ID NO: 8053 - DNA, 303 bp, Zea mays
  Peptide Sequence Number=SeqID_49832
atgggaggtgaacccagccggatctacacacccccggaagacatcccaggctccaagcaatctggagaaacccccccattcaccatccggggcaccagcgctagagtatcaaagtcttccccccatggcggatccgctgtcctccacccggcggcgcacaaagatcggagcacacaatgcctatgggtgtgcgatttatggaccgcgtcggtcaaaggatgcggcagccccgagtcttatagcgccagggtagcggccatctcggagagatcccaacaaccccgatcctggcggcgcgcatga

SEQ ID NO: 8054 - DNA, 261 bp, Zea mays
  Peptide Sequence Number=SeqID_49833
atgtaccgctctccttgtggctttgataggttgacacggtacaagaacttcaaggaaggacacaagaggattcttgtggctactgatttggttggtaggggaatcgacattgaacgtgtcaacattgtcgtaaactatgatatgcctgattccgctgatacatacctgcatagggtgcaggagaggtttgaggttgacataaaggagctgcctgagcagattgacacgtcgacatacactttgagaatgggtgacgattga

SEQ ID NO: 8055 - DNA, 366 bp, Zea mays
  Peptide Sequence Number=SeqID_49834
atggctctctttgtgaaaaggttcaacgagttaatgaagaagaagaaaggtcaaccaagaaaagatgcaagctcggatgatgatgatgatacttcatccaagctcaacgctggcttcgccatcaaggatgccccttcactcttctcatctccacattgcctcatggcaagtggtggcactaagggatggcaattgggcgggttggacacggatatatggtttgtgaacccatacccgcgagacaaagctcaacccatactcgtacccatatacgttcacgagtatggatctgtacccatacccatactcgtcgggtatccactacccagcggatacccgttacccgcccgcctactacagttttag

SEQ ID NO: 8056 - DNA, 741 bp, Zea mays
  Peptide Sequence Number=SeqID_49835
atgagtgcatccctcaagctattcttggaatggatgtcatctgtcaagcaaaatctggaatggcagattgatcctgttgctggccaagtagctgcacttgtgttgtgccacacaagagaattagcttaccagatttgccatgaatttgagaggtttagcaaatacctgcctgaattaagagtagctgttttctatggtggtgttcacataaaaaaccacaaggatctgctgaagaatgaatgcccccatattgtggttggcacgcctggaaggatactagctctagctagagataaggaccttcccttgaagaatgtgcggcatttcattcttgatgaatgtgacaagatgctcgaatcacttgacatgcgcagagatgtccaggagatcttcaaaatgactccgcatgataagcaagtgatgatgttttcagcaacactcagcaaggagattcgacctgtttgcaagaggttcatgcaagatcctatggaaatttatgttgatgatgaggctaaactgacccttcatggtctagttcagcactatatcaaattaagtgaggcagagaagaaccgaaagttgaacgatcttttagatgcactcgacttcaaccaagttgtgatatttgttaaaagtgttagtagagctgcagaactcaacaaattgctctgcgagtgcaatttcccctcaatctgtatacattctggaatgacacaggaagagaggtcagttatctactag

SEQ ID NO: 8057 - DNA, 679 bp, Zea mays
  Peptide Sequence Number=SeqID_49836
cttgattcgttttttggcagcacccgaagccaaggtagcagttgagattgaagaactccctcctatgggagtcgaagaggcaaaaattagagaggttatcgccttgatagcacaaagggttaagcctttacagccactttcagagagcgaggaagaagttgaaggggagcgaatagctcgagtaatgagttcattcttcgaagctgacgaagatgaagctaagaaagatattgctggtacaacactagcgttgaaggactctatgcttcctgctacagataggactggtccaagtaatctaggatttgaatggattactgtagtggtgaccccttcagcaattatggtagccgaaggttcctccaagcctaccctggcggaagacaaaggaaaaggttctgctaaatttgaagtggtcgagaaagcgatcaaagatgatacaccacttggtgaaggacccttcgaccaagacttaggtggccgaagataccaggttcatcacgttgtagggaaaatgatgggcacaaagcaactggccaaggctattggcttcgccgaacaacttgggcccgagcactttggagttttgcttggcttttctagtgcttcaaaaggcaaatctggtttgtgtgggggtaatggagaaaagatcgacttttggattattcttattccctga

SEQ ID NO: 8058 - DNA, 261 bp, Zea mays
  Peptide Sequence Number=SeqID_49837
atgtcattgacaccttcgtccaatgtgccagagacaagggctaaagaacttgctttagcagcgagagctatcgccacccgggtcgaggccggctctacgaatctatcgcaagacagtgacaccgttgatattgaggaaaacacgatcatacgtcccatgaagccaagccatgtggactttggcaagtccaagatcaaaggaggacacatagagtacttaattgtttctgttatgttgacaatgtcgagtgggtgcaattag

SEQ ID NO: 8059 - DNA, 564 bp, Zea mays
  Peptide Sequence Number=SeqID_49838
atggcggactaccgagtgctcgctatgcactgtcccctcacgcttgctccttacgttcattcccgcgcaaccgaaggtggaagaagacgtggttcgcggcgctgcagcgctgccggcgaggaccagctcgattccgctgccggagatcaagcgtggacggagtcggagatgtgggtgtcggcgtcgttgtccacgatggcttccagcacggcatcatcaatctccaggttgcggagcagccgatggacgctaaccgcacgcgcatctctgggacggggcgacgctggccgcgagcgcatctctggtacggggtggcactggccgcgggcgtttcttcggacgaggcagtggcgggctggcggccttgtgcgggagcggcaaggggcagtggcggccatgtgtgtgttcggcggcgagcatgtgcgagacgatgctgggttgtttgctcagaagaaacggggacgaaacccaacagcacggcccatttatggcccaatacatgattcagataatctagaggatgttgttggaaaggttgaagatatagagaacaaaatattttag

SEQ ID NO: 8060 - DNA, 129 bp, Zea mays
  Peptide Sequence Number=SeqID_49839
atggcctcccagcagctgtttctggctcaacagcaggatggcgactccgacattggtcgcgtcgtgtggctgtgctttgcaaaggagggcgtgacggtggccttcaccttcgtgaaggggcaggagtag

SEQ ID NO: 8061 - DNA, 270 bp, Zea mays
  Peptide Sequence Number=SeqID_49840
atggacaaatttctcatcaagaaccagaagaaagatgtttctaattataaaataattaggacaaatgagagtcgtgtagaacaaaagagaccatgtattgagctagatatgaatgatatagttgcagatcctggccttagaaaaccaattgatgagttcccccatgaaattagagatgatgctaaaagagtttatttacaaatgggcccatgtcaaccatttggtcatacatttccacgaacaccagcctccaagaaccaacaactttag

SEQ ID NO: 8062 - DNA, 1431 bp, Zea mays
  Peptide Sequence Number=SeqID_49841
atgcatgtggccacatgcatgtatgctttgaccgagcaacttaaggaaatgaaagagctgggagccccacttgcacaggcacaaccgcacaacctcggcgagaactattggtgccgcgaacccgccgatgatgatggcaccttgcccacgacgattgtgcacattcctttccactgtttcgcaagctgcggacattccaaagaagtttgccccgaccattggcatttttgtggatcaccaccacgggtacgtatgagtggcgacacggagcgccgtcgctccgccactgggcgtaagtcaactgtgtcgaggtacaaggtggtgaagttcgaccttagcaagacgattcagtccgagaagttcgaagataggcgtacctggggcatctttgttgaaggtcggaacgcggtttcggttttggtggccattaacaatgtatccacattcattcatggccgtaatttagattggcgatgtgtggatacatttgatgagcaatacatgaaagataaaatccgtagtttgatcacggataggcagcgactatcacagatacgcaaggaagtacaaagtatccctgaagatgacatgaaagcattttttgatgtgattagtaacattcgcaaattcacactcagtccacgtttgactggcccatcagcttttgaagtgaatcaaccatatatgctactttgtcatctttttacccctgtgtttcatggttgggttgtaagccctgaattgagcagctatgatgcaattaaagggttcactcgtgatgagttgatacagtattgcaacgcgctgatagccttagaaggtgagtcagacaatgtgagagttattcgagacttattgaatgattcagatcagctgctgacagcttatggctttgattgcctggttcaggagatgagagatgacaagtttggattatttttttggcgtagcagatatgatgtaattcataagcatgacggagatctttttttactggtttctgatgagagggttcgcagtgaaatgccccaggccacttggatgttatttgaacaatctccagaaagcagcatctacttcacatcagaatatctacctgttgaaaaccaatacagtattgacagagccagagaatggcaccagcaaaagcttcagcaaaagacttcgagctcgttagagacagtgaagaaagctaaaaagaaaaggaagaacaagaaatcagcaatggcgagcaaagaaatacctgaacaaggtggtccgaatgttgaagatgtggttgttgctgtcagtatcagtgctgagcttcgaaatgaaggtcaaccaacaacaacaagggagatggacaatcctaaacaaggtggtctgaatgttgaagatgtggttgctgctgttagtgtcagtgatgaaccaacaagggagatatttaactaa

SEQ ID NO: 8063 - DNA, 454 bp, Zea mays
  Peptide Sequence Number=SeqID_49842
atgacgtggggcgagcccctcgtgggcttgtttgctttgaaggtgaggctgttggcggaggcagggcggaggatcaaggttttggaagtcttgctgatgggttcctccagctctaaagtggacaatgaggagcccgtgaggcgctccaaggacaggaggcggctcatgaagcagctggtgcgccgccgcccagagcttgcagctgcgcacattgcatacctgcacgccctccgcaacacaggagccactctccggcaatttgtggagctggagtctgctttgtcacagcagcctccggtaggccttgcggcgccgccctcgcctactccacagtcgctgccgcagccgcagcccccgccacctcctgaaccctcactgccaccctcgccacaccccccgccgcctctgccttttagtccagtaaccaccataagaaagatggagaagagggatg

SEQ ID NO: 8064 - DNA, 717 bp, Zea mays
  Peptide Sequence Number=SeqID_49843
atgcccctcatgctgaaggcctcaatcgcatacgatcgacgcgatcacccgagcagtatcccgcatccgggaacttacccccgtgctgctgaaacaatcgtcggcccaaagcgtctctccaaagtcctcatggacggagggagcagactcaacgtcatgtacatagagacattcgacaccttggggatcgcactctccgcgttgcaccctagcaccgtgttgatctatgtcattacgcccgaccacagcgcctgctcgctcgagcaaatcgttctaccggttacattcgcaaacccctctaattttcgcaccgagcagctacagttcgaattgaactttctaggggcctacaacaccatattggggaggtcgggctacgtcaagttcatggtcattcccaactacacatacctcaagctaatgatgtctggaccccatggggtcattacggcgtccgcttcattccaagcggtctatgtgtgtgaaaaagctagctgtgagctcgcatcagcacaagccaccgcaagagagttggtggagttatggaggggcatcgactctagggatggttcggacgcacccaatgtcagttctgacattcaaatgcgtcgaggacacgaaggacgttcggatcgacaacgccgacacctccaagcatgtaagaatcggggtgacactctccacaaacaagaaggtgcccttatcgacttcctctag

SEQ ID NO: 8065 - DNA, 2118 bp, Zea mays
  Peptide Sequence Number=SeqID_49844
atgggctgggcttcaaggagaggcaagcattacgggccggcctcacggcggtggcacttgagcagcaactacagtcaaccttcaagagataaccttagcacgttaacggcggcggcgtggcgatcacaccaaactcacatacagatggagatggcagagaccttgcatgtattgcccgatgatggcaatggaagtgctgcagttcagactgagccttattgccatgaagacgccattgaggacatggaatctttcttggatgaagtaaacgacagggttcatgtttcaggaattgtgactggtgctatcatcaaggggatcctaagtgatgtgcggcaagaagctgctagccaaattgctctcaaggatgcagagatatcatcactgaaccagaagctgcagcagccagtaaatggcagcttgagtttatctgagggacgggataaaagacatgatgagttttatagtctccgccagcagcttgactccatttccaagtcactgttgaattctgaatgggggctatcgggatcacagcataactttgaagattcagaaaatgccagcaagcagcaggacaaagaaaattcctctagaaatggtgtagcaaagaccattcatcctggagactctaaagaagaagtttttggtgatccgaaactcttggatcacatggataaggttgctttgatagcccatttcaataaatcaatgaatgagatgaaaaggcagcatgattcagttctgtaccagaggacggaagagatattcaaactgaagcgtgaaatcctgaagaaggatggatcaaacccttttcatttacgaaataacaaagaacttgagcaaacaaggaagaaaattgaggaagtcatctcaaagttggatgtgctcctcctggagaataaaagagcctctgtccgtatcaagtcaaatgcaattcctggtcaacaagataagaacaatgtattaggttctgaaatcgagcaactagaaagcggtgcaagtaataatgaagactaccattgctctattccaactcactcatcacattttgcatccagagaggcagatcatgaactgaatattgtaaggcctcaatttgacgttgaagatgccagaattgcagccacctttagagaagaaatagaaaggattatcataaaagagttcattagtgaaataaacatagaattgcatggttatgagattgagggtggtatgaagcaggaagtttgctcaataattcacaatgaggctattgctagagcaatgtcaaacattgattctttgttgttgaagtacgaggagaaaaagggtcatgctgaagaggaatctctacataagcaaaagattgaaaaactgaaactaattgtggattccttcactgaagtattgagtgaaaaggagaaatttgtatcacagattggattggaagcgatgcagactcgcgtggagtcaatgtgttgtgaacttgatttgttaagggacaaagtggcaaagcaagattcctacctatctgaaaagaacagggaatttgatgccattatgtgcaggttggagcaagctcagcagcatgttcaacacaatgatgttaccttggttgagctgaatgatagacttagaaccatttcaaactctctaaaagacctagagaaacagaatcaagctctacattatgccatggaagaaaaagagaagatgctaacatctgctgtttccaaagacaatgatatgagagaattcatggaaaatcttgttaaatctatcaaagattttgaaattgtcatgatgaatcagcaggctgttgttgcaaataaagtcgatcatcatgaatcaaggttctgtttattaaaagaacaatgtaaacaccttgcaaaagaaggcaatcttttaagaaagaaggccttacgatacaaagagatatctgagacaagagactctaatcttcagaaagctgaacttgaggtggatttgcttggtgatgaggttgaggccttaacggatcttcttgcaaaaatctatactgcacttgatcactattctccagtactgcaacactacaccggcgttatggagaccttgagcatgattaagaagcacattagcatggcgaagtaa

SEQ ID NO: 8066 - DNA, 825 bp, Zea mays
  Peptide Sequence Number=SeqID_49845
atggcagcgccgcgccaccgccagggccacattgcgcagtgccttggcaggatcctcgcctgccgcggcagcgccaccgccgccgtcgctgccggcccaggcggccgacggctcaccggcgcggagttcgtcgacggcgtgcggagcctggccgctggcctcgccgaccgcgggcgtcgagtacgtgcagctgttcctcgcgtcacctacgccggagccatcatcgcccctctcaactaccgctggagcttcgaggaggcggcgcaggcggtggagctcgtgcggccgacggcgttcgccttcgacggcgcgttcagctcctgggcgcttcggctgatggagggcgacaggttcccatccatcggcctctacctcctcctgggcgatccttgcaggaccggccgcgctgctgcaggttgtgctgtacccattaccgacgtcacggggagcctcggcggagctacggcagcggcggcgatggagcccgtgtcggctccagacgacattgctctaatatgcttcacatccggaaccacggggcggcccaagggcgtagcgataagccacacgtccttgatcatccagtccctcgccaagatcgccattgtcggctacggcgaggacgatgtttacctgcacacagcgcctctgtgccacatcggaggggtctcgtcgtgcatggcagtcctgatggccggaggctgccacgtcctggcgccgaagttcgacgccaggtcggcgttcgccgccatccaggagcacggagtgacctgcttcatcaccgtccccgcgatcatggctgacctgctgtcctacgctcggtag

SEQ ID NO: 8067 - DNA, 2073 bp, Zea mays
  Peptide Sequence Number=SeqID_49846
atgccgagcggcgggaggcggctgccgccgtggacgtcgccgaggagcgcgggggcgccgatgtggagcactgccggtaccccgggcggaccgcgcccgggcccgggctacgggacgccgcccgtcagcgcgggttgcttcggcacgcgcgtcacgccgccgacgagcgggggcacgcgcgtcacgccaccgacgagcgggggcgcgggcgcgcgcgtcacgccgccgtcgaccgggggctgctcgtcgcggccgcccaggccgccgccttccatggattcgccctacgtgcgggccaagcaggcgcagatagttgaaaaggacccaaacaaggctgtaccattgttttgggcagctataaacagtggtgaccggatagagagcgcattgaaggatatggccaatgtactaaaacaagcaaaccggtctgaagaagccattgaggcaataagatcctttcgtgatcgatgtccctatgaagctcaggagtcacttgacaatattcttctagatctatacaagaaatgtggtaggacagatgagcagattgaaatgctgacattaaagctgcgaattgttgatgaggagctagcttctggtcggtggaaaacaaaactgtctaaatctcatggaagagtagtctacctttctctcagagatgaaaaagcaaggctattggggaaccttgcttgggcctatatgcagtccgaaaattatgaggaagcggagatgctctataggcaagctcttgctatagaagctgactacaacaaagagtgtaacttggccatctgtttgatgaagactggaaagttggctgaagctaaatatctgattcatgctataccttacaactgtaatgatgaaagtcatgttaagtctctctcccgggctactgaaatgcttagggaatttgacttgcaatccctcccctctcccataactcaggcgaagtccaaagaaccacggaattttgttgctgatgatgtggagatgcttgtagatctacagccacaaacactatcaactccttttagtgaactgaaatataaagaagcacatatttcagtttcacaaaatgcagagaagcatgagaactgcaattcatgccttccatctcccataactcaattgagacgggaagaaccacacactatggttactgctgatgccgaaaagaatgaaggctttgcagagttccaagatctttctcgactgttcaatgatgctgccacgcctcattcagtacttgagaaactacgaaagaggctagttaaagaggcaccaaaagtcagtattcatgatcaaattcagactcctccaactgaaagcttgccaaactctgaaagaaacctagatgctagtgagacttccgtgcaagaagggaagctattgaccaaaggtgttagaaaaacatggtctgacatggtggatgaagaggaacagcaattgggtgatgacaaaccatgggctgacatggtggcgaaggatgaccagcaattgggtgatggcaagtcaacacatggtgttggaattactgaacaaaacgagagcagtaagcatgcaagtaagctggagtatagaacaccatcgtcctctcaagaaagcaggacccatcaaagaccagtcatgggtggtcaactgcaaggttcttcagcaggttcatggagacgcagtgactccaaaatctacatggataagaacgtgaactgggatcttgtgaggactgctccgacatggagcaggcataaggtacatgaccacaacaatcgagtttggcaaaggcttcacacaattcatccccgtgagagagcctcaggcacgaagcaagtaccacggagaagcaacacatctcagcgcgctctttttcctgactggaaatcaaaaggtgaaggatatggccatggctatgttccgtttgatgataacgaacacactcagtgttccagtcacattgaggccgccactcatcgctggcataataatgaggcaagtacagggtcatggaggccacagaaccgtctgcgggtcttccaggaaatcacaaatgagatcaaccaaaatgttgtgtaa

SEQ ID NO: 8068 - DNA, 294 bp, Zea mays
  Peptide Sequence Number=SeqID_49847
atggctgggaggctaggtgaagctgtccacgcagcgtcgcgacgaaaagggtctccggcgagaaatccccgtggacacagcaaggtactcctcgatttccccctcctaccgcctctacgctgtcagttcgagttccgggtggccacgatggaggacgaaccccactgggggcggttatccgcggcggcggtggacagtctttgtgtggaacgcggcggcgcaggtgttggtgtggcgtgggggcaacgaagcaagggggctcgcgcggacgaggtcgtgtgccgatacttatag

SEQ ID NO: 8069 - DNA, 363 bp, Zea mays
  Peptide Sequence Number=SeqID_49848
atggcgccgggtcgcgcattcctccgcgccagatccgagagtccttccatggcagccgctcccccaccgcgccagatccgagagtacttccatccatggcgcgaaaccgtcgcgcccccaccgcgcctcccccagcattccatccatggcgctccctccgcgctcgcccccgctctctgttgtccgccgcccccacccccgttctcctctctcgcgcccccactctctgctgtccgctctctcgcatcctccacggagtcgtgggccagtggctccacggtgatggactgggtcagcctcgtggtggccgagatgcagcgcgacgatggcttctcgctgctgatctacgcctggaagagctaa

SEQ ID NO: 8070 - DNA, 858 bp, Zea mays
  Peptide Sequence Number=SeqID_49849
atggacagcgactacgttgccagcctgctcatgggcatgggctcatccgcccctgcgctcgacttcgccgcgctggacgccgggttcctcgaaacgctctgcggcggcggcggcggcctcttcggggtgtccggggtcgccgcgggggccgggtgtggcggcgtgtccccggaggggtcgtcggtgtccgacccggcgtgggcgcgcgccaggggcgatgacaatgtcaggaagcgcaaggcgccgcccacggggtccgccggcggcaaggaagcctgcccgggcaaggctgcggaggccaagggtccggacgggaagaggtgcagagtgggcggcagcgacagcccggtgaagccgaaggtagaggaggtggcggcgagcgacgcctcggttgaactcaaagcgcagaagaagggcaaggggaagaccgccaagccggcagtcgaaccgcccaaggactacgtccatgtccgggcgcggcgagggcaggcgactgacagccacagcctcgcagagagggttagaagagagaagatcagccagaggatgaagtttctgcaggacctagtgccaggatgcaacaaggtagttggcaaggcactcatgctcgatgagatcataaactacgtccagtctctgcagcagcaagtcgagttcctgtccatgaagctcgccactgtgaacccacagcttgacttcagcaacctgtcgacactcctacacaaagaccagagggacttctgggaggatggcctacagaacgccttgcctaccggtagtgagcaaagacaggaggaggatgggcttttagtacccaactttgatggtgttgtaataaaatgtaaaaagctgatctga

SEQ ID NO: 8071 - DNA, 384 bp, Zea mays
  Peptide Sequence Number=SeqID_49850
atggtgttcggcctcctcgcccacaatcgcggcgaaaggcagtccgccatgggcgtcgccgtcggctgtcaaattcaccggtccggtcatgatgccaaggctttcccgccttgctgctcctctcggaggcgcgtccacaggtcacggcggcggacggccgatcgcggggtctccttgacagcaacttctgcgcggaggcctgaggtctcctcggcgcccgcaacggagttagaaattatccctgcatggtcccgggctctcctccttgcatggtcccgccgcgtcctgtggctgtcgtcgaatgtggtctggggagactacgtggccacgctcgtcgtcgagcgatgtgcgggccgcaggcggccggccggcgaccaggcgtag

SEQ ID NO: 8072 - DNA, 873 bp, Zea mays
  Peptide Sequence Number=SeqID_49851
atggcctacgcgacgcagcatcggcgccgagccattcttgtcctggccgccatcgccctcctcctggtgtctcccattgcagccgcagccgccgtcgccgccgggtgcgagggcgacaagctccccgcgggccggatctacgcgcactgcgcggcgctcccgtccctcggcgccaggctgcactggacgtacgacgccaagacggggtcgctgtccgtggcgttcgtggccaagccggcgggcgcgggcggcgccgggtgggtgtcgtgggcgatcaacccggcgggcgagggcatgaagggcgcgcaggcgctgctggccctcaagagccccgccgccccctcgtcgtcctacgtagtcaacacctacaacgtgaccgggtacaccgcgctgggcgccgcgtccacgcccatcgcgtacagggccgcggagctcgccgccgacgagagcggcggcggggaggtgcgcatctacgggaagctgcagctggcacccggcctggagaaggtgagccacatctggcaggtgggatccacggtggccaacggcgcgccggtcaagcacgcgttcgacacggccaacctccaggccaagggcacgctcgtcctctccggcgccgcgctgcccgtggaggcggcgccggctcccgccccggtgggctctggtggtgcctcgccggcgaagggaggaggcgatagtggagccgccccgtctactggcgggaccagcaactcggcggctgctaaggccaccacctacgtgtgtgtttcagtgctcacgctgctggcggcggcattggcaggttccttggcgatcttactggatgaaatcaggtcaacgtttgacatttcatccatatgctacgcgatctag

SEQ ID NO: 8073 - DNA, 468 bp, Zea mays
  Peptide Sequence Number=SeqID_49852
atggcggtgccgctgctgacgcagaagatcgtgaagaagagggtcaagcagttcaagaggccccatcttgatcgctacaagtgccttaagctcgaaatgtcccttgcacaatactgtaccagtttagcaaaatgctcgttgcttctagccatgctgccaagctggcgcaggcccaagggtatcgactcccgcgtcaggcgtaagttcaagggatgcaccttgatgcccaacattggatatggctccgacaagaagaccaggcactaccttcccaacaagttcaaaaagtttgttgttcacaatgtctccgagctggagctgctgctgatgcacaacaggacttactgcgctgagatcgcccacaacgtgtccacccgcaagcgcaaggagattgtggagcgtgctgcgcaactggacatcgtggtcaccaacaagctcgccaggctccgcagccaagaggacgagtga

SEQ ID NO: 8074 - DNA, 639 bp, Zea mays
  Peptide Sequence Number=SeqID_49853
atggtgggacctgatgcaaaatctttcccactgtgccctttttgctataattgtcctccatttgaaggcatcgacaaactctttggtgctctcaagctcgatgacaccggcaaggttgggaaaggggccggcatgccatgcttcctttgtcctcacccgacatgcaagcaatctatgatcactcagggagtttgtgcttgtcctgagtgtagtggtaccctgattcttgatccagttagtgcacccaaatggcggctttactgcaacatgtgtaattgcattgtattgctcccacatgctgctcacaggatcaccactacagataagaagtgcctaacatgtgaatctactatcattgaagttgatttcaacaagaaaaccacccctcttcaagatggagctacattgcatgagggatgtatcttatgtgatgatctgttgcattcactcattgaaatgaagcatggatctgaaggaaccgctataatgaccaccacgtgcgtttcatttgagtttggattaggaagaacaaggcaagtgatgatgaagcatgagcatgtctgcttcttcgtgactgctgccaagactgccccggctttggaacacaggaatttcacaggaattagttcaaaaacatag

SEQ ID NO: 8075 - DNA, 660 bp, Zea mays
  Peptide Sequence Number=SeqID_49854
atgcctcacaaagcccgcatccgcacgtgctgttgtatcctcggcttctgctccgcgctccatgatcccatcatcatccatcccacctccgtgcccgctattgagcggggcctccaccgctttgagcggcacctagagaatgcaccccacggcatgggcatcgacaccccaccacccaagtctaggtgcgatggaaggtacacctgggagggccttggcgtcatcgtcgagggccagctcaacccagcgccgcccaccatcgaccccaactatgaggtggtgaaggagggaggggcaatagacgacgaggtggccagggaggttgttgtcgaggaggtgaagatcgctaaggtcgctgagagcaaggacgatgtcgcaaggggaccctgcctcctctcgcaacccgcagtcctctcaactatggaccgtccgcaggtggcggcatggtgcagggaacaacatgcctctatcatgaagatcgtcttaatctgcgtatttgatcttcctttcttctctgtcctcgaggggaaattgcgaggatacaacaatgtaaatgatgcgtatttgctcctcaggatgaaccatgagttgccagagtatgtgtcacactcggttattgaaaaggatcccaaggccactcttaaccgtgagcacgactga

SEQ ID NO: 8076 - DNA, 489 bp, Zea mays
  Peptide Sequence Number=SeqID_49855
atgccacacgcgcgcgcgcacaccgccgccgtcgtcggccgggccgggctcgggccgggcatggcgaggcgtggcgtggcgaggcagggtatggatctcaccgacgttggtgtcatggtggagccggttcacggtgtgaggcagatctgcagaggaggcaagaggaaggacgacccgtacttatacgcatgggacaggctcggggctggcaaggtccgtgacgatgaaggcaggttatgcgagtttctcgcgctgcatgccgagtctattgtggatgaaaggggttctgacgaggtggacccaccggttagtgagaataaaggtgtgcgcacgatagggatgcaagcggctaaaatcggggcccagatggcagtggtagcgtgtgggaatgctggtgtgcgggacccacgggcagcgacacagcggagagcaggcgcgcgtgcgggctgcgacagcagaggagaaactaggccacgcgaacgggagtga

SEQ ID NO: 8077 - DNA, 699 bp, Zea mays
  Peptide Sequence Number=SeqID_49856
atggctggaaggggctcactagctgggctcttgccctttggtgatgcaaatgacattgtacttcagatggccaacgaagtgttgcctgtggttaaaggagttcctgttcttgctggggtatgcgctacagatccatttcgtcgaatggaatactttctgagacaactagaaaccattggaatttgcggtgtgcaaaacttcccaaccgtaggtctgtttgatgggaattttagacagaatttggaggaaactggaatgagcatggaagtggagatgatttcaatggctcatcgcatgggtttccttactactccatatgctttcaatccggatgaagttgctgccatggccaaggcaggatctcatatcgtagttgcacatatgggtctgacaactgcagggtctttcggggcaatgacagctaccactttagatgatagtgttttacgtgttcaggccattgcggatgcggcatttggggttaatcctgatatcattgttttatgtcacgaaggtaacttggtgaaaattgtaattccacgatctaaccccaacgatgctcatgttgccggtgttggaaagttcctcatgtttcctagagagttgcaactctcaggggagtcagtcaagctaatgaagcttggggaagcagttgcaaagggaactattaataacgagacacttggttacttcacctga

SEQ ID NO: 8078 - DNA, 231 bp, Zea mays
  Peptide Sequence Number=SeqID_49857
atgggtggcctcgtcggagcagatgtagcaccgccggtggttgaggtcagggctggcatgcaacggcgcgacatggacgagctgaggttgggaagagcgtgggacaggcggctgtggcgcgcggccatggcgggcggatgcaacaggcggccagcagccgagctcgtcggccagggaccgcgccggggccatggcggggcggctgcgatggacaggctcgctggtggctag

SEQ ID NO: 8079 - DNA, 2044 bp, Zea mays
  Peptide Sequence Number=SeqID_49858
ggtctaccttcaccgcctcctcaagaagacttcgtatgagctgctaaccggtaacaaacccaatgtatcttactttcgtgtatttgggagcaagtgctacattctagtgaagaaaggtagaaattctaaatttgctcccaaagctgtagaagggtttttgttaggttatgactcaaatacaaaggcgtatagagtcttcaacaaatcatcgggtttggttgaagtctctagcgacgttgtatttgatgagactaatggctctccaagagagcaagttgttgatcttgatgatgtagatgaagaagatgttccaacagccgctatgcgcaccatggcgattggtgatgtgcgaccacaggaacacttggagcaagatcaaccttcttcctcaaccatggtgcatcccccaacccaagatgacgaacaggtacctcaagtggaggcgtgtgatcaagggggagcacaagatgatcatgtgatggaggaagaagcgcaaccggcacctccaacccaagttcgagcgatgattcaaagggatcatcccgtcgaccaaattctgggtgacattagcaagggagtaactactcgatctcgattagttaatttttgtgagcattactcctttgtctcttctattgagcctttcagggtagaggaggccttgctagatccgaactgggtgttggccatgcaggaggagctcaacaacttcaagaggaatgaagtttggacactggtgcctcgtccgaagcaaaatgttgtgggaaccaagtgggtgttccgcaacaaacaagacgagcacggggtggtgacgagaaacaaggctcgacttgtggcaaaaggttatgcccaagtcgcaggtttggatttcgaggagacttttgctcctgtggctaggctagaatcaattcgtatcttgctagcatatgccgctcatcattctttcaggttgtaccaaatggatgtgaagagcgctttcctcaacgggcaaatcaaggaggaggtgtacgtggagcaaccccctggcttcgaggatgaacggtaccccgaccatgtgtgtaagctctctaaggcgctctatggacttaaacaagccccaagagcatggtatgaatgccttagagactttctaattgttaatgctttcaaggttgggaaagccgatccaactctttttacaaagacatgtgatggtgatttgtttgtgtgccaaatttatgtcgatgacataatatttggttctactaaccaaaagtcttgtgaagagtttagcagggtgatgacgcagaagttcgagatgtcgatgatgggcgagttgaactacttccttgggttccaagtgaagcaactcaaggacggcaccttcatctcccaaacgaagtacacgcaagatctgctaaagcggtttgggatgaaggacgccaagcccgcaaagactccgatgggaaccgacggacacaccgacctcaacaaaggaggagtgtcacttagtggcagtgaagcgaatcttagatatttagttgctacgccttgctttgggctctggtatccaaaggggtctacctttgacttggttggatactcagattccgactatgctggatgtaaggtcgataggaagagtacatcggggacgtgccaattcctaggaaggtccctggtgtcttggaactctaagaaacaaacctccgttgccctatccaccgctgaggccgagtatgttgccgcaggacagtgttgcgcacaactactttggatgaggcaaaccctcagggactttggctacaatctgagcaaagtcccactcctatgtgataatgagagtgctatccgcatggcggaaaatcctgttgagcacagccgcacaaaacacatagacatccggcatcactttttgagagaccaccagcaaaagggggatatcgaagtgtttcatgttttggtgcttgatgccaaagggccaaagttgatcccgttttggtgcttgatgccaaagggggagaaaataaaggccaaagcaataaatggatcagctaccacttga

SEQ ID NO: 8080 - DNA, 363 bp, Zea mays
  Peptide Sequence Number=SeqID_49859
atgagcgcgtacagcagggctgcgcagtcgcgacttcgccgtggcatatgcaggggcacaagacgcgaccaaagggaaactcgaccgggtgagctcgaacgggctagacgctcagcaagcacgacggcgcggagcgggcatgagctgggttgctcgccggcggcgctgtggctcgacgatggaacggaaggagatgacgcgaatgataaactgagaagaaaaagggaagagaagaggctcaccaggatgggtatctcgctgaagaccgggaggggcgggttctggtgcagtgcggtcgtcgacatgagcggggcgacgaaggcgatgtgctgcgtgggccgtgggagagaagagcggggctag

SEQ ID NO: 8081 - DNA, 363 bp, Zea mays
  Peptide Sequence Number=SeqID_49860
atgagcgcgtacagcagggctgcgcagtcgcgacttcgccgtggcatacgcaggggcacaagacgcgaccaaagggaaactcgaccgggcgagctcgaacgggctagacgctcagcaagcacgacagcgcggagcgggcatgagctgggttgctcgccggcggcgctgtggctcgacgatggaacggaaggagatgacgcgaatgataaactgagaagaaaaagggaagagaagaggctcacctggatgggtatctcgctgaagaccgggaggggcgggttctggtgcagtgcggtcgtcgacatgagcggcgcgacgaaggcgatgtgctgcgtgggctgtgggagagaagagcggggctag

SEQ ID NO: 8082 - DNA, 237 bp, Zea mays
  Peptide Sequence Number=SeqID_49861
atggcagggagccaggccagctcgcagccgttccagtctgccatgcggatgcgggtagctgttccggggggctgcgactgcgaggcccacggcgatgcctggtcgccgcttaccggtgacgtcgtggaccatgtgggccgttcaggacggagctgtggaattaaatgggcggcgggtcttcgtcatttctctctcatcctagagatgggagtcctctttggtttcaacagattttga

SEQ ID NO: 8083 - DNA, 378 bp, Zea mays
  Peptide Sequence Number=SeqID_49862
atgccgggggacgtcgcgacctcgccggcgccggcgccgccgtccgtgtcctcgtcgtcgcagaaccaccaccatcacggccccacgaccgcccgcggcctcctctgccacgctgtcgccggcgcctccgctggcgtggtggcggcgaccttcgtgtgcccgctcgatgtcatcaagaccaggttccagttgttactaccaaatttgttgaagtatcaaacaatgcgcacaactgaaatgcttcaaggcagtgtaattattgggagtttacagcagattgctcaacgggaaggttttcggggcatgtaccgtggcctctccccaactgttctagcgctcttgcctaactgggcgatggaagtcatcaactttctttag

SEQ ID NO: 8084 - DNA, 306 bp, Zea mays
  Peptide Sequence Number=SeqID_49863
atgggaggagggcacgaggagcaggagggtggcggcgcaaaggccgggggctactcctccggtctcccgccgtcggagccgccgcaggagtacgggtacggcacgttccagggccctcggcatcctcccgtcgggttcccgcagcctgccccgcctcccgggttcggcggcggcggcggctaccacaaccagcaacagccgtacgcgcacgcggagacgtactacgcccaggggtaccaggccgtgccaggcttaggcagcggcacggcaggagatgggagggcgtcgcgggtgggggcgccgtga

SEQ ID NO: 8085 - DNA, 1740 bp, Zea mays
  Peptide Sequence Number=SeqID_49864
atggagtccttcagcgacgccgacagatacataccccaagagatcatcggcagaggcagctacggggtcgtttgctcagctattgaccggcgcaccggcgagaaggtcgcgatcaagaaaataggaggcgtcttcgatgacctgtccgacgccgccaggaccctccgggagatcaagctgctccggctgttacgacaccctgacattgtcgagatcaagcatgtcatgttgcctccggctaggagggactacaaagacatttatgtcgtgtttgaattgatggaggccgaccttcaccaggttatcaaggctaaccctgacctgacgacagagcaccaccagtactttctctatcagatgctgcgtgcgttgaagtatatgcatgctgctaatgtttatcattgggatttaaagccaaaaaatatattattaaatgctgactgcaaactcaaaatatgtgactttgggctagcaagggtcgcgtttgatgactctccaaccacagttttctgcacggactacattgctactagatggtacagggctcctgagctatgtggatctttcttcagcaagtattcaccggctattgatatgtggagcattggctgcatttttgcagagattttgactggggagcccttattccctggtaaaaatgtgtttcaccagttcactttgatgactaatctcctgggcacaccatcaacagatactatttcacagattcaaaatgagaaagcaaggaagtttctgagctgcatgaggaaacaaccaatacccttttcagagaagttccctggtgcagatccttcggctctcaagctcttacaaaggcttctagcatttgatcctaaggaccgaccaacggctgaagaggcgttggccgatccctattttgaaggcattggggaagtggagagggaaccatcctgtcagccaattccgaaaatggaatttgagtttgaagaaaagtttaccgaagaggacgtcaaggaacttatattcctggagatactgcagtaccatcctcaacttctgaaggattacaagaatagctctgaaaaaacgagctttctatatcccagtgctgttgacaagtttcataggcaattcactagcctagaggaaaatagagggagtaatgtcatgcttgtcaggaagaatgcttctcttccaaggacaacaaccgttcactccactccaattcctgcaaaggaaggtccaacagcaacctcccaggctgctcaaaggattccagcagccagaccaggaagagtggtaggcccagtactaccattcgagagcgcaagcgtcactgatcaacacatcgcgcgacaggtggcaaggaacccagccgttcctccagcaaccaacacctcgtcagcctactgctaccacctgaaaccggacagcgccgacaggcaggagcaacagctagagcttgaggaagaccatatgcagtataggacagggcagcatcccatggatgccaaggggcttgcccaaagcgacctaacagacagggccaacctccataggagcccgctgcacggcgttgctcccttcaaaggcgtcgcagcggtcgctggtgttcttcaccgaaagagcgaaggatgcccgatgactggtatgttggatgagctgcagcagatctgcaacgggatggtgaaactggttcagttaacgctaggcctcgagctcatgtttctgaactcgaaggaatttttggaagcttaa

SEQ ID NO: 8086 - DNA, 537 bp, Zea mays
  Peptide Sequence Number=SeqID_49865
atgtctaaaaaccagctacttgaacaagaagtcaaggagctgactgataaatgttcagagcatcaagaacaagcacatttagttcagcaaagaagtctggagctggaagatctgcttcacacatcaaagactcatgctgaaggtgcatactctcggacacaggaactggagcaggagctgaacagcacatatgaaaagctcaagggggttgaagaagaacgtgagcagtacagaagcaaggcttcgcagctctctaatgatctagaagcttatcagacaaaagcagctagtcttgaagctgtggtggaagcagcaaaatacgaagctaaacttgaagagagcttgaaggaaaagcaatctcttgaagagaacttgaaggaaaagcgatctcttgaagagagtctgcaacaagagctggtgaaattaagagaagaaaacgaacaccatcaaaacaacattgttgatctgaaccttcaactctccactaataatgacatgcacagtcaactggagacccagctaaaggagatcaattaa

SEQ ID NO: 8087 - DNA, 1782 bp, Zea mays
  Peptide Sequence Number=SeqID_49866
atgcctggcataccgagggatgtcgccgagcactcgctggatatccgagctggagcccgacccgtgaagcagcctctgcgccgattcaacgaagaaaagcacagagccatagtcgaggagatccacaagctgatggtcgtagggttcatcaaagaggtattccatcccgaatggcttgccaaccctgtgcttgtgagaaagaaaggagggaaatggcggatgtgtgtagactacactggtctaaacaaagcatgtccgaaggttccctaccctctgcctcgcatcgatcaaatcgtggattccactgctgggtgcgaaaccctgtcattcctcgatgcctactcagggtatcaccaaatcaggatgaaagagtccgaccaactcgcaacctctttcatcacaccttttggcatgtactgctacattactatgccatttggtttgaggaatgcgggtgcgacgtaccaaaggtgcatgaaccacgtgttcggagagcacattggtcgaacggtcgaggcttacgtcgatgacatcgtagtcaagacgaggaaagcctccgacctcctctccgaccctgaaacgacattccggtgtctcaaggcgaaaggcgtaaaactcaatcccgagaagtgcgtcttcggagtcccccgaggcatgctcttggggttcatcgtcttcgagcggggcatcgaggccaacccggagaaaatcgcggccatcaccaacatgggtcccatcaaggacttgaaaggcgtacagagggtcatgggatgccttgcggctctgagccgcttcatctcgcgcctcggcgaaagaggcctacctctgtaccgcctcttgaggaagaccgagcgcttcacttggacccccgaggccgaggaagccctcggaaacctaaaagcgctccttaccagcgcgcccatcttggtgccccccgctgccggagaagccctcttgatctacgtcgccgctaccactcaggtggtcagcgccgcgatcgtggttgagagacgagatgaagggcatgcattgcccgtccagaggccggtctacttcatcagtgaggtactgtccgagaccaagatccgctacccacaaattcagaagctgctgtacgcggtgattctgacgcggcggaagttgcgacactacttcgagtctcatccggtgactgtggtgtcatccttccccctgggggagatcatccagtgtcgagaggcctcgggtaggattgcaaagtgggcggtggaaatcatggtcgagacaatctcgttcgcccctcggaaggccatcaagtcccaagtcttggcgaactttgtggctgaatgggtcgacacccagctcccggcagctccgatccaaccggaactctggaccatgtttttcgacgggtcgctgatgaaaacaggggcaggcgcgggcctgctcttcatctcgcccctcgggaagcacctccgctacgtgttgcgcctccatttcccggcgtccaacaatgtggctgagtacgaggctctggtcaatgggttgcgcatcgccattgagctaggggtccgacgcctcgacgctcgcggtgactcacagcttgtcatcgaccaagtcatgaagaactcccactgtcgcgacccgaagatggaagcctactgcgacgaggttcggcgcctggaggacaagttctacgggctcgaggtcaaccacatcgcccggcggtacaacgagactgcggacgagtccggtgcccccagaccagaggtgccttcggtggtccctttgctcctttgttga

SEQ ID NO: 8088 - DNA, 618 bp, Zea mays
  Peptide Sequence Number=SeqID_49867
atggtcgcccacaggttccatcagtaccaggtggtgggtcgcgcgctgccgaccccaaccgatgagcaccccaagatctaccgcatgaagctctgggccaccaacgaggttcgcgccaagtccaagttctggtacttcctgagaaagctcaagaaggtgaagaagagcaatggccagatgcttgccatcaacgagattttgtctcaggctctgtaccgggctctaagtttgtcagtcatgtgtgtattaggtttgctctttggttattttagcaatatctttgagcgcaacccgaccaccatcaagaactatggcatctggctgcgctaccagagcaggactggttaccacaacatgtacaaggagtaccgcgacaccaccctgaacggcgcagtggagcagatgtacaacgagatggcctcccgccaccgcgtgaggtccccctgcatacagatcatcaagacagcgacggtccacttcaagctgtgcaagagggacaacaccaagcagttccacaactccgagatcaagttcccgcttgtgtaccgcaaggtcaggccgcctaccaggaagctccggaccactttcaaggcttccaggcccaaccttttcatgtga

SEQ ID NO: 8089 - DNA, 462 bp, Zea mays
  Peptide Sequence Number=SeqID_49868
atggcgtctcatgatcatcaccactcccactcccacgacgaccaccaccaccattcccacggggacggcggtggccatgcggctgggggatcgtgggtaggggaggacggacgcgtgtggcactcccacgacggcctcgcgccccactcccacgagcccatctactcccccggcgacttcaccaagcgcgcgccgccgctcgcctcgcgcgacttcgctgaccgcgccttcaccgtcggcattggcggccccgtaggcaccgggaaaactgccctcatgctagcattgtgcagatttctacgcgacaagtatagtcttgcagctaatctacgccggagagacaaccctgcaggttgccggcgagctcctacctcccaggtgaaacatggagtgggcgtggaggggatcgtgaaccatattctgcaggcgtgggagatcgcgactggtaataagcggcgataa

SEQ ID NO: 8090 - DNA, 315 bp, Zea mays
  Peptide Sequence Number=SeqID_49869
atggacgcccagcccggacgctggccagcctggggcgccccacagcccatccagccccgcctcagccgcgcgctcctgggcgacatcgcccaaggaaaggaacgatctagctcccagccgaccaggtcagctgccaaacctcgggaagggttcaactcccttaggctgggtctcagcacacacccacattacttctatttattaatgttattggaaaaatctgaattaaatgcccattctagtcatcctagctcctctggagaaggccgggccctccatggcccagtcctgggaaaacttaaagtagggatctaa

SEQ ID NO: 8091 - DNA, 324 bp, Zea mays
  Peptide Sequence Number=SeqID_49870
atgcacataggcggttggaggcggattgtgcggcggaacaatggcacggacgccgcgggcgcgaggccggtgtcgggggtcaggctcagggtcggtggggacggtggggacggggtcgtggcgtcgagtcttgtcggcgtggatggcacggggtcggtggtgacgacgccgctcgcaacagctgggcgtggatgccgcgggcgcgaggccggtgttgaggtcgggcttggggttgacggggacggcgggatcggggtcgtggcgttgggccttgtcggcggggacggcgccgacgcaagacgactgttgaaattgatgctttaa

SEQ ID NO: 8092 - DNA, 420 bp, Zea mays
  Peptide Sequence Number=SeqID_49871
atggatactcataggccacctcactttgacagcattaacttcccctattatgatgctagaattattggttacctagaagctattgatctaggtgtttggagagtcacccgcgacaagatgaaaccacctaagaatcccgataagctcactgcgaatatgtattctcgtttaaatcttgttgttaatgagctcaattctgttggcattaacaaactaagtgatgcgattattatgggacaagaagaacctacttcatcaaggccatatgctttcacatgtgaataccataaaaatatgaaagacaagaagatggttgaaagctcaagttcctcaagggaagaagagaaatatgaagaagaagaagatgatgaatatgatcaaccctctacatcatccttcgaggatggagaaataatttga

SEQ ID NO: 8093 - DNA, 240 bp, Zea mays
  Peptide Sequence Number=SeqID_49872
atggcggcgtcgggcatcccacagttgcgagcacgccgacgaacggcggctcagcccttcggcatgccaccccgaacgctatgttgtgcaaaagttagcagagattgcagcgaacacaatgggggcagtcttaccggtgcttgtgccgcgcaatccccaggccgcgaccacgcgcggcagcgcagcggtgatttaactccggcgaggaagttcattgggtttgagctagctaccgtgtga

SEQ ID NO: 8094 - DNA, 1638 bp, Zea mays
  Peptide Sequence Number=SeqID_49873
atgacggaaaatatgtcacatataatacttgagaagaaaccactttcttacgtggcacaaagtcaaatttatgctccaagaaatagtgatgcagccaacccagtgataataaatcgtgaactaaaaattggagaactggataatagtactcgtggatggagatctcagccaaccatttctggaatttgtttttatccatatgcgccctcgaaacaacctgagcaagcattcactttggggaacagaatgatatcgcacggtttaggatgggagaattatgatattgagcatattcctattccttctggttatgcggaatggggtacaataattcttgcaaaacattcttttaatttaagaggagatggagaagtggatggggaattttatgaggagtatgtcccttcacatcatgagcgtgaaccatccatgttattatatcccaagtgcttatcacaacttttggaggatttcagttgtctccctaatgagactcgtattggcagctgcacaatatattggataaattggtatagaaaattttcagagccttttatctcggtattgacgaacttgcgctgtggttgtgcacgtggtcgtgtacattataatgatagaaaaagactagcagaaggcaagattattcctcgtcgtctttctccatctgattttgtggtgatacgagaagtgcgtgaggagcagcatactaagtatattgcatttatcaaggctagagaggaggtgcactctgagataaatcttatggaggattcttctttgcaacacgtatctaccgataatacatcacagaaagactccatggatgatcaggtttacatgcaacctgaagacaatagaaagcggagactatctgaagacactcttttatgtgacagtgaagaatctttaaccaaaagaaaactcgatttttctcagcctattggtggtgacaacagcacagctacacttattccttacccaactattaccggaaacgaggattttgttccatcgtcttcggacgttgcacaagtaggagatggtgatgatgatgtgaccaatttttgcttgacaagacgagagccaccaacttgtgacgttgcacaagtaggagatggtgatgatgatgtgaccaatttttgtttgataagacgagagccaccaacttcaccttttattgattcttgtgtcgacacaatagagttagctgaggattattcaagcttcccctgcgccctaccctctgctgttaactttagtgacattgattcttttcttaatggttgcgatcaattgttcgaaaaccaacctttggatataatttctcctgttaagatacaccctagcatggacaccgttgcaacactagaagatcttttcctcaagacaaccaggcaagcattggcaaatgttcttgatgggctaaatgcccatactttgagagatcctattcgttgcgccagtctgtgcctcgcttcgtcttgtcttacaggacaatttgctagcattgcaagaattaaagctatgctggacaaattaattaccatttccgaacagctgcagaggacgtattctaactttgaagtggcaagaaaacaagacgaacaaagctgtaacaccctgaatttaggggtataa

SEQ ID NO: 8095 - DNA, 570 bp, Zea mays
  Peptide Sequence Number=SeqID_49874
atggcggagaatggtgaatgcaatgggatagctcataccaccaattatgccgcggagatacctgtccacggtagagggcggtcgacggtgttgccccctgctccgacgagcaattcaatgctccagagacgaagacaagccaaggagacccttgcgccggcaccaagggatcacgtagatggatcccgcacaccaaacggggaacaagtcgacggcgagcgaccctgggcgcgcggcgggtgggagttctaccctggcggcggtgcttttgcgttctgggggacgaaaaagcggtcaggggttccaggcgatggggcggggtctttactacatgtagaagcgcgacagttacgcggaccccgagatcaccggagtgccccccacgcgaggtgggcgcggtctgcgcggcgaagatctcgcgagcaccgttgcgaggaagagaaggctgacaagtgggatccacccgccagtgacgtggagcgacgcgagcgcgaggggatgcggggaggcgagactgaccgatgggccccggttgacagtcggtcccgcaggtgggcgctgctggcttag

SEQ ID NO: 8096 - DNA, 1833 bp, Zea mays
  Peptide Sequence Number=SeqID_49875
atgtctccgaccaccaccccgccgcccgcgcccgtggcagccccgacctccaagggcgccaagcgcagcctcatgtcctcgctcatggacgccactgcgctgctccgctcctcctctttcaaggaggactcgtacgtcgcggccgcgctcccggcgtccgagctccgcgcgctcgccgacctcaaggcgctgctcgccacccacccggaccccatctccatctggggcgtcccgctgaaccctcgctcccctcccgccgcggcggacgacgccgccccggtcgacgagcgcgccgacgtggtgctcctcaagttcctccgcgcgcgggacttccgcgtccgcgacgcccacgccatggtgctccgctgcgccgcctggcgcgccgagttcggcgccgacgccgtgctggacgaggagctgggcttcaaggacctggagggcatcgtcgcctacatgcacggctgggaccgcgacggccaccccgtctgctacaacgcctacggcgtcttcaaagacagggacatgtacgagcgcgtcttcggcgacggcgaccgcctcgcgcgcttcctccgctggcgcgtccaggtcatggagcgtggcgtgcgcgcgctcaccctgaggcccgggggcgtcaacgccatcatacaggtcaccgacctcaaggacatgccaaagcgggagctcagagccgccagcaaccagatcctctccctcttccaggacaactacccggagatggtagcgcggaaggtgttcattaacgtgccgtggtacttctccgtgctcttctccatgatctcgcccttcctcacggagcgcaccaagagcaagttcgtcatcgcgcgcgagggcaacgtcgccgagacactctacaagttcatccggccggagctggtgcctgtgcagtacggcgggctgagccgcaccggtgacctcgagaacggaccaccgaagccggcgtccgagttcaccatcaagggtggcgagaaggtcttcctggagatcgacggtatcgaggccggtgcaacgataacgtgggatctggtcgtcgggggctgggacctcgagtacggagccgagtacgtgccggcggccgaggacagctacacgctctgcgtggagaagacgaggatggtctcggccaccgccgaggagcccgtgcacaatgccttcacggctagggaagccggcaagatggtgctgtccatagacaattctggttcccggaagcgcaaggttgccgcctacaggtacttcgtgcgcaagtcgtcggcaggccaacttaacgacgcattggaggcgaggccctcgcgccgcgccggcggcgccaatcctagccgtcgccacttcctctcccacctctctaccttgccgccgtcggagctagccggcgggatgcgctcgcggtggggcgattcggtcggctccaggctgcgtcttccagcgtccgtgttgctcgagtgttgttggctggcgaaggccctgggcgagatggtcgtgctggggctttggtccagccgtggtagtggcaccagccaggcgcggcctcctcgccccccggagagtactccccggcggcgagtggcaggtgaccccagattcggctgggcccaggccggatccggtgcccacgagacaggggcgcgcgcctgtgtgtgtggggggggacaacgtctagcgtcgggcggcggctgcggctggcacgacgcggctatggctggcgtggtgacgacggcgacgggctatgtcatcggcggtcgtggctgggcgccaccgcctctggccgttctgggttgtgacgacctggagagtgggggcgtgctgcgtgcgagt

SEQ ID NO: 8097 - DNA, 345 bp, Zea mays
  Peptide Sequence Number=SeqID_49876
atgtccggtgcaccaccggacagtgtccggtgcaccagaggactacaactcgaactcgccaccttcgggaatttcgcaggccgcggcgctataattcaccggactgtccggtgctccaaggaagcgcggtctccggaactcgccagcctcgggaacgcgcagcagccgctccgctataattcaccggacatgtccgtgatgctagatgctttgatagactccaatccatctagcccactggccatcgttttcctcttggggcgcctccgctataccatctcctgccgaatcaccgcccgacccagccgaacagcacagaactactatgaactcaactctttcgag

SEQ ID NO: 8098 - DNA, 111 bp, Zea mays
  Peptide Sequence Number=SeqID_49877
atggccgagtccgaggtttcgatattcccatcactggatagttgttctggccgccttgaccgcggttccctagtgtctgttctcgtcggcatcaagggcatcatgttgtaa

SEQ ID NO: 8099 - DNA, 1026 bp, Zea mays
  Peptide Sequence Number=SeqID_49878
atggcgtgcggcgtcgtggcggccgatttcgggagcgagtgcggtaggattgcgcgagggggagcacggacgcgatggatgattcctatggaaggttgtcgaaggaagggcaatggtatctatgctgaaattccagcaaacttagctgaacaaacaacaccagacattgaagagggaagacttcataatatcagcagattcagagtctgcgcagcaaaaaatgcgttcaaagtattcgatggtgacaagatgatccaattcacgtttcataccatcgtaaaacgtgtcatagaccctccaacagtgtttccaaaatacgtctaccgactaacaccgtttgatcagattgaatctaatattcagaccaaaccaaactttcaaggtgtttacttaagtggtggctctgcctgtagatggtacttcaatcctacaattctagaagcagaaccttatcataccagtcagcagacaagaacaattgcattacaacttccccatgctttaaatcatcctccaacaattgaacacaaacaagcagttgaatcaaagagtctttatgaccttattagaattaatccatacgatttcctgaaataccggtcgaaaacaaatggtggtattcagcttgcacaaaatgctttaaagcgtcaactccacaaaatacagtttatcattgcaatgactataactgggacaaatacacattcagtgcaagctcaaaatcttgagcaacaaggaccatcaacacctccgaacacatcaaaactaaagctgtttaaagattctccatctaaattatccatgacaacttcaacagttgttgctaagaagcttctatatccaacaaatgacggcacaacaaaaccaccaaccaacattgatattactgatgcagaaaacgacgatatcgacgaaggaaacatagaggttcaaacatggacgtctacgcatcaaagaaaagccgaacaccagatcttccaagaactgaagattttctcagattatcagcagcgttttaggttgtag

SEQ ID NO: 8100 - DNA, 1668 bp, Zea mays
  Peptide Sequence Number=SeqID_49879
atgtgcaggactgcaggagtcaggacaacaattatggataccgtgatctacaaacatgatgacatttcccaagaaggaaccctgccatttggagagacaatgaacatgggaggaagcaatgtagaaattctcacaagaatagagctcgatattgcatttgcctccgagaaattattaaatttggagatgctggtgatggaaattgctcgtcaggctactgactttgagccttctacgcttgaagatgagtccatttcttctgagatcgcagagaatgctttggaattggacatcttgtatggtattcttgatgcagaagtcaaggagctacataacttgattagttctctccaagctgatattaaaagtatagagcatgaggtttatgaagaagagtctggaggcaaggtaaaaactagaatggatgcagctaaattgtccttgaagcagatgcaagagctaattgctgatattcagaatgaatctgcaaagtttgagaaagtcgttgagttttcccaggataaggaagggaccattgaagctgttggatgtgataatgaccatctgtcatatcaaactggtgcgcagacagaagatcaacacagaaatgttttacatatgttagaacaatccatagcaagtgagatagatcttgaaaagaaactctctgattccatatctgtcatagaagacctcaggctgaagctccatcatcaggaagaggaaatctatttccttgaggaatcaactgaaacagtttcaggtagaatgtttgaagcagaaaacgcttcggagctactttttggaacttcaaaggaacttataaataggcttaataacatgcagtttcatgtaagtgaacaaaaatgtacagaagatgatctcaagtcaaaactagaacaaagcttaacaaaattatcttttctggaaaatagcccagagaaggtggaaaaaggaagtaacaaagctggagctggatcaccatcattgcaggataaaatacaagagttagaaaaacagttgaatgaatccaatttgcaactgcaattagcactggcttcagcagaaacaaagcaggaggagcaaaatgcattgcaatctgagctgaacacattggaaaacacaattaagaatatcaaagatgatgtctcacgagcagaaagcagagcgcaaaatgcagaaataaggtgtatggagctaactgtagctaatatagagcttaatggggaactaaatgcccttaaaagcgagaagtcagataaggccagtcttttggagaagaagcttacagagtcaaatacccaattagagcatgcaaaggcagcggttgatgccattgttgaacagcaagatctgaagggtaaagtttcaaaaactgaaaccagagctgagtgtgctgagtcaaaatgcacactgttaacagacacaaatttagaacttagtgaagagctagcatttctaagaggtcgagtagaaagtctagagaactcgttacgtgaagccaaccatgcgaaggtgtccactgccaaggacattggtgtgaaaactaaaattattactgatttggtcagaaaattggcactggaaagagaacggcttcatctccaggtaaatgctgtccaagctgttgcatttaagcaacacgggatctcgaaattatcaatttag

SEQ ID NO: 8101 - DNA, 441 bp, Zea mays
  Peptide Sequence Number=SeqID_49880
atggccaagactaccctagcggctacgacggcgcactatggtcgcgctgttgagctattgaggtgggcgagacaagacaacgggggcgcggatgaggaaggagacgaaacaggaaccacagaaggtgccaacgaactcgaggagggtttgtcaaatagtttcaactccatgggaggagaggtggacctcgagctaatcaatttggtgaggtccaagagctttccaaatcaaggcgtatttgaggccccgctagcgaaaggttccacggcacatctaaaccaggttcaagcaacgggcgcatatccagatatccctggctcaatttggcccatgcaaattgtgggcctccacctcagcccaattgaagttctgaaatacgaagagcgattagaaggattaccagtgttaaacccatttaattgcctttatggtggccattaa

SEQ ID NO: 8102 - DNA, 510 bp, Zea mays
  Peptide Sequence Number=SeqID_49881
atggcaaaagagttggctatgtgcagcaaactccagttcggcctgacacaccggacagtgtccgatggtgcaccggacactgtccggatcacctattcacccctccctctaggtgctctcaccacatcgattagagttgtcaagggtggcttgccgatctctagacaaggcctgggacctctcctccccgacgaggtcccttccgggagtgagatccagacgccgccggcgaactccgctgccccggcgcacgcacggaccgtccagcctctagacgcagaccatccgtcacgtcaggcaggaacccgagccctgtgccaggtcgcggactgtctgatccctggccgcggaccgtccgtgcctccacagagagcattatcgctgattctcaccacagtgattggcgctcggatcggcaccatcaccatgattttgaatgcgctggcatcaccaccaataaaagattggagaagaaatccaacgaactctggagttagtttaacattatag

SEQ ID NO: 8103 - DNA, 270 bp, Zea mays
  Peptide Sequence Number=SeqID_49882
atgaacacgacaaaacacatagagaacccaaggaaactgaatgatatgcagaatgatctgttaccttctttggatatgcagaatgacctgttaccttctttggagttggttacaaaaatgatagaggatgttgagcttcttgaagaaaaggctaaagtagccaaacgtgaatcatctattgctgggacaggcattctaaccaaagttgaggagctcagagaaatgttaactcatgtgaaggaagcaaatgatatggtcttaccctcttga

SEQ ID NO: 8104 - DNA, 300 bp, Zea mays
  Peptide Sequence Number=SeqID_49883
atggattacaaacttcccaaggctacaacacaatatggaaagctccatgggcagcgctctagccggctgaaccaaggctccaagagtaacaaatataactacaagcttgaacgcgaacaaagtgctcttggagttgaagaacaagttggatatgattggccatataaaatcaatatgacttctaatgctcgttggcatctagaaaagtatactcaaagtactcgtcctttgttctttaccacaagtggaagtcgtctctgccgaccaaggcaggagccgtggacaaaggtcgacaagtga

SEQ ID NO: 8105 - DNA, 309 bp, Zea mays
  Peptide Sequence Number=SeqID_49884
atgggccgactggtgggccggaactggaaggccgtggaggcatcgctgacgctaagctgtaggagggaggagtgcttgccagcatgccatgtcatcttcttcgtcgtacatccattccagcttggcagagagcgtttgaatcgctgctggtcactgctggatgctccggtttgggagtccgagctcgagctctgcggtggtccgccaccgtcggagctcggagcaaatgaaacaagccctggcccctgggtaccgctggcgatgggcggcggcaggtctaccaaggtttttatgatagcggatcagtga

SEQ ID NO: 8106 - DNA, 1401 bp, Zea mays
  Peptide Sequence Number=SeqID_49885
atgggcaaggcggcgaggtggttccgcagcctgcttggcggcgggaggaaagaccaggagaggcaggcctccccggcgccggcccccgcggacaggaagcgctggagcttcgcgaggccgtcgcgggactcggccgaggcctccgccgcggcgaccgagggtttcgtgcggggcgccgccggcagcgcggcgatcgctgaggccgcgtggctcaggtcgctcgacgacgacacggggcggcggcagagcaagcacgccatcgctgtcgccgcggccaccgcggcggcggcggacgcggccgtggccgccgcgcaggccgccgtcgaggtcgtgcgccttaccagccagggaccggccttcggcggcggaggggtcgtgttggacttggatccccgcggccgcgccggcgccgccgtcaagatccagacggccttcagaggcttcttggccaagaaggcgctgcgagcgctcaaggcgctggtgaggctgcaggcgttggtacgcggctacctagtgcggaggcaggcgacggtgacgctgcagagcatgcaggcgcttgtccgcgcgcaggcaaccgtccgcgccgcccgctgcggccgcgccctgccctcgctccagccgcgcctccaccaccctcccgcccgcccgcgcttctcgctgcaagagcggcacgcggacgacgcgcgcagcgagcacggcgtggcggcgtgcggccggcgcctgtccgcaagcgtcgccgtcgagtcggcgtcgtacgaccggagccccaagaccgtggagatggacacggcgcggcccaggtcccgcgcgccgtcgctgcgcaccgaggacgagtggtgcgcgcaaccggtgtcgtcgccgccgccgccgtgccagcagcagcaccaccaccacctgcccccgtgcatcgaggtgccgacgccgcgccacttcccggaccacggctggtgcacgccggagaagccccggccggcgacggcgcagtgcacgccccggtgcgcgccgccgacgccgaccccggcggcaaagaccctctgcgggggccctgccagctgcctcgccgcgtcgcccagctgccccgggtacatgtcgagcacgcagtcgtcggaggccaagtcgtcgtcccggtcgcagagcgcgccgaagcagcggccggcacggaagcgggtgccgctgagcgaggtggtggtcctgcaggcccgcgcgagcctgggcggcgccggcggcggcgcgggcacgcacatcaagccgtgcaacgcccgcgcgcaggcgcaggcgccggacgcgtgcgacttgcgggccgccgtcgtcagccggttcgagcagcgcgcgtcggaggaggacgccgctgcggcggccgagcggggccgcgacgtgttcttcttgcaaaggaggtggtaa

SEQ ID NO: 8107 - DNA, 306 bp, Zea mays
  Peptide Sequence Number=SeqID_49886
atgggcaaggcggcgaggtggttccgcagcctgcttggcggcgggaggaaagaccaggagaggcaggcctccccggcgccggcccccgcggacaggaagcgctggagcttcgcgaggccgtcgcgggactcggccgaggcctccgccgcggcgaccgagggtttcgtgcggggcgccgccggcagcgcgacgatcgctgaggccgcgtggctcaggtcgctcgacgacgacacggggcggcggcagagcaagcacgccatcgctgtcgccgcggccaccgcggcggcggcaaataaatccatatga

SEQ ID NO: 8108 - DNA, 1647 bp, Zea mays
  Peptide Sequence Number=SeqID_49887
atgaacagggagcacagcagcagcagcagctccaagctcatcaacgagaagctcgaggaacaccggatctccaccgcgaagcactgcccccactgcggcgagaaaatcgacagcaaaccatttcaccccctcaggcctcagctagcatcagtaccatactaccatgagactcttggtggtgcaacctgttttgatgggattaattgctgtaactgcaagaaggattgggtggggctgccggcaggcgtcaagttcgatccaactgatcaggagctgatcgagcacctcgaggcgaaagtgaaggacgaaggctcgagatctcaccctctcatcgacgagttcatacccacaatagatggggaggacggcatatgctacacccaccccgagaaacttccaggtgtgacgagggatggcctaagcaagcacttcttccaccggccgtccaaggcctacacgacgggcacgaggaagaggaggaagatacagacggattgcgacgtccacaagggggagacgaggtggcacaagaccggcaagacgcggccggtgatggtgagcggccggcagaaggggtgcaagaagatactggtgctgtacaccaacttcggcaagcaccgcaagccggagaagacgaactgggtgatgcaccagtaccatctcggtgacctagaggaggagaaagagggggagctggtggtgtgcaagatcttctaccagacgcagcccaggcagtccagctggtccgccgcctctgaccggggggccgccactgccatggtggcagcaacgacggcggcggcgcaggagcagcataggagggatagcggcagcggcagctgctcgtctagggaccacgaggcggtgtcagcgacatcgttcccggccggatacacagtcaccacggccgtcgagatgcagcagcatatgaagcagccagctgcggaccatttcagcttcgcgcctttcaggaaaaccttcgatcaggaggttggtataggtggtgatcaggtgccatctaatcagctcggacgatcagagacgcatcatgccggccgggggcagcagccgcacggcccggtgctcgcgacgacggccgtgcctgctacagctttcctgatcagtaggccatcgaaccccgtctcgactatagtgccacctgcaatgcagcacgcatcagttgtcctcgataatgatcagttccatgtgccagcaatccttctccaccaccatgacaaattccagttattgttccatttcgacattattataacaaagaacatgcaacaacagccgcatcagcaccaacaggaacagacacaacaaaagcttgatcgcaggtctgccagtgccggcttggaagaattgataatgggctgcacgtcgtccacaaacacaaaaggagcaaggcccactgggcagcgcgagatatcgctgggcccaggcgtttttgcggcaaaaaatatgttgcagcccgactgcaaaccacgatgtttgcagtccctcataaaaaggaggatagaccccacctataggtccactaggaaacttcaattgctcacccccaagagacagagtggccttacccgtactggccatctgataaccaagatcatcatggatagtagtgacaggacagataaataa

SEQ ID NO: 8109 - DNA, 285 bp, Zea mays
  Peptide Sequence Number=SeqID_49888
atgtcagagcagactcaaaaaggcggaccgtccggctataattcagggactgacccgaagccaccttcctctggtcaggactgcggacggtccggccctaaggcccggacggtccgcagtgcaaaagagcatagagtcaatacaaatggtcaaacctcggaccctctgaaggatcgcggacggtccgcccccaagggccggacagtccgcgcgaccaagacttctcaagtttcagacaagcttttgaatgaactttttaacttacgaaatgagaagcgctgttag

SEQ ID NO: 8110 - DNA, 2352 bp, Zea mays
  Peptide Sequence Number=SeqID_49889
atgccgccggcgacaagcacgcgcccgccgtttcgtcgcccggtaccattgctgacggtggtcgtttccgtggcgctcctgtcactcgtgtgctttcttgtagctgctgatgcaagcagatcgctgcactaccactaccacctccggaagcaccggaggcaccacgggcaccaccgcgcggagaactacagccacatctccctgccccctgccgcgccgcctcctggcgctgatggcgattctccggccggaccggtgggtctgcctccggacgttggcggcgcgctgccgccgagctcctgcagtgacaagccgtgcccgctttcgcctagtccttccagggcaccggcaggcgcgccatgttcgacgcccggttcggccaagcctccggctttaaccttggccactccgccgtcgcccgcgccagccactccaccatctcattctcctccgaatccaccgtcgtcgcaccaaccgtttcagcggcccacacttcctcttgccaaggcgccgccgtcgtccaagccaccgtcgccggacatcgcaccatttcatcctcacgccaagccgccgcgcgcgcttccagacgccaagtcgccgtcacagccaccaaaaagggcgccagcaccatcgccgttgtctccttcgaagccgcgcaaaccgccatcgtgcactttggctacgccaccacaggcccagacatcgagactcgcccctgccagtgccaagccaccaatgcgatcaccagcccatccaccgaagctctccccggcaagcccactggcgcacccaccggtcgagccgccaaagtcagctcttgccaagccgcctggtttctctttctcccatactaccaagccacagccaccagtggcttcgatggtgaagccaccacgactcgccccggccaagcctccagcgccgtcgccgttgcctgcagcccagccaccgcggtgctccacggcaaatccgccagtagctcctacggcgtcagcgaagccaccggcgtaccctcctgctgctgcgtcaaagccaattccgccgccgccgctcccaccggcagccaacaacagctcatcagcctggggcaacgtgttcgacgtgagggcgttcggggcgtcgggcagcggctcaggcaacgacacgcgcgcgttgcgcgctgcgtggaaggcggcgtgctcgtccaactccaccacgcccacgctgctggtgccgtcggacggcgtgttcaccatcagctccaccatcttcgccgggccgtgcaagtccgctgtgaccttccaaatcgacggcgtgctgatgccgccagacgggccggcgagctggccggcgtccgacagccggaaacagtggatagtcttctacaaggccaacggcatgacgctggcaggggaaggcaccatcgaaggcaacggggaggagtggtgggacctcccgtgcaagcctcacaggggccccaacggatcaacgctgcccgggccttgcgacagccctgcactggtacgattcttcttgagcaacgacgtgacggtgcgcggcctgcggatcgagaacagcccgcagttccacctcaagttcgacgactgcgagagggtgcgcgtggatggcctcttcgtccgctcgccggcgttcagccccaacacggacggcgtccacgtcgagaacaccacgtccgtccagatcctcaactccaggatctacaacggcgacgactgtgtctccatcggcgccggctgctccgacgtccgcatcgagaacataacatgcggccacggccatggcataagtgctgctttgaatgtgtcagctgacgcggcaagctcgtggcgacctcgcagcatcggcagcctgggcgtgcacggcacgcgcgcctgcgtgtccaacatcacggtccggaacgcgcggatcctcgactccgacaacggcgtccggatcaagacctggcagggaggcacaggcgccgtgacggcggtcgagttcgccggcgtgcagatgcagaacgtgaagaactgcatcctcatcgaccagtactactgcctcgggagcgggtgcgccaacctgtcctccgcggtgcgcgtcgccggggtcacgtatcgggacatccgcggcacgtacaatccgcaggccagcgcgcccatccgcctcgcgtgcagcgacgccgtcgcctgcacggacatcaccatgtccggcgtcgagctgttgccggccagcggaggaggcgcacgagcgctgcttgcggacccctactgctggaacgcgtacggagtcatggagacgctcacgctgcctcctgtgtactgcttgcaggaaggccgaccggagtcgctgcaagatcagctcaccagttgctga

SEQ ID NO: 8111 - DNA, 927 bp, Zea mays
  Peptide Sequence Number=SeqID_49890
atgactggatggatcttcaaggtgaacacaaagcttgcctcaagcgttgatctttcccttctcatttgcttctacgatggatctctctcagttagatttgaagccaggaaatcttatgcagaggttgttggtagttctgttcttactggtgccaattcaattcatgttagcagttcttcttggcagaggaaatttttgcagcagatcaatccgaagttgcaggggcgtgccagcgaggtcctcgagtgcctagctaaggagggccagctgggagcggctgtaccttacttttactgcaaagacagagccaatccaggagagcaaagagatttcaatgcaagcagtaatggagacggagttgcagagcaagcttcaagtgaaggtccacagaagacgattttacagaagagaatcccatcctctgagaagatgaaatggacagttgacagcgacccgcctggtttcaataccgttgaggtccggagcgcgttgaagaccccatcccgagagtccggtgaggtgaacctttttgacccggcgggcagtgggcagcaccgcgacagccgaccctttgcaggcaaattattaatttcttcggcaaaggaggaggatgagggctggactgtagtcaaacctcgattctggtggcgcaggaagaacaacaacctgggggccaatttaatccacaaagaagatgaatttaagggggccaatttcttcaagaagaaatttcaaggtaaatgctacaattgcttctcggcagagcactatgctttccgttgttgggcttccccgagatgctggtcctgcttccggtctggacataaggctgggagctgccctgacaaaattcatttagtgaagtccaattcaaaccgcaaccaccaagaatcactgaagcattcattcaagctgaatcattgctaa

SEQ ID NO: 8112 - DNA, 591 bp, Zea mays
  Peptide Sequence Number=SeqID_49891
atggcccctcctgcgacgtggtcggtccgagccctgtgtcgggcgaggcggaggctcctccgagctcatggtcgagtctgccttccgaggtcgaggtcgagtccgagcccctgggtcgggcgaggtggagaccgtcggctgaggccagagccgaaacctggggtcgggcgaggcggagttcgtcgtcttccggggccgaggccgagtccgagccctgggtcgggcgaggcggagttcgtcgtcttccggggccgaggccgagtccgagccctaggtcgggcgaggcggagttcgtcgtcttccggggccgaggccgtgtccgagccttgggtcaggcgaggcagagttcgtcgtctttcgggaccgaggccgagccctggggtcgggcgaggcagagcttcctatggcgcccgaggctggacttggctgctgtcagcctcactctgtcgagtggcgcaggcggcgctgtcttcttgtcagctttgtgctgatgggggttaccagctgagattaggagtcttgggggtacccctaattatggtccatgacaagatgcgagcaatcttaatatcactcgaggtggagttctga

SEQ ID NO: 8113 - DNA, 423 bp, Zea mays
  Peptide Sequence Number=SeqID_49892
atggtaggagctggtgtactgttgctcatcatggcccctatcatagacaatgccatccctatactagttcacggacattgcccactatgggtattggccttgaagatgtcgtcccctgctggtaccctcactatgcggggtgaccagaatgccacagtcatgacaatcgagaagctgcatgccctggcgatagaatccacacaccctaatggagagagagaggaccctcaaccttgtgagccaatgcacatagctacgagggcacccaaggtgcaaccatccaaggcggatggcgttcccgcgaacaccatccaggccaaagcagactgctcccagacctcccgcaccgcgacgaacctaggagagaaattggaagatgcggtcatcaccttcctttggtcaaatgtggatgtgttcacctag

SEQ ID NO: 8114 - DNA, 633 bp, Zea mays
  Peptide Sequence Number=SeqID_49893
atggagcaatatatggaacaaaagaaggatctacacatggtttttattgacttagagaagacttatgatgaaataccaagtaatgttatgtggtgggctttggacaaacataaagttccaaggaacttttccagattatattggtacatcactcttcggaaattcgggctccacattcttgcccctatccaagatgacacaatcttcctgcagtggtggaaacgcattgctgatattgtgtcaggcatgaccaagaaggggaaatttagttatgctatccaacctttttcagttatctctgccgaaaatggccagcaagcatgggcttatcttgaagataagagaaacaacatagatcttgttttgactgaggtttttatgcccggtgtatctggtatttctctgctgagtagaatcatgagccacaatatttgcaagaacattccagtgattatgatgtcttcgagtgatgctatgagtacagtctttaaatgtttgtcaaaaggtgctgttgactttttagtcaagcctatacgtaagaatgaacttaagaacctttggcagcatgtgtggagacaacggtgtcacagtttctttgacgttattcatgtttctctgggtaaaattgtataa

SEQ ID NO: 8115 - DNA, 300 bp, Zea mays
  Peptide Sequence Number=SeqID_49894
atggatcgagagttaactgaacaagtcttaaggaagttagagcaggcgaggcagccaggggacgtcgtcatggtggcgtcgttgttccggctgcatagtcagccttgtcaacgacgattgtggcagcgttgggtacttcaccaaccaaaggggtttatagtgatgccgagcgaggtcactgaacatgtggaggaccttctcgagcttgacatgactatagaggagttctatttgatgtacgataactttgtggagcttggtttcattgggaccgacgatgtcgatgccccaacgctgtaa

SEQ ID NO: 8116 - DNA, 207 bp, Zea mays
  Peptide Sequence Number=SeqID_49895
atgagtgagaagtgtgaaatcaagaacaagaaacagtgccaagaaaagaagtttcgaattgaggaagaattggcaaagtacagccaacaccagttctggcctggcacaccggactgtccggaggtgcaccggacgtgtccgatgccccaggctggctcaacgtcaactgggcgctctcgagaaaagagaaaggcgacgtggctataa

SEQ ID NO: 8117 - DNA, 564 bp, Zea mays
  Peptide Sequence Number=SeqID_49896
atggcccacgcatcgacattcgctagtggtgaaaccttcacgtcggggagccacaacatgtttggcaccctcgacttactcgccactgcaaccggtgatctccgtctcaccacccccgacatgtccgtcaccacgggcacacaactcacacgctccaccaggagcaaggtagataagcgatgcctaaagaggcgcgtcgtcgccttaaagcgccacgtcaacaagcatgacgacgccatcaagaaaaaggcggcgagagccttgtcgttgaccctgatggccggtcaccagccaacatccatccttgacttgtttgagaacgatttgaaccacaacttgactagggctgactctggcgccgacgaggctctggaaagggcctacttcatggcaacaccaccatggaacgacaacggcatggggacgatgagccccccatccagactgagcaatatcaacgccaacgccaggcgtgcatccttgctcgcgagaacgccctccagcagcagcaagaggagctcaactctctcgttcataagctcaatcgagtttacagtgacatag

SEQ ID NO: 8118 - DNA, 207 bp, Zea mays
  Peptide Sequence Number=SeqID_49897
atggcggtgtcgaccatgatgcttcggtccatccccgagcccgacgaaccagaggcaacgacaatgtaccgaaacctccacaactggtggagaagcatgtggggggcacaaccctcccaatccacaagagatcgcgtcctcgcgaagaattgtattagggagatccacgatgctcgacacctcatcaacaaccggcaccgagaatag

SEQ ID NO: 8119 - DNA, 315 bp, Zea mays
  Peptide Sequence Number=SeqID_49898
atgtcagctgtgacaggacacatcatcaccaagccacgtccggatgtacgtgtagtgcaccaaaggggcgttgggaggtcactattagcacgactatatgccccaatgaaaggtctcaatcgtatccccactactctatggggtcagtcaaactcggtcatggggagacctcagcacggaagtcactacatagtgacccgcatgacgggaaaggcggaacaatatggcataccgagtgtacgtctacgcaggatgtttttgaaaccacgacaatgggagtatggaggagatgtggaggagattagaagagtatga

SEQ ID NO: 8120 - DNA, 747 bp, Zea mays
  Peptide Sequence Number=SeqID_49899
atggcaaacaaaaaatatcatatgatatcttggttgcttgggaggtttggaaacactggaatgcctttgtgttcgaaggggcaaaaccatgtttcgaggctgttatgcaggctgtgtccaataccagcagcatttggtgtatggctggagcttccgtgctacatatcttgctcctgcagttgctcactccggattttaatccactatgctgttgttgaaaagcctaccctagagacatggatgcaaggtggtcttgactatatcgtgcttcgggatctgagtattgatgggatccgtacaattggaagtgtcctgggtcagagtattgctcttgactactatatccgtcaagtggatggaatggtagctgagttcacagatatcaaccgtggaatggaaaaaactggtaccttcactatggagaggaagaagcttttccagcttgtagggaaggccaactctaacttggctgatgttattcttaagcttggactctttgagaggtcagacatagcgtggaagaatgcaaactatgctcagatctgggaataccttcgagatgaatacgagctaacccagagatttgggaaccttgattttaagttgaaatttgttgagcacaacatcaggtttcttcaggagatccttcagaacaggaagtcggattttctggaatggcttatcatcatcctgatcagtgttgagatcttgatatctgtttataacataatacaggagcagatgtag

SEQ ID NO: 8121 - DNA, 957 bp, Zea mays
  Peptide Sequence Number=SeqID_49900
atggcctggagctgctccatttcatggggccctaatggggcacatgacagtcatatgatgctcgagaagcaagaattgttcattgatgcttatctcttgctcttggttttggtgaaggcaccagattctactggaaaaattgtcttggaggcatcatttctcagttttagtagattcgatttgatgcatatgactttggagtctgatgttgagcctttctcgcaggtggattttgtgatggagatcatgtcacgccttgtgagcaagcagatttggaaatatcccaagttatgggtaggatttctgaagtgtgctatcttgacaaaacctcagtcatatggtgtgttgctgcagttaccagctcctcaacttgagaatgccttgagtaagaacccgacactgaagacgcccttggctgagcatgccgagcagccaaatattcggtcgacacttccaaggtctactttggtggttctgggtcttgctgaagatcaaccacagcaaccagcagtaacacaggtgcagagcagccaaaaccaggctgcggaaaccagtagctctgctgctgatacggctacagaagttccctatgaattagaccgccacaaatgtggagagctatacttgatggacttgacgttcttcagcaaccccaagggatggagctttatggccaacccccccagatgtgttagtgaattaatagaagatgccactagcctccttgctatagttgtcgtcgtcaccacatccattatcggtagttgtcctccctcgggcttctttcacatcgagtacaccgcctcccttagcgacccccatgttgactcccaccatcatggtgtaggcgtggcccatggtgtcgccccttcccttgctagcgtgggcgcagtccctatccgcgtgattggttctcggatgtgtgggtgcacttgcatccgcggagtattaaagtag

SEQ ID NO: 8122 - DNA, 441 bp, Zea mays
  Peptide Sequence Number=SeqID_49901
atggtagtggaatcgagcactgagcagggtgggtcattggggcaccgaagtgggtgcaacaacgtgactgagaaggtgttgagctttggccatctgagaggtcaaagcgtcgaccacggtgtgctcgtgctcccaaacaagggacgcaacacgttcgcgatcctgggcaacatccatggcagcctagatagtggcaagggctaccaccaaggtggaagagggggctgcgaccgacaacgtataaggtcaagccgatacgagcgacagaacgtcgacaattgtggcgaagcggagtgggtcggatggagccatgagggcccacacgaggtcgaagagagcaaagcaacgtgcgaagaagctgccactgcgctgttgcgaggcggggaagatagtggcgaaagcgttggcgtcgacgaagagggtgcgcagtgcccaccctag

SEQ ID NO: 8123 - DNA, 222 bp, Zea mays
  Peptide Sequence Number=SeqID_49902
atgaagttgcagatggaagggctagaggacttcgttcataagcgcctagaatgtggtcaacacattagagaggccaaagagcatgatgaagaacttgaagtgactatgatggcctcgaagtcccatgcgatgggcctcaaggttcaaaggaagtcaatgcctaagacaaggtcaaacccacctaggtcagtgctaaaacagttgatggtaaactcctcttga

SEQ ID NO: 8124 - DNA, 316 bp, Zea mays
  Peptide Sequence Number=SeqID_49903
atgacgaaggcgaattcgaacccatggcagccggcggcgctggacgccgaattctcgccgcaggtggccgagatgctccgtgcggaccaaggccgcagggagctgtcctcccgagtacgcagcagagacgaggacctcaggaccgcggtcaagaagcacctgctggagctggggtggaccatcgtgtccatgcccaacgccgccatgcttaccaggctccgctacaaggcgccaggcgacggcggcaagtcctactactccctcccggacctcgtcgtggatagagccgccgcccctcacctcatcgtcgataacg

SEQ ID NO: 8125 - DNA, 183 bp, Zea mays
  Peptide Sequence Number=SeqID_49904
atgccgctggtgctgaggctcctcctcctcctcctcttcctactccctgcagcaatccagcaacagcagaaaaagcaacgagaatcagaagcagaagcaaggcatggtgaagccatgatcgacgccgaggtaaccgcaggagaggatgaagatggatggagttcgacggactccattgcctga

SEQ ID NO: 8126 - DNA, 609 bp, Zea mays
  Peptide Sequence Number=SeqID_49905
atggcggggcagtccgacccgcacctctccatcttctcgccctccgaggtggagttcgtggctgaggatgagattgtcgaaatcgtccccaacatccgcatggacgccctcaacatgatctgcggggatttcgggcccttcttcccccagattcccaccaaggtgcctctctggctcgctgtcgcgctcaagaagcgtagcaagtgcaccatccgcaccccggactggatgactgttggtcagtgcttccttgttgcttgttccccctttattcctgctcaagcatacacagccataaccatctgttgcttgcttttgttcctactagaccgcttgacacaggtaagatctctaattgaggacatcagagatgtcagatttcacaaggttgagactggattagagacgatatctggacgcacccatgccgtaaagctcaaaaatctctctgcaatggaagtgaacattgtccgccctttcatggtgagaactttgcaggcattctataagcacgatagtgcacagatgattcagcaagcagataatatagggagcagagcaacactggttacagaccgtggcccgagaagagatctaaggcgcaggtag

SEQ ID NO: 8127 - DNA, 2619 bp, Zea mays
  Peptide Sequence Number=SeqID_49906
atgctggccgcccggaacccccctccgccgccccatgacatcgccgcgcgcctccaccacctgcgcgacctccgcagggtgccgctccccaaccgcgtcgcgcgcatcgccgacctccacaccgatgaggccagccccgtgcgcaagcttgttgccgagatcatcggtgagcttgggtcaaaacacatgaggtatctacctgatatgatcccttgtttgctgcaccttctgaatgatgagacgcctgcagtcgtcaggcaagctgttaagacaggaaccaacttgtttgccaaagtactccaaaagctagctatccagttgtctcatgtggaatctgaatgtcaggccaccggcaatgaaggtgtcaggttactggctattaagtttgttgaaaaaacagttcttatgtacacaccagatcctgatgtcccatctgatccgccaactgaaacaacagaagatatggcattcaatgtagcttggttacgaggaggtcaccctttgcttaatgttggggatctggccatggaagccagccagagtcttggattgttgctagagcagctcaagtctcctaaagtaaagtcactcagtacttccatgatcattgtcttcgttactagtctctcagctattgcccaaagaaggccttcattttatggacgcatattgccagttttactttccttggatccagcaagttctattattaaattgagagtcccgggcgcattccatgccttgaagagtgccttctctgcatgcctgaaatgcacacattcaagtgctgagccgtggcgagcacgcctattggaagctcaaaatattatcaaccaagggggttcaatagaagatgcagcaaatgctgctaagaatttcggggacacttcaaacagggaagaatcgtggcctctgatggagagaagcactgacggtagtaacaagcgtagtctggctgaagacatgaatcatgtgacagaggatgatgtccactccactaaaagagccaggcaatcaattgatgctaatgaacatactgcacaaggtgacagagcagctggatcactgcaaatcctttcatacagtatcgctagtgacttactagcggaggtggtaatggttaacatgcaacatctcccaatctctcgtcctgaagttgaccaacagcagcttccttctacgagctctggagatggacttccactttcaagtttctcctctctgctggggattctgctgaagggagcgaaccaaattgatcaagatgaagtgtctccagctaaagaacctgcgctggtgtcgtcagttgcagatgacagaatgatacttcctgctaattcacctgttcctagctcagtaaatctacctatcgaagagaacagtaacagtccaacagttccattatgtatagaaacaacagaggccaaagtaaccagtgcaggtggcaatagttcgattgatattccagaatcatcagaagcttcccatgcctcaacagagccccagggaacccaagagcatgctagcacttttgccggtccatttcctgctgataatttctcagttggatttagtttggcacaatcgtcagaaactcgcagcccaagctcttctacattggaagcaaaccactcacagctttcatcccttagttcacaatatgttcttccaaagttggttgtcaataatattgatctcagtgatgaggccaaagatctccttcaaaaagaggcgtttgtgcggattcttgagagtgataagaaagaagcatctggtggttcaattgctcgccttccgttgcttgctcacctgggtgttgagtttcctctggaatttgatccttgggtgattcttcaaaagcacattctctctgattatgcgaataatgaggctgaaaatcttcgagacatgtttccagcttcagataagtcacttggcaaattgctttgtgagataccatacttaccagaaggtgtgctgaaactgcttgaaagtttatgttctcctggaagtaatgagaggcaggacaaggatattcagagtggtgatagggtaactcaaggtctcagtgctgtctggaaccttatcatgctaagaccttcaaatcgggacagatgtctggagattgctttgcagagttcaactcatcatctagaggaggtccgcatgaaggcaatacgtttggtggcaaataagttatttcctatgacaagcatttccaaaaagattgaagattttgcaaatgaaaaacttaattcagtgctggaaatgactccatctggtgattgtgtaactactgaaatggctacacctgaagcacacaaagatattggtttagaaaacttaacagcttcagtaacaggcatgcagactctgatgtctctatactttgcattgtgcaccaagaaacattcccttctcagacatgtatttgcaatatatggtaatctaccgcaagctgccaagcaggcagttcatcaacaagtaccaattctgatacgcactataggctcctcctctgatcttcttggaatcatctcagatccaccagctgactgccgggacctcctcatgcaggtaggccacaatgggagtgctaagagacctgggaagccttag

SEQ ID NO: 8128 - DNA, 546 bp, Zea mays
  Peptide Sequence Number=SeqID_49907
atggcgctcatcatcaagagcttccgtcaaatcctcaagcaaaggagggggaaggactacaaaccccgctccaagaggggtttctcctccaagccgccactcctccctcctcctagccgccacctccctcctccggtcgccgcctgccccacgtctagccgccgccctgggaggctcatccctccctcctggggcggcccgcctcacagccgctgcctcgcccctcccaagatctgggccccggcgtggccatggcggcttcgagctttggccctccccaacgggcgacgccgacgcgacctaaatggactccctgcgctccctcaccagatccgcggccgctacgtcgacctgcacgctgccgccgccaagggagcgcgagcgcgcagacgacggcgtcgcctcgcagctcggcgcggggggtggctgcccagcctcggcgcggcagcccccggctccgacggcgcgcgacgcgggtccgcgtgcccccttgcgcggccctggcggctggctcctccggcgaggtgccgcgccggcgtgacctag

SEQ ID NO: 8129 - DNA, 228 bp, Zea mays
  Peptide Sequence Number=SeqID_49908
atggtgtccgtggagccgagaactaaggtgcacggtgatgctgcatgtagtacccgtgtgcgaaccggagttgcgctccatcgttggtctggggaagatggaaggggagggttaggagcacagtcgtcacggcatcagcatcaggtggtggttgtcaatgttctacttgaaatagggcccaaggaagctgaacgccacgatggagctgcgacgatgctgagaatctga

SEQ ID NO: 8130 - DNA, 525 bp, Zea mays
  Peptide Sequence Number=SeqID_49909
atgaaaggtccttgctggtttgtcctagatgcaaaaggaaaggtcccttggttatggatagatcggttggagggtggaggtttgcttatgttccttggttttggtctgatatatggctatttttatgtcaatcacggtggcgtgaagattgccaccggactaattagaagcttggttgtccttaattggaataatgttgtagaggcaactgagttttggaggcattacaacagagataggacttcgcagctgaacttgtcgacgaatgattggacttcatcctatcccacattatttgatgaacgttcatgctgtttaagtgttctaagtgatcatttagctcaagtaattggtagtccaacggttttacattggggtgatgattttctacagcaactcatggatggatgggttggaggcgagtttgatcctgcttctgcttgtgcaatcagaagtttggaattgttcagagttccttgtgtttgttcactgaccatcctcctgtcaatgttctttgaaaattaa

SEQ ID NO: 8131 - DNA, 162 bp, Zea mays
  Peptide Sequence Number=SeqID_49910
atggaacccatcatgaagatgcgcgcccggcggcagttcctggcggacaacgacatcgttgatcagtttggcgacatggaacacgcaatcgccgacctggtaagacaccagccgatgttgccagtcttagtggctcttctgcaccgcatgcgcctgctctag

SEQ ID NO: 8132 - DNA, 414 bp, Zea mays
  Peptide Sequence Number=SeqID_49911
atgaagttatgcgtactgccagagtcaaggagggcgacgagcaccatcgagccgagcgcgacagtgacctgcatggtgtcggcgaaggagacctcggcaagggcagagaagacaggagcgtcctcggccgcggcctcttcagactcctcggtggggttgttagcatcatgctccttcgatgcccttcaagacgaacagccgctggacacggttgtggaccgggtgtacttcttgtcgcagttatatcaaaggtcttttcggcggacctcgatggtgtcgtgggcgaggccgctctgtgacccggcgaccacggacgcctggaggaacgtcgatcatcttggcagcaagatcggcagtggtcaggtgtttctctacttcaagtgtcatatgtcgcagctagttaccgatcagtga

SEQ ID NO: 8133 - DNA, 249 bp, Zea mays
  Peptide Sequence Number=SeqID_49912
atggcgcagtggttccagagccccttcgggtcgagcgggctcgcctggcgagtggagttcgccagggtttatcaaccagtaaccaaaatctacacatctccgcaaagatctgtagatcagactgcatacatgatacatcagcggaatcctgacagctggtcaactactaaattcaagttggttcagacagcagtgaaagctcaacacagtatgcagaccacaaccttgccaaataatcccacaccatga

SEQ ID NO: 8134 - DNA, 360 bp, Zea mays
  Peptide Sequence Number=SeqID_49913
atgcaaaatggaaggtccttgctggtttgtcctagatgcaaaaggaagatcccttggttatggatagatcggttgaagggtggagatcatttagctcaagtaattggtagtccaacgcgctcccttaatgctttgttagtgaatctgcggttttgggagaggttgaagggtggaggtcagaatgtcattccggttgtgttgatgcaaaatgaaaggtgggctggttttgtcctcctagatgcggaaggaaagaataattttggcaattggaaatccatgtatcaaacaactgatattcgaaactgggggcagggatgcaggctgacattggaggcggattttcctcaattggagatataa

SEQ ID NO: 8135 - DNA, 1482 bp, Zea mays
  Peptide Sequence Number=SeqID_49914
atgggccgcttgctaccagacctggtggaaggaccgcatcttagcagggagaaggataatgaggaggaagaaagtgatagagatggtttcttccgcagattactcagggatagcaaagaggaggacatggaactgacaccaagctcagatggtttgttgaagcgactttttcgtgataaggaggacaggcaaggtgaggatgatgagaaggattttttcgcaggatgttcaaggataagaacgaggagaggagagatagtaatcatgcaagacatgggaatgaggaaagactgggcaagagtgtggaagatgatgacagagaaggtttcttccgcaaaattttcaaagataagaatgaggagaggaaagatgaagggcatcaaaagccagatgagagagaaaaggcaactctttaaggagaaaaacgatgagaaaaaggaaggcagcacaccaagcaagaaagaggaagatgataaaggccataaaaatgcagatgatgataatttctttcgcaggcttttcaaggataagaatgaagaaaagaaagggattgttcatgacaggaatgaagatgacaagtgtgaggaaggtgataaagaaaacttcttccgcaaattatttaaggataaacttgaggagaggagaactgagggacctgataaaaatgatgattatggtaagggaagtagtggtatcgaagaggaagataatccagagtttttgtcattccgtaggttgtttagagtgcacccagaagatcctaagagtgggcacatagaaagcagtcaatctaacaatctttctgaggggagcctaggatcagaaagcttttttaagaggctattccgtgatagagaccgctcacttgaagattctgagatttttgggtcaaaaatggcaaaagaggcaaggatctggtctcataaacaccctggtactacaggaatcaatgagaagcaaagtgggaaaccaccattaccaattaatgcagtagcagagcttcgaaaaggttcttactatgcttcgttggaacttgttcaggctttatgtgatacatcttatggcctggtagacatatttcctattgaggatcgagtatgctttccgatgggaaagggcatatatcgagtggttcatatacctgaagacgagtctgttcttctgaattctagggagaaagctccttaccttatatgtgttgaagttttaaaagcagaagctcctagccactctaaaggatcatcagatgggcacaaattatcaaaagatgggataccattggctaatggagatgtgcaactaccaaaaccacctccatgggcctatcctttgtggagcagacacgaaacacaaaactatgaaacagacataatgttgaagtctacttctcaggttattgaccaagcaatggctcaactctgggagactaaagtgtttctctacttcaagtgtcatatgtcgcagctagttaccgatcagtga

SEQ ID NO: 8136 - DNA, 891 bp, Zea mays
  Peptide Sequence Number=SeqID_49915
atggactccctggatccgccctgccgcctacccccgccgcacaactccaccgcgccctcgtccccgtctccggcgtcggttgcggggcctaggccggcggcagtgaggtccgggagcgagacccccacgacggcagtgaggtctgggagcgagacccccacggcgtccccgtccccgtctgcgtccccgtccccatccacgcccgggacgcccacggccgcggtcgcgtctcccccgccgcacaactccaccgcggcgagccagagcgatgttcctcaccagcagccggggcaacgtcgtcccatgtgcgccgtatgcacgaagcccctccgcctctgcctctgcggccgcctccgctccccgcctgtggacaacgccgtcggagtcaccgttctgcagcacgcgatggaggcccaccacccgctcaactccacgcgcgtggcacgcctcggcctccgaaacctcgtcgtcgctcaggtcaccgacgtcaaccaccgtgcctgcttcatcctcaccatgcttgatgctggcggcggcgcggcggcttcgggtcctgcaggcggtcctgtagttggtgaagacttgaattcgtccatctgcagcacacgcccaaccacagctgttagttggagttcggacattcggacgcgacgcagagcacgggaatggcgtggtcggtggtggaactggaacggaagcggctacccagctgggcgcggtgatggaggcgttgtcccagccgatgtgcgccacgtgcttcatgtcggtcggcttcctgatctgcatctccggctccttcacatcagctacacccgcgcaacacacaagaacagcttgcatgacccaatccctgtaaagatcaagaactgcatcgagcttagggcaatgtaa

SEQ ID NO: 8137 - DNA, 282 bp, Zea mays
  Peptide Sequence Number=SeqID_49916
atgagggtgggggaagggatggggcggcggcgcgattgcatccgtgggagggaagatgcgaggggtttggctgattttttgagtatgggcttgggtgcgaggaggcggtgtcgtagggcgcgacagggtgcaggccgggtcgcgcggaggtcgcacaattcgcggaggtgggggtgcggatggggatggggcggcggcagggtggggaaggggaggtgggggaacgatcgcgggcgtgggcgggcgaacgaaaacaagcaaatcactgtgataaactcataa

SEQ ID NO: 8138 - DNA, 744 bp, Zea mays
  Peptide Sequence Number=SeqID_49917
atggatcaagccaaaaggtttagggatggcagtgaagcaataaatggaggaaagacacaaaatgtttcagtaccgactgttgaaggtgtagctagaggaactagctatggatgggtggatggaggtttgcggggtacaaatcttggtgctggtgtgattgatcctacaaacgtacactcagataatcttttgcacgtctggtctatgcccagcacagcaaatgttagccagcaagaagcgcctcggcctctagagaaagtcaaccttttggcagcaagaaatgaaagggaaagttttcaaattgctttacgcccaaaggtttcatgggcaacttcaggtattgcagggtctgtgctgatacaatgcaccgatctctgctcctcctcaggagacagatatgaaaattcaagcttacccgaggatcgcattggtgaattggtgaaagaaactttggctgcagtaggactaaaggttgttccgactgagtacaaatatctgtcaaagaaaatattgccaacaaatcagggttctgtcacggagtattttctttccattcgcccaactgagagggcctggccagcggtgtactttctgtatgatctctcaccaattacattcaccatcaaagaggaaagaaggaacttccttcattttataactcgtctttgtgcagttcttggtggcacatttgccatgacagattcactggtagcgtcagttgcaatgcatgcaacgtggtactga

SEQ ID NO: 8139 - DNA, 105 bp, Zea mays
  Peptide Sequence Number=SeqID_49918
atgcggcagaagtacccggaacttttcattgtggaagcgtcagaattcgaggtcgaattctttttaagagggatagagtgtgatcctgtacgctctgtccagtga

SEQ ID NO: 8140 - DNA, 177 bp, Zea mays
  Peptide Sequence Number=SeqID_49919
atggacaacgatccatggagatgtgttgtctacgagttgaaaatgggaataaggattaatgtgtggtaccgtactttggatgacatggttgctggagtgacttggccatccaccctgccaccgggctggacagtcgagtgggaccctgcttcagcagtagaggagcatgaggagtga

SEQ ID NO: 8141 - DNA, 855 bp, Zea mays
  Peptide Sequence Number=SeqID_49920
atgaataaacatgggttttgtctcgggctgaacagtccagatagacctgacttggtgccaccatatctcccacacccgaccatatcttcacttggaactcagacaagacagatagcccttggcatagtgaagagattttacacaggatttttggcaagatttgcatgtttggtctaccagcaggcgtttgaacaagggcagaaacaaacgtccacgtgttcgacctgttctgacgcgccaaagcacgcccaggtgctcggccccgcgcgcccgcgccaagcgacgcccgagcccgtgccctcgcctgcacctataaagcagctcaaggccgcgaccgtactcccccacacgcccttagctccgcccgagctcgattttgccggagttctccctgagcacggtgtgacatcagccgcccgagcccgcccaccgtggaccagccactctggcccacctccacctaatccagcccctcggctagcttcccttgagccccatagagcttcccgagcccacaaaccgaacactacttcactggaggcaccggattgccatcaccagactccagccggtcatcgccgcgcatggaccgaactgcacggccggagcatgcaccgccgacgagctcgaccgcctgcgcacgcggccagcccacctccggtcgccaccaccggcgacctgcacctcgacgtgaccgcaagagaccccggacatcgcgcaacccttcaccagacctctaccatcggcggtactttggatgacatggttgctagagtgacatggccatccaccctgccaccgggctggacagtcgagtgggaccctacttcagcagtaggggagcatgaggagtga

SEQ ID NO: 8142 - DNA, 465 bp, Zea mays
  Peptide Sequence Number=SeqID_49921
atggcggccggagctcggccgtggcacccggcgcggcccccggcgtcttgcgcaggcctcgccctggctgctggcgcacggccatggccgcgccgcggcttcggcgcggtgcacagccccgcccggctcggcggcctgctcgtgcggctcgcccgcgtggcttgcccgcggcaacgcccgacgcggtttgcttgcatggctcgcccacgacgtcgcggcgtgggcgcgccccccggcgtcctagctcgcttgtggcagcctgcgcggcttgctcgtggcggcctgctcggcgcgtggcagcccgtccgcgacaggatccggggtgtggttcgcttcgccgtcatgccgtcaatggggctcggtgtggcaatgagattgatggttcttgttattgactctggtaatggagaagatgaggccgtggaaggagacttccaggagttccaagactacgacgagttctag

SEQ ID NO: 8143 - DNA, 1320 bp, Zea mays
  Peptide Sequence Number=SeqID_49922
atgcagcagcagaagccgcagggcttcctcgtcgctggcggaataccgccggcgcagggatccggacgtatcgtcaccgcggtggcggcgcggacgcgcgcggcggaacagatggcatttgaagacgtatggaaggccctaaacccggacttcaggacgcccttcgcctccgttgaggacgccatcagcagcgcgttaggagctttagggccgggattagctcgtcgtcaggccgggaacagtgaacgcgcgttgatttcgaggattgatttggttccattgcttgcgatttgttctctaggatatttggtgcggctgctgccctaccacatattcgcagactatgaagaagacgatgacgtagttgaccccatcagtggcatcagcagcagcatatgcaccacaacggagaagtcaagcgcccataattgggaggatggcatggttacacagatggaaggttttctcgagcacttcgagaagcaggtgctgaccttcaatgtcatgactcagcaacacgctgcaggcttcaaccgcgccgaggaacagctcattctgcagatgtctatggtcgaagacgagcggcggcagttggagctcctgcgcgcggccattgtgcagcaccagcagcaggaggccgcgcgcgcgcgcctagcactcgcgcagccgcaggcggcgctgcccgctgcgtcttgtcaggcgttggtggctgcaggacgcggcgaaggtgcctcccgcgggcaggccctggcgccttccttggtgatgcagcagcaggagacgatgatgaccgcgggcgcctggcaggcgctcgccgcggcggcgtcgcgcggccagggggcttccaatgagcaggctctgatgcaggccatcatggcgcagcacatgcaacggcagaggcagcaagagattatggcagcggcgtcacgcggcgacggtgcaacctgcgggcaggcggaggcgctgccactggccgcggtaacacagcttatgcagcaacgtaaccagcagcggcagcaggaggagatgacgacgaccgcgtttcggtgcgacgtggctcccggctacctggcgctggcgtcggccgggatgatgcggcagcaacaacagcaccagcaggaggtgatggcggccggcgggtggcaactggacctgggtttgcggcacacagacatagcgcctcgcgttgacggcagctcgagctctcaggcagcgttgcctcctgcgatgctgcagcagccaggacaggggcaggccagcaccgctgggagtgggatggcgctgccgtggcgtggcgtcgctgacggaagggagcagtag

SEQ ID NO: 8144 - DNA, 309 bp, Zea mays
  Peptide Sequence Number=SeqID_49923
atggtggcggggcacggcggtggggaggccggcggtggcggggctcggcggtgggcggggctcggcggtgggcgcggccggcggtggccgcgacggcggggcgcggcggcggggcgcgtggggaggcgcggcggcgccgacggcaagccgggaggctggggcgggcggcggtcgcggccggcggaacgttctccagccatcggcaacatgcgaaggttcacgaagaaacactactacacttatttttttgaatatgcgagcatatcccgcaaagcattggacattagtgttagaactttgttagagtga

SEQ ID NO: 8145 - DNA, 129 bp, Zea mays
  Peptide Sequence Number=SeqID_49924
atgaccctaatccaccagcgcctaaaggtgtacgcagcagtagacgtggaggcgttgcacgtggcggtggtgcacgtgcgagggaaggccctggtggctgcggcactggaggctcgttgctgctgctag

SEQ ID NO: 8146 - DNA, 345 bp, Zea mays
  Peptide Sequence Number=SeqID_49925
atggcgggaccaataactgaaaatcctagggactcttttataagcatgtctcgactgaacgaatcatatcgcacgaaggggtatgcgcgccctaatcctcaccgtctaatactcgatcaacggattagattggacgatgagattctacgcccaggatataatcctatcgttcacgccccatccgacggcacatattctaccaacgaagggataaaccaggacctaatctacaccgtcgatttcgccatccacgaccgagacgccttcttctatctctcgttaatggaaaaactgggcagcgacactcggcccacgacggcgtggtgtgtcagcatcgtggcatga

SEQ ID NO: 8147 - DNA, 537 bp, Zea mays
  Peptide Sequence Number=SeqID_49926
atgggtgagcggggcaaagatcacgtcggtgagacttaccggcgccgatttagttctggtgaagtggtcgacgacgtcacggaggtcacggcggtcacgtcggtgtgcgggccggtgtcggagatggccggagttggtcggttctcgcgcacaggcgggggagctcgtcggcagcgagtgattcggcctaaccacggcaggatagctcaattcagtgagttggggtgcttaacgggaggtcagggaagttctaggcgcaaggaatttgtaaatggctcacctggtagcccggtctatgtgtggtggcgggcgaccgaagtccagcgaggtcgcgctcgctgctccggcggggcagggtctcgtctcaagtttggaaaagcttcatggcctctcagggatgctgtccaagagcacgggcgaggctgggggtcgaaggaagaggcttgctacggcggccgtgctcgggcaatggtggcgggcggtggcacttgcctttcgcggcgaactccagttaccattggctcgggcgggggttag

SEQ ID NO: 8148 - DNA, 327 bp, Zea mays
  Peptide Sequence Number=SeqID_49927
atgaagggcgaggtcgctggggagtacgcgcgaagcattgccgcacggcaacctggaagcgagggtctcggcgtaattgtaccgcggtggggatttcacagcgcacgccaggcggacgaactgtggacgggtgcggtcggcatctcaccggaccgagccttcatcgccaaatcgagccgagcgtcgggaattctgttcgtaggctcgggctttggtctatcaacaagtgtgtcgggtagcgccggtgaggccagcaccggaggagtgggcggcgccgtcaggtctggtcatgggggtagggaagaagatgaatgcgtggccgtgtaa

SEQ ID NO: 8149 - DNA, 804 bp, Zea mays
  Peptide Sequence Number=SeqID_49928
atggctttttacctgctctctctttcacttatgcccccgcgctccctcctcccctcgccagaacggtgctcaaagtacggcgagaaattgcggctcacctggcgtggtggcgtgtcagggtcggcgagcggagcaagccggtccatggggcaggcgggtgtaggtcatcggcgagcttcaatccgggggcctggtgcattagagtctcgcggcaaccctcggggagcttggcgaggccttggagaagatgtcccgggctcggattgggcggtggaggctcggagtgaccgatcctcgtgcttcggcggcaggcaagaatactcggcgctcggtggtggctcggtggctcggctactcgacggcgccctgtgctcggcggcggctgcctcggctactcggctgctcggcggcacgagcacgatggctaccctatgctcggcggcttgctggtcgctgccgagatactcgctggtcgcctgcacgagcacgggcgcaccgcacggctggaagcctggaacttcaagtcttcaagcttggcggctggcactggctagggttagaaacttggagttggagacaagagaaagtgagagagagagaccaccagccaagagcccgagaggccgctggggcgttgtgcgcatgccgcaaggccgcaggggcacgggctgttcgctctggacttctggtcccggcctcctgggccgcaggtcgcttggacttggactgctggccacttgcgaaccgtggactgctgggtgctggccactgtttgggtccagatgtcatatgtccatcgggtga

SEQ ID NO: 8150 - DNA, 198 bp, Zea mays
  Peptide Sequence Number=SeqID_49929
atggcgatgaggtgtagattccagcccaaggcgctacgtgttcacgcggcggaggactttcaccggcgtaggtcgatagtggcagccatcaaactggcccgtacccaccgcccccgcaatggtcgcgctccagcgagcgatgacatccaaggtggcgtagctctcttcttgtggcgatggaagatgttcaaaatatga

SEQ ID NO: 8151 - DNA, 360 bp, Zea mays
  Peptide Sequence Number=SeqID_49930
atggctggtgataataagagtgaagagactgcgatgttcaagttccaagaggctatggagaagacaaatgttgcaaagatcacaaatgagttactagctagtttgcaagatgattccgaggatagtgaagattttgactttgatgaaactattgacgaagcggagaagcgaccatggaaaccaagccatgaaggtgatattgaggcagtgctaactgataagccaaaggttgaaacaccgaaggttccgtcgcctacacctacgaagcaaaatattgattactacacggagctttggttcatgatgagagtcttctcctatggcaaaggtatacaagacgaagatatggcccgaggatga

SEQ ID NO: 8152 - DNA, 303 bp, Zea mays
  Peptide Sequence Number=SeqID_49931
atggagcgaccacccgggaaaacagtgctaccacaagggtggtatgggatgcccttggctgactatctaggaaagcccgcccaccacgccctccgccagctcgcccaccgcatcgccgccagccagcccagcgcgctacagacgcgctgccgggagtggacacaatcaggctcttgcgcaagcaatgtcaacctcaacaccttgatgaacatgttcagtgttcttggtgctggtggtggccttggtggtcgaaatgcttctaatggtcctgttggggacttgttctcaaatgctatgaattaa

SEQ ID NO: 8153 - DNA, 282 bp, Zea mays
  Peptide Sequence Number=SeqID_49932
atgggcctcggcgccggtatttatagagagagggaggtgggagagagagagtcggggagggagtgggagaggccggcggcggccatcaatggtgtcggcggtttctccatcattggagagggagtggagggggagaggaaggggagagggcgccgttacttggcgtggggatgggatgggacgtgggggagatttgaggtgttacaaaacctaccccctaaaaagaatctcgtctttgagattacaaaacttctaaaaatagctgggggaattctgctgtga

SEQ ID NO: 8154 - DNA, 240 bp, Zea mays
  Peptide Sequence Number=SeqID_49933
atggcagacgggctgatgaagctgatggagggggagcacgtgggcccgttcaaactggggaacccgggcgagttcacgatgctggagctggccgaggtggtgcaggagaccatcgaccaccaagcagcgcagctgctggggactggggtggggccgtgggactgtaggagcccatggaccatggtccacgacttccgcgccggcgtcttggtaggcggagaccaacaacagcgcaattaa

SEQ ID NO: 8155 - DNA, 872 bp, Zea mays
  Peptide Sequence Number=SeqID_49934
atgcgctccggtcccggtcgtctttctttcgggcctctccgagtggtcaataaaccccgcctcccttctgtcatcccgtacgtctcgacctcgcagccgcaaacgcgaaaccctagcctcgagctctatctccggccacagctggtcaggttagcgacgaaggatgagcaggcgctggagccgcacgatctacgtcgggaaccctcccccggcgacatccgggagagggaggtggaggatctgttctacaagtatggtaaaattgttgacattgacctgaaggtccccccaagaccacctggttatgcttttgttgagtttgaagatcctcgtgatgctgaggaggcaattgctggacgggatggatacaactttgatggacaccgtctaagagtggaggctgctcatggtggtagaggtaatgcttcctcgcatgatcgttcaagtggctttggtggcggtggtggagcacgtcgtgttcttgtcactggactgccttcttctgcatcatggcaggatttaaaggatcatatgcggaaggctggtgatgtttgtttctctgaagtgtatcgcgaaggcggtggcaccgtaggaattgtggactacacaaattatgatgatatgaaatatgctataaagaagctggatgatactgaattcaggaacgcctttgggcgagcctatataagggtgaaggaatataacggcaaacgtggtcgctcctactcacgtagccgaagcccaagtcgtagttacagcaaaagcaggagtccgagtaaatcacccaggactcgccgttcatcatctagatcccggtcaagatctgtttcttctcgttcaaggtccccatcaaaaggacgttctccatcaag

SEQ ID NO: 8156 - DNA, 477 bp, Zea mays
  Peptide Sequence Number=SeqID_49935
atggcgccccgcacgctttgtgacgacggcggctctcagcccccttatggaagcaagaggatggtgaggctgacagcagctgagtccagcctcaggcgccacaggaagctccgcctcgcccgatcttgggcctcagcctcaggagaagtctccgcctcgctcgaccccagggctcggcccccgcttcggcctcggaaggtggactctgcctcgctcgaccccagggctcggcctcgacctcgacctcggaaggtggtctccgcctcgcccgaccctagggcccgacctcgacctcgggcggaatcgtgtcctcgcccgaccccggcctcatcctcaggaggagtctccgcctcgcccgaccttgggctcggaccgaccacaccgcaggagggaccccccggggccgaaacgccgatagttggcgcgctagataggggcctgctgcgtgttgacgaacaacttcccatcgagttctag

SEQ ID NO: 8157 - DNA, 651 bp, Zea mays
  Peptide Sequence Number=SeqID_49936
atggagggccacagcgcaatgctgggcacaaccctcaactacgttgctctgagactgatcggcgagggcccggacagtggtggagatgatggagcagccatggagagaggccgcaactggatcctacagcgcgacccaaactcagaggcattcaagctccatgttcctcgaatttatgattatttgtggcttgctgaagatggtatgaaaatgaagggttataatggcagccaactatgggatgcaggtttaacagttctggcaattgtgaataccgatcttattgaagagtttggtccaactcttaaactagcacatgcctttgttaagaattcacagatcattgacaactgcctcgaagatttgaaccagtggtatcgccacatgtcaaaaggtggatggccattttctacagctgatcatggttggtgtgtatcagattgcactgcaacaggactagaggcaactctattgttatcaacgatttctcctcaaatagttggtgaggcgatggaagttggtagagtttatgatggtgtaaattgtctcatttctcttatgacgctggagattgcaataaatgcctccacatcagctccagaggatgggataatgctgatttttttacagttgaaagagctcaacatgtag

SEQ ID NO: 8158 - DNA, 486 bp, Zea mays
  Peptide Sequence Number=SeqID_49937
atgcagtcggcatgcaaccgcgccaagtgggcgcaccctttcgactccaacgcgcccagcatggaggcccaggcccacacgtcatgcaaccggcgcgccggttgctacgtgcgagcaactgcaccgcccctcgcgccactaccgcacctcctcgactgcggaaccagtaccgcgactcgaggcaaccctgcgtatgacccaacagtgctagccaggcgcatcggtcacaggccagtcagccgcgggagaaggcgcgacgggaccaggaaaggggataccccgaaagggatccttctccgtgaaggaaacgggccccgagcccccctactgatcagaggttcgaaggccggcccctcggaggggttcaacagccgcctcagagcgctcgggctccgcgcccacaactggtcagaggttcgaaggccggcccccccggaagggttcaacggccgcctcaggccactcgggctccgcgcccactactga

SEQ ID NO: 8159 - DNA, 984 bp, Zea mays
  Peptide Sequence Number=SeqID_49938
atgctcaaggagtcgtgcccctatcatcaggggcccgtcaagcacacccttgaggagtgcgccatgcttcggcgccactttcacaaggccgggccacccgcggagggtggcagggctcgcgacgacgataagaaggaagatcacaaggcaggagagttcctcgaggtccacgactgctacatgatctacggtgggcgagtggcgaacgcctcggctcggcaccgcaagcaagagcgtcgggaggtctgctcggtaaaggtggcggcgccagtctacctagactggtccgacaagcccatcaccttcgaccaagacgaccaccccgaccgcgtgccgagcccggggaaatacccgctcgttgtcgaccccgtcatcggcaacgtcaggctcaccaaggtcctcatggacggaggcagcagcctcaacatcatctacgtcgagaccctcgggctcctgcggatcgatctgtcctcggcggtggcgttcttcaccaacatcatccatcgctttggggtcccgaactccatcatcaccgacaacggcacccagttcaccggcagaaagttcctggacttctgcgaggatcaccacatccgggtggactgggccgccgtggctcaccccatgacgaatgggcaagtagagcgtgccaacgacatgatcctgcaagggctcaagccgtggatctacgacgacctcaacaagttcggcaagcgatggatgaaggagctcccctcggtggtctggagtctgaggacaacgccgagccgagccacgggcttcacaccgttctttctagtctatggggccgaggccatcttgcccacagacttagaatacggttccccgaggatgagggcctacgccgaccaaagcaatcgatctaatcgagaagactcactggaccagctggaagaggctcgggacatggccttactacactcggcgcggtaccagcagtccctgcaatgctaccacgcctga

SEQ ID NO: 8160 - DNA, 192 bp, Zea mays
  Peptide Sequence Number=SeqID_49939
atggccctgctgcaagcggtggcggcatggcgctactgcaagggggaggtgagtggaggtgaagagcaatggcagcaagaggcgagcatcgctggtgagggcgagcagggcaacatgcggcgatggctgacagcttggacgactgggattaatataactcaagttagctccaaatccaccgacatggattga

SEQ ID NO: 8161 - DNA, 879 bp, Zea mays
  Peptide Sequence Number=SeqID_49940
atggcagattcgacggtcatcaacggcgaagtggagaatcagatggcggacaatttctacgacgctgatgaagccaaactcactgaacaggatagcaaaattaaagcgcttgaaagtgagaaactggacctgagcaacgagaacaaagagttgaaggagaagatgaaaaaggcgaccttagaaattgatcaactgcgaaacaaggaagaagaaatgaggcaagaaatggataactgggaagaagacaagaaggttctggaatcagtcgccgcgagatcggctgatctcgaaaccgaggttgcgaggcttcaacatgatctgatcacttcgatgagtgatgcagatgaagcgaacaagcagtcgatggagttgaagagagaattggaagagaaagggttggagattaagagattggacaaggaaatcactgaactgaagaaagagaaagttgagaacgagaagagagagagggagttggagaggaaattaggggttctagaagtgagggaatcggaggagaggagcaaaaatgttaggatggaagaggagctgaggcaacagctggatgtattcaagaataaagttaaggacctggaagcagaggtggcgagaacgagggttgaactggagacgactaaggaagaacaacgagaatccgaggagagggcgatgggcttcaagttaaagttgttggaattgaaggaggaggtagagaagaaggctgctgatggtatcaatgggaaatcaagagagattgttgagactgctgagagtaaagagaaagggctaaatgttccgccgcttgtggcagcaggatcggctgcagctgtccttgttgcggctgctgcggtgtatctttgctgtaggaagcggtcgtaa

SEQ ID NO: 8162 - DNA, 582 bp, Zea mays
  Peptide Sequence Number=SeqID_49941
atggatgcacagacagaattgtgcatgtttgtaggatatccaaaaggaacaaaagtaggattatcctacaatccaaaagataatacgattaaagtttctactcatacgactttcctcgagaaaagctatatggataactttaagcctcgaagtaaagtggtactcaaggaacttttaggagtaataaaacaatcaccaagttcatttctcgagaaagttgtagaaagacctataaatgatcaacagcataagggaatccatcctagtgagagagtttctaagaaattagacttcttcatctatgatggtagtatttataatacgaaagttaatcatgaggatgatgatccactcacttatgaggaggctctacaggacgttgattccaagctctggaaagaggccatggataccgagatggattctgtgaaatccaatacaatgtgggaacttgaagacttaccaattgggattaaacccataaggtggttacagagcattaccagagatcaaagaacagatatcagatatttcacaacatacagtgttcataacaaaattcaatcccaaagtcccttataa

SEQ ID NO: 8163 - DNA, 153 bp, Zea mays
  Peptide Sequence Number=SeqID_49942
atggggagccatcagttattcctcgttgatggttctgagccaatacgggggtataccacgaagatttaccactttaaggaccagctcctcaatcccaacgaatatctgcacgaatgtgatggtgtgagctttaaaaagcttagtgaatgttaa

SEQ ID NO: 8164 - DNA, 1026 bp, Zea mays
  Peptide Sequence Number=SeqID_49943
atggccaaaatggtgttgctctgcgtgctcgtctccttcctcctgatgcccttggcctccctagccctgacgcaggacttctgcgtcgccgacctgacctgcagcgacacgccggcggggtacccgtgcaagtccagcgtcaccgccaacgacttctacttccacggcctggccggccagggcaaaataaacccactcatcaaggccgccgtgaccccggccttcgtgggccagttcccgggcgtcaacgggcttggcatctctgcggccaggctcgacatcgaggtgggcggcgtcgtgccgctgcacacccacccggcgggctcagagctcctcttcgtgacccagggcaccgtcgccgccggcttcatcagctccggctccaacaccgtctacaccaagacgctgtacgccggcgacatcatggtgttcccccagggcctgctccactaccagtacaacgccggcaccggcgctgccgtgggcctcgtcgccttcagcagccccaaccccggcctgcagatcaccgactttgcgctctttgccaacaacctcccgtccgccgtcgtggagaaggtcaccttcttggacgacgcgcaggtgaagaagctcaagagtgtgctcggcggcagcggcctagtcctcgccctcctcggcggtggtgtcctcgagcgggtcgtcggtgatgggaaagtagttggtgtggtgccaggaggcttgggctccaaagacgccagctcttggcggtggatgctggcggctgcctccatctgggccgccttcgcctggcgcacgctccgccgccgcagcggcctagacgagtccggcctcgggctgatcctcagcctcttctcctccgctgccgccacctcagcggtcgtcctcgcccacgatggcggtgtctgccagcacaacgccgtcggggtcggggatgggttgtcctcgtcccgcggcgacgcttcgggcgcctccttgcagcatcctgtttcctgtggcggggtgcgagcatcgtgggtcccacgataa

SEQ ID NO: 8165 - DNA, 930 bp, Zea mays
  Peptide Sequence Number=SeqID_49944
atgcagctttttgcagccagaaatccatcgtttcacgccactgacaggccaagaaaagggaggcagattggggtgcggaggagggcgtccggatttgatgccttcgcgtctttcgccggcaaggtcttcgtggatgaggcgattggagcggaatatggggagggcttcgaaacatttcgaatggatggaccactcaaggttgatgtggattatctgaatgaaaaattgcaagagtgcttccttcaaaggataaggcatgctatgaagccggatgaggcgtttggtctaattttttcgtgggacaatgttattgctgatacagactcgctaaagttgaatgcttggagacaacttgctttggaggaaggtaaggatatcccaagtggtgctcatgtccggaagagcattattcatggtgctgctgaccatgttcttagaaaggttttgtactgggcaaaagaggaagataaaatggaaaaattgaaggcacgccttatagagttgtactacgagaacctgttcaaactcgatacacctgtagaaggattgagagaatggctggatgctgttcagacagcagggataccttgtgctgtcgcatcaccccttgacaggagatgcatgatcgaagctttggatcggatggcgctaagcaaatatttcaaggcgatcgtgactgacgaagatgatatggagtcgatagcaaatcgatttctgtcagctgctatgaaggcatgctcctgccccacttctaatcgttgtatgagttggtacaggcagaccttgccattggcaaagtacagcgagctctcagtgatcaacctcagaaggctgtttgcgaacaagggaatcagcttcatggacttgcagaagcagataatcgagaagtcacctcccaagaggaggctgacagtagacaccattttctga

SEQ ID NO: 8166 - DNA, 312 bp, Zea mays
  Peptide Sequence Number=SeqID_49945
atgtcgggtgggtatggtatgcccgtgtcgggcgaagggaggcgcggcggccggagcgacggcaagaggcggcggtacccggacggcgcggcaacggaggccaggtctagcggatccggggcgcgcggcaccggcggctgccccacgagatgcggcgagaggcagtggcgcacggtggggttggcggaggttcctgggttgcccatcgcggcgctaccctctggaaggcccggatcaggaactgccggaatgctggcggcgagtgcgagggggaagcgggactggaggggggcagaggcggcgtgggagtga

SEQ ID NO: 8167 - DNA, 1317 bp, Zea mays
  Peptide Sequence Number=SeqID_49946
atggcgccgacggtggaggtgttgacgtcagaggtggtcgtcccggctgaagagactccggcgggcagcatctggctgtccaacctggacatcgccgcgcgccgcgggtacacgcccactgtctacttcttccggcccaacggtgatccggggttcttcgcggcggatgtcgtgaagggcagcctcgccagggcgctggccgcgttctacccgctcgcggggcggctcggactcgacggcaccgggcgcgtccaggtcgactgcaccggcgagggcgcggtgttcgtgaccgcgcggtcggactacgcgctcgacgacctgatgcgcgagttcgtgccgtgccgcgagatgcgggacctgcttgtgcccccgacgcccgcgccgaacccgccgtgcgcgctgctgttcgtgcaggtcacgtacctgcgctgcggcggcgtcgtgctggccctgtccatgcaccactcggcgtgcgacgcgcggggcgctgcgcacttcttggagacgtgggctagcatcgcgcgcggggacgacgccaccaccgagaacgctcccgtgccaccgtgcttcgactacgggcggctgctcgccgcgcgcccgggcccggcgcgcgcggtgctgtacgaccacccggagtacaagcccgagccggagcccgtggacgccgacgccgtggccgcgtccgacgactacgcgagcgccatcatcgtcatgaccaaggcgcaggtggcggcgctcaaggcgcggtgcccgggggcgtccacgttccgcgccgtggtggcgctggtctggcagtgcgtgtgcctcgcgcgggcgctgccccccgaggcggagacgcggctctactccatgatcgacatgcgcgcgcgcctggacccgccgctcccgccgggatacttcggcaacgcggtggtccgcacgtcggtgtccgccacggccggcgaggtgacgtccaaccccgtgggccacgccgcgcggcgcgcgctcgcggtgacgagccagggcgacgactacgcgcggtcgctggtggactacctggagggcgtggacgccatgaacctgcccaggagcggcatctcgcgggcgcacctccgcgccatcagctgggttggcatgtcgctgtacaaggccgacttcgggtggggcgcgccggtgttcatggggccggcgctcatgtactacagtggcttcgtgtacgtcatgaacgcggcggggaaggagggtgccctcgcgctcgtgctgtcgctggaaccggagagcatgccggagttcaggaaggtgttcgccgaggagctcgcgagcctggaggtcatgtag

SEQ ID NO: 8168 - DNA, 993 bp, Zea mays
  Peptide Sequence Number=SeqID_49947
atgtccatctatttcaaacatgaattaaacattcaatataaactgtggatggacagcggttgcgaggccggcgggcagcgggggcaggagccggcggccggcgcggggcagggggagccgggcgcgacgacctcggggcgggggcgggagccggcggtcggcgcggggcagggggagctgggcgcggggaagggccaccgggcgcggcgacctcaggacgccgggcaggctcggggcaggggcgtcgggctcggggggcaggcgcgccaggcgcggggcagggggagctgggcgcggggaagggccaccgggcgcggcgacctcgggacgccgggctcgggggcaggcgcgccaggcgcggggaaggaggcggcgagctcgggggcggcgggcgcgggggcgtcgggagtggcggcggcgagctcgggaagaggacttaggcggcgagaagaggagtttggcggcgggcgagtggaccagtttgaccggtataaaggggacagacatactgaaccgattccgtggtggcggatggagtgggacgacgactgggtggcccccgacaagctgcagcacgccgtggcctgcctcctcatcgccctgctctccgccgcgctcgccgcccgcagcgcccgccctggcctccgccgccgcgctgcggctgtcggctccgcggcctcgctcgcggccggcgccgccaaggaggccgcggacgaggcccggctcttcggctccgccggcgcctcgcccaaggacgccgcggccgacctcctgggcgtcgcggccgcggcgctggcgctcgccctgctccgccgcctgcgccgccgtcgcgagaggaaggcgcgcgaggacggggacggggacggccgcggcggcgccgccgtctccatgggcttgaaaaaaaaacggaagctcacgaactgcttggctcaaagcggctcgcgaggctcaaacaagctgagtcgaactggattttcaagctcgttgatgtag

SEQ ID NO: 8169 - DNA, 153 bp, Zea mays
  Peptide Sequence Number=SeqID_49948
atggaggccacgccgaagaagaagccatacccacttgccacagtcgcagaggaggtgaggctggctggcgctcgaacccggtaccacattccactcgccgtcgctgacgtgcctgtccaagatgggattgaaaatcaattggacactgattga

SEQ ID NO: 8170 - DNA, 216 bp, Zea mays
  Peptide Sequence Number=SeqID_49949
atggccgctggtggtcttgcggcggagcacgagatcaccatggtgagtcgccgaggcgcggtccttcaccaggtggtcatgaagccgcgagatttccggcgcggacgccagagttctgttgaggcgagaacgatgcgcgcgcggacatcgacggagtttgttggggagaagcagatgaatccgacatgcgggacccagccaccagtgaccccatag

SEQ ID NO: 8171 - DNA, 624 bp, Zea mays
  Peptide Sequence Number=SeqID_49950
atgtccattcggctacccatgagacaactcaagagacaatttcaagctttcatgaacattcattcagctgaattgaagagaattcaatgtggaagttacttgttcctagaatatgatgtgagcttgcctacgaaccaagtagagatcaaacaagaagatattaagctacctcttgcccttgaagccgacccacaagtgtggataaatctaagtagctgtttagaatatcgagagttggatttgagaggagcccagaacgacgtgaaacaagcggaggagcttcaaatgctgcgggtggaggagttaatcttcaaccgagaaggaatgttcccggaggtggagtgcctgatcttcaagtgcaagcaattgtatgagagatctctcgattgttccaaccccaatttgattctctcaatgagtgaatggaacaaatggaagaaggaagccaatgtgccaacacccctcctattccaagaagagagcaagaacgtccatggcaacatgccaatgatttatacgaaccaagtgacgttgaaagtgaacgagcatcgcgacaaagtgcgaggtgacaaggtcaatgagcacggggacaaagagaccgagtgcggctcgatgatgatttga

SEQ ID NO: 8172 - DNA, 162 bp, Zea mays
  Peptide Sequence Number=SeqID_49951
atgggcctttccaagtactcgagcggatcaacgacaatgcctataaaattgatgtacctggtgagtacaatccgtcttcttaccattgatattcctttggaggggatattagagccgtttgaagggagttgtgatgtctttcgggatttcaaggcttcttag

SEQ ID NO: 8173 - DNA, 102 bp, Zea mays
  Peptide Sequence Number=SeqID_49952
atgactcaaaggccggctgataatgatcgatatgttaagaactgtcgcaatggcaggtctcccaaggagacgagatggttgttccatgacgataaagtataa

SEQ ID NO: 8174 - DNA, 633 bp, Zea mays
  Peptide Sequence Number=SeqID_49953
atgaaagaaaaagaagatgagtgtgagatagaaaagaaaattgaaaatgagattgagaataaaaacgagtgtgaaaaagaaaagaaaactgaaaaagagagtgaggttgaagaaagaaaccagagtgcaaaagaaatgagtgatatgataaaagaaagaggatttgaaaatgagttggaaaaagaaataagagaaaaggatgaaagtgaacaagcaaggagtgtttttactaaccatcctatgagttttcattgtattgattctacttttcaagtttctcgaaattccattgatcaatttcaacttcaatacttttctgaggagagacgatttcaattagtcgagaaaggtaagatcgtagatgaccctagtccacaagtgcttaaaggtaagcatggtaagggttctatgttaatcgagcttcaacaaattcatatccatgataatggtgagattgccgaagacttagttagtaaaagactttcctatcttgatttgtctaggtatcaatctttgattggtgatggctttgatttggatgatggattgaagagtttgtctcatgatatgtctgatgtttacaagttcgatgatgaagcaattctgattttcaagattatgcctttcgactga

SEQ ID NO: 8175 - DNA, 438 bp, Zea mays
  Peptide Sequence Number=SeqID_49954
atgggcaagagcaagaagggcggaagtttgtcgcaccattccagcgacaagcggaagcgcgagccgactcctccctcggaggacttcggcgattccgagtattcgaaagaggagttctcctccgagtctgaggggtcgccagtctatgcctctcccccggcgtcgtctgacgactcagacgattctcagggcctcgccgctgaggtgtggacatacatccaggtcgtcgagcacgtcgggctcgagggatcggatgagtcggaggtctccttggatgaggagaactcgtcggactcatccgaggagggggcggcggtgatggcgatgatgagggcgacgacgacggcggaggcgacggcggtgacgacggcgacggcggcagaggcgacgacaagggcggtagtggcagcagcaagtgggaaggaggccaactcataa

SEQ ID NO: 8176 - DNA, 330 bp, Zea mays
  Peptide Sequence Number=SeqID_49955
atgcggagttcggcgtcttccagggctgagcccgagtccgagccctggggtcgggcgaagcggagttcatcgtcttccggggctgagcccgagtccgagccctgggtcgggcgaggcggagcttcctatggcgctcgaggccggacttggctgctgtcagccgcactctaccgagtggcacagcagtcggagcggcgcaggcggcgctatccttttgtcaggccgctttgtgctgatgggggttaccagctgagattaggagtcttgggggtacccctaattatggtccccgacaactatcgtccctgcttggtagaccggcgcccctga

SEQ ID NO: 8177 - DNA, 306 bp, Zea mays
  Peptide Sequence Number=SeqID_49956
atggcgggaaagatgttcacatcctatgaagcaaatgaagatccaaataatgcagtaacatttagtgatgcttgggaaattgcacatgcactgcacgcgtggcggagcctcttcgagtttccatgcagcacgattcgtttcccaacgcgttgccgctgcatgaaacgcaatgaaggcaagccgccgcctagctacctccacccgctgcagcctgcgaacatccgtggcaccgaactcttcggcgtccacatctatggcaccgacctcgacatggagatccttagcaccaagattgctgccacgtga

SEQ ID NO: 8178 - DNA, 534 bp, Zea mays
  Peptide Sequence Number=SeqID_49957
atggaggcctactgcgacgaagttcggcgcctggaagacaagttctacgggctggagctcaaccatatcgctcgatggtacaatgagactgcggatgagctggcgaaaatagcctcagggcggacaacggttccccgggacatcttctcccgagacatacatcaaccctccgtcaagatcgatgacacgcccgagcccaaggaggcctcggcccagcccgaggaggcctcggcccagcccgaggtatcctcggccgtcgaggcacctcgggccctcgtcggaaacgccttccgacaaggtttctactggccgaccgcggtgcccgacgccactaggattgtacgctcctgccaagggtgtcaattctatgcaagacagacgcacctgcccgctcaggccctgcagacaatacccatcatctggccgtttgccgtgtggggtctggacctcgtcggtcccttgcagaaggcacccgggggcttctcgcacctgctggtcgccatcgacaaattctccaagtggatcgaggtctga

SEQ ID NO: 8179 - DNA, 657 bp, Zea mays
  Peptide Sequence Number=SeqID_49958
atgatgaccgcgtcaaaaaagggacccggaaggggatatttcgaagggatccttcccagcgaagggaagcgggccccgagccctcctactgatcaggggttcgaaggctggcccctcggaaggccgccgcagagcactcgggctccgcgcccactactgatcaggggttcgaaggctggcccctcggaagggttcgacagccgccccagaccacgcagagcgaaggatgactctgcctcgggcgcaacaggaagctccgcctcgcccgaccttaggcctcggcctcagaaggaggtctccgcctcgcccgaccccagggctcagcctcagcctcggcctcgggaggaatcgcgtcctcgcccgaccccggcctcggcatcaggagaagtctccgcctcgcccgaccttgggctcggaccgtccgcgccacgggggatacatcattatcctaccctagctagctcaggctacgagggaacaagaccggcgtcccatctggctcgccccaggctcaggcacttctccgacggccacgttatcgcgtacacagggctcaagcacttctccgacagccacgttggcattgtcggcgtcgagttcttgaagttgggctacgcggagagggattggctaggtgggccgaaaggtgaactctag

SEQ ID NO: 8180 - DNA, 1869 bp, Zea mays
  Peptide Sequence Number=SeqID_49959
atgtcgagacctaataaagctccatttagtggagtgactgaggatttgaaaggaagagcaggttgctacaaacaagactggaaccatggatttcgttctggtttaaggatactggcacctacgctctacatattctttgcatctgcagtccctgttatagcctttggggagcaattgagcaaagatacagatagtgcactaaccacagttgagacattagcatcaacggctatttgtggcatcatacattcaataataggtggacagccactattgatcgtgggtgttgcagaaccgacaattatcatgtacacctatatctacaattttgccaaaaatcagccaaacctgggagaaaaaatgtttctgccatgggctgcctgggtttgcatctggacagctgttatgctgttcctcatggcaattttcaacgttgcagctattctaaacaaatttaccagaggcgataaagcatggcaaaggagcttaattgcggactacggtgttccactgatggtgatactttggacagcattgtcatattcattgccaagcaggatcccttcaggggtccctaggaggctcttcaccccacttccttgggaacccaagtcgctccagcattggacagtagcaaaagatttgttttcagtccctacagtacatatattcctggctattgtgcctgccaccatggtcgcagggctctatttctttgaccacagtgtagcttcccagatgagtcagcagaaggaatttaatttgaagaacccatcagcctaccattatgacattttggtcctgagcttgacaaccttgatctgtggtcttcttggcattcctccatctaatggagtactcccccaatctccgatgcatacaagaagcctagcggtcctcaagaggcagttgcttcgcaagaagatggtccaaactgccaaggagggcatgatgaataatgctaccagttccgaagtttatgtcaaaatgcaagatgttttcataaaaatggaccacggaggcgactctgtttctgctcacaaagaactgaaggacctgaaggatgcaattattccagaagggaatggatcaggaacagtgcctgaagtatttgatcctgaaaagcatgtagatgcttacttgcctgtccgggtgaatgagcagagagtaagcaatctgttgcagtctctgttgattgctggttgtattggagttacaccgctcattcagaagataccaacatcagtcctctggggttacttcgcctatatgtccatcgacagccttcctggaaaccagttctgggagaggatacaacttcttttcatcacgcctcaaagacgctacaaggttcttgaaggagcacatgcatccttcatggagtcagtgcctttcaacacaatatgcaccttcacactcttccagctaatctatctgttgatcgtctttgggatgacatggataccagtagcaggaatcctcttcccactgctcttcttcttcctcattatcatcaggcagcacttcatcccgaaatattttgatccgagccacctgagggaattagatgcagccgagtacgaagaactgaaaggttttacacctgatccatcagtgtgtgaggacgagtctgttcgcagcggacatgctcagcctggatatgcttccgaaatactcgaggaattcacgactcaccgtggagagctgaagcgcaggaactctaccttccgtgatgggagactacttcagttttgtgattttgatggtggaggatataagttgcaggaaatggtcttctccatgctcaagcagtacttctgcaaatacaaggttgacttgtctcttgtggttcgggttgatgatgagtga

SEQ ID NO: 8181 - DNA, 291 bp, Zea mays
  Peptide Sequence Number=SeqID_49960
atggagcagtgtcccgggctggagaggttgatggagactacccatctggagcttgacgggaagctgttcgtcaacacgcagcaggcccctacctggcgcgccaactgttggcgtttcgaccccggggggtccctggaccgacgagtaaattgtcactgtgtgtcccagcccagatgggtcggcgtttatgcatccgggggctcaagctggattatcgacagcggatgcacaaaccacatgacatgggagaagaagatgatcacctcctacgtcaagaacaaggattcctag

SEQ ID NO: 8182 - DNA, 204 bp, Zea mays
  Peptide Sequence Number=SeqID_49961
atggacaacatcagcctggactacgaattcgaaggctcagccgcggacccgaacgaagctcaggagcaggagccagcgctgaccctcaacttcacggtcaggacggtggccggaactgaagtgcccacgagaaggcgctgtcgagggcggcagacgcggtcgtcgccgcccacgaccagagctggtcgggccttgacggagtga

SEQ ID NO: 8183 - DNA, 474 bp, Zea mays
  Peptide Sequence Number=SeqID_49962
atggcgcggctccggcgtggtgcgcggcgcgtcctcccccactccgagcccctctccctccttgcacgcgacgccatggcgcagtccgccctgcgcgcgtgccccagcgcggttcgccgagcccgcgacatggcgcggcttcggcgcagccgtggcgctcgcgcccccgccccggcacggcggccccctgctgccctggcgtgctcgcggcccctcccgtgcatctgcggcacgcagcgcgaccatggctctcggctagcgcgcggcccgcggctctcgcgcgcggcatgcgcgtctgcggcggctgggccccggcgcgaccccgctgcctacgcgcggcgtgcccgacgcagcttgcccgcagcgtgcgcacagctcgttcgcggcgcgctcagcgcggccagctcgtggtgtccctggccccagtcagtgcggccttgcgcgcactggagcttgcgcggtgtatgcggctag

SEQ ID NO: 8184 - DNA, 846 bp, Zea mays
  Peptide Sequence Number=SeqID_49963
atgacattagattatcacttcaaagtagagcaggaagcaggttcatccacctttggcttctttggttttaacggaactgctggtgtctggagaacttcttctatcaaggaagctgggggctgggaggatcgaaccactgtggaagacatggatttagcagtcagagcaggtctgaaaggatggaaattcatctatgttggggatgttaaggtaaaaagtgaactgccaagcaatctgaaggcatatcgccgccaacaacatcggtggacatgtggggcagcaaatttattccggaagatgggagcggaaattattctgactaaggaggtgtcgctgtggaggaagctgtatctgatctacagcttctttttcattaggaaggttgtcgcccatgtggtacctttcatgctctactgcgtaataattcctttgtctgtgctgattcctgaggtcactgtccctgtatggggggtggtttacatcccaacaacaataacacttctttacgccatcagaaatccaagttctatccacttcataccattctggatcctttttgagaacgtgatgtcttttcaccgaacgaaggcgacattcatcggcttgctcgagctcgggaatgtaaacgagtgggttgtcacggagaagcttggtagaaccaagcctgtgccacaaatgcttgaaaagcctcgctgcaggtgcaccatatcagagattttagttgccatcttcctcttcttctgtgccacatacaacttggttttaggagacgacttctatttcgtttacatatatttacaggaaatagcatttcttattgttggcaccggtttctgcggtacataa

SEQ ID NO: 8185 - DNA, 255 bp, Zea mays
  Peptide Sequence Number=SeqID_49964
atggctggcctgaccccgagatcggcgcggtttggtgaagaatctgttgcggccggcagaggcgatgtctacgatttcagcgaggaaacggagtttgattctatcaagcgcgatggggaagaagtgtctgggccaactaggcccactcgccaggggcaaacgtcaacggagcggctgatggtttcaacgcccgcaggacccacctgtcagttgggacagatgcgcgtgggcgcgcaggctgggctggcatggtga

SEQ ID NO: 8186 - DNA, 411 bp, Zea mays
  Peptide Sequence Number=SeqID_49965
atggcgcagagcacacgcggccgcgctctcgtcgtaggggcggcacagcgactcgatgtgacaaatcccaatcgaaggatgcaacagggagcagagataagggcgagatcggaggataggttctcaccgatgatggcggcgcagaaagttcggcccacggctgcatgcggttccatggtgaagcaccaattccggcgagaaattagaagcgctccaaccctcaatcgagcacgacgaggccacatatatgtgtggtgggacccctcgctgccccagtaccacctgtcgaggctggaggatcgcatatgggcagatcaatggcggcagcggcaatcacatctccccgcaccccccatccatgcgcctacggcaccaagctatacacggcttcagctggttggggagtcataa

SEQ ID NO: 8187 - DNA, 213 bp, Zea mays
  Peptide Sequence Number=SeqID_49966
atgaccattgttggccaggaatccagtggagcacaggactgtccggtgagtccgcagacagggaagttttttagcttccttgtggagaaggcatcagctcctaggactcttaggtctataaaaggagcccctaggcgcatctcctggtacccaagcattctaagagcactctacaacttcaagactccacgaccatgctattctagtgtttga

SEQ ID NO: 8188 - DNA, 369 bp, Zea mays
  Peptide Sequence Number=SeqID_49967
atgccctccttgcccatcatcgcggagtgcccttcctcggatcgcaagaacaagaagcccgccaccgtcgattcgctgtggtaccaacgaagtggcctcggtttggggccagggtgctacacggcgtcgtgctgggggttaccatgggcgcgctctacgggattggtggccggagtaggaccaatttgtcaccgtggtcgtggatggtcgcggctccgccttgtgtcgtggccaggaggaattgctctgagaatcctgtcccgagcccttataaagacagtgcgcctgggacctgaattttgcagagaaacccccatagaactacagaatcatgcgcgcagtccagaaccgtgggaatgtgataaatga

SEQ ID NO: 8189 - DNA, 369 bp, Zea mays
  Peptide Sequence Number=SeqID_49968
atgtccgccgcgggtgactgcgtaggattcgctggtcgttgctcctgggcagctccactcgatccgagatcccgggctgcgtccgccgccccagtgccttacccagatgcatggtgctacacggcgtcgtgctgggggttaccatgggcgcgctctacgggattggtggccggagtaggaccaatttctcaccgtggtcgtggatggtcgcggctccgccttgtgtcgtggccaggaggaattgctctgagaatcctgtcccaagcccttataaagacagtgcgcctgggacctgaattttgcagagaaacccccatagaactacagaatcatgcgcgcagtccagaaccgtgggaatgtgataaatga

SEQ ID NO: 8190 - DNA, 558 bp, Zea mays
  Peptide Sequence Number=SeqID_49969
atgccccgcgcgcgcgcttccactgtgctaaaccctagcctccagctcgacccgcgccgacatgtagcccccaactgtcagtcgtcgtaccgttccagcagcgcccgtgcgtttagctctagggatgaccagtgggccccactgggcagcccctctactgggttcatccaaacgtgcgcgaactcctattcttatgccgacaaggccccatcatgcagtctcccggtccacgcactgcctgaaaccttcaatgactggtgggacctgcgcatcagattgactatgtccaccttcactccctttgttccgctgcctggtggccccaggctgtcagattcctcctcctccttcgccgtgcatgtcgggggccgtccctgcgtagccgcgcccaggacacgaccccgtccccagccccgcgctccctggccgctcgccgagccggcccctacgcctgctcctacgcaccagccgcgcgccctgcacgtcgggcagtcggccgagcccgcggccgagtcgccctctcccaaccgcgcgttctgcaccagtgcccgcacgtag

SEQ ID NO: 8191 - DNA, 411 bp, Zea mays
  Peptide Sequence Number=SeqID_49970
atgatgggcaaggagggcatccggtgcggtcataggtggacagtgagagggggtcgcaacaagactcttttatggctaggggtggcacggatttatagctccaagcccgggatctcggatcgagtggagctgcctaggagcaacgaccagcgaatcctacgcagtcacccgcggcggacattgcgtcgttcagctgagaccggttcagcgtcgagcgagtggggaagaaggaaacccgccgacatcctgggcccgcacggaagtgaaggaaacatggccaaacagggggtaggggctgacccgtgggtccaaggcgtcggcgcccaattcctggggcgctcgggcgcgctggcgtcgcaccgttgggagagggctcacgcggctcggccagccggggtcgtgcgggtatag

SEQ ID NO: 8192 - DNA, 198 bp, Zea mays
  Peptide Sequence Number=SeqID_49971
atgagctcccccgcctgcgcacgaggaccgactgactccgaccaccgccagcgacgaccgaccattgacatgaccgtcgtgacctccccgacctccttggacacctcaccgaagctagatcgccgccggtatcttcggattcggatcatgagcatacagagcatggtcaggacgaagcctgagcgagacgaaaggtga

SEQ ID NO: 8193 - DNA, 747 bp, Zea mays
  Peptide Sequence Number=SeqID_49972
ggtgggcgtgggctccaagatacactcaaagtgcactccaagaaatttgttggaatacttaatggcattgacacagatacttggaatccgtctacggataggtttctcaaggttcaatacagtgctaatgatctatatggaaagtcagcaaacaaagcagctcttaggaagcagttgaagcttgcttccacacaagcttctcaaccattagttggttgcattacgaggctagttcctcaaaagggtgtacatctcatcaggcatgcaatatataaaataactgagttgggtggtcaatttgttctgctgggttcaagtccagtacagcatatccagagagagttcgagggtattgcggaccaatttcagaacaacaacaatgtcaggctgcttttgaagtatgatgatgctctggcacatatgatctttgcagcatcagacatgttcattgttccttctatgtttgaaccatgtggcctcactcagatggtagctatgcgatatggttctgtgccagttgttcggagaaccggcggtttgaatgacagtgtcttcgatttggacgatgaaacgatacccatggaggtgcgaaatggcttcacctttttgaaggctgatgagcagctgggatacttcagtttctcaatacgaagaaatctatcagaaaacagccactcgagccagggcagcggcataaacagcagagacattgagacagttccctgctgtctccatgaagtctcctag

SEQ ID NO: 8194 - DNA, 159 bp, Zea mays
  Peptide Sequence Number=SeqID_49973
atgcaggcggcatgcaaccgtgccaagtgggcgcgccccttcgactctaacgagcccagcatggaggtccaggcccacgcgtcatgcaactggcgcgccggttgctacgtgggcagcgagggagccctctcccacggcgtgaagacggtgcgcccgtga

SEQ ID NO: 8195 - DNA, 351 bp, Zea mays
  Peptide Sequence Number=SeqID_49974
atgtggaatactgcaccaaaagttctcccacagtttgttcatgtgcatcagaaggtattcacaccaagggaggtgatcctgctagagcctgggaccggatgcagggaactgtggcggcttgcaggacctagcggcggtgccaaaggttcaacacaaaccaataaaaagaacaacccagggttcaaaagaaaggagcaaaaggaaaccgaagcgcacctccgctataattcaccggactgtccggtgtgccaccggactgtccggtgcaccagcggagcaacggctatctgcgcgcaacggtcgactctgcaaagtgaacagtggatttcagatgtcagagcagcaagttag

SEQ ID NO: 8196 - DNA, 231 bp, Zea mays
  Peptide Sequence Number=SeqID_49975
atggaccaacgccaggcgggggcgctagccttctacatcctattctcgctctttgtgaagagcttcgtcatcatcttcgtgatcacggtgctcctcgcagcgcttgacttctgggtggtgaagaacgtcagtggcaggatactagtcgggctgcggtggtggaatgagatcgatgatgacggaaacagtgtgtggaagtttgaatgccttgatggggaggttgtaacttga

SEQ ID NO: 8197 - DNA, 1368 bp, Zea mays
  Peptide Sequence Number=SeqID_49976
atggcaggcgccaccaacggcggaggcaacggcggaggcgggaaggtggtcagcatgccgctgcagtacttctgcgtgctggcggcggtggtggtggccgtgatggtgctgtcgctgtcgttcatgtcgccggcggccatggtggccgtccgccagaacctcagctctgtggcggccgcccccggtggcagcagcaacagcagcgccggcggcgccggagcgggaggcgccgccggcctggccaaggccgcgtcaccgccggcgggctggaaggagaaggagcaggagcaggagcaggagcaggcgcggcggccgcccgtggtgctgttcaacttcggcgactccaactccgacaccggaggcgtggcggcggccggcgggatacggatcatgccgccggagggccgcacctacttccaccaccccacgggccggctctccgacggccgcgtcatcatcgacttcatctgtgagttcccgctccccatacaattcaacaccgctcccgccgctggtgagagtctgggcacgcgtgaactgaacccatacctcaggggaattggttcggactacagcaacggcgtcaacttcgccatggcaggctcgacggtgacccacggcgtctctccctactccttgaacgtccaggtcgaccagttcgtctacttcaggcacagatcccttgagatgttcgaacgaggactggaaggcccggtgagcaaggaggggtttgagagcgctctgtacatgatggacatcggccacaacgacatggttggtgtggcgcacacaccgtccgatcagtgggacaagaagatcacagagatcgtcggcgaggtcagacaagccatctcgatcctgtacgacaacggagcgaggaagttctggatccacggcacgggcgccctggggtgcctgccggcgctggtggtgcaggagacgaagggcgagcaggacaagcacggctgcctcgccggcgtcaacagggccgccaaggcgttcaacaggaagctcagccagctctgcgacgacctccgcttccacctcaagggcgccaccgtcgtctacaccgacatgttcgccatcaagtacgacttcgtcgccaaccacaccaaatacgggatcgagtggccgttcatggtgtgctgtggcaacggcgggccgccgtacaacatgaagcagggaagacccggctgtggcgacctgtgcccaccggaggcgaaggtggtcagctgggatggcgtgcacttcacggatttcggcagcggccttgctgccaagcttgcgatgagcggggagtactccaagcccagggtgaagctggcaagcttgatccatggcggatccaagaaaacgtcagactcttga

SEQ ID NO: 8198 - DNA, 414 bp, Zea mays
  Peptide Sequence Number=SeqID_49977
atgtccggtgcaccagaggactccagctcaaactcgtcaccttcgggaatttccagaggcaactccgctataattcaccggactgtccggtgtacaccggacagtgtccggtgcaccaaggaagagcggcctccggaactcgccagtctcgggaattcagaacggcagctccgctataattcaccggacatgtccggtgtgcaccggactgtccggtgtaactgcggggcaacgactacttccggcgccaacggctacctgcagcgcatttattgcgcgccagcgcgcgcagaggtcaggcacgcccatgctggcgcaccggacactcaacagtacatgtccggtgcgccaccggacatcaaggcgggcccagaagtcagagctccaacggtcggaacccaacggctttggtga

SEQ ID NO: 8199 - DNA, 2313 bp, Zea mays
  Peptide Sequence Number=SeqID_49978
atggccgacaaggagaagttggagtctgaagaggagtacgagagcgacctcgacgacgcacccctctccgcgttgcggcgccgggacgctgcgagcgatgacgaggacgaggatgaggacggagggatgcccttgaggcggaggaaggctggatccgacgcagattccgacgggcagggcgccgccgaggtgtacgacgaggatggcgcgtacgaagaaagcgaggagtacgaggaatacgagtacggggggttcaaagcagggggcggcggagtgcgcggggtggctgtcgaggcggttgccggtgcgggccatgaggaaggcgaggcgggggatggggaagctgaaaaggcgggtgaggcagcgccaggaggcgaagaggaggacaagaaggggaacgaaccctactccgttccgacgaccggcgccttctacatgcacgacgaccgcttccaggagggccgggggcgggggcgggggcgccaaaggagaatggtgaacagtagaaggttatggagtcctaaagatgagcaagcctgggttcatgacagatttgatgagatggacctgcatgattttcatggtgacaatccaaaaagaaagcagggaggtgtctttagaggacgtggtggtggacaaggtggtagaactcgtggtattagccgtggtaacttcagaggcagcagaactcgaacatactatcatgatggtagcaagaactacagctatgttccaaaggaatctcatgcataccgtgataacaccaagaatgcccatcattcttcacacattaatggaaagaatagagttccaaaaccatctcgtgaccactatgatggtgctaaaagttatgacattgtcccaaatgaatctcacatttaccatggtgatgctaagagccaaaaaaatgcaccaagagtagttcgagggagaggctccaagcgttaccaaccacgcttgaaaagcacctctgatgtatcttcagtgcaaaataccaaatctcagagtcttgaaggcacttcgtcaaatgcaaacttggtaaaagatgaagctcaaggaccaaattcacgacttgagcaagtccttcctattaagcagactgttgcatcaaacttgaattcagcttcgccaccattttatcctgcgaggtcatccagtcaagagtttgcagttggtcaaggagagaatacacaagaacttagtactaacctagtaagaggaaaggcttttgtgccatcggggcatgttgaagctgctataaatggcatgaatagacctgcactgcttccacctgcatcgtcatcaaatggtccatttcctgtagccactaatcaagtcaatagagattatggccatcctgcacatccaattgttcaacaaaacccagttcaaccccctacacgatctgcacccaggatgcctgcccagatgtttggtgcaacattcagcaatggcagtaaaatatcacctgcacaacctacatcaactattttagatgatgacgctgaaatttcttcacctagtggatcaaacaaatatgattctcggttaacagttaaaggacaacctgatgaccaaggagaagagcgagcttcgtttctctatggtggggctcgtgttcttggggctacaagcgcaatgggaatcacacttggtgatcaaaattttcatggtaccccagcattgctgccagttatgcagtttggaggtcagcgaccagttggacgtggtgttccttcaattggtatggctctgccaggatttgtgtctcaacagcaacttggtatcaataattctgagatgacttggctaccaatattgactggtgcctctggagctctaggagcaccttatggttcaccttatatagccgtcgatggaagttattactctcgaccgcctgaacaaccatcttcatcagtttctaatagagaatctagtgcaaataatgcttcttctctgaagtcccaagaaattacagaggttgcaggcgacgcaagaactcaacaccaaaataaacctcgtcgacggtcggtccgtaagtgtgaaggtcttgatggaaatcgtgaggacggaggtctcggtcgtactgcaaagctcgtgtccccgctgtacagtgtacatcacgtctctgactgtgtttgggtgtgcgctgcctctgcctacgaactcttcggtggttgtcgcatttttgaactgacaaataaaaaagaacgtgttgagcaccaaattgagaagggcggacggtccagcccggtccggacagtccgcgcctgtgggctgcacggtctgcgcaagcgcagaacagattag

SEQ ID NO: 8200 - DNA, 654 bp, Zea mays
  Peptide Sequence Number=SeqID_49979
atggcgctttacacttcacatgagcttccacctttgcgcacatatgagacacactcggctttatcctttaaatccgggtgtgacacatcgggagagatcgagcaagctggttttcctgaggcgctaaggccagagaaattctctggtatgcacttcaagaggtggcaagtcaaggtcatgctctggcttaccggtataaatgtgattcatattagtaaaggcaaacatgagggcttattgacttctggagaggagaagaaacacgtcgatgccaatactatcttcattggagcaatttttagtgtccttgttgaccgactatgtgatgcgaatatacattacacagacaagaaggaactatgggatgcacttactgtgaagtatggtgcattggatgctaggagtgagttgtatatcatggagacttttcaagattataagatggctgataatcgctctgttgtagagcaagcccgtgaaatacggtgcatagctaaggaactcgacctccttaagattgtctttccatatcgtattgtggttgggtgcattattacaaagtttccttcttcacagaggaacttcaccacttctctaaaacataagagacaagagatatcagttgaaaatctaatggcatctcttgatgtttag

SEQ ID NO: 8201 - DNA, 246 bp, Zea mays
  Peptide Sequence Number=SeqID_49980
atggttggcatcgaaacaaatgttcagttaattgtatctattgctatttcagaatattttcatttttttctggcattatgggaaaatagcagtttgtattctgttcacgacagattggagtatattctattcatcggagaaaggatacctagctcagatggaagtgaatcactggtgttcaccatgagggactggacgacaactataggtggacctccgccgtgggcgcatgtggtgtgccggtga

SEQ ID NO: 8202 - DNA, 465 bp, Zea mays
  Peptide Sequence Number=SeqID_49981
atggcacttgatgaggacatggtgggtagtggcaacaaggacactagcgatgactccacctctaaggtgtctctttccattgatgatctcaccgttgagacttgtcctagcttgcagattgagctagtggagaagaatgctaggataacctcgcttgagaaggctaactcaagtaagagagatgagcggcagggttctaagttgaacagaaggaacatgaaccgccccactcatggtgttcatgatcctcctattcaaagacatcatactatgcctagaggtgctttgcctcatgctgccaggcctcaagaaacgcaatgtcttaacctttattcatcaaagtacaacgaaacatgggcatccttccataggaagatgaccgagggtatcactagactagcatccatcaagttcatcatcacaatcttcatctgtaaacgtctgatcaaaattaagcaagggtga

SEQ ID NO: 8203 - DNA, 357 bp, Zea mays
  Peptide Sequence Number=SeqID_49982
atggacgaggttgctgagggaggcgaggaaggcatgctccttcaccttggacttctagaggtacttcttcttgagcgcctccttgtcgaaccttccattggacttgtgcttgctgaaggtgtactcgtgcttgcccttgcaccggccagagtggtggtcgtgctagccaacatccgacttgccctccttcgggcaactagcgatgaagtggtcggggtcaccacagttgtagcatccatccttggacccaccacgccattgattcaggtggtggttgtggaaccacgtgaaccgactggccacaagcgccaactcctcgtctccaaggctctccacttgctcctctataatggttaa

SEQ ID NO: 8204 - DNA, 432 bp, Zea mays
  Peptide Sequence Number=SeqID_49983
atggagtattcggcaaagacatcacttccactctacatattcgatattatccttccttgccggtgccaaaggttcaactcaaatcaatcaaaagaacaagttaggtctcaaaagaaaggagcaaaaagcaaaccgaaggctgccctggtctggcgcatcggacagtccggtgtgccaccggacagtgtccggtgcaccagggtgattcagctcgaactcttcaccttcgggtttcccaggcgcaccttcgctataattcaccggactgtctgggggctcgagcggtttctcgagtgcctttccgtggcaatgagattgatggttcttggttttgactctggtaatggttgtcagcattgcaaccactgctcaggagaagatgaagccgtggaaggagacttccaggagttccaagactacgacgagttttag

SEQ ID NO: 8205 - DNA, 168 bp, Zea mays
  Peptide Sequence Number=SeqID_49984
atgtcatgcataaattcacctttcgagagctcagagtttcgtttagcttatcctttgaagtaccttcgagctatcattcttgtggagccgaagacgctggcgaaggagaaatggaacaagctggagttgctgcagaagatgaaaccttcaggctttgacattttctaa

SEQ ID NO: 8206 - DNA, 144 bp, Zea mays
  Peptide Sequence Number=SeqID_49985
atggtgtcaaagtgcattgtcggagcggtccatttggccaccggccgtccccgcaagcgggcgtggtttgaatgggacttagtgctagttggcaaggatacggttcgcctctctaggaaccgattaggcatagaattatcatag

SEQ ID NO: 8207 - DNA, 207 bp, Zea mays
  Peptide Sequence Number=SeqID_49986
atgccgactttagtcagaggatacctgttcacacattgtactccagaaatactgttaaatcctgtttttgaggaccttcggatgccgaaggaccttatggtgaaatatgcggccaagtctatgttccttcgccgcgaattcggcgtttgggattcgctgcagcgccagaggggcctgcttgctcagacaaatgagcagcttgcctag

SEQ ID NO: 8208 - DNA, 447 bp, Zea mays
  Peptide Sequence Number=SeqID_49987
atgactctgaaacgacggcggtcaagcgattcaatggtggcggtggtttttctggatctcctccggagcggaggcgatgcggctcaggtattacacaaagcgaaccatgtgggtgaggtcataccccacagcgacgagtcggtgttgcagtccacgaagtcccccaaagcggcggccctccattcctgccgccgattacagcgacgcatagctccacaacgcctactcgcgatagatgagggggaggaaggagagtcgcgggctcgattttatagcccaggtcaagaacggactcagtcaggttggtcccgaggttctagcgcggagttggttggcgaccgcgtgattggcgcagtccgttgtgagcaccacgcgcggatagggaagaaggcacctgacacaggggtcccagtgggcagcggcagcaaggctgacctagccacgtga

SEQ ID NO: 8209 - DNA, 273 bp, Zea mays
  Peptide Sequence Number=SeqID_49988
atggggttccccgagttattaccaacatgcctactcgaagtacagaacaaagcgaaccatgtgggtgaggtcataccccacagcgacgagtcggtgttgcagtccacggtgaggcgcacctccgccaccaaggagaagctccggcgagcgatgcaccgacgactccgccgtcaagcccgcccggagtgcaaccataccatccacgcggccccgcgaagaagtcccccaaagcggcggccctccattcctgccgccgattacagcggcgcatag

SEQ ID NO: 8210 - DNA, 159 bp, Zea mays
  Peptide Sequence Number=SeqID_49989
atgggcgagagggacgaagctgacaagcgggccctggctgccagcgagaggaaccagcgcgagaaggagggggacaaggcgctgacgggcggcgcccggatgtcaacgagagggagcggctgggctgggtacagaggaggggagcgcgggcgcgcccgg

SEQ ID NO: 8211 - DNA, 232 bp, Zea mays
  Peptide Sequence Number=SeqID_49990
atgaacaaagacactggcatccaaggtgccatcacaaacggaactccggttccgtccccgtgggctcacgtcccatctaagggcagcaagagagcctcctcccacggcgtgaagacggagaagcgggcgacgcttcgccttcgccgtaataaccgcgccaaaaaaggggttcaaaggctagcccccgaagggttcacagtcgcctcagacgccgagcgagggatgaccaggg

SEQ ID NO: 8212 - DNA, 593 bp, Zea mays
  Peptide Sequence Number=SeqID_49991
gtggcgatgtgaagctcctccggaagctgagtcgagtctgtctccgttgcccgagtcgagtccgagccccgttgttcgggcgaggcggagaccgtcggctgagaccagggcggagtccgagccctggggtcgggcggagcggagttcgtcgtcttctggggctgagcccaagtctgagccctgggtcgggcggagcggagttcgccatcttctggggcttagcccgagtccgagccctgggtcgggcggagcggagttcgtcgtcttctggggctgagcccaagtccgagccctgggtcgggcggagcggagttcgccgtcttctggggcttagcccgagtccgagccctgggtcgagcggagcggagttcgccgtcttccggggcttagcccgagtccgagccctgggtcgggcggagcggagacccagggcggagcggagccggtcagtggagcggcgaagtgactgcggtcacttcggctctgttgactggggggcgcgcgtcaggataaagctttatgctgatgggggttaccagctgagaattaggagccttgagggtacccctaattatggtccccgacactattag

SEQ ID NO: 8213 - DNA, 399 bp, Zea mays
  Peptide Sequence Number=SeqID_49992
atgattgcattgatgcccctagctcctcctcaaccagtcttcagtttcctcattcctggaggcgatgattcgatgaacccgcgtaacagaaaaccctgctcatgcatttgccgtgggctggttgctcaacaactgctggagctgggctgtctcagctctgtcctccagctccaggcttcagatactagcaagttggcagtaggggagtcccactcccagcaagggaccgacgggcagggactccaatcagggtccgccaactgccacgtttcgtccgctgagctgtgccgttgttccctcatcgggtacctgcatgtggaccaccactttgcagtatgtcttggtacaacacagccaatgaagttagcgattagaagagagttcacaacgactgactga

SEQ ID NO: 8214 - DNA, 282 bp, Zea mays
  Peptide Sequence Number=SeqID_49993
atggcgcagggtcgtcttcttctcctcgtaggacctagatcccgtcccctggatgagagacctttgggtgctccgggtcagcagattttagcagttggcgctgaacctgtgctctcccgtctcacaataaacggaacagtcctttcacaaataaaatgtgctcctcagtgtgcgttttctgtctccatccattcatctggaatagcagctgttgctggatacggaggtctgggtggatgtgatctcagaagttgggagccgccatctgtgcacatttggtag

SEQ ID NO: 8215 - DNA, 291 bp, Zea mays
  Peptide Sequence Number=SeqID_49994
atggaggtgagggtgccgcttcttccgcagcacatattgcggaacggcgacggacgggagaagaagtgcggcgtgaggcggtggagggagctgctagcgcgggaggccgggaaggtcggctgcgtggccctgccgatggcgcccgtgaccggggtcgcaagtacgcgggtgccaggtggcgtcaacattggaagttcggtcaccatccccggggtcctcccggtcttcgcctcggcatcgcactcctcgcacggtaatcccggttcagccttctccgtaggtatcgtataa

SEQ ID NO: 8216 - DNA, 276 bp, Zea mays
  Peptide Sequence Number=SeqID_49995
atggagaaaccgtctgctcagctgcgtgcagctaaccatgagcgagcgccatggcagcaggtcgttggtgccgccgccgccgagcatatccgttgtatctgcacagggatagataaacaagtgagtgacgtctctgaacggggaactctgttccggaacggacgaaggaacgatcccagccgcggcaagctgacaaaggcgccgccgaccaaacaaaatgccacggcagcgttcatgcaagtctgtgctggacttcgtcttttattcggatcctaa

SEQ ID NO: 8217 - DNA, 279 bp, Zea mays
  Peptide Sequence Number=SeqID_49996
atggggaatatgataaattaccggattttcccgaatacaggaacttactggattttcccaaaaatccgaaaaagtcgaacattcttgtcaatcattggtggagttgttgctggaatctggggattcacaggcttgatggggtttgtcttctactttctgataatgatggttgcatctattgggctcttagcgaagtcaaagttttcagtccaggcgtacttcgatagttggaccaggatttcaattgaaggagtttttggtggcctgatgattatttga

SEQ ID NO: 8218 - DNA, 228 bp, Zea mays
  Peptide Sequence Number=SeqID_49997
atgtttatgagcgggcgtgttggtggtgacgataaaagggctggcgtgctgaaccttatctttcgtggtaggcccaaagggtgcattggggcagactccgggtgcgctagagaacgctccaacggtgggcgagataatgtcgctgaaccaactctcccttatcaccctatgcttgatatgatgaagaggaagatacttggaatatgtgtgacagtgaagaagccataa

SEQ ID NO: 8219 - DNA, 297 bp, Zea mays
  Peptide Sequence Number=SeqID_49998
atggatggcgtcgtgcagtaccagcagcagtccccgacgacgccgtcgggtcagcagtcacagcagcagaaggtagcgctgatcacgctgccgccccccagggaggtggcgcggccggagatgcccagagattcggctccggctgctggacgggtcgacgaggaggagtgggtcaccgttttcggagagttcccctttgaacataagcatgcagatttccaagaattttatatcatcggtctatggacttcttacccccaacataactccagagattcagagaacatagtacagtag

SEQ ID NO: 8220 - DNA, 651 bp, Zea mays
  Peptide Sequence Number=SeqID_49999
atgagcgagccgagctccgacacctcgtgcacgtcctcctgctcgtccggaccctccacgtccaccagcccgcgcgcggcgccctccgccgccgccgccgccgcatcgggcggcggcaagaaacgtccgcgctcagacgacggcgggtccagctccagctccgccccggcgtaccgcggcgtccgcatgcgcgcgtggggcaaatgggtgtcggaaatcagggagccccgcaagaagtcgcgcatctggctgggcaccttcccgtgcccggagatggcggcgcgcgcgcacgacgcggccgcgctcagcgtcaagggcgcccgcgcagtgctcaacttcccgggcctcgcgcgccacctcccgcgcccgggcctccctcgcgccgcgcgacgtccaggccgccgccgcgcgcgccgcgctcatgcaccactccggcgagatggcgccgctgcgcacgacgagcctgagcctgagcggcagcccctagaggtggccgccgagctggtgttcgacgagctggcgccgctgtgggtggaggacgtggtggagctggggccgtccgccgatcacccgtggccgtggacgccgtgcgatgggctcgacatcgccgccggcttccaccctctccctctcctgtgggacgactactag

SEQ ID NO: 8221 - DNA, 348 bp, Zea mays
  Peptide Sequence Number=SeqID_50000
atgcggacgccgcggtacgccggggcggagctggagctggacccgccgtcgtctgagcgcggacgtttcttgccgccgcccgatgcggcggcggcggcggcggagggcgccgcgcgcgggctggtggacgtggagggtccggacgagcaggaggacgtgcacgaggtgtcggagctcggctcgctcattgccatatacactactatacgacaccgagctggaggctggagcagtcgatcggtacacgcacgtgtccctgccggcctgccctgctctgcggcgggcgtctccgagtccgacgatccgatcgatcgacgaccccgggcgcaggcgcagctggctgggtag

SEQ ID NO: 8222 - DNA, 747 bp, Zea mays
  Peptide Sequence Number=SeqID_50001
atgaccgcgtcaaacaagggactgggaaagggggataccccgaaaaggaccattctccgtgaaggaaacaggctccgagcctccctactgatcagagattcgaaggctggcccgtcggaggggttcaacagccgcctcagagcacgtgggctccacacccactactggtcaaaggacagcgccgcctgcgccgctctgactgctgagccacccgacagagtgaggctgacagcagccaaggccagcctcgggcgtcataggaaactctgcctcgcccgaccccagggctcggactcgggctcagccccggaagacggcgaactccgctccgcccgacccagggctcggactcgggctcggtcctggaagacggcgaactccgctccgcctgacccagggctcggactcgggctcagccccggaagacggcgaactccgctccgcccgacccagggctcggactcgggctcggccccggaagacggcgaactccgctccgcccgacccagggctcggactcgggctcaaccccggaagacggcgaactccgctccgcccgacccagggctcggactcgggctcaaccccagaagacgacgaactccgctccgcccgacccagggctcggacttgggctcagccccagaagacgacgaactccgctccacccgacccaaggctcggacttgggctcagccccaggagacgacggactctgcttcgcctgaccccaaggctcggacttag

SEQ ID NO: 8223 - DNA, 570 bp, Zea mays
  Peptide Sequence Number=SeqID_50002
atggcgcctcctgttgacgtggctggcctgcgccttaggttgggcgatgcggaggctcctccgaagccgaggtcgagtctgtcttccgtggccgaggccgactccgagcccctgggtcgggcgaggcggagagttcgccgtcttccgggacttagcccgagtctgagccctgggtcgggcggagcggagttcgccgtcttccgggacttagcccgagtccgagccctgggtcgggcggagcggagttcgccgtcttccggggctgagcccgagtccgagccctgggtcgggcgaagcggagcttcctatggccggtcagtggagcggcgaagtgacgacggtcacttcggctctgccggggggcctttgcagctttatgctgatgggggttaccagctgagaattaggagtcttgaggacaacgatgaggcggcggcgtggagtggcggcatgaggtggcggcggccgagggagcgaagggtggggcggcgttggaggtggcagcggccgagggtaggacagcgttgggcagcggcggcgtgtggcatgagcggcggcatgagagagtga

SEQ ID NO: 8224 - DNA, 708 bp, Zea mays
  Peptide Sequence Number=SeqID_50003
atgaccgcgtcaaaaaaagggaccgggaaaggggataccccgaaagggatccttctccgcaaaggaaatgagccccgagcccccctactgatcagaggttcgaaggctggcccctcagaagggttcaacagccgcctcagagcactcgggctccgtgcccactactggctggcccccaaagggttcgacagccgcctcagacgcagagcgagggatgaccctgggtacgttcgatacataaccaaggctcgggctacgctcctgagagtgaggctgacagcagccaagtccggcttcgggcgccataggaagctccgcctcgcccgaacccagggctcggcccccgtctcggcctcagacgacgaactttgcctcgcccgacccagggctcggactcagcctcggctccggaagacgacgaactccgcctcgcccgaccccagggctcggacaaggcctcgactctggaagacgacgaactccgcctcgcccgacccagggctcggaatcggcctcgactccggaagacgacgaactccgcctcgcccgaccctagggctcggactcagccttggccttagacgatggtctccgcctcgcccgacccggggctcggactcgacctcgacctcggaagacagactcgacctcgaccttggaggagccaccgcctcgcctgacccagggctcggaccgaccacgtcgtag

SEQ ID NO: 8225 - DNA, 624 bp, Zea mays
  Peptide Sequence Number=SeqID_50004
atggagcagattttgttaggaagatctgatgttgcaggttggggtgcattcattaagaatcctgtaaataaaaatgattatcttggagaatatactggtgaattgatctctcacaaggaagcagacaaacgcgggaaaatttatgaccgggcagactcatcgtttctgttcgatttaaatgaccaggtgcttcttgtcccgccggccgttctggcactccgcgagaccagtaccttcaggaaattcaccttgcaaatttgtttctcgctaatttacccgttccgcttgattgcttgtgcccaggatctcgtgacccagttccagaacgccacaaatgaagaatctaaggagaagattgttgctaacctggcaaattttgcttatgacccttttaattatgccttcatgcgccaggttgttcttgagttattcttggactgcattacagagccaaatgaaaagcttgtcgagtttggcattggtggaatatgtaactcctgtgaagatcctgcaaattctttaatcattactcagagtggtggaatcccgttggttgtacaatgcttatggagcctagtgcggaatactataagcatttctgaagctatagtgatcagctcttga

SEQ ID NO: 8226 - DNA, 447 bp, Zea mays
  Peptide Sequence Number=SeqID_50005
atgtcgggaggatccaccaagagggagatggaaacgggcacaagccacgggaaggctccatcaaaggagtccggcgccaaaggaagggaggaatcacctccccgcgtcaagtcgcattggagtggcgacaagaagaagaagatgaagaaagtggtctactacgagaccgattcttcgtcaagggcgtcccattccaccattgtgcacctttatttacatatatccactgagatgatgaaggaacaaggaccaacattgacgcccacctccggtgaactcaatcgaccatcttcggcaagcatcgactttcgtaatgccgctgaagaagacaacagtgccaggggctggcctacaccactggacactaatcaggaaacactgcgagaagctaggagccagaagaggaaggctactagcccgacacctcaggagggggagctggattag

SEQ ID NO: 8227 - DNA, 405 bp, Zea mays
  Peptide Sequence Number=SeqID_50006
atggagaagacgactccgcgaactcgatggcagggttgtggccacaagaccggggtcagagagggggaaacggcgggggaaaacctccgggcagctcggggtaactctagtgaggaatatcggccgctaggagaggcaatcggtcgtgatagggctcgggctagttccagtggaggtgggggagcattatgggccaatgccggggcactggacgggctcgggctggccggacaccgtgcgggcgcagcgagcaagcacggctgcatgccagcgaggccaaattggctacaggcggtgctcaaaaagagctgggacgtgtgggaggacgacgtggccaaggttcccggcgacgtgcgcgagtgcgcgcgcgctggtccacggcgggcgtggggaaggcggagctga

SEQ ID NO: 8228 - DNA, 390 bp, Zea mays
  Peptide Sequence Number=SeqID_50007
atgcagcggcgcggggcgctgcaggggcagggcgtcgatctcctggcgcggcttccgggcgcggacgtcgagcgggctggcagcgatgcctgggcgctcggccggatgagcaggggcgggtgtccggggtgcgtgtggagcagggcttcaggcgcgcgggcggctcgatgggcgcagggagctcagtcggtctccgggtggctgcaggcgcgcatggtagggcgctggcgcgtcggtgtcgcggccgcggggtcgcgcggtcggcacggtctgctcggctgcgcgtcggagagaggagcgagggggaggagagaggaggcgggtgggagagagagagaagcagagggcggcggcggcttcaactggaagagggcgcgcgcgctaggttag

SEQ ID NO: 8229 - DNA, 288 bp, Zea mays
  Peptide Sequence Number=SeqID_50008
atgggtctagctatccgttcctccggctctagctcctccaagatctccgtgccgtgctcgatctgccaccagcgtcgtcgtcgtctccgtctccgtcagggtctcctccagcagtcgggatgccctgtggtggtgcagggggcatctctagctgaggtgcaggagaaggcggcttctcagactccacctcctgctgaggcgagggggaagagtcctgctgctcctgctcctggcatcgacgctcctgctcctcgtgcaggcgatgatgtagtctctctaggtgactag

SEQ ID NO: 8230 - DNA, 177 bp, Zea mays
  Peptide Sequence Number=SeqID_50009
atgctccctgcctccttgctggtcggccataccctctgctcctccctaccgtccgcagccccgacgtcgtcgctgggtttagtcatggtgttcggtgaaaaggatgaattggtgatcgttgttgctcttgcgaaattcaagttctattttatgttaataagcacatttgtgttctag

SEQ ID NO: 8231 - DNA, 2028 bp, Zea mays
  Peptide Sequence Number=SeqID_50010
atggaggagaggctgttcgccacggagaagcacggtggccgggcgctctacaggctccacgccgtcacggtgttcctggggatatgcctgctgctctgctacagggcgacgcacgtcccggctgccggctccggcggcagggcggcgtggctggggatgctcgcggcggagctctggttcggcttctactgggtcatcacgcagtccgtgcgctggtgccccatccgccgccgcaccttccacgacaggctcgccgccaggttcggagagcggctcccctgcgtggacatcttcgtgtgcacagcggacccgcggtcggagccgccgagccttgtcgtggccacggtcctgtcggtgatggcgtacaactacccgcccgcgaagctcaacgtctacctctccgacgacggcggctccatcctcaccttctacgctctgtgggaggcctccgccttcgccaagcactggctcccgttctgcaggaggtacggcgtcgagccacggtcgccggccgcttacttcgcccagtctgatgagaagcctcgtcatgatccgccgcacgccttgcaggagtggacgtccgtcaaaaacctatacgatgaaatgacggagcggattgactccgctgctcggacgggcaatgttcctgaagaaactagagcgaaacacaaagggttttctgagtgggatacgggtattacctcaaaagaccaccacccgatcgttcagattctgatagatgggaaagacaaggctgtagctgacaacgaaggcaatgtgctgccgacgctggtgtacgtggcacgagagaagaggcctcagtaccaccacaacttcaaagccggggcgatgaacgctctgatccgagtatcgtccgtgataagcaacagccctatcatcctgaacgtggactgcgacatgtattccaacaacagcgacacgatcagagacgcgctgtgcttcttcctcgacgaagaaacgggccacaggatcgcgttcgtgcagtaccctcagaactacaacaacctcaccaagaacaacatatacggcaactccctcaatgtcatcaaccaggtggagctgagcggcctggacgcttggggcggcccgctgtacatcggcacgggatgcttccataggagggagaccctgtgcggcaggaggttcaccgaggactacaaggaagactggggacagaggaaccaaggagcagcagcagcaccgccaccgcgtcgacggcgagaccgaagcgaaggccaagtcgctagcgacctgcgcctacgagcacgacgacgacacgcggtgggggagacgaggtggggctcaagtacggctgctcggtgggaggacgtcatcacggggctggcgatacactgcagagggtgggagtcggtgtacagcaacccccgcgagagcggcgttcgtcggcgtcgcgccgaccacgctcgcccagaccatactgcagcacaagcggtggagcgagggcaacttcggcatcttcgtttccagctcacgagtccgtggatcgcgcctttcgtctacgtcgcggtcgccaagaacgtctacagcgcgtgggaggcgctgtggtgcggagacacgctgagagggtggtggaacgggcagaggatgtggctggtccggagaacgacctcgtacctctacggcttcgtcgacaccgtcagggactcgctggggctgtccaagatgggcttcgtggtgtcgtccaaggtgagcgacgaggacgaggccaagaggtacgagcaggagatgatggagttcgggacggcgtcgccggagtacgtgatcgtcgcggccgtcgcgctgctcaacctcgtgtgcctggcagggatggcggcggcactggatgtgttcttcgtccaggtcgctctctgcggggtgctggtgctcctcaacgtcccggtctatgaagccatgttcgtcaggaaggacagggggaggatgccgttcccgatcacgctagcctccgttggctttgtgacgctggccctcattgtgccattcttttga

SEQ ID NO: 8232 - DNA, 621 bp, Zea mays
  Peptide Sequence Number=SeqID_50011
atgccgaccagggtcgaacacgtgtgcgcgtgcattctgcccgagttctggcgcgtgttgtcactcatccaagcctgctcttgccttgcctcaggcgccataggaagctccgcctcgcccgaccccagggctcggactcggcttcggctccggaagacgacgaactccgcctcgcccgaccccagggctcggcccccgtctcggctccggaagacgacaaactccgcctcgcccgaccccagggctcagactcagcctcggctccggaagacgacgaactccgcctcgcccgaccccagggctcggactcagcctcggctccggaagacgacgaactccgcctcgcccgaccccagggctcggactcagcctcggctccggaagacgacgaactccgcctcgcccgaccccagggctcggactcaaccacgacctcgggcgacggtctccgcctcgcccgaccctagggctcggactcaatcacgacctcagacgacggtctacgcctcgcccgacccctgggctcggactcaacctcgacctcggaggaatcgccacctcgtccaaactcgggcccggaccggccacgtcgccagggggccatcattaccctacccctag

SEQ ID NO: 8233 - DNA, 477 bp, Zea mays
  Peptide Sequence Number=SeqID_50012
atgtggaaagataagtgtgcgcctcctgttttcacaataagtgacaattgggagttggtatacaaaactgttgcccaaggcggaggagatgttcgcgcaggagatccgcaacacggtggctacctccgcgtcacgttctgcatctccatgttcgtgttgcccgacctggaggatgcccttgaagcctcgcactatgcgtcccaccatgctcattgcacctcaaggaggcaaccacatgcgacctgtggtctggttcccaatactcttctttcatcctatgagcaacagaagaacagagctttgttggttgtcacctatgctgtcgttggactgaaatgtgctggcagcctgccaacccgccaatgcatgcgaacccacacaatattgttcctgtgcatgccgttcttctgtgacaacgcgacccaggtgtctatctccacaacatctcccctgtcattgtcagacaagagtgtgtga

SEQ ID NO: 8234 - DNA, 675 bp, Zea mays
  Peptide Sequence Number=SeqID_50013
atggcagtaaggcgtcaagaggagcaggttggcgtagggcagccgaaggaaaaagcgaaggaggaggaggaggacgtagccgtggaggagaagatcatacaggtggaggcagagatgccggagctacgagagaagaagcagcaacacctgagggagaagacgagcttgcaaccaacatggtggaagagaagatcatcgaggagatccagcgggcagaggcgactgagaactcagggcggggatggtgtagtggttcgtctgggtgatgggcacgggggaggtgaagggcaagagggcgatggatctcaagttgggatccatcacgcgggacaaggtgcaggacaagtacacacagtattggtccttcttccgccgccccaaggagacgggccaccaaggcagcgtcgacggagaaggtgccgggccttcgtcgacaccttctacaacctcatgaccgacatctacgagtgggggtggggccagtccttccacttctctccgtccctccccggccactcccaccgcgacgccacacgcgtccacgaggagcgcgtcgccgacctcctcgacgccaggccaggccaccgcctcctggacgtcggctgcggtgtcggtgggcccatgcgtgctatcgccgcgcactcgggatcaatcgtcacaggatctaggaggtga

SEQ ID NO: 8235 - DNA, 1533 bp, Zea mays
  Peptide Sequence Number=SeqID_50014
atgaggagcaacaacctcttgtacgtctcgctgctcatcgtctgcgccgctgcactgcagttgcagttgcatttgcgcgcagacgcgtcccaagagggggatcagctgaagaaattcatccggtccaggcgggacagcagtactcgtagtcgtatcgacgacaagggcgcgtttaaggtgagtaataacgtcgtcggcggcctcctgagagcaggcgggtactccggcagcgagcagagcgcgctgatgaaggcgggcgacaagatcgctgcgctgccggggcaaccggacggcggcgtcgacttcgaccagtacagcgggtacgtgaccgtcgacgagaagaacggccgggcgctcttctactacttggcggaggcgccgcggggtgccgcgtccaagccgctcctcctgtggctcaacggagggccgggatgctcgtcgtttggcatcggagcgatgcaagagctcggcccgttccgcgtaaacagcgacaacaagacgctgagcagaaacaagaatgcttggaacaacgtcgttgtgcatgtaatggctaacgtgatcttcctggaatcgccggcgggtgttgggttctcctactccaacacatcctccgactacgacctcagcggagaccagagggcagcggacgacgcgtacctgttcctggtgaactggctggagcgcttcccggagtacaagagccggccgttctacatctccggggagagctacgccggccattacgtgcccgagctcgccgccaccatcctcatccagaattcctacgacgacgccaagacggccataataaacctgcggggcatcttggttgggaacccactcctggactggcgcatgaacttcaagggccaggttgactactactggagccacgggttgatgtcggacgaggtgttcgccaacataaccaggcactgcgacgacgactcggactcggacgtgggcgcgtgcgatggcgccgtgcaggcggtggacgcggggcagcttgattactacaacatatacgctcccgtctgtgttgacgcggccaacggcgggtcgtactaccccaccagtgcacagttacctgatccgtgcagctaccactacacctattcctacctcaatgacccggcagtgcaggttgctctccacgctagaccaacgacctggtcaggatgcgcaaacctgaactggacggattcaccggcttccatggtgccaacgatctcatggctagtcgagaacaagttaccggtctggatttttagtggggattttgataccgtgtgcccactacccgcgacgaggtactccatccgcgatcttaagcttcgcatcacaactccatggcgtccgtggacagtaaacatggaggttggagggtatgttcaacaatacaagggagggttcacatttgcctctgtgagaggagctggtcacatggttccatcctcccagcccgagagagcactaatattattggattcctttctcaaaggggtgctcccaccgtacgtaccggagcagtag

SEQ ID NO: 8236 - DNA, 171 bp, Zea mays
  Peptide Sequence Number=SeqID_50015
atggggctcaggcgagttggcggcgaggtgaaggatgaggaggcagttgagggggggcccgtgcccgacctttatggtcccgcgagtccgcgcgagaacggggccacggcgtccgattcctacggcgagcgcggcggagggtgtacacatgtgatgatgcacaaaggttaa

SEQ ID NO: 8237 - DNA, 402 bp, Zea mays
  Peptide Sequence Number=SeqID_50016
atggtgctcttggcaatgttcgtgtcctacatgtaccgacgacttcacggtatgctgacgtattcaccaaaggtggtaatatgtttggtgctgcggaagactgctccacttatgagttatgttcaggggcatccagagatagttgtccagcttgttgacctgattggcatcacatcgataatggaggtgctgatacgactgattggtgctgatgagaccatatattcaaactatggtgatacgttgcagtggttagaaaatacaaatgtacttgaaatgattgcagataagtttaactcgtcgaaattgagcatgtatttgaaatgttcttacctctgtgacatggataacagtgaccatctcaattacgcaacaaaagtgacagggaaaccacccgcataa

SEQ ID NO: 8238 - DNA, 336 bp, Zea mays
  Peptide Sequence Number=SeqID_50017
atggcggcagggaagtcgcaagtgcatctatggctgaggatgtggcggcaaccgtcgcgtgacaattgcgctatgctgttgtctttgctgaccaagtggcatctgcagctgcgttcggaaaggaaacagctggaggacaagatagtgtgccttcagacgcagcataccgaggctgtcagggataggtttgtggttgagaacaagattcagaaccttctagagaaggttggcttgcttgaaaaagagaatgaggatctcggtcgcaggtggaatgaagagaaggatgctaccgatcaggcgaagacggaggcccaggctactcgcgtggaggcctaa

SEQ ID NO: 8239 - DNA, 429 bp, Zea mays
  Peptide Sequence Number=SeqID_50018
atgagggacgaagacgttgaagaccttgctagcctggagagctcagtggccacacaagatgatgatgcagatgtaggtatcgaggagcagtcatcgctcgctagggtcggtcgtacggaacctagagcggcggggtcctcgctgccgtctgcctctacgcagggtttagcaacgaggggatctgattttgattcatggtcatcgggtagcgaaggattactaagcccgttcgcaaggatggacgatgagtcctcgaaagaggacttagattttgttgtaccgttagatgtgtctgcgacagagtctaggacgggggatccttcatctagggtctcgccgattgtggcgagaagcaagagaagagttggagtattgaagcggagattgggaaccgccgtcgagccgccccaaggcatcagaggctcctga

SEQ ID NO: 8240 - DNA, 318 bp, Zea mays
  Peptide Sequence Number=SeqID_50019
atggggtctcgactgcgggtctgggagcttcaccgcgttcttaggaaagtgcccatggccgagacagggtggcgcggtcatcatggcggccccaatggctcaccggagcttggcggacaacatggtaccgcaccgtgtggtggccagatctccacgctgcccaaatcttcattcggtggacgaattggtcacggatcggggcatttgctggggcgctggtcgttgcgccgccgcggggaatcggtggcgccgccctggattagcaggctgggggaaggagaggactcgtgggccgtccgatccttctcggatggctga

SEQ ID NO: 8241 - DNA, 1728 bp, Zea mays
  Peptide Sequence Number=SeqID_50020
atggaagccgcggcgcccgcgcccgcgcgtggcctcgggcggcaggagtacgcggtgctggcgctcaccttcgcgtcctacgcgtcgttccacgcctcccgcaagccgcccagcatcgtcaaagccgtgctctccgcggactgggtccccttctcgggcccccggggcccgcaccgcctcggcgaactcgacgtcgccttcctctcattctacgcgcttgccatgttcgccgccggccacctcgccgaccgcgccgacctccgctgcctcctcggcacggccatgctcgcgtccggcgccgcgtgcgccgcgctcggtgcggcctacttcctcgacatccacgcgctagccttcttcgcggccgcgcaggtgtccagcggtgtcgtgcagtccgccggatggccctgcgtcgtcgccgttgtggggaactggttcggccacgcctcgaagcgcggcaccatcatgggggtgtggaactcgcacacctccgtcgggaacatcgccggctcggtcctcgccgcagccgcgctcgagttcggatggggttggtcctttttgcttcctgcggtcgtcatcgccgcgctcggagttgtcgtgctggtgtttttggtcgcacacccgagcgaggctggtttggatgtggaagtaatggaggttgagatgaatggggatggtggggaggaggtagggctacttggggaggataagaaagaggttcaagggaatgaggataacgagttcgagctggaaatgggatcacaattgccgagggcaatcgggttcgtggaggcatggaaacttcctggcgtggcaccatatgcattctgcttatttttctccaaactcgtcgcctacaccttcctctactggttgccattctatatcaggaataatgccgtggcaggtcagttcttgtcacacaaggcttcaggaattttatcaattgtattcgacattggaggcgtcttaggagggatttcggctggttttctctcagatgccataggtgcccgtgcaataacatcagttctgttcctcttgctgtcaatcccatcactcgttgtgtaccggacatatggaagcatatccatgcaccacaacattgctctcatgtttctctctggttactttgtgaatggtccatactctctgatcaccacagctgttgcaactgatcttggcacccaagacgctatcaagggaaattcacgggcgctggcgacggtttctgcgataattgacggcactggttctgttggtgcagctctgggtcccttgcttacgggtggtggtaatacgccgtcgcagcagctgccatcgtcgttgagccatagggttgccaggtcgaagacttcgtggagggtcaaggagatggagaggttggggtactttcctactggttatgggtgggttgccggagcggagaccatggcgacctcgtggtcttcaagagtttatttgctgccagactttgcctactgtgccatgattttctacttggtgtgctcgagaaatacaagggttcacattcatcagccgaatgctagggtggaaatgagtaaatatgtttgggcgacgaccaccttcggtagggctgcgtcagttgaggtcttcgctaagcattgctgcttgcacgggcagaagaggtctgtaggtgggattgttgatcagttcgagagctacatgtttaccccaaaggtcttcgctaagcatttgggctatttctag

SEQ ID NO: 8242 - DNA, 438 bp, Zea mays
  Peptide Sequence Number=SeqID_50021
atgttggggaaacaagattctctgtcgtggcttcaatctgttccactacaccgccagggaagaaggcaagatctactatttctaacctgctccgctgcaacccaagggggcaaggctggtgtcttcgatctgcttcactgtcggctcaggaaggcaagatctgctatttttaacctgctccgctacaacccaggaggcaggctggtgtctttgaactacttcgctgtcggtacaggaaggcaagatctgttatttttaacctgctctgctacaaccaagggaggcaaggctggtgtcttcgatatgcttcgctgtcggtgcaggaaggcaatatctgctatttttaacctgctccgctacaacccagggaggcaaggctggtgtcttcgatctgcttcgctgtcggtgcaggaaggcaagatctgctatttttactga

SEQ ID NO: 8243 - DNA, 1254 bp, Zea mays
  Peptide Sequence Number=SeqID_50022
atgggttttgctggttatagttatagttggtttttgttgtcatttttcgccctaatcccaacactaagagctcacatcgctgaatatgatgagtattggaaggcacgagaattggaagccattgagaacctgaacaaggcttatcaccccaatccggaggaggtggtccggcattacaatgaccactttgtcaataccatgcttgagtataataacaccagaagggtgttgaaaggaaagaaaaacggtccctgtgagattactaaccccgttgatagttgttggcgatgtgatcctaactgggtaaagaacaggaagaggttggccgactgtgcccctggatttgctcgtggtactaccggtggaaaggacggcaagttttacgtggtcactgaccctaatgatgatattgctaaccccaagcccggaactttacgtcatgcagtcactcaactcaggccactttggatcactttcaaaaaatccatgatcatcaagctgaaacaggagctcattgttacaagcgacaagaccattgatgcaaggggagctaatgtgcatatttgctatggtgctggtattactgtccagttttctaggaatgtcattatccatggcctccatatccatcacattaaacccgctactggtggcatcattagggatgctgaaaaccacattgggttaaggactgccagcgatggagatgcgatctctctttttggagcaaccaatatttggcttgaccatctttccctttatgattcctctgatggtcttatcgatgttattcagggttccactgccattaccatttcaaactgccatttcactgaccacaacgaggtgctattgtttggagcaagcgacaactacgttgccgacgagaagatgcagatcactgttgctttgaaccgcttcggtaaaggattggtggacaggatgcctaggtgtcgattaggtttttttcatgttgtcaacaatgactacactcattggttcatgtatgccattggcggcagtagccaccctacaattatcagccagggcaataggtatatcgcgtcaagcatctacatggatctggaggatgccctgctaaggatagataagatgccttcgacattaatgggtgaagagaagaagcgtgtacttgagatgatgattggcaccggtgttgacgaaaggattagcaaagactcgcagacactaggatctatcacaacatgggatgaattcgttggaaaattctga

SEQ ID NO: 8244 - DNA, 141 bp, Zea mays
  Peptide Sequence Number=SeqID_50023
atggttgcttgtgatatgatcgagcacttgaaagaactttatcaagggaaagcaaggcaagagaggttcgatacctctaaggcccctttccaatcttacgagcaagagaagcagctcaacaactactcagatttcatttga

SEQ ID NO: 8245 - DNA, 1236 bp, Zea mays
  Peptide Sequence Number=SeqID_50024
atggagcagcaaagaagcacatcggagtcgtcgcagagccctagatctccaccttcacagcgatatctatcagtctccgtttccgatcccgttaaattaggcaatggcgtccaaggttacatctcttatcgcgtcatcactaagaccaatttcccggaataccaagggtcggaaaagattgttattaggcgttacagtgacttcgtttggttacgtgatcgccttttcgacaagtacaaaggcattttcgttcctcctctccccgagaagagtgctgtagagaagttccgatttagtgctgaatttattgagactaggcgtcaagcattggatgtatttgttaatcgaatagcttctcataatgagcttcagcagagtgaagatcttagaacctttctgcaggcagatgaagagtcaatggagagactgagatctcaagagactggtatttttaagaagaagccagctgatttgatgcagatgttcaaggatgtacagtcaaaggtgagtgatgttgttcttggaaaggaaaaacctcttgaagaatcaaatcctgaatatgagaagcttaaacactatgtttttgagcttgaaaatcatttgactgaagctcagaagcatgcatatcgtcttttaaagagacatagagagttggggcaatcactctctggttttggtaaagcatccaagcttcttggtgcttgcgaaggacaagctcttggcaaggcatttgatgaacttggggctaaatccgagacactatcaattaagctgcagaaggaggcccatcaactcttgatgaattttgaagaacccgtgaaggattatgtccgtgctgtccagtccataaaggtcacaataggagagagagctaacgcattcaggcaccagtgtgaactggctgaaacaatgaagttgaaggagataaatcttgacaagctcatgctaacacgctctgatagggtgggagaggctgagcaagagtacaaggaggcaagtcattttatcttatacgcctattggttgaaggccgagagtgaggaggtgacaagaagatttgagacaattgtgagacggatgaatgaagagatagttcgatttcaggaacagaaaacacaagatatgcggattgcctttcatgagtttgcgaagggacaagctcgactggcaaaaagtattgcggatgcctggcgaagtctccttcctaagctggaagcttgctctgacacttcctga

SEQ ID NO: 8246 - DNA, 243 bp, Zea mays
  Peptide Sequence Number=SeqID_50025
atggagatgttttacaacgagttgaatgcacacacaaggatggtagtggatgcatttaccaatggtactttgttggataaaacttataatgaagaatatgagatcttggaaaagattgccgacaacgattatcagtatcagaccatgagagttaggacgagtaagagagctgctgctttaactgtcgagaagcataagctaccactttccttgactgcattaacacacaacctaaacaattga

SEQ ID NO: 8247 - DNA, 261 bp, Zea mays
  Peptide Sequence Number=SeqID_50026
atgacgtacaaaactaagacacttcaatcagatcgagaaggagaattcttaagcttacaagttgatgagcttttcaaggaatgtgggattgtctcacaacttacacctcctgagatactcaatggaccaactgtttgggaaaggaagagcatgaaaaaccctaggcttgacaagcccgggaagtcatcaaggtgggaattaacacaaaattggcattgcccattcgtgaaaaccttcaccccaagccagtctaaactgtga

SEQ ID NO: 8248 - DNA, 213 bp, Zea mays
  Peptide Sequence Number=SeqID_50027
atggagtcaaaggccaccataggtacatgcctggaatatgacaatccctcaggaaataaattgaaggcaaaaggaaattttggggcaaaaattgtgaatataaagacaaaacgagtcagcatgcaaaataggtcagatatttttcttgggcacgattacacccaggatttcgaagaacaagaagctgtagcaatccagcccttgaggatttga

SEQ ID NO: 8249 - DNA, 528 bp, Zea mays
  Peptide Sequence Number=SeqID_50028
atgggtaaggggcgttacaagaggtgttctgtggagtaccggcggcatattaagtctgcattattcgtagtcagtgcactgcacctagagtaccgaggggaatgttccatgcctatctcacacagttccaccatcttgatggagcaaattcttttgctgcatgtaattatgacaaaatggtctatcaatgttgggaagatcattcttaaggagattcatgattgtgccagaaagaagaccaaaagtgcttacttcccatcattgatcacttcactttgcttaagggcccaagttaagacaaaagcaaacctgaagggtccatatgttcaaggttgcatcacaacccatgatcttgaaaggttattggagaatgtccatgaaaaaaaccaaattaaaccaagtgagccaatagaaccagatatcaatgagtcatcaaacaagtttgaaactgaagctaactcagttactgaatcggaaaaggtagaatcggaggaagaaccgaatgagactgaaccaataaaggaatag

SEQ ID NO: 8250 - DNA, 144 bp, Zea mays
  Peptide Sequence Number=SeqID_50029
atggacgtcaaaacagctttcgttaatgggaaacttgaagaggatgtgtcaatgacacaacctaaaggttttgtcaatgcgaaggatgctggaaagcacaatgtggacatatgccacaagagaaactgtatacagctgagctga

SEQ ID NO: 8251 - DNA, 321 bp, Zea mays
  Peptide Sequence Number=SeqID_50030
atgttcgatatctctaaggccctattccaatgcaacatgaaaaaggttggacccaagcctatactgatggtccgtaataataagggcaaaggaaaggccaaagttcagacaaagcccaagggtaaaggtaggcccaagcctggaaaagaaaaggctgtattgaaacctaaaggaggggtggctaaggaaggaaactattttcattgtggtgtaactggacattggaagcggaactgccctatttatcttgaggaagttaagaaggccaaaataagcggaacctctgcttcagggactgtaaaggagcaggactttggctag

SEQ ID NO: 8252 - DNA, 1899 bp, Zea mays
  Peptide Sequence Number=SeqID_50031
atgcgggaagcctcggtccacaccgggcgcacgcgcaacacagcgcctgcggccccagatcgcctcggcaacggacaccctcaccgcaaccgtcgaacccacctcgacgagagggtgcgccgaggctaccaccccaggcgtgggggacgctacgacagcggggaggatcggagtccctcgcccgaaccacccggtccacaggctttcagccgagccatacgacgggcgccgttcccgacccggttccgaaccccgactactatcacaaagtactcgggggagacgagaccggaactgtggctcacggactatcggctggcctgccaactgggtggaacggacgatgacaacctcgtcatccgtaacctccccctgttcctctccgactccgctcgggcctggctggagcatctgcctccgaggcagatctccaactgggataacctggtccaagcctttgtcggcaacttccagggcacgtacgtgcgccctgggaactcctgcgatcttcgaagctaccgccaacagccgggggagtctctccgggactacatccggcgattctcgaagcagcgcaccgagctgcccaacgtcaccgactcggatgtcatcagcgcgttccttgccggcaccacctgccatgacctggtgagcaagctgggtcgcaagacccccaccagggcgagcgagctgatggacatcgccaccaagttcgcctctggccaagaggcggttgaggccatcttccggaaggataagcagccccagggccacccaccggaagatgtccccgaggcgtcaactcagcgcggcaccaagaagaaagacaggaagaagtcgcaagcgaaacgcgacgccgccgacgtggaccttgtcgccgctgccgagtacaagaaccctcggaaacctcccggaggtgccaatctcttcgacaagatgctcaaggagccgtggccctatcatcaggggtccgtcaagcacacccttgaggagtgcaccatgcttcggcgccattttcacaaggccaggccgcctacagaaggtggcagggcccgcgacgacgataaggaggatcacaaggcaggagagttccccgaggtccgcgactgcttcatgatctacggtgggccagtggcgaacgcctcggctcggcaccgcaagcaagagcgtcgggaggtctgctcagtaagggtggcggcgccggtctacctagactggtccgacgagcccatcaccttcgaccagggcaatcaccccgaccgtgtgccgagcccggggaaatacctgctcgttgtcgacctcgtcatcggcaacatcaggctcaccaaggtcctcatggacggaggcagcagcctcaacatcatctacgccgagaccctcgggctcctgcggatcgatttgtcctcggtccgggcaggcgttgcgccttttcacgggatcatcctcgagaaacgcgtccagcccctcggacaacttgatctacccgtctgctttgggacaccctccaacttccgaagggagaccctcacgttcgaggtggttgagtttcgaggaacctaccacgcagtgctggggaggccatgctacgccaagttcatggccgtccccaactacacctacctcaagctcaaaatgccgggccccaacggggtcatcaccgtcggccccacgtatcgacacgcgtacgaatgcgacgtggagtgcgtggagtacgccgaggccctcgccgaatccgaggccctcatcgccgacctggagagcctctctaaggaggcgccagacgtgaagcgccatgctggcaacttcgagccggcggagacggttaagtccgtccctctcgaccccaacaacgacgcctccaagcagatccggatcggctccgagctcgaccccaaatag

SEQ ID NO: 8253 - DNA, 381 bp, Zea mays
  Peptide Sequence Number=SeqID_50032
atgggcagaaggaagatgacgtactttctttggccgatctgggaatctcctcccaagcccttgaggacaataatccccccactactaccacgagaacgtcaccatggagaacctctgcaggctacacgggtggatgacaggagctggagggcgtcgatgcacaggtactgggccggagagacgaggtacgcgcactcccggcagacggacgcgccgctcctcgccaactccgcgtggcactgcagcagcttctgcttccgccgcatcagcgacttcgccaagaccgcgtggcactggacggcggaccgcaccggcagccgctgggggcttggtggtgggggcggcgggggcacggaccagagccgcgaaggcgacgaatga

SEQ ID NO: 8254 - DNA, 1056 bp, Zea mays
  Peptide Sequence Number=SeqID_50033
atgttcttcaacgggtcgctgatgaagataggagccggcgcaggcctactcttcatctcgcccctcgggaagcacctacgctacgtgctacgcctccatttcccggcgtccaacaatgtggctgagtacgaggctctggtcaacgggttgcggatcgccatcgagctaggggtccgacgcctcgacgctcgcggtgactcgcagctcgtcatcgaccaagtcatgaagaactcccactgccgcgacccgaagatggaggcctactgcgatgaggttcggcgcctggaagacaagttctacgggctcgagctcaaccacatcgcccggcgctacaacaagactgcagacgagctggctaaaatagcctcggggcgaacaacgcccgaggtaccctcggcccccgagggagaggcactgcgcgtcgaggaggagcgaagcggggtcacgcctaatcgaaactggcagaccccgtacctgcaatatctccaccgaggggagctacccctcgatcgagccgaacctcggtggttggcgcgacgcgccaagtcgttcgtcttgctgggagacgggaaggagctctaccaccgtagcccctcaggcatcctccagcgatgcatccccatcgccgaaggtcagaagctcctgcaagagatacactcgggggcttgcggccatcacgcagcacctcgagcccttgttggaaacgccttccgacaaggtttctactggccgactgcggtggccgacgccactagaattgtccgcacctgcgaagggtgtcagttctacgcaaggcagacccacctgcctgctcaggctctgcagacgataccaatcacctggcctttttctgtgtggggtctggacctcgtcggccccttgcagaaggcacccgggggctacacgcacctgttggtcgccatcgacaaattctccaagtggatcgaggtccgacccctaaccagcatcaggtccgagcaggcggtggcattcttcaccaacatcatccatcgtttcggggtcccgaactccatcatcaccgacaacggcacctag

SEQ ID NO: 8255 - DNA, 531 bp, Zea mays
  Peptide Sequence Number=SeqID_50034
atggcgagagcgcgactcgacagggcgtggatgacggcgatggtgcgcggctctgcgtggacgacacgaggacacatatacgacgtcaagaacaacaagatcggttttgccatcgtcggttgtaactgggaagctacacaagcaagtaaagactccacaaatgatgagagcaaatttcatagaaattgccaagatagctcaccaactcactgccgtaggcggggaggcactagcgtcgtggccgagggcggggagagggctggggaggcagcgtcgtggtccggggaggggaggcgcgtctggggggtggtgttggcgccattgttggggaatgggaggcgtggctggtggcagcaccgacgacgagaaggcgtgacggggggcgaggccaccgacgtggagggggggtggagggacgaccggggcggcgccaacgacgtggataggggcggcaccgacaatgtggatgggggcagcaccgatgtgatcggggggtggcgccagcaacgagacgacatgctagtgacatga

SEQ ID NO: 8256 - DNA, 174 bp, Zea mays
  Peptide Sequence Number=SeqID_50035
atgtcgtgccatgtcctcgccatcagcctcaccttgctgctggataaaggtcgtaattgtgtgctgcttggttgccgtcgtaattatgaaatggtcgcgaggtgtggtacgataattaatcgcgtgatgaggaagatgagccaaatcgacccaagcacgggctactccacatga

SEQ ID NO: 8257 - DNA, 396 bp, Zea mays
  Peptide Sequence Number=SeqID_50036
atggcgagcaggaaaaggactcggtgcgggagttcgacgtgtcgtggcaagcagaggggcactgccgcgcacagggaacatggcatggcgcggacgggcgagctcgacgagcacagggacgatctgggcacgagctgtgcgcaggcacacgcgcaggggacttcggctgggcgcgcggccgactggagggagccggcgtggccatatattttggatcccaattttcttagcgatgtatacgatgtagacagtaatggtgacacggttaacgacggcccgaataagactgatttcgtcttcgataatttgctctatgggattcgactaaaattagccgaaaccatatttgctaatgcacccatgatttcgtcgccaaaacaatgtgctgaaggataa

SEQ ID NO: 8258 - DNA, 285 bp, Zea mays
  Peptide Sequence Number=SeqID_50037
atgcaccatgcgccatatgcccgaacccctaactcacacacacctgtgaaaccgcaaaggtgctggtctagaggatgttatggaaggcgggagtggtgtgaggatggtagatacgtggtagaggaaggagatgatgatgaggaagaagaagtgcttcccctggttcggcgtgagcggcgatccaaggcttgcagtaacatcttgttggaggtcttcttcttcgccgaaggtcctcaaggcaaaaacaccttcggcaagataatacaaaaggcatacgtgacatga

SEQ ID NO: 8259 - DNA, 411 bp, Zea mays
  Peptide Sequence Number=SeqID_50038
atggggaacgccgtgtctcaggcgatgaacaagctacctaaggtggtttactgcgatgtggtaacgcttctatgtacgtggcatccgggcggcaagcggcagactctggcgaagacatctggaccggccgctaggcaagtgggtacgacggccagcccacgacctcatacgcagtcaagatcttttcaccgacggctgatatctgcactcagagcgcacgaatcgcgacgcggtgaggatcacggtgtggagttcatcgacgacacattcactgcacctgaagatcttttcgttcattgtaccatcaggatcttctttagtgtgtttgacggagcatattctggggtgtttttctttgatttctatgtgacaaactaccgaccagattacaacaaagttattcacctataa

SEQ ID NO: 8260 - DNA, 1122 bp, Zea mays
  Peptide Sequence Number=SeqID_50039
atggagctaccgtttggtgaattcgacctaatcttggggatagattggttggtaaaacaccgtacaagtttgaattgtgctgctaagcgtatggtgttgaagactactgaagatgaggaggtggttgtgattggggagcgaagggactttctgtctaatgtggtctccgcatttagggccaaaacactggttcccaagggttgtgaggcgtttctagcctatattggtgtatctgattctgatggtccttttgttggagatatcagaacagttaaggatttttctgatgtatttcctgatgaactccctgggttgcctccgagccacgaagttgaatttgatcttcgttctgggtaccatcagctaagagttaaggaggctgacatgtataagactgcgtttaagaatcgttatggtcattacgagtgccaagtgatgccatttgggctaacgaatacactagttgccttcatggacctgatgaaccaagtattccagccctacctggatcagttcgtggtgaggcattatttatacggtgagaagtgtactatctacacagatcacaagagccttaagtacctcctcactcagaaggagctgaatcttaggcagcgaagatggatagagctacttaaggattatgattactcgattgagtaccatcctgttcgtactgattactctttgcagaagttggctaaactgtatgtggctgagatagaagcatctgataggcagaagtcttacgcagaccttaaacgtttagagattgagtatcctgtgggggactacgtatttctcaaggtctccccttggaaacagttactgaggtttgggaaaaagggtaagcttaaccctaggttcattgcgccttactgtatactgaagcatgtgggaccggtcgcctatcaacttgagttgtctccagaattagacctaattaaagatgtgttccacgtgtccatgctgaggcattatcgctctggtcccacacatatagtaccagtcgaggagatcgagatatctgtcaaagagattgtagtcaacctccatcagtggtataagtgggctaagccacatttgacaattgaggcaagtgttaattttagttttggttaa

SEQ ID NO: 8261 - DNA, 207 bp, Zea mays
  Peptide Sequence Number=SeqID_50040
atggtggcgatgagcagctgggcagtgctggtgaccgtcgtgctgatgcagtgctgcaacgtgatcgtcgcggcgagaccgttgccgatggagtcgccggcggtagctacagccgacggcggctggctggagatgatcatgcaggtgctacaagggccgggctccaacaaccacaactgccaagcttccaacggatcctgcccctga

SEQ ID NO: 8262 - DNA, 273 bp, Zea mays
  Peptide Sequence Number=SeqID_50041
atgagcagcgaggaaggagccttgacaagaaaggaggctcgtccatggagggagctccgctcggccgccaaggaagaggagcaggggcactgggtgccgagcgccatggatgggcagaaggagaggaggtcgtgcgtcctggatttatatggccccgagtcccaaggatccgcaatcatcggcaccaacatttgggtggcaaccactggatcggttccaggcttccagccggtggaggatttggatgattcatttatgtttgctgttgtctga

SEQ ID NO: 8263 - DNA, 345 bp, Zea mays
  Peptide Sequence Number=SeqID_50042
atgaggatgggctatagagaggctaccactcatatccaactctggctaagcagtgctttgatctctcactttgagtttgacgtggtcgattttctgatctgtgagatagaggacacaattttggatggtcttcgtgctcggcttcagctgccatatgctcactacctctgccacatatttgctcaactgatccggcatcctcagttccaggctacccttgaggcctccagaatgcagtttggcttttatcatctagctcctgaggatactgctccagctccagttgatccattggcaccagatcttagggttgaggacgaggccatcaaacagtttgaggattag

SEQ ID NO: 8264 - DNA, 279 bp, Zea mays
  Peptide Sequence Number=SeqID_50043
atggtgaagtcgccggagttggggcatgcacgtgctagggtgattctggggtcgccggaattgggcacagaggggaagaacgacacggcgaactcagtggtggcaaaaaggccacgaatccaaggtcagagagggggaatggctgggaaaaggcctcgggcggactggaggaactctggtgagggattccaaccgccaggagggcaatcggccacgatagggctcgggctaggtccagtggaggtgggggagcactctgggcaaaagccggggcactag

SEQ ID NO: 8265 - DNA, 609 bp, Zea mays
  Peptide Sequence Number=SeqID_50044
atggccagggttccagggggcaaggctcggcacccattatatactgaggagcgcgagaatctgggggggggggttcggcgacacctgcgtagaaattcgggcgcggttggaacaggctccacggtgtacgcgagattcgttgaggtcgactccgcgaggtcagggatggccttgacagatgtggcccacacggcgacgtacaacgcgagactgtgcgcggtgagagcgaagctgaggccatgggcccacctgccatcgccttgtaggcgggagtggagacgcgcggtggctgcgcccgcggggaagaaaaaggagatcggcctcctgggactagtaattgtatcacatttgagtcccagaggattggggcgcttcaagatgcatggggctcgacgtttaagaggatggagcatgggccgtgctggtgctggcgagcagacgggagaagagcagcctgtgttggcgagcacgcgggagaggagcggccgagcggggatggagcacggagagaggagcgaaatgcgccagggcgggatggagcacgggagaggagttgtcggccgccagggtgggatgcacacgaccgctagggcaggagaggagcactaa

SEQ ID NO: 8266 - DNA, 330 bp, Zea mays
  Peptide Sequence Number=SeqID_50045
atggagcagcaaacaatatcaattgccaaagctgccattacaatagtactcattttagggacttcagttcttgcagctgtcaatccaattgcaggatgctatgacgctcttaagtttcctagagggaggaacatcgtgggatgcaggtcccaaggaacaccagatattttgagtgttctctgcattgtcatatgtcaaaaattgattggtgactatgatagggtcagtttgcctactaagcatccacaaaatctcattataagttctgagaaggccaagtcaattgttcaggatattacaaaagtcaggttggagaactcccttgtttag

SEQ ID NO: 8267 - DNA, 420 bp, Zea mays
  Peptide Sequence Number=SeqID_50046
atgcaggctggccgcgccgggtcgaaccacgcaacgctagggccaagccgcacgcaccgggcgccatggccgaaggcacttcgcgcgccatgccggggacaccgcaggatgaccgcgccgcggacgccgcgagcctgcgcgtcaggtctggtcggggtgagccgccgcgccgggctgccacgccggggtgcccacgccgggagccgcacgcccgcgccggagccgcgccggggccgcgcgcccgagccgggggtcgcgcccgcgccgggaccgcgctgggggcaggggcgggagctcgccggagggatagaagagaggggggtggctggaggggcctacctcgacggcggcaactgttccaggctcggcgggtgcgtcgtgggcgagaaccagggcagggcggttcgggaggaggaatag

SEQ ID NO: 8268 - DNA, 1212 bp, Zea mays
  Peptide Sequence Number=SeqID_50047
atgatggacatcgccaccaagttcgcctctggccaggaggcggttgaggccatcttccggaaggacaagcagccccaaggccgccagccggaagacgtccccgaggcgcccactcagcgcggcaccaagaagaagggcaagaagaagtcgcaagcgaaacgcgacgccaccgacgcggaccttgtcgccgccgctgagtacaagaaccctcggaaacctcccggaggcgccaatctcttcgacaagatgctcaaggagccgttcccctatcatcaggggcccgtcaagcacacccttgaggagtgcgccatgcttcggcgccactttcacaaggccgggccacctgtggaaggtggcagggcccacaacaatgacaagagggaggatcacaaggcagaggagttccccgaggtccacgactgcttcatgatctacggtgggcaagtggcgaacgcctcggctcggcaccacaagcaagagcgtcgggaggtcagctcggtaaaggtggcggcgccagtctacctagactggtccgacaagcccatcaccttcgaccagggcaaccaccccaaacgcgtgccgagcccggggaaatacccgctcgttgtcgaccccgtcatcggcaacatcaggctcaccaaggtcctcatggacggaggcagcagcctcaacatcatctacgccgagaccctcgggctcctgcgaatcgatctgtcctcggtccgggcaggcgcggcgccttttcatgggatcattcccgggaagcgcgtccagcccctcggacaactcgatctgaccgtctgctttgggactccctccaacttccgaagggaaaccctcacgatcgaggtggtcgggttccgaggaacctaccacgcagtgctggggaggccatgctacgccaagttcatggccgtccccaactacacctacctcaagctcaagatgttgggccccaacggggtcatcaccgcaggccccaagtaccgacatgcgtacgaatgcgacgtggagtgcgtggagtacgccgaggccctcgccgaatccgaggccctcatcgctgacctggagagcctctccaaggaggcgccagacgtgaagcgccatgccggcaacttcgagccggcggagacggtcaaatccgtcgctcttgatcccagcaatgatgcctccaagcagatccggatcggctccgagctcgaccccaaatag

SEQ ID NO: 8269 - DNA, 366 bp, Zea mays
  Peptide Sequence Number=SeqID_50048
atggccacaatccatctcacccacgaactggtcctgtgcgatgtgcaagggcgcgagcagccgtgccgaggctgctcgagccgtgctggtcgagcgagggcgccgcgagttatgtcgtggccgctcctgggcgagccgccgccgcgccgggccgtccatgctggggtgcccgcgccggagccgcacgcccgcgccggggtcgcgcccgcgccgaggccgcgccgggggcaggggcgtgagctcgtcggagggatagaagagaggggggtggctggaggggcctacctcgacggcggcaactgttccaggctcggcgggtgcgtcgtgggcgaaaaccagggcagggcagttcgggaggaggaatag

SEQ ID NO: 8270 - DNA, 1041 bp, Zea mays
  Peptide Sequence Number=SeqID_50049
atgtttttcgacgggtcgctaatgaagacaggggcaggcgcgggcctgctcttcatctcgctcctcgggaagcacctacgctacgtgctacgcctccacttcccggcgtccaacaatgtggtcgagtacgaggctctggtcaacgggttgcgcatcgccatcgagctaggggtccgacacctcgacgctcgcggtgactcgcagctcgtcattgaccaagtcatgaagaactcccactgccgcgacccgaagatggaagcctactgcgatgaggttcggcgcctggaggacaagttctacgggctcgaactcaaccacatcgcccgacgatacaacgagactgtggacgagctggctaagatagcctcggggcgaacaacggttcccccagacgtcttctcccgagacctacatcaaccctcagtcaagactgacgacacgcccgagcccgagaaggcctcggcccagcccgagataccctcggcccccgagggtgaggcactgcgcgtcaaggaagagcggagcggggtcacgcctaatcgaaactggcagaccccgtacctgcaatatctccaccgaggggagctacccctcgaccgagccgaagctcggcgattggcgcgacgcgccaagtcgttcgtcttgctgggggacgggaaggagctctaccaccgcagcccctcaagcatcctccagcgatgcatatccatcgctgaaggccaggagctcttacaagaaatacactcgggggcttgcggtcatcacgcagcgcctcgagcccttgttggaaacgccttccgacaaggtttctactggccgaccgcggtggccgacgccactagaattgtccgcacctgccaagggtgtcaattctatgcaaggcagacacacttgcccactcaggctctgcagacgatacccatcacctggccgtttgctgtgtggggtctggacctcgtcggtcccttgcagaaggcacccgggggctacacgcacctgctggtcgccatcgacaaattctccaagtggatcgaggtctga

SEQ ID NO: 8271 - DNA, 354 bp, Zea mays
  Peptide Sequence Number=SeqID_50050
atggccagccactcctcccacgagcacacctccagcggatggcgccagaaggcagctgcgcgcaaccagcatgcagtagccctggaagcagggaacggcatgcggctgcagctcgctcttcgccccagctgtttcccaacgacttctctcctcatctgccaaagcaaagaagaagataaaggctcctccatcatcaaaccatcaccaaggagtctggcagtagcacatggcccatgccccgtgctcaccaaaaccaactacaacgagtggttcttggtgatgaaagtgaagttgcagggccgagaggtgcaggatgtggtctcgtacgacgacaatgacttcgacgagaactag

SEQ ID NO: 8272 - DNA, 186 bp, Zea mays
  Peptide Sequence Number=SeqID_50051
atggccgtcaccggagttgtcatgctttactgcggttgtgccacgctccaagccttccaccacgtcgtccctagccgcaccaactcaccgaccactcggaagcacctgcccttgccccgtttggccggtccaggagctcgctggagctcggtcgcgctcgacgccgtcggggatcatgcggtgtaa

SEQ ID NO: 8273 - DNA, 246 bp, Zea mays
  Peptide Sequence Number=SeqID_50052
atggtcatggccaccgtcaaggggaagcccgacctcaggaagaaggtgatgcccgccgtcatcgtccgccaacgcaagctgtggtgccgcaaggacggtgtctacatgtactttgaagataatgctggagtgattcaaacaccatcatatgagagcttgttggaatgtgttcagacttctgaatctattgcaactgttgctaagggtgctattgggcttattgagtcctttgtgtttgttcactaa

SEQ ID NO: 8274 - DNA, 465 bp, Zea mays
  Peptide Sequence Number=SeqID_50053
atgttcgacgcgcaggtcgacgccgcctacttcgcgctcgaggccgcgggctactcgggcatggaggtgcgcgtggcggagaccggctgggcgtccgccggtgacgccacggaggccggcgccaacatggagaacgccatcacgtatgaccgaaaccttcggaagcggctgttcctgcgcaaggggacgccctacaggcccgaccgggtggccaaggcctacatcttcgcgctcttcaacgaggacctcaagccgggacccacctccgagcgacactacggcctcttcaagcccgacggcagcgtctccattaacatcggtctcaaggggcttctgccgtcatcggcaccgccgcgtcctctcgtggccttcaagatttttgcacatagatatatagaagttgccatcacaccagagcagcagttgctattacccatgaccagcagtgcactcatgcttgtttaa

SEQ ID NO: 8275 - DNA, 1959 bp, Zea mays
  Peptide Sequence Number=SeqID_50054
atgccggagccatcaaccaccgaggggcggcaaatccagggagagctcaagaatctcctggagggcgccgcggtccgacgggccgaaagctccgcctcccgaaggcaggggtacccctcggaacatcgcgccacgacttcccgattcatgtgggaagcctcggtccacaccgggcgcacgcgcaacaccgcacctgtggccccgggacgcctcggcaacgagcaccatcaccgcgaccgtcgggcccacctcgacgagagggtgcgccgaggctaccaccccaggcgtgggggacgctacgacagcggggaggatcggagtccctcgcccgaaccacccggtccgcaggctttcagccgcgccatacgacgggcgccgttcccgacccggtttcgaaccccgactactatcacaaagtactcgggggagacgagaccggaactgtggcttgcggactaccggctgacctgccaactgggtgggacggacgatgacaacctcatcatccgcaacctccccctgttcctctccgacaccgctcatgcctggttggagcacctgcctccggggcagatctccaactgggacgacctggtccaagccttcgtcggtaacttccagggcacgtaccgcaccgagctgtccaacatcaccgattcggatgtcatcggcgcgttcctcgctggcaccacctgccgcgacctggtgagcaagctgggtcgcaagacccccaccagggcgagcgagctgatggacatcgccaccaagttcgcctctggccaggaggcggttgaggctatcttccggaaggacaagcagccccagggccgcccaccggaagacgcccccgaggtgtcaactcagcgcggcgccaagaagaagggcaagaagaagtcgcaagcgaaacgcgacgccgccgacgcggaccttgtcgccgccgccgagtacaagaaccctcggaaaccccccggaggtgccaacctcttcgacaagatgctcaaggagccatgcccctatcatcaagggcccgtcaagcacacccttgaggagtgcgctatgcttcggcgccacttccatagggtcgggccccccgcggagggtggcagggctcgcgacgatgacaagaaggaagaccaccaggcaggagagttccccgaggtccgcgactgcttcatgatctacggtgggcaagcggcaaacgcctcggctcggcaccgcaaacaagagcgtcgggaggtctgttcggtgaaggtggcggcgccagtctacctagactggtccgacaagcccatcaccttcgaccaagccgaccaccccgaccacgtgccgagcccagggaaatacccgctcgttgtcgaccccgtcatcggcgacgtcaaactcaccaaggtcctcatggacggaggcagcagcctcaacatcatctacgtcgagaccctcgggctcctgtgtgttgatctgtcctcggtccgggcaggcgctgtgcctttccacgggatcatccccgggaagcgcgttcagcccctcggacaactcgaccttcccgtctgcttcggaacaccctccaacttccgaagggagaccctcacgttcgaggtggtcgggttccgaggaacctaccatgcagtattggggaggccatgctacgcaaagttcatggccgtccccaactacacctacctcaagctcaagatgtcgggccccaacggggtcatcaccatcggccccacgtacaaacacgcattcgaatgcgacgtggagtgcatggagtacgccgaggccctcgccgagtccgaggccctcatcgccgacctggagagcctctctgaggaggtgccagacgtgaagcgtcacgccggcaactttgagccagcggagacggttaagtccgtccccctcgaccccagcggcgacgcctccaagcagatccggatcggctccgagctcgatcccaaatag

SEQ ID NO: 8276 - DNA, 378 bp, Zea mays
  Peptide Sequence Number=SeqID_50055
atgacgagcggctaccgacgtatacccagtgagtcgtcatctcggcgagggaacactgatgggcgcgccgcgagagcaccaggcctagctcctgcctctactggatgctctacggaggctctgggaccgaggactcacggcagccaaggtcgtgctgccttccaccgcaagagggtgttggcattggtggagcgtcgtctgcgcctggacaaaatgacactcgaggcctccgtggagagttctcggatggcctcgaccgccctctccactgatgatctcctccggtgggtgaaagggacggtcgggaagacggattatactgtccccgtcccgatgggccccaaccagggttatgtgtctatgaggctgcggggataa

SEQ ID NO: 8277 - DNA, 867 bp, Zea mays
  Peptide Sequence Number=SeqID_50056
atggagcccacctcatcggcgtcgatcgcgcggcagacgtgggagctggagaacaatatccccgcggcggcctccgacccggacgcgatggacgcgatctaccgctacgacgacgcgtctcaggcgcgggcgcagcaggagaagccttgggccaacgacccgcaccacttccgccgcaccaagatctccgcgctcgcgctgctcaagatggttgtccacgcccgcgccgggggcaccatcgaggtcatggggctcatgcagggcaagtgcgagggcgacgccatcatcgttatggacgcattcgcgctccccgttgagggcaccgagaccagggtcaatgcccaggccgatgcctacgagtacatggttgactactcaaccatcaacaagcaggctggaaggttggagaatgtggttggctggtatcactcgcaccctggctatggatgctggctgtcaggaatcgacgtgtcaactcagatgctcaatcaacaattcacagaaccattcttggcagttgtgatagaccccacaaggacagtttctgctggtaaagtggagattggagcctttagaacatacccaaaagattacaagccaccagatgagcctgtatctgagtatcagactattccactcaacaagatagaagattttgctgataaactagagcaagctgaaggccagctggcacacagtcgatttggtggtatgattatgccatcgcaacgaaagaaagagcaagaagagtctccactggctaaggtcataaaagacatccttttcaactctgttcacccgtcaagcaaggcaagcacaagtgctccaccagattcatccggtcctgagcctatggttgaagcctga

SEQ ID NO: 8278 - DNA, 216 bp, Zea mays
  Peptide Sequence Number=SeqID_50057
atggaaaggaataccatctgttgggatgtcaccatttgcttgttggtggtctacccaacaaagaaaacttgcatcagcaaatgcttctcaaataattcagtcactccatgcaggttttgtcccagactgtaccatattgagtggggatgtcattatacgacatcttgcacagcttctgagtccgaaatctctacaactattaagaggggagtgtag

SEQ ID NO: 8279 - DNA, 255 bp, Zea mays
  Peptide Sequence Number=SeqID_50058
atgacaagagatggattggatgcccctgccaattcggttgcggtggtcactggttcctccaccgcggcagctggttccttcgaggcagctgccttgcctgagagggttcttcgaccagagggccgcccaaagatggctgacatcggcgtcgccctcgaggtaagggtggaacctcccgccactgccaccgccccctccaccacctcaatctgccgcgccgcgggaggagtagcgattgggcgggctaccccctaa

SEQ ID NO: 8280 - DNA, 843 bp, Zea mays
  Peptide Sequence Number=SeqID_50059
atggccgctgctggtggatgcacgacgactagtggatgcacgacggtggccctgaacggcgactggtggatgcacggcggcgctgatgatggaccgatattttatcggaacttcgttgttgggcgccaccacgccatacaggacggactctccatccctgcctccgccattatcgccccacgctcgcgctccgtcgatggaaggcgccattctagggatcctccgcggctccactatcctccaaatccttggccctctcgtgatatccccacggccccgccgctcccacccctgtcctcccgacctcttcgccgggtccttgttcccgtcgtcgaccgtggcccattccgccagtcggcatcaccctggcctccgaccaccaaccccgctttagttcgccactccctccccgtcggtgcggcggccgtcgccggtgctaacgccaagaacgtctccccgccgccggtggcggcagcatggccagggggaggaggggcggaggaggccgtggcggggggcaaggaggagtggcagctcacgccgcttgacatgggccttggcgtcggcgaggggtgggacgtcgccgacgccgtggcgccgcccgggctcgcccccgaccacaccttcctcaggtggatcatcggcggcgaggacgcgtctgcgaccatggggtctgtcatggactcgccggtccttgagctggaccacgcgccgtccatgatgtcgctggcgttcggttccaccatgccgttcgcgccgaccttggaggacgccaagccggtgcccttcggccacacacccaacttcttcggctcgcacccgtccctgaacgcggcaccgtag

SEQ ID NO: 8281 - DNA, 444 bp, Zea mays
  Peptide Sequence Number=SeqID_50060
atggcggggctggccgcggcggccgccgcgctgctgctgctctgggccggtggggtctccgtcgctaaggttacagaggatggaagattaacagtcccaatctggcgtagctttgagctccataataccaaactagcgaacgcttgccgctactgggagaccgtgtcgcgcatcgtgggaaacccagaactcttctcggatggagtactcctacgtcggcagagggtgcagcgtcccccgtcgttgccgcagcgaatcctaccggaagcagcagaacgcattgccaggctgggtcatgggatcatgtatgcggacactcctgcggccaccgcacagtcgcagctaccatctgatctttgcagagcgcccagcttgcaccgtgggattcgctcggtgtacagtactggttccaaattcgacgcaaacgcaggcctggagttttag

SEQ ID NO: 8282 - DNA, 99 bp, Zea mays
  Peptide Sequence Number=SeqID_50061
atggcgttcgattatggtaggctgacagctcagaaatatatcgaagcagctgaatttaacctccatgtaaacattagccttggggcactatggccttga

SEQ ID NO: 8283 - DNA, 321 bp, Zea mays
  Peptide Sequence Number=SeqID_50062
atggaactccgagaacttagggtttctggagttagtaaaggaattcaaagggtaggggagtcgctgacggtttgcagaaaagtctctatagttctaattctttacaccttgaagccctcgacgggggacggcaatgcgcagggctccgacgagctcgtgaaccggctatttcgctcagcgaccgggcggatggttatagggacgaacgcgttccagccaaacgacagtggggatgaccaaattgaggctggggaagggttcacagagcaggtgtgtgttccggtgaaaggcttcggccgaatttcgattggttggcactga

SEQ ID NO: 8284 - DNA, 1158 bp, Zea mays
  Peptide Sequence Number=SeqID_50063
atggaggcccaggcccacacgtcatgcaaccggcgcgccggttcctacgtgcaagcaactgcaccgccactcgcaccactaccgcgcctcctcgactgcggaaccagtaccacgactcgaggcaaccttgcgtatgacccaacagtgccggcgggcagaagcagcggtcacgtcgtcagccaagctcatgtcacctcgtgggacagcaagagaaccctctctcacggtgacacctttggcaggagaagcaagcgacgcttcaccttcgccataatgaccgtgtcaaaaagggaccgggaaagggggataccccgaaaagggatccttctccatgaaggaaacaggcctcgagcctccctactgatcagaggttcaaaggctggcccctcggaggggttcaacagccgcctcagagcgcttgggctccgcgcccactactggtcagaggttcgaaggtcggcccctcggaagggttcaacggccgcctcaggccactcgggctccgcgcgcactactgatcaggggttcgtaggctggtccacgaagggcgccataggtaactccgcttcgcctgaccccagggctcggactcgggctcagccccggaagacgacgaactccgcttctcccgaccccagggctcagactcgggctcagtcccggaagacgacgaactccgcttcacccgaccccagggctcggactcgggctcagccccggaagatgacgaactccgcatcgcccgaccctagggctcggactcgggctcagccccggaagacgacgaactccgcttcgcccgaccccagggctcagactcaggctcagccccagaagacgacgaactccgcatcgcccgaccccagggctcggacttgggctcagccccgaagacgacgaactccgcttcgcccgaccccagggctcggactcgggctcagccccggaagacgaggaactccgcttcgcccgaccccagggctcggactcagccctggcctcagccgacggtctccgcctcgcccgacccaggggctcggactcgacctcggcctcggaagacggactcgacctcgacctcggaggagcctccacctcgcccaacctggggctcgaaccgaccacgtcacaggaggcgccatcattaccctaccctaa

SEQ ID NO: 8285 - DNA, 1038 bp, Zea mays
  Peptide Sequence Number=SeqID_50064
atggcctcggtgggcgtggcacgctcttctttgggatttcagaatggcacaagttctagcagtgacccagatcgtcttcccaacgagttgggcagtatgagcataagggacgacaaggacgttgaagatattgtagtcaatggcaatggggcggagcctggtcatatcatagtgaccagcattgatgggagaaatgggcaggcaaagcagaccattagttacatggctgagcgggtggtaggtcatgggtccttcggaaccgttttccaggccaagtgtcttgaaactggtgagaccgtagctataaaaaaggttcttcaagacaagagatacaagaatcgtgagctgcaaaccatgcgagtgcttgaccacccaaatgtggtggctctaaagcactgtttcttctcaaagactgagaaagaggagctttacctcaatttggtgcttgagtatgtaccggagactgctcatcgtgtcatcaaacattacaacaagatgaaccagcgcatgcctttgatttatgcaaaactgtatatgtatcagatttgtagagccttggcatacattcacaacagcattggagtgtgccacagggacattaagccgcaaaatctcctggttaatcctcatacccatcagctaaaattgtgtgactttggcagcgcgaaagttctggtaaaaggcgaaccaaacatttcttacatctgttctaggtactacagagctccagagctcatatttggtgctactgaatacacaacagccattgatgtttggtctgctggctgtgtgctcgctgagctgcttctaggacagcctctgttccctggagaaagcggtgttgatcagcttgttgaaatcatcaaggttctgggcacacccacacgtgaagaaattaagtgcatgaatccaaattataccgagtttaaattcccgcaaatcaaagctcacccatggcataaggtagggattttgtattggattgtgtgccctctcttcctgtccctaacctccaccaaggttgacatcttccattga

SEQ ID NO: 8286 - DNA, 333 bp, Zea mays
  Peptide Sequence Number=SeqID_50065
atggcggttcgaggatggcacgatgtcgttgttgtccatcaacgatgcctctgctgcccagttcctgctcatgtccacgaaatcaccattgtccaccaagatgcccagctctcatcagcagccgcgcgcatgtgcatatcgccgacgggcgcatgctctcctcatcgtcaccggccgacacccgcgtgctctcctcctcgtgctggtctatcgggtgctctccttctcgtcaacatcggctgcgcacgctcgtcatcgtcgccatcggtcgcgcgcttgtcctcctccctggcggcctcgcacgctcgtcatcagatagaggatgtacagtga

SEQ ID NO: 8287 - DNA, 903 bp, Zea mays
  Peptide Sequence Number=SeqID_50066
atgccaattaataacgcaccccttgggtggagtatattcattgacctgcctgtccctggcctgcggggcccacgtgtctgccagggcggcggcccggcggtatatatacccaccgcttcgttcctccacccgcagccgcagtccaccagagcgcacgcgcaaacaagaggaggagagaagctgccattgccgacgaccgccaaggaagggattccggaaggagggggaacccacgggaggcccagcgctgggatgttggccgcggacgtcagctccgtcgcgaggctgctccgcggggaggcggtgaagaagggcgggccggagatcgtgacgatggatcttctcggcggttgtggcggcggcgtggcagcggaggacgaggtcgtggacctcgatgtcacggtgcctgccggctgggagcgacggcttgacctcttgtccggcaagacgttcctgacccctcgccaccagagcgtgcaaggcggtcaccaagacctcaaccttcctcctccggcggcaggatccgcgtcggcgccaaacaccaacaactcgtcagcagcggtctgtaccctcgacatggtccgctccgccctcgagcgcgcgactgccggaaggaccgccgcgtcgcctgcaacgtcttccacatcgtccgcgtccacctcgtcgtcctcctccgcgggaaagcgcaaccgccggtcgccgctgcccgcgactcccgcgatgcgcgcagccgcgtgcccgtcctgcctcacttacgtgctcatcgccgaggcggacccacggtgcccgcgttgcgcggccagggttccaccgctccgcggtaaggccgccggcgccgctaccgtaggtagtggcaagaagccgaggattgacctgaatgcggctgctgatgagatggagtga

SEQ ID NO: 8288 - DNA, 342 bp, Zea mays
  Peptide Sequence Number=SeqID_50067
atgaattggaagcgcaagagctccggcagcaggtgcagggaagaagagcagagggagcggcttatccagcaggcggcggcggacccgccggacggtttgcgcagctgcaagggctgctgcgtgccgcggggctgcgtggcggtgctggtgggcgggggcgcggagccggaggagcgggtggtggtggacgtgcgcgcgctggggcagccctgcgtgcgggcgctgctggacatggcggcgcgggagctcgggtacgaccagaagggcgtgctgcggatcccctgcgccgccgccgagttccgacgcgccgtcgccgccgacggccaccggtgcatgcggtag

SEQ ID NO: 8289 - DNA, 411 bp, Zea mays
  Peptide Sequence Number=SeqID_50068
atgaagaagtacgcttcagttatccgcgtcatcgcccacacactcagttttaactgtgctctgctcacacgttatattatttaccttatttcagatcagaaagatgaagggtttgaaggagaagaaggctcacctcatggagatccagagaaggatgagatgattgacaagaaggtcgtgactctccgccagtccctgctgaagcagacctctcgactagccctagagaggagatcaagctcaagttcatcgacacctcgtctcatggtcggatctaaggagtgggcaaggtccgctactgcctcgtccaagtttgggcatgggcgcttccagacaaacagaggttctttggcaagctcaaggcctaagctttctgctgctgcttctgctggagatatcaggagaacatga

SEQ ID NO: 8290 - DNA, 318 bp, Zea mays
  Peptide Sequence Number=SeqID_50069
atgcgggagcggctgatccccgccgcggggtgcgtgccgccgggctgcgtggcggtgctggtcggcgggggcgacgagccggagcgcgtggtggtggacgtgcgcgccctggcgcagccctgcgtgcgggcgctgctggaggcggcgcagcgggagttcgggttcgaccagaagggcgtgctccggatcccctgcgctgccgacgagttccgccgtgccgtcaccgccggaggccaccggtgcaggcggcttggaagggcagacggtggttcacggccgaggtacaattgcacgctttgtcgaatgcccgagttgtag

SEQ ID NO: 8291 - DNA, 906 bp, Zea mays
  Peptide Sequence Number=SeqID_50070
atgaccaccgcgcggctcgtctcaacatcccccgcccgcctaccctccacgtcggcttccccgattcccagaacctcgctgtgtgttgtcggtcgtgcccctgctttctccgctagggcgctcggcttctcgcttcgtctcaagccgtcgcctgccatggccgccgccggcccccctaccgcgcatggagactcaataggtggatcttctaggattggagaggttaagagggtgaccaaagagacaaatgtgcacgtgaagatcaaccttgatggcactggtgtcgccgagtgtagcacagggataccgttcttggatcacatgctcgatcagttggcatcacatggactctttgatgtctacgttaaagcaataggcgacacccatattgatgatcatcactcaaatgaggacattgctttggcaattggaacggcactacttgaagcacttggtgatcgaaagggaattaaccgatttggtcattttacagcaccgcttgatgaggcagcggttgaggttatactggatctgtctggtcgccctcatttaagctgtggcttagatattcctactcaaagagttggcacatatgatacacagctggttgagcacttcttccaatctgtggtgaacacatctgggatgactcttcacatccgtcagcgaatttgcatgaccccgtccctatcacctgatctcgctccatactgtcttttgaagcttgctgggaaaaactcacaccatatcatcgaggcatctttcaaagcgtttgctcgggcccttcgacaggcaacagagtatgacctgcgccgtcaaggcactgtccccagtttctgccaacaaattaacgggagagctgagaaaatacgagccctccaattatctgggaaaagggatggataa

SEQ ID NO: 8292 - DNA, 1143 bp, Zea mays
  Peptide Sequence Number=SeqID_50071
atgtatcttattggtactacaggaaactcaattgatatcaacaagctgggaacactgccgctgaatttagaggctggccaaaatggttccataaaaaaggttacaagtattcctgtgatgccacattctgggcacaaagggcaagacaggataggatgttgttgttgcacttcatcgagtacttggcattctaaaagaggctgggcaaaatggttccataaaaaaggatacaagtattcctgtgatgccacattttgggtcacaaagggcaagataactcccaagtatttatctaacagaacaggcagggtagctgggcaaaaagaagagacacaaaatagtcaaggtcatgatgataagcaaatgaatacgaaggatgctaaattagttggataccctcatagtgatgaagaggaacatcttgatttcacatctctttcatcctttgaaagagtagaaggtcatcttaattttgttcccctggccagctactgcaatttacttgaaccagggaagcatactctatattcaggacgctttgctccagttggatgtttaagggaagttccagtgagggggatcgaagggcacgaaggatacattagattaattgaggccaaaaagaaaggaaagggatatttattagtccacaaaataatatgtacgaggagatttattagtccacagaataatatgtaccaggactgcaagatcgttgaaggccagttatacacaaagaggttgaatgaaaaacagatcacatcgctgctaaaggttcaagtaggtaatactctagagtacataactgacaggaagttaggtaaaggtggttttggtcaggtctatgttggtcgaagggtttctggtggagctgcccgcactggtcctgatgcatatgaggacgcattgaaattagagcatcgaaacagtaaaggatgcaattatggccctccatatgagtggcaggtttataacactctcaatggttgctatggcataccatcggtccactacaagggtcgtcagggcgactactatatacttctcaacagtttttattcacttatatttttaggtaatggatatgcttggtcccagcctttgggacgtgtggaattcaatggggcaggccttttagactaa

SEQ ID NO: 8293 - DNA, 432 bp, Zea mays
  Peptide Sequence Number=SeqID_50072
atggaggctttgaatgtgtcttggaatgggttgctagctcttgtattgaatgttgaagaaaaagagatagggttgggacgttggggtgtgaatcgaccaaaggtggacttactcgaccggaggtggtgcccgctgaggttcgtcgccattggcccgtaccaccagagtgagaagcaccttgcgaatttgtatgagatgaaaagcgccgccacctactacgtctgccagcgcgtcgtcgtcgcgctgaagaaggtgaggcaggcggtgctcgccatgtctggtggtccaggtgctcctgctcgtcgtcccgtcggatcacaggagcgatctgcgaggaagatggggaagggagatgaagaaacgtcggcggcggctgtgtgcgctagaaatgttagggtaaagaaaaatgtgaatttggtgaatgtattttaa

SEQ ID NO: 8294 - DNA, 957 bp, Zea mays
  Peptide Sequence Number=SeqID_50073
atggaccgaaggcggcggcttcctctgccgccgtcgacgaggttcgtcttgtgtgccctcgccggccgctcccccgtcaccgtctgtgctgctgactgtgcagtgatgcagagcagaacgatactgctcccacgaaacagcagtaatcggcagctcagaccgcccccgctcgccaaccagccctacctctccgcgccgctgcaaaccgtccgccatccccgcttgcccgaccgccggattctgcccccgccactaccaaacgcccgccgctaccgcacgcccgccgcagcgcacgctccgcgaatcccgcacgcccgccgtcgcgaatctcgtcgctaccgaaccgcccgcacgcccgccgccgcgaatcccgccgctaccgagccgcccgcctaccacccgcacgcccgggaaccctacggccgccgcgactgccgcatatccgcccccacaccgccagccatgccgcggaacacccgcctccctacgccgctaaacaactgtcgagatcgtcctctcccctcctttgccgccaccgcctcctggtcccgcacatcagcctcgcctccgcccgttgccacgaccgcatcaccaagaactctagcgcccccgaacccgatcgacgccatggtgtcaaaggccagcaagaggaaggccatcggagagatagttgaacagataccagaagaatctggtagaagctatttagaaatatgcgacgatcttgagaaaaaacctcccaagattatgtggaatcaatcatttgatctgcgctcccccatcgccaccagcgatgacgccacccctgctgcatccatgggtgccaggaaagatggcagcactaagacaattagcaaggctcttgttcttggtgttaacgtcaagatgattgcgggtgatcagcttgctattggtaaagagactggaaggaggcttggcatgggcaccaatatgtga

SEQ ID NO: 8295 - DNA, 1029 bp, Zea mays
  Peptide Sequence Number=SeqID_50074
atggcggaggacatcatcttagattttacaaaatcaaagaagcaatcaaatatggctgtcatgatcttaagatacttcaacgtgattggatcagacccagagggacggctaggagaagctccaaggccagagctacgcgagcatggacggatatccggtgcttgctttgatgcagctttgggaatcattccagggctaaaggttcgtggaaccgattactccactgcagatggaacttgcgttagagactacatcgatgtcacagatcttgtagatgctcacgtaaaagctcttggtaaagctcagccaggcaaagttggaatctacaatgtcggaacaggccaaggtagatcagtgactgagtttgtagaagcttgcaagaaggcaacaggagcttctatcaaggtcgaatatcttgcacgtagacccggagattatgccgagggaacacaggaaatttcggaaattctaggtacggcacttgtcacctcaaatccttcaaataggcagcctgtcctcgtcctcgacgcacgtgagggccgactccactccctctgcccccctcctgctcggctgctccgcctctgctgcggcgtcgcaatgtcccagtcccagatcgaggcgtacacacgccgggcgggggcggccgtggcgctcgccgcggcgtccgcgctcacgacgggcttccccgcgctcgaaccgcgcgcgcatgtcgtgctggccctgcacgccatcctgctgctcggctgcgctgcggtgctgctctccccggcgcacggagacggaggcccagaggctgcccgggggacgacggtgctgggatcgctgcggtggctcggcttcgccgggatggcgctcagcgcgctccacgtggacgcggaggaggcgccgcggggcacggggaaggggggaaggggtgccccggccccgcaaccgcggctggcggtggaagaagatgctaacggcgaggaggccaacgccatgcccatgacgggggatgctcgcgtcgttgttgattcgaaggtttga

SEQ ID NO: 8296 - DNA, 156 bp, Zea mays
  Peptide Sequence Number=SeqID_50075
atgaccttgagatccaagacaaaaaaaggtgttgaaaatcaaatagctgatcatctgtcaaggttggagcaagatgaggtcatgcacagcttcctgaaggctttaaaggtgtttgatttgtctttcagaaatttcacccatgtgaaccttgaatag

SEQ ID NO: 8297 - DNA, 1245 bp, Zea mays
  Peptide Sequence Number=SeqID_50076
atggcagctgatgaaaggttgtttaaggacctagacagaaactttacctcaaatatcaaaattggagatggaaacttgattgaagccaaaagaaaaggcaatgtgttggtaagcactggttcagaccaaaatttgcttagtgtgggccaattagtggaaaaaggttgtaccttagtctttaaaaatggttgttccattgttcaagactcacttggtcaagagcttgttatagtagctatgactgataggtgcttcatgttggatgtgagccaagtagaaagaaaggcttacaccagtcttgctaatagcactgatctctggcataggagattaggccatgttaatttcaagtcccttgatctattgcataggctaaatttggttgatgacatgtctaaaattgaagctagtggcactgtttgtgaggtttgccagcttggtaagcaggctagattgccttttccagttgatagtgcttggagagctcaagagaggcttgaattggtgcattttgatgtttgtggtcctatgaaaattccttcaatcagtgacaacaagtaccttgtcttgtttatagatgacttgacaaggttttgttgggtttattttttgaggcagaagtcagatgtgtttgagacattctacagaagttgtgtgaaagtgctgggattcatcatcaactcactactgtatatactcctcaatagaatggagtatagcaagcttccaaaccaattttgggctgaggcagtcaacacctcagtatatctgtttaacaggttgccaactagagcagtcaaaaacaaaactccttttgaggcttggcatggagccaaaccagtggtaacacacttgaaagtatttggttgtgtgtgctatactcatgttccagtggaaaaaagtaccaagcttgaaagtagagctgttccaggaatttttgttggctatagcagtaataagaagggctatagggtgtttgatccatcaacaaagaagttattggtcagcagagatgtgcagtttgatgaagagagggtatggagcaggaatggtgttgaagcaggcttgcttgaagagaatcagttggacttggtcactgaacctacagaagaaggatcaaatgttgatgctgttgatgatgcaccagtgagaggcactagaaccttggctgacatttaccaaagaagcaatgttgcggtagttgagcctactaactatgaagaggctgccaaggataagaactga

SEQ ID NO: 8298 - DNA, 1644 bp, Zea mays
  Peptide Sequence Number=SeqID_50077
atggaaatctactactctatgttcatcgctccttttacaacaatgctaagcttctccaccttacttgctttcatcacttttgctttgagtcacctctttaagcttcaatggcagcgcaatgcccaaaagcctaaacagccctctcttccgccaggccctaaaccttggcctattgtgggaaacctccctgaattaatcataaataagaagaaaacttcggtgtcttattggatacacagtttcatgaaagaaatgaacaccgaaattgcttgtattcgtctaggaaatgttcatgtgattcccgttacttgtcctgaaatcagtctccaattcatgagaaaacaggatgctatttttgcttcaagaccacttaccatggccactgatgtcctctcaaaagggcacttaaccactattttttcacccttaggagatcagtggagaaaaatgaagagagttatggtcagcgagatgctttcacatgaaagacatcgatggcttcacgagaaaagagttgaagaagctgataacctcgtgcgttacgtacttaaccaatgcaaaaatggtgatgaaggcggcctagtggacttaagactggttgcccgacactattgttgcaatgtgataaaaaagttgatctttaatcgagggtactttggagaagggaaagcagatggtagacctggttttgaggaagaagaatacgtcgacgccattctcgctttagtcattcatctttattccttttgtatatccgattactggccatttttgagaggcctcgacctggaggggcatgagaaaatcgtggaggacgccactagggttctagagaaatataacaatcccattattgaagacaggattcaacaatggagagatggcaagaaacatgaacctcaagacttgcttgatgttttggtttctttaacggatgacaatggtaccccactactgtccgcggacgagatcaaagctcaagtaaatgaaattatgattgctgcagtggataatccatcaaataacttagaatgggcacttgcggagatgttgaataaaccagagacgctacaaaaggccagagacgaattagataatgtggttggaaaatataggttaatacaagaatctgatgtcccacaacttaactttactaaggcatgcgccagagaagcctttagactccatcctgttgcagcatttagccctcctcacgtgtccgtgactgatacaacagtgggcgactacttcattcctaagggtagccatgtgatagttagtcgggttgggcttggtcgaaaccctaaagtttgggacgagccatgcgagttcaagccagaacgtcacctccagaattgtaataaaggcgaagaagtggtgcttgaagagccagatttgcggttgtttacattcggtagaggaaggagagggtgccctggagtggtgcttggaagcttgatgactaccatgctgtttgcgaggctattgcaaggattcgattggagcatcccgactaaccagggaaccattgatctttgtccaggaaggggagttccctttctggctaaaccactgcttgctgttgcaaagccacgattgccaccgcatgtctactctttcttaactgaaagtgaaatacagtga

SEQ ID NO: 8299 - DNA, 159 bp, Zea mays
  Peptide Sequence Number=SeqID_50078
atggattctatgataggtttacctctgactcctaaaaagaaagatgctatttgggtaattattgatagattgatgaaattagctcattctacaccgagatccaaggttcacttcaaggttttggaaaaagttgtaagaagccttgggtacaagacataa

SEQ ID NO: 8300 - DNA, 630 bp, Zea mays
  Peptide Sequence Number=SeqID_50079
atggtcgaagaattgattcgtcttgataaccagcacatatccatcgaacaaatgaaaatgtctgtagatcgaatattggaatgctatatccagaatatgtatggtcctccatcatcgttggtagagaattacctgcgggaagcgggtttttggaacgtggtgacggtaggccggggatgcaagttggacccaaaacttatcagtgcattgatcgagaggtggagacccgagacgcacacattccatcttccatgtggagagtgcactatcactttggaagatgtaaatatgcaattaggattgtcggtggacgagtacccaatcaccaggtctgtccaatctagcgattggggagcggtgtgctacgagcttttgggcgctattccggagaaaattaacggaggtcggatcgagatgggctggctacgagacacattcccggagtcggatgatgattcaactgaagtagaaataattcgatatgctcgggcatacattcttcagataattagaggttatttgatgccagacttgtcatggaacctcgtacatctaagatggctgctgaaactcgttgattttagagcagctggtgaattgagttgggggtctgccatcttggcaacataa

SEQ ID NO: 8301 - DNA, 363 bp, Zea mays
  Peptide Sequence Number=SeqID_50080
atggaagctaactcaattactgagatagaagaatcagaatctgaggaagaaccaaatgatcctgattcgatgaaggaaccggaagcctttcaaccaaatagacccatttcttcaaacactgtgaagaaattagaattgttaattatgatggatatgatcaaatttatgcataaccaacaacaagcttattggaaatatgcaaagattagagatgactttgtaagaaatacttttaaaaatatctctaacaatttcattcttgagctcccagattatatcttcgagtcatggaaggaagatgggaatgtaagcaaggatgaaatagcaaaggaggaagacgatgaggataagttaaataaataa

SEQ ID NO: 8302 - DNA, 156 bp, Zea mays
  Peptide Sequence Number=SeqID_50081
atgtcagaaatggtttatgaattaactcatgttggctttgtccaagttgtggttggattacgccacattaaatttataaaattatacattgagctggaaaagtctatggacatgacaacctttgaaaaaggaactaaggatgaggtaagtatgtaa

SEQ ID NO: 8303 - DNA, 381 bp, Zea mays
  Peptide Sequence Number=SeqID_50082
atgaggcactcggtgccaattcactttggtttagccgatgagacactgagtactgattgggagggtggctacttcccgctcacgctccatttcagtgaagattatcccagcaagcctccaaagtgtaaatttccccagggctttttccacccaaatgtttatccatctggtactgtttgcctttcaatcctaaatgaggatagtggttggagaccagccataactgtgaagcagattcttattggaatccaagatcttctggatgctccaaaccctgctgatcctgctcaaactgaagggtatcacctcttcatccaggatgctaatgaatataagagaagggttcgccagcaagccaagcagtacccacctctggtctag

SEQ ID NO: 8304 - DNA, 513 bp, Zea mays
  Peptide Sequence Number=SeqID_50083
atgcaggcgcttaatggaatggtgtttgatcttgagaaaggatcaactttgttcattgattttgcgaaatcaaattcccgatcaaagcacccaagaacagatgaggaatggactggctctaataagaaatcgaggggatcattttcgaggtctaccagtgattcgtgttttggaagcgttcatgtgtctggaatgggtaattctgcttacagcatgattggttatccacctgcacaaagttcgggaaatgttgatgccaatgctgagtccacagctatgaaatcgagtgctagcccatgtccgacactttttgtggctaatctaggggcaagttgtacagaagaggaactaattcaagtattttcaagatgccctgggtttctgaagttgaaaatgcagagtacgtatggagctccagttgcatttgttgatttccagatatgcgaaatcccggatgggattgcgaaggaaacggaaataaacggtattgaagcagagattggtttgcaatag

SEQ ID NO: 8305 - DNA, 258 bp, Zea mays
  Peptide Sequence Number=SeqID_50084
atggagaacatcaaaatccgagctaatccaattgaagagcccgaagtattcatggctagattccttgcagggcacctagattgtttaaacgaagagatgaaaggtttaagccaaatgagcctacagatccatccaaagatagaagtatgcctaatacatttcgtggttttacttgtaataaatcttctcaaagtttcaccagaaaacttaaacacacatcttactacaagctccaaggaaggggacatcgtgctataa

SEQ ID NO: 8306 - DNA, 111 bp, Zea mays
  Peptide Sequence Number=SeqID_50085
atgaaacactggaagctccggagagccattaacgagaagcttattcggctgtataacgggaagctcataagagccataattaggaagctcatacgagccaataacaggtag

SEQ ID NO: 8307 - DNA, 734 bp, Zea mays
  Peptide Sequence Number=SeqID_50086
atggcttcctgttctccctccgcccttcgcccaccgtcgtggtccccgcccccaacgcccctgctcccaggccgtgatcctccgcgcgattcccgtcgcgcccgcctgcctacgcccacctgccacccgctaaacccggcgctaaccgcccgcacgaccgccgcgaacagcacgactgctgcaaaccacccgcaatccagactccctacgcccgcctgccagccgctaacctcgccgctaaccccgccgctaaccgcacgcacactgcaaacctcccgcacgctgcgcctccctacgcctgctagccgtgaccgccgccaacccagccgcgaccgctccgcgaaagcagcaaatgtcgcattccgcccgcacgcccgcgcacaattcgctccgagctcaataccccgccgcgaaggtgcaaacatgagctccgtacatgccgcaaacaaccgccctgatcaatccgccgtcagcaatttgttcccctgctcaatccccgggcccctttcatttctccgcccctttcatttcccacgccagtgtgccgctggagaggaaggacgaaggagaaggagcttgccccgccatcggagaggaaggatatctgatattgctcaaccgcgcaggcctcgaccaaggcggccgaggatgtcggcggcgtgggggcagggctgcggcggcaggggcgcggcggccgaggatgccggcggcgtcggacgcggcggcgtggagag

SEQ ID NO: 8308 - DNA, 219 bp, Zea mays
  Peptide Sequence Number=SeqID_50087
atggatcgggggcacggcggggcgagatccacgatgactgctcaggagtgggcgagatctgtggttgctgctcgggcgtggggcaggatctggcgggagccgcggctacctgctcgagcgtggggcaggggcacggtgttgggcgacctcagcagggacggagccacgcgagctgggcatgggggtgtggacgctgacgttgctaaattaatagagtag

SEQ ID NO: 8309 - DNA, 381 bp, Zea mays
  Peptide Sequence Number=SeqID_50088
atgtcgcccatcctgttggaggattgggaatccgccggtcacggcgtgcgtccacgagtcgaccggctcagctccagccgaggctggcgagcccaccgcatcccgctcggctcccgccgcggctgcgcggtgccgcgcaagctcgcaccacgcgtcgcgccggaggcaggcccgccctcccgtcttcgccatctccagcggaaccgcatgccccaaaagcgaagccaaccagcacaaaaaggagcacaaagctctctctccctcccccctctctctctctctctcctgttccccgcgagagtcgctcagggccgcgacgaggagaagcggcagcgcgtcacctctccaatggcatccccgtccctcctccgtgcaacctgt

SEQ ID NO: 8310 - DNA, 132 bp, Zea mays
  Peptide Sequence Number=SeqID_50089
atggcgaattctcggattggacgttacaagcgtttaccatgcttgctgtttttgtattggaaatttttgattgggttcatgcttgctacagaagataaacaggatggccaaacatatgaaacagggatttaa

SEQ ID NO: 8311 - DNA, 192 bp, Zea mays
  Peptide Sequence Number=SeqID_50090
atgtctactctctcagacccctcaaaagaagatacttcacctgagggttcaggtggcgtgctctaccagcaatccaccatgaagccgaaggcgcccaaggttgagccgaaggaagagaacgacaacgacgaggagcagcagaaattgctgcagatgcagggtgttcaagagagcaatccaactcagaaataa

SEQ ID NO: 8312 - DNA, 932 bp, Zea mays
  Peptide Sequence Number=SeqID_50091
atgtgtcaacgagggcatcctagtcggacttcccccaacaatatcttgactgttgcttctgcacttgagactgtctctactacgccggacagctaccgtgcaacgtcggcagtcggcatcatcatgcttgactcgccgctcgcgttgcgcgccaaccaccctataaaacgttcggcgccgctagcgcccacggcacgcatttcaatgggcaactgccaggcggcggaggcggaggcggcgacggtgctgatccagcaccccggcggcggcggcacggagcgcgcttactgggcgctctctgcagagaccgtcatggcggccaatccgggccactacgtcgcggccgtcatcaccaccgcgcagccggacgcgggagacggagcagcctcttctgctgccgcgcccgtgaagcacctcaagctgctccgccccgacgacacgctcctgctcggccgcgtctaccgcctcgtcagcttcgaaggtactgtgcgtgcgtcgtgccctggactggcgccgaacgggctcatacgttacgttgctggccgtgttaggcccggccgtcatcttgctgcgcgcgcatcagaggtgctgagggagttcgcgtcgaacaagcggcaggtgaagctgagccgcgtgacggtaagggccaaggacgaagacgaggacgtgaagccggcgtcgaagcatcgccgcgccagtggcgacgtcggagagcgcaaggaatccgagaggtcactcgccaaggtcctgcgccagacggaggagctggagccggaggcagacccgtcgtcgggccccagcgccaagcacaggcaagccgacaccgacacgccagccgacctggaggccctcctgccgcacagggcgctgctcggccaccgagccgcccggcaatggaggcccgcgctgcagagcatcgcagaaggcggagg

SEQ ID NO: 8313 - DNA, 1065 bp, Zea mays
  Peptide Sequence Number=SeqID_50092
atgccgctcccgatcccttgcacccgccatcccctacctcccgcccctgcaccccgcgggtcccgcgcgtgcccagccgtgaatcagccgccgcgcctcccgcagaacccgcctccacccgcgaatccagcgccgcgcctgaggaacaaccgcagagaaacccccgtgcgtcgtgccctcgcgaaccccaccccagccgcaaacgccacagacacctgtacgcacgcgcgcgattcgccccaatctacaacaagaagggcggcgggctggagaaggcgccggcggcgaccacaagcctgtgttcgccacggtggcggtgagctccccgccggagcagaagccgttcgtggcggcgggcgggctacccccggcgttcccggagctggcggcgtactacgaccggccgtcggactcgatgccgcggctgcacgcggactactccagctgctcggagcaggtgctgtccccgaagcagctggcgtgcgaccgggaggtgcagagccagcccaagatcagcaaatgggagcggaccttcgcctccgatcccgtgaaccccgcgggctccatgctcgaccccgtcagcgtactccccagtacatgaggatgtcctgcagcagcgggtcgccctccacgccccgcagcctatgcccgtgcacccccgccctacccgtcgcaccccccatacccgtgtcccccagctccgcctcgcgccgaacttcgccggctcccgtcccctcgcctgccacgagaggccccaaaatagatctcttcttccgacaatgggaagagcgagggcgacgtggtggtctcgacttcctgtgcagggagggatctctgggagtgggcatccctggtgtcgcccttcttcgcccgttgttgacaacggacacgctggagcgacagagctgcggtatcaggacgtggaggtggacacgaggcggtgcgagcgccggcattgcgagcctgcgaggcactggtgccacgtgcgcgctgcgggagaaggaggcggagctagaggcggcccgagcccgactgcatgttgtggagctagaggagtggctgtag

SEQ ID NO: 8314 - DNA, 870 bp, Zea mays
  Peptide Sequence Number=SeqID_50093
atgacgaaggagacggggggcggggttggcaatggccatcgccggaagcaacccgatgcttgtcactccatcgctaggcctaggcgcgcgcgtgtggactgtggacgtggtgtgcaccgctgcggtgtgtgtagtcggcggaggaggatcttgcagcctgggggaagcaaagcaacgaggggcttggcatggtgccttgtcgggggccacagcaaaagccaaaaaggctcaacggcgaatgctaatcggcgcatcggagagaaattggcaattcgcaaactgaattctgttatatggaatcttgtgctttctccgatgtacccggtccatgctcgtcactcccacaaattagccgcattaagcatgtggctggctaatcacaagacgtgcgacgtgagatcagcaactatatgtgtcggcgtttcgagaccgggggtccctaagccgacgagtgaatgtgccgcgtgcctcagcccagatgggtcgagcgcgtgggcgagcgcgaaggggggaagcgaggtggccggaggcgggcgtgagagaggtggaaatcccgcggccttcgtgttcgtcccgcgcccaggtcgggttgggcgacgtggaggctcatctgaagccgaggtagagtctgtcttccatggccgaggccgagtccgagcccctgggtcgggcgaggcggaggtcgttcggcagaggccagggcggagtccgagccctagggtcgggcgaagcggagttcgtcgtcttctggggctgagcccgagtccgagccctgggtcgggcagagcggagttcgccgtcttccggggcttagcccgagtccgagccctgggtcgggcggagcggagttcgcagtcttcgggggcttag

SEQ ID NO: 8315 - DNA, 579 bp, Zea mays
  Peptide Sequence Number=SeqID_50094
atggaggccttcgtaagatctgactcaggaacgctctcagcatcaaagcgaggggctcttgaaggcagtgactggcaacaaaaaaaccaagattgcatgactgatgatgacaatagatttctaagacctagaggccgtgtggatccgtgcgatggtgaggtcggcaaggaaggtcgcgccctacctcgtaccctctttcgcagcagctacacgtgggaccgcacgaaagcagggcccaccatagcaacgacagagcgacacccacgcggggatgaaggtgcaggtggacggagctcaattggggatttggggtggaccggtggggtgggcgctgggccaggctgctggatgcgaatgtcgcctttcactagaggggtcaccacgcccatgcccatgcccccgcatggcaacaaatggggagctgtcatccgtgtccacgcccacacccaggctgctggatccatcattcgtgtccccacacactttttacacgaaatcctgaacacgtggggcaagatcccaatggattttagcttccaatatcatcatgactcattgttgaacaagaagttcatctaa

SEQ ID NO: 8316 - DNA, 315 bp, Zea mays
  Peptide Sequence Number=SeqID_50095
atgggcattgattcacgtttaagcacttgtgttgacactcaatcaccaaaatacttagaaatggcccaagggcacatttccctttcagggaggagggccttcagccgacattccatggggttagtgcgtgcgcgggcctgtgtcggcctcgcctcgcggcggtcaatcgatggaggcgtcgcggacggctgcttcaacaacggcaaggtgtgcaaggactgggcactcctggttgagctggcgattgtggtggcagagctggatgcctggaccccgtggcattggagtggcggtttgggcactctccctcgttag

SEQ ID NO: 8317 - DNA, 708 bp, Zea mays
  Peptide Sequence Number=SeqID_50096
atgcgcttcgacgacgagaaagacagcgacgccgccgccgctccctccgcccggtacgtgcgcacgctacacgagctgcgccagttcaagactgccgggaaccccttcacggatgagttcttcgataccttcgacgccgtttaccagcagcagctggacatgctgaagaagctgcagcagcgccagcaccggctcgacaagaaggtcaagaccatccaggcgtggcgccgggtgtcaagcatcatcttcgcgaccacgttcgcggccgtgctcatctgctcgattgttgccgcggtcatcgctgccccgcctgtcgctgcggcattggccgcggctgctgcagtcccgctgggatccatggggaagtggtttgattcgttgctgaaagggtgtcaggacgcggtcaacagacaggagggggtggtgagcgaaatgcagtttggcacattgattgccatcaaggatttggagaatatcaaagtcctcatcaaacgggtggaggaggaaatcagctcaatgatagactgcgtagagtttgcagagcgggatgaggaggcggtgaaatttggggtggaggagatcaagaagaagctggaaagcttcatgaagagtgtcgaggatctaggagagcaagcagaccgatgtacccggcatatccatagggcaaggacccttgttctgggaaggatcatccgacatccaaactga

SEQ ID NO: 8318 - DNA, 1116 bp, Zea mays
  Peptide Sequence Number=SeqID_50097
atggggaacagtagtagcagcagcgggagcagcagtaagcgtccggggccgtcggagccggcgctgccggcggcagcggaagagctgagcgcatacgaggcagcgtgccggtcggatccggagctgcgcacgttcgacacgacgctgcagcggcgcaccaggcgcgccatctcgacgctggcagtgggcgttgaggtgcggtcgatgtcgctggactcgcttcgcgaggtcaccggctgcctcctcgacatgaaccaggaggtggtgcgcaccatcctcgactgcaaagaggacatctggaagagccccgagctgttcgacctcgtcaaggactacttggagagcagcctacagaccctcgatttctgtaccgcactcgaaaagtgcctcaagcgtgcccgcgactcccagctgcccctccgcatcgcgctccagcgagttttttgggattatgatcctcccgtcggacggcttcgctctcttggtatcccgcagcgctctatccccagtttgggatgctcgtgtgccagcactcgccgcattggtaccattgccggtgaagactccattaacagtgatgtagcaattgattggggcaccatacaagttgaggaaaattgggaagaagaaggagcacaggatgttgcttcagagctagtgttgtatgacaggttgggattattggatgaagataatcgcgaaacaagtgcaaggcaagatgcttgtagatctagagcatttaatgttcgtggcagatccgatgatgttgatgatgaaatagttgtggtacattgtggggattctataccagaagagcgaattttagtttgtgacaggtcaaatcctattatgaaggttggcagtttgtacaaggatatgaaagagttcagacttgctatgaggcaatacgcgattaacaatgagtttcgagacgttggattggaatattttgttgatgattacttttcagtggagtcatttaaaaaagcttatggtaggatcctagagcccctgggtgataaatctatgtggcccaaggtgcccatagcagatgaggtggaagtgcaaagaagaaaccctccagcaatgaaaatgacactgaaaggaagatactaa

SEQ ID NO: 8319 - DNA, 585 bp, Zea mays
  Peptide Sequence Number=SeqID_50098
atggcgtttcaggggaagaatcgccaggtcctcgaggtcgatccggcggacgatcctacagctgaggtggccaccgccttcgatcgtctctccgtttcgcccatccccaatccgtctgcatctgccgccgtcgttcaggtctgttctccttacgccctcaacaacagtggtacccagcagcctcagtcgtcgtccactcgtgatgccaccatggttcctttacctcctgcaagtgtgctgtcttaccggtaccaagaggtccttaattgccttcacgacgccattaacgagatgcaacaagtttcaatgaatttgaagtcactggccactgaccatcttgttagtcaacctgattccggtgaagaattgctagtgaaccaattaatgtggcgtgtacatgagcttgcgcaatcacttgataaagcatcaattcgttatcaacttgtgcacgacaattcttcgccacccttgtcggagtattgctacaacgatgattcagattcagaccatgaacctgacttgatgaggcattggtcactggaagatgttagctgggaagagattctggatcgtcaaatgaagtag

SEQ ID NO: 8320 - DNA, 429 bp, Zea mays
  Peptide Sequence Number=SeqID_50099
agggtatatatgttcatggaagctgatataattgtaaggtttgcaggtacagtgcctgcaaaggttgttctgcaacttacaaccgctttcagggaaggtgggctgtgcaaccgaaatggaaccttctcatacaaggatcatttgcgagagtgtcagactcctgtccttgcattggctggagataaagacctaatctgccctccagatgctgtttatgaaactgtgaaactcattccgaatcacaaggtggactatagagtgtttggaaagccacaaggcccgcattatgcacattatgacttggttggaggccgactgcaacaagaaagagatggatatgatggttactgcgagtgctgtgctgatcaatgtaaatttgacaaccacctgctgaacggactaccgaaactgattggccagttgaactaa

SEQ ID NO: 8321 - DNA, 672 bp, Zea mays
  Peptide Sequence Number=SeqID_50100
atgcgccctcccctcccctctctctctctcatttggatctcccgcgcaacaacctctcctctccctcttccacctctctctccccgtggtgccctaggatttggagacggcgatcaccggattttggaccccgaggtgagctcccctcccctcctcttctcctctctctctccctctccctcctcttcttccccccgcgcgcgccctccctctcccctgcccgcgcgcgaccccgtccccgccctcccccggcccgcgcggcggcgccccccgcccctccccccggccgcggcggcgctccccgcccctgctcgcccgcgcggcggcgcccgcccctcccccggcctcgcggcggcgctccccgccccctgcccggccgcggcggcggctcccgccccctgcccgcccgcgcggcgctccccgccccctccccggcgcggcggcgcccgccccctgcccctccccgcggcggcgatcccgcccgccccctgccgggcccgcgtgacgacgccgccctcccctgacccgcggcggcgctcgcccgcccctgctcgcccgcgcgacgccgctcgctcctacccgtccgaagatgctcccgccctccccgaacgcggtgggaatccgccaccgctcgaccacctcccaggccctgaccttgtccgcccaacctag

SEQ ID NO: 8322 - DNA, 780 bp, Zea mays
  Peptide Sequence Number=SeqID_50101
atggccgagctccaagacgaccaccgccccgagctcattggcctgggaaagatggctgcagaagatagtttatcatctctggtctccagtgaggacgagccagatttggatccaggggattccaaagagactcagcttaatccaggatcggtttctgcttctacggtgtcatatcgcagacaaacatcaaaagagagagctattgggttggctcctgaatttgctttcttcaaagcagagaaagatgagcatagtgaagatgatgatgaagagccttgtcctgactctcaggactggccaggctcattcgtaactactgtaaggatgtatgaagcaagagaagctaagttgagagctcgagagttgaattcttcaaagctgaacaaatctgcaaaacggcatctcagtgagtgttcatggctgagtgaggatgactttgagaaaacttttgggaaatgcagcattgaaagcttgcagttacattcagttcttagagaactgtatatagctgattgcacaaacgtggatgctatggcaattcttcctgctctacaaaagattaatcatctagaggttttggcaatgtttggaatacaatctctatgtgacaagtttgtgaaggggctcattcctgtgcatggttcaagtctgaaggagttagcatttgctggttgcttggaacttacctcagcttccatcaagactgttggggaatattgtcaagaattaacttcattggatctccgcaacttgaataggctgcgtgactcagcactgtga

SEQ ID NO: 8323 - DNA, 348 bp, Zea mays
  Peptide Sequence Number=SeqID_50102
atgcctctaccatccaccacagagactaaagaggccagtacacagaagaacaaagtggataaaggttcaggcactggtgctgagtctgggcctccacgttgctcgtcctcgacgactccggcctcgtcttgcacgaagacgacggctgctctatgcttgtcaactggtcctcgttgtgggggagttgaggacctcatcctcgtcaaccgccacttaccgacctccgtgagcctcctcgtcgatgtcctccaccttgcctccctccgcaccctctacctcggcttctggcgcttcacagacaccactgtactcccgcggggctgcgctgctgtgttcccctacctctag

SEQ ID NO: 8324 - DNA, 312 bp, Zea mays
  Peptide Sequence Number=SeqID_50103
atgaagtgtcccactgccaaggcgctttctgtggccaccctctcagctctgctcatcctcctcttctttgtcctgcgatgtggctcttctgcgtcgccatcgccgcagttgtctattgcgaggaggagcagaaggcttctgtggacgccatgccgtgatgccaactcttgctcgacgcctgtgagcgggttcaggcagttcttcaaggcgccagcgacagtgttcgagagcttgaagaagatgcccaagagcagtggatcacttcgcctgctggtctatttagttcaggataggcaccagcataatctctag

SEQ ID NO: 8325 - DNA, 204 bp, Zea mays
  Peptide Sequence Number=SeqID_50104
atgtggcctactgcccgtgatcggccaggccatcctacaggcggcatgcccgtccgctctagtggcaggcagtacgcctgtgctatggcatacattgtgctcatcatcactcctacgttgccagtgaagcttctgtcgcacgctgatactacgcaggctgcgaatatcagggcgcaaggagattgcactggcaaccagcattag

SEQ ID NO: 8326 - DNA, 1194 bp, Zea mays
  Peptide Sequence Number=SeqID_50105
atgaccttctccactgcgctcgcctgggcgatgcgtgtcgcggaccagatctggcatgcggcgatgcgcacggggagggaggccgggttgcgggaggggatttgcggcgtgggtgggcggttccctgatatcggtggccagcagccgactttgtggttagtccattctcttccggcgggatacgttgcggaccacttcgctcagctgctcgcgacggcggcttgtaccctgatttgggtggggaggatgcctgatatccagctgggatgccacactataaggtcccatggtaccaaagtggcaacattacacatgtatgactggattatacttttatgtcttgctgtacttgatggactgttaaacataatcgagccctttcaccgctttgttggacgcgacatgatgaccgacttgagttatcccctcaagggcaacacaatcccattttgggctgttccagtatgttctgctctgctgattgcgatcgtgctacccttggttatctttgctgtcatttacttcaaaaagaaaaatgtctatgatttacaccacggcatactaggtatcttgtattcagtgcttataactgctgtgatcactgatgcaattaaggatggtgttggtcgccctcggccagatttcttttggcgttgttttcctgatggcaaacctaattttaataatataaccaccgatgtgatatgccatggagaaaagagtgtcatcaaggaaggtcataagagtttcccaagtgggcattcttcatggtctttcgctggtctaggttttcttgcatggtacttggctggaaaacttaaagcttttgatcgcaagggtcacattgcaaaactgtgcttagtttttctgcctctacttgtcgcgtcacttgtggctgtttctcgagttgatgattactggcatcactggcaagatgtctttgccggcggcatcataggtcttacagttgcttcattctgttacctgcagttcttcccatatccctttgacaatgatgccctatggccacacgcatacttccaacagctagctgagacacacagtaatggtaatgcaaactcaatcaacataagacctacagagtttgaagatgaaccagatgaccatggtgacattgtcctgagggacaccagccctatcttggagtcaatggagtctggcaggagaccatga

SEQ ID NO: 8327 - DNA, 450 bp, Zea mays
  Peptide Sequence Number=SeqID_50106
atgtctctccagtacgtggcgcccccggtccgagcactcgccgtgctaccggcgccaggcccccctcgccgccggacaagccatgtgtccctataccttccgagccggcggccagggctcgccgtcgccccggtccgtgcggcggagtcgtcctctccgcccaccgtgcccgcctccgcggccggcaaggctgtcgtcccggacgacgagttctccctcgccaaggtctctttcggtgtgatcgggctggggcttgggctctcgctcctgtcgttgcacctagaaacgcaaatgggtgatagtgatttagtaatttatcaggttgaagctgctcggtttcttttctgcttaaaattgagctacattgccaatggttccgtttcgtggaagtggaacttcaagatgaacttgaaatatgtacggaaaagaggtattctgcatagtgcatag

SEQ ID NO: 8328 - DNA, 348 bp, Zea mays
  Peptide Sequence Number=SeqID_50107
atgtcgaacgatccaactgtgtccagagccggtcacatgccaggcggtagcggttgtggtggtgctatgaacgtattcatcggcatatcatacaatgactgggtaccagatgacccatttgcagccgatgtattaggtgcgggtggctccgtattagggagaacccatccacaccctttgcttatgatgctggagaatgatattgcttgcatttccatcaacctatcctcagctgcaatgaaggttggaacccagatgaagcagctgaacaagtctctcagggagaagagggccaagctctacatcgtccgccgctgcgttgtcatgctcctccgctggagtgattga

SEQ ID NO: 8329 - DNA, 234 bp, Zea mays
  Peptide Sequence Number=SeqID_50108
atgtatcctcatactgcatacatacatcatacaggatcgcaggaggaagtgccagtgggaattatcgaggagctgccaggaattctcgtggaagagggtgaaccagaagctgaagctcaagagtgtcctgatcaccgccccagttccttcgagaaaggtatagaagttgattggaaccaattgttgcatatacccttgattactttgtttaccctatccttgccacctatttaa

SEQ ID NO: 8330 - DNA, 515 bp, Zea mays
  Peptide Sequence Number=SeqID_50109
catggagaacgcggtgttatgatgcctttggtgatactgcaatgggagaagctgaagaagaggtacaggcagaagatgagcctgatgatgatgagcttggtcaggccatccttgatggaaagagaggatgcgatagtgaaagggagaagatcaactttgagcgcataatagaggatcacaagaagttgctttatctgacttgtgaggggcagaaaaagttgggtaccgtactggaattgttgcaatggaaggcaaagaatgaaatccagaagatacatgcgtgtcataatgactgcatcctctactgcggcaaggagtatgagaatttggatgaatgtccggtatgccatccatcacggtataagattaggcgaaatgaccctggtgatgttgagggcgacggacaacttcccacaaagagaatccctgccaaggtgatgtgcccgctgatgggtcctagtggagagcaatcgatagagagttccctgagtttgcagatgccacaagaaacttaa

SEQ ID NO: 8331 - DNA, 195 bp, Zea mays
  Peptide Sequence Number=SeqID_50110
atgccccacataagcgggggctctctttctctctccctaggtgcaacagcttcgtgttgcttagcctacgaaataccttcgcgctatcttgtgccaagaagccgaagccatgtagcaatcgaaaacaagtactcaacattggcgcccacatccggtgattccacgaccacaacaaggagcatgacgaactgctaa

SEQ ID NO: 8332 - DNA, 327 bp, Zea mays
  Peptide Sequence Number=SeqID_50111
atggcgaggcgggccaaagggggaacaaatcctaatcccgacgagcatctggtaagcgacagagcccaacgcggtcccggcctaaccgtactagaggtgcggtacaaaacaagaggcagaatcggtgcagagcacgacgagcgacggaaggctttccggaactcggacgaggaattgggtagtcgccggccggtcgatggcgaggcagtccacaccgacgcgtaccccggcgacccgcgcactcccgaagccagccgcagcaacccaaacggtgcagaccagcggcaatcgcaggcgaaggtgcggcggccgggttttcttggctaa

SEQ ID NO: 8333 - DNA, 666 bp, Zea mays
  Peptide Sequence Number=SeqID_50112
atgttaagggtatccacatgggttttcgtgttgggacacgccctggccacggcgaggcgggccaaagggggaacaaatcctaatcccgacgagcatctggtaagcgacagagccccaacgcggtcccggcctaaccgtactagaggtgcggtacaaaacaaggtaagggaatgtcgtctcaccacgcgcagaggcagaatcagtgcagagcacgacgagcgacggaaggctttccggaactcggacgaggaattgggtagtcgccggccggtcgatggcgaggcagtccacaccgacgcgtaccccggcgacccgcgcactcccgaagccagccgcagcaacccaaacggtgcagaccagcggcaatcgcaggcgaaggtgcggcggccgggcgcacgcaaaatcgtggcgccgcaactactccgcggggatggcggaggtgctgttaccgtcgagctcgcggattccgcgcggtccgcccgctgcgatcgtttcggaaggtgggtggagctcctgtcatctcgggcccacgcgtcggcgaggacttcacaagcacgagaaaccgacagccgggcccagggtgtcggcgccgatattcacaggttgggccgcagggagttaaaggggaactgggccggattggggatatttggcccatgcgcatag

SEQ ID NO: 8334 - DNA, 458 bp, Zea mays
  Peptide Sequence Number=SeqID_50113
catcctgttttgcacctgagtatctcttgctcgttggctgccaactcaataccacggagggtttgcctggtgagacatccggctttgctcctgttgagtcgctgctttcaccagagcttccggtgctcagatcaagcatcaagtggaacgacgagctagctctcatcgtccattgtaacaatgtgattatagatgttcaaacgggcggcatggcccggtccgacccgagcacggttcagcccggcccgtttgagtccggcccgtttgagcccgactacttaaccgtgccgggccgtgccgcccgacgggctcggaaccttgcacgagcacggcacgagagcggcccgaccatgccaggccggcacggcaagcacggcccacaaaactactcgtgccagtccgagcccgctcccccgaaaaaccctggaaactgtacacagttgacagttcacatgtga

SEQ ID NO: 8335 - DNA, 180 bp, Zea mays
  Peptide Sequence Number=SeqID_50114
atgggcgaggatatggtgaagtcgatcgtcgaacgtcacggtgaaggggcgtatgtcaacggggaagatgaatgcgggcgcggtgaaagcgaacggcggcccggtgaagacgaacggcggctagaggggcatcgcggggtgcggcgcggtgaagggcggatcgacgaagggtacggcgtg

SEQ ID NO: 8336 - DNA, 210 bp, Zea mays
  Peptide Sequence Number=SeqID_50115
atggcgctggggaaatacacgcccgcctccatggtgggtgccgcctccggccagtactacgtcggcatcgctgccaaactggaggcctcggcaatgccttccctgacgacttcgacaaccaagacctcgagtgactgccatcgccgcgcgctgctttgctcgcgggcccatcttggctggcagaggcggcttggtctcgaccaggcctaa

SEQ ID NO: 8337 - DNA, 312 bp, Zea mays
  Peptide Sequence Number=SeqID_50116
atggcagaaggcttaggtccggacttcaagaaagatgagcaaggcacaatctggttcaagaacaggatatgtgttcctgagatagacagtctcggtgaaaccatattgaaggaagctcatgactcagcctactatattcaccttggtagtaccaagatgtaccaggacctaaagcaaaagttttggtggtatggcatgaaaagagatgtagccttgcatgtaggagtatgtgatgtttgtcaatgggtaaaatccgagcaccagaggtcagctggatttcttcaaccgctgaagatacctgagtggaagtga

SEQ ID NO: 8338 - DNA, 474 bp, Zea mays
  Peptide Sequence Number=SeqID_50117
atggcttacccggttcacgtgctccggcgggcggacggattccggcgaggccgatccggtgcttctggtgtggttgcgtttggtctggggctcgggaaactttatgggactctggggaggctggtcgagcagttggcgcgggcgagggatggctggggcgagttggctgcggtggccggcactcgggtggctcgggcgggtggtgtagagctcgccggagttggggacttgctcgaggaagtgaggcaggtgagtagtcgcgtccccaagattggtctgtctgacagccctaatccaagaataaaagcgtgccaaactgtgtcaaatggatttggtttgaccccaactttttccaggatcctgatcgcacaatgggtgatcgacagctaccctgatttgcccaccccacaacggcctaagacggcggggctcgtgcctacgacggtggccctgccggcgttcgaccatccataa

SEQ ID NO: 8339 - DNA, 480 bp, Zea mays
  Peptide Sequence Number=SeqID_50118
atggagtactggcgccaaaggttgacaacaagccaattaaaaagaccaagtattgggttcaacaaaagagcaaagggacaaccgaaggcacctctgggtctggtgcaccggacatgtccggtgcaccagaggactccagcgcacgtcgccttcgggaaaatccagaggcaactccactataattcaccggactgtccggtgtacaccggacagtgtccggtgctccaaggaacggcacctcaggaactcgccagcttcgagaaactgcaacggctgctccgctataattcaccggacatgtccggtgtacaccggactgtccggtgtaacagcggggcaaaggctatttcggcgccaacggctacctgcagcgcatttattgtgcgccagcgcgcgcagaagtcaggcgtgcccatactggcgcaccggacactctacagtgcatgtccggtgcgccaccggacatccaggcgggcctag

SEQ ID NO: 8340 - DNA, 435 bp, Zea mays
  Peptide Sequence Number=SeqID_50119
atgacgatgatgatgatgatgacaacgacgaagatgacgaagatgatgatgatgacaatgatgaagacgacagagatgatgatacgctctgatgagaatgctaaggataagggacgaactgagacccaaaggaaggcaagatctgctattttcagcctgctccgctacaacccagggaggcaaggccggaaggcaagatctgctattttcagcctgctccgctgcaacccagggaggcaaggctggaagccaagatctgctatttttagcctgctctgctgcaacccaggaaggcaaggctggaaggcaagatctgctatttttagcgtgctccactacaacccaaggaggcaaggaaggaaggcaagatctgttatcttcactgatctactttctggggaacaggacctgtataatgaacctaattatgcctaa

SEQ ID NO: 8341 - DNA, 744 bp, Zea mays
  Peptide Sequence Number=SeqID_50120
atgcccagtgtcagtgcaagtggtcgacatcacagcggcggcggtggcagaagggcagttggccagaaggccctaggtgcggcgcacctaggcttagggagacaggatctacaatcttcaacctactctactgctgctcagggagataggactaatggtttaaatctgcttccctactaccttgggaagataaaattagacatcttcagtcttccccactacaacttcaaggggataagacttactttcttcaattttaacgccagggagataaggtttgatgccttcagctttaatccgctctatttcatctttaacctattccactacaacgccgaggaaacaagattcgctacctttagctttaatctgttccactacgatagcaaagagataggattcgctaccttcaactttaatcggctccacttcagctttaatcaattccactgcaacaccagggaaacaagattcgctacctttagctttaatctgttccgctacaacgtcaaggaaataagacttgctgctattattcttaacgccagggagataagattcgctgccttcagctttaatctactccgctttagctttaatctattccactacaacgccaaggaaacaagattcgctacctttagctttaatctgttcaactaccatgccagagaaataagattcgctattgtagcttcaatctatttaactgcaatgtcggggaagcaagattcactgttgtag

SEQ ID NO: 8342 - DNA, 951 bp, Zea mays
  Peptide Sequence Number=SeqID_50121
atgagaaatggaaggaaagattctttgtatcagaactggagatggcagcctagagattgtaatttgccaaagtacaaaccaagattgttgcttgagaagctgaggaacaaaaggcttatgtttgttggagattcgttgaataggaaccaatgggaatccatggtttgtctggttcaatcagttgtccctcctggaaggaagagcttgaacaaatcagggtctctctctgtgtttagaattgaggattacaatgccacagtggaattttattgggcaccatttctggtgcaatcaaattcagacgacccagacatgcatagcatattgaatcgtataataatgccaaaatccatccaaaaccatggcaagaactggaaagatgtcgactatttggtattcaacacatatatttggtggatgaatactttcaacatgaaagtcttacgaggatcattcgatcaaggcgatacggaatacgacgagatcgaccggccagtagcgtatcagaaagtcttaactacatggtctaaatgggttgataagaatgtgaatccaaatcgaaccaccgtcttcttcagcagcatgtctcctcttcatatcaagagcttggattgggaaaatccagatgggatcaaatgtgccttagagacaaccccaattctaaaccagtcaatgcacttaaatgtgggcactgatcgtaggctatatgtcattgccagcaacattactcaaaacatgaaagttccggtacattttattgacattacaagcctttctgagtatagaaaagatgcacatacttcggtgtatactatccgtcaaggtaaaatgttaactccggaacaacaagctgacccagccacgtttgccgattgtatccattggtgccttccagggttacccgacacatggaatgagttcctttatgcacgtatcattgctcactcgtga

SEQ ID NO: 8343 - DNA, 132 bp, Zea mays
  Peptide Sequence Number=SeqID_50122
atgccaaaactagtcgaagacccctcgacttccggccacttttcatcggaggtggctacctcaggcgtccccacggagaagcacctccctcaggtgatggcagagaagtgccagacgcatggaagtggctga

SEQ ID NO: 8344 - DNA, 510 bp, Zea mays
  Peptide Sequence Number=SeqID_50123
atggcggcaatgggcacgcgaggaggcggagatagaactactggcttcaatgtactccactgtaacctcagggagggagatgaggctactggcttcaatgtactccactgtaatctcagggaggaagatagaactactagcttcaatgtactccactgtaatctcagggaggaagatagaactactggcttcaatgtactccactgtaatctcagggagggagatagaactgctggcttcaatgtactccactgtaatctcagggagggagatagaactactggcttcaatgtactccactgcaatctcagggagggagatgaggctactggcttttatgtactccactgtaatctcagtgagggagatagaactactggcttcaatatactccactgtaatcttagggagggagatagaactactggcttcaatgtactccactgtaatcttagagaggggtataggatctatttctttgatctgttctctggggaacatgacctgtaa

SEQ ID NO: 8345 - DNA, 1509 bp, Zea mays
  Peptide Sequence Number=SeqID_50124
atgaatgcacatggaatgataactcatgtaactcaggctttattgagggctttgaatagggttgttggggttccaattgaaggtgttagtcataggacggttgctgaactgctccgctctagtgaggatttgaaatgcactcctgaacaagaacttaagcgtgtcgtctctctgttaagggatgaggcatattggtggtggcaatcagtggaaaatagtttccattttcaagaaggtccaaggcatgacctcaaggttcaggtagctttacaccaagagcgtgcgtttaaggctttggtcgagaagaccaagattattgaggagattaaacgcgtggagcacgagaagaaagggaaattaaaggatcagcccaaaagagaaacgggccctactggcctaaattcgcgaccagttaaatgggctagagaggctaggccactacagatagggaatagtggacccaagagaaggggatattcagttgaaggtattcgtacagtgaaggaatttcttgatgtatttcccgatgaattgccagggttacctctggagcgggaagtggaattcagaattgagttgttaccgagaatggcactggtgtccattgctccttaccgcatggcactgaaaaagcttaaagagttgaaggtgcagttgcaagaattgttggataggggttttattagacctagaagtgatgatttttgggtcacattgtatcagctgagggtattcatgaagaatgctccgtttaagtggggagacgaacaacaagctagtttcaaaaaattgaagtccgtgttgacagaagctcttgttttaattcaaccgaaatctggtaaggattatgttgtgtataacgatgcttcgcatgttgggattggttgtgttctaatgcaagatggtaaatttgtagcatatgcctcaagagaacttaggccacatgaaagtaattaccccactcatcacttagagtttgcagttgttgtgtttgcactcaaaattttgaaacactaccaatatggcgagaagtgtattatttacactgatcacaagagtctcaaatatctcctcacccagaaggaacttattttgaggcagtggaggtggattgagttgttaaaggactatgactgcacgatcgagtattacctcggaaaggctaatgttgtggctgatgtcttgagcagaaaggcaatgtctgatttgagggttatattcactcacttgagtctttatgatgataggggtatcttggctgaattgcaattaaagtctgtatgggttcaggaaatcattgataagcagagtttggatgaaactctaacacctcgatttaaactggttgaggatggttcaactgaggactttgggattaattttgatggaattttgtgctttagagggagatattgtgttcctagtgataagaatttaagacgatccatacttcaagaagcacatagcagcccttatgctatgcatcctggtagtattaaaatgtactga

SEQ ID NO: 8346 - DNA, 231 bp, Zea mays
  Peptide Sequence Number=SeqID_50125
atgtcgggaggatccgccaagagggagatggaaacaggcgagaaggccacaagccacgggaaggctccgtcaagggagtccggcgccaaaggcaaagaggaatcacctcctcgcgtcaagacgcaccagagtgacgacaagaagaagaagatgaagaaagtggtctactacgaggaccgattcttcgtcgccctccacatctggctccgatgccgcgtccgtcacttctaa

SEQ ID NO: 8347 - DNA, 219 bp, Zea mays
  Peptide Sequence Number=SeqID_50126
atggcaagggccaaggaagacgagcagatcatgggaattgacctagaatcttgcaatctagcaaaacgatcattttatgatgccatgcaacatgacattctagaaatatgggtggctaccacgaaaggcatcaaactattggtcattgtcagagggaaatcctccagccaggtggtggaatgcatccaccctgattctcagatgaggagggggctttga

SEQ ID NO: 8348 - DNA, 318 bp, Zea mays
  Peptide Sequence Number=SeqID_50127
atggggcaagctcaggggaaagaagaagatccgccccgccaccatggattgttgctggcgggaccaactgaggcggagaagatgattatggagcatcaacaacccatcgcaaaccctctggtggcagttggagatctgaaggccagaatggcgtcatacctcttcactgcgcgttattttcatatgagtccctgcattcatgataaatcaacccgtcgtcctatgcggctattcactgagtcatggaatacatgcgtcgtagtccctaggcttttctataatagtgcgcgtagtctagtgatccaaaggattgagtaa

SEQ ID NO: 8349 - DNA, 246 bp, Zea mays
  Peptide Sequence Number=SeqID_50128
atgtcgatggcaaccagtaaaggttccaacatcaaagtttgcatggtccagggcgacgatgtggatgctagagatgttgaaggagaacatgtgcctagaggcgtagatggtggtggtgaaattgtggtattccctaatgtagagcaagggatcaagaacgatattcgaagagataatgccgctacaaacattgcaaccgttgaaatcgtaatatgggttactaatatggtttttatgattacctga

SEQ ID NO: 8350 - DNA, 108 bp, Zea mays
  Peptide Sequence Number=SeqID_50129
atggatatagaggtggatgaggaaaaggtttatgtcggcaatatttttaatccgtcatttgagatcttggagctgaagctttctagcttcgccttcggagataaatag

SEQ ID NO: 8351 - DNA, 468 bp, Zea mays
  Peptide Sequence Number=SeqID_50130
atgacatcaagctgcggccagatatcatggatgccagatatctccaaaggggacatagtatgggtatcgtggaatagatggtcatgtgactcgcactcatggcagtacaagagactaagcacaaagatcgatttgataaccaagtggcacaagctcagtctccttccagccctaattgacaatagtagggagaaggttgttccaccaaacaatcaagttccacaaagtactgtaataccatatgatgcagacgtcctagaggataaccagaaccaaatatccttcctcagccttgcgtgccaggaccaccatccatacaggatgtacactgaacctggctacgagacaagcaacagatacgtcatggagggccttggcaggcatcctcatatgtggtacccgaaagcccgagaaaagaagcgtaatgtgtttttacatgttggccctacaaatagtgggaaaacttag

SEQ ID NO: 8352 - DNA, 255 bp, Zea mays
  Peptide Sequence Number=SeqID_50131
atgctcgcgccccctgctccgtcgcgctgctccccttgctccgcctccccctccgtacacggccctgcctcccgctggcacgccgcgggagctccgcgcacgctatctcccctgccccgcctccccctcgcactgatgacagttccatctcactcaatagtctcttcgcggaaggagttcatccaagctcagtgggtgcaagcctgcaagccagttctatatcttttaaatgcgcagttatgtgaatcttcctag

SEQ ID NO: 8353 - DNA, 183 bp, Zea mays
  Peptide Sequence Number=SeqID_50132
atgactaatgtgcgcaaaagatattcaggttcagtcccctcgccgtcggtgacctttgcgcaaggattcgcgctgatcgcggcgattcgtgctagactcgggcaggatagtgccgggagggtgaaaagatcaaaaggggagcggattgggtcgcggggtgaagcttatcaaccgcgcctgtag

SEQ ID NO: 8354 - DNA, 210 bp, Zea mays
  Peptide Sequence Number=SeqID_50133
atggctttcccggagggcagaggtgtaggtttggtaagccagatggtctctatggaaatggtggcatatgttatggctcctataatctcgctcagggattttggtggtgatgaggaggatggttttgaatatgattatggtaatggtaaagaagaatgtgtcgaggtggatctccaggaattccaggacgtcgacgagattgaggattag

SEQ ID NO: 8355 - DNA, 306 bp, Zea mays
  Peptide Sequence Number=SeqID_50134
atggcaaatagggaatgtgctagacgtgcaacaccaacactcacgcacggcgagggtggcatggtggtggctgcgcgacgagccggtggggcgaggggcttcgcgaacggggaaggccgcagccgcgaccacaaggtggctagccaggctggggaacacggcaaggacacgaaggcaaggcgggtactcagtgagggaaagagggggagtggtacgagacgtgggcgggcgtgtggcgaggtggggagagaagaatgggggagtttcaagctcttgggtggatttttgcgtcgtgggcgccgatag

SEQ ID NO: 8356 - DNA, 198 bp, Zea mays
  Peptide Sequence Number=SeqID_50135
atggagaggattgaggagaaattaattgaccgaaggatgatgaaacttgctgctcaacaacctccacccccgcaagttcctgtaactccccaagttattgatccaatacgctcgactaagccacctgtcgataagattcataaatatggggccgaagagttcaaagctactgttgatgatgatgctgagagagcttag

SEQ ID NO: 8357 - DNA, 1500 bp, Zea mays
  Peptide Sequence Number=SeqID_50136
atggcgaagttgcttaagggtcgcagtattcctggtaaaatattattgaccagaaggtcagatatacttgatgattcaggttcacaagaacgatctcccagttatcaaagaagcttctcacagaacgatgccggtacaagtgatgacatggacaaatccatggagggaggggtcagaaatacaaataattctgatggtaatacaactgataataagttaacatcttcaacctcaaagaatgatgatgctgccaatgaagtccagaactctgcaatgggcacaagagctacagattctgccagggttacgaagttcactaaagagctctcaggacaaatggtcatattagagagattacgtgagttagcttggagtggtgttccgccttatatgcgtcctaatgtatggagactcctgttgggatatgcaccacctaattcagatagaagggagggagttttaaggaggaaacgccttgagtatcttgattgtgttgctcaattttatgacattccggacactgagcggtctgctgatgagattaatatgcttcgccagttttttctgtttgttagattgccgttgattgtcctaggactgttcctgatgtccctttctttcagcaagctcaagttcaaaaatccttggatcgcattctttatacatgttaaaactcaagatagtcagtaccacaccggttggcgcaccgtttttctactggaactgcggccggtgcattatgttccggctggtgtgaccggaattgaccggcatgagctggtgggattggtatggactggaattttcaccggtgtggaaaagggtgttggttgttcctgtttaaaaaagggtgttggttggttgttcaatggggccattcggcatcctgcaagtgggtatgtgcaggggataaatgatcttgtaacaccctttctagttgtcttcttatctgagtacttagaagggagcatagatagttggtcaatctcagatatgtcttctgggaagatatccaacatagaagctgattgctattggtgcttgtcaaagttgcttgatggcatgcaagaccattacacatttgctcaaccaggaatccagaggcttgtatttaagctgaaggaattggttaggcgcatcgatgaacctgtttctagacatatggaggaccaagggcttgaatatcttcaattcgcatttcgctggttcaactgcttgctaatacgagagataccttttcatctagtgacccgtctatgggacacgtatcttgctgaaggagatgcactgccagattttcttgtctacatatttgccagttttcttttaacgtggtcagatgaactccagaagcttgacttccaagaaatggtgatgttccttcaacaccttccaactcaaaactggacatatcaagagcttgaaacagtactttctagggcttacatatggcacattgatgatacaaacaactttagggaaaattacgagtctgattaa

SEQ ID NO: 8358 - DNA, 306 bp, Zea mays
  Peptide Sequence Number=SeqID_50137
atggcggcacaactggctcaaaaagaaatctcagtcatatgtcgtttctccgagagttattacaaacgctataggcttgcagtgctgaaatggctctcagtattgctaaaaggtccaaaagaatctgtggaatactcttttcccaaggaccaattgatcgatatagtaccttgggcgcgtttcgagattggttacggaacctgccccttcatcctcacttgcatctccttccatgtccacgccttcattgtcaccttcgagcgctatgttagacgtactttcgtcgacccccgtcgaaaggagtag

SEQ ID NO: 8359 - DNA, 591 bp, Zea mays
  Peptide Sequence Number=SeqID_50138
atggggatttcgcaatcggcgtcgaagcgagtgacctccgcattagtcaactcgtcccaattcaactcagcctgcgactcagtctacagtcaatgcctctcccttacccaagaagcctaccccggagtcttcccttatcagctcttgaacgccgccgctaacctccatcaacacctcacttccctccgccctcactctctcattctccgttgggtccctcatcctcccgctcgctcccaagtcgattctgcgttccggttcgtaactcgccaccaggataatccccggagcgatgaagaagcacttctcctggattcctccgacttcagggaatgggcagtggttttattcagtgatgccgtcgtgggaaacgctggaaaggcagttttgcagcgagtgccggttggggttttgggtattgcggggattggcgcggcggcgaggacggggaaagaggttgttggggcagcgattggagtgtacgcgcttggtgtggctacttcaatttaccttagcttgtctgaggcttctaatccaatattgtcaaaattttactcgtatcgactctttaacaccccaaactcggcctag

SEQ ID NO: 8360 - DNA, 561 bp, Zea mays
  Peptide Sequence Number=SeqID_50139
atgaggggaactacctgggaagcggcgccagaccaacctcgccaagcgcgctacctgcgaggccaaggacacgcccgcacaaccgttgcccaacaagctcaagatcgcccccaagtctgttggagtgatgttgatgagacatttgaggtagattgggggttcttaaatgcttcatggactgatggcatgtgtgcgaatcttcaaattgtgcagacgattggtattgcttggcttccaaatgaattttcatttatgaagcttatcctctctaaagcaaggcttcttcgcacgttgtatgttgatagaaacccagatgattttgataatcaggcttctgcaatgcataattttcttccttttccctttattgatgaagacaaaagctcccagtttagacaaagctcttatgctgtgaatcacttgtgggagttatgcgcagagaatgacacagttcctagagttggaaaagtatgtaacactttttgtaaagagcgttacatagaacagattcagaagctatatgaaaagatatatgagcctaagggtgaaaacggtcggtaa

SEQ ID NO: 8361 - DNA, 519 bp, Zea mays
  Peptide Sequence Number=SeqID_50140
atgccgcgcccggcctccgccgcgccgcgggacgtgcaggccgcggccgcgcgcgccgcagccatggacgtgcacgtgcccgtgggcgcggccgctgctgcagcgacgccgccgccgcctccggagccggagccggagccgctggggtcgtcgtcctcgccgcagcagcaggtgccgccggccgggcaggcgtcagtatgcagccccgacgaggaggaggaggaggaggggctgctggacgagatcgtggagctgccgccgatcgacgaggacgtcctggcggcgtcggacgacggcgtgttctgctgggccgcgtcgttccaccactgtgccgccgacgagacgtggccgtacgagccgaacgcgtggatgcaggcgggcggtggaggcattgcggcggcgcacgtcgacgagatggcggtggtgcccgggaccgagttcgccgcggaccagctctggacgtcgcagccggacagcattatgccttctgggctcggtgcgttcttatggaacctgtag

SEQ ID NO: 8362 - DNA, 408 bp, Zea mays
  Peptide Sequence Number=SeqID_50141
atggtggaggagactgcttcagtcgccattcgtcggtctccgctgctcctccacacgcttggtcgtcgtctctacggttggcaaaggcttaacatgtatcaagatgcatatagcacccaacagacttctacatctgatactgaagaacatagatccaaatgtaatgctcaagaagaaatcacaaaggaccaaacagctagcatcaggcaactcaaagcaaaagacaatatgcctttatttgaatctcctccaaaaagagtagtgctatgcttgagaaggtcaccttgcatcaggatgaggatgatacctgagtttgcccagtttgacgaaattgctcaaagcaaatgtaccttcggtttgaaggaaagtaaagggtacaagcgtgatgccaatgccaagtcagcgtga

SEQ ID NO: 8363 - DNA, 435 bp, Zea mays
  Peptide Sequence Number=SeqID_50142
atgggtacggaggtggcggcggcgggtacggcggtgatggggggcggcggcggcggcggcggctacacgcccgggtactctggcaccgggacctgcgactactggaagagccacccggacgcgatcgtctcgtgcgtcgggtcgctgggcagcgtcctcggctccctgggcgacgcgtgcagcgccttcttcgggggcaagctgcagacgctgcaggacgcgctgtgcaacgcccgcgccgacggctacggcgacctcctccgcgagggcgccgcggcctacctcaactccgtcgccgccgccgccgctggcaagtacgcctacaccacgcagcaggtcaaggactgcatcgccgccgcgctctcgtccgaggccgccgccgccgcgcaggccgccatgttcaacaaggccaactacgcctgccactattactag

SEQ ID NO: 8364 - DNA, 165 bp, Zea mays
  Peptide Sequence Number=SeqID_50143
atgatgttgtatgttgtatctcttctcctttcccccctctcgctgttcctcttgcttcttgtagaaaatgcccgtgtgctattcgaccaggccaaagcccaaggcccatatgacggccccactgtaatccctgacaccgccgaacccgttcgatacaatttttga

SEQ ID NO: 8365 - DNA, 1782 bp, Zea mays
  Peptide Sequence Number=SeqID_50144
atgcccggcataccgagggatgtcgccgagcactcgctggatattcgggctggagcccgacccgtcaggcagcctatgcgccgattcgacgaggagaagcgcagagtgataggcgaggagatccacaagctaatggcagcagggttcatcaaagaggtattccatcccgaatggcttgccaaccctgtgcttgtgagaaagaaaggggggaaatggcggatgtgtgtagactacactggtctcaacaaagcatgtccgaaggttccctaccctctgcctcgcatcgatcaaatcgtggattccactgctgggtgcgaaaccctgtccttcctcgatgcctactcagggtatcaccaaatccggatgaaagagtccgaccagctcgcgacttctttcatcacgcccttcggcatgtactgctatgtcaccatgccgttcagtttgaggaatgcgggcgcgacgtaccaacggtgcatgaaccatgtgttcggcgaacacattggtcgcacagtcgaggcctacgtcgatgacatcgtagtcaagacaaggaaggcttccgacctcctctccgaccttgaagtgacattccgatgtctcaaagcgaaaggcgtcaagctcaatcccgagaagtgtgtcttcggggtgccccggggcatgctcttggggttcatcgtcttcgagcgaggcatcgaagccaacccggagaagatcgcagctatcaccagcatggggcccatcaaggacttaaaaggcgtacagagggtcatgggatgtctcgcggccctgagccgcttcatctcacgcctcggcgaaagaggtctgcctctgtaccgcctcttaaggaaggccgagtgtttcgcttggacccctgaggctgaggaagctctcatgaacctgaaggcgctccttacaaaggcgcctatcttggtgcccccagctgatggaaaagccctcttggtctacgtcgccgcgaccactcaggtggttagcgccgcgattgtggtcgagaggcaagaagaggggcatgcattgcccattcagaggccagtttacttcgtcagcgaggcgaaagttgcgacattacttcgagtctcatccggtaactgtggtgtcatcctccccctgggggagatcatccagtgccgagaggcctcgggcaggatcgcaaagtgggcggtggaaatcatgggcgagacaatctcgttcgcccctcggaaggccatcaagtcccaggtattggcggacttcgtagccgaatgggtcgacacccagctgccgacggctccgatccaaccggagctctggaccatgtttttcgacgggtcgctgatgaagacgggagccggcgcgggcctgctcttcatctcgcccctcgggaaacacctacgctacgtgctacgcctccatttcccggcgtccaacaatgtggctgaatacgaggctctggtcaacgggttgcggatcgccatcgagctaggggtcagacgcctcgacgcccgaggtgactcgcagctcgtcatcgaccaagtcatgaagaactcccactgccgcgacccgaagatggaggcctactgcgatgaggttcggcgcctggaagacaagttctacgggctcgagcttaaccacatcgctcggcgctacaacgagactgcggacgagctggcaaaaatagcctcggggcgaacgacagttcccccggacgtcttctcccaggatctgcatcaaccctccgtcaagatcaatgacacgcccgagcccgaggcaccctcggtccagcccgag

SEQ ID NO: 8366 - DNA, 117 bp, Zea mays
  Peptide Sequence Number=SeqID_50145
atggcatccaggtttaaactcctcccgctgctcgccgatgtaaagatctcctacctctgcgattctaaaaagaagattcaggtcccatttgccatagtggatctgtttccactgtag

SEQ ID NO: 8367 - DNA, 117 bp, Zea mays
  Peptide Sequence Number=SeqID_50146
atggcgttatcaaggatgtcaatcaaggggcctaagaaagatgctcttcgaaaaacatcgaaacatatgaaaacactgaaggtgagcaaagccaaagctgacaatggcgtcctctga

SEQ ID NO: 8368 - DNA, 819 bp, Zea mays
  Peptide Sequence Number=SeqID_50147
atggcggcggccggaagcacggacgcccactactacccgcgcccgccaacgtcgtcgtcggctccgttgtcgtcgtccactccggcagctccgaggctaccaccaccgccgtttcttcaggtgcgcatgcaactattgtgctgcttccaccgtggcaccctggtcggggtccggtgccacgacgggaacggccggacggtgttccggaaggacggcgtcgtgacggaccgcagcggcaggttccgcgtgcacctcgcgcacgggccaagcagctcaagcagcagcagcagccaccagctccggtccgtcacgtcctgctcggtggcggtgcacctcccgcaggcgtcgccgccgtgcgtcgccaccgccagctccgctcgcgggctccacctcgtcgcccaccacaacaagcacgaccacggcggcggcactcgcgtcttctccgccggcgccttctccgtccgcccggagctctgcagcaacaagggcctgttcttcccgccggtcccgctcgtgccggagccacccaacgtcggcggcgtgcccatcccgcccaacccggtcacgccagccccgccgtccctcgtgccgccgctcctgcctaccccgtctccgccgtccgtcctgccaccgcttgtcccacagccaccgccgtcgtcggtaataccgccgttgttgccgttggttaagccgccgccgccgccaccgccgccccagcttcttccacccctggtgccggttcttcctccgggggtgcctggcgtaccgccggcctccgcttcaacgaatcgccgccccgtgaacgtgaatcatccctga

SEQ ID NO: 8369 - DNA, 189 bp, Zea mays
  Peptide Sequence Number=SeqID_50148
atggccatgggggcagagcttcgacgctgcgacagcgcagggaaaataggaatccctcgaaaaaatggtgttctcaaactagcccttaagaaacgattctggataggagagggattaccgttgcttgcagtttggtcttgtaaatcttggtttgctggtcatgtttcaaacattgttcctatttcataa

SEQ ID NO: 8370 - DNA, 1467 bp, Zea mays
  Peptide Sequence Number=SeqID_50149
atgcactctactctaactaatctaatggagtactcaacgccgcaccaggtgtccgggaaccagcagcacggttactccggcgatggccggccaagaggcacatccggcggggagtccgactccgacgacgacgccctcctcttcctcgccgtcccggcaggctggctcgtgcgcctgctcgcgttcctcggggagctcgtggcgtctgccatcctcggcctcgtcttccccgtcgcagccctcgtgggcgcgctgcgcgccctccccgcggcggccgcgtccagcctccggcgcgtggcgcgcggcctgctcgccgcggcgtgcaccttcgccgcactcgtggccgcgctgctcgtgtccgtgctcctgggcttcgttctcgtccggcgctgcgtcgagggcccggtcaccgtgcgccagcagctcttcttcgactacacggaggcgcagcccagcgccgcggtgctcctcggtggagcgcgaggcgccgtgctgccggcgggtcactccgtcagcgtgtccatggcgttgctccttcctgattcctaccacaaccgtgaggttggcatgttccagataaaagcagaggcggtctcggcaagtggagtcaccatggcatcagcgacacagccgcacatgcttcgttacaagagcggcccagtccggctggcgcagaccgcgctgctgtgcgtgccgctcactctgggcatgcgcagcgaggcccaggccgccagcctcagggtgctgcagtacagggaagggcacggccggcacaggagaacaggggccatcagagtgctgctgcagccgagagccgcgacggtgagcctgccccaggtgtacagggcagaggtggtcgtgcagacggcgcttccgtgggcgaagagcctggcgcgcgggttcaggtggacgctctgcgtgtgggtgtcctcctccgtgtacgccgtcctcgctgtttgctgggtccggcctctcgtgctgtccgcgaggaggaggccgtctggtgttcaggaggccgatggaaacttggcttctggtttgggtttagtagacatgggcgaccgcccaaggaaggaggcgtctgattgtcttgcagcgaggtggagagcgaggagaagcgagcggaaagcgcagctccgaacgcggttacatggaggcggcatggagctggaggccactgaggattcagcttctagtgttgcggtggtagagagagagaaagagcctggaaaaattgtggagtgtccccttgccatggttgcagaagctgcaaacaggagagagcatgtttctgcttctacgcgccagtatgtggatgtaggcaggaaaaagacatcagatttgctggatgggtcctacttacactctacagtgtttgacattcctcacttcccagatcggattgatctaaggaacccgttcaatagcagcaggacctcgcgcagatcgatccagcatcagcagtag

SEQ ID NO: 8371 - DNA, 1350 bp, Zea mays
  Peptide Sequence Number=SeqID_50150
atgtctccatactggaaagcaatcagagtttgggacccttctactgagcaacgaataggcttccaagagttccgccgctcgcagcgcaaggagtccttcggcctccagcgctggctccagctcgtgctcagtgatgacgcctaccgccgcctcgccctccggtcgcacggcccaaacttacaggactaccggccccccgctccggcagttaccagtcggctgtctcgtgctctgttctgctgcgcctgcggggcttcagtgcagcgcatcggaggaatggtgagcgcgtcgagcctgctgctcccgtcgtcggtgcgggacctggcctcctgcgtctccgacggcgccgtccgcgtcgcctgcaccaccccggcgtccacgttcacggtctcctcctcctcgccgtcgccgccgtccacgctctccgtcgccgtctcctaccgcgccacgccgcaggtcgcgtcgtcgccgccgctcctcctgcgcctcacctggtcgcactccccgcgcgggcagccgacgctctccttcgcggggcccacggcgtcgtcgcccgccgtcctcctccggcgccgcaggggcacctactgcctcccctcctcctcctcatcctccgcacacgccccgccgctcgcgatcttctgggacctcacaggcgccaggtacgacggggcgggctcgtcgtccccggagccggtctccgggttctacgtggtggccgtggccagcgccgaggtggtgctggccgtgggcgacctggcggcggggttcgtgaaggcgaagctggagggccagatcccgcgggcgcgctccatcctggccgtgtcccgcgtggtcgtcgtcgcggcggcgggtccgggcgccgcggcgcacacggcgcgggtgcggttcgcggagggcgcgccggagcacgaggtggccgtgggctgctgccgcgggctgggcggccggcccggggaggaggacgagctgtgggtcagcgtggacggcaagcgcgccgtgcacgcgcgccgcctgcgctggaacttccggggcaaccagacggtgttcgtggacggcgcgcccgtcgacgtgctctgggacctgcacggctggtggttccgccgcgacccgccgggctgcgccgtcgtgatgctccgcaccaggagcgcgctcgagagcaggctctggctcgaggaggaggccagggcgcccggccccctgattgtcgatgaagttgagcagatgctctgctgccagtgcctgctgcttcatgtttttcctctgccttttgacctggggatctggtgcctggtgtttagcaatccaaattcgaatccaacagggcaacggtttgcgttgacaatttag

SEQ ID NO: 8372 - DNA, 1362 bp, Zea mays
  Peptide Sequence Number=SeqID_50151
atgccgccggacagagaagacgccgcgggcgcgggcgcggacgtcgcggccgacgagctgcagagcatcccgcgcctcggcgccgtctcgctctccgacatccgcttcctgcgccggctcggcgccggcgacatcggcagcgtgtacctggccgaggtccgccgccccacccccaccgccggggccgccggcaaggagaagcacacctcgactttggcggcggcggcggtggtggtggccgccaaggtgatggaccgcaaggagctggaggggcgaaacaaggagggccgcgcgcgcacggagcgcgagatcctcgaggccgtcgaccacccattcctgccccgcctctacggcgtcgccgagggcgaccgatggtcctgcctcctcaccgagttctgccccggcggggacctccacgtgctccgccagcgccagccgcaccgccgcttctccgaggccgccgtcaggttctacgcggcggaggtggtggcggcgctggagtacatccacatgatggacatcgtgtaccgcgacctgaagccggagaacgtgctggtccgcggggacggccacatcatgctgaccgacttcgacctgtcgctcaagtgcgacccgacggcgccgacgccggcgcacgtcatctccgacccgctgtcgctggcggggcggtcgggcggcgccgcgtcgtccacgtcctcctgcgccatctcctcctcctgcatcgtgccggccgcctcctgcttccagctcttcccgggccgcgggcgcgggcgccggcgccgccggccccgctggctgcgcgcgggcaagaaaccgtccccgaacaacaacggcgggctggagctggagctcgtggcggagccggtggagctgcggtccacgtcgttcgtgggcacgcacgagtacctggctcccgagatcgtggccggggaagggcacggcagcgccgtggactggtggacgctgggggtcttcgtcttcgagctgctgtacggggctacgcccttcaagggccacgacaacgagatgacgctggccaacatcgtggcccgcgcgctcgagttcccccgggaccgcgacccgcccgcgtcgcccgccgcccgcgacctcgtcaccgcgctcctcgccaaggaccccgcccgccgcctcggcgccaccgtcggcgccgccgccatcaagcgccaccccttcttcgccggcgtcaactgggccctgctccgctgcgccccgccgccttacgtgccgccgccgttcagcatcgccaaggcggcggctgctgctggtggaggcggcgggaaagacgacgacgacgacgacgtgtcggacgacagttgtcccggcacgcccgtggagtactactag

SEQ ID NO: 8373 - DNA, 495 bp, Zea mays
  Peptide Sequence Number=SeqID_50152
atggcggcaacggtaaccctcctccaccttcctctcgcccgactctcctaccacctccgctccatagaggaggaatctgcggccgaggcggaggcgcccaggtcgttcgtgctcccacggctgtcgcagccgaagctgagcgtgaaggaagatgtccccataaaatggccaaaaagtcgtgatgtagtatggaaagcaaacattccacacactcaccttgcaaaagagaagtcagaccagaactggatggttgaagctggtgaaaaaatcaagtttccaggtggtgggacccattttcaccatggagctgacaaatacatatcaaatattgcaaatattctaaatttcaaagataacaatataaacaatgaggggatgcttcgtatagttcttgatgttggttgtggagttgctagtttcggaggataccttctttcttctaatgtgatagcaatgtctttggcaccaaacgacgtgcatcagaatcaaatttag

SEQ ID NO: 8374 - DNA, 138 bp, Zea mays
  Peptide Sequence Number=SeqID_50153
atgcctccacggaagagatccacacggctcacccaaaaattcgaaggaatgattgctaaaatgaacgataggttatggtgtaacgagcatatctgtagtgatacatcaaatggccatacaaatttatatacccagtaa

SEQ ID NO: 8375 - DNA, 204 bp, Zea mays
  Peptide Sequence Number=SeqID_50154
atggctccacgattctatgcaagagacacccaagagcatgcctcatcgtttgtggatttcgcagggaagaaggctaagtatgtcagccgctaccgtattaccgattcatattcattagatgctgcaatggaggcaactgacgaccaacgtcaaatctctgttggtgtggtgtttgtgaccgttggcatgaatgctttgatataa

SEQ ID NO: 8376 - DNA, 582 bp, Zea mays
  Peptide Sequence Number=SeqID_50155
atgcccccaaccctagccgccactaccctactccctctcccaagccgccgccactccttctccctcgccctttctctctcttctctctctaccgccccaggccccccgatctcctcctcccactccgatcgcccgaccgatcgccgagcttccctgttccctccccgcccccgcgacgccacggagccaccgcacgccgagcaggcccgtcgccactgtagcagcaggaggagagggtggcactgcaagcccgggcaccggcctcgaaggtgctgcctgcttaacgtttttttgtttcgttcagatctccggccgggcgtacggccgcgcggatctctggtggcttcccgatgtaaccgcgtggtacgagaacgtgtggcttttgtagggccggtgcttaggcgggggctggacggcggtggggaaggggaggacggggagctgggggcggggcaggaggcgaacgcacggctaccggagcggcctggcgaggcggactatggctactacctctgcacgggcgcctgcggcttcggggaccgctgcagttacaaccatccccgcgattgtggtggcactgag

SEQ ID NO: 8377 - DNA, 156 bp, Zea mays
  Peptide Sequence Number=SeqID_50156
atggcccggggttccactgagcacaaccatgggtactatgctacaattagatgtgctccatctgcgttgaagaacgcaacatctttgatgccagaaaaatatgtgaggaaaatggaatggttaagatattcacagatgatcgtgcaaagggaatag

SEQ ID NO: 8378 - DNA, 384 bp, Zea mays
  Peptide Sequence Number=SeqID_50157
atgacaagtggggccaccgtccacctcttgcccttcttcttaggagtggtcaaaggtgccttcgtcaatgacatcttcgcatttgcccttgtctttggagcgatcaaagattgccccaacagtctcctcgctcgaggcgtgactcatggcgatgccaaggggctccttagtggtcctcatacaattgcgcctgggtttgtggacctactcacaggtggttggggttgtatttatagcctccaaccacttcctagccgttgccaaagttctaccaactacggacagtccgcgctcctggcccggacagtccgtccctgcacatcaacggttgaaatcgcaatggtcaacagtaacgactatatcaacggctatcaaggttattaa

SEQ ID NO: 8379 - DNA, 279 bp, Zea mays
  Peptide Sequence Number=SeqID_50158
atggcgccgtcccccgccgtctccctcgctgatgggccggctgggccgcctgccacgctcgcgcccggcctcttgggactagtaattgtatcacatttgagtcccaaaggatcaggacgcttcaatcatcatctgctgcagcctgtgaatgggtggttactaccgatggaactcgcaaacaactataaggttctattgatgacccatggagtcatggtgagaagtggaagaaacaaggattcaagtgtgcttattgcgggtgtgctaaggagagtggag

SEQ ID NO: 8380 - DNA, 270 bp, Zea mays
  Peptide Sequence Number=SeqID_50159
atggacggacacatcagggccggcaatgacttccggcaaagaaggaaagaggcctacagatacatagaaatgactaggggtttcagaggaagggacgcaacaaagttcttacaggccaccagctccaagaggcagaggaggaagaagcttcggagggagattcagctctcaacccagaagaactttatcgacgacttcctccatgagtctgttgacagcttcatcaacggcttcgttagcaatcctaattacatcgagcgccccctttag

SEQ ID NO: 8381 - DNA, 543 bp, Zea mays
  Peptide Sequence Number=SeqID_50160
atgatccgacgggtcatcaacggtggcatcgcctctacttacggcgatggtggcggccagccagacctctactcgcccgacgatggtgacttctacctggtgtacaaagaggtggccccggctttgcctaaatacttgggagacccaaccaacacgcaacaatcacggatagttgcgtcaactggagcatccctggtgaggaaagatattcatttttgcggaagtgacttgaaagtgagaaaacccttgttaaaaggtaggattaaagaagagaaggttaggcagggaaaacttctatctaggatggtggatcttgacctattcggagaacttgtcagacttctatccttcctcgacaaggttgacctatcccttctccgttcttggtctcctattcctaagggtcattttggtataggatttcaaagtgtgaaatccacttttgtctttagaagagataagagcaagatagagatgcaaactctcgtggatgacgtcgatatttttatcgaggtatccggaaccacgcaaggtcccgactaa

SEQ ID NO: 8382 - DNA, 450 bp, Zea mays
  Peptide Sequence Number=SeqID_50161
atgggtaggggtccggtgtcggcacgtgtccaggccttgccctacgctttccgctcaggcgaaggcccgctgctgccgcgtggaggagattttatggaggccgagctggggaaaaaggccaaggttggaccagccagattgacggcgaggtcaccggcgctctgctcgttcgccgaggaaggcaggaggcgggcctgcgccatggctggcctgggcgtccagcaccacacagaagtgctccatggccatgctgagcagagggagggcgccttgccggacttgaggaaggggagtagagagctccctgctgcaagctacgaggttggagggggaggttggacgagctgctgcactagcgagcttcggccaaggggagaactagaggtggaagacagctgctggcaagcgtgtgacggagaggccgagcaagctgctgctgctatgcgctag

SEQ ID NO: 8383 - DNA, 375 bp, Zea mays
  Peptide Sequence Number=SeqID_50162
atggatgagctcggtgctcaaacttgcctgttggccgatgccggagggagctcacgtgcctggggaagggaacgcgcgtgggggagctcagggcttgcgcgccatggggagagggaaggatcccagctgctggcgaggtgcgccagggaggccgccatgggagaagaagctcctgcgcgctgggggagaagggctctgcgcttggttacttctgcagaaagctgggcgtcgagtggacgaatggagcagagaatggagatggcgccctggctcctgttatttacaggcgacgaccgggtgcggcattggtggcttggccggctgctgctggttggctggtaccaggcattggccaagagcctggtggctggttga

SEQ ID NO: 8384 - DNA, 982 bp, Zea mays
  Peptide Sequence Number=SeqID_50163
atgccgtggagatggcgggcggcgggcggcgacgagaaagctcaccgggatctctcagtcgcgagtttcagtagcctttaccgtccgtcttctctaccggtagaattctcgttcggaagcgactccagtgaaagccgcaagaggtcactgccacggggggtcgtatcgatcggggccatcagccttgctggaggtctcgtgctcagcgccgtcaacgacctcgccatcttcaatggatgcacaacgaaggcaattgagcatgctgctgacaaccctgctgttgtggaagcaattggagtgcctatagtcagaggaccgtggtatgatgcttctcttgaggatggtctgctttcgtttctgcggcatcacgactggaagatcctattgctggaggctcatcttgaagcaccatcagatgatgaggaccagagaaagctggttaagtcccacaccagcgatcacgctgttgcttcgtccccggctacctcttcgtcctctgccccctcgtcgtgccgaaacaacgatcgccgtgctccccccgagcggcaggcccccggcgaggagaagagcaggaggaggaacgacagcgtcgacaacagcaacctggtcgacctcgtcaacgacatcgtcgccgagtcagtgagctaccgtcacaggcgtgtggccgaggatatcctcaagatggaaaaggcgggcaaggtcacggcgcgcgccttcacgtacgccgagctgtccgaggccacgggcggcttccggccggagtcgctgctgggcgagggcgggttcggccccgtgtacaggggccgcctggggtcgtcgtcgggcccggaggtggccgtcaaggcagctggacccgcaacgggcatgcagggcacgcgcgagttcctggtgaggctctcatgctcagcctgctcagcactccaacctggtgacgctgctgggccttctgtaccgacgccgaataccgcatgctcatctacga

SEQ ID NO: 8385 - DNA, 519 bp, Zea mays
  Peptide Sequence Number=SeqID_50164
atgcctccgcccgcggcgcctgctgtcgctgcgagactcccttcgccgccgcacgcgactgaaacaacggtgtcggggaccagcggagccgccaaggaattgtcggtagacgacaacctggtgggaggcattgccatgtttgatgcccagactgggctgccgcctcctggcggaggcaaacttgcctcagccaccacctctgttgtcgtggttgcgtctatcgtgcagcagttgcgatttgtgactgccttcgccgagcaagttgcctcgtggacggtgacctcgcagtttgtttccgagaggagacgactcgagggaaggattgagcgccttcgaacgcagcacactgaggcggtgatgaacgaagaagatgtggaagacctcgctggccttgagagctcggtgacccagagggatgcttcgacggaggcgggagctgaagagcaaacgacgcttccaggaggtgttgctgagggtcccgcgacggcagaaacttcgacgctagttgagagaatgtaa

SEQ ID NO: 8386 - DNA, 138 bp, Zea mays
  Peptide Sequence Number=SeqID_50165
atggccagcccaaccgaagaaaacgagcaagcaaatgatggaaccgaagtgccgctggaccgaacggttggaccggtggaaggaacgggcgaacggccttcgtcttcgtcgacgtcgtgcgcttccttgacagtttga

SEQ ID NO: 8387 - DNA, 2007 bp, Zea mays
  Peptide Sequence Number=SeqID_50166
atggctttgaaggcgagctccagcgacaaccggaccaggagcacggtatccctgtgcatagtgattggcatgtgctgcttcttctacatcctcggggcgtggcagaagagcgggttcggcaagggggacagcatcgcgctggaggtcaccaagcgcaccgactgcaccgtcgtgccgaaccttagcttcgacacccaccattctaaagccagtggcaactctagcagcctggtttctccgtcgaagaagttcaagccgtgccctgatctctacacggactacaccccctgccaagaccagaacagggcgatgaagttccctagggagaacatgaattacagagagcggcattgcccggcgcagaaggagaagctgcactgtttggttccacccccaaaaggctatgtggctccgttcccgtggccgaagagccgggactatgtccctttcgcgaattgcccatataagagcttgacagtcgagaaagccatccagaactgggtccaatatgagggtaatgtattcagattccctggtggagggacgcaattcccgcagggagcagacaagtatattgatcagcttgcatcagtcgttccgatcgccaatggaactgtcaggactgcacttgacactgggtgcggggtggctagctggggagcttatttgttgaagaggaatgtcttggccatgtcgtttgccccgagagattcacacgaggcacaagtgcagtttgctctggagagaggtgtccctgctgttattggcgtccttggtacaataaaacttccctatccatcgagggcctttgacatggcccattgttccaggtgcttgattccatggggagcaaatgatggaatgtacatgatggaagttgatagggttctaaggcctggtggctactgggtgctgtctggccctccaattaactggaaggtgaactacaagggctggcaacgcacaaagaaggatcttgaggcagagcagaacagaatagaggaaattgctgaccttctatgctgggaaaaagtctcagagaagggcgagatggcgatatggaggaaaagggtgaataccgagtcttgcccttctaggcaagaagaatcagctgtgcagatgtgtgaatcaacaaacccagatgatgtctggtacaagaagatgaaggcctgtgtgacaccccttccagatgtaaaagatgaaaacgacgtagctggaggtgcaatcaaacccttcccagccaggctcaacgcagttcctccaagaatcgctaatggtttggtcccaggcgtttcatcccaggccttccagaaagacaataaaatgtggaagaagcatgtgaagtcttacagcagtgtgaacaagtatctgcttactggtagatacaggaacattatggacatgaatgcacagtacgggggattcgccgcagcaatagagtccccgaaatcttgggtgatgaatgttgtgccgaccatcgcgaagatgcccaccctgggggctgtgtatgagcgaggattgatcggcatatatcatgactggtgtgaggctttctctacttatccaaggacgtatgatcttatccacgctagcggtcttttcaccttgtataaaaccaagtgcagcatggaagatgttctcctggagatggaccgcatcttgaggcccgaaggcgccgtcataatacgggacgacgtagacgtcctgaccaaggtgaacagcctcgctctgggtatgaggtgggacacgaagatggttgatcacgaggatggccccctcgtgcgcgagaagatcttgtatgccgtgaagcaatactgggttggtgtcatggagcattttgtaaagaaccaccagaagacaagaggcacaaagatcatggcagccacagggacaggggcatcggacacgaatatgcatagcaacgcttcgaccctcagaggattttcacctagatatagagggtacttcatcctctctattctctcctctcatttatcccttctataa

SEQ ID NO: 8388 - DNA, 279 bp, Zea mays
  Peptide Sequence Number=SeqID_50167
atggctccggccgttgccgcggcggcgtcggcggcgatgaggcaggcactgcgggaccggcagatcctcgatgccgtgggcactggcgctgcggcgctctcgctggcaggctcctccttcatcgtgatctgctacctcctcttccgcgagctccgcaagttctccttcaagctcgtcttctacctagccgtctcgtggttaaagtatgacactaagatatttaaggggtatttggcatcgctcgagagcaaaactccaagagaaactggccagagctag

SEQ ID NO: 8389 - DNA, 492 bp, Zea mays
  Peptide Sequence Number=SeqID_50168
atgggcgatatcctagagagcatgggcgaggatcgagagcgagaccgattaccccgtcgatggaaacctcaatcagatccacacgagcagataggaccgtgggcgaggacagattacccagatccatggagagtgtgggcgaggattgagagcgagggtcgcgatctgggtcgcgtcagcggggattgcgtgagagaggagagtggatctgggggaggttgcgccttccatggacgacggagctgcgaagattgggatgtcacggacgagccttacatggagagccagggcgacgatctggggcgcggtcgcggggtattcgagattcgcgggcctggccaccacgcgccctccatggagagcgacgatctggggcgattagagaggagatcggtggtggctgctggctgggattgcggccgcttgtcgcggtggcagtcgactgttggtaaagttgaccgttggtcgtgggctcaccagacagtgcggtga

SEQ ID NO: 8390 - DNA, 255 bp, Zea mays
  Peptide Sequence Number=SeqID_50169
atggctgtcattctacaacccctcgaccgggaccatctccatgtggctgggtcaggccccgagtgcctcccgtcctacgacgctagctctcttgaccacgccgccctactacgtaccggcatcgctagctttgccctagctcccgcccccggggacccccaccctgactccttgggtccccgatgggctggaggatgggaccatgcctccctcgccaccactttagcaccatgtgatggccccaaactcatctga

SEQ ID NO: 8391 - DNA, 279 bp, Zea mays
  Peptide Sequence Number=SeqID_50170
atggagacggtgggggacgatgtcgtcgaggatgtggtcggcgagagcattctactgaagcgtgaggaggacctggtgttgtacagcttggtggtttgtgcatgggaggacgtttgtcagagtgggagcacgtcaggtccaactcgatggacacgaggggctggatgttgtgcatcttggcggtctgtgcgtgaagggcagcgatgtgatcgacgtcgagaccagggcgggggggcttcaggagggagcgtaggagcctcatggacgatcgaaggatga

SEQ ID NO: 8392 - DNA, 291 bp, Zea mays
  Peptide Sequence Number=SeqID_50171
atgccggatcccgcacccgagcctgccctcgccggcgccggcgctgctgttttaaaggacctttgcatttttcagtgtgcagcccctcgcctcaacattcagttcacagattttcagttcagtgatattcaactgaaactggatgaatggccatattcagttcacagaaataaatggaccgcagttcacagattagaattcagttcacagattacaaccggaattcagttcacacagattaaatggactgcagttcacacagcagttcatagattagaattcagcggctag

SEQ ID NO: 8393 - DNA, 129 bp, Zea mays
  Peptide Sequence Number=SeqID_50172
atgaggacgtttcacatcaagcgtgcaccatcattttcgccgtcgtcggacatcccgttcgtcttcccggcctttgtcctgttctgtctccccaacctgctacccacgcccactgtcgcaaccggctag

SEQ ID NO: 8394 - DNA, 222 bp, Zea mays
  Peptide Sequence Number=SeqID_50173
atgggggctatttatggccccaggggtccatatggtcgttggaccttcctccaaaacctgttagaaatttgctctcaggtggcgcacttgaccggtctggtgcaccaccggaccgagaacaaggatggatactctaggatcttaactgaggccttccaagtcgggctagcaccagactggtctagtctagcaccagactaccacatgtccgttgcttgttga

SEQ ID NO: 8395 - DNA, 447 bp, Zea mays
  Peptide Sequence Number=SeqID_50174
atggcgtcgtcctccatcgcgctcaccgttatgttcggcttcaccgcagccctgtgctgcctccagctcctcggcgcggacaccacgaccacgaccacgacccagagcggcctcgcgcgcctggccgcggcctccctggtcccggcggtcctggccgccctgacgctgaccccgctgctcgcgttcgcgcgcgtgcacgcccgtgccggggcggagggggcgctcgtgtcgggccttgccaaggcgaccctcctcgcggggacggtggctctcgtcgcggcggccgtggtgcagctcggcgccgacgggcacctcgaccgcggccgcgacgacgtcgcgcgcctgaacgtgaagcgtctggacgaccggaccactgctaggtcctcgttctgctcgatccgttcggagctcagcgcgtctgggctttctgatggcggcggcgtctga

SEQ ID NO: 8396 - DNA, 177 bp, Zea mays
  Peptide Sequence Number=SeqID_50175
atggagaaaccaactgcagccatgagtggatttgccaaaaatgagctttgtttcttgcgcataccagtttttgactatagacttgaaacacctgatgctgcttcaactggattgataaagatgactgggttgaatgggcttgggaagctttgcagcatggggaagattctttcctag

SEQ ID NO: 8397 - DNA, 132 bp, Zea mays
  Peptide Sequence Number=SeqID_50176
atgcagcagaccggtaggtggcggcagtgctacacgggcggtggaggcggcggcgctgtgcaagcggtggcacgccggcgcggctacggctacgaacctgagaacaacgagatacctccatattgtctgtag

SEQ ID NO: 8398 - DNA, 555 bp, Zea mays
  Peptide Sequence Number=SeqID_50177
atgggtccctcctgggagcgagatccaggcgccgccggcgaccttcaccgccactgcacacgcgcggaccgtccgtgcctctgcagagggcaccgccgccgtgggccagtagccgctcgagacggcaagcaaaggccaagggccagctcgcgcggacctgggtccccaagccgacgtgcgccccaccggcaccacttgctcgctctcgccctcgccctcgccctcgtcccggcgtgccgcctcgacgctctcacgcgtaacggcgaccaagcacggtgccactgccaggtgtgcggtttgaggagtgcagggcagcggctccggcggcactgggcggcggaacagacaaaacgggagaacagtggccccaagagcgacgaggtgtacgtgtcgcgaggagaaagttctgcgattgaccctggatgtaaagtgccgctgcagcgctgctgcaggctgcagcctgcagtgcacttgtggccatccatcaacgattgggaaacaaaggagctgcggctgcctatagctatcggctcggtggcgttcggctccagctaa

SEQ ID NO: 8399 - DNA, 234 bp, Zea mays
  Peptide Sequence Number=SeqID_50178
atggctcgccacggccaagcgctgctcgccgcgctcctcgtgtccgcggtcggcgcagccagcgcgcagccgagctacaatgacggcggccagggccaggtcagcacggccatgatcgcgctcctggtccccgtcttcgcggggcagcggcggccgcgcgggctgaacgccgaggtgttcgaggctttccccaccatgaagtaccccgaggccaaggctctctggttgttctag

SEQ ID NO: 8400 - DNA, 630 bp, Zea mays
  Peptide Sequence Number=SeqID_50179
atggcttcctccttggtttctcgattgcctgtcgcagtgttgctgctgctcgtggcctgctcctccacggcagccgccaccagctacaccgtcggcgacgggtccggctggacgtccggtgtcgactacacatcttgggccgcctccaaagacttcaaagtcggggacaatctcgtgttcaactacgcgaaggggctgcacacggtggtggaggtgagcgcgggagagtacatggcgtgcacggccgccaacccgctgggctccgagtccgacagcagcggcgcgaccaccgtggccctcaaggcgccaggcacccactactacgtgtgtagtatcgccgggcactgcggcgccgggatgaagctcgccgtggccgtgaccgtcggcggctccaactccaactcccctggcgccacgccggacgacccaacgaccccgcggacgtccccgacccctaccgcgccctacacgacgccgaccaccaccacaccgtacacgacgaccccgaccaccacaccaccgtacacgacgccgacgacgaccccgaccaccacaacaccgtacacgacgccgacgtgctctggcggtggtggcgccacggcaaccccgggcatgactccgttcatgtaa

SEQ ID NO: 8401 - DNA, 2136 bp, Zea mays
  Peptide Sequence Number=SeqID_50180
atgccgttcggcttgaggaatgcgggtgcaacgtaccaacggtgcatgaaccatgtgttcggcgaacacattggccgaacggtcgaggcctacgtcgatgacatcgtagtcaagacgaggaaagcctccgacctcctttccgaccttgaagggacattccgatgtctcaaggcgaaaggcgtgaagctcaatcccgaaaagtgtgtcttcggggtcccccgaggcatgctcttggagttcatcgtctccgagcggggcatcgaggccaacccggagaagatcgcagccatcaccagcatggggcccattaaggacttgaaaggcgtacagagggtcacgggatgcctcgcggctctgagccattttatctcgcgcctcggcgaaagaggcctgcctctgtaccgcctcttaaggaaggctgagtgcttcgcttggacccctgaggccgaggaagccctcgggaacctgaaggcgctcctcacgaacgcatccatcttggtgccccccgctgccggagaagccctcttgatctacgtcgccgctaccactcaggtggtcagcgccgcgattgtggttgagagacgagaagaggggcatgcattgcctgtccagaggccagtctacttcatcagtgaggtactgtccgagaccaagatccgctacccacaaattcagaagctgttgtacgcggtgatcctgacgcggcggaagctgcgacactacttcgagtctcatccggtaactgtggtgtcatccttccccctgggggagatcatccagtcccgagaggcctcgggtagaattgcaaagtgggcggtggagatcatgggcgagacgatctcattcgccccccggaaagccatcaagtcccaggtcttggcggactttgtggccgaatgggtcgacacccagctcccgacagctccgatccaaccggagctctggaccatgtttttcgacaggtcgttgatgaagacgggggccggcgcgggcctgctcttcatctcgcccctcgggaagcacctacgctacgtgctacgcctccacttcctggcgtccaacaacgtggctgagtacgaggctctagtaaacgggttgcgaatcgccatcgagctaggggtccgacgcctcgacgctcgcggtgactcgcagctcgtcatcgaccaagtcatgaagaactcccactgccgcgacccgaagatggaagcctactgcgatgaggttcggcgcctggaagacaagttctacgggctcgagctcaaccacatcgcccgatgctacaacgagactgcggacgagctggctaaaatagcctcggggcgaacaacggttcccccggacgtattctcccgagacctgcatcaaccctccgtcaagaccgacgacacgcccgagcctaagaaggcctcggcccagcccgaggcaccctcggctcagtccgaggtaccctcggcacagtccgaggtaccctcggcccccgagggtttctactggccgacggtggtggccgacgccactagaattgtccgcacctacgaagggtgtcagttctacgcgaggcagacccacctgcccgctcaggctctacagaccatacccatcacctggtcgtttgctgtttggggtctggacctagtcggccccttgcacaaggcacccgggggctacacgcacctgctggtcgccattgacaaattctccaagtggatcgaggtccgacccctaaacagcatcaggtccgaacaggcggtggcattcttcaccaacatcatccatcgctttggggtcccaaactccatcatcaccgacaacggcacccagttcaccggcagaaagttcctggacttctgcgaggatcaccacatccgggtggactgggccgccgtggctcaccccatgacgaatgggcaagtggagcgggctaacggcatgatcctgcaaggactcaagcctcggatctacaatgacctcaacaagttcggcaagcggtggatgaaggaactcccctcggtggtctggagtctgaggacaacgccgagccgagccacgggcttcacaccgttctttctagtctatggggccgaggccatcttccccgaggacgagggcctacgccgaccaaagcaatcgagctaa

SEQ ID NO: 8402 - DNA, 165 bp, Zea mays
  Peptide Sequence Number=SeqID_50181
atggagagtctcacgctcatgaacgtctcgcacaggcaggtcatgtacttctataatgtagagttcgaaccacgtgatagagggaagttcatctccaccgccgtggaatataagaagatatattccacatgtgctcccaaggaagcaagctgtgaggtgcactga

SEQ ID NO: 8403 - DNA, 1731 bp, Zea mays
  Peptide Sequence Number=SeqID_50182
atggcgactctcaaggatctcctaccggcgcccaagacgtcggcgtccaccttctacgaccatagtagcgacccctggttcaaggagcggtacggcggggagtcggcgcaggcggccgcggcagcgaggcccgcggccgccgccaggctcatgcctccgtacgggaagcgagcggggttcgtgccgagacggccggaggacttcggggatggcggcgccttcccggagatccacgtcgcgcagtacccgctcggcatgggacgccgcgacgataagggcgggtccaggatccttgcgctcaccgtcgacgcacacgggagcgtcgccttcgacgccgtcgtcaagcagggggagaacgcaggcaagatcgtctactccaagcatagcgacctcgtgccgaagatagccactgccgattctcaggcgatgtcagacgacgacgaggagcagaagcagatcgaggagaccactgaacggaccaaggccgccttggagaagcccaagaacgtgccgactcatgattctgagtccaagttcatcaagtataagccgtcccagcaatccgcggccttcaattcaggtgcaaaggagaggatcattaggatgtcagaggtggcggtggatcctcttgagccaccaaaattcaagcacaagcgtgtgccccgggcatctgggtcaccacctgtgccagtgatgcactcgcctccaaggccggttactgtgaaggatcagcaggattggaagatcccgccttgcatttcaaattggaaaaacccaaagggttacacgatcccacttgataaaaggttggcggctgatgggagggggctgcaggaggtgcagatcaacgataactttgcaaagctttctgaagcattgtatgtggcagagcagaaggcgagggaggcagtacagatgcgctccaaggttcagagggaacttatgctgaaggagaaggagaggaaggagcaagagctaagggctcttgctcagagggcacgcatggagaggactggtgccccacctgcaccatcaggtgtgcctgctggtggcggcaggggagcagttgagggcttgaggctgtcgatgaagatatggatatggagcgaccacgtgaaccgccgcaggcgcgagagggagagggagaggaggctggaagccaaggatgctgcaatgggcaagaagagtaagatcacgagagacagggatcgtgatatcagcgagaagattgctcttggtatggcaagcactggtgctgcaaaagctggtgaggtcatgtatgaccagcggttgttcaaccaggacaagggaatggactctggctttgccacagatgatcagtacaacatctactctaagggtctcttcacagcgcagtccactatgtccacgctatacaggcctaagaaggacggggattctgatgtatacggtgatgcagatgaacagttggagaaggttatgaagacagagaggttcaagcctgacaagggatttactggtgcttcagagaggactggcaagcgagacaggcctgttgaatttgataagcaggaagaaaatgatccgttcggtctggatcagttcttgactgaggtgaagaagggtaagaaagctgtggagaagattggcggcggaggaagcatgaaggcgagtggtggatcctcaatgagggatgattatgatggtggatcagggaggtcgcgcattaattttgagagggggcgctga

SEQ ID NO: 8404 - DNA, 1062 bp, Zea mays
  Peptide Sequence Number=SeqID_50183
atgcagcacgaggagaacgagctggtcgaaggacacaacagggacatgaatggaaaacaaagaatactggtcaccacctgcgggctcaccccagcgcaagcgggcagggcgtccaaggggctcacccacctcaagtctccggttaagcccgacgccgtcgtcgcctttctcgcgggcgtcggtctcgccaaagacgacatcatcgccggtatcgccaggtacccgcggctcctctgctccaaggtggacaaaaccctaacccctcgcttcgctcagctcatgagccttgggctatccccttcccaaatctcccgcctcattaccatcgtccccaacatcttcgtcgctcccaaaaagatctcccacctccagttctatctctccttcatgggttgcttcgatcgggttcactccgccatcaggatcaatccaatgctcctcagtcggaaccttgaggatgtggtcaagcctaacatagcattcctactgcagtgcggtctaactgtttctaatgttctagagttcccattgctgataggcatgaggcccgagagtgtcagggaaagggtggcatgcgctgagaagcttggtgtgccgcgcaatacagggatgttcaagagtgccctgtgggccgtctattgcgttggtcccaactccattggtgcaaaattggatgtcatcaaggcgactcttggatgctctgaggcggagctgacccttgtggtgcgcaagtcacctccaattctgaggatgtcagaaggcaagctgagtcgcgcattgaagttcctgaaggtggatgttgggttgaagcttcagtacatcttgcttaggccagcaatacttgcctttagcatgcagaggcggctgatgcccagacattatttcatcaagattctgaaggcgaaggggcttgtgaaggaaaatgttgacttttataatgctctttgtttaactgaaaagagatttgcccagaagtttattgatccttacaaccagagtattgcagggcttgcagatgcttatgctgctgcttgtgctgggaaaatgcctcatgaagattag

SEQ ID NO: 8405 - DNA, 366 bp, Zea mays
  Peptide Sequence Number=SeqID_50184
atgggagctatcagcgtgcggagaatacagatcttattgactgacgaaggatcttgtacggtccaagtgtttgagatgctcctgtgcaaacgggtttgggtcctatttgctaaccgagttagaatttctatgtaccctcgctatttgccattcgagaattccgtactgctgaaaacaacacttgttgatgatactatattggactattttagactttttggtgttcggtttgtgatccatttgttttgctggtctcattgtttggaagcaaaatttgattggctctcattcacccctggtcgccttacaaggtcctacacttacaataaagtttgctccaacatgattgatgaagatgacatgtag

SEQ ID NO: 8406 - DNA, 528 bp, Zea mays
  Peptide Sequence Number=SeqID_50185
atgcgcgagctcttcaatgcgcgcctgtggttgcagggggcgggcgtctgcgcgacctgcctgcgggagcgcctgtcccacctgtccgtctcggcgccactgccctccgtcgtcgtcgtgcgcggctgcggcgaggatgcggagggacacggcggccgccggcaccaagaggcggccttgtcctcctgctccgagtcggaggcctccacggcctactcctcggagggctccagcgcggcggcgtcggagtgcgccagctcggaccacgagacgaggcggcgccgcgcgccgcgggtgtcgctgctgatgcgccacgagcgggtcgtcggggacgccgacgccgtggcggcgttcctgctggcgaggagggagcagaggacggcggcagcggcggccacgagcttctgggccaagctgctgcgcgcgacgcggggaggcgggaagaaggaccaccgagggtgctcgctggccgcgcgcggcaacacgctccaggagagggccgccgcgcccaagtgggttctcttctga

SEQ ID NO: 8407 - DNA, 657 bp, Zea mays
  Peptide Sequence Number=SeqID_50186
atggagttgcagaaagatggtgcatgtcatcgacctcggcagcgccgatgccacgcagtggctcgagttgcttcacctgctggccgaagggtccgcctcgccgccctgcacaagcacatcgacgtgttcacgcacacgactagacgtggagtcgctctacgtgaagaccgctacgcgggagtgattctcgctgtgagcgaagctgttggagctctaccaaacggagcacaagctattattagggatttccgtgatcaaccaatgggtgcctggtttcaaggtcggccggtgcaactgggctacgcacgtcgtcgtcggaagttactgccgtcgtccgaggaaaaccgcgcgcggccgccgacgaacatggcgagggcagcggctatgatggtagtgctcgccgtggtggcgctggcgctagccgcagcgccgcgcgcggaggctgggcagaactgcatctgtgagtgcatgaagctgtgcgtgcggacgcggatcccgagcatgggccagtgcgcgggcaagtgccgggagatggcctgcaccaagagctgcgaggatgcctgcacgcgcaagggcttccccgggctgcccagcgagggcatccccacctgcgagctggagccgctcacccccgacgaaacgcacatgttgcactga

SEQ ID NO: 8408 - DNA, 300 bp, Zea mays
  Peptide Sequence Number=SeqID_50187
atgaagctgtcatatgttgtcaggaggcagatgcaggttcaaaatcagcaacaacatgaacaatttggtgccccacgaataacgggcacattacagggtcttgtgtccattaaacaaacacagggttggaaacaattatttgctggcttgagcctcaattacatcaaggtggtgccttcagtggccattggtttcaccgcatatgacaccatgaagcatttgctgaagatacctccaagagagaagaataagctagcagaaaagcactgcttctttctaaggcatgggagtgccgtatga

SEQ ID NO: 8409 - DNA, 183 bp, Zea mays
  Peptide Sequence Number=SeqID_50188
atggtctgtcacgggaaggagacgcggcggcagaggaggagacacaggatggaggaggtcgcgaaggaggtcgcccgtacctgcgaagacgacgatgcggggaggagagggaccggcggcggcacggtgggccctaaaggagttgaggaaaaacattggaagaatgcatcctttctgctttga

SEQ ID NO: 8410 - DNA, 552 bp, Zea mays
  Peptide Sequence Number=SeqID_50189
atggagccgaggatcgggaacaagttccggcttgggcgcaagatcgggagcggctctttcggggagatctacctcggcaccaatatccagacgaacgaggaggttgcgattaagctggaaaatgtgaagacaaagcatcctcagttgctctacgaatcaaagatttataggattctgcaaggaggaaggcaggtgggactgacaacctttgttctgacagctggaataccgaatgtcagatggtttggtgtagaaggagactacaatgtcttggttatggatttacttggaccaagccttgaggatctatttaatttctgcagcaggaaattatctctgaagaccgtgcttatgctcgcagatcagatgataaatcgagtagaatttgttcattccaagtcttttctgcatcgagatattaagccagataatttcctcatgggtcttggcagacgagctaatcaggtctacgttattgactttggccttgctaaaaaatacagggatacctcaacgcatcagcacatcccatacaggcatagaaaagaataa

SEQ ID NO: 8411 - DNA, 120 bp, Zea mays
  Peptide Sequence Number=SeqID_50190
atgggagtccgtgagaacaggccgttctctttcaaaggaggcccaagctctaaggggctcgaggctcgaccattcgtattacttgaggacgaggtccttagagaggaccctaagcaataa

SEQ ID NO: 8412 - DNA, 480 bp, Zea mays
  Peptide Sequence Number=SeqID_50191
atgggcaggactacaactggaggagccagccaatcaatccttaggcagcatatgttagcgcagaaggacaaacccatggacgcaactggcacaacaagcgggcatctcaatgccaacatattggatgccacctccagactttgcaccgctgtcgcctccacctccaccacaattccatgtgtcatctggagagcggcggcgagcgccgtggagacacggtcaccagagacgctcctcacctgcttactgctgcctctcccttccagcacgtcgcccgatttagagggatttggttcgatccctggtctagagggaaacagagatccaccaggagtttggatttgcttctccgttttcttgcctaggctatggagaggatttcatctgctccagaaatggatgaggctatctcaactgatcagtcaagcagatcaacaaaaagaagggctaaagtttgggatcacgttgattcagagctaa

SEQ ID NO: 8413 - DNA, 276 bp, Zea mays
  Peptide Sequence Number=SeqID_50192
atggccatgatgggttcaacatcaaaaaagatgtacctctgccaggtaccagactttgggtttttaaatgataaagctgagaccgggcgggggtggggcctcggccggtggctaggggcgctcgacggcggccaccacagctggcctaggcgccgcacacgctggggctgggggctcggagccgcgccccgtcgtgcgtcggcagatgccatgggaggggcttgggacaagctcgtcggggccctcggctcgccgagcagggcgggcgcgagctag

SEQ ID NO: 8414 - DNA, 322 bp, Zea mays
  Peptide Sequence Number=SeqID_50193
atgctgttgcgccgtcctggaattctcgccacccttagaccacctcggcccggctacaaaggcggacccaacccctgtgcttcctctcccataacgcggtcagtgagcgggaggggactcctcctcggtcgtggaagcctctggacaccgagaaaatggtcgccggagtatcaagagacaaccgatcaagccaaggatggaggcaagaagagcttcgaggtactgagtgcacgggagaaggtcaaggagaccaggaacccaaagccaggggtgaagaagaagacttgcaaagtcaaggttgatcgagttaagaagagttatg

SEQ ID NO: 8415 - DNA, 654 bp, Zea mays
  Peptide Sequence Number=SeqID_50194
atggggcgcgcagggctttacgacttggtgaccggcgttgcttcctccgcggtggcgaggtcattggagatgaggcagacccggtcaccagggagtctagggtcgctaggaagggctagaatgggtcaagagggtctggcaaactcactggtagactaccggctgcaagaacgggactggaaacgggaaaacgacaaagggaaggcgaagctcaccgcggccaaagcgctggcagaagtccagcggcgatggtggaatgacgtgggcgcaggtctggtgggcgggccacatgccatgggtgcaacagttgtggaggaggaggacgggtctgacgggcagggcccacgtgccagttatctcgaccacaacacagataatcgtctagccctccatcgaagatggtggaccccgaagggttttgaagagcctaccttcttctcggctattataatcaccgaaggtgtcatcaccacggctgtcagtctaacctttggacttcttggtatagccacatctgcagcaggcgtcataacacccttcgatgctagaattgtgccagcaggcgatagaatcgtcgaccctttggttttcatagaagggatttcctcaattatggatgacatctcaacttcgggcataatcctgaaaagatga

SEQ ID NO: 8416 - DNA, 234 bp, Zea mays
  Peptide Sequence Number=SeqID_50195
atggaggaaaggatcgtgtcaccgacacagttgtggacatgtgggacacgtgtccaggatatgggggacgcatatgaaatttggtcctcaaaatccggctttacagttctggcaagaatcggtggtgacacgtggcatcatcatgaagggtgcattgaggtgaagcaacttcgtgaagaatatgtgactgtcatattgatattccaagagttggcccattttgcccctagctga

SEQ ID NO: 8417 - DNA, 432 bp, Zea mays
  Peptide Sequence Number=SeqID_50196
atggacgacggcgggatgtggcaacgacgtagaggcaaggcgcagcctggtcacacaggccaggggacagacgacgggcggacgcgcgacagcagcttcttcttcgccggcgcttgggaacggtcgagcacgatggcggtgagccgctgcgcagcaaggcaaggcgcgggctggtcgaccacgccgccgagccaagcgagctcgcgggcaggggccgggacacggacgtgggggagagagggaggtaaggcttgcgtccgagagatagagagagagaaaacgatggatgtgggtgcaaaaaacggcatcgtgggcgagttcctggtggcggtagcgctgccactcgcgagcgtgcgcgacgtgcggctagggagcgcgtgggctgcgcagaaaaaagagaagaatagtggtaaaggagagggtaacacttga

SEQ ID NO: 8418 - DNA, 279 bp, Zea mays
  Peptide Sequence Number=SeqID_50197
atggagctcggtgcgaattctccaatggcggcggatcttcctcctccaccgcagctgcccccggccctagttttctgttgctgcgcgattcagaagggagagggaaggggaggcagagggaggctgacccgcgggcccgcgcagcagggagtgcccgcgcgcggcgtggagaagctgatgaggaagactttgacgatgatgacgatgagtgctgagtctagcgacgctccggtcatcttcctgtgggagattgcccatgatatttccactgtactttga

SEQ ID NO: 8419 - DNA, 258 bp, Zea mays
  Peptide Sequence Number=SeqID_50198
atggacggcgcaacgggctccggcaaggccgtgggtgacgatgggtgtggcggggccaaagatggctacttcaactatggagactttgaccacttcatcgctagccgccccaagatgaagggcaagcaagaggtcggcaagcgcgactaccattctagtcggcacaagggaaagcgcgagctgacctccgacaagctcatgtccaaggagaggtttgacaaggaggcgctcaagcagaagtacctccacaaggtctag

SEQ ID NO: 8420 - DNA, 183 bp, Zea mays
  Peptide Sequence Number=SeqID_50199
atggctgcgattaaatgtgagagtaacccctttgcgacatcaaatcttggccgtttgatagagatcgggcggctctgggcgtgtaccgattcacttatggaagagcacgtgaccgaggatcctggtgagcagcaggttgaagtagctgagcaggagctcattgaaggcaagttgtgcccttga

SEQ ID NO: 8421 - DNA, 1053 bp, Zea mays
  Peptide Sequence Number=SeqID_50200
atggccgccgcctcctcctcgcagcaaccaccgcgcctgctagtactcgtggcggtctcgtgtctcctcctgcagagtgccatcaccagcagctcggcggagtcgtcgatgcagtgccacgaggaggaccaggaggcgctgctggccgtgaactccgcgctgggcagcccctaccacttcgcgtcgtggacgcccgacaccttttgctgcgactggtacgacgtggactgcgacaacgtcacgggccgcgtcgtcggcctcaccgtgttcggcgacggcaacctgacgggcgccatcccggacgccatcgccaacctgaccaacctccgcacgttggtcctgcgccacctcccgggcatctccggcggcatcccggtctcgctcgcgcagctcgccaacctcacccagctcaccatctcctccaccggcgtctccggcccggtgccgtcgttcctgtcgcagctaacggagctcaccctcctagacctctccttcaactccctcgacggcgccatcccggagacgctcgccgacctccccgccctctccagcatcgacctcagccgcaaccgcctctcgggccccgtcccgccgctgctcctaagcaagtacgtcgacgaccaggcggcgtacctcatgctgtcgcacaacaacctctccggcagcatccccgccgggttcgcctccgtcagcttcgcgtacctggacctgtcgcgcaacgccttcgccggcgacgcgtcgggcgtgttcggcaaggggaagccgctgcagcacttggacctctcccgcaacggcttcgccttcagcctcacggccgtggacctgccggagcagctggcgtacctggacctgagccacaacgccatccgcggccgcatcccggcgcaggtggccgacctcgccgggctgcagctgttcaacgtcagctacaacaagatgtgcggcgtggtgcccacgggagggagcatggccaagttcgacgcctacagctaccagcacaacaagtgcctctgcggcacgccgctgccggcatgcggccaccgttactattga

SEQ ID NO: 8422 - DNA, 354 bp, Zea mays
  Peptide Sequence Number=SeqID_50201
atggggagaaatccacatcgccacgggattcgtctcctcgccggcctgtcattgcttgggactgcaccggagggtcgtctggtgaagggagtttggtgccaacctcaggcgagagcgacctccaccataccatcggcaatttctcaccggctctggcgcgccaccgtagatccgcgcggcaccgtggactgcttcgtctactcctccattcccgatctaatcctacagccgaaaaccctagataccccttcgcgagtacttttcgttaaagagccccctaggaaatcactaatcaacccgccatcctcggagactgttgactgggtcttaggaattttaccctgcaacccctga

SEQ ID NO: 8423 - DNA, 262 bp, Zea mays
  Peptide Sequence Number=SeqID_50202
atggcgacgatcgcgcggagcggggagcagctggtaagcggggcctacacgtcatacacacggagcggaaaggggcgcagagagaacacacagcgcgcgatgcgaggggctgactgcccggtcccacatggcagtgacagaggaaagcgcgagcgtgcggtggctacggggctggaaagtggggccagcgtaagtgagcgcctgcgtgtaagtgtggctacgcgtgtggaaccggagtgggccgaatggtcagtccggccag

SEQ ID NO: 8424 - DNA, 465 bp, Zea mays
  Peptide Sequence Number=SeqID_50203
atcaacggtcaccgagtcctagccgagctgttcacctggcttctaatcctagccatccgtctccgcatcaacggcccaggtgtctcccccaatacccttgtcgagctacggtggcgccgcccagggcacacggcggaccatcgccggagcacactgaaacccgtcccccaatactccaaaatccaattaatgcccttctacacgatgccagatgaaaagcgagacgcaggggggaagtattaccgtctggtgcggcacgaaactcacggcacgcggtgcagttcatccccacggcggcgagcggacaacagcgggcaatcaccggcgcgcagagcttcaatcgcgcccacagaggtcgagggaacacaccgtaggtcgcgtagaagcactcaggaccacaactccgaccgtgccagcgtcgcaatcgcgaaaccacggcggcgggcacctcgcagcgacgactaa

SEQ ID NO: 8425 - DNA, 272 bp, Zea mays
  Peptide Sequence Number=SeqID_50204
atggcgacgatcgcgcggagcggggagcagctggtaagcggggcctacacgtcatacacacggagcggaaaggggcgcagagagaacacacagcgcgcgatgcgaggggctgactgcccggtcccacatggcagtgacagaggaaagcgcgagcgtgcggtggctaagggggctggaaagtggggcccaggcgtaagtgagcgcctgcggtgtaagtgtgggctacgcgttgtggaagcggaagtgggccgaattggttcagtccggcccag

SEQ ID NO: 8426 - DNA, 1119 bp, Zea mays
  Peptide Sequence Number=SeqID_50205
atggagccgcaggatgacccatcggtcgcatttgcgctcatctgcaacaacaccaccgtgttgggccctgccaactctagagccgcggacgactccgtcaaagcgctcgtcgcctccaccgaccccaacgcgctgctcaacaccgtcaccgcggacgcgctcgcgaccccgtctgtggatgttggggccgacgtcgtcgctgacaactggggcgggtgcttcgacgacagcgagcagtactacgagtcgccatccgtcgtcgccgacaattggggcgggtgcttcgacggcgagcagtaccgcatgagaccatccgtcaccgtcgacaactggggtggattcttcggtgacgaggacctcgctccgtcaggcaaccccacgagattcgtcctccccatcgcctccatcgacgagcccagcatcgacaccgcgccggcccgtgccaactccggagtcgcggatgactccgtgttcgtgaccatcgaacccgccggttacgacgaatccaagctgcacgccacagccgtcctcgacgtgctgccccgtgtgcacacgttgggcaaggcacaatgcgcctcctatgccgaccgcctctatgcctccgccacctgcaccgctcccgaccatgcaacgttttggagaggaagcgttccggtcctagtcgacgccatgaagctacaagagcgggacctcgacgcgtacgccaggaagcgctggttcaccatgggcttcctccataaggccgccgccattcccagggggtcggtgccggtgaggagcctctgcatggtgacccaggtggaagatactaagtcgatcctgaagttggtggccctcgacgcgctcaaggtgttcgaccaaatgtccagcccagactcggacatctgccaggaagcgcacacgctagtggccagctcacggaacttgctcttcccaggattcgtgtcgtgtgttgagacaggaatgatgcagaagcaaaacaatgacaacttggttgctctcacggttacctatcttttaactcatggagtctatgaagaaggcattgatgagatcggcaagattattcatgaaaatggcagtcaagtctacatggaaggggctaaaatgaatgcttag

SEQ ID NO: 8427 - DNA, 423 bp, Zea mays
  Peptide Sequence Number=SeqID_50206
atgatgagttcacaggggctcactgatgcttcaaagatcgcgatcttgaatgcaaactacatggcacaacgtctagagaaacactacctagttctgttctgtggagtcaacgaaattgtcgcccatgaattcatcattgatctaagagcatttaaggcgactgatggtgacaatgttgttgtatacaccaagaactgccctgaggttgtagaggatgtagagaggtggttgggctatttgctagacacatttgaggtggttgaccaaggtataaaacatttctttgtcgtgatttgggatcccggtggaattgatgccatgtattggcttgagggcaagccggtttttaagaagggaggaatgtcaacagctgcaaggatggtctacaggaagcgtgtgtggctgatgagcgtgtgtggctaa

SEQ ID NO: 8428 - DNA, 4254 bp, Zea mays
  Peptide Sequence Number=SeqID_50207
atgcctcccggcggtaggcgcggcgccaagcagcggcccaactggaccagggaaccccagctaggtgacctcgtcctcgccaagatcaaggggtacccgcgttggccagctaagatcagcaggcccgaggaatttaatcatgagccaacgccaaaaaagttctttgtctacttctatggcaccgatgagattgcttttgtaccgctggcagatcttgaggaatttactgagaagacaaagaatgatctgttagaccgagctccaaatatgaaagttaaaagaaaatatgttcaagtatttaatgatgctgtggagcagatctgcaaggcctacaatgagttgccaaaaacatctgaagctgcaaatggagcattgcctgatcagagtgaaaagccttcagagcaccttgtgaggtcacaggatgttggtgagattccaggattgggacaaatggaaggtgatagccctactgattactcgcatacttcagcgaaaaggccagggaccgaggaggatgtcaaagatgatggtcatgaaatatgtgatcattctttagcagtttatcaaaagaaaacatctttactagaggatcctaagcatcccatgacaaagaagtctgctgcatccaagtcttctcttgacatttacatggaacaggagcattcaccaacatctgtccgtgctgaaagggaggctgaagaggtgaaaattgaaaaagagagctgtcccctagatggttttattttggaacctaacttggaggtagtttgtgcccttgaagtgccaaagaaatctaaatccaacaagccgttgaggaatgctgaaaggaaggaaaacaaacgtgctggtattggtagccctattgaaaggattgttgctgaggctgcatctgatgttgtattaaacatgagtgctgacaaagagagcagagaatttaagaagtcaaaaatcatgacaaaacaatcactaactactgattcagagaaaatggattataataaaattgtgcatggcgggcctgacgagcaattgactggaaaatcatctgcagggttttcttccaataagaaatcgctgccagatagtgggcagcacaagatggacagtagtgctgatacacgtccgggaaaaaagccaaggcttatggacagggctggtgaaacagataagacagttgacaagagtgagatgaagtcaaacattgattatggaaagcattatgctgtgaaacatgagcggcctacctctatggaaacgtgtaaaaacacgattcttaagaccagtaccagcgatgatagggcactgagatcaggtggtgttgtatcacccatatcaaggcttcattctgaggtcatggaaccagcatgtggttctgtgacactgtcaactgttgctgattctgttaaaaagggttccagcatgaaggaggatgcctcacgtgttgataggcaattggtgaaacctaagagaagagcatgtcgttttgatgaagatgaggatgaaggacagcgaacaccacttcatagaacttctgctaaatctctctctacacatatagtcccaactgagaaagcaggtattcggggaaaattttcttctcatgttggcaatgtttttggaaaaaagttaggccctgcaagagaagagaaatcaaggagtgttaggatgtcacctgtgaagcatgagccaattttttcttcaccgagtcaggataaagtgcatgctagacaccaggtagtcgagaaaagactgatcacagggttggttgagactcctgctgtcattggtaacaaaatgagcctggttgatggcaaatcctctgctcaagtaaaaatgccggcatcctctgaggtgaagaaacttcgtagtagttcttctaaaccatcacacctaacatctgggaactcccattcccgaaactatcctgccccagaaaagatccccttgctgccccaaccagaagaaacaaaggctaaatctaagctagctacgtctgttgagcataaggtgggcaccactttgtcaactgaacagagtgggaagcgggatcacttgaaagaggaaagatccagttatgttgataaagcagtttcttctgaacctaaccctggctcggccaagtcaataaaacatcttattgcagctgcccaagcaaggaggaaccttatggcttctgttcatgcaaaatttgatgggtcttcgactgataatgctgatattacgtccacaccatatggtttgccgggactaagccctagtcctgttttccgcattccatccccacccagaattgcttttcccgggagtcctggtcaacgtattctgaaaagcccaatagagtttgacaatggtcatggaaagagtcccaaatctaggcaggccagcggttcacctagtggtggtactgatgcagctattgctcgtgatgctttggagggaatgatagagactttatcgaggacaaaggatagtataggacgtgcaacacgccatgcaattgagtgctctaaatatggcattgctggagagattgtcgagcttctcatacagaaattgcagagcgagcctaattttcatcgcagaattgacctcctttttcttgtagattccataacacagtgttctcattctcagagaggagttgccagggcttcatatgttcccactgttcaagcggcattgcctcgtcttctcggtgctgctgctccacctggagctggtgctcgtgaaaaccggcgccagtgccttaaagttttaagattgtggcttgagagaaagattatgccagaagacatactccggaagtacatgggcgacattgaggtgccaaatgatgatactagcactactttaatgttgaagcgaccatcccgtgctgaacgttctgtagacgatcctattagggagatggatgacatgcttgttgatgaatatggaagcaatgcaacttttgagctttctggaattttatcatcaaaagtgtttgaagatgatgaagacttccctaaaaataatgggtcatcaccatttgtttcacaggcacggcctgttgaaaatgatgtcatacgaaaaactgaagatactattgctccagtatatgttgaggaacacattattatagtagagaatgtaactactgatgctgctatggaagatgctttagagttaccaggcaacaaacaacagactgatggagctgtccttattgaacacgactctattcaagatccaggttcagagcaggcaattgaccagaatgactttccctctctacccgatggccctccaccgcttccgtcagattcaccaccacctccacctcctttgcctccttcaccaccacctgttacaccgccgcctccgccaccacctccactttctccagcttcaccacctccgccaccacctcccccactgccatctggaccacctcctcagcctgctccaccacctctggcaacccaggtcacacctcttccttctattcctccgcctgttccttcatctccaccatcattgagttatcagcctccagctcctgagtactttgtgacggccaatggtgatcaattaacccagatgacaggaaatatattgattcaagctattggaaatgcaacaaccttcattcctagtggaccagttaatggacaagctgcggttaattttgttacttcgatgcaggcagaatatggaaacaataacatatttatggcaccacaagcttctaatggtaattaccagtttcggcccactggtgtaccttttcagcaagggaatttcagtgcctttccatctgcacaaacacatccagttcaacctcactctcacatggcacacatgaatcccatgggccaacaagctgtaccacccacgctcaatccttatgctgtgcagtcatttccaaacagtcagagccattatccatccgaggaacattggcggatggcatctggtaacttcagcccagatggccagcataattggctagccggtggcggagcattaccttgctcagaagggccatatgtgcaggatggttttaacgtggaaagctcagaacactggaggcaatttgaattgagtgcaacaattcatggctttgttagtctgactgcaaactgttcttattgtatcttgctcagacgtgcattagttataaacagaggtctgaagaacgatagccgaacgatgacagggtttgatttgttgatgcgtcgttttggttctcacccgagccagtttttgaagtga

SEQ ID NO: 8429 - DNA, 411 bp, Zea mays
  Peptide Sequence Number=SeqID_50208
atggtctcgcgaactaacgcacctaagccaaatccgagctaccctagacgtgatagagattcaagcgaaacatgggaaagagaactcaccgagggcggtggtaaacaccgtgctgaccatgatgccacgttcctctcgcggtggcggattcgcttcccccgacaagcacacggcgaattggcggctgaggttaaacggcgaagaggaggggaagaaggagactcggcccaatcccttataagcatgcgggcgacggactcgggcacaacacccacagccccggagatcgcaatggcgctcgcggagctcggcatggttgttgaggacggcgacccgactgacgcggcccacacgtcagtggaaccagtcaccgcgccgcgcaacgcatcggacacgagggtgggtggctga

SEQ ID NO: 8430 - DNA, 456 bp, Zea mays
  Peptide Sequence Number=SeqID_50209
atgggcaagaacaacaaacgcaagcgcgagccgactcctccatcagaggactttggcgactcggaatactcagaggaggagttctcctctgagtctgaggggtctccagctcccgtctctcccccagcgttgtccgatgactcggacgactctcaggggattgccgcagaggtctggacttacatccgggccgtcgagcgctccgggctcgagggctcggatgagtcggagtactcctcggacgaggaggactcgcccgaggaggacggcgaaggtgacgacgacgacgacgacgacggaggcggcggcagcgacgacggtgacggcggcagcaggggcggcaacggcggcagcaggagcggcaacggcggcagcagcaggggcggcgacggcggcagcagcaggggcagcggcggcggcggcagcagcaagggcagcaacaaggccagtggctaa

SEQ ID NO: 8431 - DNA, 855 bp, Zea mays
  Peptide Sequence Number=SeqID_50210
atggcgcttcctgttgacgtggctggcctgtgccctaggctgggcgacgtggaggctcctccgaagccgaggtcgagtctgtcttccatgggccgaagccgagtccgagcccctgggtcgggcgaggcgaaggtcgttcggcagaggccagggcggagtccgagccatggggtcgggcgaagcggagttcgtcgtcttctagggctgagcccaagtccgagccctggggtcgggcggagcggagttcgccgtcttctgggacttagcccgagtccgagccctggggtcgggcggagcggagttcgccgtctttcgggtcttagcccgagtccgagccctggggtcgggcggagcggagttcgccgtcttctgggacttagcccgagtccgagccctggggtcgggcggagcggagttcgccgtcttccggggcttagcctgagtccgagccctgggtcgggcggagcggagttcgccgtcttccgggacttagcccgagtccgagtcctggtcggagtggcgcaggcggcgctgtccctttgtcaggccggtcagtggagcagcaaagtgacggcggtcacttcggctctgccgggggcgcgtgtcaggataaagctttatgctgatgggggttaccagctgagaattaggagtcttgagggtacccctaattatggtccccgacagatagtaatactcgttgtgcacttattcccttccgaccaaagggtttttgagaagattgtcattgcacaactctatttcaatacgttatcacgcacgctcactaagcaccatccacaaagaaaaataggagacatgaaggcctccgatccatcacggaactatgtctaa

SEQ ID NO: 8432 - DNA, 411 bp, Zea mays
  Peptide Sequence Number=SeqID_50211
atggtctcgcgaactaacgcacctaagccaaatccgagctaccctagacgtgatagagattcaagcgaaacatgggaaagagaactcaccgagagcggtggtaaacaccgtgctgaccacgacgccacgttcctcccgcggcggcggattcgcttcccccgacaagcacacgacgaattggcggctgaggttaaacgacgaagaggaggggaaggaggagactcggcccaatcccttataagcatgcgggcgacggactcgggcacaacgcccacagccgtgaagatcgcaatggcgcccacggagctcggcatggttgttgaggacggcgacccgactgacgcggcccacacatcagtggaaccagtcaccgcgccgcgcaacgcatcggacacgagggttggtggctga

SEQ ID NO: 8433 - DNA, 771 bp, Zea mays
  Peptide Sequence Number=SeqID_50212
atgcagcggtggctcccggcgctcctccgccgcgcggcgcccggcggcggcgcggcgcggctcctcgccacgtcctccctcctcttcgacgacacgcaggagcagttcaaggagagcgtgcgcaagttcgcgcaggaggccatcgcgccgcgcgccgcggccatcgacgcctccaaccacttcccgcgggacgtggacctgtggaggctcatgggagacttcaacctccacggcctcaccgcgcccgaggagtacggcgggatggggctcgggtacatgtaccactgcatcgccatggaggagatcaccagggcatccggcgccgtcggcctctcctacggcgcgcactccaacctctgcatcaaccagctcgtccggcacggaaacccggagcagaagctcaagtatctgcccaagctttctcaccatgttactgagggtgcatgtttacgattacagagggagcaattcggccgtccaattggtgaatttcagttcatacaggggaaaatggctgatatgtacacttcgttgcagtcgtcaagatcatttgtatactcagttgctagggactgcgataatggcaaagttgatcgcaaggattgtgcaggagtaattctctttgctgctgaaaatgcaacccaagttgcacttcaggcaatccagtgtcttggtggaaatgggtacataaatgagtacccaactggtcgtctcctgagagatgcaaaattgtttgagattggtgccgtggctctatttttctgtcaataa

SEQ ID NO: 8434 - DNA, 498 bp, Zea mays
  Peptide Sequence Number=SeqID_50213
atgcaggaatcccttgcaggaccgccatcgcagcaaaatcctcccgagggcctccctacactgaccactcccctactgcccttgcccctttcgggtaaggctctggattgggccacgaattccagaggagtcaggggtctcagcgcaaaagatactagacctagcgcacagtcggataggatggcgggggctatcgcccccatccacggcgacccgagcggcggcacgccacccacgcgaggggtgccgtcggtgaagaatctacgcccgcaccggcatcctagggctaaatcgaagtgcactacacataatacggacgataccgaggcttggaggaggtttcataccgacaatcgaagggcgaacgttcctgtccacggcgtggcggagatggtactcgacggtgagaaattccggggtctccatcgaccaaacgcgcacgccgaggccaccgacaccttccttgcggtccgcggaaactcccagacacgacgttaa

SEQ ID NO: 8435 - DNA, 498 bp, Zea mays
  Peptide Sequence Number=SeqID_50214
atgcagcaatcccttgcaggaccgccatcgcagcaaaatcctcccgagggcctccctacactgaccactcccctactgcccttgcccctttcgggtaaggctctggattgggccacgaattccagaggagtcaggggtctcagcgcaaaagatactagacctagcgcacagtcggataggatggcgggggctatcgcccccatccacggcgacccgagcggcggcacgccacccacgcgaggggtgccgtcggtgaagaatctacgcccgcaccggcatcctagggctaaatcgaagtgcactacacataatacggacgataccgaggcttggaggaggtttcataccgacaatcgaagggcgaacgttcctgtccacggcgtggcggagatggtactcgacggtgagaaattccggggtctccatcgaccaaacgcgcacgccgaggccaccgacaccttccttgtggtccgcggaaactcccagacacgacgttaa

SEQ ID NO: 8436 - DNA, 1257 bp, Zea mays
  Peptide Sequence Number=SeqID_50215
atgagcatctcggtgaacgggcagtcgtgcgtgccgccggggttccgcttccaccccacggaggaggagctgctcaactactacctccgcaagaaggtggcctcccaggagatcgacctcgacgtcatccgcgacgtcgacctcaacaagctcgagccatgggacatccaagagaaatgcaagatcgggtcgggtccccagaacgactggtacttcttcagccacaaggacaagaagtacccgacggggacgcgcaccaaccgcgccacggccgccgggttctggaaggccaccggccgcgacaaggccatctacaacgccgtcaagcgcatcggcatgcgcaagacgctcgtcttctacaagggccgcgcgccgcacggccagaagtccgactggatcatgcacgagtaccgcctcgacgaccccgctgctgctgctgctgctggatccggtgatgccgtggccaacgacgacgcagccgccacggctgctgctgctgccgccgcgtcgtcggacggcgggcaggaggacggctgggtggtgtgcagggtgttcaagaagaagcaccaccacaaggagtcaggtgggggcgggggcaacaagcacggcagcagtaacagcgagcatgggcacggcggcgccggcaaggcatcggctgcggctgcggctgcggcgcaccagcaccagcaccatggaggcctgcagtactcctccagcgacgaggcgctggaccagatcctgcagtacatgggcaggtcgtgcaagcaggagcacgagctggtgtcgccggcgccggcgccgccgggacgggcggcggcgtccaggtacctccggcccatcgagaccgttctgggcgggcacgcgttcatgaagcttcccgcgctcgagagcccgtccgcggccgcgtccgcatcgctgacacagccggcgcagcacgacgagctctaccgcgccgccgggaacgggatcacggactgggccatgatggaccggctggtggcgtcgcacctgaacgggcagcaggcgcccgccgcggcggaccagctcggcggcggctgcggcttcgacgcggacgccggcgccgaagacgcggacgccggcctcgccttctactccgccgccgccagccggctgctcggctccggcggcggcgccggcagcgacgacgacctgtggagcttcacgcggtcgtcggtttcgtcaacggcggcggcggcggccacgtccacggagcggctcagccacgtgtcactgtag

SEQ ID NO: 8437 - DNA, 162 bp, Zea mays
  Peptide Sequence Number=SeqID_50216
atggagaccccggaatttctcaccgtcgagtaccatctccgccacgccgtggacaggaacgttcgcccttcgattgtcgggtgcgttgatttgggatccaacggctacagtcgcgtaccggttcgggaaaggctagatataatctcgcgcgtccacacctaa

SEQ ID NO: 8438 - DNA, 129 bp, Zea mays
  Peptide Sequence Number=SeqID_50217
atgttgtccaaccgagacattgaaccagtgaaattccacgaggaggctatgaagaacacaatgggtggctccctaccagtcgccgcgcagcagagcaggctgcccacgttagattggcttgaagtttga

SEQ ID NO: 8439 - DNA, 720 bp, Zea mays
  Peptide Sequence Number=SeqID_50218
atggccattcgtttcgaaagcctcgacttcgtcatcgacaatgagggaacaatgaccagggccccaaaagctcaatcccccttgatgaaggacttgattgatattgttggggcctcgaaggcctctagctcagctcccctcacgaggacaatgggcggcggtgcacggcaggaccccgcttgtgttgagttcatgggaatgatggacccaccagggatttgttccatgaccttctcctatcgggatcagaatgtggacacatctccccatccagcagagcaagtcacaactcagcccaagagtgcttcatacgacgtccactccacttcagcacgacctaccctgccaaaggctgttgccaagaccgagtccttcctagagcagctagtgtctcccgaccggccaagagttccatgttgcgacgccgagagccggaggttgaccaacatatcgcgtccacactattgggaaacaacacttcgtcggacgattgctagaggcacgtacctaaacccgggcaacctgtgggacctcaagagctgccgacagaaaccggacgagaccttgagagactacattcaacgcttcttgcgactgtgcaatgagctgactaacctcaccaatgccgatgttatcagcgctttcattttaggaaccacgagtgagactctggtgcataagttgggcataaaatcctatgaaccacaaaggaactactag

SEQ ID NO: 8440 - DNA, 2055 bp, Zea mays
  Peptide Sequence Number=SeqID_50219
atgggcgtgggcatggccatgtggggagatgagtacagacatcaccgccggggagtgcggaagccgtcaggggcaggagagctcttcctgccttcggcgcgtggagagctgacgcttggtctccaccaggagcttgtggggccatcttcagatgttctcagagcaagcatttctagcgccccaagtacatctagccatggttctgcacaagatgaatgtgattcattaggggatgtgtatgtatggggtgaggttgtctgcgatacttcagtacgaactggttctgatactgttattagttcaactggcaggattgacattctcctcccgaagccattggagtccaatttagttcttgatgtgtatcatgtagattgtggggttaagcatgctgcattggtcatgaaaaatggtgaggtttttacatggggtgaagattctggaggccgccttggccatggaacacgagaagattgtgttcgtccacgtctggttgagtctttgacagtttccaatgtagattttgttgcctgtggtgaatttcatacatgtgctgttacaacaacgggtgagctttatacatggggagatggaacttacaatgttggccttctcggacatggcaatgatgtaggacactggatacctaagaggatttctggagcactggaaggtcttcaagttgcttatgtttcatgtgggacctggcatacagccttgataacatccatgggccagttatttacctttggggacggttcatttggtgtattaggtcacggagatctgaaaagtgtttcttacccaagggaggtagagtcactatcagggttgaaaacaattgctgtggcatgtggtgtgtggcacactgcagctatagtggaggttattgtcactcggtccagttcaagtgtaaagctatctgctggaaagctgttcacatggggagatggtgacaagcatcgacttggtcatggtgacaaagaaactcgacttaagccgacttgcgtggctacacttattgatcatgatttttatagggtggcatgtgggcacagccttactgtagccttgacaacttctggacaagtattgagcatgggtaatgctgtttatggtcagcttggaaatcctcattcagatggaaggataccatgtttagttgaagacaagattgtgggtgaacaagttctccaaattgcctgtggatcctaccacgtcgcagttttgacaaataggagtgaagtttttacatgggggaagggagctaatggaagattgggccatggagatacagaggatcggaaggtgcctacactggttgaagccttgaaagatagagctgttaggtacatagcctgtggtgcaaacttcactgctgctatttgtcaatataaatgggtttctggagctgaccaatcacagtgctcctcatgtcgacaaccatttgggtttacacgaaagaggcgcaactgctataattgtggacttgtccattgtaattcctgcacctcgcggaaggctttgagagcatcactggctcctagtcctgggaaaccctaccgtgtttgtgattcatgtttcttgaagttgaataatgcctcagatcctaatgcagctaaccggaggaaagatcctgttccctatcaacctgttgaaagcaatggcgatgctaaagtaggaaaggctagtttgcctagcaatatggaaatgattcgaaatttggatatcaaagcagcatggcaagggaagaaaactgatgggctatcgtttctccggaatcctcaagttagttcgctcctgcagctgagtgatattgctttatctggtggcttgggcatgaacagatcagctccgagagcggtacacatatctgcagctcgctcggttactacttcaagagctgtttcccctttctctcgcaagcccagtccaccgcgttctactacaccagttccaacagcccatggtctttctttctcaaaaagtgctactgataatattgtgaaagcaaatgagctcttaaatcaggaagttgaaagactgcgtgcacag

SEQ ID NO: 8441 - DNA, 1152 bp, Zea mays
  Peptide Sequence Number=SeqID_50220
atggctgagagattaccaccagaccacggggcctataatgtcaatgagacaaagcaatcacataatccgaatggcattgactcacatgctgctagctactctagcatgaatggaattcaccagacacggaatgagttgctcaatgcttcaattgcacatagtctgaactctggacgaccatcgtcgcattgcaatggaatctcaggacaacataaattactgggcaatgtgagtgaacacagtgactgcagcactcacagcctaagaattaccgctcctcacgattcagagcttcctagtcgaagagcacgcagcagcagtgatgagatgctgacagcaggcagtagagtggatgacaatctgaacgttgatgctgtgtcccttcaaagcggcgaggatggctacaagcctcgaggcacaataccattgccaagcaaccaagttcaggctgaatggatcgaacaatacgaacctggcgtatacataacactcacaacccttcgtgatgggacccgggatctgaagagggttcgcttcagccgaagacgttttggcgaacatcaggcggaaaattggtggaatgagaaccgggaaaaagtgtatgagcgatacaacgtgaagagctctgagcgtgtgtcgtcggcagcctcaacccgaaaaactgcaaaggctgcagcatcactactcaacagcagcaaactattcaggtcatacatactgggagatgacaaaaggccagcggccattattattttgttggcactacacaatgctggatacaatgctaggctatacgaaggccgagtctacagaacccgccagagcaggccgagggcgtcaatcagatgggaggagagcaggttccaacatttggcgtccaccgtccgtgctacgaaaaaacaacccgcgatggcccccaagagagaaaattcgaaggctgccccatccattgacgatgtggcaaagacagcactgctggtggaaaagaaaggcaaggccctcacagacaccacccccaagaggctttcgaagatgacgctgtcaacagcaagagacagcgccaggaccaccccacccccgacggcactgtacgcacctgcagttctgagggcgcaccacaagcaccaccaccagggggcgaagacaccatag

SEQ ID NO: 8442 - DNA, 420 bp, Zea mays
  Peptide Sequence Number=SeqID_50221
atggaggtatggagcccccagtacaagaaagacagagagctgttggagagggtccagaggagggccacgaagatgatgaggaggctggagcacctcccctacaaagacaggctgagggagctgggcttattcagcctggagaagagaaggctatggggtgacctcattgcagcctttcagtacctgaagggagcctataaacaagaagggattaaactctttgaaagggagagtggtgaggtgctggaacgggctgcccagagacgttgtggatgccccgtccctggaggtattcaaggccaggttggatggggccctgggcaacctggtctagtaaatggggaggttggtggccctgcccagcagggggttggagattcatggtccttgaggtcccttccaacccaggccattctgtga

SEQ ID NO: 8443 - DNA, 555 bp, Zea mays
  Peptide Sequence Number=SeqID_50222
atgggtccatctgatagcccatattctggtggagttttcctagttacaatccattttcctcccgattatcctttcaaaccaccaaaggtggcattccgcaccaaggtgttccatccaaacatcaacagcaacgggagcatctgccttgacatcctgaaggaccagtggagcccggcgctaaccatctccaaggtttgggagctacctacctaccagcaccctcaatctggtcgatttcaggtgctgctgtccatctgctccctgctgaccgatccgaaccccgacgatcctctggtccccgagatagcgcacatgtacaagacggaccggaacaagtacgagaacaccgcgaggacctggacccagagacgaggccatgtttgcgtccgtcgtattggaagaaagggcgatccggagcaggtaaaatggaactatctcccctgtgggcaggccacaaagttcggcccatctggtagccccatatgccggtggagtgttggactccaatatcgacttccggtgatcattcttgtaaccgccgaagtccaaaggtag

SEQ ID NO: 8444 - DNA, 237 bp, Zea mays
  Peptide Sequence Number=SeqID_50223
atgaagtccttttgctttgggctcttactctctcccccaaagatgaagtccttttgctctctcccccaaagatggagagtcgcgtcgcagcggcgcacagtcgcggcattgcctccgctccagcgagtcctcgagcccgccgtagaagtaacgacgctctcgcgacctatcgagattgttatgctgtctgccacatctcaatcgttcgtcgagatcattaatgtccgctttgagtag

SEQ ID NO: 8445 - DNA, 513 bp, Zea mays
  Peptide Sequence Number=SeqID_50224
atggcgccccgcatgctctgtgacgacggcggctctcagctctcttacggaagcagaaagacgtcagcacggacccgaccgctccgacagctgtccctccgccaggctccgccgctcctccgacggccacgacatcacaccagctgggtgccaagatctctccggctgccacatcggcatggccctcttagagagggttggccgcgcggggacgaggacgagacaggcgctctcttggggccgctcgctccctctcctgcgtggacgcttgtaaccccctactgcaagcgcacccgacctgggcgcgggacgaacacgaaggccgcgggatttccacctctctcacgcccgtctccggccgcctcacttccccccttcgcgctcgcccacgcgctcgacccatctgggctggggcacgcggcgacattcactcgtcggcttagggaccccccggtctcgaaacgccgacagacctccctaagcaacaacctggtgaaggcaagtgtcctctaa

SEQ ID NO: 8446 - DNA, 399 bp, Zea mays
  Peptide Sequence Number=SeqID_50225
atggaggcgccggacgaggaggctgggctggggctcctccatgagggcgagcagattctggaagtagcccttatctcggcgcaggggctcaagcccccctccagccagcggcgacggctgcaggcgtacgcggtggcctgggtcgacgcggggcacaagatccagacccaacccgacgacacgggcggtctcgacccggtgtggcacgcgcgccttctcttccgcgtgcgcgaggcctcgctcgccgacgactcccgcgccgctgtctccgtcgagatctacgcggccgccgcgggctcttggcacctcggcggggactccctcgtgggcttagtgcgcttcctgcttggcgaccatcgtgttgtgccccgtggccaccgaggatctccgatggcgtga

SEQ ID NO: 8447 - DNA, 705 bp, Zea mays
  Peptide Sequence Number=SeqID_50226
atgagggtccacggtctcctcaacgtggccacgagcctcgtcgcggtgccgccgtctccggccgcctgccatgccctccgcctctcgcaggccgtctccctcagaggtctctccgtggtgcccaccccaagtcgcgcgctccgcgtcctcaaccgcgcgcactcgacgcctccaccctccccgaggcttcttacgcccaagaagcagcagatggtggtcaacgccaataataaggtcgcggacgacgccagcgatgaggaaggcgccgaggaagacgcgagggggatgggtggggtcgtgttctgcgggccctgcgtcttaccgttatatcccagaaagatacgcacgagcccctcagacgagaacctgcaggcctacgcaaatgtcttctccggcgggctcaagcattgccggacggagccctcatttttaaggagtccgggcaagcataaaactgcacgatgttcctacgttcaggggcggatgactctatgtggcgaggctgtggcaagaagtcgaaagccaccgtccgtcctcaccccgccgaaccagccgctggtccgctgtagacagcagaccgtcctcgtggccctcgcccagtcgcccgtcgcccctgcacacggtgcgcttgctagcttgccggcttgccacagaccgcagtgccactcaagactgaagacgctgctgtcagctgtagacaactag

SEQ ID NO: 8448 - DNA, 171 bp, Zea mays
  Peptide Sequence Number=SeqID_50227
atggagcacaagacgtgccggatccagccgtctgccacagggcgccactatgccctcgccaagtcttcttcagttcattgggccatgcagcagaacattcaggaagcatgtgaaccatttgtgagctccgaaaacatacctcgtctgactacagttatacaggagccctag

SEQ ID NO: 8449 - DNA, 354 bp, Zea mays
  Peptide Sequence Number=SeqID_50228
atgggtttctgttgttgggctactgctgggccacatgtgggatggtgggatcatgttcgtcaggaattcaacattgagaagttgcagcttgttgaagctgagaaaaagaagatcaggcaagagtatgaacgcaaagagaagcaggttgaagtacgcaagaaaatctctggaggtattgtattggcttctcgagatggaaagattgtgtttgagagtacacttgacgcaagactagaagttgttttccgcaagaaattgccagagattgtgcttgaccatctgcctcgagatcaaaggtaccagcagcagagatctgctgtgttggatgactgtgtggacgacgaatggatgtga

SEQ ID NO: 8450 - DNA, 390 bp, Zea mays
  Peptide Sequence Number=SeqID_50229
atgggcgccgccgtaggggtctgcgtctccgtcctctgccagcaatgctcagctctaaccatcctctttggtaagccttacacttcacggccctccaaaaccgagagccggccctggtggccgggcggggtatccagctcagtggcaggcggttcagtcgcgacgggtcaacacggcgagacggtgctcctcttcgtggcggctcaccacatcgcggcggcgcccggtggcgtgccatcgctgaacgcagagtatgaatcaggatctgatgtctccatggatggcctacgggatggtcctgttggagatgtttactggaagaaggccaactggcagcttcatcgacgctgtggcaaatcttatcggctttgtgaagatggcttattctga

SEQ ID NO: 8451 - DNA, 513 bp, Zea mays
  Peptide Sequence Number=SeqID_50230
atggcgtctctccctaacggtggcggcgccgccgcctctggctcatgcggcgcgcgccctgtggacaaggaggtggacttcgccaactacttctgcacgtacgcctacctttaccaccagaaggagatgctctgcgaccgcgtccgcatggacgcgtaccactccgccgtcttccgcaacgcgccccacttccagggcaaggttggcacccctctgaacccctcagaaaattcgattctctccaggcaattttggggtccggtttggttgattcggcagatctgccaggtggtccttgacgtgggcaccgggagcggcatccttgctatctggagcgcgcaggccggggccaggaaggtgtacgccgtcgaggcgactaacatggcggagcacgcgcgcgagcttgctcgcgccaacggcgtcacggatatcgttgaggtgatacagggcaccgtggaagacgttgaccttccggagaaaggtgaggctggtttcttgatgctcgtcgtgtga

SEQ ID NO: 8452 - DNA, 210 bp, Zea mays
  Peptide Sequence Number=SeqID_50231
atggagcaacttactccagtgagcagtggtggctccggcgtggtagtgagctgggggagtgactggggaggtttactggagctcaaggaccatgacagcaccaacgactttgagtcgaggatgactcaaaaccaagaagggaagaatgatgagtacatggatatcaactatatggccaatgcccaatcaatcatagagtcccaagcttaa

SEQ ID NO: 8453 - DNA, 528 bp, Zea mays
  Peptide Sequence Number=SeqID_50232
atgtcgagggagccaagaaacaaaggcatctcgatgcttgaagaagttgagaggagaatgacagttaaagcgaaaggtgaggatgacgaggaaaatgaaagtgatagtgaagatgatgatgatcttcaacaattctttgctcaacttagcaagaagaactggatgaacttgctcaaacttatgaaaagagaggaagaacaaaaagaaatgctccataagcaagaagatatcctcatgagaaaaatcgaagacttggagaagttgaccaaagagcatgagaagctaaagtgctctcatgatgatttggtccaaaggcgtgcctccgccgccggcaaccaaggtccccgcagtgtcctcgccgttgctcaagcgctccagagccatctctcaagaccttcaccgtggccgcgccctcgccttcggcgaacctccaccacggaatcgggcaccgccgccaccggcagccctgtaactgagcctgaggtcaccatcagatctcaagcgtccatccgggatttgacaacctaa

SEQ ID NO: 8454 - DNA, 378 bp, Zea mays
  Peptide Sequence Number=SeqID_50233
atgtacaacgcgccgccaccgccgcaggacatgtcctactacgagcactgccagaggcggcacgaggagaagggctgcctctacggatggcttgggggtaaggtggacaaccacgccaataatcgcaccagacagtcgctgccagatgaggtccatgcctattgtcagccgaagacgaagccgctccgatcgatccgcaaggcaggcaagatgtacaacgcgccgtcggcccaggagatgtcctacttggagcacgtgcagaggcgccacgaggagaagggctgcctctacgcctgcatcttcactgcgctgtgctgcttctgctgctacgagacctgcgagtgctgcctcgactgcctctgctgctgctgcaactag

SEQ ID NO: 8455 - DNA, 144 bp, Zea mays
  Peptide Sequence Number=SeqID_50234
atggcattcgatcgactgttcaccaggcttggaagttggaagtgcaaattggacgtcaagatcaggggaaacagaacagctgggaaagggatgtttgggactgcttcatttcacgaaatcctgcttaactccagaaaacagtag

SEQ ID NO: 8456 - DNA, 456 bp, Zea mays
  Peptide Sequence Number=SeqID_50235
atgcaggcggcatgcaaccgcaccatgggggcgcaccctttcgacttcgacgcgtccagcatggaggcccaggcccacacatcatgtaactggcgcgccggttgctacgtgcaagaaactgcaccgccactcgcgccaccaccgtgcctcctcgactgcggaaccagtaccgcgactcgaggcaaccctgcgcatgacccaacagtgccaaccaggcacatcggtcacggggaccgggaaaggggaaaccccgaaagggatccttctccgcgaaggaaacgggccccgagcccccctactgatcagaggttcgaaggctggcccctcggaagggttcaacagccgcctcagagcactcgggctccgcgcccactactggtcagaggttcgaaggtcggcccctcgaaagggttcaacggccgcctcaggccactcgggctccgcgcctattactga

SEQ ID NO: 8457 - DNA, 918 bp, Zea mays
  Peptide Sequence Number=SeqID_50236
atggtgctggacctgctagtggtggtggtcgacgcgatttctagagctccagctccatcatctacgccacaagatcctactcctacaccatctgatgtaatagcgcctactcctactgatggtcaaggtactggaaccaccaacactaatgctgttgaaatagatgaggatgttagggttggtagtaaaaggaagcttaaatctgatgtatggcaagactttgaaagagtctgtgtaggtggtacttggaaagctaaatgcaattggtgtcacaaaacactatcagatgtatgtagaaatggtacaagtcatttgcgtagccacgcaaacagctgtgaatctcgacaaacaagaaaaggtctaaaacagtccactttgaaattatctaaaacacaagatggaaatgttctattagagaagtatgtgtttgatcaaggtgttgctagaaaagaacttgcattgatgatatgtgttcatgagtacccactttctattgttgagcatgttggttttagaaggttttgtgctgcattgcaacctttacttaaggttatgtcaagaaatacaattagaaaggatattttggacatgtaccaagtgcaaaaggtctcgacagtcactcttgacaactacagtaccaatgacaatgttatgaaagaaatgcaagataagatgcctctcccctctcttatgcttaggggtaaactgatgcatatgcgttgtgttgcacatatcatcaatcttattgtgaaagatggattgggtgcaaaagatgcaatgggtgtaaaagtagtagaagaggcaatagggaggatccgtgaaactatcgccttttggtcagccacacccaaaagacatgaacgatttgaaagggttgtttcacaagaaggcattaaatatgataaaaatagctcttga

SEQ ID NO: 8458 - DNA, 2751 bp, Zea mays
  Peptide Sequence Number=SeqID_50237
atgccaacctcatcgccctttgtcggcgacagcggcggcgcgggctccccgatccgcgtcgagcgaatggtccgcgagcgtagccgccgctacgacatcttcgcgtcggacgcgatggataccgacgccgaggcggccttcgcgctggatggggtccagtcgcctggacgtgcgtcacccgccaacatggaggatgctggcggcgcggccgcagcgcgaccgccgctcgccggctcccgcagcggtttccgccgcctaggcctccgtggcatgaagcagcgcctcctcgtcgtggccaaccgcctgcctgtatccgccaaccgccgcggagaggaccactggtcgcttgagatcagcgccggcggccttgtgagcgccctccttggcgtgaaggacgtcgacgcgaagtggattggctgggcaggcgtcaacgtaccggacgaggttggtcagcgagccctcactaaagctcttgcggagaagagatgcataccagtgttcctggacgaggagattgtgcaccagtactacaatggatactgcaacaacatcctgtggccactgttccactacctaggactaccacaggaggacaggctggcaacaacgaggaactttgagtcacagttcgacgcgtacaagcgtgctaaccagatgttcgctgatgtcgtgtacgagcactaccaggacggggatgtgatctggtgccatgactaccacctcatgtttctgcccaagtgcctcaaggaccatgacatcaatatgaaggtcgggtggttcctgcacacgccgttcccgtcatcagagatttaccggacactgccgtcccgcttggagctgcttcggtcggtgctgtgtgccgatttagttggatttcatacttacgactatgcgaggcattttgtgagtgcttgcactagaatacttggacttgagggtacccctgagggcgttgaagatcaaggaaggctaaccagggttgcagcgtttcctattgggatagactctgatcgtttcaagcgagcattggagcttccagcagtgaaaaggcacgtcagtgaattgacagaacgttttgccggtcgaaaggtctgcccttcagaaaaacacttgcaaaatattataaatttggaggactctaagaatgtattctggaaggtaatgcttggtgttgaccgacttgacatgattaagggaattccgcaaaagattttggcctttgaaaagtttcttgaggaaaacccagactggaacaacaaagttgttctactgcagattgctgtgccaacaagaactgacgtccctgaatatgttgctcttgtaacatcactgagagatgggatgaaccttgtgagctatgaatatgttgcatgccaagggtctaagaaaggagttctgatacttagcgagtttgctggggcagcacaatcacttggagctggtgccattctagtaaacccttggaatattacagaagttgcagactcaatacggcatgctttaacgatgccatccgatgagagagagaaacgacacagacacaactacgcacatgtcacaactcacacggctcaagattgggctgaaacttttgtatttgagctaaatgacacggttgctgaagcactactgaggacaagacaagttcctcctggtcttcctagtcaaatggcaattcagcaatatttgcgctctaaaaatcgtctgctcatattgggtttcaattcgacattgactgagccagtcgaatcctctgggagaaggggtggtgaccaaatcaaggaaatggaactcaagttgcatcctgacttaaagggtcctctgagagccctctgtgaggatgagcgcactacagttattgttcttagcggcagtgacaggagtgttcttgatgaaaattttggagaatttaaaatgtggttggcggcagagcatgggatgtttttacgcccgacttacggagaatggatgacaacaatgcctgagcatctgaacatggattgggttgacagcgtaaagcatgtttttgaatactttacagaaagaaccccaagatcccatttcgaacatcgtgaaacatcatttgtgtggaactataagtatgctgatgttgagttcggaaggctacaagcaagagatatgctgcagcacttgtggacaggtccgatctcaaatgcagctgttgatgttgttcaagggagtcgatcagttgaagttcggtctgttggagttaccaagggtgctgcaattgatcgtattttaggggagatagttcacagcgaaaacatgattactccaattgactatgtcctgtgcatagggcatttccttgggaaggatgaggacatctacgtcttctttgatcccgagtacccttctgaatccaaagtaaagccagagggcggctcagcatcacttgaccggaggccgaacgggaggccaccatcgaatggcaggagtaactccaggaacccacagtccaggacacagaaggcgcagcaggctgcatccgagaggtcatcctcatcaagtcacagcagcacgagcagcaaccacgactggcgcgaagggtcctcggtccttgatctcaagggcgagaactacttctcctgcgccgtcgggaggaagcggtccaacgcccgctacctgctgagctcgtcggaggaggttgtctccttcctcaaagagttggcgacagcgacagctggcttccaggccacctgtgctgactacatgcatgttcttggatag

SEQ ID NO: 8459 - DNA, 597 bp, Zea mays
  Peptide Sequence Number=SeqID_50238
atgggtggagctcagatgggggcaatgctgccatgggagaggagcttgggtgtcctccatggctgttcagatctcaggcgcagcaggggtttatttcaggcgctgaaacatggaggagcagaggaaggaaagggggagattgcaggggcgccatggagaagcttctgcgcggcgtccattgaaggggaggtggagctcgtagggaggggcgccgtgcaggagaggggcgcagggaactcagactggagctggatgtcaagttccctgccatgggggcgctgcttgggcgccatggctgctggccgagcagaggcgtcggggcctgggcgtctgctgcttgctgcgtttgcaaaagaaggtgtcatggggagcttctgtaggggagtttggctaggggcaagcagggaggaagatgaacaggtgttggctgctgctgcgcgaggaagaaggagcaggggcgccgcgtttggaacccgcgccaaggggagaaaggctggaaaatctgggcgccatgggtggaggaagctccctgcgcgctgctgccgtgaacagggaggaagaaacgtgatggctgaaagaagagagggtggcggctag

SEQ ID NO: 8460 - DNA, 1215 bp, Zea mays
  Peptide Sequence Number=SeqID_50239
atgatcttcccccctgccttcctgcaggattcctcgagctggaacgataaccagcaccagcagcagcagcaccaccaccagcagcaaggccacggccacctgcagattgccgtcagcggcagcggcgacgccaatcatgagctcctccagcaaccaatcatggggggagcgcttcccgatggaggaggaggaggtggtggcggggggcaggttgggggccccgccaagcccatgtccatggcggagcgcgcgcgcctcgcgaggatcccgctgccggagccggggctcaagtgcccgcgctgcgactcaaccaacaccaagttctgctacttcaacaactactccctcacccagccgcgccacttctgccgggcctgccgccgctactggacgcgcggcggcgcgctccgcaacgtgccggtcggcggcggataccgccgccacgccaagcgcgccaagcccaagcagcagcagcagcagcacgcggccgccgggaccggggctgccaccggcgcgatgcagcagcctcccgctgggtccatggcgtcgtcggccgccgcgtgcaccgcgaccacgacgatgacgaccaacgcgctccacgccgggcccggcggcggcatgctgcccatgctgccgccgctgctgcgcctagccgacttcgacgcaatgagcctcggctccagcttctccggcatatcgtccatggggaagcccggctccatcggcgcggcctgctacccgcactcggtcggcgggctggagcagtggagggtgcagcagatgcagagcttcccgttcttgcatgcgatggaccagggcccgctggggccacctctggccatggcgatggcggcgccaggagggatgttccagctaggtctagacaccaccagtgataacagccgtggcggtggcggcggcggagaagacgggtcgtctgccggagaggcgctccatatgatgcaagccaccaagagggagagctaccccgcggcaccaagagccatgtacggcgaccaacaacacaatcacctggctgctgctggtggctacacttcctattccaccaatgctgctgcagaaaagaccagtagcatgcatgcacttgttgcaatgtttgctttcaagaagaaactctggagggaggagaggctcggtttggatgctgatcatgcgcaaatattactagtgtctacagctgctacttcattatag

SEQ ID NO: 8461 - DNA, 303 bp, Zea mays
  Peptide Sequence Number=SeqID_50240
atgggggtggtgaagggcggccgggaggtgcacgctctggcgtcgtctagcttggggcttggggcttgggcgctgcgggagcgggggcacgggacaatgtgctggctcggggcttgggcgttgtgggagcaggggcacaggacagtgtgcatcgtgccgagggtgggctggacgggggcgagagagattagggtggtgatcatgagggggagggggtcgcagacggtggcaggggcatggcgcacctgcggttgcgtcggggttggtgaagggcacaacggggaggggcacggcgaggtctag

SEQ ID NO: 8462 - DNA, 294 bp, Zea mays
  Peptide Sequence Number=SeqID_50241
atggagcagcgacagatggtcggtcgagcgcgtgaggaagcagctcaaggcacggaagagcagcagcagcgcccaagccagcgtgagaagggagctcgcgtccgggctcagtatctgggagttgagcacaagataaaagagagaacgttgagagatgcagctggaatggataggaaggagcgcttgaattatctagacgagagaaatgatgtggagataaggaagagaataaagaatttcagagagacgtttcagagagtggacgtctgcaccaaattgtatgccccaaactga

SEQ ID NO: 8463 - DNA, 141 bp, Zea mays
  Peptide Sequence Number=SeqID_50242
atggagcagcgacagatggtcggtcgagcgtgtgaggaagcagctcaaggcacggaagagcagcagcagcgcccaagccagcgtgagaagggagctcgcgtccgggctcagtatctgggagttgagcacaagaattcctag

SEQ ID NO: 8464 - DNA, 2853 bp, Zea mays
  Peptide Sequence Number=SeqID_50243
gttgcaaaatctgctgcactatcatcaatttgctacagctgtgttgttgtcattggcagctttgttaaattatgcacacctaatttgctagtggagttacagaagactgtaaatctctctagcttatttaattgtttgttggcccagaaaaaccaacacgtcttatttgaaacactcaaaatttcaaggatccttgcaaaaaaagatcagcactttttcttggagagctttaccaaggagggtgtaaagcatgcaattgagtatatcgtatcacaatcaaaaaataacagtcaccagaacatgaaagaatattgcctttgcttttacatggaaacttcctcgactgttgaggcatgcagcattgcgaataattctgttacggaactagcaaaagagataaagaaaaacttcttatcggtaaaagggagtaacaaatctccaaataggtttggatttactctcaaaagtgtcagggacttttttgctaggttgaatttatattcctcgacacaccttgctgaaaatcctgatagctgcaagcagttgtctgatctttcaaggagattattgtcagatgaactgccagttacttctaattttgagtttgtgcagagtgggtctatcaaatgtttgtcagtttatctctcaaacggggcatactgcaatgcagaccttaatgatggacctgtacttgagcagcttagtgtggtgcatagtcggttgcataaatttgctaatttggctctcacccccttcaatgaaagttcagcaaatccacttgggattttggtggagaagctgctagacactttgcacatgtgctatggcagttttccggtactgctatcttatgaacagatgtcacgtgaggacatgacgatgattccgctgagatatcctgaggccaagaaaccaacatcattgctattaaaattccataggtcgcagaaggagagagaattgtacaactacaatggtgttcttattgtcgaccttttctcaacaccagatagcaccgaaccaattctatttcctgaggtctttagaagaactgatcaggaacctgcatccgagaattccaatcaagataaaaatgacgatgatgggaacaaatcctcaagactggaattcttctacaatggcgtgacactccaaccatctgttacattttttgaatcgattctccatctgatgtacaagggacaatctgatttatggatcgacccatctttctgggttcaagaacacagcataacctataggaaaagaatcaaaagcaataaggagatctcgtctcagagttcctactatactcggttatcctacgtgcatgaaatccttcaacgtgcatggttaaaggacccttttttcactgccatacttaatggcaaacttcctggcaatctggatgtgtctgacctgtcatacaatctcttattcatgcttaaagttcttgaaggggtgaaccgtttttcatatcaactcttgatggatgaacagataaacaaatttgctgaaggtattcaagaagatatcaatgatattgaagtggcaatatgtccagtaccacgacatcagttcctcagtagtcttctcataaataagctagaggtgcaaatgcaagatgtcttgttcgatgatggcctcataccctcgtggtgtgtctatctggtcgagaactgcccattcctgttgtccttggacacacggtggaagtacttctgcctgactgtacatcgctcattctttccagaccagattaaccgttattatccacaaactaaaaagtacagggtagcccgaagtgctatcattgaaggtgctgtatcagtgatgaccaatcatggtccaagcaatagaatcattgaggtggagttcgaaggagagattgggactgggcgaggtccaacatttgaattctactctacagttagtcatgaacttcaaagagctgggctcggaatgtggagaggagacagcggtgaacatggattcgttcatgctccttttggactatttccaaagccgtggccaccatcatcacaaggaattgattttactaatatgctacaaaaattcaaacttctagggaatcttgtagtgagagcggttctggatggaaggattctggatattccactttctaaagcattttacaaaatcatgcttgagcaggaactcgatatgtatgacatcctatcatttgatcctgagctgggccggacagtaattgagtttcaagcacttgttagcaggaagaattttttggaaacctcttcagaggaatctaaccctacggctgacttgtcctataaaaacgtgaaattggaggatttgtgccttgacttcactcttcctggaaatcctgaatatgaacttgttcctggaggctcagagaagatggtaacacttgacagtttagatcaatatgtatctttggtcgtttatgccacactgaagagtgggattgccaagcagatcgaagctttcaagtctggaattaatgaggtttttgatctcaaggccctcaaaatgtttacagaagaggaaatggaacgcatactatgtggtgaacagggtgcttgggatttaaagaaccttgaggatcacattgtgtttgagcatggctacgatatgagcagtcaaccggttattatttttctggagatattgcgagagtttggaagagaggagcagcgggctttcacacaattcagcactggagcccctcatctcccacttggcggcctagcttcgcttgatcccaagctcactgtcgtacgcaaggagataatgagaaagaagctcaaatatgccattacagagggtctaggccctttccacttatcatga

SEQ ID NO: 8465 - DNA, 2074 bp, Zea mays
  Peptide Sequence Number=SeqID_50244
ggcaagcgacacctttggcagacgaagcgggcaacgtttcacctccgccatgatgaccgcgtcaaaaaaagggaccgggaaaggggatatttcgaaagggatccttctccgcgaaggaagcgggccccgagccctcctactgatcaggggttcgaaggctggcccctcggaagggttcgacagccgccccagagcactcgggcttcaggctcatactgatcagaggatcgaaggctggccccttggaagggttcgacagccgcctcagagcactcgggctccacgcccactactgatcaggggttcgaaggctggcccctcgaagggttcgacagccgccccagagcacgcagagcgagggatgactctgggtatgtccgatacatggccgaggctcaggctatgctcccaaggtaccgtaggacatttccgagaccagcaggagcgattttgtaacagagtctcatcagagggaggcatcgagccctcggaccctatcgaatgggaccgggtccggcaaatcacctacaggcgcattcaatgcaaggatcgcctggcgccttatcctgacacgcgtgcctcagtcggcaaggtcgaacagctgggtccagcctcaggcgccacaggaagctccgcctcgcccgaccttgggcctcggcctcaggagaagtctccgcctcgcccgaccccagggctcggcccctgcctcggcctcagaaggtggactccgcctcatctgaccccagggctcggcctcgacctcgacctcggaaggtggtctccgcctcgcccaaccccagggcccggcctcaacctcgacctcgggcaaaatcgcatcctcgcccgaccccgacctcggcctcaggaggagtctctgcctcgcccgaccttgggctcggaccgaccacgccgtaggggcaaggatgatgaagaggtggcccgccggcccatacgggaggtagagctccggctcagctcgcccccctccccagcaaggatgatgaagatccttgaagccgagggcggggcagaggccgcagcccggcttgcttctccccaccatcgaactggtggtcaccatcctggggaccgggaaaggggatatttcgaaagggatccttctccgcgaaggaagcgggccccgagccctcctactgatcaggggttcgaaggctggcccctcggaagggttcgacagccacccagagcactcgggcttcaggctcatactgatcagaggatcgaaggctggcccctcggaagggttcgacagccgcctcagagcactcgggctccacgcccactactgatcaggggttcgaaggctggcccctcgaagggttcgacagccgccccagagcacgcagagcgagggatgactctgggtatgtccgatacatggccgaggctcaggctatgctcccaaggtaccgtaggacatttccgagaccaacaggagcgattttgtaacagagtcccatcagagggaggcatcgagccctcggaccctatcgaatgggaccgggaaaacagcgccactcacccttcttcgactgctatgccacccgccagggtgaggctgacagcagctgggtccagcctcaggcgccacaggaagctccgcctcgcccgaccttgggcctcggcctcaggagaagtctccgcctcgcccgaccctagggctcggccactgcctcggcctcagaaggtggactccgcctcatctgaccccagggctcggcctcgacctcgacctcggaaggtggtctccgcctcgcccaaccccagggcccagcctcaacctcgacctcgggcaaaatcgcatcctcgcccgaccccggcctcggcctcaggaggagtctccgcctcgcccgaccttgggctcggaccgaccacgccgcaggggccccttacggaagcaaggagacgtcagcaaggtcccgacagccccgacagctgtgcttctacatggctcaaatgctcctccgacggccacgacaccgcggccctcccggggtcgaaacgccgacagaagaaaactgtggtactcaagtttgatcattggatcacttga

SEQ ID NO: 8466 - DNA, 246 bp, Zea mays
  Peptide Sequence Number=SeqID_50245
atgacgaagaagggggagactgataaagcagtcgaagaaggggaggatttagaggataatgtctctgatactggggatgatgttgccggggaagaagaatatgaccttcatccatccaagcctagttatactgacatggtgcaatatctcataaagcccagcgaggaaggaagttttcctaagctgaaagtcatggtgtataagagcttcttctgggcaggccttttggcttttgagaacacctag

SEQ ID NO: 8467 - DNA, 360 bp, Zea mays
  Peptide Sequence Number=SeqID_50246
atggcgagagaagtacctcctcggtggtcggtcgggactgcgctagtagcggcggcacggcaagcaggtcgcaggtgcccgccggtggcggcggctggggggcgtggccgatcgggcggtgggcgtggggtcgttgcgatcgttggttcgcaggtgctcaacggcttccgcgtgcgccgcggactcgtgccgttggttttggttgatagtgcggcgacggcgagggcgagggcgaaggcttatatatcgcggcggcggggggaaagggcggcggacccggactccgatgccgcgcggtgcatgcatgtgggacccaggagcagggtatcacgtcacggcccaactgccttcgaggtttaa

SEQ ID NO: 8468 - DNA, 345 bp, Zea mays
  Peptide Sequence Number=SeqID_50247
atgaatcctgagatccgttgcaccaaccgctcccacctcgctgtcatgcacgccttaggggtgtcgtcgttgctcacatgccccgagatccgccgtcgcgccgccgcagccgctcccacgtcaccgccgtgcgcactcaaggggtcgctgccgcgtgcacctcatggagacgctgtcgcgctcgagccccacaggatccgccgccgcggccgctgccacatcgccgtcgtacgcacctcatggggccgccaccgcgtgcgtgccctcgggatccgatgccacagctgctcccacctcgccgccgtgcgcgcctcagggatccgcagctgccagcgtgtcccctag

SEQ ID NO: 8469 - DNA, 225 bp, Zea mays
  Peptide Sequence Number=SeqID_50248
atggcgtcttcgggcggttggggccactggctcagacggaatcgctcgtcggaatccgtggtggtgcgctgggccgctaccgctgtggccggtgatctacacgcctcgacttccgggattgagctatgtggccggggcacattgctcgccggcgaggcggcgaagttcgccgtgaacagggagcgacgccgctgtctcagtgagctgggaagaaaatgcatatga

SEQ ID NO: 8470 - DNA, 945 bp, Zea mays
  Peptide Sequence Number=SeqID_50249
atggagacccatccatccgaggcagagctcatcacgtccttcctccgcccccgcgtcgtcgtctctgacgacagcgacacgccgtgcgcgtcgttcgtccatgacgtggacgtctactccgctggccccggcgagctcacgggcaggctcgctccggtgctcgcgagcaacggcgacagggcgtggtacttcttctgcgccgtgagggcaaagaagagcgacgggcagcgcaaggcgcgcaaggtgcacaccggggaagggtgctggcactccgaggccggcgcgaagcccgtggtggaggggcccggccggctcctagtagggcaccgccaggcattctcgttcatgacgaaggtgaaagggcggcgcgtccggtcggggtggctgatggtggagctcagcctcgacggcgccgacgccgacgatgtggtcctctgcaaggtctacttcagtccgcgtgcgcgcgcctcgccggcggcggcgtccgggcgcaaggagaggaaggccgccgcggacgacaagaatccggccagttcggcacgccggcgccgcgaccctccggccgacgacgcagaggcaggcacgcccacacccgacaacgacgaagacagagacagcgcccagagccgcgggctcgctgatgatgacaactcatctactactgtggccgacgatcccgacgcggtcggactgggaacggacgactcagcgttctcctggtggatgaggaatagggatcggttaatggagaagtacaagatcgtcgaccggccagacgaggagctccagaaaaccctcgacctcgatgagtacctgcggctactgagccgtgatctcgatcccgccgatgcactgccgcgcgccacgtcgtacatttacatgcactcagctcctataagcgtggacgcttgctgttttgatcctttaacaccaacgggaacgtga

SEQ ID NO: 8471 - DNA, 633 bp, Zea mays
  Peptide Sequence Number=SeqID_50250
atgctgaaggacaatagccgagcacaagtaccgcaagaacccaacggcgctgccgccactccggacgaggcgaacgttaacccaacagcattcccgacgaagagtcctgccgttggctacggtgacctccttctttcgtggcggctcgacggcaccgtttccggcgtggtgacgcagagcgttcgcgaggagccggaggtcctggtggccgagggcgacatggaggagcgcgacgtcacagagctcttccgcgttgtcagtgtcactaccatagctgtgccagtggatgaccatctagatatatgccggacgatgaacaggacaagtccaagactgacgtacatgcatctcttggggattgattctaagtgggaatctcgcatcggcgcgcttgaatccatggtcaccgactcgtgcatgtgtcacgaggccagtaagtcactgctcgcacagtatggtgaagatttgatcgtcgtcaagagatctaaggatggtgcatccgcagcagctacaaccgagctcggtgccatggattttggcgccgagttcggccacatcagcgctagcgaggctaatacctcggcgtatggcctgtggcgccgagcagtgttacttcagcgcctcggcctatag

SEQ ID NO: 8472 - DNA, 171 bp, Zea mays
  Peptide Sequence Number=SeqID_50251
atggctttgttgcaggaggccgagtcatcaagacgcgatcctgttcgtggggagggatcaagcagcgaccacaatggccttagcagccatgagggccacaaccagggtgtagttggcagccgcaacgtcagagtgtggaagagcagccgacggaggtatgaaggacagtga

SEQ ID NO: 8473 - DNA, 258 bp, Zea mays
  Peptide Sequence Number=SeqID_50252
atggcattagtctgtagattttctttaactatccttgaatggaaggttgggacattcagttgcagtggcatgctcaattcatttgttgatgtttctcccgaagatttgcaacaaaaggacctccaatcttcactggagatggtagatgtaacacatgatagtacagaaagtgaaagtaaggaggatactgaggaaaaggctcccacaaatggagcgacttttaagctgaatgaagatgctgctcgtgggcccaactga

SEQ ID NO: 8474 - DNA, 1242 bp, Zea mays
  Peptide Sequence Number=SeqID_50253
atggcgcccagttcgcagaccgacgctccctgcccttccatggcacctccctctgctcccttgcgtggcgaccccgatgctagatccggcgtcgtgcagctccccttcacctctgcaacctccatggtgctcggcgctcatgctccccaaggccgacgtccctgcttccactctcctccggccgcccaggatgtcgcgccgccacccaggacgatgctccgctgcctaggaagctgcgccgctgacttctgtccgcttctgcggtgcctccgacgtgcagtaggagctgtcctgcgcgcagctgcagcctcgtccgtggcccggcgtcgacctgctagccggcgcccctctccttcccagtcggcccagcgcctgcattcgacgtcgacgcctcctttccctgcgaggacgctgtccacagtgcgagctttctcggctctgtggacgggctggctgccgtactgccgcgtgggcgtgcaggccagccgccgctgcctcgcgggcgcacgtgcggtgcagatccggcccctctcgcagcaggctacaccgcccttacagccaccggcgtgcgcgtccttctcggccttcctgtgcgccctactgccactgcccgccgccgcgctgggcctctgcccaccaccgccggctccctctccgttgcgtcctccgctggcaccctcgcatgtgccgcctccccctcattgcgctggccacctcctaactgctcgcgctgatgcgcagcagcgcctcacccttctaccttctcctgtcgtcggcgtcgttcacagcccttgccagccgctctcctttggtggtccaccggctcctcgcgccgccgtgccgccccgcccttgcctcctcggccacgcgcccgtcgtcctcgcgcggccacgcgccgccgcgcgcgcgcccgtcctcctcggccacgtgccaccctcgcctcctcggccacgcgcccgtcgtcctcgcgccaccacgcgccgccgcgcgcgcgcccgtcctcctcggccacgcgccgccctcgcctcctcggccacgcgcccgtcctcctcggccatgcgccgccctcgcccctcagccgcgtcccctcggctgcacgccctcgcctcctcagcctcacgccaccacgcgccgccctcgccccctcggtgcgcttcgccgcgcgccctcgcccgtgtagttcagaaccgagcaaggaaacgattagcttacccgagtagagttgagaaatattttgtcaaa

SEQ ID NO: 8475 - DNA, 423 bp, Zea mays
  Peptide Sequence Number=SeqID_50254
atgcggcatgccccacgcagcagtggcttcgtttctcctccgacgctcccagcaccaccgattgatcccacaacttgcagacgcggggagcctcctcttcgggccgcgctccagacgtgcacggcacggaccgcgtgctggaattgccgcgtcgtcgctgtgtggccccctgccgtgaggctgcccaggaagagctcggtggtggcggcgacgagcaacgccgcctcactccccatctcatcgacgctgaccccgtcctctctagtgttcttccatgtccccttccgcgtccgccgcgacggtcgggtgcgcctctcaccccgccgccctcgctactccgtgtggcactgcagagagatgtgccaccggatccacagcgatagattgaggacgtcgacgccctgcgagccggccgtgttgtga

SEQ ID NO: 8476 - DNA, 339 bp, Zea mays
  Peptide Sequence Number=SeqID_50255
atgggacaggcgctctcttggggccgctcgcttccctcacccgcgtggacgcttgtaacccccctactgcaagcgcacccgacctgggcgcgggacgaacacgaaggccgcgggacttccacctctctcacgctcgactccggccacctcgcctctccccccttcgcgctcgcccacgcgctcgacccatctgggctggggcacgcagcacactcactcgtcggcttagggacccccctgtctcgaaacgccgacacccttgatatgataatattgggaaaacgttatacaaaatcggatagatttagtttctcaatagtggcatgtgcatttgcttaa

SEQ ID NO: 8477 - DNA, 1461 bp, Zea mays
  Peptide Sequence Number=SeqID_50256
atgggcgagacaatctcgttcgcccctcggaaggccatcaagtcccaagtcttggcgaactttgtggctgaatgggtcgacacccagcttccagcggctccgatccaaccggaactctggaccatgtttttcgatgggtcgctgatgaaaacagggacaggcgcgggcctgctcttcatctcgcccctcgggaaacacctccgctacgtgctacgcctccatttcccggcgtccaacaacgtggctgagtacgaggctctggtcaacaggttgcgcatcgccatcgagctaggggtccgacgcctcgacgctcgcggtgactcgcaacttgtcatcgaacaagtcatgaagaactcccactgccgcgacccaaagatggaagcctactgcgacgaggagctcttacaagaaatacactcgggggattgcggtcatcacgcagcgcctcgaacccttgttggaaacgccttccgacaaggtttctactggccgaccgtggtggccgacgccactagaattgtccgcacctgccaagggtgtcaattctatgaaaggcagacacacttgcccgctcaggctctgcagacgatacccatcacctggtcgtttgctgcgtggggtctggacctcgtcggtcccttgcagaaggcacccgggggctacacgcacctgctggtcgccatcgacaaattctccaagtggatcgaggtccgacccctaaatagcatcaggtccgaacaggcggtggcgttcttcaccaacatcatccatcgctttggggtcctgaactccatcatcaccgacaacggcacccagttcaccggcagaaagttcctggacttctgcgaggatcaccacatccgggtggactgggccaccgtggctcaccccatgacgaatggacaagtagaacgtgccaacgacatgattctgcaaggactcaagccgcggatctacaacaacctcaacaagttcggcaagcgatggatgaaggaactccccttggtggtctggagtctgaggacaacgccaagccgagccacgggcttcacaccgttctttctagtctatggggctgaggccatcttgcccacagacttagaatacggttccccgagggcgagggcctacgacgaccaaagcaatcgggctaaccgagaagactcactggaccagctggaagaggctcaggacatggtcttactacactctgcacggtatcagcagtccctgcgacgctaccacgcccgaggggttcggtcccgagacctccaggtgggcgacttggtgcttcggctgcgacaagacgcccgagggcggcacaagctcacgcctccctgggaagggccgttcgtcatcgccaaggttctgaagcccgggacgtacaagctggccaacagtcaaggcgaggtctacagcaacgcttggaacatccgacaactacgtcgcttctacccttaa

SEQ ID NO: 8478 - DNA, 246 bp, Zea mays
  Peptide Sequence Number=SeqID_50257
atggggctctcgaagggggagcgggcctacctgcggggcatcgagcgtgctggcctcaatgacttggaggagtccatggaggaggacaaggaagacgatgaagggcgcctccgtcgatcaccatcgcctgcgttcgtggctagaacacctccggtcaccttcgacaccgaccagcacatcgacgtgaccgctagagcctcctcgacctcacctgacccttcatcaaagctctactgccgcgggtag

SEQ ID NO: 8479 - DNA, 528 bp, Zea mays
  Peptide Sequence Number=SeqID_50258
atgacgacggaattgtggctgtgcgaggaaagctctgactcgtcagatgtggagtccttcgacaatgatgacgacccgatgtctggacattggatgggcatcaacttctcggatgacggggacgacgacgacgagaacgacgacagcagcagtgactacggcagcaatgacgaggatagcaacggcagtggcgacgatgacagcgatgatgatggtggggcaagccaaatatgcgatgagatgcctcccaacaagcgtcgtcggctgctgcatgccgccgacgtgccacctcgcgcctccccttcgtggtcgttgtcggatccagcctccctccgtcatcctagccgaagtgaagtaggcgccaggctcggccgtcgactgcaggccagacaccaagatgtggatctagacaaacctactcagtacaacctgcatggcaagacaactgcacctactcagtacaataaccatactgggcttggccttgactcaaggactggtggtatagcggctgatgattcgtactag

SEQ ID NO: 8480 - DNA, 270 bp, Zea mays
  Peptide Sequence Number=SeqID_50259
atggccacagctccagtacgagagatgggagatggttatgccatcgccatgtgcgttatcatgccgcggtcgccatgtgtcatggatgaagctcctgcacacgtaaaccacgcgcgaggttacgtgtcatctgaagatcatcctggtacctggaatctcaagtctcagacaagttgtgcccttgatcacttctttttacctactcatgttctgattaatcataatgatctgcataggttaattttgatgggacccaataggttaccctag

SEQ ID NO: 8481 - DNA, 186 bp, Zea mays
  Peptide Sequence Number=SeqID_50260
atgatgcacatagagattcagtattccccagactttgaccatagaccaaggtacttcttttatgtcaaagaagacaatattgatgaagtgaccgacaagagagtgatagctctaggagaaatagagaaggacaagatcatggtcgccaaagcatacaacaagaaggtcaaggctaagtcattctag

SEQ ID NO: 8482 - DNA, 333 bp, Zea mays
  Peptide Sequence Number=SeqID_50261
atggcgtccagctgctcctcctctctccccagccgcgcgctcctccctgctgctgcgtccctggcccagctcagatcttgtcgacccctagttgagcttccatctcccatggtcgccggtcagctcctgcgcacgacttcctgcgtgctgggatggctcttctccgttggccatggatgcttgggaacaacagtagcccagctcggcaacaccaatcggctctctcgaactagcgccccaaaccccttccacaagccccatcgtggtgctccagctcgcttctgcctggtggctggtccgctcaggcgccgggctccgggagcccccacgtga

SEQ ID NO: 8483 - DNA, 204 bp, Zea mays
  Peptide Sequence Number=SeqID_50262
atggggatctacagggaaggagctcggctgctagcaaagcctgagcacaagggcgagctcagggtagccagtgaaccgcgcgtgcacaagagaagagctcgcggacgagggagttccaggaggcagaggggcatcgcagccatggatggagctgggcgcgagctcggtcggaaccagggccagggcgggcgccatggccaatag

SEQ ID NO: 8484 - DNA, 324 bp, Zea mays
  Peptide Sequence Number=SeqID_50263
atggctataattcaccggactgtctggtggtgcaccggactatccggtgagccaacgatagccagcgccaacggtcgaccgcgcaatcttcgcgcaacacgtggactgctccaacgatcagctggtgcaccgaactgtccggatcaccaattcacccccctcaaggtgctctcaattggtactgccacagacaacgagcagtccgtggttcctaagtgtattgctgatgatcttcctgagcaacaacctggtgaaggcaagtgtcctcagacctttcatgtcctgctttaccttataattcattgtcctgtattatattattga

SEQ ID NO: 8485 - DNA, 111 bp, Zea mays
  Peptide Sequence Number=SeqID_50264
atggatgactgggcggtggttatcatgggggtcgccgatggcgtaccttcaccgcaatccgagccgtcgatccttgatcctatggttctgagagcttaccggttcaagtaa

SEQ ID NO: 8486 - DNA, 228 bp, Zea mays
  Peptide Sequence Number=SeqID_50265
atggggtcacgcggcgtcgggctgtcggggacgtggcaggggcgccgaggcggctccacgggcgcggcgcggtcggggcttcggctgctcctggcgttgtgcttggcgtcgtgcttggggggtgcaggaaataactactctctaaggatgtcgaaggacgagaagaacaagacgtgcaggataggggcacgagaggatggagttaaagcaagcattgtaaacaactag

SEQ ID NO: 8487 - DNA, 111 bp, Zea mays
  Peptide Sequence Number=SeqID_50266
atggatgactgggcggtggttatcatgggggtcgccgatggcgtaccttcaccgcaatccgagccgttgatccttgatcctatggttctgagagcttaccggttcaagtaa

SEQ ID NO: 8488 - DNA, 1344 bp, Zea mays
  Peptide Sequence Number=SeqID_50267
atgggcgagacaatctcgttcgcccctcggaaggccatcaagtcccaagtcttggcggactttgtggctgaatgggtcgacacccagcttcgagcagctccgatccaaccggaactctggaccatgtttttcgacgggtcgctgatgaaaacaggagcgggcgcgggcctgctcttcatctcacccctcgggaaacacctccgctacgtgctgcgcctccatttcccggcgtccaacaacgtggccgagtacgaggctctggttaacgggttgcgcatcgccatcgagctaggggttcgacgcctcgacgctcgcggcgactcgcagcttgtcattgaccaagtcatgaagaactcccactgccgcgactcgaagatggaagcctactgcgatgaggtttggcgcctggaggacaagttctacgggctcgagctcaaccacatcgcccgacgatacaacgagactgcggatgagctggctaagatagcctcggggcggacaacggttcccccggacgtcttctcccgagacctacatcaaccctcagtcaagaccgacgacatgcccgagcccgagaaggcctcggcccagcccgaggcaccctcggctcagcccgaggcacccttggcccccgaaggtgaggcactgcacgtcgaggaagagcggaatggggtcccgcctaatcgagactggcagaccccatacctgcaatatctccaccgaggagagctgcccctcgaccgagccgaagctcggcgactggcgcggcgcgccaagtcgttcgtcttgctgggggacgagaaggagctctaccaccgcagcccctcaggcatcctccagcgatgcatatccatcaccgaaggccaggagctcttacaagaaatacacttgggggcttgcggtcaccacgcagcgcctcgagcccttgttggaaacgcttttcgacaaggtttctactggccgaccgcggtggccgacgccactagaattgtccgcacctgccaagggtgtcaattctacgcaaggcagacccacctgcccgctcaggctctgcagacaatacccattacctggccatttgctgtgtggggtctggacctcgttggtcccttgcagaaggcacccgggggctacacgcacttgttggtcgccatcgacaaattctccaagtggatcgaagtccaacccctaaacagcatcaggtccgaacaggcggtggcgttcttcaccaacatcatccatcgctttggggtcccgaactccatcatcaccgacaacggcacccagttcaccggcagaaagttcctggacttctgcgaggatcaccacattcgggtggactag

SEQ ID NO: 8489 - DNA, 807 bp, Zea mays
  Peptide Sequence Number=SeqID_50268
atggacgattggggggatcacgctgcgactgcaagcgcggcgtgcatggtgggtggcggcggtacgaagaaggatgagggctccgccgtgcctcaacaacctccgtatagcttctacgggagccacggccacctcgctgctggcggtgatgagcatgagatgccggcgccagccagcaaggctcagctcagccagatgctcctggcctcgtctcctcgctcgtgcgtcaccacgagcctcggcagcaacatgcttgacttctccaacagcgcgccgccgatggagctgaagcgccaccatcatcactctgataactcatccgagtgcaacagcactgcgactgctgcaggttcggccgtcaagaagcctagggttcaggcggcctcctcttcagcacaatctactctaaaggtgaggaaggagagactgggcgatagaataactgctcttcatcagatcgtttccccgtttggaaaggctctcagctacccctacatgggccacggcaatttgacctcctcctccactcaaaatgggccagctggatcagaaaggaaccctgcagggctgttcccagaataccccggccagttgctaaaccataatcataacactggagcacagcagcagcagcctgcagcagtccagcagccgcctgatgagaagcagggagtcgatgacgaggtgaaaagggacttgaggagccgggggctgtgcctcgtcccggtgtcctgcacgtcgcacttcggaggggacaacgccgctgactactgggccccggcggcgctcggcgggatgttccgctag

SEQ ID NO: 8490 - DNA, 468 bp, Zea mays
  Peptide Sequence Number=SeqID_50269
atggcttctgatgccgccggcgccggcgccaccgccgccgttctcgccattctggtcgtatcttccatggggcatccaaacaaagggccattatgcagcgagtgtgggtcgctgtgcaatacgaactgcactgcagaggctgccaactccacaacctgcagaagctactgcgacaacgacaccacggctgcccgggaggactgcgaaaggcaggtcctccaggggtgccaggcggcctactgcagctacggcacctgcagccgggactgcaacttggaagcccagaacgcctgcctttctatccatgacgactatacagattgccaagcatgcaagcaaggcctcacctgtcctgagacacttataagcctaagtccttggagcccctcattgtccctaaacgctagtaaatatgggttctcggagcccctcatgttctatgatgataagaagactgtggatgcttag

SEQ ID NO: 8491 - DNA, 570 bp, Zea mays
  Peptide Sequence Number=SeqID_50270
atggcggtagcagccatgatgctttggtctatccccgctcccgaagaatcagaggcaagagagatgtaccgaaacctccgcaacctggtggagaaggctacgatagctacgacacatggacgacctcatcttggagcagggggcacaaccctcccaatccccaagaggccacgtccctacgaaggatcgtatgagggaaatccacgacgctcgacacctcctcaacaaccaacgccaggagcaggaagaggtggaacagccaagcgagcaaagacgcgagagaagcccagccctactaggtcggggccacgtgccttcagacactccatcagcaaggcgcaattctccatgaagagcttggtgcaccgatccaagtgctcagccactgcccggtctattgaagcaatgacatcatctcaagcctacaaaagctctcgcatcttggtctctatcgccgccttcgcctcttgtgccgcttttgaggcatcttgggcttgggagagcatcttctggagctccagaaaagggaaggggatgacgtaccacgaagaacagagtcaaagaacgtaa

SEQ ID NO: 8492 - DNA, 300 bp, Zea mays
  Peptide Sequence Number=SeqID_50271
atggtgacatttgaacagaagggtgttgaggggtgggagaagaggatagagatgttggatcggttgggaagtagactggaggtgatggaggcagatcaatttcgactcaaggagcgggcggatcgtgcagccgcagcgacgagaaagtcgaccatggcgagttactgtatttttctacaaccgtccctcaactcccacgagctctcaggtgaccagatccttaaggtcggtgaggcagtcgagttcggcatcatgggggacagctccattgctccaaatggattgaaatttatactgtag

SEQ ID NO: 8493 - DNA, 1015 bp, Zea mays
  Peptide Sequence Number=SeqID_50272
acttgatcttccattgaacattggtgctaccgatgcttttgaggaatatattaggtttgctcataaccctcgttttcaacgtgtttctagacagagcactactagggatcttgaaacttattttcatgctaaagtttctgaggttaaaaatatgttagctaaggctacatgtgtttgtttgacatcggacatatggagtggtaatgctaaggaagactaccttagtgtggtagtgcactttgttaatgatgggtgggaattagaaaaaagaattattggtatgcgattaattgatgtgtctcattgtggttctaacattgctgagcgcattatgaatgcactagttgattaccaattgactactaaagttttatctgttacccttgacaacgcttcttctaatactagtgctattgaaaagttgacaccattactatcatcatatgttggttctactttaatgcatcaacgttgtgcatgtcatatcataaacttaattgtcaaatctggtctaaaaaggttaaaaactttgcttgaggattttagaactgctatatcatttctcaattcttctaatcaacgaattgcccagtataagacatattgtattgctatgggtgtgcggccccgtaagtttggattggatatggatgttaggtggaattctacgtaccttatgctcaagcatctcatgccacacaaagttattcgattgaagttaagactcaattgtcaattctatatgccaaatatgagtctaaatttggttctgtacgtttgcaaagacctcaacctgctactattggacctggtaatgttgatcgaggaacgacgacgaagtctaacaccagaacatgtggagatgctgtccctggccaaggattgggagcaagcagctgttcggcagcaacactgtgttgagaacaaagatcttgaagagctaatggaaaacatgtatcttgatgcacaagaaggatcgacttgtgttggtggtggagatggacatgatcactaa

SEQ ID NO: 8494 - DNA, 444 bp, Zea mays
  Peptide Sequence Number=SeqID_50273
atggcgggcggaattgagctcgccggagctaaggaacggtggctggccggtgagggattcgagttagggatcaaggtgaacatccctgatctttggctcaagaggcgtcctgggtggcctgccaaccccaagacaaccgtaggatttgtcctccctggcgtgctccctcctcgggggcaagatccaggttttgcaggagattctcgaagcctatgcgccactgcggatggtccaccgcctccatgtggacagtctgcatgcctgcagatgtcacacctggtttcagtaggcaaaccgaatgtgaaccattctgaaggtctagggtcactggtgtctggtcatacatggatcatccgtggtaggaagccggaccgtccccatgtggtctggaccatttggccttatggctcagaccatccaacatatgctggacaggggagatga

SEQ ID NO: 8495 - DNA, 357 bp, Zea mays
  Peptide Sequence Number=SeqID_50274
atgggcgaaattcaggtcaaggctccgtccgctcaagggacacgatcttgcctcgaccgagcccagcctcgggcaggaacagtagacccaggcggattcacgcctcgcccgaggcccagctcgggcaggcttggcagtgaagcagccgagtccagcctcaggcgccatagaaagctctgcctcgcccgaccccggagctcggcccccgcctcgacctcggaagacggtctccacctcgcccgaccccagggctcggcctcaacctcgacctcggtagacggtctccgcctcgcccgatcccgtggcttggcctcaacctcgacctcggcagacggtctccgcctcacccgatcctag

SEQ ID NO: 8496 - DNA, 441 bp, Zea mays
  Peptide Sequence Number=SeqID_50275
atggcacatcagccaggctttgaccccacctacagggtcgtagcctcccctgaggagggcccgagggccactgtcgatcacgcgccgcctgaccgccctgctcacaggcgaagtgccgactcggcatttaatgcgccccgtccactctggtggcaggcgtcgaccagagcgggcggcatacctatccaatcaaagcagtgggcagtacgcccgcaccactgcatgcgagcagtagtcatcataacttggtccattccaaggaaccttaggcagcacgccaattctactcaggcaatggatgtcaaggcccagggagatagcgcaagggcgggtgcactccgccactcggccggagatttcctctccgacaggcgtgcggaccatccgcacgtaggtggtagaatgtcgcccataggtggtggaccatctgtgatgatatag

SEQ ID NO: 8497 - DNA, 231 bp, Zea mays
  Peptide Sequence Number=SeqID_50276
atgttgggagaacacgccaaaagggatatggtcaccgaggaaaagcccggatctttgggaaagaagattgaacaaaggactctatggaaggaggtcggcgacaagcacaagaagcacaaggaggaatccgccggctccatcaagtcacataagaagggtgacaataagaaaaaagaaaatgaaaaaggtggtctactacgagaccgattcttcctcaccctcaacctctag

SEQ ID NO: 8498 - DNA, 1758 bp, Zea mays
  Peptide Sequence Number=SeqID_50277
atgtactgctatgtcaccatgccattcggcttgaggaatgcgggtgcgacgtaccagcggtgcatgaaccatgcaaaaggcgtgaagcttaatcccgagaagtgtgtctttggggttccccaaggcatgctcttggggttcatcgtctccgagcggggcatcgaagccaacccagagaagattgcggccatcaccagcatggggcccatcaaggacttgaaaggcgtacagagagtcatgggatgtcttgcggctctgagccgcttcatctcacgcctcggcgaaagaggcctgcctctgtaccgcctcttaaggaaggccgagtgcttcacttggacccctaaggccgaggaagccctcggaaacctgaaggcgctcctcacgaacgcgcccatcttggtgccccccgctgccggagaagccctcttgatctacgtcgccgcgaccactcaggtggttagcgccgcgatcgtggttgagagacgagaagaagggcatgcattgctcgtccagaggccagtctacttcatcagcgaggtactgtccgagaccaagatccactacccacaagttcagaagctgctgtacgcggtgatcctgacgcgacggaagttgcgacactacttcgagtctcatccggtaactgtggtgtcatccttccccctgggggagatcatccagtgccgagaggcctcgggtagaatcgcaaagtgggcggtggaaattatgggcgaaacgatctcgttcgcccctcggaaggccatcaagtcccaggtcttggcggacttcgtggctgagtgggtcgacacccagctcccaacagttccgattcaaccggaactctggaccatgttcttcgacgggtcgctgatgaagacaggagccgacgtaggcctactcttcgtctcgcccctcgggaagcacctacgctatgtgctacgcctccatttcccggcgtccaacaatgtggctgagtacgaggctctggtcaacgggttgcgcatcgccatcgagctaggggtccgacgcctcgacgctcgcggtgactcacagctcgtcatcgaccaagtcatgaagaactcccactgccgcgacccgaagatggaggcctactgcgatgaggttcggcgcctggaagacaagttctacgggctcgagctcaaccacatcgcccggcgttacaacgagactgcggacgagctagctaaaatagcctcggggcgaacaacggttcccccggacgtcttctcccgagacctgcatcaaccctccgtcaagatcgacgacacgcccgagcccgaggcaccctcggcccagcccgaggtgcccttggctcagtccgaggcaccctcggcccagcccgaggtgccctcggttcagcccgaggtaccctcggcccccgaggtacctcgagcccttgttggaaacgccttccgacaaggtttctactggccaacggcggtggccgacgccactagaattgtccgcacctgcgaagggtgtcagttctacgcgaggcagacccacctgcccgctcaggctctgctgacgatacccatcacctggccttttgctgtgtggggtctggacctcgtcggccccttgcagaaggcacccgggggctacacgcacccctgggcagggctgttcgtcatcaccaaagttctgaagcccggaacgaacaagctggccgacaatcgaggcgaggcccacaccaacacttggaacatccaacagctacgtcgcttctacccttaa

SEQ ID NO: 8499 - DNA, 3132 bp, Zea mays
  Peptide Sequence Number=SeqID_50278
atgcggcccaccacgtcctgccatcgcttccccctgctgctcgtcttgctcctcttcctcctcgccggcgagggccgctcccagcccgccgccggcggcggccccagtgaccgcgacacgctgctcgccgtcaagaaggcctggggcagccccccgcagctcaagtcctgggaccccgccgccgcccccgaccactgcaactggaccggcgtcacgtgcgccaccggcggcgttggggtcgtcaccgagcttatcctgtccaggcagaaactcacgggctccgtcccggcaccggtgtgcgcgctcgcgagcctcacccacctcgacctctcctacaacaacctcacgggcgccttccccggcgccgcgctgtacgcgtgcgcgaggctcaccttcctcgacctctccaccaaccagttctcggggccactcccgcgcgacatcgaccgcctcctctcgcggtcgatggagcacctcaacctctccaccaacggcttctccggagaggtgccgcccgcggtggcggggctcccggcgctcagttccctgcggctcgacaccaacaacttcactggcgcgtaccctgcggccgagataagcaaccgcaccggcctccagacgctcacgctggccaacaacgcgttcgcgccggcgccggtgcccaccgagttctccaagctcaccaacctgacatttctctggatggatggcatgaacctcaccggagagatcccagaggccttctctagcctcgaacagctcactctatttagcatggcttccaacaacctcaccggctcgatcccggcatgggtgtggcagcatcagaagctccagtacatctacctgttccacaatgtcctctctggcgagctgacgcgcagcgtgacggccttgaacttggttcatatcgatttgtcgtcgaatcagctaaccggagagataccgcaagacttcggcaatctcaagaacctcacaacgctgtttctatacaataaccagctcacgggcaccatcccggtgagcatcgggcttctaccacagctgagagacatccggttgttccagaacgagctgtccggagagctcccgccggagctgggcaagcactcgccgctgggcaacctcgaggtgtgccttaacaacctctccggcccgctgcgagggtcgctctgcgctaacggcaagctcttcgacatcgtcgccttcaacaacagcttctcgggcgagctccccgcggcgctcggggactgcgtcactttaaacaacttgatgctctacaacaacaacttctccggcgacttcccggagaaggtatggtcgttcccaaatctgaccttggtgatgatccagaacaacagcttcactggcacgctgccggcccagatatcccccaaactgtcacggattgagataggcaacaacatgttctccggctccttcccggcctcggcagcagggctcaaggtgctccatgcggagaacaaccggctgggcggcgagttgccgtctgacatgagcaagctcgccaaccttactgatctgtcagtgcccggcaaccggatccctggctccatcccaacatcgatcaagctgctgcagaaactgaattcgctcgacatgagaggcaaccggctgaccggcgcgataccgcaggggagcatcgggcttcttccagcactgacgatgcttgacctgtccgacaatgagctctccggcaccatcccatcagacctaaccaacgcgttcaacttgcttaacttgtcatcaaaccagctcaccggcgaggtgccggcgcagctgcagagtgcggcctacgaccggagcttccttggcaaccggctctgcgccagggcgggctcaggcacgaacctcccaacgtgcccaggcggaggccggggcagccacgacgagctttccaagggcctgatgatcctctttgtgttgctcgctgtcattgtcttcggcggcagcatcggcattgcctggctgctcttccggcaccggaaggagagccaggaggcgacggactggaagatgacggcctttacccagctcagcttctccgagtcggacgtgctcggcaacatccgcgaggagaacgtgatcggcagcggcggctccggaaaggtgtaccggatccatctcggcagcggtaacggcgccagccgcgacgaggagggcggcggcgggaggatggtcgccgtgaagaggatatggaactcgaggaagggcgacgagaagctggacagggagttcgagtcggaggtgaaggtgctgggcaacatccggcacaacaacatcgtgaagctgctgtgctgcatctccagccaggaagccaagctgctggtgtacgagtacatggagaacggcagcctggaccggtggctgcaccgccgagaccgggagggggcgccggcgccgctggactggccgaccaggctcgccatcgccgtcgacgcggccaaggggctcagctacatgcaccacgactgcgcgccccccatcgtgcaccgcgacgtcaagtccagcaacatcctgctggacccggacttccaggccaagatcgccgacttcgggctcgcccggatcctcgccaggcccggcgagccccagtccgtgtcagccatcggcgggacattcgggtacatggctccagagtatgggtacaggccaaaggtgaacgagaaggtggacgtctacagcttcggcgtcgtcctgctggagctcacaaccggcatggtcgcgaacgacagcggcgcggacctctgcctggcggagtgggcgtggcggcggtaccagaaaggcgcgccgttcgacgacgtcgtcgacgaggccatccgggagccggccgacgtgcaagacatcctgtcggtgttcaccctcggcgtcatctgcacgggagagagcccgctggcgaggccgtcgatgaaagaggtcctgcaccagctcgtccggtgcgaacagatcgccgctgaggccgaggcgtgccagctggtgagctacggcggcggaggcgcaccggtcgtcgagtcatggaagagaggcagccggcgacgcagcacgtctggctccagccggtggagctacgacgacgaggacagcggcgacttcgttgcgcacgtggtgtag

SEQ ID NO: 8500 - DNA, 837 bp, Zea mays
  Peptide Sequence Number=SeqID_50279
atggatgtgaagagcgctttcctcaacgggccaatcaaggaggaggtgtacgtagagcaaccccctgactttgaggatgaacggtaccccgaccacgtgtgtaagctctctaagacgctctatggacttaagcaagccccaagagcatggtatgaatgccttagagactttttaattgctaatgctttcaaggttgggaaagctgatccaactttattcactaagacgtgtgatggcgatttatttgtgtgccaaatttatgtcgatgacataatatttggttctactaaccaaaagtcttgtgaagagtttagcagggtgatgactcaaaagtttgaaatgtcgatgatgggcgagttgaactacttccttgggttccaagtgaagcaactcaaggacgagactttcatctcccaaacgaagtacacgcaagacttgatcaagcgggttgggatgaaggacaccaagcccgcaaagactccaatgggaactgacggatacgtcgatctcaacaaaggaggtcagtgttgcgcgcaactactttggatgaggcaaaccctccgggactttggctacaatctgagcaaagtcccactcctatgtgataatgagagtgctatccgtatggcggataatcctgttgaacacagccacactaagcacatagacatccggcatcactttttgagagaccaccagcaaaagggacatatcgaagtgttttatgttagcaccgagaaccagctagccgatatctttaccaagcctctagatgagaagaccttttgcaggctgcgtagtgagctaaatgtcttagattcgcggaacttggattga

SEQ ID NO: 8501 - DNA, 1995 bp, Zea mays
  Peptide Sequence Number=SeqID_50280
atggccagcggctctgatgccccgaagcagtatggaataaccaagccgttgtcgttgctcggaccggtggaggccgacctccagaggacggaggagctagagaagttcttgctcgagtcgggtctctatgagagccctgacgaatctgctaggcgggaggaggtgctggggaagcttgaccagattgtaaaagactgggtaaaacaattgactagtcagagaggatacactgatcaaatggttgaagaggcaaatgctgtactcttcacctttggctcataccgtcttggggttcatggacctggagctgatattgataccctctgtgttggaccttcatatgtgaaccgtgaggaagatttttttattgtactgcatgggatattagcacaaacagaggatgtgaccgagctgcagcctgtacctgatgcacatgtccctgttatgaaattcaagttccatggaatatctattgaccttctttatgccagtgtctccctcttagtagtaccagctaattttcgcacggcattaagatgtttgaagtactgggcaaaaaggagaggtgtttactctaatgttactggctttcttggtggtgtcaactgggctttactggttgcgcgtgtctgccagctctatcccaatgctgtgccaagtatgctggtctcacggttttttagagtttttacacaatggcagtggccaaacccggttatgctttgttctatagaagaggaagaacttggtttccctgtttgggatccacgcaaaaatcctcgagatagatgtcatcatatgcctattataacccctgcgtacccatgcatgaattcaagctataatgtttccacaagcacactgagggttatgttggaacaattccagtttggtaatagaatttgccaggaaattgaaatgaataagaccagctggcctgctctgtttgagccttttcaattttttgaagcatacaagaattatctacaggttgacatcattgctgaggatgatgaagaccttaggctttggaaaggatgggttgaatctcgattgcggcaactaactttgaagattgaacgtgatacatatggaatgctacagtgtcatccttacccacatgaatatgcagacccttctaggcagtgtgctcattgtgctttcttcatgggcttgtcaaggaaagaaggtgtgaaaatacaggaaggacaacagttcgatattcgaggaacggtggatgagttcaggcatgaaatcaacatgtatatgttctggaagcctgggatggagttagctgtttctcatgttcgtaggaagcaggtcccagcttatgtgtttccagagggttataaaagacctcgcccttcaagacatgtgaaccatcagtctgataaaaatgacactgaagatggcacagcgaccaggtctccagacagtcaactgaagagaaagcatgattctgttggaactgatgatatcaggtatgcaaagaggtcatcgaccagcccagttcatccgaaaaattcacctcaatctggaagcactggcgatgagactagatgtaacaaccaaataaaaagggctcctagcgatgcaagtggtggcagtccggcttcacctcaggcatcagagagaagcccagatactattctgtctgcccctaggtgcacgacaacaggagcagtgtgttctggtgatgcaattagtaagcatagtagtgttcctcttgttgagaactgcaccactccgactgtagcagtgtgcacaactttgaagcgcgtagctgagaaagttgtttcagagctagttggaagtgaaaggctggggagcaacaacagtgcggaattgttggagagtatggaaaaggaggatgtccttgctgaaaatgttcgttttggcgggaatggagttgcgcaaggtggccttccagaagagttagaggtgatgcttctggtgcacccttctcctgtttatgcgctgtctaacatgatctga

SEQ ID NO: 8502 - DNA, 1794 bp, Zea mays
  Peptide Sequence Number=SeqID_50281
atggcgtccgaatcctccccgcccccggcgggggcgccaccgcctggtctgggagacaagctagcggtgttctgggacgagggcatgctggcccacgacgccggccgcggcgtgttcgactcgggccgcgaccccggattcctggatgtgctcgaccaacacccggagaacgccgaccgcgtccgcaacatggtctccatcctccgccgcgggcccatcgcgcacttcctctcctggcactcgggccgccctgcccacgcctccgagctcctctccttccactcctcagaatacatagaggagctcgtccagacgaacgccaccggagccaagaagaagctctgtgagggcacgttcttgaacccgggctcctggggtgcggcgcttctagcggccgggaccacgctctcctccgcgaagcacatactagacgggcaggggaacctggcctacgcgttggttcgcccccctggccaccacgcgcagcccgaccacgccgatggctactgctttctgaacaatgccggacttgctgtgcaactggctctggattccgggcgcgcaaaggtcgccgttgtggatattgatgtgcactacgggaatggcaccgcggagggcttctatcggacagacaccgtgttgacgatgtctcttcacatgatgcatggttcttgggggccatcgcatccgcagagtggctccgtcgatgagattggtgagggcaaggggcttgggtacaatctcaatatacctttgcctaatggaagtggagatgctgggtatgaatatgcgatgaacgagttggttgttccatcgattgataagtttcagcctcaactgttgtttcttgtggtcggccaagattccagtgcggtgagtgcaacacacttacatagtccttgcagtgaagcaggacagagaggcaaagcacatttgcgcgtgtcccagaaaattattcaccccctctataccaaggtgctacatgggaaaaatgaaattgttattacagattgtatatcgttgggtaaccttgtaggaataggaaacgttgtaggaatatatgtgggcgatgataaggtgatccatttcacaagaggaagaggacaggaggtcggaacaggaactgtcgtcgatattattcttgtgagttccaccccaaaacgaagcaacacgccttgcccggtgtgcaccgacgaaaccagcgacagcagcacagagacgaacggcgtggtatcctcctgcctcagctgcttcctagctgggggtgctctctaccgtttcgagtacgcagtcaacccggcgctcttcctcgccaaagcgcgaggagggacgtgcacgctcgctccctctgaccctgacgacacggtggctcgccgcgccagatacctgctgagcaacggtttcaggtgctacaacctgttcaagagcaactgcgaggacttcgcgatatactgcaagactggccttcttgtcgctgagcagggcgttgtcgggcagagcgggcaggctatctccatcatcggtggacctctcgccgcggtggtctcgaccccattccgcttggttaccacgaacatctacgggatggcggtgatggccgtcggggtgtactgcgcgagcaggtatgcagctgatattggcaaccgccgtgatgtggtgaaaatggaagtcgaggacctgacggccggactggccagcggcaggatatgtgctgtggagaacatcgcccagctggtggctccggaggcagaaggcccggccgatgccacggccacggccacgctggctgcttaa

SEQ ID NO: 8503 - DNA, 216 bp, Zea mays
  Peptide Sequence Number=SeqID_50282
atggttgagctccggctacgcaagaaccactccgttgagcgcgggccggctgaaccagggagggaaggggcacaccgaagggtgtcccgagaagctgaaggcaaggtgaagctcaccgtggcactagacggggcgcgggcgcaacggcagccacggaacaggaggtggatgtcggcgggcggtggcggaagttctcggttcgcgtgggcagagtga

SEQ ID NO: 8504 - DNA, 405 bp, Zea mays
  Peptide Sequence Number=SeqID_50283
atgggaggaacagagggaagactcggccgagctgaaaatgcagccgatgatgaccagggaggtcgagccgaggatgctggcggcctgcagcttgcgtccatggaggggcgagcacaggaagaggctgggccgagctccaaccggaggggcttgctgttgctgcgttttggaacagagaggaggaagagaggagatggcgtgagggagaaagggggaggggctggtgctgccacctttaaaggggtgcttgctgcagccattggtgggctgggcggctgctgcagagctcaggtcatgtcagccagctgcagcaggtggcagagcgactttgagcgcccatttttggcattttccttttggaatagaaccttggtcactgcacaaaatatcttccttgatgtataa

SEQ ID NO: 8505 - DNA, 1872 bp, Zea mays
  Peptide Sequence Number=SeqID_50284
atggtcatatctgtgcgggttatgttctcatcaggatgtcttggacatcttgatcgtgtacatataagagtcgacgtctacgtggatctaacgtggcagcacctcggcgccgtggatctcggccccgacctccatgtcggcgccgagatccatggcgccgacctcggcaccgagatctacggcgccgaggtgctgccatatcagattcactggccagtggccagtggtcagtcaaacatttcccaccagcacaactccaccctaggcagcgccctgccccgtcccttcctctgcacactccccagactgcccactcgtccgccacccaacgcgacgcgtcgccaactcgccatggcgctccgtcttctgctcctcctcgtcactgttactaccgccgccgacgcgctcacgccggacgggcaggcgctgctggcgttcaaggcggccgttctccaagatcccacgggggcgctcgccaactgggtcgccaccgccgcggacccctgctcatggaacggggtcacctgctcctcccctgaccccggctccgcgcagcaccgccgcgtcgttgcgctctccctccctaagaagcgcctcgtcgcggagctccctagggccccgctcccgtcctcgcttcgccacctcaacctccgcagcaaccgcctcttcgggcccatcccacccgcgctcgtcgctggcgcacccgcgctccagagcctcgtcctctacgggaacgcgctcgacggccagctccccgaggacctcggtgacctggccttcctccagatcctcgacctctcctccaacgccatcaacggctccctcccggcctcgatcctcaaatgccgcaggctccgcgctcttgcgctcgcgcggaacaatctcacaggctcgctccccgctgggttcggcgcccgcctcggggcgctggaacggctcgacctctccttcaacggcttctacggcaccatcccggaggacatcgggaacctgtccaggctccaggggacggtcgacctctcgcacaaccacttctcgggccccatcccggcgagtcttgggaggctaccggagaaggtctacatcgatctcacctacaataacctctccggtccgatcccgcagaacggggcgttggagaaccggggacccacggcgttcgttggcaacccgggcctctgcgggcccccgcttaagaacccctgcgcgccagacaccatgccttcctccaatccttccctgcccaatgatggggactcgtcggcacctgaggcagccggtggtggcaaggggaagaacaaggggctggggaagattgccattgtggccatcgtgctgagtgatgtgatgggtattttgatcattgcactggtgttcttctactgctactggagggcggtttcatccaagggcagcaaggggcacggtgtggctgctggttcaaaagggtccatgtgtggcaaggattgtggatgtttcagcagggatgattctgagactccatccgagcatgtggagcagtacgatctcgtggcattggaccaacatgtgaggtttgatttggatgaactgctcaaggcatctgcttttgtgctggggaagagtgggattggaatcgtgtataaggtggttcttgaggatgggctcacaatggcagttaggcggcttggtgaggggggattgcagaggtttaaggagtttcagactgaggtggaggcgattggcaaggtccggcattccaacattgttaccttgagggcttattattggtcttttgacgagaagctgctaatatatgattacattcctaatggcagcctctctgcagcaattcatggtaagtgcctgcatttgctgcaatttgcatcctga

SEQ ID NO: 8506 - DNA, 194 bp, Zea mays
  Peptide Sequence Number=SeqID_50285
atggccgaaaagatgcaaccctatacgggctttaggatcagagatccaaatagactctcgactggaagagccggcgacggcaccagactaagtcctaatttcggagccaaggcaattctgattcctatggttcccgatgacaccgatatacagtggctctctggattggtgaccttcaccaaatggaaagtggt

SEQ ID NO: 8507 - DNA, 231 bp, Zea mays
  Peptide Sequence Number=SeqID_50286
atggagagtcatgatctgcgggcagaaagggaatcacgacttgtgggtaaagtgcacaacctcataaatcagagacaacctcataaatcagagacacttgtgggtggcaatgagactgatggttttggttatgactatggtgctggttgtcagcattgcaaccactgctcaggagaagatgaagccgtggaaggagacttccaggagttccaagactatgacgagttctag

SEQ ID NO: 8508 - DNA, 459 bp, Zea mays
  Peptide Sequence Number=SeqID_50287
atgacagtaagcatcccacttcgaagtgctctcaccaaggtcggaccaagatccacctatcgcaggaaagccttcctcgcagggcggtgggctcgagcatccgaggagaaaatcatatcgcttttgtcttctagctctctggatggggaatcgaggggcaatccttatgatggagagcctgcatcatcagtagtgtcgaccaacgctatcggtgctccgaccattgttggtcaccacatggtggctgtaaggttggctggcgctggcccccaacctggtcatgttatcttatgcaagagggtcatcgcttcttcctccccatgcccctcatgtgttgtcttgcagggtcagatccttgacccttccgttgttaccgatggtcgagctacgggccgactggaggcatctcggtcggccatgcagacaaccgatgctcatattgcaggtctccaagcgtga

SEQ ID NO: 8509 - DNA, 1005 bp, Zea mays
  Peptide Sequence Number=SeqID_50288
atgggaaactccgctccgcccgaccccagggctcggactcgggctaagacccggaagacggtgaactccgctccgcccgaccccagggctcggactcgggctaagacccggaagacggcgaactccgctccgcccgaccccagggctcggactcgggctaagacccggaagacggcgaactccgctccgcccgaccccagggctcggactcgggctaagacccggaagacggcgaactccgctccgcccgaccccagggctcggactcgggctaagacccggaagacggcgaatctccgcctcgcccgaccccagggctcggactccgccctggcctcggccaaacgatctccgcctcgcccgaccccagggctcggactccgccctggcctcggccaaacgatctccgcctcgcccgaccccagggctcggactccgccctggcctcggccaaacgatctccgcctcgcccgacccgggggctcgggctcggcctcggcaatggaaggcagactcgacctcgacttcggaggagcccccacgtcgccctgcctagggcacaggctccgtcgctcctccgacagccacgatatcacgccagcaaggtgccaagacctctccggctgccacattggcatggccttcttagagaaggttggccgcgcgggaccgaggacgggacaggcgctctcttggggccgctcgcttccctcacccgcgtggacgcttgtaacccccctactgcaagcgcacctgacctgggcgcgggacgaacacgaaggccgcgggacttccacctctctcacgctcgactccggctacctcgcctctccccccttcgcgctcgcccacgcgctcgacccatctgggctggggcacgcagcacactcactcgtcggcttagggacccccctgtctcgaaacgccgacagtatgggaaccgatacttgtggtaccacctcgtgtcgtgttgtccacattaagcaatggcgccatagtagatga

SEQ ID NO: 8510 - DNA, 294 bp, Zea mays
  Peptide Sequence Number=SeqID_50289
atggcgagattccttggtagaggggggtcgagctttcagggccctaatcacttctcattcgtcgttgaaggggaagtcaaggctcccaaaatggatcgccatcctaggaagtcgattggtgcgttgaaggggaagtcaaggctcccaaaatggatcgccatcctgggaagtcgattggtgtcgcggttagccatccagagcttggagaacttcatcacggaacgtagaagcccccttcttggtgctctaactgttgatgtttcgaacctcgcttcgacaagtgcatatccataa

SEQ ID NO: 8511 - DNA, 213 bp, Zea mays
  Peptide Sequence Number=SeqID_50290
atgaagattgagattgcacgctatgtggcgagatgcgacacctgtagacgtgtcaaggccatacatatgaaaactgctggcccatatgaaaactgcatgtttagaggttccctagaggacatggttgctggagtgacttggccgtccatcttgccaccgggttggacaatcgagtgggaccctacctcggctgaggaggagcacgaggagtga

SEQ ID NO: 8512 - DNA, 321 bp, Zea mays
  Peptide Sequence Number=SeqID_50291
atggggtcggccaacatggggaagagacctggacgtccatggagaggagcccgagcagcagagaaccaagagggagaaggctggagcgagcagagacgcgcgcgatctgggcgagcgcgtgctagggcgcgcggcccgggcgagctgctggtgcagatctgggcgagactagagcagagagggactcgacgagggagaggctggacagggagaggaggtacggcgagcgtcgcggctggcgaccagagccccatgccggggtcgagcaggggagcagtgcgcgctggtgaggaggatggagagggcggctgcttcacgtaa

SEQ ID NO: 8513 - DNA, 264 bp, Zea mays
  Peptide Sequence Number=SeqID_50292
atgaaggacacggtggccggctctgcgggcgacgcacgacaagagaacacgagagaaagtgaggagcaggcgaagagcagaggagtgtgtgtgacggtgaaagcagggatggcgagcacgttttataggcgagggaagagggagagacaggaagagaaacaacagtcttcaaagccattaacgtcgccattatcaccactaagggggagaggaatagggaggaagaggaacggacgagttaaatctccattaacgcggaaatga

SEQ ID NO: 8514 - DNA, 378 bp, Zea mays
  Peptide Sequence Number=SeqID_50293
atggaccacgacaaacatcctgctccggagtgtcctcaccaaggttggtccaagagccacccattgcaggaaaggcttttcctcgttgggcagtgggctcaagcgctagaggagaggtcatatcgctttcgtcctccccttcaacctctccggatggggaatcaagggttgacccttgtgacggagggtaatcgcctattcctctcccacctaccatgtgctgcaatgtggggtcggatcctcagcccttccgatgttggcgatggacgagctacagggctgactggagatacctcgctcggttgtgcggatgtccgacactcatatcacgggtctccaagcgtgattagccatcgtggaggcctgtgcgtcgagtaa

SEQ ID NO: 8515 - DNA, 243 bp, Zea mays
  Peptide Sequence Number=SeqID_50294
atggcccaatgtaagaccatcgtcgcagcagtcctcgtggttgctctcgtggtttcgacgatcccagccagcgccgatacgaacctggaacctgcaggaggctctacggagggcagtgcccgcacctccggcatgcagaaggaagagacccgaggcaacaagaagccagcgacgctcgctggatctcttggttcaggcaagaatgccatctacggaacagtctatgctagaggccagtattaa

SEQ ID NO: 8516 - DNA, 318 bp, Zea mays
  Peptide Sequence Number=SeqID_50295
atggggaggcagaattgtttgactctagaacgcctcccgacgaggaatctcatagccctcgggtccagtcacaacgcatgggcaaccccagaaccaacacgaatccttgggccccatgccaaatccttcatgaccacccctccgaagcccgagccggtgaagaccggggcacatcgcagaggcgacaacgataatccaactcggttcttcctaaatcactgctcctcaccgatggtgatagctttggggatgaacggacaaagaggggaggaagtcgcgggcatgctgtatttatgccaaggcttcgtcagtccgtga

SEQ ID NO: 8517 - DNA, 261 bp, Zea mays
  Peptide Sequence Number=SeqID_50296
atgggaggggatccagcaggggggagctcgaccaaggagatccagggcggccatgggggtagggaaagtcggctgccactgaagatggcaagggtaccatggccagtggccgagcagtgtgttccatggcggctagagaacaacatcgacatggagcaccatggacgagcccggccatcttgggcgagcgcagggaagaagcagctcctgctgctggcgtccacgggaaaggagttgggggctgccgacgagcaggggtaa

SEQ ID NO: 8518 - DNA, 327 bp, Zea mays
  Peptide Sequence Number=SeqID_50297
atggagcagggcgcggcgcggctatggggagaaggaagagagaactccgaccaggaagccgagctggagcaaggagaagagggggggacgcgacgctgggagaaacgccggccagggagcaggatggccgcgactatggcgagtagaggatccactcgggtggttctatgcatgcggctgggtgagccccatggccggaccaaggaggacccgagtggagcaaggagggatgccatggaggttggggaaagcttcaaggaggagctcggcactggggaggagcaagcactagggagcttggggaatctacgcgacgtagagagctag

SEQ ID NO: 8519 - DNA, 159 bp, Zea mays
  Peptide Sequence Number=SeqID_50298
atggatatcttgagcagacatgcacccgagacatctcgacgtgcacagcagtcgctcccagcgtcgggcggtggtgcaaacactccaagtggctggactggccagtcactgggcgacgaagcagacgctccgcaagatgagagggcaagaaaggaatga

SEQ ID NO: 8520 - DNA, 462 bp, Zea mays
  Peptide Sequence Number=SeqID_50299
atggcttaccgtgtggctcggtctacgtgcgacggcggtcggttaaagtccggcgacgtcgatccggcgtctccgcctccagatggttcacctcccatggttgtagctactgtgtctgaagacgattgcctgctccttgctgaggtacattctaccttgctagggcattgggggtcggctgctgctgagctaccttctttggacaatgcattgcccaatggccctgctctccacaatggaagcatcctctgcatcctccttgcactggggctgcttgattgctctagttggttgttgggacaggaagacgaggtgcctgattattctgcctctgaaactgacttcctcctggttggtagttttggtggtactgctgttgatgctgagggtactgcctctggaactgctgctgaggaagatgttgggtctgctgttgatatccctaagggtgattctacttga

SEQ ID NO: 8521 - DNA, 336 bp, Zea mays
  Peptide Sequence Number=SeqID_50300
atggaccgacctcctctgaccaccatcgacagcgattcgcacctcggcgtgatcgctagagactcccggacctcacccgacccctcactagagcaaccccaccaccgtagagagaataagccctaccttattaaattgaccctaattacacatcatgccatgcatatatcttactcattgcattcattagattgcaatctcgctgacggagagtacgtgctcatccctgagcaaggagctgtccacgaggaagaccaggagcaagctcccgagactgccatcgaggatctccccgcagccccagctattgaaggcaagccccggttttatgcataa

SEQ ID NO: 8522 - DNA, 376 bp, Zea mays
  Peptide Sequence Number=SeqID_50301
atggtgcagaggctcacctggtccacgtgctccggcggagttccgaactccgacgagcacgattgcgctatttcggtggtgggggtcctgggttcaagctcgggcaagcttcacagcctcctaggggagctatctaagggcttggatcgagcggaggagggcaggaaaggggttggcaacggtggtttccctcgggcggctctggcgggtcgcggggaggtcgctggagctatgggcgagctcggggaagtttggtgcgggttcaacggcctatttgagcgccttagcgtgcagatcttggcaaaacccccatggtgggaaaggccaaggttgacttcaaaaatggttaacccctacttagatcctggatccccag

SEQ ID NO: 8523 - DNA, 228 bp, Zea mays
  Peptide Sequence Number=SeqID_50302
atgcggatgatgaacctgaagatggataatttgaacgagtaccaagacaaaggatggtcatcaagagatcgtcgtctaaccaacaataacctagtgttattccaggtgatgcttcatatgggatgggaatttttacaaagaaaagcttgtgatggtgaatccatcatggccatgatgggttcaacatctgaaaaggaactagaattgcgctgttgtggatggtgctaa

SEQ ID NO: 8524 - DNA, 450 bp, Zea mays
  Peptide Sequence Number=SeqID_50303
atggagcacgacccctccttgcctctccgtagcgccaggacctcctccgagctcgacatggatgtgctgtgtcttccccagtaccgaccatgtcaagctccggtgacccccttcccacggcacagcagaccggcgccagacgttagcgccgtctcagatctttgcctcctcacactgctcttctccaccatgcagcttctggagctcgtcgccgtcctctgccttgacgtgccatcgtcgttaacagtttgcctctcctacgctgcgccatccttattccctctggtcgcgacaaaatcctgttccaccaggtcgtcgggcgctgctctcagctcgctatggggcttgctgggctcgccatgttttaaaatgtcgtcgaatttgcctgcaaccgcggtctcgtcgagtccgtcgctcttcaacttcggcgaccactatcatcttcattag

SEQ ID NO: 8525 - DNA, 437 bp, Zea mays
  Peptide Sequence Number=SeqID_50304
cgagccgcctcgtcccgtccggcgaatggctccagtgcctccccaatcccggcgagccgcctcggccccgctccggcgagccgcccccacccccgacctcgcgccgccccggcgagcccgctcccgccccgcgcccggccgccccgacgagcccgcctcttcctcgcgccgccccccggcgagccgcccccaccccgccccggctcggccgcgccgccctgcgccgcctcggcaccgtgccgtcccggccccggtcgtgccccccgccccgcccgtgctccatgctcgcccacccgccccggtatcttcggactcgaatcagaaagggagaagctcaaaagatacgaaggttgacacagtgccgaagctgcgaagcaggaaagcttcggcatgttcgcagaaaggggaaccgacttaaagatgaaaaggccatttag

SEQ ID NO: 8526 - DNA, 411 bp, Zea mays
  Peptide Sequence Number=SeqID_50305
atggaggagaaactcggcgtggctaggctgggaaacagggagaagcagagggagctgggaaccgcggcgcgcagggacgaacgggagtcaggcgcgtgcgatgggggaactcggaccaagacgcaaggagagggcaaaggggcaggggcaccgcggcatggcgagtgcgccagacaactctggccggcgagcagtgagatgggcacgcttccatgggcgagcaaggagtcgaccacggccatgggggcgcgccatggacgaacggagtgcgtatgtcgatctccacggaggggaaacaagggaggcgcgcgccatgagagcaagctccacggcggtgtccagggagaggaggagcgagccgaggggaaagagaggagacgcgcaggggaggaaaaggaagagcgcgcatag

SEQ ID NO: 8527 - DNA, 348 bp, Zea mays
  Peptide Sequence Number=SeqID_50306
atggatccgaagggcaggaaccctagctgggatcgttgggggcagaaggaggtcctgcaaggctctcagacgtggggaaagaatcggaatctcagctggagattgaaatcggctcctggaaaagcagagaacaaggaagatataatgacatcttcttctggtgatggcggtcaatcagtgtcctcttggagcttgcaggctaaacctaagtccaaattgcattctgtgtggattgttgcggaaaatgttcctgaagaacttcagaattatcgagctatttgtgagctgggctccacaattggtgttgtggaagaagttgacattttatccttagacactaaggacatt

SEQ ID NO: 8528 - DNA, 378 bp, Zea mays
  Peptide Sequence Number=SeqID_50307
atggccggtatgtgctcggccccgtggacactcccgctggcgagcgtgtcccctcgggcggacgcgccaccgtggctcgggtaccgacggtggttgttttcgccggtgagacacggattcaaggatcctaagcgcttttgtggtctctgtgatgcaattagggccgaagcaacgatgcggtggcgtcttgtagagcgctcccgcctcctctgtggccatgtcctcccgtgttctattgaggtggaggatccctatcgtcggttcttgtcatggtggtggtggaggattcctgccaccggtgatgcctccattgtcctacagaggaggaggctcagacttcgtgcccattgggttgaccgtggagtccgtcgccattag

SEQ ID NO: 8529 - DNA, 756 bp, Zea mays
  Peptide Sequence Number=SeqID_50308
atggagagcgatctgcgttggtgctctggtagcagcaacaacgactgggacctacacgccgtggtgcgcttcgcaagctgcagtggtggcagctgtgtcccctcgccgcgggcctcggacgaatcattctcctgcctgcccctgccgccgccgccaccacagaaggacgatgtgacggacgccactactgcgttgtcgcagcagctcccgatcggccctgccatcgacgattcctgcctgcagcaggccttcttcgccacgccgcagtcaagaaacgaagcgccggcgccgcccctgcagccgccggccaagctacgaattggcggagcgacacgatcaaagagaaaaaagaagagcaagaaggaggtgaagcgcgtgccggtggtgggcgcgtctcctgacccctgggcgtggcgcaagtacgggcagaagccgatcaaggggtcgccgtacccgcgcggctactaccggtgcagcaccgacaaggactgcagggcgcggaagcaggtggagcgctgccggaccgacccctccaccgttatcgtcagctacactggcgagcacagccacccagtaccactgcatcgcaacgccctcgctggcaccacgcgcaacaagccgcagccagcgtcgtccatctgcaactccccagcagagcagcctccagctgcgtcgccaataggagatgacttaggggcggctccggcggccatcaacgtcgtcactgacgagaagtgccctttctctcaagcctaa

SEQ ID NO: 8530 - DNA, 165 bp, Zea mays
  Peptide Sequence Number=SeqID_50309
atggaggcgtcaccgacagtggggaccctccatcgccaccgcgataggagacaggaggtgggaatcctccacctcgacagaacatgggagaaagtggaggagatggccagggaggaggcaggagcgctctacaagacgttactgccatcgtcgatgaagggctag

SEQ ID NO: 8531 - DNA, 369 bp, Zea mays
  Peptide Sequence Number=SeqID_50310
atggaaattgttccagaggaagtcacgccggagtccatggttactcgcatgaaaacccatagcaagcgagcgcgccccacccgcctcctccaccgcgtgtcgacctccatcccctgcgtcgcgtcccgtatggacactgtcttcgaggcggccatggcctcgctcggcgtctccaccatcgtgcactatacaacaccgagccccacgtctaggtcgccatcgtccgtgccgccaaggcgccatgtcccacgtcgtcccaccaccttccctttgtctccttcgtggccttctccccgtcctccgcccccaacgctcaatgatttcgctggaagcgagtacgtcctcgtcgtcaccgagcgcgcagattag

SEQ ID NO: 8532 - DNA, 741 bp, Zea mays
  Peptide Sequence Number=SeqID_50311
atgatgcaacacccatgtcaacataggtttttgtttccacacgatgtggacaccagtcgctatactgctttgaaattggggagaaggagcgaaacaggaaaagaaaagggagcaacacctgaatttgaggacagcgccgcctgcgccgctccgactgctgagccacccgacagagtgaggctgacagcagccaaggccggcctcgggcgtcataggaaactccgcctcgcccaacccagggctcggactcgggctcagccccggaagacggcgaactccgctccgcccgacccagggctcggactcgggctcagcccccggaagacggcgaactccgctccgcccgacccagggctcggactcaggctcagtcccggaagacggcgaactccgctccgcccgacccagggctcggactcgggctcagccccggaagacggcgaacaccgctccgcccgacccagggctcgaactcgggctcagcctcggaagacggcgaactccgcctcgcccgaccctagggctcagacatgggctcaaccccggaagacgacgaactccgcctcgcccgaccccagggctcggacatgggctcaaccccggaagacgacgaactccgcctcgcccgacccgggggctcgacctcgacctcgacctcggaggagcctccacctcgcccagcctagggcacggaccgaccacatcaacaagaagcgccatcattaccctaccccgagctga

SEQ ID NO: 8533 - DNA, 474 bp, Zea mays
  Peptide Sequence Number=SeqID_50312
atgccgggtcgccggggcgccgaggccacgccgcgggaggggcaggggccgcgccgccgagagggcagtgggccgcgccagggaggggcaggggccacgctacgggggagcaggggtcgcgccgaggagggcagggggccacacccggggagggcaggggccgcgccgggggtaggggccgccacgggggagcaaaggcccgcgccacctgggggacaggaggccaccatgggggatgcagggggccgcgccgctgggggagcagggggccaccgcgggggaggcagggggccacactgccgggggagcagggggtgcgcgctgggggccgaggccacgcaggggtgcgcgcgcagggggaaacagggggcgcgcacggggaagaaagggaagggggaggggaagagagagggagagggagaggggagctcacctcagggtctaaatctggcgatcaccgtctctaaaacctag

SEQ ID NO: 8534 - DNA, 654 bp, Zea mays
  Peptide Sequence Number=SeqID_50313
atgcaaggtaggctcctctcgctgactgtgctggccgtcaaggtggcaacgttccggcttccgctgtcgttcgaggacaccgctgacttctccctatgggggctcgtgcccatctcacagaagtcctcgcccagcatggtctccggcggccacaccaccgccctgtccccaacgcgtagaaacggtagattgctcgtctggaaggctcgcgtggagaagcacaaatacagacatctggagaccgttcgtctttctaggcgtcgaggaggaggcgaggggcgaagggagtttgggatgaaggcgagggcgaggtgtggggccacggcggtcgttcgtcttcccgggtgtcgaggaggagagaagaggcgaaggagagggagtccgggatggaggccgggccgaggtgcgggcttacgtcgagcaacaaggccgcagtcgtcgagcgaggaggaggcgagaggcgaaggtgatggaggccaggatggaggcggggccgcggcgagcagcgaggccacaaggcgagggaagcatacatggaagagaggtggagcacacgcaagagaggcggagcacaacgagagcgtcagtggagagtcacggaggcagggcgtgaaatttctagaatattcgggacgcaggatgtgcgaccgctga

SEQ ID NO: 8535 - DNA, 537 bp, Zea mays
  Peptide Sequence Number=SeqID_50314
atggacgaatatatattatcaaaactggaagttgataaacataatgcacgccagactggtgacaacaacccagaagggaggagagatcataccattgaggccttttcggttggtagtaacggtagaataaatggagatcctatatcagttattcatcctaccaaaataaaaggatcatgggagaaactacagatgtacttcacctgtaaattaatctccatgcaagagcaacttggaatagtagatgcagttatcgaatctgccaagatgtcagaaagatcaaaaagcaagttaggaacatgtgcacgtgtacagatacgatgggtaaaatcaataatcgaaattcggagatccgtagaacccatcgaatatcacatagataagaacgtttcacataaagaactgcatatagaggggaaaaagcagtgcaaattgcaaaaaatgcaagatatggattctactgcactaaatactattgttggagggctggaggctacaaagtttgagaggatatcaattaaagattacaacatgtaa

SEQ ID NO: 8536 - DNA, 519 bp, Zea mays
  Peptide Sequence Number=SeqID_50315
atggccgctgctttcgtacccacaccgaatatctcagaaccggagcaccgcccggcgaccaacaaaggtacgctggtcttcagctacacctgcgtcggcctcacgggcacagcgctcgtcgccgtcctcctcttctactgctaccaccagctgctccgcagacgggcgccagtcaccgcggccgccgccggagcagcagctgagaccaataatccaccagggccggacggccaccatgtcggcggcgtggacatcagcaagcttcctgggttcgcgtacgccgcgccgtcgtcgaggcgcaggggaaacggcggcgacggggcgcagtgctccgtgtgcctcggcgcggtgcaggccggcgagatggtgcggcggctgcccctgtgcaagcacctgtaccacgtggagtgcatcgacatgtggctggcgtcgcacgcgacgtgcccgctctgccgatctgacgtcgaaccgccggggatagcgtcgtcgacggagccgccggagactctgccagtgtaa

SEQ ID NO: 8537 - DNA, 987 bp, Zea mays
  Peptide Sequence Number=SeqID_50316
atgtcggcagcggaggagcaccggtggcgctcgctggtcttcggcgaggccgtggccgcgcagcgcagcgcgctggtgctcgcgtcgtacccgctgctgctgctcctcgtcgtcctggccgcgttcgtcaggtacctgtggatcgcgctcgccatgtactgcgcgctcctgttcgtgctctcgtgcgccgctcgcgccctcgccgcccagcctgccggcgccgccggcgcagaggcggcgcgggtcagccgcggcgggctctcggcggcggccatcgcggcggtcgcgccggcgttccgtgtctttgtgacgaactggggtctaacagacattgacagcacggctagagtgaattgcgattgcaaacaacctgtgtgtgattcagggatgaaaacgagcggtagaaaactgccggtaaaagcacctttcgatcggaacatgttcctcaccgagcagcattgcagggagtacttcggcggatcgatcgagacactcaactgttggccgcagactgcaaggagtacttcaaggccgcgatgcagttcgtcgtcagccctggaaagttcggtgtgctgcggctcgggagggcagggcggctacaacttcaacctgaggctgcccgcagtggaggactgggtgctggactctatcccatatagcgtaaagaaacacgtgcagcaggggctcggcgcgacggaatttgagggctggtacagacccgccttcgggccgtgtttttgctttaggctcctgttttcgggtcgtgctcgtgctaaaagaccgacccatattcctagcactagtgatgggtatggtaaggtcgcctgtgcctgtggctgccatgcctgcctggcctacaactacaagagcgagcggacaagcgccagcgccacgggcatgccaagccagttcacgagcccggccaagaacccaagcacggccaagccaaaccgcccttctcctcctggctcctcatgcctcgcttga

SEQ ID NO: 8538 - DNA, 456 bp, Zea mays
  Peptide Sequence Number=SeqID_50317
atgtcgtcgcagctgatcgaggagcaccggtcgggcgcggaggtgcacgtcgggcacgagctgtgcgagcgcaagtcgcgcgagttcatggtggagctgggcctccccgacgggctcctcccgctgcccagcctggacgaggtgggctacaaccggtcgacggggttcgtgtggctgcggcaggccgccggcctgacccacaccttcggctccatcggcaagcaggtgtgcccgggcggatgcacggcctcgccgggggtgaagagcaaggagctcctcatctgggtcaccatctccgagatcgtcctcagcccctccggcaccaagatcgtgttccgcacccccgcggggctcggccgcgccttccctgtcaccgccttccagctcgagcccgcggcggcggagggggaccacaaggaggaggccgaggacgccgccgccgccgccgccaactga

SEQ ID NO: 8539 - DNA, 201 bp, Zea mays
  Peptide Sequence Number=SeqID_50318
atggagcgagctcgccgtcgccgttaccgtcgtcgtggtgcagaccagcggctcagcggattgaggggagccctggcggcggagaaggcgtcattttcagcgctaagcatttctcgtgcagataagatagagcagcagcagcccgcagctgatccttaccgctgcggctgtgtatcaattaggcctcgccggctgcactag

SEQ ID NO: 8540 - DNA, 450 bp, Zea mays
  Peptide Sequence Number=SeqID_50319
atggtgccgagctgcctgcacctgcaggaccaaggccagagcggcgagagggtggccctggcggcggcggcggccggagccgacgcgaggcagctcaccctggaggagatgctgtacccgccgccgagctgggagacggcggcggaggctgcgacgccgtcgcggcgcagctccccgaaggtgtgcccggtgaacctggccgacttcttctcggacgaggagggagcggactccgggaccgggagcggcggcggctactccgcgccgggcgtcaacgagagcgcgtccgtgtccgtcgtcagccgggcgtcgctccggggcctgcacagcgtgtcccggagggtgagcttcaggtcccccgacgagtccgacgtgttcatcatcccggcgagaggccactccgacgacgacgatgagtggagcagtgacggtgagccaagcaggacgtga

SEQ ID NO: 8541 - DNA, 2364 bp, Zea mays
  Peptide Sequence Number=SeqID_50320
atggagagctacctgaacgagaacttcgggggcgtcaaggcgaagcactcgtcggacgaggcgctggggcgatggcggagcgtcgtcggcgtcgtcaagaaccccaccaggcggttccgcttcaccgccaacctgggcaagcgctccgaggccgccgccatgaagcgatccaaccaggagaagctgcgggtcgccgtgctcgtctccaaggccgcgctccagttcatccacggcctgccgccgcagggcgactacgccgtgcccgccgacgtcaaggcggccggcttcggcatctgcgccgaggagctgagcttcatcgtggagagccacgacgtgaagaagctcaagtcccacggcggcgtggacggcctcctgtccaggctgtccacctcggcgtccgacggcctcgacggtagcaagctgatggcggcccggcaggagctcttcggcgtcaaccgcttcgccgaggcggagccccgcagcttctgggtcttcgtctgggaggcgctccaggacatgacgctcatgatcctggccgcctgcgcgctcgtctccctcgtcgtcggcatcgccaccgaggggtggccccacggcgcgcacgacgggctcggcatcgtcgccagcatcctgctcgtcgtcttcgtcaccgccaccagcgactaccgccagtcgctgcagttcaaggacctcgacaaggagaagaagaagatcacagtgcaggtcacgcggagcgggtaccgccagaagctctccatctacgacctcctcgcgggcgacatcgtgcacctcgccatcggcgaccaggtgcccgccgacgggctcttcgtgtcgggcttctccctgctcatcaacgagtccagcctcaccggagagagcgaacccgtcgcggtgagcgccgagaacccgttcctgctgtcggggaccaaggtgcaggacggcgcgtgcaagatgctggtcaccaccgtcggcatgcggacgcagtggggcaagctcatggccacgctcagcgagggcggcgacgacgagacgccgctgcaggtcaagctcaacggcgtggccaccatcatcggcaagatcggcctcgccttcgccgtggtcacgttcgcggtgctcacgcagggcctgttctggcgcaagctcgccgacggctcctacttcagctggaccggcgacgacgcgctggagctgctggaggtcttcgccatcgccgtcacgatcgtcgtcgtggccgtccccgagggcctgccactggccgtgacgctcagcctggcgttcgcaatgaagaagatgatgaacgacaaggcgctcgtgcggcacctcgcggcctgcgagaccatgggctccgccaccaccatctgcagcgacaagaccggcacgctgaccaccaaccacatgaccgtcgtgaaggcctgcatctgcggcaaggtgaaggacgtgaacagctccgcggagaccaagacgctgccctccgacctgccggcgtccgtcgtggcgatgctcctgcagtccatcttcaacaacaccggcggcgacgtcgtgctgaaccaggacagcaggcgcgagatcctgggcacgccgaccgaggccgccatcctggagttcgggctcgcccttggcggcgacttcgcgacggtgcgcaaggcgagcaccctgctcaaggtggagcccttcaactcggcaaagaagaggatgggggtggtcatccagctccccggcggcgcgctgcgggcgcactgcaagggcgcgtcggagatcgtcctggcgtcctgcgccaggtacctggacgagcacggcaacgtcgccgccctcgacggcgccaccgcggaccacctgagggccaccatcgacagcttcgccaacgaggcgctccggacgctgtgcctcgcctacgtcgacgtcggcgacgggttctccccgagcgaccagatcccgacggacgggtacacgtgcatcggcgtcgtggggatcaaggatcccgtccgtcccggcgtcaaggagtcggtggcgatctgcaggtccgctggcatcaccgtcaggatggtcacgggcgacaacatcaacacggccaaggcgatcgcgcgggagtgcggcatcctgactgaaggcggcgtagccatcgaaggcccagatttcagagtcaagagtgaggaggaactgcaagatctgatacccaaaatacaggtaatggcgagatcttcgccgctcgacaagcacactttggtgaagcacctacgaacaacatttgatgaagttgttgcggtcaccggcgatggcacaaacgatgctcctgcgctacacgaagccgacattgggcttgcgatgggcattgctggcactgaggtactatctacttcgtgttcctaa

SEQ ID NO: 8542 - DNA, 774 bp, Zea mays
  Peptide Sequence Number=SeqID_50321
atgtggtataggctaggggtgcaccttatcgtttctaataatgtttgtttgaaggtggcgaaagagagcgccgacgtgatcattctcgacgacaacttctccaccatagtgactgtcgccaaatggggccggtcggtgtacatcaacatccagaaatttgtgcagttccagctgacagtcaacgtcgttgcgctcatcgtcaacttctcttcagcttgcctgatagggagcgcgcccctgactgcggtgcagctgctctgggtgaacatgatcatggacacgctgggagctctggcgttggccacggagccccccaacgacgagctcatgaagaggactcccgtcggaaggaaaggcaacttcatcagcaacaccatgtggaggaacatcatggggcaggccctctaccagttcctcgtcatctggtacctgcagtctagggggaaacggctcttctggatcgacgagggcgccgccgacgccgacctggtcctgaacacggtcatcttcaactgcttcgtgttctgccaggttttcaacgaggtgaactcgagggagatggagagggtgaacgtgttccgaggcatcctggacaacaacgtgttcgtcatggtcctcggcagcaccgtcgtgttccagttcgtgatcgtgcagtgcctcggtagcttcgccaacacgacccctctcagcctcgcgcagtgggtcgcctgcgtcgccatcgggttcgtaggcatgcctatcgccgtggcggtgaagatggtgccggtggagtag

SEQ ID NO: 8543 - DNA, 240 bp, Zea mays
  Peptide Sequence Number=SeqID_50322
atggccaatgtgctaagaaaccacactgcattggcacaagtgactattgaagaccatcctcacttattggctgggaagcatgcatcagtgcacccatgcaaacatgcaactgtgatgaaaaagatcatcgacgttccaatgtcggggtaccttttcatatttttgaaatttatagcgacagtcataccgactatcgagtatgattatacaatggacgtcgaccttggcagtacaagctga

SEQ ID NO: 8544 - DNA, 417 bp, Zea mays
  Peptide Sequence Number=SeqID_50323
atggcggcgacggcggtaaccctcctccgccttcctctcgcccgactctcctaccacctccgctccgtagaggaggaatctgcggccaaggcggaggcgcctaggtcgttcgtgctcccacagttgccgtggccgaagctgagcgtgaaggaagatgtgtgcccgcatggaagcacaattgttggtattggttcaccggatcctcctgcattcgtgtatgacgatgaagactacaatgatgtttttgtgtcagaggcttgcttgctcactcgcgacgagaacgagtggtacagggaaccaatctcgaccaatgccacgtctggcaaagaagatacagaatttgatcaacgcctcgacatggtaggaaagaacactacggtattggcgaggattgttcacaagacaatctggttctga

SEQ ID NO: 8545 - DNA, 729 bp, Zea mays
  Peptide Sequence Number=SeqID_50324
atgggtcggcgcgagacggagcgcgaaggggggaagaagccggagggagacaggcgtgagagccctgggttgggcgaggtggaggctcctccgaggtcgaggtcgagtttgtcttccaaggccgaggtcgagtccgagcccctgggtcgggcgaggcggagaccgtcggctgaggccagggctgagtccgaaccctggggtcgggcgaagcggagttcgtcgtcttctggggctgagcccgagtctgagccctggggtcgggcgaagcggagttcgtcgtcttccagggctgagcccgagtccgagccctggggtcgggcgaagcggagttcatcgtcttccggggctgagctcgagtccgagccctggggtcgggcggagcggagttcgtcgtcttccggggctgagcccgattccgagccctggggtcgggcggagcggagttcgtcgtcttccggggatgagcccgagtccgagccctggggtcgggcgatgaggagttcgtcgtcttccggggctgagcccgagtccgagccctggggtcgggtgaagcggagtttcctatggcgcctgaggctagacttggctgctatcagcctcactctgtcgagtggcacagcagtcagagcggcgcaggcggtgctgtcctcttgtcaggccggtcagtggagcggcgaagtgactacggtcacttcggctctgtcgactggagggcacgcgttaggataa

SEQ ID NO: 8546 - DNA, 327 bp, Zea mays
  Peptide Sequence Number=SeqID_50325
atgaaggagatctccatgggtttagtactcaccgaggacaaggtctggcacgggctgttcacggcgaggcgcggacgcggcgaaaatcccagctccgtcgagggattcccacggacacagcaaggcacccttcgattactctcccctaccgcttctatgcaatcagaccgagcctcaggtggccacgatgggggccgaaccccactggaggtggttatctgcgacgacacctgtcgtctcccccggctgcggcggcacaatgtggatgtggcgaagcggcagcagacaaagaggcacgagagggcgtggtcaagaggggtcttatag

SEQ ID NO: 8547 - DNA, 1284 bp, Zea mays
  Peptide Sequence Number=SeqID_50326
atggaggcgccgccggtaccggagctcatggatctggacgcgccccctcccgccgcagccgacgccgcagccgcggcgccggttccccccgccgtcagcgacaagaagaaggaaggggaagggggagacactgttacgggtcacatcatctccaccaccatcggtgggaagaacggcgagccgaagcggaccatcagttacatggcagaacgtgtcgtgggtacgggctcatttgggatcgtcttccaggctaagtgtttggagactggagagaccttcgccattaagaaggtgctgcaggatcggcgttacaagaaccgggagctgcaacttatgcgtgccatggagcaccccaacgtcatctgcctgaagcactgcttcttctcaacaacgagcagggacgagttgtttctaaaccttgtcatggaatttgtccccgagaccctgtaccgtgtcctgaagcactacagcaacgcgaaccagaggatgcctcttatctacgtcaagctctacatgtatcagcttttcagaggcctagcctatattcataatgtaccaggagtctgccatagggatgtaaagccacaaaacgttttggttgatcctctcacccaccaggtcaagctctgtgactttggtagcgcaaaagtcctgattcctggtgaaccgaacatatcttacatatgctctcgttattatcgtgctccagagctcatatttggagcgacggagtatacaacttcaatagacatatggtcagctggctgtgttctagctgagttgcttcttggtcagccactgtttccgggagagagtgctgttgatcagttggtagagattatcaaggttcttggtactccaacccgtgaggagatacgatgcatgaatcccaactatactgagttcaggtttcctcagataaaggctcatccgtggcacaagattttccacaagagaatgcctccggaagccattgaccttgcttcccgtctccttcagtattcgccaagtcttcgctgctctgctattagagtcagctttgatgcttatagtttgaggggaatagacaatggaacgcgacagactaagcttgatgcatgcgctcatcccttctttgatgagctccgggcgccgaatgcacgtctaccaaacggccgtccattccctccgctctttaacttcaaacatgagctagcaaatgcctccccggacctcatcaacaggcttgtaccggagcagattagacggcagaacggtgtcaactttgggcataccgggagctag

SEQ ID NO: 8548 - DNA, 693 bp, Zea mays
  Peptide Sequence Number=SeqID_50327
atggaggaaagcctgtgcgccgtggagaagcgcgggcgggtgcacgtcatcaccctcaccggcgcggaggagcaccgcctcagcccggccctgctctccgccctccgctccgcggtcgcagccgcccgccgcgccctcccccgcaacggctacgacctcgcgtgggcgcgcgcggggccggccccggcgccggggcaccgcctctccgagatgcgcgccgcgttccgcggcctcgtcgccgacctgctcgcgctccccgtgccaacggtcgcggccgtcacgggccacgccgcgggcgccggctgcgcgctcgcgctggcgcacgacgccgtcgccatgcgcgcctcccgcgggttcctctacatgagcgaggtcgacgccgggatcaagatcgtcgattttgtcggcgagctggttcggcagaaggtccccgacgcggccgctaggagggacctggtgatgaagggggagaagatgacggccgcgcaggccgcgcgccgaggcatcgtggatgcggccgtggacggcggcgtggaggacgtcgtggccgcggcggtcgccatggctgaggagctcgcagccagagactgggatggagagaacctagccgccatcaggaaggacgcatggccggttttgtggagcaaggtcaaggactacggcggcgatgtgctggcgcggccgcgtctgtaa

SEQ ID NO: 8549 - DNA, 2658 bp, Zea mays
  Peptide Sequence Number=SeqID_50328
atgcccccctcacaccgcctctcgctgcttctggccgtcgccgtcgtcgtcgccgccacgagtgtccgcgttcacgtccacgcgcagggcagcgtcctcttccccacgccggcatccacgaacgtctccgtcacatggaccgtcagcctcaaggcagacggccacggcgcgcagtccttcgactacatggacggcacgtccgcgagcgtcttcctcctccagtccgtgcacccgacgccgcaggaagggctctgcttcgccgcgtgcttctactgcgtcgcgccgtgccgggccttcctcttcggcgtctgcgtcgtctacgtcgacggcggcggtttcctgagctggccgaacgcgggcagcccgcaggtggtctggtccgcgaaccggggccgcctcgtccgcgagaacgccacgctcagcctcacggccgccggcgacctgctgttacgggacggcggcggcgggggcgtcgtctggtccaccaacacctcaggccggtcggtcgcaggcatggccgtgaccaggtccggcaacctggtgctgctcgacggcaagaacgcggcggtgtggcagtcgttcgaccacccgacggattctctgctccccggccagccactggtggaagggatgcggctggcaccaaacgcttccagcacgaactggacggccagcggccagctctacatcaccgtcctctccgatggcctgtacgcgttcgccgagtcctcgcctcctcaactgtactaccaaatgacggtgaccaccaacaccacagctggacctggaggcaggaaaacctacatggccctgacgaacggctcgctggccatcttcgcgccctcctcctccgttaacgtatcgactccacagcctgcagacggcgcgaccaacaagacggcggcgggcgagatggagtacgtgaggctcgaatccgacggccacctgaagctgtaccggtacacaggaacggaagggtgggctatggcgcaggaccttctgcaggggcaggtaggcagctgcgcttacccgactgtctgcggcgcgtacggcgtctgcgtcagcgggcagtgcacgtgcccatccgcgacgtacttcaggcaggtcgacgaccgccggaccgacctcggctgcgtgcccgtggccccgatctcatgtgcctcgacgcaggaccaccggctcctcgctctgagcaacgtttcttacttcaactacgtggataccaaggccgcgctgcctcggatggtcgacgaagagagctgcaagaaggcatgcttgcagaactgctcctgcaaagccgcgttcttccagtacggcggcaacgacacctcccagggctcctgttacctgccgacgcaggtcttctcgatgcaggtgaaccagtggcaagaaactcactacagctcttctgcgtacctcaaggtgcaggtcacaaggtctcctcctcctcctcctgtccctggtccctcgaattcgaatgggacggccatacccgcagggaaaggaaggactggtgaagctgccatcgttggctccgcacttgcgggggccattgctttactagccgtgatcgtcgttacctcggttgttctccggaggagatatcggcgtagagatgacgaggacgacgaggatggtcttggagaagtgccaggtatgatgacgaccaggttcacgttcgagcagctgagagcagcgacagagcagttcagcaagatgatcgggaaaggagggttcgggtccgttttcgaggggcaggtgggcgaccagagagtcgccgtgaaacagctcgaccgaactggccaaggaaggcgggagttcctggcagaggtggagacgatcggcaacatccaccacatcaacctggtgacgctggtcggtttctgcgcggagagatcccacaggctgctggtgtacgagtacatgcccaatgggtcactggacaggtggatctactcctccgccgccgccgccgccgacacgacgccgctggactggcacacgcggcgcagagtcatcaccgacgtcgccaggggcctagcgtacctccacgaggagtgcaggcagcggatcgcgcacctggacatcaagccgcagaacatcctcctagacgacggattcggcgccaagatctccgactttgggctgtcgaagatgatcggcagggacgagagccgggtggtgacgaggatgcgaggcacccctgggtacctggctcccgagtggctgacgtcgcagatcaccgagaaggccgacgtgtacagcttcggggtggtggtcatggaggtcgtcagcgggaggaagaacctcgactattcccagcctgaagacagtgtccatctcatcagcgtgctgcaggagaaggcgagggacgggcggctggaagatctggtcgatgctcgtagcgacgagatgcggggtctccatagggaaggagtgattcagatggtgaagctcgccatgtggtgcttgcaggttgattacaaccggaggcctcagatgtcggtcgttgtcaaggtactggatggcgccgtcgacgtggaaactggtatagaactcaactttgtggctacggttccggacagcctcgccaataatggcgggaatctggcttcgtcaaccccgcttctagcctcgcatttgtcaggtcctaggtga

SEQ ID NO: 8550 - DNA, 339 bp, Zea mays
  Peptide Sequence Number=SeqID_50329
atggcctttgagaacccgaagtataccccggatcttgtgttatcggaggtttctcaagcgcctaatgggtgcctattaaactccgactacatggttattcctgaattgagaccaacaccatacgttcctgcttcatcacggcctgaggatattgagatagacaaaatgacacagtctcctagacgacgaagacatgaacatcatgtgtcgttctgtgaaagacagaccctggtagctcgtcaaaaccagaaatttcaatcggccattggacgaaagttttttactccaactagggatcgtgaaatggagattaatgtggacaatgaaattgattactaa

SEQ ID NO: 8551 - DNA, 207 bp, Zea mays
  Peptide Sequence Number=SeqID_50330
atgatggtcatcgtcatcctcctcgctcttcgcctcattcgagccggcaagctggggctgctccataaccctaatgaagctcaaagctcgggggctacacccattaggcgcactgactgtgcacccaatggaacaatgcattggattaaaatgtatgattcaagaggaacaactagtcggctctggcttggctggatactttgctaa

SEQ ID NO: 8552 - DNA, 567 bp, Zea mays
  Peptide Sequence Number=SeqID_50331
atgagcacgaacctgggaggagcctcttgcttcggcttcggcttgactcagatgcagcccgccgccgttaggctccggttgccgcctgctcgcgccgcggacacttcgtcctcccagtcgccggcgcgcctgacggcggtgctggagcaggtggaccagttgctaagccaggggaacgacatggccgcgctctccctcgtgcgcagtacgcaggggggtgacggcgggctccgggcctttggcgccgccaggcaggtatattttggtggtggggtgagaaacttggttcttgatacaattggtcactatctcagccagaagtatcacaacagagttatccagcatgaagctggtcacttcttgatagcttacttgcttggagtgcttccaaaaggatacacaatcacaagcttagatacacttatgaatcaaggatcgcttaatgtgcaagctggagcagcttttgtggactatgagttccttgaagagggcctaaggaggcccacggaagggctgcgccagcagcagccatgggccctccaagggggattagataaggatagttag

SEQ ID NO: 8553 - DNA, 315 bp, Zea mays
  Peptide Sequence Number=SeqID_50332
atggacgcaacggtggccacggaacaggcggtgggcgtcggcgggcggtggtggagctccctatttgtgtgggcagagcgagagagagggcgagagagctgggcagagggcacaaatgagagaggggaggtgggcgagcagggcgcgggtctcaaaagcggcacgggggctcggacgtggccggagaacgcgcggtcgtggacgtgtccatggcagggagatcgtgggcgagatgttagagacgggctgacaggtggggacgacgggacagagagagagggagcgggtgcacgcgacggaaacaacgccgactag

SEQ ID NO: 8554 - DNA, 207 bp, Zea mays
  Peptide Sequence Number=SeqID_50333
atggcctttgccattcggcgatccaaactatgtacctatgtgtgtggaatcgcagcagagcaattgggtgtcagggagggtgacagctccgtgcatcgcttgtgtggtgctcgacgtaatggcggaattagaaatcatagctgtgctcgtggccttcgagttggattaaattactggtgcgttgtagttgtattaaatgtttgttga

SEQ ID NO: 8555 - DNA, 462 bp, Zea mays
  Peptide Sequence Number=SeqID_50334
atggcgagagtagcgtgtaccctccgtggcaagaggctggatggtggtgtatctgtgctctcggttggcgtgaacccgcatacccttgagagtattttctttagtcgggttacgagtcacttgattgtgattggtgttaatcgctgggcagcggacaccagtttcaccaggcggcagtggctagaggggagtggtggagaagaccagatctgggacacggtgacgagcgcttgccttatcctaactccgaggacgctgatgatcttgctgaggttccctgacagcgacgacggtgcctgcggcggtggcggtggcccgggcatcgtcgatgacggtagtagacctaggacaacgcccgtcagcgaggaccacgactctgctgtccaagagagtggatggggctctgattcgcgggttgcaggaccgctggcgtccgcctcccatattgtcgtggatggctaa

SEQ ID NO: 8556 - DNA, 390 bp, Zea mays
  Peptide Sequence Number=SeqID_50335
atgaagagcatctcaccaagattggaggcagtgggacagcttgtcttcgttgccgagcgattttacggcgtcggtggtgagaacgtccccagaaccacgcccgcgattggcttccgtgcacacggtgtgccgagaacacgaagtaggcgctacagtaatccccgcgacaatactcccgcctacgcttcttttcttctctatttctctatctgctacctgcgacaagcacccggtgcttcattggcgcggcttagggttggctttcgttgtgggcaagggatgcgaggtgcacacataaatacccaatggtcagggaagatttggtccctacatgcctcggcgaggagcaacggtccatgcgcaaaacccggccagcaacccggtaactaa

SEQ ID NO: 8557 - DNA, 224 bp, Zea mays
  Peptide Sequence Number=SeqID_50336
cggctgatgctttttctgcctctgctcaagctgttttgtccgtacgccgctttttgcgtccttcctgctgctccaagcaggacaggagatgacacatgggaagtcaaggtcgctgaaatgacagaagaggagctcagagagaaaggggaaagaggaggatactcaccagagagggaatgggagaagcacttggacgccgccggtgaagagatcgccggagagtg

SEQ ID NO: 8558 - DNA, 246 bp, Zea mays
  Peptide Sequence Number=SeqID_50337
atgaaagagaagagggcggaagaaggcagaacgaaagaagatagaggtatggggaatttgaacacaactctggagcactacacatcttacaggtgctctgatgtcctgctatgcgtccgtgctctatgggaactccagcatgacacccgtagcttcagcgccatccgcgacaagtacagacatcacaagttcgagtgcgtggcgaacctaacctcaccggcgcttcctcggtcgctcttcagctga

SEQ ID NO: 8559 - DNA, 360 bp, Zea mays
  Peptide Sequence Number=SeqID_50338
atgtcgacacatgtccagacccagtctggtgtggacctgtccgcatacacttctgctctgcgcccaggcagagacctgatactgccacgtggcctatatcgcgtgatggaggtgtcgagcagatacatgtctcatatgaagaatacaaagactactaagaagggtgaagagaccacggtggccaagatcaaagacataacatgcagtcgaggtctgttcaaagctgaacttggcgtgcctggaggtgccgagcagataatgtctcagctgaagaataaaaaggctaccaagatgactgaagagaccacgatgaccaagatcaaagacataacatgtagtcctgtcgaggaccataattag

SEQ ID NO: 8560 - DNA, 756 bp, Zea mays
  Peptide Sequence Number=SeqID_50339
atgaccggcggcggccgcggcgcgtgcgcggtgtgcaagcaccagcggcgcaagtgcgagcccaactgcgagctggccgcctacttcccggcgcacaggatgaacgacttccgcgcgctgcacctcgtcttcggggtggccaacctcaccaagctcatcaaggccaacgccagcgaggccggccggcgccgcgccgccgagacgctcacctgggaggcccgctggagggagtgcgacccctcggacgggtgctaccgcgaggtggcctgcctgcgccgcgacaacgccgtgctgcgcgccgagaacgccgcgctgcggcggcagctggccgagcagcagctgctctggtccagcgcctgcagcactggcggcagcgcgcttctggccgagcagcagctgctgccgccgtgtgggggcaataataatgggcttctgacggcgagtagcagagctcatcatgcaccggcagcagctctggcggcaacgcacaccgcgctggcctgctaccgtggcagcatgccggtgtgtactattactatgacagcggacgacggcagcggcaggaggccggcgtcggatgctgccgccatcgccgggagagggagtggtgctcaggtcgacgcttctagggataacaagagcagcgcctgcagcatcactcagcggctgctatatacagtgcttcctggcagcttaccagctgggttgttgtgtcatttcacgaaccagatagctcgcatagggaagaagggatga

SEQ ID NO: 8561 - DNA, 546 bp, Zea mays
  Peptide Sequence Number=SeqID_50340
atggactgtcaagggaagcatggtgtgaagcccccggcacctatgctcgcggggtcggatgtcgcctacgtctgcaaggtgttggtcgtgtcgaacaagggcagtagatcaagctggagcagcaacgaggccacgggcgggggacaagggcaggggcgccgttgcaaggctggagcagcagcggggccacaggcggggacaagggtaggggcgccgttgcaaggctggagcagcagcggggccacgggcggggacaagggtagggggcgccgttgcaaggctggagcaggtgtaaaacagcgggcaagagtgaagggcggcgccagattcgaccgggaagtcgtatggtccaacgcggagacgacgatgggagtgaagactcaccgctttttccccatggaggccgtcggcatgtggaagccatcgcacaacggagttctggagacacggagctccaatgtggaagacactagatgttgcagaagcaaagaaatttggggggaaaatgggaagcatacgaatcggacgatgaaccctaaaccctaa

SEQ ID NO: 8562 - DNA, 390 bp, Zea mays
  Peptide Sequence Number=SeqID_50341
atgcaggccgcgtatataaaaagaagggagctggctcaagaggtgaggcagtctcagctgtgtgagcctgcaagagtaattaacttgtctactactgagttctcaccccctcctctcccatctcattccaaacttgagattatggccatttcgtcgaagaccgttgctgtgtccatgctgcttctcagtgctgtcttcttcgtgctgctctccgcgccagctcatgctaggaagctggggacgatgagggcgcctaccagcagcgtgcgtcgtcctccggcggctccatgcactccaaggagtattctgcaggaggtcgctactcagaccgaatctaccactactccaggtcacagccccagcattggccacaacagccctccgaattga

SEQ ID NO: 8563 - DNA, 498 bp, Zea mays
  Peptide Sequence Number=SeqID_50342
atggtgtgcgagctgatacaagcagtttatcctagttcaagcaatataaagcctcacttccagcagagggggatgaggcttatattactcgcacctgagtgtcagcgggagaagggaagtcctcagtcggcagggtggttgcccgcgggactcgcagtggagcaggtagccgaggccgagctcgggcgagacggagaaatcacccgaggccgaactgggcgtcaggcgaggcgaaagtttgcgcccgagggccggtctgcttctcccgttgtattagatgtcccatcaggggatggcaggcggcatgcacgtacagtagtggggcgtaatcatgctgttgcgctcggacatgacctctgtcttgttagccactgtgcttttgtgccactacgtggggatcggctcgagcgagatggacggagcggtggtgacctcagccgagacggagattcgcctgaagtgggagaccctcgaaggagaggcctcggggttaaggag

SEQ ID NO: 8564 - DNA, 741 bp, Zea mays
  Peptide Sequence Number=SeqID_50343
atgaggccaattgggaaagagaagttgaactcagagcagaattccctcagctattctcagaaggttcttaatctcgaggacgagattctttttaagagggccgcccaggcgccgccgcgcgagcccgcgctccctgtcgagcagcgcccgccgatgccgagcgcccctgctctcgtccgcgccgtccacaccagactaggtctggacacgtgtcggtaccggacccccgcctgggtcctgtttaaggcccatgtatgttccgttctggaactttgggaccccattgcgagcgacccggaccccatacgggagggtccggatcccattccaggggtccggcttgcacacgtggcggtcctggaccaaccctggaggtccagactgcatatccaggggtccggtgctctcctgtgggggtcctggcccactgttgatgccttggaggatatcaccttctctggacacatggaggctctggacccgcccatgtggtggagtcagggtaccgacagtggcccccaagcccacctcaagggaggatgcgagcctacaggtggggccaaagcttgtacttcgcctcaacacggcatgaccggtgattggggcgccatcttagcatgcttgctgacgtgccgcattaactcagtgcatctgtcgacgcacgcgctctcaatctgccttcagtcacatcagctgccatatctgtccccatcgctgactgacccacggccgcacgtctag

SEQ ID NO: 8565 - DNA, 330 bp, Zea mays
  Peptide Sequence Number=SeqID_50344
atgggccatccgatctgcccaacggttcggatccaatcaccgaaagggtactcctacatctattcccagccctccatctctggatcaatggtcgtcgacacgtcatcccgattcccagtcgcacgaggcggcgccgcccaggtgcagcggtggtccatcgccgggatcacaccaagcgacgccagggagcgacaatccccggtccaagacccgatacacggtatggagatcaattcgagtaagttacgcggatacctaccgatgattatgcgcccagggatccggacctcgagatttagcggcaccgcggctacagagcagcaccggtga

SEQ ID NO: 8566 - DNA, 468 bp, Zea mays
  Peptide Sequence Number=SeqID_50345
atggacgcgctggacgtgccgcgccaggcaccacgcgccagggccgcgcgccacgccgcagacgccatggccgcgtgccaggcgggccacgccggacaccgcgcgccacgcgggggcgccacagccgcgccatccgagctctggccgcgcaccaaaggcacgtcggccgagctccaggccacaggccgcgagcacggggaggagggacaggcgagccgggggtcgccgcgggcaggtgcaggcgagcgccctggccgcgagccgaggggaaggagggccatgccggggcggggcacggccgcgcgccgaggcaggcgggcgcgccggggagggcaagggcaagggcgagcgcgccggggccgcgccggggtggggcgcgccatggctggggggggggaacgtgcgaggggaagccgcaccggggggcacctcggccgcaccgggcggggacgggacgggcgcgcctaa

SEQ ID NO: 8567 - DNA, 318 bp, Zea mays
  Peptide Sequence Number=SeqID_50346
atgtggagttttaaagggaaggagaaggtggtggaaaatctccacaagaaggacaatgggtcccttgaagataagtcgaaagatgagaagcccacagactctcatcgcatgaagaaggatgacaataagaagcggatcaagaagatcatctactatgatacccattgtcatccatatcgagcaaagaagaatctacctccaagcattgctaaaagacgggaagaacataataaggtgaatggctttgagaatgcaaataagacttgggatactttgaggacgtcacacgagggcgataagatgacaagaatcacctag

SEQ ID NO: 8568 - DNA, 645 bp, Zea mays
  Peptide Sequence Number=SeqID_50347
atggagatagctcaccggagaaaaccaagttcgccggagccgagaagaaaatcatcgattgacggcgaaccggaggtcggatcgatgaatcaaaaacacctggatgaaactctcgatgagacgaatgcagcggtactctcatattacgccaacaacgaattgaaagtaattgctcgccggagttgtcgccggagttggaaccgccctaaacttcggcgagcaattccgaaaattgtggatcgaatacttgagccaggatatcaccatccaccggggtcaggatatcacaagaaagaagcgcagggggaggaagaaccagagcttggagatgcagttcggtgggcgaagctaggagatgcattctggcgggcgaaggagcaggtgattggagatgaaggtgaagcttcagtcgagaccaatatgctcagcctcctatattatttctcattaaccacaatatatgtattcttggacattgtggatgcacacatcataagacaagttgtgccatgtcctgggaacacacaatgtgcttgcaaatcaacggagtccaaaaagtgttgcatcaaagaaactggtttatttgctgataaggcactcgagagggcacttcatgttctaataaaaaatagaatgaggaaatag

SEQ ID NO: 8569 - DNA, 858 bp, Zea mays
  Peptide Sequence Number=SeqID_50348
atggatcttcctccggcggagagacagatggccgcctcgtcagcaccatcatcggcggtgccggccgtctccacggcacccgtgatcactgtggcctcgccgcccacgggtggtggtggatcgatctctggtaacggcggaggcggcggcggctcgccgtgcgcagcgtgcaagctccttcggcgcaagtgccagccggattgcatgtttgcgccctatttcccgtcggacaacccgcagaaattcgtgcacgtgcaccgcgtcttcggcgccagcaacgtgagcaagattctcaacgacctccagccattccagcgccaggacgccgtgaattcgctcgcctacgaggcggacatgcgtatccgcgatcccgtctacggctgcgtcggcgtcatctgcatccttcagcgccacctcagtctggtccggcaagaactcgcctgcgccacctacgagctgtccaagtaccggcaggctgaagccgcggcggcctctgtggccgtgggatcccatggtgcggcagcggcagcagggatggcggaatttgtagggaacgcagtggccaactgcccacaaaccttcatggatgtcaggcactccacggcggcggcggcgatcggtggagctggcgggttcatgcaggaagacaacttctccatgcagcagatgctggccatgacctacgaaggtgaaggcagtggagctgcgagggtggacatgaacggaggtggaggctatggcttcacgtactcgccggccgccgccatgggcgccgtcgagcatggtgcagtgtctggtattggggcagcagaacaaaggggcacaattcctgaagcccagcaagaccggcggggatga

SEQ ID NO: 8570 - DNA, 1497 bp, Zea mays
  Peptide Sequence Number=SeqID_50349
atggatgctgtgtggttcaccgtctctttcctcgccatcgccgccatagccaccaagatcatcgcaaaacggcgagctacgacgtctgccccaagaagcaccataccagctccgccagtcgtggagggcagatccctcgtgcggttcgtgcacacgctttttaccaaaggtctgcgagccacgatccacgacgagcacgcgaggatggggagcgtgttcaccgtaagtttcttgggactgatgaagacgacgttcctggtggggccagacgtgttgaaccatttctacaacgggccggagtcggatatcaaccatggcaacatgctcgacttcatggtgcccatgttcggcaaggaggtcgggtacggcgtcgatttcgccacccggtacgagcagatccgcttctacagcgatccgctgaaacgcccttccaagctcaggatacacgtcgaccccatcgtccaggaagtagaaggttactttgcaaaatggggagaggaaggcacagtggacctgaagcacgagttcagccagctgctgatgctgatatcaagccggtgcctgctcgggaaggaggtccgcgagaagatgttcgacgagatgcacgctctgttccacgagctgaagagcggcatgcgcctgtccagcgtgctcttcccctacgcccccacgccgacgaaccgccggcgcgacagggcgcgcgccaagctgttaaagatattcagcgaggtcgtgcggtcccggaggaggcggggcgaggaggagaaggagaaggaggaggacgtgctgcagagcctgatcgattccaggtacaaggacgggcgggccacgaccgaggaggaggtcaccggcatgatcatcctcctggtcttcggcgggatggacacgagcacgctcgccagcacctggaccggcgcgcgcctgctcagcaccccggcggccatggctgccgcggtcgaggagcagaggcggatcctcaccgaccacgggcacggggaccgcgtcggctacagtgaattcatgcagatgaccaccctccactggagcatcaaggaggcgctgaggatgcaccctccgtcggcggtgttcttccgcaaggcgcggaggagcttcggcgtacggacgagagacggccgcgagtacgaggtcccgggtgggcatacggtggcgagccccgtgctgttcaacagccacctgcctagcgtgtacaaggaccccgacgtgtacgacccgacccggtttgggcctgggagggaggaggacagggccggcggtaagttcacctacgaggcgtttagctgcgggcggcacagctgcgtcggcgaggcgtacgcgtatctgcagatcaaggtgatgctcagccatttgctgaggaacttccagctcgagctcgtgtcccctttccctcagacagattgggggaagctggtgcctgagcctaaagggaaagtgatggtcaggtacaagaggcagcgcctgctctcagtgcctagctag

SEQ ID NO: 8571 - DNA, 600 bp, Zea mays
  Peptide Sequence Number=SeqID_50350
atgcccaacttttgggtcaacatctcgacaacaggttattgcaagtataaggcaagttgtgtccttgatcactcttctttacctaataatgttcatgttaatcactatgacatgctcaggggtacccccaagacccctaaatctcagctggtaacccccaagacccctaaatctcagctggtaacccccaagacctcggacgacggtctccgcctcgcccgacccccggggctcgaactctacctcgacctcggacgacggtctccgcctcgcccgacccctaggcttggactctacctcgacctcggacgacggtctccgcctcgcccgaccccaaggctcggactcgacctcgacctcggaagacggtctccgcctcgcccgccccccggcgctcagactctacctcgagctcggacgacggtctccgcctcgcccgacccctgggctcggactctacctcgacctcggacgaccgtctccgccttgcccgacccccgggcccaaactcagcctcgacctcggaggatcctccgcctcgcccgacctcgggctcggaccgaccacgtcacaggggggccatcattaccctacccctag

SEQ ID NO: 8572 - DNA, 1047 bp, Zea mays
  Peptide Sequence Number=SeqID_50351
atggcgcccgctccatgtggccgttcgtcgcagagggtgttccacttcggcaagggcaagagcgagggcaacaagaacatgaaggagctgctgggcggcaagggcgcgaacctggcggagatggcgagcatcgggctgtcggtgccgccggggttcacggtgtcgacggaggcgtgccagcagtaccaggaggccgggcgcgccctcccgccggggctctgggcggaggtcctcgacggcctgcggtgggtggaggagtacatgggcgccgccctcggcgacccgcggcgcccgctcctgctctccgtccgctccggcgccgcggtgtccatgcccgggatgatggacacggtgctcaacctggggctcaacgaccaagtggcagccgggctggcggccaagagcggggaccgcttcgcctacgactccttccgccgcttcctcgacatgttcggcaacgtcgtgatggacatcccccacgcgctgttcgaagagaagcttgaagccatgaagaaagccaaggggctgaagaacgacaccgacctcaccgccaccgacctcaaagagctggtgagccagtacaagaacgtctacgtggaggctaagggagagccattcccctcagtcacccagcgacctgacacactgaagctccctgctgcagaccccaagaggcagctggagttggcagtgctggccgtgttcgactcgtgggagagcccgagggcaaagaagtacaggagcatcaaccagatcaccggcctcagaggcaccgccgtgaacgtgcagtgcatggtgttcggcaacatggggaacacctctggcaccggcgtgctcttcactaggaaccccaacaccggagagaagaagctgtacggcgagttcctggtgaatgctcagggcgaggatgtggttgctggaatcagaaccccggaggatcttgatgccatgaatgacgttatgccacaggcctacgaagatctagtcgagaactgcagagtactggagagccactataagaaatgcaggcaccgtgctatgggttaa

SEQ ID NO: 8573 - DNA, 462 bp, Zea mays
  Peptide Sequence Number=SeqID_50352
atgggcaagagcaagaaaggtggaagttcctcacaccattccagcgataagcggaagcgcgagccgactcctccctcgaaggatttcgacgattccgagtactcgaaggaggagttctcctccgagtccaagggttcgccggtccatacctctcccccggcgtcgtctgacgacacagacgacacccaggggatcaccgcagaggtgtggacctacatccgggccatcgagcgcgccgggctcgagggctcggatgagtcggaggtctcctcggacaaggagaactcctcagactcgtccggggagggcggcggtgacggcgatggcgagggcgacgacgatgacggaggcgacggcgatggcgacggcgacgacggcgaaggtggcggcaagggcgacaaaggtgacggccaggacggcagcaagggcagcagcaggggtagcaacaaggccagtggctag

SEQ ID NO: 8574 - DNA, 1236 bp, Zea mays
  Peptide Sequence Number=SeqID_50353
gtgagggcggagaccagccctgaggacgtcggcggcatgcacgcggctgcaggaatcctcacagaaagaggtggcatgacctcccatgccgccgtggtcgcacgcgggtggggaaaatgctgtgtctcgggatgctctgggattcgtgtaaatgacgcagagaaggttgtgaagattggaggcaatgtgctgcgcgaaggtgagtggctatcgctgaatggatcgaccggcgaagtgatcctcggaaagcagccgctctccccaccagccctcagtggcgatctgggaacattcatgtcctgggtggatgacgttagaaagctcaaggtcctggcaaacgcggatacccctgaggatgcattggctgcacggaacaacggggcagaaggaatcgggttatgccggacagagcacatgttcttcgcttcggatgagaggattaaggctgtgaggcagatgattatggctcccacagttgagctgaggcagcaggcgctggatcgccttctgccttaccagaggtctgacttcgaaggcattttccgtgctatggatggactttcagtgactattcgacttctggaccctcccctccacgagttccttccagaagggaacgtcgaggaaatcgtgcgtgaactgtgttctgagacgggagccaaccaggaggatgccctcgcacggatcgaaaagctttcggaagtaaacccgatgcttggcttccgtggctgcaggcttggtatatcgtaccctgagctaacagaaatgcaagcccgtgccatctttgaagctgctatagcgatgaccaaccagggcgttcaagtctttccagagataatgatagtagtacctctgcagttcaaaattatgacaaaaatccacttgatcgcggagcaggctgaattcttctcctttggaacgaacgacctcacgcagatgacctttggctacagcagggatgatgtggggaagttcatccccatttatctggctcagggcatcctccagcatgaccccttcgaggttctcgaccagagaggagtgggcgagctggttaagcttgctacagagaggggccgcaaagctaggcctaacttgaaggtgggcatttgtggagaacatggtggagagccttcatcggttgctttcttcgccaagactgggctggattacgtttcttgctcccctttcagggtcccgatcgctaggctagctgcagctcaggtgcttgtctga

SEQ ID NO: 8575 - DNA, 240 bp, Zea mays
  Peptide Sequence Number=SeqID_50354
atgcctccccagtacacggtacagctgttcgagaagcaccagattcaggagcttgaggagctagtgggagccagggagaacaccattgaggttctcgaggatcagctgataaacactcaacagcaacttgaggaggctaaccaacatttggatatgcaccaccaggagatccaggacatggaggccaacgaggatgtcgacatcaagggaggagaggagccagagcctgcatccagctag

SEQ ID NO: 8576 - DNA, 231 bp, Zea mays
  Peptide Sequence Number=SeqID_50355
atgttgtgtcaacaagggaagagaatcgaggatctgtcgcggcacaaccggttctattatgttacaggaagtaattgttataccccatgggttgcactttccatctgcccttggcctggtgtgtgggaatatgtgagggtcaatgtcatcaagctcgctgttgaggagatgagggtccctgagtacctgcagttcaaggaacaacttatggaagaagggatcactcaatga

SEQ ID NO: 8577 - DNA, 519 bp, Zea mays
  Peptide Sequence Number=SeqID_50356
atgctcgcccaccccacacgatgcacccccctcgtcgctgccgcaaatgcatccgcgtcccttccttgccttggtggcaagcttgttgaggctgatgcgggagatggacttggcggcccgctccgccttgtcggcacgccgctgctcgaggaggcgcttggcctgcgcggcgggctcctcgagcagcaccatcttggagcggatcacgagatctgggaggggagcagaggggaggagggcgttgatggtgggtgtggcatcggatcacggcagcggatcaagggatctgggaggggagcggaggggcaggagggcgtgtgcggcagcggaccacggcggcgacgaaagcgcgaccaaacagacagacgggtatatatctggccttcacccatcctgttcccgtgtctctcattgccttccaagtctccgagctcctctccagcagggtacttctcttcctcggagtacccgatcgagagttcgagatggaagcgcagccagtcggaggagttttcctaa

SEQ ID NO: 8578 - DNA, 759 bp, Zea mays
  Peptide Sequence Number=SeqID_50357
atggcgcccttttatcgacagagagcagagggggcggtgggtgggcatggaaggaaggaggaagaggatggaaaggagcgaggggggcgggcgggatgcgaggagcgtgcgcggtcaagcggcggctttagggaggaggacattattgcagttagactggagtggacaactgttgacatgatccttgatagcagggttcttagtgcctacctaactggggcaggaatgaacactgaatctgggattcttgattacatgagctattggctcaagctatcgatagattggaagttggacaaccaggttttagaagttggacaaccaggttcagacataagttttggaatgcagcaacaatctgatggtgatgttcccattgacgagaagttctgggagaaagattttgaaattcctagctgccatcaatgtggactgctaaagcctgatgagttgtgggactggtccggcatgacgcgtgtgtgtcttggcaaagcattctcgtgtctggcgctggaggacctatggtgcggactaggggtgggcgttcgggttacccgaaattttcgggtcgggtattcgggtttcgggtattccgggttcaggtttcgggtattccgggttcgggtgtcatgtcgctcctggtgggacgccgtgcgctcacgcttaaggctcttcgagatgcttgacctcgagcctaggtttgctacatccacacccggcaccgaggcatcagcatggtggacgccctccttccaatga

SEQ ID NO: 8579 - DNA, 180 bp, Zea mays
  Peptide Sequence Number=SeqID_50358
atgatggttcatgttgtggggtttgccaatacttcaaagaaacttcaagttcaagtcggctacaaagaggcaggaggtctaccaagatttattgataagaagaataacaagagggtttcagtcaagacagtgaccgaagcaccaggcatagctccaaccctatccgtaaagaaaaaataa

SEQ ID NO: 8580 - DNA, 183 bp, Zea mays
  Peptide Sequence Number=SeqID_50359
atgacggtggtgccccccaatgtgcgagcatcgaccaagccacatgaggcgcgaggatcgagcagcgtccacagaaggcacgaggtgcgcacggcgacggtcacgcgtaagaatctgacagttacgaacgtgctgttagttggactgatatttgatttttatcaattatgctacaaggtgtaa

SEQ ID NO: 8581 - DNA, 1487 bp, Zea mays
  Peptide Sequence Number=SeqID_50360
atggaggatgactggatctttcttggtgacggcgtcggcggcaggagcgagagcgacacagtcagcgcgtccgacgacgacgacggcttcacgatcgtgcgccggggccgcgaagccggcggcgatcaccgcagcgtcgtcgacagcgacgatgacgcgccggcaggcgtgccgcaccccacgccaccggggctctccttcagggtggtatcctcggacggcggccgccgcgagcaagccggatgcaacgacgatgccgcctccgggaaagccatccgaggcgctggcattgatgacgcggtgacgtgcaaggagggatgcgaatctgctgatgactctgctcaggttggaaagcacgatgtcacggggcgctccgtggaggtatcttctgcaccttcggtcgccgtagcgacagcgttcgcgccgacggcgaactgtccagagagcgacggcgatgaatgctttggcgcggactctgaggacgaatgctatggcgtggagtactcggatgtcgacgccgagagctgtggcgaggaggaggaacaagaagaggacacggtgagcgctgctggtgttggtgaggaggagagcagtcgcgtcgttggtgtagcggagaactgcaaaacggatatcttcgccatgctgttgcccagggaacgtgcatacggcgtcaacatcgacgattatgaggacgagagcgacaacggctgtatcgactacgaggaggaggaggaagatgggtccttgtttgacatgttgttgcccagggaacgtgctatcaacgatggcattgaaggttctggcggcgaagaagaggctgctactgcgactgcggcttgtggctacaacgccgaggaagatgacattgctgatgtagcagagaacggcaaaacagacatctttgccttgctgttgcccaggcaacgtgcatacggcggcgtcaacatcgacgactatgagtatgaggacgagagcgaggaggaggaatatgggtccttgttcgacatgctgttgcgaagggaacgtgctatcaacgaagacactgatagttccgacggcgaagaagaggctgctactgcggcatgtggctacaacgccgagccgagccacggaacccggcggcaggagcttgctggtcgcgctcgtggctacgacgacgtcgatactgattctgacatggaagagggcggcgatgaggttgcggctgcggcgtcgaaagccagctctggggatttgctgggcaaagtcagacggagaggcaggcgctggcgctgtgggaggtcacgagcggcgggtgcgggaagactgctgcagctagtcgcgagctgtccctgcgcgcctgtggcggaagccatgttcgcgctgcggcacagggagcgtgcgctgtggatcgaggaggtggggggtggggaggccgcgcaacaggagctggaccgcgcgctggcgagagatgcgggacttctgccaaagtcaagacagattatgcg

SEQ ID NO: 8582 - DNA, 411 bp, Zea mays
  Peptide Sequence Number=SeqID_50361
atggtggcaagtccttatcattgcctgctcctgcgtttgccccatcagcaggaaccgccaccacgaggaaagaacaaggtacttgatgagcagagtgcagtcctaatcactgtctgctcctacgttttccgtcgcagctgcattcaagcccttaccgcaacctgcatgcatgtcgtcgtcgccggagaggagcaagagggagctagtatgggtggtaggtgcgggtggcgcacgcacccggcgatgacgggtcggaggcagaggcacgcagggaggggagcacacgatggtgttcggggcgtgcttgttgaggtcgggccgtcggggaggatctcgacgagcggacgcgtgatcccgaacggcgccgctgaagtttctctcaccgccgccgacgcgggaaccagcagctga

SEQ ID NO: 8583 - DNA, 201 bp, Zea mays
  Peptide Sequence Number=SeqID_50362
atgcccaagcccccaggggaggatatcaagttcagatccaagctcgagcgaggcggatgtcttctcgaggagatggtcatgctctcccctatcgcgcgccacagtttgatggagtggctgttcgcgggattcacggtggagcaggtagccgaggccgagcttcgggcgagaacgaagaccggtccccgaggacaagcctag

SEQ ID NO: 8584 - DNA, 882 bp, Zea mays
  Peptide Sequence Number=SeqID_50363
atggaggacgccgaagctaacgcaccccctgcccttaactgggccagtcaaagccttgcaacagcaatcttgctccgcgccatgccggagccctctaccaccgaaggacgccacatccacgatgaactttgggagctcttggaatgcgccgatgtgcagcaggtcgagagttcagcctctcgacttcgggagcccatctcgagaattagtcagcaaactgggtcgcaagacccaaccaaagccaatgaactaatggacatcgccacaaagtttgcttcaggtcaagaggcagtcgaggccctcttccataaagacaagggtgacagaaagcaaaaggagggtgcccccgaggcgtccacccaatgcaacctagagaaggggaagaagaggaagacgcatcagggtccacatgagaccctcgtcaccgagcttgtcgccgcgactgaaaagcgcaacccccgaacaccccaaggaggaccgggcgtgttcgacaaaatgttgaaggaatcctgcccttaccacaagggccctgtcaaacatacactcgatgaataccgcgccatcaccttcgaccgagatgaccacccagactacatcccgaaatcagggaggtatctactcatcgtctaccccgtcatcaacaacacatgcctcaccaaggtactcatggatggaggcaacaacctcaatatcatctatgtggatgccttggaactcatgggggtcgagcgatcccagattcggccaggggatgcgccatttcacggaatcacccctagcaagggggtgcatcccctcgggcagatcaacctgcacgtctgctctgggactcccgccaacttccgaaaggaggtcctcacattcaaggtggtgggattctaa

SEQ ID NO: 8585 - DNA, 978 bp, Zea mays
  Peptide Sequence Number=SeqID_50364
atggcacaggcgagcaagcgcagtgcgtttctccggccagtgatgtacgacgacgacgaaccttcgtccatctccatgtccctcgagctattcggctaccacaacggcggcgtcggcgtcgttgtggacgacggcgacgaggccgccgacggtggctccgcctctgctctctcgctgcagctcgccttcgacgacgacagcttcgtcaagggcgggtgcgagtgcgacgacgccggcggcggcggtgcctcggctgcagactactactactacggcagctgggctggcgcctacggtggctccggcgccacgtccagcggctccaactcgtcggtgctcagcttcgagcaggccggcagcggcggcggacagcgtcatcacctggtctatggcgaagacgggtgcgctctctggatggacgacgcgggcgctggcatggtcgtcgagcatccgccggcacagcagcagcagcagcacggatccggctgcgacttcggactcatcggcagctcgcctgatgatgccggcttaccaatccagctggagccggggactgtccagctgccggccaaggcgccgccgcacaagcgtgctcgccgggacggtgatcaggtgcaagctgctgcagcggcgaagaagcagtgtggtggcgtgggggccaggatgaagagcaagcaggccaagctggctgctcctgctcctaccaaggaccctcaaagcgtagctgcaaaggttcgaagagagaagatcgccgagaagctcaaggtcctgcaagatctcgtgcccaatggcaccaaggtggacttggtcaccatgcttgagaaggcgatcacctatgtcaagtttctccagctgcaagtgaaggtgttggctgccgatgagttctggcctgcacaaggaggcaaggcaccagacctctcccaagtgaaggacgccttggacgccatcctgtcatcgtcccagcagtgccctaaataa

SEQ ID NO: 8586 - DNA, 249 bp, Zea mays
  Peptide Sequence Number=SeqID_50365
atgaggcgctctgggttggttgttcaaaagggagaaggatctattcccgagaaggataatgttattactgaagttgaacatgctattgccgaagctggtagtgatgatgaagaggatgatggcatcttgagtccgagcaagcctagtcatgttgaatttgggaaatccactgaggtcgctagcctaaccttcatgttcgttaaagtcctggaacacctggagatctgcttcaatgccttcttcgtctaa

SEQ ID NO: 8587 - DNA, 258 bp, Zea mays
  Peptide Sequence Number=SeqID_50366
atggagctagacgtggccgtcgagatcgccggcgaggccgcggtgctgctctggtcccgccccttctccgtccgcatcgacagccacatcaccgtcgaccccgtcttcctggaagtcgtcgagcagtgctcaaaatgcaaaaccttatcaattgttcgcacaatgcaatgcagcattcagactccagtgcaattctttggcaaatttctgatgctctacaaaaatcagtgtcgcacaactagagatgtcaatgggtaa

SEQ ID NO: 8588 - DNA, 441 bp, Zea mays
  Peptide Sequence Number=SeqID_50367
atgagaataagtctccttggccaggctgccgtcttcagcgccgtaatccccagggggcacggtgccggactcggacggcgagatggccacggacggcggcgatctaggaggtggcgggagcacgagcacgcgggctcctctccccgatcccgatctatgtgcttggctgcttgcaacctcggtgggatggaggcgacgtggcagcagcaagaggagtgcccgtgcggcggggccgaggccgctgaccagtccgagcggctccacgacgcggtgctgctcgacgtcctcaattgcatcgacgacgtcaaggcgctcggccgctgcgccctcgtctcgcgtcgcttccccttcccccagtcaatcatctgtatcattgcgttgtgcgtagagatgtcaatggggacccgatacccgataacccgtggggaattcccctattag

SEQ ID NO: 8589 - DNA, 594 bp, Zea mays
  Peptide Sequence Number=SeqID_50368
atgtcgcaccacgcacgctcgcacaccagagttctgcgcccccactccccctcccacccgagattgtcgccgatccgagatagccgtgtgcgtggtatcgattttgccccaaccaccaccacagacggagaacctacctctcatgtcgacgccgccggaggaggagcaggtggtgtcacgatcagcaaggaggtggacctcaagcccgttgtcatgaagtgggaggtgctgcaggccgaccacttccacaacggaacgcctaggccagacaactggggaacatctcggccctcctttgggttcttctcactcgacctcggctactcactcctcttcaccgaggcgctcctcgcccccgccatcccctccgtcttagcgcacactgacgatatcttcctacctctcgttaggcatgcggctctcgcgccggcgacggcaaggagcgctggcttaactcagagctggctcatgctcacgtgcttccagacctccgtcgtctcatcagccatgttcctcaccgcgatggtagccaaatcactctcacccaacctcacgactgccaccatcggccaggggattgggtggaagctctag

SEQ ID NO: 8590 - DNA, 573 bp, Zea mays
  Peptide Sequence Number=SeqID_50369
atggcgcgcttcgtggatccgctggtggtggggcgggtgatcggcgaggtggtggacctgttcgtgccttccatctccatgaccgtcgcctatgatggccccaaggacatcagcaacggctgcctcctcaagccgtccgccaccgccgcgccgccgctcgtccgcatctccggccgccgcaacgacctctacacgctgatcatgacggaccccgatgcgcctagccccagcaacccgaccatgagggagtacctccactggatagtgattaacataccaggaggaacagatgctactaaagcgcacgccaagcgtcgacacaggagcgcgctgacacgagctggtgtgggtgcaggtgaggaggtggtggagtacatgggcccgcggccgccggtgggtatccaccgctacgtgctggtgctgttcgagcagaagacgcgcgtgcacgcggaggcccccggcgaccgcgccaacttcaagacgcgcgcgttcgcggcggcgcacgagctcggcctccccactgccgtcgtctacttcaacgcgcagaaggagcccgccagccgccgccgctag

SEQ ID NO: 8591 - DNA, 561 bp, Zea mays
  Peptide Sequence Number=SeqID_50370
atgaaggacatgaacaaaggcccttcagcagtagcatttgccccgatgccgtcgctgctgctgtctagccactcgagacgaaggtcgttgtcgctgctgctggagcggttgccggcgagctgcttggagtttgttatcccgtgggccccctggtgtggaggttgttcatacccgcgggagcggaaccagagtcccaaggtgacgagtgagaatcctcggctgctctgcgatgagccggagccggaggcagcggtgttggcgcggacagaggcgaagtcggcccgaaaagagacttcgtcggctcgggagctggcggcttcccaggccgaggaagatgtggcagcagcagctgaagcttggccaagacatctgctggcgcggtgctggcgtcctcccttgggtggaggtcccttcgcctgggtcgtcgtccgaggtcgggccaggttccgccgagggtggaaacaacgccgagaaaactgctgctccccctgccaatgcctgaacctgcaggaacagtttgtctgtagcatgcacatgtttttcgcggccgccgaggcctaa

SEQ ID NO: 8592 - DNA, 261 bp, Zea mays
  Peptide Sequence Number=SeqID_50371
atgtggtgggagcatattagacctgctcctcaggctcctctcgtgaaaatgaaatgtgtccttgggccatttctagttgttttgacgattaaatgcccagcacaccactttggaccaatccatgagcacaggtgtagcaaatacaaattgaagaaccatgttgaaattgcgccccaccccgaaactggaggcaacatgaagaagacaactgagatattttgtgcacgcatagatactgtcactgataagcaacatttgtaa

SEQ ID NO: 8593 - DNA, 204 bp, Zea mays
  Peptide Sequence Number=SeqID_50372
atggcgggcggaaatacgctcgccggagctaaggaacggtggctggccggtgagggattcgagttagggatcaaggtgaacatccctgatctttggctcaaggttgtcttgtgcacagaatacgttccccatcaattccacttgaacttgaatgttgaaaagctattccccatgggtattttatttgagtttcatgttcattga

SEQ ID NO: 8594 - DNA, 2613 bp, Zea mays
  Peptide Sequence Number=SeqID_50373
atgagggaatcaagccctttcttggtgagtccagtcactatctttgaggcttcttcccaccactccaaaaaggatctggcattaatctcatcatttactctcttcttcagttcccaagaatgccagacaaagcattggcaaattgatcacaaattcaagtgcaaacaaatgaaatcattggatcttgccgacaagttatcctgtggaggtgaggccaacagtaagaaaacatcaggtttcggtcgcatctcattggtgcctgcctgtaaaaagataagcaagggtcaggtcctctttccttatgatgagttcttaaagttgtacaactggaaagaccttgatgttgtaccttgtgggcttatgaactgtggcaacagttgctttgctaatgtggttttacaatgtctctcatgcacgagaccacttgtggcctatctgttaggaaaggaccatagcagggaatgttctgtgaggcatgaagattggtgttttttgtgtgagctacaatgtcatattcagagagctagtggaagtttgcacccatttgctcctacaaacattctttctcatctgccaaatattggtggcaatcttggcgttggtaggcaagaggatgctcatgaattcatgaggtttgcaattgataagatgcaatctgcttgccttgatgaatatggaggtgagaaggctgtagatcttagcatccaagagacaaccattattcagcacatatttggtgggcggctgcaatcacaggttcaatgcaccacatgtggaatggtctcaaaccgctatgataatatgatggatttgactgttgaaattcaaggtgatgctgaatcattggaacggtgcttggatcagttcactgctgttgagtggcttgatggggataataagtacaaatgcgatggatgcaacgactatgtgaaagcacggaagcacctttcagttcagcaagctccaaatatacttactatcactctcaaaagattccagactggtagatttgggaaactaaataagagagttacattccctatggagttagatctgacaccatacatgagttgcactgatggaagtgacctgtatgatctctatgctgtagtcgttcatctggatatgctgaacgcatcattctttggacattatatatgctatatcaaaggttatcaaggaaggtggtataaaattgatgactgcaaggttatggttgttgatgaggaggaagtacatgctcaaggcgcttatatgcttttatatagcaggagaacagctcgtcctaggtcacttcttacagttgatgagtccgtgaaacagcaacaacagtgcaaatcgctcctttccaatgggcaaagccacatgatactagcagatacaacattgaactgtgaatcatctttgaagattccagaagatatgttacaacaggattgtgaatccaataatgaatccttgcatgaaatgggtattaaggaccaggagtcagacatggatctacgtacaagcattgaagatgacaaattcattagcaatggaaatctacgtttaccaggttcactagtatcacatgttcttgaagatactagagctccagattctgtattagaaggctctgtgcaacttggccctcctttagaaggtggtcctactacgatgagctctgtgcagtttggcaactgcacaagtgaagcatcttcggaacattcctttgcagagcaatgtgaggtgcctgcctcatgtattgattcagttgactatatggatgttgatactgaagctggtgcagaagttgagagatgcgacgaacaaagacctgtcttaaatgattcagttggaaggccgaataataacacagcaaccccaactgcgaatggggtgccaggagaacccaaaccatcattttcctctggtttttttgataagccctcaagaaaaagatcttcctttacagaagaggctagtgccggttctcctcgaaagttaaatggctattgcaatggacatatcagcagtctagagcaagaagttctttgcaactctggaagtgaaaagtgcaatggagatgcacccgttacatccagtaatggcaaattctgtgcagctaatgttgatatgcaatctatcgatgattcgttgcatgaagacaagcgagatgtgccttctgtttctcatggctttgagccaagaccttacaagctacaatcagacagcaacaacaattgcggtaggacatgcaatgggaaacctaaagcttgccaaggggacatgtcatttttacctcggggcttccttggaaggcctagttctagaggaatttcagtcaaagcagatgatagcttgccatttagcactgacgcatcatcatcctttgggaatggaaacagtaagtcaagtaacaactcatcttctatgggtggcttgtctcctggtttccttacaagacaccgcagggaatccacagtcataggcacaagctctgacattccaatggataaaaaatctaatggcgccacagtagtgccagatcatgcagaaaaaaaggtttcagattgtacgacgaatggctcttcattccaaataagagcagcctccgaccaccttgattga

SEQ ID NO: 8595 - DNA, 2187 bp, Zea mays
  Peptide Sequence Number=SeqID_50374
atgcccggcataccgagggatgtcgccgagcactcgctggatatccaagccggagcccgacccgtcaagcagcctctgcgccgattcgacgaagaaaagcgcagagccataggcgaggagatccacaagctaatgacggtagagttcatcaaagaggtattccatcccgaatggcttgccaaccctgtgcttgtgagaaagaaaggagggaaatggcggatgtgtgtagactacactggtctaaacaaagcatgtccgaaggttccctaccctctgcctcgcatcgatcaaatcgtggattccactgctgggtgtgaaaccctgtctttcctcgatgcctactcagggtatcaccaaatcaggatgaaggagtccgaccagctcacgacttctttcatcacgcccttcggcatgtactgttatgtcaccatgccgttcggcttgaggaatgccggtgcgacgtaccagcggtgcatgaaccatgtgttcggcgaacacattggccggacggtcgaggcctacgtcgatgacatcgtagtcaagacgaggaaagcctctgacctcctttccgaccttgaagtgacattccgatgtctcaaggcgaaaggcgtaaagctcaatcccgaaaagtgtgtcttcggggtaccccgaggcatgctcttggggttcatcgtcttcgagcggggcatcgaagccaacccagagaagatcgcagccatcaccagcatggggcccatcaaggacttgaagggcgtgcagagggtcatgggatgtcttgcggctctgagccgcttcatctcgcgcctcggcgaaagaggtttgcctatgtaccgcctcttaaggaaggccgagtgcttcacttggacccctgaggccgaggaagccctcgggaacctgaaggcgctcctcacgaatgcgcctatcttggtgcccccagctgccggagaagccctcttgatctacgtcgccgcgaccactcaggtggttagcgccgcgattgtggttgagagacgagaagaggggcatgcattgcccatccagaggccagtctacttcatcagcgaggtactgtccgagaccaaaacccgctacccacaagttcagaagctgatgtacgcggtgatcctgacgcggcggaagttgcgacactactttgagtcccatccggtaactgtggtgtcatccttccccctgggggagatcatccagtgccgagaggcctcgggtagaatcgcaaagtgggcagtggaaatcatgggcgaaacaatctcgttcgcccctcggaaggccatcaagtcccaagtcttggcggacttcgtggctgaatgggtcgacacccagctcccaacagccctgatctggccggaactctggaccatgttcttcgacgggtcgctgatgaagacaggagccggcgcaggcctactcttcatctcgccccacgggaagcacctacgctacgtgctacgcctccctttcccggcgtccaacaatatggccgagtatgaggctctggtcagcgggttgcggatcgccatcgagctaggggtccgacgccttgacgctcgcggtgactcgcagctcgtcatcgaccaagtcatgaagaactcccactgccgcgacccgaagatggaggcctactgcgatgaggttcggcgcctggaagacaagttctacgggctcgagctcaaccacatcgcccgacactacaacgagaccgcggacgagctggctaaaatagcctcggggcgaacaacggtttccccggacgtcttctcccgagacctgcatcaaccctccgtcaagatcgacgacacgcccgagcctgaggcaccctcggcccagcccgaggtaccctcggctcagcccgaggcaccctcggctcggcccgaggcatcctcggttcagctcgaggtaccctcggcccccaagggtgaggcactgcgcgtcgaggaggagcgaagcggggtcacacctaatcaaaactggaagaccccgtacctgcaatatctccaccgaggagagctgcccctcgaccgagccgaagctcggcggttggcgcgacgcgccaagtcgttcgtcttgctgggagatgggaaggagctctaccaccgcagccccttgagaaggcacccggaggctacacccaccattgggaagggtggttcgtcatcgccaaagttctga

SEQ ID NO: 8596 - DNA, 390 bp, Zea mays
  Peptide Sequence Number=SeqID_50375
atggccaataggttccaaaaaattcatgaacttggttctaaaggaaagcaatcaaaccctttgcaccgtaagattttcagtgggacaataagcgggtggataccgattctgaacaagttcaaagatccgacagaaatgatgtggatatggttgatcaagctgccagtgctcgtacgcaaattcatgaggagaaggaagcacacaagagcaataagtaaggaagttgatgtagaaggagatgaaggtgatgggcaagatggaaatgaagcctcacaagtcacaagagcaaactgctattcaccgacagcatcagcaaacaataggcggccgatttcgagaaattctccctggaacagtagagctattgctgatttccaatttatagtataa

SEQ ID NO: 8597 - DNA, 334 bp, Zea mays
  Peptide Sequence Number=SeqID_50376
gaaagtggttgttgaaaagaccctagatggaggggagacattgaagatcaccatctcggactccaatgttgggggcaggcgcaggcaggcgaccaagtgcagcgacctgttttgcgcatcgcgaacggtccgccacgaagccaccaacgacgcgccaatgcctatggatgaagacaacttcgaggaggatgatttactaggagaggacctggtcgactatagagtctcgcccaaacacccagatatggataacgtgattacattttcaacagattacactattattggtgacgatgaacctgcggttgctcaatttgagcttggtcctaaatag

SEQ ID NO: 8598 - DNA, 444 bp, Zea mays
  Peptide Sequence Number=SeqID_50377
atggccctcctcgagctgccgcccccatggctgccccttaggaggcctcaatggttgggtggtcatccttggtgggatctcgtatgcggcagcgatggtattggctacatcgtcgtcgtcccatgtgcccccaagcgccataagttgttttcctcttgcctttctaccggcattcgtctgatcacctggtttgccttctgcagcgtcttttcatgcgatcggcttctagggcggatgcgttattgtccacctagcgggaggcaaaataattgtgcatgggagttgcctgtgctgaggcgaaggagcatgagcacgctgagctttgttctaaggccgagcggcttgagggcgaggcgacccacctatggtatgagtgtaatgacgctcagagcgacgccgaccatctctgggaagggggtcccaactacaagggaccctccgtga

SEQ ID NO: 8599 - DNA, 381 bp, Zea mays
  Peptide Sequence Number=SeqID_50378
atggccggttcaaaggatagttccgacgtctcttccagcaacatcatcgagccgactatggagactctgtcagttgaagatgagaaggagttcgaggaacgcaaggagcagctgacaaggaagcgcaggatgccgatgaatacatatcccaaacaaccacaacctcctgcgcagatcgggggattagcttttaactacatgtcgggggccataattaggggtaccctcaaggctcctaattctcagatgaaggacatcgctgcctgcgccgcaccgactgcggtgccacttgacagagtgaggctaacaggcagtcaggcccggcctcaggccccattggaaactccgctccgcccgacccagggctcggactcgggctaa

SEQ ID NO: 8600 - DNA, 366 bp, Zea mays
  Peptide Sequence Number=SeqID_50379
atgtgcatctacgaacgggagagcaggtttctggaaccattagccttcgagatcctacaccgggagagggcgaataaggttttcgagaagcgtattcacgcgactgctcgcgttcttctcatcgaccctgcctcgacgtcgttgaccctactgcttcgacgttgtttaccatactgcttccacccacgttgtctactagcaaagtgtaagataaaccaaactaaggttcgagaaccactgaattcggagctaaaaagaacaagttatggattttctaagcactatgacctacaacgcttgaagctacacgatactgaagcgattgttggcacttgctctcagtcgcaaggtggccaacaagggtga

SEQ ID NO: 8601 - DNA, 670 bp, Zea mays
  Peptide Sequence Number=SeqID_50380
ggatttggatccccggaaggtgagtttttcccctcgccttacaatctctatatacctcccccatcccttcttattaccctatgcgggcccctactccccccgcggcgggcacggatcgcccctgcccgcccctgcgcggcagcgcaccgtcccggaccctccccggcgcggcgcggccccgcccctcccctacccggcgcggaggcgcccgtcccagcacctccccggcgcggaggccctgccccctccccttccccgcgcggcagcgcgccccgtcccgtccatcaccggcgcagcggcccgtccccgcccctcccatcccctgtccgcgcggcgtagccccgcccctcccctgcccggtggcgcggcggctcgcccctgcccctgcaccacggcgctcgccccggctccggcgcggcccgccccgccccagctccctctctcgtggcggctcggccccggcgcggccccggcgcggttcggccctggcgtggccccggtgtggtcctctgccccggcgcggcggctcggccccctgtgcgcggcgtcccggccccggcgcgactcgcgtggtgatgaggatgatggttttggttatgattatggtaatggagaagatgaagccgaggaaggagacttccaggagttccaagactacgacgagttctag

SEQ ID NO: 8602 - DNA, 375 bp, Zea mays
  Peptide Sequence Number=SeqID_50381
atggcccaccgcgacggcttctcgccctcggtctcccccgatccccggcgacaatttcccaccgcacacaggaacaggtggggaagaaggataggaacgaggtccacccgcagagcgcctgcgtccagtggccgacccgtgggtcccacgctagtgccacaaatcgcggacatcggcgcggaggtggagctagggagcggatgcacgaatcacgcgaagcttgttacgatgaggttggggaagaacccgacgggcgggccctcgatgccagtggaaggaggaatcagtgcgcgtggtgcagtcaggtttactgaggaccagacggtggggcccaagggcagtgagcgcggaagtgcaggtgacggctgggcctag

SEQ ID NO: 8603 - DNA, 2031 bp, Zea mays
  Peptide Sequence Number=SeqID_50382
atgaagaaccctgacttcgccgcagacaaagcgctcgccaaggacttcctgtccaatttcaccggccctcacggcgagcccaagtacctgaacatcctgcaagatgtcgcgaacaggaagatacgcgcggtccagatcgagctggacgacctattccactataaggatgtcgacgaggagttcttgcagcgtgtcaccgagaacacgcggcgctacatcggcatcttcgcggaggccatggacgagatcatgccggagcccacagaggcgtacaccgtcgacgaggaccaggacatcctgatgacgcagcgtgtggatgagggggccgacggcggcgcggacggcacggacccgctacagaaaatgccaccagagatcaaacggttctttgaggtttacatcaaggcattctcaaaggtgactccactcaccattcggcaagtgaaggcatccaacattggtcagcttgtgaaaatatctgggattgttactcgctgctcggatgtgaagcccttgatgcaggttgctgtttatacatgtgaagaatgtggcttcgagatataccaggaagtgactgctagagtgtttatgcccctcattgaatgtccatctcaacgatgcaagctgaacaaagcgaagggaaatctaatccttcaactgcgtgcgtcaaagtttttgaaatttcaggaggtaaagcttcaagagttagcagagcacgtaccaaagggccacattcctcgtgctctgactgttcatctaagaggagagctgactagaaaggttgcacctggagatgtggttgagatgtcgggtatttttctccctatgccatactacgggtttagagcgatgcgcgcaggattagttgctgatacttacttggaagcaatgtctgtcacccacttcaagaaaaaatatgaggagtatgatctaaaaggtgatgaacaagaacaaattgaccgattggctgaggacggtgatatctacagtaagctggcaaggtccttggcacctgaaatatttggccatgaagatgtcaaaaaggcactgctgttactacttgttggtgcaccccatcggaagctcgcagatggcatgaagatcagaggagacctgcatatatgcatgatgggagatcctggtgttgcaaagagtcaacttctgaagcatattatcaatgttgcaccaagaggagtgtacaccactggacgtgggagcagtggtgttggacttaccgctgcagtccagaaagatccagtaacaaatgagtttgtcctcgaaggtggagcactggtactggcagatatgggcatttgtgctatagatgagtttgacaagatggaagagtcagacaggacagcgattcatgaggtaatggagcagcaaacagttagcattgccaaggctggcatcaccacctctcttaatgcgagaactgcaattctggctgctgcaaatccagcatggggaagagcatacatatctgctgctagaagagtcattccttctgttcctagagagctcgaggaatacattgcaactgcatattccagcatccgccaagaggaggcgaagtcaaatgcaccaacctcctacacaactatcagaacacttttgagcatactccgtatctctattgccttggcaagactgaggttctcagaaactgtggctcagagcgatgtcgacgaagcactgcgactgatgcaaatgtccaagtactcattatactcagatgaccgccagcggtctggccttgatgcaatatctgacatatattccatcctgagagacgaagctgctaggacgagcagcatggatgtgagatacgctcacgctcttaacttgatctccagaaaggtgcacaactcagtatatggcctgattgctgacaaattggttggtgctaaaatgtctgaatcacagggatacagcgaggctcaattgaaggaatgcttggaggaatacgcttccctgaatgtgtggcagatccatccaagcacatttgacatccacttcattgatgcctga

SEQ ID NO: 8604 - DNA, 243 bp, Zea mays
  Peptide Sequence Number=SeqID_50383
atggccaaatgtaaccctagcttatgtgcgggatgtgcctgtgtgtgctgcgtggtgtggactagaacatgccaccgactgggggtgctgctgcctatggctctgctgtgggctcgtcatcatcttgaagttattgaggctattgtttcaaacctgaagattgaggacgatgatgtcatagacagtgatgaaggagatatagatgggctaaatgtagatgatcagagctactttgacatgtag

SEQ ID NO: 8605 - DNA, 309 bp, Zea mays
  Peptide Sequence Number=SeqID_50384
atggggattgattggacaatgccattgcctagggaactaatcgaagacctcaagagctcacgctcgagcggtaaagatggatcgtccaaagggttcaaccatcaattttacagttgtgtgaaatggccaaccatcaatttcaatggcaaaaattttgttgaagagcgaatggagaaggcactagcagaatctgataaaatagaagctgaaagcaacgatgctgatgcagaagataacaaggcaaggaagtcctttgtaatatcagtatcttctcacgttgtgttatgtaatctgtattgttgccgttga

SEQ ID NO: 8606 - DNA, 468 bp, Zea mays
  Peptide Sequence Number=SeqID_50385
atgctcctcgcacacatcaaggccatgattcgcaatgcgaatggtgattcgaatacgatggagctactcaccgcagctggagggcaatggagggagctggccacggaggacagtggattcgcggtctctggtgaagaaatctcgagctcgggcgccccccggcgcgaaattccgccacgccgaccgcaccaccagcccggtcgagtagtagccaaccaccagaggtcccgtgcgcacccggggtccccaagtgcacttcaattggccccgacgacggagatccctggcggcggcaaactcccccgaggtcggcaatggcgggactgggtgcattgggttggggagaacgaggagactgcgacgcccgatttatactccggtagcgaagtccgagcgaagcacgaggagcgagatccccggcggggtagtcggcgctctgctgcaacggcatcggagagacggatctaa

SEQ ID NO: 8607 - DNA, 396 bp, Zea mays
  Peptide Sequence Number=SeqID_50386
atgtcacttttttacaagtacttgtacagtactcggttgagtcatggactacccaaggtgtggagcacagatacagtggtcaatgttgaaggtgatggtcatgagcgctgggtcaagcttctccgccgcggtgtccgccgtggcactggcggtgccgccgcactatggccagaagaggtagggggacgtctattgtcgatcgtgatctggacgaatgggaatagactagtggataacactgtggcgtttagatctaggctgttgatcctagatgaatgggtcaagaacaggtactgcaagatgaggagcatgaaggatgctacgatgagttcggagaggtctaagttgtcatctcttagtcaactatggttgtggaggatcgttgtcatcatatga

SEQ ID NO: 8608 - DNA, 489 bp, Zea mays
  Peptide Sequence Number=SeqID_50387
atgaacagacggctaatgcaagtcacggcgatgcaatggatgtgccaaggcacgtggcgcaaggccgtgaagtggctgtctccagtgaactcatccgaatccgccgtgccgccagccgcccccgccgccactccacgccgtggccgcctcagcctccggtcgcccccgccgcgcctgcccccacccaccccgggccgcggacgctcccgccccggccccatctgccaccgctacccccgcttcggcttgcgtctggccccgtccgccgaccccggccccgcccgacgacgcccgctgcacagccaccgacctcgctgtggctgccccgacccaagcccgcacccgccgcggccgcccccgaccccggccctgcccggcgtgcccgtcaccgacgcctccgccccgccagcgacccgctgcgaccgtcgcccccgccatgcccaagcccgccgtcaagaagttagtcagctgacggcgctgacggcgtga

SEQ ID NO: 8609 - DNA, 393 bp, Zea mays
  Peptide Sequence Number=SeqID_50388
atgcggtcaagcccacggccgttcgacgacgtttactccgacgagcccccgttggctgcccgctgctccaaaaccctccccgtagggtcctacgtgaagctcacggaagtctcctcggaggaggtggactcctctgactcctccgaggagtggagcggcggcgatggtgatggcaagggcgactacagtagcgacaacgatgacgaagaggacgatagtagcaagggcgacgacggcaagggctgtggtgatgacaacagcgacgatggtgaggatgacggcagcaagggcgacgacggtgagggtgacggtgacggcggcagcggtgatggtaacaagggcgatggtaacggcagaagtggcaaggccggtagcataatgtcgttggtttaa

SEQ ID NO: 8610 - DNA, 399 bp, Zea mays
  Peptide Sequence Number=SeqID_50389
atgtacagtgtgcgctggttctctaacgcgcgggcccaggctgggcagcggcagcggtgggcgccctccacgcgctgggcgcggtcgcgtgcgcgctacgcgcgcctggacgtgcggcttgggctggggcgcgcggctgggctgcttcgcgcggcgctgggctggggcacgatgctagctgggctggcgcgcgcggctgggctggcggctggcgcgggggctgggccgcgcaggcgcgagcgagctgggccgcacgacgcgcgcgggcccacgagggggaaggctggcgcggcgctgcgagctgggccgcgacgcggtgggccgagcgggggggaggggagagagggaaggggggcggctgggccggccgagttgggccagggaggagaggtgggctga

SEQ ID NO: 8611 - DNA, 201 bp, Zea mays
  Peptide Sequence Number=SeqID_50390
atgacattccaaacagaagcacatatgattgaagttgtttctgtcatggttgttcctcgtacaagcacatttcaaaatttggtcagtacgatgtcgaaccaaagattgcctattggcgatgaaccaaagaaagattttgatgctaaaccgtacgcgaaacagacgggttgggaggtgacccctaaacgtgtcggcgcctag

SEQ ID NO: 8612 - DNA, 597 bp, Zea mays
  Peptide Sequence Number=SeqID_50391
atgacgagactgcccctcctccgtctctgcgccacccgctccctgggcggaagccctcaggaagccacgcgcacaccgcaactggtcgacgacgacttcctcgtctctctcctccggcctcgagtcgcctccgatccgtccgagaaaacaaaacaaaccgaaagaagaaaggcgacgaggaagagaaggctctccgcgagatctgggggagctcccattctcaagatgcacgacttctgcttcaccatcccctacgggttcgccgtgctggccggcggcgtgctgggctacctccgccgcggcagcaccgcctccctggcggggggcgccggcgccggcgcgctgctcctcctcgcgggcttcgtcagcctgaaggccttcgagaagagacgcaactcctacgtcgccctcgcgctcgagacgcgcgtgctgcgctttcttcctcctcctgttgtgctaatcggacatctgcctcctacacctagtacagggccttggaatggcaacgcagcgacgaaagtaatagttgtggaccgttgtctcatggtcatcgccttagtcttcgacgaaggcgcagggcgcttcccggtaggttga

SEQ ID NO: 8613 - DNA, 1431 bp, Zea mays
  Peptide Sequence Number=SeqID_50392
atggccaccaccgtgagccctgaccctgaggcggcgctcgccggcgtgaaggagccgagggcgccaaggtcgctgcttgcgcgcgcgcgcgccaacctggcgttccagtcggtgtgggcggagctgaacggcgccatgggcgacctgggcacctacatccccatcgtgctgtcgctggcgctggcgcgccacctggacctgggcaccaccctcgtgttcaccggcatctacaacgccgtcacggggctcatctacggcgtgccgatgcccgtgcagccgatgaaggcgatcgccgccacggcgctgtccgactcgtcgttcggcgtccccgagatcatggccgccggcatcctgaccgccgccttcgtcctcctcctcggcgtgacgcggctcatgcagctcgtgtactggatcgtgccgctccccgtggtgcgcggcatccagctcgcgcaggggctcaacttcgccatggcggcggtcaagtacatccgctacgagcaggacctcggcaggggcaagtccttgggccgccgcccctggaccggcctcgacgggctcgtactggccatcgcgtgcatctgcttcatcctcctcgtcaacggcgcggggtcagagagcggaagcaggagggggagaaagaggaggagggctatggctatccgagagcaaggcgcacatcccgaacgccaagaagaagaggaggaggaggaggaagagaggcaaggtggtggtgggtggaggtctacggttaggcgcgcggcggcggtggtgccgtcggccgtgatcgtgttcgtgctaggcgtggcgttggcggtggcgcggcacccggcggcggtgcgggagctgcgcgcggggccgtcgcgggtgcgcgtggtgcgcatctcgcgggaggcgtggaagcagggcttcctcaagggcgcggtgccgcaggtcccgctgtccgtgctcaactccgtggtggccgtgtgcaagctgacgcgcgacctgttcccggagaaggaggcgtcggcgacgtcggtgtcggtgacgatgggcggcatgaacctggtggggtgctggttcggcgccatgccgtgctgccacggggccggcgggctggcggggcagtacaggttcggcgggcgcagcggcgggtgcgtggcggcgctgggcgcgctgaagctcgcgctgggcctggtcctcggcggctccatgctgcgggtgctggtggagttccccgtgggcctgctcggcgtgctgctgctcttcgcgggcgtggagctgggcgccgcggctagggacatggcctccaaggcggaggcgctcgtcatgctgctctgcaccgccgtgtcgctcgtgggctccagcgccgcgctgggattcctctgcggcatggtcgcccacggcctgctcatgctcagggcgtgggccatgggggtcaggctcacctag

SEQ ID NO: 8614 - DNA, 447 bp, Zea mays
  Peptide Sequence Number=SeqID_50393
atgaccagtcctatggtactgcaccgtatatggtggctacgacagtcccaagctaacatacagtgggcatgtgaagatgtggcaaggcagcaacaggaaattcagaaccaggcggcctccatgctcaagcatgaagcatcacttaagcgggatgataaggttcaatatcaattgcatgtcgcggagatggaggcagttagcgttgcaatgcctcctgtttatgtaaatcaccgtaatgatggtgggccagctgttaaggatatacatatggagaactttagcgtcactattgatctaattcaagaagccactttaacaatcgtatttggaaggcactatgtggatgcttatttgtctgctcctaagctgtcccgcatgaaggatcttcgtgcttctgtattcatagtgacattgcaagggatatatgttgagcttcttctagcttag

SEQ ID NO: 8615 - DNA, 1332 bp, Zea mays
  Peptide Sequence Number=SeqID_50394
atggggaagcaaggaccctgccgtcattgtggagtcacaattttgatggatttctcatggaaaaatggtggagcaggtactcccctgtggcgaaatgggccaccagataagccggtgctctgcaatgcatgtggctcgagatggagaacaaagggttcattggcaaactacactccaatgcatcgcaaggacgatattgatgacgatgaacccagagttagcaagctgaagccaccgacatcaaagctgaagtcacagaagaaaaaaccaaatcacattataatggagaatgggccattttctggtcagaatttccgaaagatgggggatgtcgaccaaagttatcggtctagttcgggatctgcagtatcatactctgagagttgtgccccatatggtgctgctgatgcaagtgaaatgactggttcagcacagtcgcatgcttgggagtccctagtgccatcaagaaagaggagctgtgtcacccgtccgaagccttcccctgtagaaaagcttgcaaaagatctaaacttcatcatgcatgaagagcagttatattacccttcaggatcatcggaggaagacctactataccatagtgaaactcctgtcggttcctttgagatgggctctggaagtgtgcttctaagacatccaaactcgaaatcactggagaaagaatcagaagcaagctctattcctgcagataataaatcatatattacaagtgaatcctactcgggctctgcctcgtttgccattcacaatggaaacaaggcagcaattaacttaaacgcttcaaatgcaaggctgaagaagtcgccgctgcatatggaagacaatgctagaaggggagtagggagcatcagtggtccggaaggctttaccaagtctactatgaaaccactcaaaagaccccgtgacacccaatttcagattgatgcagtgacacaaagaagggttcttatttgctttgcttgtaaacatgcagaactagaaggtaccatgaggagtcctctaagaggtctaaaatctggtgctttggctcagtttgaaagttcatctttgccaaaatctggctacaccaccaaagattcaacctgcactggaggagcacttaatttattcatgttacccccagaaaagttattagtggtccctcctcagtatgtcgaccctgatcaagacttgctgctggagatacctctcaatgcacgacacccagaggcagaacttctgtgtcaaccatctcagctgatgagctctataagccgcagctccacctctatgggtggggttgctgaaggagaagggtgcctgaagcaaccatag

SEQ ID NO: 8616 - DNA, 531 bp, Zea mays
  Peptide Sequence Number=SeqID_50395
atggctgcagggttcatcaaagaggtattccatccagaatggttagctaaccctgtacttgtaaggaaaaaggtgggaaatggaggatgtgcaacataccaaaggtgcatgaaccatgtgttcggagaacacatcggcagaacggtcgaggcttacgttgatgacatcattgtcaaaacaaggaaagcctccgacctcatctccgaccttgaagtgacattcaggtgcctaagagcgaagagcatgaaactcaatcccgagaagtgtgtcttcggagtcccccgaggcatgctcctagggatcatcgtctccgaacgaggcatcgaggccaacccagagaaaatcgcgaccatcaccaacatggggggcaatcaaagatttaaaaggagtacaaagggttatgggatgccttgcggctctgagccgcttctctcgcacctcggcgagaaaggattgcccctgtaccgcctcttaaggaaggccgagcacttcacttggaccccgaggccgaagaagcccttggaaacttaa

SEQ ID NO: 8617 - DNA, 396 bp, Zea mays
  Peptide Sequence Number=SeqID_50396
atggcgcatgggccgactaaccctacttcggcgcatttggccaactcctccgtgcaacccaacccctggagaagtggcgccgacaccctgggcccggctgccagtctctcgtgcgtgcgagtcgtcgctggcgagtggacccgagatcgcgactcttccatctgtaactctccatcgctgccttgtgggcccctttggccaggaccgcccacctcaccacgaccgcgcggaccgagtccgtcgccggtgatggcgggctccctcaaccacctcgcccacggacgttgcgcggactcgccggactataaggcatggacacagaccccccttacccctgtgttcgtacttcaccactccgcaaggaatttgcgccgccattaccaccgcgagggatag

SEQ ID NO: 8618 - DNA, 765 bp, Zea mays
  Peptide Sequence Number=SeqID_50397
atggccggtgatgaggaggaccacctagcagacgcgccgcgggtggtgggcgtcctctccgcgctcctggaacgtgtcgtggagcgcaacgacgcggtggccgatgagctcgccgccgggaccgagtccgcggcgccgccgtcggcgttccgggcgacggcgaggcccgacatctcggtgcgctcgtacatggcgcgcatcgcgcggttcgcagggtgcagcccggcttgctacgtcgtggcgtacgtctacctcgaccgcctcctgcgccgcgcccgcagcgcgcccgccgtggactcgtacaccgtgcaccgcctcctcatcaccgccgtgctcgcggccgtcaagttcatggatgacgtaagtatcgtatttgctttccttttgcaatacagcatgtattacttcagaattataagtattaaagagtcgcgtaggatgcataagcagagcaagttcttaaaggaacagagctcaccaacttgctgcctaaattctaacagatgctacaacaacgcctacttcgccagggtcggcggcatcagcctgtcggagatgaactacctggaggtggacttcctcttcgccgtcgggttcgacctcaacgtgtcgccggagacgttcggccactactgcacggtcctccgggccgagatgctgtacctggagctggagggtcctcctcctccagccgccagtacaagtctgcacaggtgctgcttgtcagaagacgacgacggtagcagcagcaccagcagcagctag

SEQ ID NO: 8619 - DNA, 2460 bp, Zea mays
  Peptide Sequence Number=SeqID_50398
atggcttttctcaagccatctctcgtgttctgctctattctcacttttctgagcttgaactggggtccatctcatgtgtttgccaaggtttatatggtggtgatggaggatgacccagtcatttcttacaaagtgaaccgcaagcatgtaatgagaggcgacgaagctcagaagtacaagcgagtggccacaacaaagcatgatagcttcctggactcatttctcccagtgggatcttacaagaagctgtacagttacacgcacttgattaatggatttgctcttcatgctgaatctgagaagacagttagaattcttagtggtgcaaaaggagtaagacttatccaagaagacatcaaaatggccaagatgaccacacatacaccaagttacatcggagctactggagtctggccgctcctaggtggtgctgagaattctggtaacggggtggtgattggcatgatcgataccgggattgaccctaagaacccaagctttgctaccagcaacacgtcaagccaggcggaaccaccaccggctagtttcaaaggaatatgtcgtaccggcaatagatttcctccggattcatgcggtggtaagatagtaggagctaggtggtttgcgcgtgctgcccaagcgactggagagttcaacgctacaattcactatgaatctccttatgatccagatggtcatggcagccacaccgcatcgattgctgctgggaatttccatacaccactaatatccagaggctacaactttgggtatgcaagcggcatggcccctggagctcgtcttgcaatctacaaagctgcctatcccttcggtggatacatgtcagatgtgattgctgcagtcgaccaggcggtagaggatggggtcaatgttataagtctttctatggctccttcttcagtttcatctgggccagcgtctttcctcaatttgcttgaggcacagctgctcctcgccaccaaggctggagtgtcggttgttcaggccgttggcaatgcaggacccgatgcaaacacagtcgtctctttcagtccatggatattaagcgttgctgcttcaatgacagaccgcacgtatagaaaatcaatcgtaattggcaatgggaaagtgttctcttgcggcgtcctttcagcaccaacaccaggtgaaacaatgtacccactagcatgggctgatgatgtggtcaatgagaactcgaccgatgggtctgtcaattgccaagatccaagggtgttcatcagacctcttgtccagggaaaggtgatcatctgcatgttcgactcatcaaactactacgaagacgatcccaacctcgccggtgtcatccatacgatcgagagaattggagctgctggcgtcgttgtcactgatcgttcttcgggtgacatcgacattgactatgagcctacatttcccacgacagtcccttccgccatagttctcaggggttccgacatgcgagctctactgaggtactataacaacaacacggttcgagacgaacgtggaaacgtggtcagcttcggagcgactatacggattacggagggacggcgtgcgagctactctggagaagcaccagtggtggccgactactcctcgaggggaccggacgtggagaacgcacagatgcagccggcagaggtgctgaaaccgaacgtcatggcgccagggaacctcgtatggggagcatggagcccgacgagcaacgcgctgccggagatccagggcgaggagtacgcgctcctgtccggcacaagcatggccgcgccgcatgtcgccggggtggcggccctgatcaagcagaggcacccgacgtggagccccgccatggtcatgtcggcgatcatgacgaccgcggacgtgaccgaccgctcgggccggccgctgatggcgaggagcgactccggctccgtggaccccgcgacgccgttcgacatgggcgcgggagccgtgaacgcggcgcgcgcgctggaccccggcctggtgttcgacgccgggtacagcgactacctccggttcctgtgcgcggtgcccggcgtggacgaggccgccctgctgcgcgcggtgggcgcgccgtgcccggccccggccccgccgcgcgcgggggcgccgcgctggtgctcggacctgaacgcggccagcgtgacggtggcgaacctgctggggtcgcggcgcgtggaccggcgggtgacgagcgtgggctcgcagaacgagacgtacatggcgtacgtgcgcgcgcccggcggcgtcgcggtgcgggtggccccctcgcagttcgccatcgcgcccggcgcgacgcgggcactgcggatcgtgctcaacaccaccgcgcccgggaatgcgttcagcttcggggaggtggtgctcaagggcgacaagaagcaccgcgtccggattcccctcgccgtgtaccccgccgcggcactgagcccatga

SEQ ID NO: 8620 - DNA, 3006 bp, Zea mays
  Peptide Sequence Number=SeqID_50399
atgaccgaggttgctatacgacaaagtttgcccgagcgtggcctcaggcgagccggggggcgcccactgcctgaggggccctcggtctttatggtttgttctgaagacgcttgtcagccgtgcttaggtgcattggggcgcgaccttgcatccgctcgagtcgagtggggaggcacccagcccgccagccgcacttctgccagctccgccaattccggaaggaaatcctccacaacccccatcccggaaccgttccgccgcaccgcgggccgcttccatctccaggggcaggggatcttggagggggtctgctggtgggtccgagcagggcagcggcggcgttggatggagactggggcggcggcggcaccggcatcgagggcggacggcgtgcggaggtgcaaaatactcgtgccctggcgtttccagcccggcttcgtcaggcagccgctcaagcaggccgccaatgacgcagcggtcaacggcgacggaggtaataccgccggcgcgcctgatgctaaaagttgccgagcggatggggcggcgagcgacggcggtgagaccaacgttttccgagacgcaaaaaaattcggatcgggtagggctacccgcgggaagaatggggaagttgacggaggagaggagcattcggagagatgcactagcagtcagagtttgaagagtcctgatgtagaaaatggcggtcgccctggacccggagatgcatgcaatctgggcgagtctgtaaggggaggctgggtgaagagctccccattggaaggtactggaaatagcaggggtgcaaatggtggcgtcgaggctggagaggactacaatctggggagctctaactgtgatgctagttggaaggacgctcgcacccaggaattcaggggtgctggtgatggagcagcttgcgatcctgaggtgattgagagcaatgtaggagcagagaagtgctttgccaagggtttgaagaagccgtttatggatcagaccgggtcaaagagcaatggttcttctgctccaggactcgagtcagaggaccctgagggaaatgttggcttggaagattcctcttatcaagccgcaaaggggtgtagcatgggagatggagcagccaaggagaatgaagcaacagccaatggttgcagctcggcgactcctggcagcattggtaatggaacgtacgtccgcaagggacggaaggcagctgtaccatggagatttcaggccaggtacaagcgatcgttctctgatgcttttggctccaataatgaatctcctgatcttccagcatacatgtttgacagtagttcaacacagtgcaccccagcaactagaagcaccgtgcggtgttatgcgagtgctcattctggtgttagagtttcggctatgaataacttctcagtgaaaggtgatactgaatgtaagaagaggaaaactaataatgattatcaggatgaatcaatgctaaataatggaggtgtcgttgttagagaacgcatcatgcggtctctacaggatctccgtttaatttatcgggaccttttagatgaagaagataattctagggaaaaagtgcttaatgtgcggcctgatctaaaggcttacagaatcttcagggagcggttctgcacagattttgatgatgagaaatatattggcagtgtgcctggaatatatcctggtgatatcttccatctgagggtagagctttgtgttgttggtctccatcgcccacatagggtaggtattgattgtaccaagaaggatgatggtacaactgtggctgttagtatcgtgtcatgcgcacaatctcatgacatcaagtataatctggatgccttcgtatatactggactggtggctgttgcagtcaatcagaggatagagggtaccaacttggctcttaaaaagagcatggatactaatacaccagtccgtgttatccatgggttcaccacttttaatggaaaaaagaaatttcctgcatatatatatggtggtttataccttgttgagaagtactggagggagaaagagcatggagaccgttatgtgtatatgttccgactgagaagaatggaaggacaaaagcacattgacatccaagaaattctgcaaacagggaactctggatcaaacgacaatgttattatcaaagatctatcacgtggattggagagagttcctctacctgttgttaacaaaatatccgatgagcgtccaatgccctattgctacatttcacaccttcgatatccccgtaactaccggccaactcctccagccggttgtaattgtgtaggtgggtgctcagactcaaacaagtgtgcatgtgcagtgaaaaatggtggagaaatccctttcaatgataaaggccgtattgtagaagcaaaacctctcgtttatgagtgtggtccttcttgcaagtgccctcctacatgtcacaacagagttggccaacatgggctcaagtttcggctgcaaatcttcaaaacaaaatcaatgggttggggtgtgagaactcttgaattcataccatctggaagctttgtgtgtgaatatataggtgaagtgttggaggatgaagaagcacaaaaaaggacgaatgatgagtatttatttgctattgggcacaattattatgataagtctctttgggagggcctatcaagatctataccgtcacttcagaagggtccgggcaaagatgatgaaaatgaaactggatttgctgttgatgcttcagagatggggaactttgcaaaatttatcaatcacaattgcaccccaaacatatatgcacaaaacgtcctttatgatcacgaagatatcagtgtgcctcatatcatgttctttgcttgcgatgatattcgacccaatcaagaactagcataccactacaattataaaatagatcaggttcatgatgccaatgggaacatcaagaagaagaaatgcctttgtggctcggttgagtgtgatggctggctgtattga

SEQ ID NO: 8621 - DNA, 378 bp, Zea mays
  Peptide Sequence Number=SeqID_50400
atggccaccgccgttggaccgcctggcgcagcgatttgtcttcgtcgtggttcggttgcgtgttcgacaacctgggagttcaacggggctagcgaccggagttctcctgccaggtcgtggcatgcacctgatagccggtcatggtgggagatggacatggcgcagtcggccggacctggtgtcgggggggaagaactggcgccgccacgccctgtcgcttgggtggaatctcgggaggaagaaaggattcatgccgtccatctgttgatcgatggctcagatttggcgttacgtgccctttgcccaatagaactgcgaccatggatctgtgatccgatgattaccaacgcgtctgggtattttaaatctgtgccgtag

SEQ ID NO: 8622 - DNA, 387 bp, Zea mays
  Peptide Sequence Number=SeqID_50401
atgggccatgtcatgattctggtgttctttgtcaatctggtttcattctgtctgatgtcagtgtggacattctccaaattgtcaggcgatatccatgaagaggtggagactcataacagaatgctggaccgaatggggaacgatatggatacttcaaggggttttctgtctgggaccgtggacaaattcaagatggtatttgagaccaaatcaagccggaggatgggaaccctcgtcgcatcattcgtcgccctttttctgctggtttactacttgaccagttacttgcagttcaaatttgaattatccaaagaaattcaattaaatgaactaaatctaataggtatagcaaataatttgacaaatgtgccagaattggacatgtag

SEQ ID NO: 8623 - DNA, 993 bp, Zea mays
  Peptide Sequence Number=SeqID_50402
atgacggccacctccgcgttcgagtcgtccccggagatggagcggttcctctgcgagcggctgctgaacacggagcagcccatcgcggagcgcttccgggcgctcttctccctccgcaacctccgcggggatgcgccgcgccgcgccctcctccaaggtttagactttggcgtttctgtgagatacattttggtcagcaccaaagaaagagctgcaagggatccttctaacttgcttgcccatgaggctgcatttgcacttggacaaatgcaggatgctgaggctattcctgcactggtggcagttctcaaagatctttcgctacatccaattgtccgccatgaggcagcggaagctcttggagctattggcctggaaaagagcatccctgtgttggaggaaagtctaacaactgatcctgctgtggaggtccaagaaacttgcgagctggcactaggacgaatagaggagaataagaaagttaatggggctgagagtacaaccacttcaccctttctctcagttgatccagcgctgccttcaaagcatgggctttcagtagatcaattaaggggccttcttctcaatgagcaagagagcatgtaccaacgttatgcagctctttttgcgcttaggaatgatggtggagatgctgctgtttctgctattgttgcagctctgagcgtcaaaagtgctcttctacgtcatgaggttgcttatgtgttaggtcagctgcaaaacaaagccgcttcagatgcgctttctacagtcctgaaggatgtctgtgagcatccaatggtcaggcatgaagctgctgaagcccttggctcaatcgcagaccaagaaagcattgcccttttggaggagtttgcaaaggatcctgagcccatagtctcgcagagctgtgaagtagctctcagtatgctcgagtatgagagatcggggaaatcctttgagtttctcttccttcagactcctcatgtgcagtcctag

SEQ ID NO: 8624 - DNA, 561 bp, Zea mays
  Peptide Sequence Number=SeqID_50403
atggagttgggtctaacagtagacaggaagaaggacgacgagggtgcaccacgagcgtcgtcgtcgtcctcccctagctgcgaggccgacgacgacgatctgccgaagaagcagcagcagcgccccagcggcgacgacgacgagggaacaaggcagccgtacaagtgcaccttctgcaggagggggttcccgacggcgcaggcgctcggcggccacatgaacgtccaccgtcggcacaggggcagaccggcagctgtttctactggcgccgcagcaggaagcagtgcagccagtgtctacgactacgaccagccgtgctccaccacgacgactcctgttctggcgttcgcccggcaagctacgacgactcaacggaggccgcacggtctgcccctgttcgtcgcccgcggtgactgctgcgctttcttttcttcagcactggcaccgccgccggagacgacgtaccacaaaatctacgctctacttaccctaaacgggatggtaggggaggagcaggacttggagtcaggcttggaggtgcgggaccatgaacgagtataa

SEQ ID NO: 8625 - DNA, 1389 bp, Zea mays
  Peptide Sequence Number=SeqID_50404
gtgaagatccggcctgcagagggcacctcgaaggggaagactgttgttgcaggagttaatggggacgtgcacgggtctggggaggtgatgtcttcgtccgagctccgggaaacatctttgcgcatgctgaaggttgctgggggtcgatggcataggaatgaccctataccctgggccgctggagatgactattttacgtcttgtttggctcgtgagctgagaatttttccttacgggagaaacattggtgcttttgtgtcagcagtgatggtgaaagatcgtcaagatgtccagcggaagaagcggaaggtccctcttcggctggtggacccatgccgagatgctaaggtggtgcggccaagggcgaagggggtcgctccgtccgcgatgatgcctacctccgcggtgccggccgccgctgcaagtttgccctcgccgccgcacataactgagacggcggtgtcgaggaccggggggataggccaggagttgtcggtggacgaatacctggtgggcggagtcaccatgtttgacacccagactgggctgccgcctgctggggcggaggttgggcaactgacggtggtaccagctacgatgcccgccggtctggtgggtgcagcgaagggtgacacatggacttcgctggacccatggtcgaagttttgcgccgccgctgatggcggaggcgaacttgcctcggctaccgccgccgccggggtagctgcgtctgtcgcgcggcagctgcgatatgtgagttattattattattattatttaactgagtttggaaaatttcgatgtcaggtgacagccttcgccgaccaggttgctttgggggcgctgacctcgcagcttgtttccgagaggaaacaacttgagggtagggttgagtgccttcggacacatcataccgaggcaatcagggacaagttggtggccgagaataagagccgaaaccttctcgagaagactgcccccttcgacaaatcaggggaggaggtggggacccgcttcttagggtggctgcaggatgagctagagtcgctcccgtccattgtgatgggcctcatgtcctatgcgtctcttgtgacctgtgagggggctgtgaatgctttgtcctgcgagggatgtaggcattttgagacattcgatcggttcaacgaggaattcaatgctggtgtattccagaccgaagacgacgtgttgaagcgctctgtgggggcgctttacgataggatgtgggaccctcatggccgcggtgttgtccgagagagggccaaccgagcgctagcacatgcgatgagggaagaagaagtggaggacctcgccggcctcgagggctcggcggcccggaaggatgatgcggtggaaacgaattcaagctga

SEQ ID NO: 8626 - DNA, 1111 bp, Zea mays
  Peptide Sequence Number=SeqID_50405
atgcctctctcggcagcttcttccatcctcctcctccatgccctggtctccctcacccttctcctcggcgacatgacgaccacgacacctgccgccgctgtcccggccgcggtggacgtgaacacgacggcgttcaccatgcatgactctgctgcgtcggcgtctccccatggcgccgaaaactttgagatgtactactgcttcctctgcacggagcgccacccgctgctgattcactactgccccatctactgggacgagtgccacctcaactgttgggatgatgacacgccgacctccatggtcacggtgcagggcaaggagtgctacgtcatgaaactgtacatgtccggtcgctacgtcatcgtccaacgcctgagctgcgacggcgtcgcctcgtgcttcctcacctgcggcggcggggagctggccgacaaagttgctgccggtgccatgggaaccacggcgtcggcgagcgcggtccagctccaggggaacgctctgcctttcgagctgtgcggcacacagcaggttccagcttcgatactcctcctcctccacgcctgctccctgtccctgctcgccgccgcaagagtccccgacccggtagaacatggcgacgtgaacacggcgatgcttaccaacggctcggcctcggcgacgccgtcgtcccctgacagcagcagcaacggcaacttcgacatgtacttctgcttcctctgctcggggcgcgacccgctgctcattcaccactgccccatctactgggacgagtgccacctcatctgcgacgatgacatgtccaccgccactcctactccacctgctgttgcagtgtcgtcgtcgtcgtcgtcccgccccgtccccatggtgcaggtgcagggcgatgatgactgctacgtcatgaagctctacatgtccggccgctacgtcatcgtcgaacaccggccatgcaaatacatcgcctggtgcttcctcacctgcggcggcggggagctggcggcggccgaccggaaagccgtcacggccactgcgatccaggggacctctctgcctgccgagctatgcggcacgcaggtggtcaatgctccaccatctgctgccgctggtg

SEQ ID NO: 8627 - DNA, 933 bp, Zea mays
  Peptide Sequence Number=SeqID_50406
atgtcttcaccgggagtgtgcaacgagccttctgtacgagcagactaccacaaattgttcgatgctgctcagggtgtaacagaggtgaagtttctgatgtacctgaagcggatagttgctcggttgtgtcagcttgctactttcactaataacttgcgattaaacgtgcagttactcaaccaagagcagaaaaatcgattcaacatatgggtgctgcatgcagtggtggctaacgatcttttcactgatgacagctttgtgttctcaaaggctgtaggaaagatcaaagatgccatctcagccctgccagtggcaacggtggatgacgacaacgacgaagctgcggcccttgctgctgcgagcaaaactgatgtggcgacggataacgaagcaggtcatggcgtcccagccgcagcttctgactctgtggtggatgatggcgcgcatgccgtggccttggagccggaagaagaatcctccgaccctttcggtttagatgggcttcttgagcacaggcctaagaagacgtctgggagagctcgagagaaggcagtcgcggctctgaacagaaagacggtcgaggaggaagcaaagagggttctcaagtcgcagcgggaggcccttctgaaatgcctggaaatagccgctcggcgctacagaatcccgtggacacagaccgccattgacattttggcgaagcaggcgtacgacgacgcggcccggttcacacggcggcagcgggacgcgatcgctaagctgtggaactcgatcaaggagcagcagatccggcggaagcaaggcaagtcggtgagcgggaagctggacgtgaacgccttcgagtacctccaggagaagtactcccgcgagaagatgagcatccggcacagcgtgggcggcggcggcgatcgtcgcgcgacgcagtggctgggctag

SEQ ID NO: 8628 - DNA, 207 bp, Zea mays
  Peptide Sequence Number=SeqID_50407
atggcggctgagctccctctgctagcgcgtcccctgctcctcccagccggcccgagctcctgcttcccctccgtggagcacgcccctgcctcctactccccgagctcgcccctgcgctcggatttctccctcggccatgtcatcgcccagctcgctgatggccaggctgttcgccttcgattagctcaccatgacgccaacatctag

SEQ ID NO: 8629 - DNA, 687 bp, Zea mays
  Peptide Sequence Number=SeqID_50408
atgccgagaaatatggtaaatcgttttttaggtgttacagctgggggtgctggcatccatgtagaggtcctggatgatgttccttcagctagccttcttgctgggcaggaaataacccgggcagtttcccatgcatcttcgacctttgagggtggcctgattcgcgaggacatctcggtccctgatgttacatgcgagggttatccagccctcgagggtacgattgaggataacctagcccctgagggtgttattgaaggtggtccaacccctaagggcgctgctgagggtgacccagccgccgagggtcctgaacttggctcttcttcggctgcttctatggatgttcatgttggctcaccatcggttcagtctgaggaagctgcagtgatgagtcttgatcttcctacttctcttgttggcctagctactttagaggtcagtaattcgggtgttgaggatccgctgcgtgttgttggagccgaggtcccactaggcgtcgccctgagcatgcgtttcaatccttctttggtgctcaaacctgctctcgatatttcatctaccagtgtctcgccgtttgatggtagctcaacgcctccggctttgggatttcatttgttcctttctagccttcagatgtacctccaatttgaaggaaatgaaagtacaagcgtgacgcaaaagtga

SEQ ID NO: 8630 - DNA, 534 bp, Zea mays
  Peptide Sequence Number=SeqID_50409
atggaggtggacgccactgccttctgcccgccgccccagcccgcgcctgccgcctccccggcttcaaagccgcctgcgccggtgctgggcgccggtggagcggtcgcgccggtggcagggcacggccgcggcggagggaggcagtaccgcggcgtccggatgcgcaagtggggcaagtgggtggcggagatccgcgagccgaacaagcggtcgcggatctggctcgggtcctactccaccgccgtcgccgccgcgtgcgcctacgacacggccgtcttctgcctccgcggccgctccgcgcggctcaacttccccgaccagctcgacggcgcggcggtggccgacaaccccgaggacggcgcggggctcacagccgccgccatccgcaagaaggcggccgaggtcggcgcccgcgtcgacgcgctccactgcggcggcggcacctctccgcagccgctgtcgttccatcgccgccgccccaagaaccccgacctcaaccgggagccaaccccggaaacctcagacgacgagtaa

SEQ ID NO: 8631 - DNA, 255 bp, Zea mays
  Peptide Sequence Number=SeqID_50410
atggcggccaagcaagccactgaggacccaggtgttcagcaggaggaaattgctgggcatgagctcgttgaaggcaagggcagtagggaagtgccttacacttcacatgagctcccacctttggtgaagagcaggtcgttcaagaggagccctacaatgaggaatatgagcttatctaggtggttttcaaaggggggagggatctcagggagaaagaagaagaagccggggggttttgagaagtcagagactcag

SEQ ID NO: 8632 - DNA, 282 bp, Zea mays
  Peptide Sequence Number=SeqID_50411
atgacgcgcaacagccggcaacagagttttcacaaacatgggatggcggcgagcgtggagtattacttaccgagatcttgggtgaggctagagccacgcacgacacgcttacgggttgcgcccatgcaccaccagggacttggtgccggcgagctcagggttctccacaaagtcccccacgacgtcggtggtgaaaggaacaaactagagggatggtcgacttcttatatcgcagtcgaggcacgtagcgaggggatctcgcccaagtggttcgtcaactga

SEQ ID NO: 8633 - DNA, 393 bp, Zea mays
  Peptide Sequence Number=SeqID_50412
atgccagtgaccctgcgcccgatttgtttctatgcgatgacaggaggatggtgtatatcatggataaactctcacctgggatgtaggcacagggttccccgcccacggtggggtgcggtttcacggcgacggtgcaccactggcgagaagttcgcccagtgctggtcaccaagcccaccccgtgaagatgctatccgcagaggcgaacactggcgaccacgcacacagccgcccaaatccaaaactcctatgaatccagcgcatggcgatagcggtgtcagcggcatcgaagcactccctctctgctctcctcttgaggccggatcggcggcttgggcaagaatcgcccacgacggcggtcggatatctctgctacccaacggcacgagctag

SEQ ID NO: 8634 - DNA, 324 bp, Zea mays
  Peptide Sequence Number=SeqID_50413
atggcctcgctggttcgtcccgaccgtttccagaccgaggaggcgctcgacacgggtctcctccccttctgctcccaaagccgctcccaccggcgaattcggctcccaacaataggcgtctgctgggagtggtgccggcgacctgcctccgcccgccactgccgaggcggcgccgtcgggtccccaggttccgtctgccactaccgaggcagcgtcgcggggcccccaggttccatctgccactgccgaggcagcaccatcgggcccccaggttccgtctgccactaccgaggcagcgccgccgggcccccaggttccagctag

SEQ ID NO: 8635 - DNA, 510 bp, Zea mays
  Peptide Sequence Number=SeqID_50414
atgctcacgcgctgcacagatagacgacgtgaggctcgttctggcgagcgcgacgcagcgaagggcgtcgctgctgctacttgctgcggcatttcgtcgagcacgccgggggcgcgacgcagaggagatccacggccgctgctgcaagtgcgggggcacggaccgcaggatgaacatgtgaggaggagctcagcgagcgcagtccaggcaccgaggcgtggatggcaagggcagagcagagaggaacggcgtccagcggcacagggacagtggtcgcaagctagtgaaggtgagcttgaccacatcagagaaggtcggacgctggacgaagcaggcactacaggaaaacacttattcccgtcgaccatgaaccgccatggagaaggggaaggcgcgctggagaagatgggagaagagagctcggcggccaccatggctgggtcgtggagcagagggaggcgcagaggccgacggccaaggggtgcgctggggctcggcggccatggctga

SEQ ID NO: 8636 - DNA, 372 bp, Zea mays
  Peptide Sequence Number=SeqID_50415
atggaaatgggaatagaaaaaaagatagagaaggtgtggactgtggagagagaggctgacccagaattggaagctatcaggaagagaaggatggaagaactaatggcaaaacacggtggcggtggggcaaatcaacaaaatgcaagccaacaaaaagctcaggaagacgcgaaacaggaagctgaggaacgccgacagatgatgcttgctcagatattatcttctgaagccagagaaaggatctcccgcatagctttggtcaaacctgacaaagcaagaggggtggaggatgttctgctgagagctgctcaaactggtggaatatctgaaaagattcagaggcgtcgaagtgtccttgacgacgacgattag

SEQ ID NO: 8637 - DNA, 675 bp, Zea mays
  Peptide Sequence Number=SeqID_50416
atgccaccgggccttgccatcgccaccgtcgccgtcgccaccgccgccctcgtcattgcccttgccatcgtcgtcatcgcctttgccatcgccttttccatcgtcgccgccgtcgtcgttgccgccgccttcgccaccgtccctgtcgccgctgcctcatcaccgtcgtcgccactgcctttgtcgtcgtcatcgccactactgtcgtcgccctcaccactgtcgacctcaccaccgctccactcctcagagtcagaggagtcctccacctcctccgaggaggcctcctccgagtcgtccgacccaccgagcctcgtgcgctcgatggatcaccagtatgcccgcgctgcgatggatagtcctccacgggggacgctaggcaggcgagcgatcatactcgaaagtgacctcctccgagtcctccgagtccttgaagtccaactagggaggactcagggggcgcttgcgcttctcatcagcacggtggggccctgtcttgcccttcttgcctccgtccatggtcgtgcagaaggaggggaaatgaagaagaaggagaaggcaagtgataaagaacgagtggagaaagcagccagggcgggtgggctatttatagaggccgggaggcgaccgtccacttcctaccctgatcaccggacagtcacaagaattcaataa

SEQ ID NO: 8638 - DNA, 366 bp, Zea mays
  Peptide Sequence Number=SeqID_50417
atggtcggacctgggcgaggccacaggcagcaggggaagcgacggtccggagagcagctcgctggagaggtagaaatggcgcgtggaacagagaggcgagggcctgggcgtttcctagccgcggcagggaagagaaaaagggggcgccatggccatggaggaaaggagctgctgctccctgcgctgagaagggggtgctgctgctcgcctatagggagcgagcgccagggggaaagcttgcctgggcgcctgtgggccagtgttgagggaggagggatggacgccatggctgttggcttgctccttgctggccgccgtgggggaaccagggaggaagaagctgacgcctgctgttctatcgtgtag

SEQ ID NO: 8639 - DNA, 525 bp, Zea mays
  Peptide Sequence Number=SeqID_50418
atggccggacgcggcgatttggcgacccaccgacctaatccgagcgaaactacaccgaaggaaagaggagagggaggcgaaataaccagggcggccataccagtcttttatcgcgagggtgatcccgacgacgtgaaggcgcggttcctcggccttgttcgacgtcgacgagcgattcaacgctccagaggcgaagacaatcccgggcgatccttgcgctggcttcaggagatcacggaggaaattgaggattactctctactattcttagtatacaacttggagtattacagtgaggcacagatctatgtcgtgagaaacaacgacttgcaatcgccgacgccctggcaccctaatctgagcacgattcggcatgaattgaaacagagaaggtatctaagagaaggaggaccttaccggagtattggacagcgtaggagcttggtcattgacgaagggcgtcacactatgtcacacccaactctggccgtagatggtgattcgttgggtttaccgatggaatga

SEQ ID NO: 8640 - DNA, 321 bp, Zea mays
  Peptide Sequence Number=SeqID_50419
atggcgagcgtaggagacttccggcgaacagcaaagactgggcatggcgatggccgacacctgccattgatggcgagcaacaatgggaaagacgagagggaaatacgcgcgagtggggagggtgacggacggtcgacttctctacggcgcaggcgccgggagtcgaggagcagagcagcagtcacgaagtggcggtcggcgcttcagctttctcatggcgtcgtcgtcgtcatccgattcgtgcatgcgggcaaggggctggaagacaagcagggctgggagggcccacacatggccgacggcttagattcttttttctaa

SEQ ID NO: 8641 - DNA, 627 bp, Zea mays
  Peptide Sequence Number=SeqID_50420
atgcaggaatcccttgcaggaccgccatcgcagcaaaatcctcccgagggcctccctacactgaccactcccctactgcccttgcccctttcagcggacggcggggatgaacccaagccaaaccggtatctgtgttataatcatgaccgtgcattcagatctaacggcagagacttcctctcccagctcctacgcacgaggtcaccagccccgggcggcgccacccgcgccagcgccagtgatcagccggcgagcagccaaaacagtggctcgcgcattcctacccgtgatcgagtagctaaaaacggagggaacgacacaaccaacattatgcacgagatcttacccctaaccggcgtgccagagtcgcagcccaacgataagacttggtccgccgtgaagaagaagctccgacgagaaattaaccggacctcccagccaccagtgcacaatctccgggccaccgagagcttcaccacgaagcgcccgccgcccccagctccaatttcagcgacgacggaccgctggtggcggcgcgatggattcctccacgcccacacccgcgacgaaatcgccaacgatacgcaacagtgttccaggggttgggggggtggggtggcgtactag

SEQ ID NO: 8642 - DNA, 258 bp, Zea mays
  Peptide Sequence Number=SeqID_50421
atggcagacgaggctattaggcagaatgaaaaagaatatcatgttgctttagaagaagagaggagagctgaagaagccacggaacgcgaaaggcttataaccaaactttttcctccttcaaagtcgtacaaccctgaggccgatccagccctgaagggcgctcttgatgtgatcaggataacaaatgaagcggttgacaaagctgtggatagactcctaaacaaagctactgagaaaatcttgaaggaggatgattag

SEQ ID NO: 8643 - DNA, 336 bp, Zea mays
  Peptide Sequence Number=SeqID_50422
atggccgagctccatgttcccctgctccaagggcgcgcaacccacctcccagcgcccttctccccctcagctctggtggtgggtgctcttgaggtcttccatggcgttgcctccctgttcatggcacagaaaatctcccagccgatgctctccctctgctgcccatggcgtctccttcccttcctcaagcaagatccaacgcgcacacgacagcagcaggagctctccccctcccatggtcgcgagctccccaactggccgccatccatccctaggctcgacccctccctgcaggcgagcagcaacttcggccagcctcctctcatcctcccctag

SEQ ID NO: 8644 - DNA, 1947 bp, Zea mays
  Peptide Sequence Number=SeqID_50423
atggcaggcaccggcctagatccagcagagtattcccctgaggatgttggtagccatctatgcataaggagtccctggatgaagctcgaccagctgacacaagctaacccactctcgcccggcgacgtgctcatctccaaggacggagcctttgctctcggcttcttctccgcaggtaactataacaagagtttatacgtcggcatatggtacaacaaggtgccagagcacaccgtggtgtgggtcgccaaccgtgacagcccagtcatcgccccttccagagcgaagctcgccatcaccggaaaaccagagctggtgctgtctgactcccaaggacgcatccgttggacgacgacgaacagcgccgcagctgggggcgctgacgcttttgccgtgctactcaactcgggtaactttgtccttcaaacgccaaccggcgagaccatatggcaaagctttgattacccaactgataccttactcctaaccatgaggttattgctcaatcacaagggtcaagtgccaactcgcatcatttcttggaagagccctgatgacccatccactgggaatttctcctatggaattggtcccaactggaaccttcagttcttcacttggtacgggaccttgccgtacagccgctcaaatgcgcttaacgatgcatctatgtccagtggcatgtacctcagcagtggtgcctccattgtataccaagccattgtcgacacagggaacaggctctactatatatacacagtctctgaaggatcaccctacacacgtatctggcttgactacaccggtaagatgaggactcagagttggaacagcaacacatcatcttggatgctcgtttttgaacgcccccattctagctgcgatctctatgcccagtgtggtccattcggtttctgcgatagcacaggcgatgtcccaacgtgccggtgtcctgaagggttcgagcccatcgatggtgtcaactattcgagaggatgccggagaaaggaggcactgagatgcgggaaagaagacagcttcgtcaccttgccagcgatgaaggttcctgataagttcttgtacttgcgcaacagaagcttcgaccagtgcgcagccgagtgcagcagaaactgctcatgtgtagcttacgcttatgacaccttgagcctaggtgacagtaatggcgacacgtcgaggtgtttagtttggactggggacctcattgacatggagaaggccagcttccatggtaacttgtacctccggattgctggatctcctggtcgacgacaaaagaagaaggttcagaagagagtgatgctagaatacttgaggtctccggatgaaatgggggataagaatatagagttcccatttattagctttgaagacattgctgcagcaacagatcatttctctgactccaatatgcttgggaagggaggttttggcaaagtttacaaggagatgagccctaagatatcagattttggcatggcgaggatattctttggcaagcagctccaagcaaatacaaaccgagttgtagggacatacggttacatggctcctgaatatgccatggaaggatccttttcggtcaaatctgacacctacagctttggtgtaatactgctggagattgcatggaacttgtggaaagatgggaaatcagaacaaatggtggactcatttgttgtggagagtaattgccctcttgatgaagtttcgcgatgcgtccaaataggtctcttgtgcgtacaagatgatccaggctccagacctgtcatggcagtggttgtgttcatgctggaaaacagaactacgccactgccaacaccgaagcaaccttcatattttgcacaaaggggttacaagccccggaaggctggagaccacagggaggtctccactgacatgagcttgacagcacttgaggctcgttag

SEQ ID NO: 8645 - DNA, 1041 bp, Zea mays
  Peptide Sequence Number=SeqID_50424
atgggggagacaaaggagaatgttgttgagctattcccctgtgccaaaaataagtcggtgggtggacggagaactggttttatgtgcgttgtgctagagaggctgagcttgagtaggatgctgctttacatgggggcttcgtccgcctcaaccatgtttttagcttggtgggtcttgacaattgatccgaaggagaaggcctctgcccagatatatggtgtggtgaatctggttgggcgatcaaagaagtggaaggctcgaccatccgaggcgtctacccccacaaggccccttaaagaggtaaaaaagggctccgttgctaatgttgctggggcaaccgacggtggtgttgtgcccctgaccgttgaggactttgatcttgatgatgtggagatgcttacgaagtcacccctgacggtgccgccgctgagtaggaatggtgtttggtgtcgtggggccttcaggtgcctccgcatcggtggctgcgtcaagggaggcgccgtcggcgaactcctacgcccctgcgcacgtgcggaccgttcggcccgtcaggcagggaacccgagccctacgtcaggtcatggaccatccacggctgtgcagagagcactgtcgccggttatcatcgcaatgattagcgcccggatcagcgccaacacactttttggcaactccgctgggatagcacgtatagacccatcaaattgcccctcattggctagttcaagggataactctaacatctcccgcaacaatatcatagagccgacttgggaaaccttgccggctgacgaacagctccagttcgaggagcacaaggagcagctgatccaagaagaaaaggtgaagttcctggccaacttcaaggtggacaggaacaacaaggtcattcggcaatgggcgactgatctggcttcgctccgacccacaacggatacccccaatggagcagggaagggggtttcggcaaggggcacggacggcgaggcgaggctcgagctccggcgtggcggctcgacggggcatggctctggcgtgtag

SEQ ID NO: 8646 - DNA, 291 bp, Zea mays
  Peptide Sequence Number=SeqID_50425
atgggggatcgcgctgccgaggtgtggacgtacatccgggccatcgagcgctccgggctcgaaggctcggatgagtcggagatctcctcagacgaggagaactcctccaactcgtctgaggaggagagcggcggtgacggcgacgacgagggcgacggcagcgatggaggtgacggcggcgatgacggcaagggcgacggcaagtgcgacggcagtggcggcaagggcggcggcaacggcaaaggcagcgtcggcatcagcaaggccagtggcaaagcaccactggtttaa

SEQ ID NO: 8647 - DNA, 441 bp, Zea mays
  Peptide Sequence Number=SeqID_50426
atggcccccaagaaagcgacttacaaggccaccacctccctggacaatgctgcgaaggaggccctcaccgaggagggcaacattggaccatctcccggaaaagacttcgggaccagctcaccaatacaagaagtgaagggtacctcggccgatatcataatcgaggtcttcgacccgaagctaccaaagacgtcagagcgaaaggctgcactgtttaaaagagggctcgttgtagcctcacgaagacgcccctcatcggctcggacagttctgaacaacgatagtcctggcgaggtcgaaggcttggcttcgcatggcgaagggtgtcacgcgtgggtgaagatctcgccacccaacggtggggcccatgctacatttcatcgtcatttgggcccatttgtaagccctccttggggtaggttccgtagtacatctaattag

SEQ ID NO: 8648 - DNA, 195 bp, Zea mays
  Peptide Sequence Number=SeqID_50427
atggcctacgacgagctagatgactggggaggcgggcgcgggtctccggcgaggtcggacggcgtgggcagagcgctagcgagagcggggctgcgtgaaatgaggcaggggaggtgttacacccgtgcccaccgtgctagtcatctagcccgccagaagccgtgccaagccaccccgagttctgccccaaggtga

SEQ ID NO: 8649 - DNA, 414 bp, Zea mays
  Peptide Sequence Number=SeqID_50428
atgggcaagagcaagaaaggcggaagctcatcgcaccattccggcgacaagcggaagcgcgagccgactgctccctcggaggacttcggcgattccgagtacttggaggaggagttctcctttgagtccgaggggtcactagtccatgcctctcccccggtgtcgtccgatgactcagacgactcccaggggatcgccgccaagggctcggatgagtcggaggtctcctcggacgaggagaactcctatgacttgttcgaggaggggagcggtggtgacaacgacggcgagggcgacagtgacgacggaggcgacggcgatggtgacggcgatggcggcaagggcgatggcaagggcgacggcaagggcgatggcggcagcggcaaggccagtggcaaagcgccgctggcttag

SEQ ID NO: 8650 - DNA, 1116 bp, Zea mays
  Peptide Sequence Number=SeqID_50429
atgccggcgacggcggggcgcgtccgcatgcccgcaaacaaccgcgtgcacagcagcgcggcgttgcagactcacggcatctggcagagcgccatcggatacgacccctacgcgcccgagaacgacaagcaacagccggggcggccttcgtcctccgtctccgccaacgccgccgccgcagctgccaacgacgccaacgcagccgccagcgccgccgcagcttccggatccggctcgggcgatggcaacgcctacaccagcttccagggccttctcgcgctcgcccgcatcacaggctccaactccgatgagacacgcggcgcctgcaagaagtgcggccgcgttggccacctcactttccagtgccgcaacttcctctccgtcaaggacctggacctggacgacgccgacgcccaggccgctgcacaggcggccgcgcaagccaagttcgacgagataaaaaagaaagctgctgccggtggggatgcagatgatgcttctgatgatgtggaagaggacgaggacagcgattcctctgattcagacatcgaccctgagctggagaagataattgctcagcgcgagcgctccaggaatggagcaaggtggcccaggaaggaaaagaagtcgtccagccaccaccataggaacagcagcagcaagagaaaatcaaagcacacaaggagtaggagtgatgatagtgaggaggatgaaggcagaagaggccgggacaggaagaagatgtccggcagatcgaagaagcatgaaagatctgatgaggctagcagcgatgacactgattcagatagacagaggcacaggaagagcaggaaggacaggaagaggaggagccaccgcaggagtgacgacacgttggatgagaaggatgtatctggaggtgaagaaaggaggcatcaacgtcaccagcggagccatcactggagggatgcatctgactgtgacaatggtgacagtgattctgcacatgacaagaagcaatccagcaggcggaggaggcattgccagtcagaaaacagtgggctagatgaggatgagcgacatgaccaccggggagcaaagcgatcacggaagaatagggaccacaagaggagctaa

SEQ ID NO: 8651 - DNA, 414 bp, Zea mays
  Peptide Sequence Number=SeqID_50430
atggaaatgacaaccgcgagcggcgtcacgagtgatgggtcatgcgattcaaccttccagctcctgctcctccgaaagattcgtgctgtggctcgaacttccaccgtcgtcgtcgtctccgtcaagggtgcacctctagctgaggcacaggggagggatgcctcccagactccacctcatgctgaggcgagggggaagagtcctgctgctcctgctcttggcattggcgctcctactcctcgtgcaggtggcagtctctccaggtggctcgacagtcttgtcaccatgcgtcgcagtggacgctccgcaaggcgagagggcaagaaaaggatcaccgacttacgtgcaatgcatctaagacggaccatctataaaagacatcgtaagcacaagagtgagaatagaactacatga

SEQ ID NO: 8652 - DNA, 501 bp, Zea mays
  Peptide Sequence Number=SeqID_50431
atgcagaataggaggaaactctggcacacaccggatttgcaattagtgtctgctcaagctgagccaaccatcaatgatgaagttgtggatgctgatttggtcgatgaggtggagtgtggtggcatatctaagttggctaagtatgtcatggaggacatggaggaggatgaagaagaggaagaggaactctctctagtccatcgtgagtggcgctcaaaggctcagagtgattcttcgagccttgccgctctggcgatgacgatgaaaatccaagccttggcaatgtcggctgtggagtgttgtcttgaagaagttgtcccagaggccttgttgtgtgagctgcctaagatccgcattgtggacgtttgtgtcaggcgttcggacgaggtccccacagttggtttgtttcctaggccaggggtcagcttgctgatttctcatgaggtcaatgtcacggttgattgtcctaccatcccatccctggcccccaagggtgtgaag

SEQ ID NO: 8653 - DNA, 381 bp, Zea mays
  Peptide Sequence Number=SeqID_50432
atggcttcggttggcggctctgccgcgggcgggcagggcaaagggcgcagagcggccggttcggcgagcggcctgggcgcgcggtgcacggtcccggcgctggacgtcgcacggtcgctggcgcgcggctgcagggcgtcgcggctcgggtccggccggggtcacgggcggctggtgcggccaggtcgtgcaggtgagggcggggcaggggcgctgctccacgggcgcggagcggccgggtcctgggcggcgcgcacgggcaagcagagagggaaagatggccaggggaggggcggcggctatgggaagaggagccagggtggcggctggctgggagatagagcagggtgggcgcggcttagggttaggcgttgggcctaa

SEQ ID NO: 8654 - DNA, 432 bp, Zea mays
  Peptide Sequence Number=SeqID_50433
atgaagaacccgccgacgccactgatggccatgaagcacccccggtcgtctcttgctctccctcccttcccctctataaaaaccacagccgagctcttctttcttcctaccccaagctcgcttcctcctctcggttctctcttcctcggaccctcgctgttcgtcgtcgtgaagttcgtcgccggattgtccgcgcaacacctcatcggagccccgtccgacgtcaagaacccctgcccacacgcgctgcagcaccaccgctcgctgtcgtgcctcgccggagacgtgcccgcacccatcgtaccgagccttcgccttgacgcccgttcgtcattcgccgtcgtccgttcatccctgcgcatgaacgaaatcacaaggtggaagacaactcaaaacatgaattttatttttgtacagtatgtgttgaattaa

SEQ ID NO: 8655 - DNA, 381 bp, Zea mays
  Peptide Sequence Number=SeqID_50434
atggcttcggttggcggctctgccgcgggcgggcagggcaaagggcgcagagcggccggttcggcgagcggcctgggcgcgcggtgcacggtcccagtgctggacgtcgcacggtcgctggcgcgcggctgcagggcgtcgcggctcgggtccggccggggtcacgagcggctggtgcggccaggtcgtgcaggtgagggcggggcaggggcgctgctccacgggcgcggggcggccgggtcctgggcggcgcgcacgggcaagcagagagggagagatggccaggggaggggcggcggctatgggaagaggagccagggtggcggccggctgggagatagagcagggtgggcgcggcttagggttaggcgttgggcctaa

SEQ ID NO: 8656 - DNA, 432 bp, Zea mays
  Peptide Sequence Number=SeqID_50435
atgaagaacccgccgacgccactgatggccatgaagcacccccggtcgtctcttgctctccctcccttcccctctataaaaaccacagccgagctcttctttcttcctaccccaagctcgcttcctcctctcggttctctcttcctcggaccctcgctgttcgtcgccgtgaagttcgtcgccggactgtccgcgcaacacctcatcggagccccgtccaacgtcaagaacccctgcccacacgcgctgcagcaccaccactcgctgtcgtgcctcgccggagacgtgcccgcacccatcgtaccgagccttcgccttgacgcccgttcgtcgttcaccgtcgtccgttcatccctgcgcatgaacgaaatcacaaggtggaagacaactcaaaacatgaattttatttttgtacagtatgtgttgaattaa

SEQ ID NO: 8657 - DNA, 261 bp, Zea mays
  Peptide Sequence Number=SeqID_50436
atgaggaatcgcatccacgacgtggttgaggcggccgtaatcgaggacttctactgcgagtccaatgactcagcctttgtcggagccatcctccaaaaagctccgtcaacctcggaacaacttttccgagaagcggacgtctccatcaacacgagtgggctcgagatcttatgggacaagccgaggggctcgtttgcaaaaggtgtggccgaaagggtatggttaagtcctggccgcccgatcaagcacgagcggcgctga

SEQ ID NO: 8658 - DNA, 285 bp, Zea mays
  Peptide Sequence Number=SeqID_50437
atggtagctggagagcaatctgtcccagaggcgctcttggcaccttcgtcggatgcgctagagacaagacttgatgatttgactaaggcagcaagggccaccacctgccagaccgacgctgctgtcgtggatccttctaaggacaacggagatatcagtattgaagaagacaacaccaacatttgtccaacaaagtcgagtcatgtggacttcggcagttcaaagaccaaagaggggcacattgaggtacttaatcgatttggttatattgacaacattgactag

SEQ ID NO: 8659 - DNA, 537 bp, Zea mays
  Peptide Sequence Number=SeqID_50438
atgcagaataggaggaaactctggcacacaccggatttgcaattagtgtctgctcaagctgagccaaccatcaatgatgaagttgtggatgctgatttggtcgatgaggtggagtgtggtggcatatctaagttggctaagtatgtcatggaggacatggaggaggatgaagaagaggaagaggaactctctctagtccatcgtgagtggcgctcaaaggctcagagtgattcttcgagccttgccgctctggcgatgacgatgaaaatccaagccttggcaatgtcggctgtggagtgttgtcttgaagaagttgtcccagaggccttgttgtgtgagctgcctaagatccgcattgtggacgtttgtgtcaggcgttcggacgaggtccccacagttggtttgtttcctaggccaggggtcagcttgctgatttctcatgaggtcaatgtcacggttgattgtcctaccatcccatccctggcccccaagggtgtgaaggtagggtgctctcctgttgcttcaatggaggtttag

SEQ ID NO: 8660 - DNA, 243 bp, Zea mays
  Peptide Sequence Number=SeqID_50439
atggcgcgatttgttgagcttgggctgagtcaagcgaattggggaagaggaaagcaccagacaggatggtcccacgcgcaggcgatgaggaggagaatgacgagacggccccacgcgtcaataactcagaggaaaataaggagcgagcttatgggtcggtggggtgtatttggcccaactggtaaagaaggcgtcatggcagatctccaggagttccagcacttcgacgagttcgaggattag

SEQ ID NO: 8661 - DNA, 390 bp, Zea mays
  Peptide Sequence Number=SeqID_50440
atggacgccctgacgcgcctccaccgctccctcgtcggcggcgacgacgaggatcagccggaggactccatccttgctgataccgaagacctctgctccctctcccctctccaggttaagcaataccccccctccgagacatcggaatgctccaaggatttcatggctctcgtttgcatcgatctgatcctgtattggccgtttgcgtgttcagaggatctacgccttcgcggcatgtttggtggccggactcaccctcatgatcttgtcttttattgtcttcgcaagacctatcaaattcgcagtaatgtttacatttggaaacatattggcagttgggagcacagcctttgttatgggccctcaaaaacagctaaggatgatgtttga

SEQ ID NO: 8662 - DNA, 249 bp, Zea mays
  Peptide Sequence Number=SeqID_50441
atgaagatcgaggtgggcgtgaaaggtggggaaaaaggcttgggcgtccatgtttttgaagctgctggccatggtgaggatgactggtcgacgcagctgggaagaccaagcgtaatcacggttggtacaggagttggacaccatgacgagttggagaccgacagtcggtccaagcagccatctgatggcgtatgcaccagggctaggtccgacgagatggggaaaaagaacggtgcatggcgcagatag

SEQ ID NO: 8663 - DNA, 219 bp, Zea mays
  Peptide Sequence Number=SeqID_50442
atggacaataacagcgaaggtttaaggatggccgagctcggagatgcgaggcgggagtcccagagggccccggatttatgcccgggcacacgggagagaccgaccgcggttccctggccgatccgcgcggaattctcagaggctgttgcagaggatggttacggcaaggggatggagctgacgacgtggccccacatgtcactgacgctggttcactag

SEQ ID NO: 8664 - DNA, 114 bp, Zea mays
  Peptide Sequence Number=SeqID_50443
atggtgcagtccatcgtctccatcgacaagatttgtgccatgcttgaggtattaggccatacgagaggtgttatccttataccggtactccacatgaaggttcatggagcatga

SEQ ID NO: 8665 - DNA, 315 bp, Zea mays
  Peptide Sequence Number=SeqID_50444
atggcggcatcccagttggcgaattggatctcgaatccaccacgacggagtgggcactcacagcgaaggtttgaggatggccgagctcggagatgcgaggcgggagccccaggggtcccgaatttatactcgggcacgcgggagagactgaccgtggctccctggctgatccgcgcggaattcgcagaggctgttgcggaggatggttacggcaaggggatggagctgacgatgtgcccccatatgtcactgacgctggttaagggagagtttgttcttattactcttggtgatcaacatcacctcaacggctag

SEQ ID NO: 8666 - DNA, 318 bp, Zea mays
  Peptide Sequence Number=SeqID_50445
atggggtctggatttattaggtccacttccaccgacacaaggtgccaaaggttcaacacaaaccaatcaaaagaacaagttaggcttcaaaagaaaggagcaaaaaggaaaccgaagtgtgccctggtctggcgcaccggactgtccggtgtgccaccggacagtgtccggtgcaccagggtgaatcagctcaaactcctcagcttcgggttctccaggcgcagctctgctataattcaccggactgtccggtgcaccagtggagcaacgattatctacgcgcaacggtcgactctgacagggaacgatgcagcatag

SEQ ID NO: 8667 - DNA, 381 bp, Zea mays
  Peptide Sequence Number=SeqID_50446
atgccgctgaccaacccagaagcaatgctgaagacgagagatgagatagatgccaacatcggtagttccctgctggtggaggagttagatatgacgaacctccggttcatccaagcgcatgaggccatggaggacttcaccgttggagggttccatgtccgacgcggcaccatgatgatcctcgtgaacgcttggctcatccatggggaccccaaactgtgggaggcgcctgaggagttcaggccggagcggttcttggacaataccatggtgaccatggtcaccgcccccttgctactgtttgggcttggatggagacgctgccctggggaggggatggcgatgcgtcttctcggcttgacactggcagctctactgtaa

SEQ ID NO: 8668 - DNA, 2475 bp, Zea mays
  Peptide Sequence Number=SeqID_50447
atggcgacgattcttggcgcagatggcgggcgagagagacagcagagaggagagcagggtcggacctttcctggatgtgttgattctccttccatgatggcgagcgagagatcagaggctgagataggacagcgggggcgagtctgttggcgagacagcgtgagagaggagagcgggcgacggcacaagccagaaccacagttcggaaaaccacccatgcttccttcccgccatctccgcgccgccgcgcggcagcgaagccacaggcggccgcccgcccctgccgacgcttgcattacgggcaagcctgatatggaggtcatccggcgcaacagagccatcacggcgcacatgcgtgcgggccgcgttccagacgccgagcgcctattcgccgcgatgccccgccgttccacctccacctacaacaccatgctcgccgggtacgccgccaacggacgcctcccgcaggcgctctccttcttccgttccattccgcgccccgattccttctcctacaacacgctcctgcatgcgctgggggtgtcgtcatcgctcgccgacgtgcgtgctctgttcgacgaaatgcccgtgaaggattccgtgtcctacaacgtcatgatctcatctcacgctaaccatggtctggtctcgctcgcacggcactactttgatctcgccccagagaaggatgctgtctcgtggaatggcatgcttgctgcctatgtccggaacggacggatccaagaggcaagggagctgttcgattcaaggacagagtgggatgcaatttcttggaatgctttgatggctgggtatgtgcagcgcagtcagatagaagaagcgcagaaaatgtttaataaaatgccacagagagatgttgtttcctggaatactatggtgtccggttatgcgaggagaggagatatggctgaggcaagaaggttgtttgatgtggccccaattagagatgtgttcacctggacagctattgtctctggatacgcacaaaatgggatgctcgaagaggccaagagggtgtttgatgccatgccagataagaatgctgtgtcgtggaatgcaatgatggcagcatatgtccagcggaggatgatggaggaggcaaaggagttgtttgatgctatgccctgtaggaatgtggcttcgtggaacacaatgttgacagggtatgctcaggctgggatgctggacgaggcgagagcaatttttggcatgatgccccagaaggatgcagtctcatgggctgcaatgctggctgcgtattcacaaattggtttcagtgaggaaacactgcagttgttcaaagagatgggacgttgtggtgagtgggtgaataggtcagcatttgcttgtgttttgagcacatgtgctgacattgctgcacttgagtgtggaatgcagctgcatagtaggttgattaaggctggttatggggtgggctgctttgttggaaatgcacttctagctatgtacttcaaatgcggaagcatggaggaagctcacagtgcatttgaagagatggaggagagggatgttgtttcgtggaatactatgattgcaggctatgcacgtcatggttttggcaaggaagcacttgaggtttttgataccatgaggaagacatctaccaagccagacgatattactttggttggagtacttgcagcatgtagtcattctggcttggttgagaaagggatttcatacttctattcaatgcaccgggattttggtgtggcaacaaaacctgaacactacacttgtatgatagatcttcttggccgtgctgggcgattggatgaagcagttaatcttatgaaggacatgccttttgagcctgactctaccatgtggggtgcattacttggtgccagtaggatccaccgcaactctgaacttggcaggaatgcagctgagaaaatatttgagttggaacctgaaaatgcaggcatgtatgtcttgctttcaaatatatatgcatcatctggcaaatggcgtgatgtggacaagatgagacatataatgcatgagcgtggtgtgaagaaggttccaggattcagttggattgaggtgcagaacaaagtccacactttctcagtgggtgattctgtgcatcctgaaagagaggacatatatgctttcctggaagatcttgacatcaggatgaaaaaggctggatatgtatcagctacagatatggttttgcatgatgttgaggaggaagagaaagagcacatgctaaagtatcatagcgagaagcttgctgttgcttatggtattctaaaaattcctcctgggaggcccatccgggtgataaagaacctgagagtatgcagagactgtcacactgctttcaagtgtatctctgcgattgagggaagactgatcatactgcgggattccaaccggtttcaccattttagagatggttcttgttcatgtggtgattactggtga

SEQ ID NO: 8669 - DNA, 189 bp, Zea mays
  Peptide Sequence Number=SeqID_50448
atggcgttgagcacgcgtgggcccagtgagtccgcggtacagacgcagggagcgagcgcggaggagacgcagacaggcgggtcccaccggtcgattcaacaattttgcaagcatcaatcacgagacaaggaaaatgttgatagggctgacccggaccccacattatataggctacaggacgggccttag

SEQ ID NO: 8670 - DNA, 2292 bp, Zea mays
  Peptide Sequence Number=SeqID_50449
atgggcaccgggggagacgggagcaaggcgggcccggcgctgccgctcgaggcgctgctggcgctcggcctcgaccagcgcaccgccgagaacgcgctcgtcaacgccaaggtcaccgccaacctcgcctccgtcatagccgaggctggtataaaggaatgcgacaagtcagtcggcaatcttctgtatgcagtcgccaccaagtacccaactaatgcacttgttcaccgtcctgtccttattagctatgtcttgtcaacaaagataaagaaccccgcacagctagatgctgctctgtcatttcttactaatactggtcctgattctctagatgtggtcaaatttgaagaagcatgtggtgtaggtgtggttgtttctattgaggaaattaaatctactgttactgatgtgcttgaggagaatatggaagctataaaggagcagcgatatcacataaatgttggtacactatgcggacaggtcaggaagagacacccctggggtgatgctaaggcgataaaggaggaaattgacaagaggcttgcagaaatcctaggtcccaagacagaagctgacaatataaaaccagtgaaaaagaagaaggaaaaaccagcaaaagttgaggagaaaaaagttgcagttgccactgctgccccaccatctgaggaggaattgaacccgtacactatatttccccaaccagaggaaaacttcaaggttcatacagaaatatttttcagtgatgggaacatatggagagcgcataacacaaaggaaattttagaaaaacatcttaaagcaactggaggaaaagtgatgacccgttttccaccagaacctaatggatatcttcatattggtcatgccaaggctatgtttattgattttggtctggctaaggagcgaaatggccattgctaccttagatttgatgacacaaatccagaagctgaaaagaaagaatacatagatcacattcaggaaatcgtccattggatgggatgggagccctacaaagtaacatacacgagtgactatttccaagctttgtatgaacatgccgttgagttaatacagaaagggctagcatatgtggatcaccagactgcagaagaaatcaaggaatacagggaaaagaagatggatagtccatggaggggtaggccaattgaagagtctctgaaattatttgaagacatgaggcgtgggttgattgcagagggtgcagcaactctccgtatgaagcaggatatgcaaaatgagaacaaaaatatgtctgacttaatagcatatagaataaaactgtgcacacttgagtttgacatacgtcgcccttcatactactggctacttgttgccttgggcctttatcaaccatatgtgtgggaatattcgaggctaaacatatcaaatactgtgatgtctaaaagaaagttgaatcgacttgtgacagagaagtgggtagatgggtgggatgatccccgcttgttgacactggctggtctccggcgacggggagtatcatcaactgcaataaattcctttattcgtggaatcgggataacgagaagtgacaatagcttaattcgtgttgatcgtctagaatatcacatcagggaggagcttaacaaaacagcccctcgaaccatggttgttttgcgacctctaaaggtggtaataactaacttggaagaaggaaaagtactagaccttgatggcaaaatgtggcctgatgcttctgatactgatgcttcctcccactataaggttccgttctcaagaactgtctacattgagaaaactgattttcgcctaaaggactcaaaagactactatgggctagcccctggtaaatctgtcatgctaaggtatgcgttccccataaaatgcacagatgttatctctggtgatagtcctgatgatattgttgaaattcgagctgaatatgatcctttgaagacttctaaactgaagggtgttcttcactggattgctgagccagcacctggtgtagagccattgaaggtggaagtaagattattcgagaaattgttcatgtcagagaatcctgctgaattggaagattggcttggcgatcttaacccacactcgaaagaggtgataaaggatgcttatgctgtaccatcacttgccactgcggttctgggtgacaagttccagtttgagcggcttggttacttcgccgtggatactgactccacacctgagaaactcgtgttcaacagaactgttaccctccgtgattcgttcgggaaagctggacccaagtga

SEQ ID NO: 8671 - DNA, 1113 bp, Zea mays
  Peptide Sequence Number=SeqID_50450
atggagagatattcagcaatcaaatcatatggttcgtggatgatacaaatgtgtatcgagtcactattcacaaaacattttagggttatccacacaagtgtatgggcggggcaaaagcgtcttgggcagctggccaagtggaaaaccgctgaggaggttgctgcattggttcgatctcttcctgtagaagagcagccaaagcaaattgttgtgacaaggaagggcatgttggatcccttggaggtccatctacctgacttccctaacattgttattaagggcagtgagctgcagcttcctttccaggcttgcttgaagattgagaagtttggtgatcttatactgaaggcaactgaaccacagatggttctttataatatatatgatgattggttgaaaagtatatcatcatacacaacattctcccacattgtgcttattctacgtgcacttcatgtgaataatgagaaggcaaagatgttgctcaaacctgacaaaacaattattactgaaacacatcatatatggccatctctgaatgatgaacagtggttgaaggttgagtgtgcactaagggacctcatcctttctgattatgcaaagaaaaacaatgttaatacttctgcactgacacaatctaaaatgcgagatatcattcttggcgctgaaattgctccaccatcacagcagaggcaacagattgctgaaattgagaaacagtcaagagagactactcagttaactgctgtaaccacaaggacgacaaatgtgcacggagatgaactcattatcacaaccacaagtccatatgagcaacaagcattcgcatcgaagactgattggcgtgtcagagaaatctctgccacaaacttgtatctacgtgtaaatcacatttatgtcaattctgatgatataaagggcttggtggctgagtccgcagtggatgccagcagcgatgtggagattcatggcgagctcgagctcggtgccctcacctcttcgctcgagcaccctggcggcgcgctcggcgaactcaagcacgcgaggcggcgccaccctcgcccaataccatggcttgaggaggaagggccccagatccgggttctggagtga

SEQ ID NO: 8672 - DNA, 357 bp, Zea mays
  Peptide Sequence Number=SeqID_50451
atgacgctggagaagaaacaaaggccggtgcacaagagaagatcggaggacggcgtccacaccccgacggatggtgcacggttctgccctgcgacaccacccacgcccgtctctccgaagccgccagcgtctccacccgagaccccgacccaccccgcctcccccgccgccgcgctcgcgctcccccgcgacagccgccatacgccctatctccgccgtgcctgcgcctcctcccccgcccgcccgagacccgccaagtttcccttccttgcacggcgagatccaccatcggcgcccccttccctggcgagccacagccgtccatgttcctggccaccggcgacctcccttctctag

SEQ ID NO: 8673 - DNA, 363 bp, Zea mays
  Peptide Sequence Number=SeqID_50452
atgcaggcggtgggcatccggcggcgcgggctgaccatcgacccggcgggggaggaggaggcccccgcggcgcgcgtggggcggctggtccgggagagccccgtggtgatcttcgcgcggcgcggctgctgcatggcgcacgtgatgcggcggctgctggcggccgtgggcgcgcacgccaccgtcatcgagctaggcagcgccgaggaggaggaggaagagctggcggcggccgagggcggcggcgtcccggcgctcttcgtaggcggcgaccccgtcggcggcctcgagggcctcatgcggctccacctcagcggccgcctcgtgccccggctccgggagctcggcgccctctgcgcctga

SEQ ID NO: 8674 - DNA, 159 bp, Zea mays
  Peptide Sequence Number=SeqID_50453
atgccggctgccgggccggcccgcccatcgatcgcgccccgcagattaagcttaattgggctgtgccggcctaagcctggcccatctatgcgggccgtgccggggcccgacgggccgaaaattgaggcccggcccaagcatgcctttgggccgtgctag

SEQ ID NO: 8675 - DNA, 348 bp, Zea mays
  Peptide Sequence Number=SeqID_50454
atggagggaggtgctgctgttcctagcagagaggggctgggcgagctcctgcagaggggagtacgccgagcaggaggagccaccatgggcgagctcaccatgggaggaagtgagggcgcagctagctgccatcaatggagagctggagacgtcatgtgcagctcacatcaggaagggatgagcgccatgctgctagcaaggagaaggagacaccgtgtgggggaagcaagggaggacggcatggtggaggtagccagggcagagcgccgtgaggagatgaagcctggcttcggtcggctgggagaattccagaaggaagaccacgtgggggaggaggtggcagtctag

SEQ ID NO: 8676 - DNA, 345 bp, Zea mays
  Peptide Sequence Number=SeqID_50455
atggaggccctgggcagcagtgtcgggtggtcacgtgaaacgacagtgggcctcgtggacgcggcctcgcgcgcggccggccacagtgaccatgagcgaccacccgacagcgacgaactgctcatcgccgacgagcgtgcgggcatcgcctacggcacccgcatcagacgatacttccatggcccttctcggtgcgcggacgccaaaacggccacatgcgctccccggagcgggcgcgtggctcggccccggagcgggcgggcgagcggcctcggccaaagggctccccaagtgcggctgctttctggcggcgggcgcgtccgggccacgaccacgcgggcgtga

SEQ ID NO: 8677 - DNA, 264 bp, Zea mays
  Peptide Sequence Number=SeqID_50456
atgacacgcaatcatgttgccatgctggttggactgaaagcattgtattttccctatcgggtacatgatatgtgcttcccatgccccatgtatggaaaagtacctctttcgctggcactcagtcctaggatcatttcggaggttgcgaagttcaaacctgacattattcatgcgtcttctcctgaaattatggtttttggagctctagctattgccaagctactcggtgtgcccctagtcatgtctatcacacccatgttcagt

SEQ ID NO: 8678 - DNA, 375 bp, Zea mays
  Peptide Sequence Number=SeqID_50457
atgaaggtacgccttataaccgaaaaaaatctgagagagctaaggaatagtgctgatgtggaggctgtcctcaacaaatacaaggaggcaattgaatcctgtagtgaatgttcccaagacataggtgtcaatggggcactactattagctgttggtggtgggaagatttctaaagacataaattccaacgatgggatggatcattgtgtaataatggttggcttgcgttatccaagtccatctgatgttgagctgctagagacgataaagcatatcgaaagtatttctagctcattttttattggagatgacaaggcctcaatcagaaaatatgatgatgaatgtgaacttcagcctggttatgatatattatga

SEQ ID NO: 8679 - DNA, 807 bp, Zea mays
  Peptide Sequence Number=SeqID_50458
atgaatgttgtggtaacttcacacctacccgtctgtttatatagtgctgcagcatttgagaacaagtccccaacagatgtaaacaacaaattacacctcaagctccctgaaggcacgctgccacttaaagtccttcctctggagggagagcaagactgccgtcttggtcgaccagctggcccactctcgacagagcaagatctagaactgggtgctccagatcttcccctagtggcagatgttgatctttctggtagcgatgtccttaggtttggaggcgcatcaagagagaaaccaggcatatcagatggtttccatggtcttgatttgatagtgggtgagctgccccttgaaggtgttggcgctgcagttttcgctggtgaagaacctttgggcattgtagaacctggtttggtgattgacgacgatctaaccggtgcaaccaagttaccatgctgggcagaaggggcagaaggtcgccttgttggggtcaatgcccttgatgtaggcttgctttgcgctgatatggtgggcctggatgatagtgttgttgacctggtattgcctgaaggagctgaagtcctgctagcaggaccaactgccctgcttgaaggagttgttgatctggctgatggaagtgttgatgatcttggcacagaagctccagttttggcaggaacagttgtccgggaagtgggggtccaaggtcttgaacctttggaactagctgtcaatgcaacatgtctagttggtgttgaagtccttgatgaattagaagtaagccctccagacgatgatggtcagtga

SEQ ID NO: 8680 - DNA, 533 bp, Zea mays
  Peptide Sequence Number=SeqID_50459
atggatctagtgcaagctcctgcaaggatcactgcagatagctcctttaggtggaggaaacccattggggcagatgtggtggagctgatcgagaaatatatggagctcttgcgggtcaaggtgattgaggatgggcagatgtgctggttccctccaatattcccctccgacgatggaatatccccgcagttccaacccaggcccgccttcttcatcgtcttcagtccttctcccgcttatatacgcaacggcgacctcgccctcttccttgctcgggcaatggcgattggcgggaaggaggtcaaggatgacctggaggaggcgccgccgccggtcctggacgaggccatgcggccgcgccgcgtcgcgctcttcgtcgagccgtctccgttcgcatacatctctgggtataagaaccggttccagaacttcatcaaacatttgcgagaaatgggggacgaggtcattgttgtgaccaatcatgagggagttccccaagagttccatggcgccaaggttataggttcatggag

SEQ ID NO: 8681 - DNA, 408 bp, Zea mays
  Peptide Sequence Number=SeqID_50460
atggccgacgcctcctcccgtgagcatgtcctagtcatgctcggccctatcagccatggctccatggacaccagtcaccttcccctaacgggcaagctcgcgcccctgctccctcgaccagtcctgcgcagcggcgtgctcggcgcccagccggtcagcccgctccccttgctgcgcaggcaacacatcatgcgcgagtctcaacccaggagcgcaatctacctccccgcgtctgcagccccattcatggctttgccgtcgcgctcgctgctggcgagcagcagccagacccacggccaagccgagctcaagcgccacagccccgagcgcgactccgcctctcttgcgcgcctagaaattgtccctgcttatgagatacaaaatacatcgaaaaaggattttctatag

SEQ ID NO: 8682 - DNA, 393 bp, Zea mays
  Peptide Sequence Number=SeqID_50461
atggggcgtcattcggtctggctcctgggtcactggtggacgcgcgcatgggcatggggctcggacggtgttgtagggtgggagcaggtggggccaggcggcgtcggggctgttgcccactcacgcatgcgtgcagggcgcggcgaggagcgcgctggcgttggcgcggttgggcatggcggcggcgctcctgctgcgcgcgctagggttgcagggggggcgcagccgggctgcgcgggcgctgggccgcgggagcgcaaggtgggccgggacgcgtggggcgcgcaggccgctggggaagggcacggctgggccacgcgacggcgctgggtcgtgggcaggccgagggaagggagggggaagaagccagacaggcccgtcgcggctggatag

SEQ ID NO: 8683 - DNA, 492 bp, Zea mays
  Peptide Sequence Number=SeqID_50462
atggaacaatacgacgggctctttcctcccgcctacgtggactcctcctcatccctcctcctggtgcccaacgccaacggcactgcgcaggaggagagaccgagagcgcggcgcaggaggcgtcgagcagcgaggtgcggcggcggcggtggcgagctggacggaggaggggaccacaagaagcggcggctgaccgacgagcaggtagagatgctggagctgagcttccgggaggagcggaagctggagaccggccggaaggtgcacctgggcgccgagatcgggctcgacccccagcaggtcgccgtctgggtcccgaaacgccgcgccccgcccaagagaaagctgctcgaggaagaagtcggccaggttcagcaaggcaccaacgcccccttctcccaaatggcaacctggaaagaaggacatgcatcctacctctcactctttgcctgtgctccaatcctcttctctgttcatccccatgcgccatga

SEQ ID NO: 8684 - DNA, 1065 bp, Zea mays
  Peptide Sequence Number=SeqID_50463
atggatattaacaaaggcccaaagaacaaaccatcaattctgggaactgtttctctcaatctagcagattatgcattgacggctggagagacaattgagataattcttccgttgtctatacctggtggtgcacctgaacgagcctcatcccttcatctcactctgagtatggttgaattaagagcttttcaagaaacatctgatgcatcacagcgatctgctgcaaccttgccattgtccccatcacctagtgattctcttcctggaggaaaatatgaggttttggttattaaagcagggttgaggaaggtaaaaattctcacagatctggtgtcgacacgaaggcctaagaagacttgccagggaggtggcgaagataagttctgtgttaacagtgatagtgttgaatatccatgcgatactgagtctcttgatgacgatctagatgacagagttgaggaagatgaatttggagattcaactatcaggaagtctttcagttatgggtatctgcaatctgtcaactatgttggtggcctagtttatgcccatgcaaagattgatggggagcatgaggactggatatattatagtaaccgaaaaactgatgtcggtttccatgtagagaaaggatcaagaggatatggattagcaaatactatggtgtcagaatttggtgatgacaattttgtcattgaaaattgggagttgaaggagataattagttgtgatggtcgtatgaagctttcatcccagatgttctttgcatcaatagaccagagaagtgagcgagcagctggggagactgcatgtacatcacttgtagctattattgcagactggttccaagcaaatcagaatattatgcctatccagtcacagtttgacagccttatccgtgaaggatcactagagtggagaaacctttgtgagaacgagacatatagaaagcgttttcctgataagcactttgatcttgaaactgtccttcataccaaaattcacccgctgacagtttcccccagcaatcttttatttgatctgtcttattatgactatggatga

SEQ ID NO: 8685 - DNA, 336 bp, Zea mays
  Peptide Sequence Number=SeqID_50464
atgccctcagggccggccctgggaacagggcccccaaatcctgagggccccaaaattttcaacgctacagtctgttgctcacgtaattttgttagtccatatcgtctaaggccggttgacagtcacgacgtcttccagagtctcaacgctctgccacaagctggtagtgagtggtggccaggcaaacctgctacgccactacgtctgtgtgcattaggacacaaagaaagcaagacagctctaattcgtgaaccttacgatcaacacgacgctgagataaggtcagtgcggggctggccggctgggttgtcggactggaggtttgagggtgtttaa

SEQ ID NO: 8686 - DNA, 429 bp, Zea mays
  Peptide Sequence Number=SeqID_50465
atggccttcggcggacggcgtgctaagcgcggcaaggcgccaatggcaagaggagggcgcggaagggaggtgcgagctccgcgggtgcacgacgtgggcgccaaaggggcggttgttcctgtgaggaagaagaacagtgggctgggcgaacggcgtgggcgagcgctgcacgcgctcggcgaggcgctgggcgagcggctgcacgcggggccacgacggggtgggccagctgggcgaggcggctgcgggcgcgagcggcggcgcgctgggcgagcgcgcacactagggttcgggcgcggggctgcggtgcgcgcgaggccgtcgcacgggctgggctgccgaagcaggcccgaggagagcgcgcacgctagggcaggggcatgggctgcgcgctggggaagctgggccgcgagaggagggcgctgctag

SEQ ID NO: 8687 - DNA, 180 bp, Zea mays
  Peptide Sequence Number=SeqID_50466
atggaggaaatgagggaaatagaggtgactgtggaagttggtataaatgatatatggacttttcagagcgatgaaaggatcaaaagctatcgcaaagaagggtccatgaactatgaatgcaaattgtatggaacctgtattcatatagtaaaacatgtgcgagcggtattgaatgtgtaa

SEQ ID NO: 8688 - DNA, 240 bp, Zea mays
  Peptide Sequence Number=SeqID_50467
atgaaccgcccggttataatcatcctatgccgaggaaaaatgcccaacaaggtgaggacaaatgggttttccgatctataccaaaagaccacagggattgatctatggaattcccattatgagagaatgaaagaaaattacaggaggttgaaggagataaacaagaagctgagaagggagattaggcttgctgagaacatccaagatgcttatggtgaggcagctagcattgctgaatag

SEQ ID NO: 8689 - DNA, 330 bp, Zea mays
  Peptide Sequence Number=SeqID_50468
atgggcggaggtagttctttgctgtttagaactctgtttggaacacttatagttttggggtttatcttgggtatatcagttgggttcctaaaaagtgaaggaaatgaaaagaagacaacaataacgagtgatgatcatcagtcatcgacaacgacggcaaaggtgcagcacgaggaggagcaagtgaaggtattaggtcaaggaaagtcaaatgtggcgcatccgaagcaggatctcaactacatgagcaaaagaagagttccaaatggaccagatcctattcacaacaggcgagctggcaactcgggacgaccgccgggacaagtctag

SEQ ID NO: 8690 - DNA, 399 bp, Zea mays
  Peptide Sequence Number=SeqID_50469
atgaaagcatatactgatggcagtatttataggtacaaggcccgcctcgtcgccaaaggcggaaagaaacaaactcaaggaaaggataggatagccagtagagaagaaaggataggaaaaggaaagagggacctggccaatggggaagaagaacttgtcgaaggatctccatacctagaggtttcagggttactcttctggcttgaagggttactcgtattggttcttctgtttgctggtccagaaagggaaaaggttgattactcattggctaaagggaaggttgattactcattggctggctgtgctagtgaactacctccaactatggttatggatttgtggttcctcatagcatttccaccatatgttgcatttctgtattcgaatttgagatag

SEQ ID NO: 8691 - DNA, 777 bp, Zea mays
  Peptide Sequence Number=SeqID_50470
atggctgaggtgacagatgatagtcttaatcagacaactgatattccgaaagaagaagctaataataaaagcaataaatcagatagctctaaagagctgtataatatagggagtaccctatttacctggctaaataataggaatttggttgagatctaccatcctcatggtgatatcaagagccctaaaaaagggcttctcatgcctagcattcttgcttctattgatagaacggaggggacttctgcctgctacgagcaatacattttaaaactagctgatgctttacaaaattacaatttgtatttcccaacgtttttggactttaggggacgaaattaccgatatggtccttttcattaccacgaacgagatcttgttagatctctcatactctttgcgcaaagtggggtgacagatacacccccagataaaggtagtcagggcatacgaacctttatggcttcaacagctttccattattccaaatattggaagaattataatgaagtcgtaacgctacgaatacccacgaacaaaaagaatactcggaagaacactagttccacttttgctaacttcatccatcagaaggatgccttaactgtaattcattttattgatattctaatggatgaatatgaatctggtaataatacagtacctgtatacacagttcatgataatttcatcacaacaccattgtatggcgcagcattcccaagcctatataggaaagcaatgactcgattcgattgggacaccccatatttataa

SEQ ID NO: 8692 - DNA, 396 bp, Zea mays
  Peptide Sequence Number=SeqID_50471
atggaggtggcaatttcttatcaaaagaaaagaaagaaaagcagtttcaagcctaacaaccttcttacataccctagccagaataagggaattatggtcaagggaaaaatgaaagagcataagccagaaaatggaaactctcagaataggaatgaagtatgggaagaaataagagccttaggcctgtgcttgacatgtgttgagctaccctggtcatcagtgcaagcaagttcgtaccagtcgtcagtcaaggagggagctccaacctccgcgcctagccacaacctaaacgctggttctatcccggcaaggggaacccggtgggaagagggaaagaaagatcaggggaagaagcggggtagaggaattggtcgactcatcaggctcatgacctga

SEQ ID NO: 8693 - DNA, 195 bp, Zea mays
  Peptide Sequence Number=SeqID_50472
atgggcgaaagcctgacggagcaatgccgcgtggaggtggaaggcctacgggtcgtcaacttcttttctcggagaagaaacaatgacgtccgccgtcaaatcccagggctcaaccctggacaggcggtggaaactaccaagctggagtacggtaggggcagagggaatttccggtggagcggtgaaatgcattga

SEQ ID NO: 8694 - DNA, 270 bp, Zea mays
  Peptide Sequence Number=SeqID_50473
atgggggtggtgaagggaaagcccccattggtagaaaaaaacccacaaccccttggggttatcctgcgcttggaagaagaactaggaaaaggaaaaaatatagtgatagttttattcttcgtcgccgtaagggacaggtacgctgaatatgactggggattttcctatgggtattggagcgggtccaagcagattaaagaggatgagttgtcagagactgctatttattcgaattatttatgggagatggttaaggacctcagaagatag

SEQ ID NO: 8695 - DNA, 438 bp, Zea mays
  Peptide Sequence Number=SeqID_50474
atggggagccagggcaaggtcgtcgcggtggggcaagagaccgttgattgcgggaggccatggagagtagaccgcgccttccctgtagagttgggtgcagagggctccgcagctgaagagtcttcgtctcatctcgtgctacaaaatctcgaagctggccctcaaagaagcaataagaaagttccgcatgctggccctcaaagaagcaataagaaggtgtcacactactcaagttccaccctctcccgcttctgcagcaacgtcgctgaggctgagatcctcgccgccacagccgacgccggccctcgcctgaagcaccttcacctgaacaagcatcacttccgctggccctgggagtctggcaccggcggcgacagtgaagccacggaaacagcaaaagatgcgcggcctccagtccctgcagcttttcggcaatag

SEQ ID NO: 8696 - DNA, 402 bp, Zea mays
  Peptide Sequence Number=SeqID_50475
atgaacgctggggtgcgcgtgatgtgtgccctgcagacgctgaggctaccggatgactccatgcacggctacgacctcagctttgggcctttggcacgcttgatatgggcccagcggggatccctcctccttggtcgaggacaatcaccaattcttcccggtgtaataatttggggattgagttttttcaggaaaggactgaagcatctacaggctctggagccttgtgtcaaagcagctgctgagaagcagcacattgactaccacttcagtggactagatgatgacagtgatattgatgattacagatcttaccaggataatcatagtgatggcagtgagttcacctttgtggagagcctttttttaagaattcagacaaatagatcatgcaactcatag

SEQ ID NO: 8697 - DNA, 294 bp, Zea mays
  Peptide Sequence Number=SeqID_50476
atgtcacagggcggccaccgccgtgcctctggatcagggagctgtcatgtcgcagctgtgcttccgaattggggagccgtcgtcacgtctctagattggggaatcaccgccaccgcgcttctagatcggggagccaccgacgtcgtgactctggatctaggaaccgccgctgccgcgcatccggagcagggagccactgtcgtcgcgcctacggatcggggaactttcactgccaccgcgcatcgtgctgtcgtcaagcgcaccctcgaggccaccgacactacacgctcttga

SEQ ID NO: 8698 - DNA, 243 bp, Zea mays
  Peptide Sequence Number=SeqID_50477
atgatggtggcagtggcagagcgtggagaccaggagaatgaacccatcggcaacttgaggccgatcattaggcgtttgaaccacacccaaccggcaatgaacggaacagtctttatttggggaggaattgaccaagcctctagatctacaaacgagggcatcaacttggcctctcagaagaatcagaaccaggtcggaccttcaccagttaagcacgcttctgtgtttagagaaatgacttga

SEQ ID NO: 8699 - DNA, 339 bp, Zea mays
  Peptide Sequence Number=SeqID_50478
atggagggtcggcaagacgcacatgcacagcagcgagggcctcgcgacacacccatccgcccgcacgccgtctcactgctacaaacgcacaaaaagaaccgcgaatcccaggagcaactggttttcacagatgaccaggacgcgcggtgcaggcatcctgcggcaagcgtcacatggcgagcccaacggctcaggggcagcgcgcatgtggcttcggtcctcggccatcgcccacaggctgcgcactgcgcacatggtttgcgacgcggagccgctcaaagtctccggccgccgagatgggtgcgaatacggccgggaccgaggcaggcacaggcatag

SEQ ID NO: 8700 - DNA, 330 bp, Zea mays
  Peptide Sequence Number=SeqID_50479
atgggcgaatctcgggatcgggcgtgcgcttcctgggcgcacgacatgagtaccgtggaggttcggctcgcttctccttccttgtgtgcctgtccgggttgggtgctagggagctccatgccaagggatttccgtaccggtgccaggacgtcgccagccgccgccaccttgggtgctcacgccgccacagttcatgaccaagggaagaaggatcctcagtcgtcggttgaagatccgatgctcaagtttgcataccggtttgatgaggggcccctgtactttacagaatttgatgcgcggtccagagagatagaaaaatcagaaaaataa

SEQ ID NO: 8701 - DNA, 150 bp, Zea mays
  Peptide Sequence Number=SeqID_50480
atgtcgtgcgcgttcgacgactactatatcaaggactatggcgtcatcttggccccagagggcccacaaaaaatgtgtggctcggcgatggcggtccgactcaacgggagcgatccgattaagcgagagcgcgacatagcaatcacatga

SEQ ID NO: 8702 - DNA, 204 bp, Zea mays
  Peptide Sequence Number=SeqID_50481
atggaatggttgggcggcgacgatttgctcatggagtttgcgcaaggtgggtggtcgaggcctcgagggcagaaagggcaggggtgtgcctacttatccccgtggacccggctcggggtgggagagggtcaacttgtcacacccggttttgaaggtttcgccagtcgtacaaacgcagtacacctccccaaggtgggtgactaa

SEQ ID NO: 8703 - DNA, 1110 bp, Zea mays
  Peptide Sequence Number=SeqID_50482
atgggcgtggggaagctgatgaacgacgtgaagccgtacctggcgatggtgctgctgcaggtggggttctcggggatgtacatcgtctccgtcgcctccctcaagcgcggcatgaaccacttcgtcctcgtcgtctaccgcaacctcgtcgccaccgtcgtcttggcccccttcgccctcctcttcgagaggccggtgctggaccagaacatgtactacctcggcgcgaagctgacctcggcgaccttcgcctcggcgctcgtcaacatcctccccgccatcacgttcctgatggcgctggtcctgaggatggagaggctgaggctgcggagcctccgcagccaggccaaggtcgccggcacggtctgcaccgtcgtgggcgccgtgctgatgatcctgtaccacggccccgtggtgccgttcccgtggtccgcgggccaccaccaggcctcagccgccgccgccgccgcggcagcggagagccagagcagcgcatcctggctcaacggcatcgtcatgatcatcggcagctgcctgtgctggtccggcttcttcgtcctccagtcgaacacgctgcagagctaccccgcggagctgacgctggcgacgctgatctgcttcctgggctcggtgctgaccggcggggtggcgctggtggcggagcgccacgacatgagcgcctgggtcattggcttcgacacccgcctcttcaccgccgtctactccgggatcgtgtgctccggcgtggccttctacgtgcaggggatcgtgacgcaggcgcgggggccggtgttcgtgacggcgttccagcccctgtgcatgatcatcaccacggtcctcggctccaccatactcaaagaggagaccaccttgggaagcgtgatcggcgcggcgatcatagtggtggggctgtactgcctcatctggggcaagagcaaggaccacctcggcaacggcggcaagccggccgtcgccgagctgcccctcacctcggctcccaacggcggcaccaacggctacggcaagcacgcgctcggcggcggcggcggcggccaccacgtcgccgccggcgtcgaggcaccgccgccgtcgtccaagtgcgttcactga

SEQ ID NO: 8704 - DNA, 501 bp, Zea mays
  Peptide Sequence Number=SeqID_50483
atgggccgggtcaaggccgccgcggtctcgcaccgcaacctcatcgcggtgatcagcgcgcacatgaacaaccggactcccttatccattcgagccaccatcaacgccgatcctgcgatccggggcccagcagcgcggccgccatcaacgcaccctcgatcccccatcaacgcggcccccactatgcagtcgtggtggctccccgcgtataaatgcgggcgtgcggcaacggggacaagcacttgcagaggagggcgaaggtacgaggtggttcagtctgtggagaggagggagaagacgagtccatctatgttgtcattggattgctccgtcgcggcgccgaagctcacgctcacgcccacgacgacgagaatgtggggaggagagagaagaagagtcggcgcgcgcaacttgtacctcgccgactccgacgccgacgccgacgaccacctcgacctacaactcaaagttatgcactgctcctctcctctcctaccttaa

SEQ ID NO: 8705 - DNA, 303 bp, Zea mays
  Peptide Sequence Number=SeqID_50484
atggacccaattgccctcaggctgagacaatcaaaggcacagaatcagaggaatgcatcgaatggaggacagaccataaatcaaccgaccgccaagggattacaaatcatggctgaaggaatctgtgacagactggctcttggaacttatacgcacgtcttccgcctgggtcccatggggtggttcgttgagcagctaaaggagttggaagagccagatgccggcttccttgtgccggcttgcacggcaagatcatggcgcattggacagcgtgtttacactgtcgtcgtctatgcctcctga

SEQ ID NO: 8706 - DNA, 204 bp, Zea mays
  Peptide Sequence Number=SeqID_50485
atggatggcggcgatagacccgccctctgtgccgccaaggagctcatctccatccaatccctgacgtcgtccccatccaactcgccccaccccgcaaccaaatctcgctccgaccgtgatccccacgccgctctcccccgtcacccaccagtccccaaatctaggcgcgatagctccaatccctcaacaaccttgccactctga

SEQ ID NO: 8707 - DNA, 735 bp, Zea mays
  Peptide Sequence Number=SeqID_50486
atggccgccgcgctcgccggggtgaggcggttcaacgagcagcaggcggaggcgaagcgccgcttctacaccagggacaccgcgcgcaaggtgaggttcacctccaactacgacctcttccagtcggcggccgccagctggcgcgacaccctcttctgcgagctggcgcccgacccgccgcgcccggaagagctgcccgaggctgtcaggggcgcgatgctggagtacggcgacgcggcgacggagctggcgctgcgggtgttggagctcctgtcggagtccctcggcctgcccagcgaccacctgcgcgagatgggctgcgcgcggagcctcaacgtggcgagccactactacccgccgtgcccggagccgcacctcaccctcggcactagcaggcacgccgacgccaccttcctcaccgtcctcctgcaggacgccatgggcggtttgcagcttgtgagcaacgaccggttcaggagcgtggagcaccgggtcctcgcgaacaagagcaaggacacgccgagggtatcggtggcgtgcttcttcaacgcggacgtgaagaggtctacgaggctttatgggcccatcatcacggatggcggcggcagcagcagccccccgctctacaagagcgtcacggctagagagttcgtcgggtactcgtacagcaaaggcctcgacggtcgcccgcttgagcacttccggttggagggcacaacagcagcatgcccctaa

SEQ ID NO: 8708 - DNA, 249 bp, Zea mays
  Peptide Sequence Number=SeqID_50487
atgactgggagtgtcgtttcagatgaggtcactcgtgaggctgaatacactgatgacacaccgacacctcccaatactttgcatgctgctttggtgctgagtaagaaggctcacgctcgcatattgtctattgatgatgcacttgccaaatcttcccctggctttgctgggctgttcctttcaaaagacattccgggtgttaaccatactggaccaattatccatgatgaggagtttttttgcatctaa

SEQ ID NO: 8709 - DNA, 324 bp, Zea mays
  Peptide Sequence Number=SeqID_50488
atggcagtttgtggcactcttctcaatttctctcttgctcgacgatacctcaccctctatcgttggcgttttagcgcgggtgggaagcggtgcaccgacggcgggcaggacagcgcacggagcggacgcgagggtgcgagccgaggtggccacggcggcggctatcatgcgtgcactcggttcacctttttttatgctcccaccacggtgaacactagggcttggctcttggtttattggtgcccacctgtcagtgacccgccacgtgagaagcaacctgggctgcgcctagtgagtaggtgggccgaccagattatatattaa

SEQ ID NO: 8710 - DNA, 435 bp, Zea mays
  Peptide Sequence Number=SeqID_50489
atggccgtgatgggttcaacatcggaaaagatgtacctctgtcaggaccatgtcgatgtaggcttgctgaccgaggaccctttaactggtcacatgcctcgtcatgggctttggtggggacctggtgatgttcgccagagccttctgaaccgtgccaaacggagagggtgccggatctcggctaattgctggccagaatcagtgcttcaccgccgtgttgtgggtgacgtagaggacccttcctccgcgggtcctatccctggtaagcccgtgaacagcctcggattgtcccttgggttgtgtagcgcgtgtctgggggaagaatcatgcgaccaggcactcggctggcttacgccgacgagcctctgccttgagtgtggggcggcgccgccgtcttcgggtataggatggaggaagatgggcgttggccgttag

SEQ ID NO: 8711 - DNA, 123 bp, Zea mays
  Peptide Sequence Number=SeqID_50490
atggcgacctcgcagaaccgagggtgcaacacacggttggagacttcgtctggctacgaaagggtccaggactccgacccgatgccatctggaccaacttgggagaggtacaacttcgtatga

SEQ ID NO: 8712 - DNA, 216 bp, Zea mays
  Peptide Sequence Number=SeqID_50491
atgaacgggtgggttacggtgactcactacggcatggttaaagggtcagggcgtgtcgcgatcatggcaggcggcgtatgcctcgacgatggctgctgcgccacatcgctggcgcaagtgggcacggcatacggcggaacagtggcttcgagctcatccgcggtgaagatcttttcaccacgagacgttatccgggcaccgctctacaaaatttga

SEQ ID NO: 8713 - DNA, 249 bp, Zea mays
  Peptide Sequence Number=SeqID_50492
atggagctcttccccatcaagcccatggcaggagctctcgtcgaagtgggctccaagtccgttaccggcgcgggccgctctgtacacgacgctgccgccctcggggccacctctatggcgccctccatcagcaaccctaccagctcctccgtagcagcgtggagcacgccaccgacctgctccccatgtcccatctccatggcgcactctagcagcggtggcgacaccgacctgctcccacctccctga

SEQ ID NO: 8714 - DNA, 381 bp, Zea mays
  Peptide Sequence Number=SeqID_50493
atgacggcgcgcaagggtggagccgaggaggacggcgcgcggggtgggcctgtggaggaggacgacacgcgggtgtggggcgccctagcgttcacggcgcgcgggggtggagcggaggacgacggcgcgcgggctagcttttttggtaaaaatttggtcgcggtgcgcgggacacaattgggaatgggaaacgggttacatgcgcgggacacagcgggacacagttgggaatgggaatgcaaacacacaggagttgggaattggggtcacatgggttacatgcgcgggacacagcgggacacagttgagaatgggaatgcaaacacacaggagttgggaatgggggtcacatgcgcgggacatagttgggaatgggaatga

SEQ ID NO: 8715 - DNA, 141 bp, Zea mays
  Peptide Sequence Number=SeqID_50494
atggcgacgagggggcgagtagagccctatgaaaacaagctaggggaggaagccgaacaacgccaagccaagaacgaccgactaacacaccaagctacagccgcccgaccaatggtccatactgaattaggacagacataa

SEQ ID NO: 8716 - DNA, 652 bp, Zea mays
  Peptide Sequence Number=SeqID_50495
tgacacggtcttcttcgaggactcggcggcgcccgaggagatgccgccggcctttagggacgtcgtgccggagtacgccaggcaggcgcgggggctggcggcgcagctgctggcgctgctgtcggaggccctgggcctgcacgcgggctacctgcagcgcgacgccggctgcctggacgggccctcgctcgccttcgcctgccactactacccgccgtgcccagagccgtggctcacgctaggcaccaccaggcactccgaccccagcttcctcacggtgctcctgcaggacgccgtgggcggcctgcaggtgctcctcggcggccgctgggtggacgtgccttcgctgcccggcgcgctcgttgttaacatcggcgacttcctccagctcatgtccaacgacaggttcaagagcgtggagcaccgggtggtggccgtgcctccaggcgccgctgcccgggtctcggtggcctgctttttcagaccctccggcgccgccacgtccaaggagtacggccccgtacccgacctcgtcaagccgccggaggccccgcgttacaggagcgtcaccggcgtagagttcctcgactactataggcagaagggtctcgacggacgatcggcgctcgaccacttcaggctgctggtctga

SEQ ID NO: 8717 - DNA, 339 bp, Zea mays
  Peptide Sequence Number=SeqID_50496
atggccgatagagggaagaagaagaaggatcatctgccccgtaactcctttagcgactccgagagagatgagtcctccagcattggttggagtgacaacgaggattcgtcagagggggtgcctccagaggaggcctacccgaccgacttcgagggcatggagcccaaggagcgaccctacctccgaggcctcgagcgtgccaggcgtgggggctcagaggacgatgacaaggaggacaacaaaagcaatgatgaggatgacgagatgatggcggtgatgaggccatcttttcatcgtcgaagcgccgccgcctcgccaagtagatatagggtagcataa

SEQ ID NO: 8718 - DNA, 1011 bp, Zea mays
  Peptide Sequence Number=SeqID_50497
atggtttggcaatatgctaattcattgatcaatgtgaaggctgacacggtgttgaattggcttactcaagatcaaggtggtgctgcacacaggctacagacatggatgactgtttcttccacctttctgaataagcccattcatgtaatgcttggggtaatgggtttattctttaaccttgtggactactgtagacatcatggcctgcaagctgacttcattgggactaaaaaggctttgttcttgttgtccaaggaacatagacatggggtaatgggtttattctttaaccttgtgcactactgtagacatcatggcctgcaagctacagggggacttgggattgagaggccttcaccaattgatttctgcgtgcctcgggaccggggaggcgatggcacggtgctgggcgacctactggagaactgtgtcacggaggtgctgctcaggctggacccgctggagatctgccagatggcgcgactcagccgcatgttccgcggcgccacatccggggacggtgtctgggagtccaagctactgacgaactacgcgcgcctcctcgccgtcgctgaggccggcgatggggaagcggggcaggccaccgggtctgcgccggaggcggagccgctgcccaagaaggaactgtacgcgcgactttgccgtcggaaccgtttcgacggcggcaaaaaggagttctggctggacaagggtggcggaggtctatgtatgtcaatttcttcaagggcgctttcaataacaggcattgatgataggaggtattggaacttcattcccagtgatgaatcaagattccgcacggttgcgtacctctcgcaaatctggtggtttgaagtcagaggggaggttgaattcttcttcccgaaaagtacgtacaacctattctaccgcattcatctcggccgaccattcaagcggaaccagaggagttcagggagagatcaccaagttgcacataggtgtccatgggcaaacacccactcacaataa

SEQ ID NO: 8719 - DNA, 894 bp, Zea mays
  Peptide Sequence Number=SeqID_50498
atggatgtccaaccgggtgatcatgttctacctatcttcaccggagaatgcaaggagtgtccccattgcttatcagaagcaagtaacatgtgtgatatccttagaatcaacactgagaggggtggaatgcttcatgacgggcatactaggttttccaaagatgggaagcctatctaccactttcttggcacctcaacttttagcgaatacactgttgtccatgtcggccaggtcgctaagattaatccagaggctccacttgataaagtgtgtgttcttagctgcggaatgtcgacaggttttggtgccactgtgaatgttgctaaaccaaaaaagggtgggtctgttgcagtttttggacttggtgctgtaggtcttgtggctgctgaaagagcaagagtttgtgaggcttctaggatcattggtattgatctaaaccccaacagattcgaagaagccaagaaatttggttgtactgagtttgtgaacccaaaagatcacaataaacctgttcaagaggtgattgcggagatgactggaggaggagttgattgcagtattgaatgtacggggagcacccaggccatggtttctgcatttgaatgtgtccatgatggttggggtgttgctgtgcttgtgggtgtgccgagcagagatgattcattcaaaacccatccaatacatttcctgaatgagaggacacttaggggtactttcttcggcaactacaaacctcgatctgatatccctggtgttgtggagaagtatatgaaaaaggagttggagctagataaattcatcactcactctgtcccattcttggatatcaacaaggcgttcgagtacatgctgcgaggggagggtttacgatgcatgattcgtatggatgcttag

SEQ ID NO: 8720 - DNA, 198 bp, Zea mays
  Peptide Sequence Number=SeqID_50499
atgaagttgaaatcgaaccacacgagcttgaaggtttctcaaggattgtgtaatgagcttcgacttcaataccttctcaaggagaaaaggttcactttgattgaaaaaggtaaaattgattctcaattttccactcctaaaggtgaatcagagctactaaaacgaggagcaccgacgttcatatcaagctacgagtag

SEQ ID NO: 8721 - DNA, 132 bp, Zea mays
  Peptide Sequence Number=SeqID_50500
atgggcgccgataggcagggcccacttgccattgttaggggagctcaggagcggtttggaccgagcggatctgggccagctcagctcaagggggcacatacaaggatactgagccccgacatgtgggcctag

SEQ ID NO: 8722 - DNA, 498 bp, Zea mays
  Peptide Sequence Number=SeqID_50501
atgggggaggaggtggcggtggtgctggagccaccacggcccaagtcgccgccgaggtacccggacctgtgcggccgccggcggtcgcagctggagctgcagatgctcaaccgcgagatcgaattcctcaaggttggtgcgaaatctggtcgatcgttggagcacaccacgccatctattccgtcttcgtatggggatgagagcgggagggcggcggatcgcggcagcgcagttaaacccgagggcgcagcgacaggttttgccccagttgccctcttcgggcgtgccgcggctgtacctcttgctcttgggccgtgcgcgtgcggttcggttccttgggagaatagaggtgacgggggcatggcatgggcagtggcagtgccattgccgcagcctgcccctgtcagtgctgcgcgtggagcagcgggtgggcgtgtccgcctgctgttcttgcttcgcggacacgcacacggcatggctcgtcgggcatcatcatga

SEQ ID NO: 8723 - DNA, 501 bp, Zea mays
  Peptide Sequence Number=SeqID_50502
atggcgaggcagagtccgatgaaaggggaagctgagcgagaagatggccaggttgaagaacaccgtgacgaagaagaagacgacgactacgaccgggcacagatgtttagcggcggcggcggcaagctgatccgtatggagcagcatgccgaagctgatgcagactacgagaaagagcatggagagcgaagttctcggtgcgaagccggccggcgcttctccagcggcaacagtcggggcgatgccgaagctgatgcagactacgagaaagaggatggagagcgaacctcccgcttccccgctgccccgcttccccgcccaccgcgctgcgcgctcgccggagccgccgcgccgccacgccgttccgagcgcctgccgctccgccgcgccgtgccgagcgccgtgccgtgccgagcgcccgccgccgacaccgcagctcgcccgccaccgccgctgcgcgcccgccaggtgttcgtccgacttgaccttctccaccgttag

SEQ ID NO: 8724 - DNA, 732 bp, Zea mays
  Peptide Sequence Number=SeqID_50503
atgtctcttcagatcatatcccggtttgtcgctaggcagtcgaggcataagaagatgcattggagtgtgagggagggacgcaacaagaagaggcacgtaccaccagcaaagacgcttccaatcgctggagctgccgccgtggtgctcagcaagaggctacaagtaccatcagcaaagatgcttgccaacgccgaggaacacaagaagcagcattatgtaccgccaacaaagacaattccgaccgcagcaattctatcgaaccaccagaagaacatgagtgagaccaagaagtcgtccgtcgccgacaatgagaagatggaggctacaaaacgcaagctacgggagggttaccaaaaagccgatggagtcaagcgtcggcgcagcatccagaccatcaaggaggaggaggggaagctgttggagcagaagcaatgcaagaaggatgcgtcccatcgtatggagaggggcccagtaggatgtaggactaggacctcgacgaacatctacatcaacccaccgccggtggcgctgcctttgggaggcggatacggctacgaggggtcgttcttcggcggctacgaatacagctacgggtggtcgccgttcttgttcgcccccggtccgagtgtgtccgtcggggtaggcggtggcttcgacacactcattctcttcttggcgctgggcgccattgtcggagctgtcaggcggttcctcaaccggaactactactaa

SEQ ID NO: 8725 - DNA, 1677 bp, Zea mays
  Peptide Sequence Number=SeqID_50504
atgcagccgccgccgccgccctcttcacgccgacgggccattaccagggccctactgtgcttgctcttcctcgccgccctctccctggccgcgatgatcgccttcgccacctcaaccccgtcctccgcctcctcgcccgcacgccgcgccctgcagatcgtgccgccacgccgccgccagccactaaccgcggtccggaaggacgggggcgagaacgaggccaggcccgcctcggactcgtcgggcctcgaccaccccgacgccgtgctgctcccggactgggaggtcctcgtcctgctccgccccgacgacgacgcgcacgggacgacggcagccaacgccacgtgcgtgttcccgggcggggccacatccccggcgcgacagctcgggaggatgcccacgtccggccgccgagcctacacgtgcgtcatgcccaggccggagcgcgccagcagcaggcccttccgcgcgccacgcctcgtcgtggccgccacggcgccgtcgtccccggcggcggcggcacggtcaaaaacgccggagatgacgcggtggaacggccgcctcgtgtacgactccgccgcgctggccgacgacggcggcggcggcgtcctcgtcttcgccaagggagtcaacccgcgccaaggagtcaaccgcgacgccgcggatatccggtgcatctactaccgccgctgcaccgccggagaagtggtggtcgcctcgctcccggccgccacgtcggcgcagcatgtcttccggtgccctgcgccccctgcagccggcgcgcagcagctccgcgtgacgctggccgtcgctggcgaggaccccatcccatcggtggcgacctacatgccccttcctccagcagcccagacgacgacgacgaagaaggagaaggagctcatctgcgcgtgcaccatggtccgcgacgtggccaagttcctccgggagtgggtggtgtaccacgcggcagtgggcgtggaccgcttccacgtctacgacaacgggagcggggacgacctggagggtgaggaggccgggttctcctacgcggcggcggcgcaccgagactcgtgcgagtggatggcattcatcgacgtcgacgagttcatcttctccgcgagctgggccgggcggggcgaggcggccaaatccatgctccggctcgtcgtcgacgccgtcgagccggacgtcggccaggtcactctagggtgcagggacttcgggccgtcggggcagaccaggcacccccaggagggagtcacacaggggtacacgtgccggaggcgagcggaggagcggcataagtcggtcgtcaggctcgactccgtggccccgtcgctggtgaactccgtccaccatttcgagctgcggtcggagttcaggtgggagcggtccaaggatgcgagagtcaaccattacaagtaccaggcttgggatgagttcaaggccaagtttcggcgccgcgtgtccacctacgtggcggactggaccgaccgggtcaaccatgggtctaaagaccgcacacccggcctagggttcgaggcgatcgaaccgaccgggtggtcacacatgttctgcgaggtggaggatgccctgctccgggacgtgacacggaggtggtttggtgttggattcaccggcatcaaccataaaagattaggagaacattcattttga

SEQ ID NO: 8726 - DNA, 381 bp, Zea mays
  Peptide Sequence Number=SeqID_50505
atgagtaaccatttcgagctgcggccggagttcaggtgggagcggtccagggatgcgagagtcaaccattacaagtaccaggcttgggatgagttcaaggccaagtttcggcgctgcgtgtccacctacgtggcggactggaccgaccgggtcaacaatgggtctaaggatcgcacacccggcctagggtttgaggcggtcgaaccgaccgagtggtcacacatgttctgcgaggtggaggacgccctgctccgggacgtgacacggagtttgaggtggattgaggcaatgtactctcatgatcaaggatttaaagaagtatatgagagggagattcaagcctaccatcttgtgagagtaaaaggcaatgtactctcctga

SEQ ID NO: 8727 - DNA, 447 bp, Zea mays
  Peptide Sequence Number=SeqID_50506
atgtggccctcccccgcgatcccctgcgcgcgtgccccctcctgcccggcgtggttggccctcgggcttacccccggcgcagcggcccccgacacggttggcccctgtcacacccaggtaaaaaggagtgatcaagggcacaacttgcctgggactcgagattccaggtaccaacttgctcttcaagtgactcgtgacctcgtgctagtcgtagtaatacaaacaaacatgcggtcggatctaaaatcgacgctcgagattaaaggatctcgcgatctgatctcgccaatagatccgagatcaacagctacgattttcgatcacgatgggtatttgagattcaattgtgagcgttcatcactggatcaacagacagggcaacagggatgcggcatcctgcccgcgatggctgctgtgaggctatggatgatattagtctttgattga

SEQ ID NO: 8728 - DNA, 705 bp, Zea mays
  Peptide Sequence Number=SeqID_50507
atgcgtgccaatttgcgcatcttgggtgaggacccattttttgggtggattttgcagcagcgttgtgatcaagaaactactggggaagcaaaaacgcgcgagattctcgacaaacttgaaaaaactacctgcaacacaaatccaatttcaacaccagctgttgagaaggtgatggatgcgctcaaagcaagctgtgctgacctccacagcattgtggaggatccccttccagctgcaaaggcagttgcagatgagttattgactgcgaggatggaaaaattagttagcctgaatgcccaagaagtaggagggcagccaacaacttgtggcgttgcaggaccgagtattcataatgacaaagacaatggtccaggtataggcaaacctcacagccttatggagcggaacgcaacagcacgaacctctcagtgggaggagtcacttggtcttgatggttcggaaccaccctcaccaccgagaccacacttgcctagcccaaggagactaccaccttctcctttgtcaccgcctgggaacaaaaacaataatcggagaaaggcaaggaggtggagcttgttcgaagaagaaaccttaagaaagggtgttgaagagtatggtgttggcaattggagggatattctagataacaatgctgaggcttttaccggcaggacaccggttggtaattctgttattacagtttag

SEQ ID NO: 8729 - DNA, 348 bp, Zea mays
  Peptide Sequence Number=SeqID_50508
atggccacctcggctcacacccgcgtgtctgctccgcgcgctgcctcgcccgccgtcgtggtgcgccgcttcccggccgcgctaaaacgccaacgaaagagagtgagcctatgcctgggttcgccgaaatccaaggatagtgccctctgcgtcgtgttcgccggtaaggatactatccatcacttcgcctttcttcccccaatgtttggcaccgttcgcgtttggattttgacgccagtgcgctgggcggaggaaatccagcgagctcccagggtggagctctgcttcgtcgccgccctgctgattggggaagaagagagggttgggggaaattcgcgcgagccgtag

SEQ ID NO: 8730 - DNA, 273 bp, Zea mays
  Peptide Sequence Number=SeqID_50509
atggcggcgacagcttcctttctctctcttcgaatcctgctagcaatactgggcgctgcggggcaggaggcgagtccgcaccgaggaggttggcgtagaatcctggttcaacgcgagaatcgtggcatcagtagcggcggtccggtacggaggttcggctggattcgcgaggaagagggttctgcggtccggccccacatggcggaggtagtaatcgtcgcagatttctacttcaagtttgaattcaaatcagagtttcaaactcaagtctag

SEQ ID NO: 8731 - DNA, 207 bp, Zea mays
  Peptide Sequence Number=SeqID_50510
atggccaacctggtggcggggaatttcttgccgtggaacagcctatgcctgggttcgctgaaatccaaggatagtgccctctgcgtcgtgttcgccgtgcgttgggcggaggaaatccagcgagctcccagggtggagctctgcttcgtcgctgccctgctgattggggaagaagagagggttgggggaaattcgcgcgagccatag

SEQ ID NO: 8732 - DNA, 210 bp, Zea mays
  Peptide Sequence Number=SeqID_50511
atggttacaagtagagagccaaatagatcatggcccgaggaagtgaacaagaacaaccatattagtaggaaagtcctgtctggccaattgttaagggcacctgagggaggggggcctgaaaaggtccagttcaccatcaagtgcttctcccgctacatgagaaggtctggcttctctcccgacaagattcgcagggacgttcgggtgtag

SEQ ID NO: 8733 - DNA, 123 bp, Zea mays
  Peptide Sequence Number=SeqID_50512
atgaccccctgtgtccaccagaaatattcgcgtcaccatttttcccctcgtcggacctcgccgagcgcactctgctccgcgctccgtggccagacgaacctgcagaactttgaaaaagtgtag

SEQ ID NO: 8734 - DNA, 1200 bp, Zea mays
  Peptide Sequence Number=SeqID_50513
atggcggaggagtcaccggccgcagtctcagcggcggcggcgcgggcccggccactggaggcggtcgcggaggaagggcaggaggtggcggagcagcacgaggtggcagttggctccaccaagaccatggagcgcgtggcggccgcgaagaagttcatcgaggaccactaccgcgcgcagatgaagaacctccaagagcgcaaggagaggcgcttgattttggaacaacagctagcttcttcacaagttccgagggaggagcagataaacttaataaaggatttggagagaaaggagactgaatacatgagacttaaaagacacagaatttgtgtggatgactttgatctgctcactatcattggaaaaggtgcttatggacaggttcaactatgtcgggaaaaatccactggtaacatttatgccatgaaaaagctgaagaaaactgatatgcttgtgaggggtcagtttaaaagtctgcgccaagtcaaaatttgccttataaaaggggcagaggaagcactagtggagcatgttagagctgaaagaaacttactggcggaagttggtagccactgcattgtgaagctatattattctttccaagatgctgagtacctctatcttatcatggagtatcttcctggaggtgacatgatgaccctcctgatgagagaggatactctgactgaaaatgtggctcgattctacattgctgagactattcttgccattgaatccattcataaacataactacattcacagagatattaagcctgacaacctacttctagacaagaatggtcatatgaaattgtcagattttggattgtgtaagccaattgattgttcgaagttgtcaacactgaatgaaaatgaaccaatgactgatgaaaaccttagggagtctatggacatcgatcattctctctctgatactgcaaatggtaggagtaacactaattctcatgatcatgaactctcaaaggcattttcaacagtcgggacacctgattatattgctccagaggttctactaaagaagggatatggactagagtgtgactggtggtctcttggtgcaatcatgtatgaaatgcttgttggttatccaccattttattcagatgatccactagttacatgccaaaagctaagttcatatcttataattactttcaccttttggccttactga

SEQ ID NO: 8735 - DNA, 459 bp, Zea mays
  Peptide Sequence Number=SeqID_50514
atggcgcccttgcgtcatgttcctccctggaggtgtcattgcagaaccaccactctgctctcgcaccttggtccctatggcattcttctgtcacccgataatccaagattgtctcttgaagcaaaggatctcatttgtcggttattatgtgatgttgatcacagaattggcagcggaggagcagatcaaataaaagctcatccttggtttcgaggagttgaatgggacaagctgtatgagatggaggcagcatttaagcccctagttaatgatgaactggatacacagaatttcatgaagtttccagatttaaaccctgctccagcaagagcaagttctggggcttcaaggaagatgatgcttaattctaaagatcttagctttgtggggtatacatacaagaattttgaggccgtgaaaggtttgcatcagtttgcaggtgatctatttctgtactag

SEQ ID NO: 8736 - DNA, 174 bp, Zea mays
  Peptide Sequence Number=SeqID_50515
atggctacggcgagatctccgttccatggttctgttgtagccatcagggagaagaagggctccaggcgacatggtggtgacgaggatgatggttatgattatgcttatggtactggtgaagatgaagtcgtggaggaggacttccaggagttccaagagtacgatgagttctag

SEQ ID NO: 8737 - DNA, 780 bp, Zea mays
  Peptide Sequence Number=SeqID_50516
atgtcgcaaactaactgggaggcggacaagatgctggatgtatacatatatgattattttatgaagagaaatttgcaggcaactgcaaaggccttccaagcagagggaaaggtctcttcggatccagttgcaattgacgcacctggtggatttcttttcgagtggtggtcggttttttgggatatattcatagcaagaactaatgagaagcattcagatgttgcagcctcatatattgaggtacaaatgagcacattattccagactcagctcatgaaagccagggagcaacaacatcaacagcagcaacagatccctcaacagaggcagcagcagccacagcatatacaaatgcaacaaatgctgttgcaaagagctgtgcagcagcagcagcagcagcagcaacaacaacaacaacaacaacaacaacaacaacaacaacaacaacaacaacaacctcagcagcagcagcagcagcagctgcaacagcaacagctgcaacagcagcgtagagatggttctcatcttctcaatggttctgcaaatggaatttctggaaacaatcctttaatgcggcaaaaccaaagtactgcaaatgttatggcaacaaaaatgtacgaggaaaggttaaaggtaccttccgagagagactctttggaagaggcatcattgaagcaaaggtacggagagaatgctgggcaactacttgattcaaatgaagcatcattgttgaaagcagcttcaagcgcgcaatcctcagggtacttgctgagcctgtga

SEQ ID NO: 8738 - DNA, 426 bp, Zea mays
  Peptide Sequence Number=SeqID_50517
atggtgacctgtacctgcgcttatttcgccgccactgccgacctgatcgactgccatggcctccccgagtgtgcccgtcccttcgagctcatgctgttagtgggtgaaagtagcaacgagggccatggctgtcacaactgcaacaacgaatatattggtctcctaggattgcttggaggtatgttattagctcatgtagagtgtcagattgccacgaacgagaatccacttgctaagttggtctcttacaaggctccaatagtgacaaatgatgatgatggagagctattctatgggcgtaaggatgtcatgtgggatgaggagacacatcatggcttgttgcagcagcatgctgaagcaatggataaccagatagtgggcaagcaggaggtgtctattgaaatactttgtgagatcgtgttatag

SEQ ID NO: 8739 - DNA, 339 bp, Zea mays
  Peptide Sequence Number=SeqID_50518
atgagcgtagacacgttgaggaacacgtcggtgagcgcgttgtcagaggctgagcatgcgcaggcctggaaacactgcgagggcatcgtggtggagcagggttgggcgtggaggaaggagcaggggggcggcgccatggtggagcagcggggcgacgccgtggatgagctgggtggccgtcagaactcccagacctggatgatgttccatgaaattcaatgccttgcatttaagctgtccgcacagaatcggatgactaagggctggcgccatggcgacatagtccttcctacagatgatttgaagcgtcgttgcaagtttctgggacttgttatttag

SEQ ID NO: 8740 - DNA, 900 bp, Zea mays
  Peptide Sequence Number=SeqID_50519
atggcctccgcctgtcctgatcgatccctccgtcccaaagccttcacttggttgagggacatgcgctgggcctgtggaggttatgacttcgctcgatcactgagaaacatcttcgcgaatgttgaaggtgaccggggtgatggaaaaggaccgttaggagtccatgcggaagaagcgaaaggccccgcttcggctggtggacccacgacacgacgccaaggtgtcacgtcccagcgcgaaggaagctgctccggcttctgcgatgccccctccggcggcaccagtggcgcccgagaggagactggagggaccagccaagagttgtccgttgacaactacctggtaggaggcgtcaccatgtttgatgcccagacagggctaccgcctattggggcttcaacgaagggtgtggttgtgacctcgtcgaacctgtgggcgcacttttacgccattgctgatgggggcggagaagttccgcgttccgagaggagacagctggagggcaaaatagagcgccatcggatgcaacacaccgaagctatcagggacaattccacagccaagaacaaaagccaaaacctttttgataaggtgactacgcttgaaaaagagagtgaagatctcggtcgtcggctcaatgacgagaaggacatcgctgctgaggcgaagacggaggccaaaagtgcatgcgcggaggcccaagctacccgcaagtgtgctgccgagcttgagctcgaggtgaagagtatgcacgcctaccgcgagagaatggaggtcgccatgcttgtgggtgtggaccgggcacacacactttttgtggatacgtaccacgacctgggtgtgcagactgcccccttagacaagtcgggagaggaggtggggactcattttctcgggtag

SEQ ID NO: 8741 - DNA, 1836 bp, Zea mays
  Peptide Sequence Number=SeqID_50520
atggcgcctcttccactcccccttcccgccaccatgatcactccccaccattccaaaccgcacgacgcgccgaggcccgaggcctctttgcacgccacgctcgcctccttctcgcagcaagccaacgagggcagcctccgcgacgcgttcgcactggtcgcccgcgccgagcggcagtcctcccccgccgcgggcgttgcggtgggtccggaggtgtacacgtcgctcctccagtgctgcgtgacggccgggtccctccgcgcgggccgccaggtgcacgcggcgctcgtcaagcgcgggacgtactactgccggaacgcgtacgtcggtaccaagctcgccgtctgctacgcgcgctgcggcgcgctcgacgacgcggaacgcgcgttcggcgcgctcccggagagggacaggaacgccttcgcgtgggccgccgtcatcgggctctggagccgcgcggggctgcacggcagggcgctggcggggttcgtcgccatgctcgaggccggcgtccccgcggacaacttcgtcgtccccaccgtgatcaaggcgtgcgcggggctcggcctggctggcaccgggagggcggtgcacgggcacgcgtgcaaggcgggcgtggctgagtgcgtctacgtcatgagcagcctcgtggacttgtacggcaagtgcggggaggtggaggacgcgagggcggtcttcgacgcaatgcctgagcggaccgtggtcagctggaacacgatgctcatggcgtacatacacaacggaaggatcgacgaagccgtggatctgttttacgagatgagggtcgagggcgtgctgccgacgagggtgagcatcgtgagctttctttccgcatcagcgggtctcgaggctatcgacgggggaaggcagggccacgcagtggcagtttcgagcgggctggagatggacgtgattttggggagctccatgatacacttctactgtaaggttggcttggtggaggctgccgaggcagtgtttgagcagatggaagggagagatgctgtggcttggaacttgatgattgctgggtattttcaggacgggcagatcgataaggcgttacacacttgccgaagaatgctggaggctgacctcaagttcgactgcgtgacgctggcgtccattatcatggcttgtgtaaagtcctgcatcacgttgctgggtatagctgctcatggttatgcagtcagaaacggtcttgattcagataagacggttgctgctggcctgatagacttgtacgcgagtactgggaggatcgaacaagcgcgtcgagtgttcaatgccacgagtccgcgaaatccggtcgtctggaaagcattggtttctgcttacgtcgactgtggcatgaactctgaggctcggaatcttgtgaatcagacgcagcttcaaggcatgtcctcaaatgcaacgtgttgggattctgtaatctctgcttttatacagaagggccaactcgaagacgctgtagatatgttcagcgagatgcttctgacgaaaacacggcccaacctgcggacctggagcttgttgataagtgccttgtcgcaaaatggcatgcgccaggaggtaacaagcatatgctgcaagatgcaggaagtggagtcagcgcccagtcccacaatctattcatcagcgatccttgctgttaaaacggcagcttctgtagattacgggaaggcaatccatgcgtgcgttgttaaaaagggcctgctgctgtccagatccgtgatccagtcgcttctgaacatgtacagtagttttgacgacagagacacaatggatggtttgctgagactgtttcctgaataa

SEQ ID NO: 8742 - DNA, 270 bp, Zea mays
  Peptide Sequence Number=SeqID_50521
atggcggcgagagcagcgagatcttgtcggtcagaagacaattgcctttggcgtgccggcgttgatgcacataaggaagaaagtagggggaaagcagggactgtccatgactccatgtactatcttgtgcggattccgcgcacccatatcacctcctaccggatcttttcagctcttcatcaggttacactttttacccttgcttcagcttggctcaggctacttatgtttcagattttcatgcagtcaccgggtgctgtttttggctga

SEQ ID NO: 8743 - DNA, 312 bp, Zea mays
  Peptide Sequence Number=SeqID_50522
atgtctgtggcgaaggaggcggggccgagcagcagggcggtgcttgtgacgggcggggcgggatacatcggcagccacgccgtgctgcagctgctcaccgcgggcttccgggtcgtcgtcgtcgacagcctcgccaactcctccgagctcgtgatccgccgcctgcgctcgctcgcggtggaacacgccaaaaacctcgcgttccacaagattttacttgggaagggggaaatgcgcagattgatcttggctaggaagtataaattcagattagatatgtgcccatgcgttgcgacaatgtatactatttga

SEQ ID NO: 8744 - DNA, 372 bp, Zea mays
  Peptide Sequence Number=SeqID_50523
atgccgtgggccgcccgctcctgcaccgccgggaccactgccacgtgtctgccgcgggggactgatgggggtgtcggtggggttgcatgttgctcggctgctcgctgctccgggccgaggcaaggcaacgactcgtcgtcaaaggatccgatttgccactacccgtgggccgtggctgcattagtcggggacagggatgccaatggatatggttcaaaccaggctctgtacatacaaatcacccgtcttagccaggctcggtggatacggacgaaatccgcgttcgtcgggagcctggttgtgctcattcaccgcacttgctcacagccgtcactcgccgcatccgctcgagcgggcgaacccccctactag

SEQ ID NO: 8745 - DNA, 639 bp, Zea mays
  Peptide Sequence Number=SeqID_50524
atggttgatatccgtgacaaagatggattggaaaaggtttttgcttcaacaagatttgatgctgttattcattttgctggactgaaagctgttggagaaagtgtacaaaagcctttgctttattatgaccataatgttgttggcacaataaatcttctggaagtaatggcagctcatggatgtaagaagttagtgttctcatcatcagctgcagtttatgggtcacctaagaactcaccctgcactgaagattttcctctcactccacataacccatatggcagaaccaaacttatggcagaggagatatgccgtgatatctaccattcagatcctgaatggaatatcattttgcttaggtactttaatccagttggggctcaccccagtggataccttggtgaagacccatgtggaactcctaacaaccttatgcccttcgttcagcaaattgcagttggcaggaggccatcgctaacaatatttggaaataactacgcaacaaaggatgggacaggggttcgtgattatattcatgtggttgaccttgctgaaggacatcttttcgcattaaagaagctttttgaaagctcatctaacataggtttggacaaatggctgcccccttatatactatag

SEQ ID NO: 8746 - DNA, 222 bp, Zea mays
  Peptide Sequence Number=SeqID_50525
atgacccgccttgacaacggggaagatgcatctgccccacaggtgaagattggcgcaggagggcctacacccttgggagattgcaacctcgctgacggagagtacgtcctcgtgccggagcaaggagttgctcaggaggtagccccagatccagcaccagagcctgccccagaggatctgcctgccccagctttggaaggcaagccccggttttatgcataa

SEQ ID NO: 8747 - DNA, 873 bp, Zea mays
  Peptide Sequence Number=SeqID_50526
atggagcggtcagaccgtatccatggtggaactctagcaccgtggtcccagctcggccgatttaagatccgcacccatcaaatcaagggcacagggggcatgaaggggcccgcattccaatgtcttgttctccacgtcgctaccgtaacaaactcgagctacgctgctgggccgttacgatctggggcgaatctgacttcgccgccaaatccgcaacaacccgctttggtcgaactcctggcacctacccggactcgcctctgggccataaaagccagcggtgagctcttgtgtcgccatggctgtggatcccgctctccggcaagcggcggccacgccgcagaagccccaacgacgctgaccgcgctacactacaaacttgtagtttgcactttgcaccgcatttctccggttgtgtgggttgcctctgcgccacggactgcactgcgcgtcgccttaccgtgctccccgtcgttcctagtctcgggtggtgacttgggaggtctcgccaccacctctacctgcttcagtgaactcaggccttgccgcgatctcaggcacctgggtcaactcctcgtccgcgccgcacgtactcgagcatcatcgagcggagaggagtgtccgggccccccccggaattggtggccggaaatcatcgtcttcgcaaggccgccgcgcgctgtgggctggactttctgcgccgccatcatcggtgagaacctctcctccgatctcgcccttatctctgctccctatagcatccttcgattgggatttgtcacatcgagtcgctgcgccgccccctacgacgagagcgcggccgcgtgtgctctgcgccgtcgcgcgtctccagcaggggaggatgacgagtag

SEQ ID NO: 8748 - DNA, 654 bp, Zea mays
  Peptide Sequence Number=SeqID_50527
atgttctataatgtctgcaagacgggtgaaacgttcctggtgagaggtcgggacggggctgaggccgggcgggtgggccaccgcgctgagggcgccggggctgggacctcgcgccgcgccacggggagggagggagccggggcgggcgcgagcgcctcgtccgcgccgagccggacggggccacgcgcgccggagccgccgcgccggggagggaaggaggggaggggcgaggggaagaggagggagggtgggtttatcgcgaggggcgaggccggcgtcgaggggggcggttccggtcggcggcgaggtggggagggagaggtaaacgagctgcacggggaagaagacgtgcgcgagggggtagagaggagagagagaaagggggaggcggttttggggaagggggcggctgacaagcgggccccacaggggggtggcggcggcggctcaaccgcccgcgccgagtgcgcgcgagggggcggggggggacggctgggccgccaggtgggcccaaagcgggggggaagggggcggctggccaccgagccggcccacgaagggagggggcggctgacgcggctgggccgcggtggggggggaaggggaggggcggttgggccgcgcgagaggggggcggctgggccgccgagctag

SEQ ID NO: 8749 - DNA, 642 bp, Zea mays
  Peptide Sequence Number=SeqID_50528
atggcgcggccgtggcgctcgcactcgccccggctccctccctccccgtggcgcggcatgcggtcgcggtcccggccccggcgccctcggcgcggtggcccgcccgcccggcctcagccccgtctcgacctcggcgcgggcccggctcgccgggccgtggcgctcgcgcccgcccgcctggcgcggcccgcgaccccggcgccccacctcgcctcgaccccctccgtcccctacccgacacggcggcgcgcccgtgcggccccgccccggcctgctcggtcaccgtcctcggcgtccgcccgccccaacccctccctgcgcggcgcgctcgagtcccccacgcccggccccggcaatccccctccccggcctaacctcgcccgccgctgcgtgcagtccgacctcggcgcggcgtgcccgcacggcctcgcccgcggcacaactccccgccccgttcggccctccctgtgcagcggccgccgtggcgcgaggatccagggtgtagttcgcttcaccgtcgtgccgtcaatggggctcggtgtagcaatgagactgatggttcttggttttgactttggtaatggagaagatgaagccgtggaaggagacttccaggagttccaagactacgacgagttctag

SEQ ID NO: 8750 - DNA, 345 bp, Zea mays
  Peptide Sequence Number=SeqID_50529
atggcgcaggtgagcgtggtgacggcggcgaggagggagctagcgggcgcgctgaaccccgacgccagggagttcctcccgtggtggcgcctagggggcagcaggaagcagctctcggccgacgcgccagagttcacgcggtccagcttggggcgagcggtggccgcagccgccgccaacggtgcggtgatagccgccccaaacaacgcccggcgtggggaaggcggcggaatattcagcctcagactccaagccccctccctgacaaatgatatgcctatagttccttccactgtgccagccgcagccacattcatcagtcctcctggatctctctcgatttaa

SEQ ID NO: 8751 - DNA, 3207 bp, Zea mays
  Peptide Sequence Number=SeqID_50530
atgcccggcataccgagggatgtcgccgagcactcgctggatattcgggccggagcccgacccgtcaggcagtctctgcgccgattcgacgaggagaagcgcagagtgattggcgaagagatccacaagctaatggcagcagggttcatcaaagaggtattccatcccgaatggctcgccaaccctgtgcttgtgaggaagaaaggggggaaatggcagatgtgtgtagactacactggtctcaacaaagcatgtccgaaggttccctaccctctgccccgcatcgatcaaatcgtggattccaccgctgggtgcgaaaccctgtccttcctcgatgcctactcagggtatcaccagatccggatgaaagagtccgaccagctcgcgacttctttcatcacgccgttcggcatgtactgctatgtcaccatgccgttcggtttgaggaatgcgggcgcgacgtaccagcggtgcatgaaccatgtgttcggcgaacacatcggtcgcacagccgaggcctacgtcgatgacatcgtagtcaagacaaggaaggcttccgacctcctctccgaccttgaagtgacattccgatgtctcaaggcgaaaggagtcaagctcaatcctgagaagtgtgtcttcggggtgccccgaggcatgctcctagggttcatcgtctccgagcgaggcattgaagccaacccggagaagatcgcggccatcaccagcatggggcccatcaaggacttaaaaggtttacagagggtcatgggatgcctcgcggccctgagccgcttcatctcacgcctcggcgaaagaggtctgcctctgtaccgcctcttaaggagggccgagtgtttcgcttggacccctgaggccgaggaagccctcggcaacctgaaggcgctccttacgaaggcgcctgtcttggtgcccccggcggatggagaagccctcttggtctacgtcgccgcgaccacacaggtggttagcgccgcgattgtggtcgagaggcaagaggaagggcatgcattgcccgttcagaggccggtctacttcatcagcgaagtgctgttcgagaccaagatccgctacccacaagttcaaaagctgctatatgctgtgatcctggcaaggcggaagctgcgacactacttcgagtctcatccggtaactgtggtgtcatccttccccctgggggagatcatccagtgccgagaggcctcgggcaggatcgcaaagtgggtggtggaaaccatgggcgaaacgatctcgttcgccccttggaaggccatcaagtcccaggtgttggcggacttcgtggccgaatgggttgacacccagttgccgacgactccgatccaaccggagctctggaccatgtttttcgacgggtcgctgatgaagacaggagctggcgcgggcctgctcttcatctcgccccttgaaaagcacctgcgctatgtgctgcgcctccatttcccggcgtccaacaatgtggtcgagtacgaagctctggtcaacgggttgcggatcgccatcgagctaggggtcagacgcctcgacgcccgtggtgattcgcagctcgtcattgaccaagtcatgaagaactcccactgccgcgactcgaagatggaggcctactgcgacgaggttcggcgcctggaagacaagttcttcgggctcgagctcaaccacatcgctcggcgctacaacgaaaccgcagacgagctggctaaaatagcctcggggcgaacgacggtccccccgaacgtcttctcccgggatctgcatcgaccctctgtcaagatcgacgacgtgcccgagcccgaggcaccctcggctcaagccgaggcgccctcagctcggcccgaggcaccctcggctcagcccgaggtaccattggcccccgagggtgaggcactggacgtcgaggaagagcagagcggggccacgcctgatcgagattggcaggccccgtacctgcaatatctccgtcgaggagagctaccccccgaccaagtcgaggctcggcgggtagcgcgacgcgccaagtcgttcgtcttgctgggcgatgaagaggagctctaccatcgcagcccctcgggcatcctccagcgatgcatctccatcgccgaaggtcgggaactgctgcaagaaatacactcgggggcttgcggccaccacgcggcgccccgagcccttgtcgggaatgctttccggcaaggcttctactggccaacggcggtagctgacgccactagaattgtccgcacctgcgaagggtgccaattctatgcgaagcagacccacctgcccgctcaggctctgcagacgatacccatcacctggcccttcgccgtatggggtctggacctcgtcggtcccttgcagaaggcgcccgggggctacacgcacctgctggtcgccatcgacaaattctccaagtggatcgaggtccgacctctgaacagcatcaggtccgagcaggcggtggcgttcttcaccaacatcatccatcgcttcggggtcccaaactccatcatcaccgacaatggcacccagttcaccggcaaaaaattcttggatttttgcgaggatcaccatatccgggtggactgggccgccgtggctcatcccatgtcgaatgggcaagtagagtgtgccaacggcatgattctacaagggctcaagcctcggatctacaacgacctcaacaagttcggcaagcggtggatgaaggaactcccctcggtggtctggagcctaaggacgacgccgagtcgcgccacggatttcacgccgtttttcctggtctacgcggctgaagctatcttgcccactgacctggaatacggctccccgaggacgagggcctacaccgatcaaagcaaccaagctagccgagaagaatcgctggaccagctggaggaggctcgggacagggccttactacactcggcgcggtaccagcagtccctgcgacgctaccacgcccgaggggtccggtcccgagacctccaggtgggcgatttagtgcttcggctgcggcaagacgcccgagggaggcacaagctcacgcccccctgggaagggccattcgtcatcgccaaagttctgaagcctggaacatacaagctggccaacaatcaaggcgaggtctacggcaacggctggaacatcaaacagctacgtcgcttctacccttaa

SEQ ID NO: 8752 - DNA, 381 bp, Zea mays
  Peptide Sequence Number=SeqID_50531
atgtttccaaacgtttcagatgaagcaattgcttcgttggatcttgatggatatattattagcgtatcccctttgagcgtttcacgctcaaggactgcaatctgccctattaaccccaagttccttcctcagtctgaagctgagtgggagacgtgcttgaggactatatattgcaccaatatcagcaaaaatgtgtgtcgcgttaggcttctggataataaagagcgctccaccaatatagctttcattgagtttgttgaggtttatggtgctattgctgctcttgggtccggtggcatttatgtggatggcgttcctatcaggatgtgcccatccaagagcccgataaggacccattgctttgggaagcttagtagctaa

SEQ ID NO: 8753 - DNA, 1464 bp, Zea mays
  Peptide Sequence Number=SeqID_50532
atgaggagcatctccgcctgcttcttcttcgttcttctcatcgtctgcttgttgggatcgcacgcaaattcgtcgcaggaggctaggctaagagaatttatcctgtccagaaggagcagtggcagcgcgttcagcgcacacgacgagtcggcctccacggccactagccgcctcagatcagagtactccggtacggaccagagcgcgcagaaggcggccgacaagatcacagagctgcccgggcagccgggcggcgtcggcttcgaccagtacagcgggtacgtgaccgtcgacgaggagagcggccgtgcgctcttctactacttcgtggaagcggcgcacgacgccccggcaaagccgttgctcctgtggcttaacggaggccctggttgctcgtcggtaggctatggagcaatgatagaaatcggcccgttccgcataaccagcgacaacaaaaccctgagcagaaacgagaacgcctggaacagcgaggccaacgtgctgttcctggagtcacctgccggtgttggattctcctactccaacacgtcttcagactatggcaagagcggtgaccaaaggaccgcggacgatgcattcgttttcctcatcaattggctcgagaggttccctgagtacaaagcacgcgccttttacatctccggggagagctatgccggacactacgttccgcagctcgcaacagccatccttagtcacagtataaagagtgaaagcggcatcataaaccttcgggctatattggttggcaatgcgtacctggacgacaacaagaacacgaagggacagattgactacttgtggagccacggagtgatatcagatgaggtgtgggccaacattacaaagaactgcaagttcagtcttgcggacggtgacgcgtgctccgatgccatggcagcatatgattctgggtatattagtggatacaatatatatgctcctgtttgcatcgaccaacccaatggaaactactaccccagcagcaatgttccgggaattgacccatgcagcaactactacattcaggcttacatgaacaatcccttggtgcagatggctttccacgcaagaacgacagagtggtcaggctgcacaaacttgcactggaaagatgctccagtgtccatgacgccgaccatcaaatggcttctgggacttggcctaccggtgtggctatacagtggagactttgatgccgtctgcccactcaccgccacaaggtactccatcgctgacctcgagctctcggtcatggagccatggcgcccgtggacagcaaccagagaggttggaggctatgttcagcagtacacgggaggtcttgtgcttatttcagtgaggggagctggtcatcaagttccttatttccggcctgagagagcactggtgctgctcagatccttcttgaaaggaacgctcccaccttatgtagtggactag

SEQ ID NO: 8754 - DNA, 327 bp, Zea mays
  Peptide Sequence Number=SeqID_50533
gtgacggagacggatccgaggaagaccgtgacgccggtgaagggatcgggcaacgccggtaccaggggcaccatgaacaggatccagtcgaggagagagcgaaagctcgcgctacagcaagatgtggataagctgaagaagaagctgcggcacgaggagaacgtccaccgtgcgctggagcgggcgttcacgcggccgctcggcgccctacctcgcctgccgccgtacctgccgtctcagattttggtgaggcaatggggttacagggccaaagttgatcccgttttggtgcttgatgccaaagggggagaaaataggccaaagtga

SEQ ID NO: 8755 - DNA, 840 bp, Zea mays
  Peptide Sequence Number=SeqID_50534
atgccgtctttcatcgacggccccactttccgggcgctgctccggccgtccaccaacgggcgccggaccaagatctcggacagcggcggcggcggcgggggcatcttcaagatgttcaagctcatgcccatgctctcgtccgggtgcaagatggtggcgctgctgggcaagcacaacaaccgggcgctgctggccgaccacgcgacgacggtgacgctgttcgggccgcgccggggccgcgtgagcctggccatccacgaggacacgcgcgcgccgccgctgttcctcatcgagctgcccatgctgacgagcgcgctgcaccgggagatctcgtccggggcgctcaagctggcgctggagagcgacacccgcagcgcgcgccgccgcctcgtggaggagtacgtctgggccgtctactgcaacggccgcaaggccggatactccatccgcaggaaggaggcctccgacgacgagcgccacgtgctgcgcctcctgcgcggcgtgtccatgggcgccggcgtgctcccggccgcccccgagaaggagggcggcgtgcccgcggggcccgacggggagctcacgtacgtgcgcgcccgcgtcgagcgcgtcgtcggatccaaggactcggaggccttctacatgatcaaccccgaggagggcgggaacggcgccgataataacgggggcggtggaggcgccggcggcgcgccggagctgagcattttcctaataattgattttgtgaatcgtgctgagatcaaatccggggtgcatattgttcttagcggagtagcaagaacattattatatatgaaagagagcggtacttcattcggttga

SEQ ID NO: 8756 - DNA, 1434 bp, Zea mays
  Peptide Sequence Number=SeqID_50535
atggccaagggtagtccgccgctggatatttcaattatctgtcactatactagatgtctagacaggaattggatacatttcgttgagttgagcgtcaagcaggtgacggagacggatccgaggaagaccgtgacgccggtgaagggatcgggcaacgccggtaccaggggcaccatgaacaggatccagtcgaggagagagcgaaagctcgcgctacagcaagatgtggataagctgaagaagaagctgcggcacgaggagaacgtccaccgtgcgctggagcgggcgttcacgcggccgctcggcgccctacctcgcctgccgccgtacctgccgtctcaggttagcggcacctcaaccgcatcctgttctactagattactcgtcacgctccgagctgtgccttggattgcgctgaatccccttgctcgtaattgtgctgcgaagacgctagcccttctcgcggaggtggcggtgctggaggaggaggtcgtccggctagaggagcaggtggtgagtttccggcagggaatctaccaggaggcgaccgtcttctcctccgccaagaacacccaactccccggcggcgatgctcccgtgccggcgcagctcacaccgccgaacccggtgctgaattctgacatctcacccgcgacagaaagccaccatcctcccaacgctcgtccatcgtcgccgcacaacggcgtggccaatggcaagcaaacgccaacaaagcccgtcgtcaacactacctcgccgagccaggatgaccgacagacaaaaactgctgcgcctgaccgtaaaacgcctgctgacgctgctgctggcactggcagcacctctgacaaagcgacgtcccacgacgactcgatctggagcgtgccgaacatagctgctccgatgcctgctgaccatcttctccgatgcctgctccgaggacaaggaaacgaggatcagcaggcgctgtccccgtcggtctccggctccagcgagagctcgtcggggtacgccgcaggacccctacgggctacggcatcctggagctgggcgccagggacaccgggccctacaagcggttccacgtggtcgacgccgcgtccttggaccccaatgcgctggccggcgacggcgactgaaaaaaaaagagaggcaaattcgcaattttggtctgccgcaaagcaactacagcctggatatgtggtggtagtggtactagctcttggaggcgtgtgctttaagcctgatgaagcctggcatgtctgcgttccaggagcaagggatacctaccactaccaccccggaaatgctcgtggcgatgacggacacacccaaggtgccggcacaaccgaacccttcccacctccagataggcaggcgtacgcgcgcagggcattcactgaaggtaccctgcgcacaggttttgcttggcaataa

SEQ ID NO: 8757 - DNA, 2337 bp, Zea mays
  Peptide Sequence Number=SeqID_50536
atgcagccagacccacgcgggcaatcatgctgcaggggaccaaaagtcccccccacggccctacgctccgcggccagccggccacaagcccacaagcgctgcaagcctgcaagcgacggcaacgactggacgcccgcgcgcgggattcagcgcctggcacggcttcacagacgagcggacttttgtgtctccaacggcgcttggcgtttggatcgtgcgatcgcggtcgccagaaaagggtcgcggacgcgcgcggtggagcagaagggggtccagggtggtggcagtagtcctgttagagaaatcggaaagaacaagaaaaggaggtttaatcctaagtggtttgatcagtatgctaattggctggaatacagtgagaaggaggacaaagcctattgtctatactgttatttatttagggatagcactaaagacaatcactatggacacgatgcatttgtcacagaaggcttcaattcatggaacaagactgagagatttgtgactcatattggtgaccgtaacagttttcacaacaaagcagtcaagagttgtgaagacctactgaaattagatcaatcaatcccagcggctttgcataaaaaaagtcagattgaaaaaaatgagcatcttattcgattaaatgcggccattgattacacaatcaagcaaaatgatgtcattgcaaaagcattcaaaaatgctcctctgaataatcaaatgatgtctccaaaaattcaaagagctattacagaatgctttgcaagagaaatattgggttgcatgatggaagaaattggtactgatgtattcagtttattggttgatgagtgtcgagatatttcagacaaagaacaaatgggagtggtgcttagatatcttgataaatgtgggttggttaaagaaaaatttgttggtgttgttcacgtgaaagagacaacagcagcctgtctcaagtattgtattgatttcttatttgcagatcttggtttaagtctcaaacaagtgagaggccaaggttatgatggagcaagcaacatgtctggtgagttcaatggtcttcaagctaaaattaaggaggagaatggttctgcatactacatccattgttttgctcataagcttaacttagttgttgtggccattgcaaagaagatattcgatgttggagatttctttgatatgatctcagtgctattaaatgtggttggatcatcctgtaagagaaaagacatacttagagagcaccatcaagcagaagtgcagaaagcaattggaagtggagatattacaacaggaactggattaaatcaagaaatttgtcttcaacgaccaggtgacactcgatggaactctcattataaaacattggtgggtttgtctaaaatgtttccatcagttgtcaaagtgttagaatatgtcgaggaagatggtacagatgcatacaagaaacgtcaagcaaatggtcttttaaagtattttcagtcctttgattctgcatttttcttgcacatgatgatgatggtatttggtttaacaaatggactgtcaaaaactttacagagaaaggataaagacattttgattgctatttcagatgtacaatctactaagagagaactagaaaaacttagaagccaagaaggatgggaatctcttttgagcaaggtacattgtttttgtcataagcatgatatttcaatgatgaatatggaagatgactatgtaaacccaaagaaaccacgacaaaggactggtataaacaatgagcatcattatcgagttgattgtttctttgctgtccttgacctgttaagagaagagtttaataacagattcaatgaggaaaattctgagttgctcatgtgtatgtctgctctaagcccaagtgatttattctctcattttgacaaggaaaaattgatacacttagcaaaattctatccggatgactttgttcacaatgatatggcaactcttgagtatcaacttggcctatacattgataatgtccaacatgatgaaaggtttgctaacttgcaaagtataagtgatttagctaaattgatggtggacacaagaaaacacctttcctatcctttagtgtatcgactgttgaagctcgcattaactcttcctgtcgccacagcaactgttgagagatgtttttctgctatgaagattgtgaaaagtgcattgcgtaacaaaattggagatgaatttttaagctttagcctcatttgctatatagaaaaggaacaattggacactatttccaatcaaataattgttgatcgtttccacaagatgcaaggtcgtcgggggtcacagaattga

SEQ ID NO: 8758 - DNA, 345 bp, Zea mays
  Peptide Sequence Number=SeqID_50537
atgaccaaccccgatcaggaatcggcggagttccaccagcgcaccagggtgttttcggacatgatcttcgtcgcaagcatagggctatcctcccacggccaccagaggactccaaactggcacaagcgcccgaacttcaatggcggtgaggagctcagccgccctggtgttgtggcttccgcagtcgactcgaggaggtggcgagggaagggagatgtaggaaggagaggcttcggccgcgttttcctaaataggcagggagaaatagtccgcgtgctgcaaccgatcatgcggacggcgctaaaatcggatctccgcggctgctgttccgagcttcacgggtag

SEQ ID NO: 8759 - DNA, 243 bp, Zea mays
  Peptide Sequence Number=SeqID_50538
atggcgcccgaggctggacttagctactgtcagcctcactctgtcgagtggcacagcagtcggagcagggcagacgacgctgttttcctgtcaggtcggaaccttcggacaggggatgaagttgtacacgatatggaaagcagggtcagaatgaaggttgaaccagtgctgaagatgtgtgcaaggaagcttcggctcaatagcagaaagaggaaccgacttaaggaggaaaagactagttag

SEQ ID NO: 8760 - DNA, 417 bp, Zea mays
  Peptide Sequence Number=SeqID_50539
atggcattacttgcaagtccttatcattgcctgctcctgcgtttgccccatcagcaggaaccgccaccacgagggaagaacaaggtacttgatgagcagagtgcagtcctaatcactgtctgctcctacgttttccgtcgcagctgcattcaagcccttaccgcaacctgcatgcatgtcgtcgccgccggagaggagcaagagggagctagtatgggtggtaggtgcgggtggcgcacgcacccggcgatgacgggtcggaggcagaggcacgcagggaggggagcacacgatggcgttcggggcgtgcttattgaggtcgggccgtcggggaggatctcgacgagcggacgcgtgatcccgaacggcgccgctgaagtttctctcaccgccgccgacgcgggaaccagcagctga

SEQ ID NO: 8761 - DNA, 783 bp, Zea mays
  Peptide Sequence Number=SeqID_50540
atgtgccccctccgctgcgtcctcaaccgccgtggcccatcgactccaccgccgttgtcggtcctccgccccaccaccttcaaccatcgtggcttccccgatgagggcgacaggaccgctgcgaggacccgacgcgctggatgtgcgccctcctttgcatcctcgaccgtcgcgtttgtgaaccccgatctaaagacggagagagggttcgcggcgctgtacacgaacaagggcccgactgccgcttctgcagccgccaagcccttgctgcttgcctgcactgccatcgagtggagaaggagagatggagtcagaccagggcaaggcggcaagctaaagctcttcataagtggcatctcctgggaaacgatcaacgatggacaagaagctgagcgagcacttctctgcctacgacgaggcacgatcctggtcacaatcgctggagcttgtaccagaggggcaggaacttcttttgcagcatctggcacttcgttctctatatatatttggcacctctttcagtacaggaacttcaacaactggctcagtgtcatgaattttattagtcggttgctcttcaaggaattgggggcgctcaaattcagattgtgggatgtgaagcaagaacttccattttgtcaaccatttgtctgcacgatctctacatctagacaactggaagctaagcgagatctcgtcgctggtgtcgtctacggcaccgacttcttcacgaagaggaaaattcaagacagtagaggaatcttaattggacagattgagtag

SEQ ID NO: 8762 - DNA, 327 bp, Zea mays
  Peptide Sequence Number=SeqID_50541
atgggtagcacggaaaatgctctttctctcggtatggttcaccacatgcctgtgatctctctcaagctaggtatcggagaagtccgtcatggaattgaagtggtagagtggtgtgacctagtttgcttagtaagtatggaaggacaaaagacgagtacagatgactactattctccggcagaaagtcactcatttcctcttaaaggtcccaaagatatgagtaaaaaactcttccaaatcaaagatttgcctattcttcgtagtacgagaatactcttacttctcattgacacagacgagaaagaatttcgtaaagctatactttag

SEQ ID NO: 8763 - DNA, 156 bp, Zea mays
  Peptide Sequence Number=SeqID_50542
atgggctggtggctcagttgctacaggactagtgaaacgaacagtcagctcagtcaagagcaggaaagccagccccttattagtactccagagagctacttcacccagaataaagagaagatgcgtcttcttctttctcagatggcccgcatgtag

SEQ ID NO: 8764 - DNA, 456 bp, Zea mays
  Peptide Sequence Number=SeqID_50543
atggacgattttcccattgagactcagttttttcaaaagaaatctgatcctccggccaagccgaagttcctggaacatatggatcaatcaagtggattggaaagctatggttatatgctgcccaggtcttgcggtataggactttactactctactcggatgccagaatcagaagatatcatattctcccagttgagattctccatccaggaattccagtctttgactcgggaaacgaagaaggccgcccttagaccggagtccttgggcaccctatatacccacccccgaatggacaggccccacgggaatcgccttgaagatgtccacccctttcttagaaaaatggaaagaaaggtgctcagcgacgactgccccttctacctttacttttttgccactctgtctctttggagcatccgtttcctcatattatcgattcataaaggtccatga

SEQ ID NO: 8765 - DNA, 159 bp, Zea mays
  Peptide Sequence Number=SeqID_50544
atgacctgggttgaagaaggaatctatgttcttggaagcaaagaaagaactccggctaaaaagaattgtctcttgtgggagtgcccaataaggatgaagagacctggttacttgaaggcggattccgaccttccaaagaaagaagtcagtcactactga

SEQ ID NO: 8766 - DNA, 135 bp, Zea mays
  Peptide Sequence Number=SeqID_50545
atggccgttgcttttgaacctggggagtttgcttttgtacttaagcaagggaatttgatgaaagtgattgagctgacctactatctatattcggtaagcgggcttgctgatctacccatacccaggcgcttctga

SEQ ID NO: 8767 - DNA, 246 bp, Zea mays
  Peptide Sequence Number=SeqID_50546
atgtcccagaaggcttggattacacagattctaccagaggatgttgagatgctcccattgcaactcactgatggagaagaactggagagctcagctagagctggaggaggtggtagtaccagttccctactggctttgaatataaacagcactctgtcacgattcgtgggatttgaactattagaaaagtccgtccgtgtgccaaacccagatcaagtactgtacatcaggatccccccagcataa

SEQ ID NO: 8768 - DNA, 270 bp, Zea mays
  Peptide Sequence Number=SeqID_50547
atgagggatttcgctgtattgttcgatatcttctatacccccgacggagtttacatgataaacggggtcagcgcatctgttttgggtacagagggccataggttcgaatcctgtcaccttgatgtgtatctggaaaggaccaggagccgagaggaacttctcaaattaactaataaaatctatgaagggaagcaatccgtactttcagagcttaggcgtttagctggccctttccatggccaaatcaatcctgttccaggatatggatag

SEQ ID NO: 8769 - DNA, 168 bp, Zea mays
  Peptide Sequence Number=SeqID_50548
atggacgttgccgcgccctggctcagctctgttggggggagggagcattggtgtgcgccgtgggccgtggatctcgggatggacgaagagcccgtgaccgaggatcctggtgagcagcaggttgaagtagctgagcaggagctcattgaaggcaagttgtgcccttga

SEQ ID NO: 8770 - DNA, 801 bp, Zea mays
  Peptide Sequence Number=SeqID_50549
atgctggcgtctacaactttcgcggcgactacacgctcgtctgcgccttcgagtcggcgcaagggtccgacatctactgcttcgcggtgttcacgtcggggatcggcgcgtggcgggtcgccaacgcggtcgcgcccgccggggctcgtccccgcctcgggcgtcgtggctgacgggacagcctggtggcggacggacatcggtaccaccgtcgggtacaactctgtcgcgagccgcgtcgacctctcgttgtgccccggggacagcgcccggtgggagatcggctccgccgcgggcagactgcactgcgccgtgcgcgacggcggcgacgtcctggtgttccgcctcaacgacaggcgcggtggctgggagctggccacctcggtctccgtctgcgagatactgcagcggccttggcaaccggagaccactttcgagctatccgactccgaggacgacaacaaggaggcggtgggtcaggcagagttggaccacgcgggtgctgtcattgctgtggccaacaggtacagcaggagcagggtacgggtgccgagagacgacgtgaggctgttgccgttccagggcgccgatgtggaggtggtgctgctgtccggttggagagtggtggcattcgagacggtgacacggcgccggcgtgaggccgtcctgccggtgccagatcagtcgaccgccaaggattggggcgctgtggagtacatcacgcacaccaacacgctcgcgctggtcgggcccgtggtgttcatggagcctccggacgatcaggtagaggtgtcatcgtaa

SEQ ID NO: 8771 - DNA, 345 bp, Zea mays
  Peptide Sequence Number=SeqID_50550
atggctgccccgcgaaccacccgtcccgtcgcattaactccccgacgtggcaggcgacacctctggcaggcgaggcgggcgtcgcttcgccttcgccataatgaccgcgtcaaaaaagggaccgagaaaggggatgttgtggaaaggatccttctcgtcggaggaagcgggccccgagccctcctactgatcaggggttcgaaggctggccccttagaaaggtttcgacagccgccccagagcactcggacttcaagcccattactgatcaggggttcgaaggctagcccctcgaaagggttcgacaaccgccccagagcgcccgggctccatgcccactactga

SEQ ID NO: 8772 - DNA, 267 bp, Zea mays
  Peptide Sequence Number=SeqID_50551
atgtttcttacaatccctccaactctcaccctactgggtgaaggtgataccttgttgatttacatcataggaacaatcaacatgttcatcacaacaattgtggttcaagaagaagaggaagattatgcatataaggcgtggatcacagggacgatggtcggccaacagcgaaggtggaaggtcatatggattcatgtcgatggaccgagagcggcgaaggacgagagctgggacttgaccgagggaccagagaatctaggtgactag

SEQ ID NO: 8773 - DNA, 552 bp, Zea mays
  Peptide Sequence Number=SeqID_50552
gttttcatatttactggtcacttagcattgagatatctttttgcgaagaaggatgcaaaaccaagactgatacgtgagatcttactgtttcaagaattcgacatcgagataaaagatcgcaagggttcagagaatcaatttgcagaccatttgtctcgattggaacttgacagcaaagatggaaacatacttcaaattgtcgacgcattcccagatgagaagttatttgctgtagatgcaaccccttggacaacatacaaaactccatttagggatgtcgccatatcaatttggtttttggggaaagtttgtcacttgccagttgaactggagcacaaagcaatgtgggcaattaagcatgtgaacatggactatgaagctactggaaagaaaaggctgttggatatcactgaactagaggagattaggcgaaatgcatatgaaaacactgcaaattacaaggaaaagactgaacaatggcatggcagaatttattttgcagcgacattttatcgctggtcaacaagttttattattcaatttccagactga

SEQ ID NO: 8774 - DNA, 387 bp, Zea mays
  Peptide Sequence Number=SeqID_50553
atgggaacaggaacaaactctggacgtcaggacatgtcttactcaaggggctcaaggagtgtcgactctagtgatgctgaaaaccctgggaacaacctgtatgtgactggtttgtcggctcgtgtaacggatcgagatctggagaagcacttctccactgagggtgagcagacggtatcgttcaaggtccccatactgctacagaagacgcaggtcaccttctgtttcgccatactaccgccggcacaggtacagatctgtctccaagtcatccagttcatctccaagggccagaggacggagctattcgtgcagtttatcaccacagagaagctactcgcgcagccattccccagaatccgagagatcaacaagctattctcctaa

SEQ ID NO: 8775 - DNA, 279 bp, Zea mays
  Peptide Sequence Number=SeqID_50554
atgccgtctctcgcctccgcctcgcaccctcgcctcgccgacgccgatgaagcgcctcttcatccgcgaccacgagggggggctggagctgtgtcaggatcgtggatggtgcctagggttctagcaccaggaagcttgcttccaccagatctgttgctactcacggtgtttggcggtgctccatcaccaacgggttgtgacaattggtatcaaagccgtcaatcctcggcggggtgcgacgaaggagaccagcttgctgctgggaaagacaacgactag

SEQ ID NO: 8776 - DNA, 2376 bp, Zea mays
  Peptide Sequence Number=SeqID_50555
atggcaacttcgcagaaggaggaggagaggtgggagaagatgtggcgcattctggaccggctagaccaccaactcgagaattgggaggtgggacaacacagactgcagggccaggcggaactggttactgcgaggaagacggaggagcatggtagtcacaactgcgttccagtgatacttggaggtaccaatttctcagtgtttggtgaaaagtctgctgagaagatggtatggggtagagtatttggttcagattcacatggcctagcgcaacagctagctcatggggtgggtgatcagtggcacaataattgtgagcaggatgttgaacctaatgtcccatggatgtttgttggaatgccacagcaagcaagtacatacccagtgtctagtgaaatgggtcttacagtggcatgggacgaggagatgcaagttgaaactcacacacatgagggattactgcagcaacttgctcaaggtggagaagctttagaagaattggctgagaagaagggtgatgttgtagatgagaccagcaagtctgacccatcaagtatggcagttgctatggttatgaaagttggaagcatggaggggcttcttcctgctagtgttatcagtgtgcttgaggaaagccctgagaaggagcagaatgctgaaaatgttgatgctactagtgctggtggcatcctttctcaagatttggtttcagaatcaacccatgaaactaatggtgcaggcgagattataagtgcccctaaggttgatgatgaggattgggagatactacaggttagagaaatcagtgaagaagaggtggaagattactttgtggtatctcaagaaggggctgtggatgaggtgatgcaggttgagttagcagatggtgggactggggaagaggaaatgctctgtggaaaagaagtagcagggaatttggtgcaggtgatagttatgagtgcagtaaggtggatttgtgatggtcaaggtttgcccgatgaaattcttagtaaaattcagtgggataaggagttttcatctaacctgagtatgcgcagaggtttacttagagatatggttgtggaaaggagttatctcaatgttttccattcaggtgaaggggtgctgatcataacaccatcccaggggtaccaccctgaagagatgctagatctcagtttggttgatactgacatcttatgcattgtgaagcttctaaaggttaacaatagcttgctacttgaagcacatgggtctggttttgtgttgatttttgatgggaggcagaacaatggcagtgttcattatgtgatatttgagctaacacaagggtggctacctgcttctagcccaggaaacagtgatatggcatttcagtcacaactggacattcaacgaaaatccatgaacaagttaatgagcttacagttcagaatggtgtatgataaaggcaaggagaacatagtaactgatgattatgctcaggatctgtggtctatggtgactggtcacatttcatgtcaggatgtattctcaggacagagggttgttccttatcactggttcaagagtttatttggttggacagatctgaaaatcggtgttgatcagttggtaaggcagtgtccagttttccaacaaacacaacaagggcagcagcttcctattgggtcattgcatcaggcttccatgggtggttacttctttaactcattgtataggtatgcagtcttggtgttggcagtccctatgatcaaagggagtgaggacttatgggtggctgtttggattcaacagcaggctgctgacagttctgtgttcaaagagcaagccaaggcacatgagggtgaggaaatcttcaaccacagatttggtgggaaaagggcaatgcaacaatcgtgctggttgtgctccgagagtcaggcatgttgctggagttatctacttggagggatttttatgccgtgcaggctcgttttcctactgtccttgcttggggacaagcaagttttggcgaaggggaaagttaccagaaccacatacctgttctcctggaaacttaccagggttctagcaccaggaagcttgcttccaccagatctgttgctactcacggtgtttggcggtgctccatcaccaacgggttgtgacaagctgcgaccgctttccgggctccacgtgcgtgccgggtgccgcggcagaaaacgaccgcgaactccttcctcctcgtgcttggctgcgccggaccggcagcagaagagatgcgagagtcttggctccataaatccagctcctgcagagtcgcgggcggtgaccggtgaggtggggaaacaggggtgtctgtgccagtgcccagttgaggttcagattgggtga

SEQ ID NO: 8777 - DNA, 1404 bp, Zea mays
  Peptide Sequence Number=SeqID_50556
atgtcggtgcaggagtacctggagaagcacctgctctcgcgcaagatcgaggaggccgtgaacgcggcggtccgcgccaaggcccccgacccggtgctcttcatcgcgggccacatgcggcgggcggcgcccgccgtgatcacgagggttcgggcgcgccagatccttgacgggcacggcgcgccggctgtcgaggttgagttgcacaccaacaaggccatacaccgagcatccgcggccggctcgggcgcgctcgagggcgccgccgccgacgcggccggggccgccgagaggcggaagatactcgccaaggtggtcgccgactcggtgcggatgatcaatgacaaggtatcggaggcgctcgttgggatggatccgcaggagcagtcgcagatcgaccaggctatcatggacttgaacaaggcgcgccacaaggctgagcttggagttggagcaaatgctatgctggcagtgtcaattgcagcttgcaaagctggtgctgctgaaaaagaggttccactctacaagcatatagcgaatcttgttggcaaaagcgctacaactcttcctgtacctgcaattacagtcattaatggtggaaagcatgctggaaatggtcttcccattcaagaaattatgatccttcctattggtgctaagaactttgaagaagcaatgcagatgggttctgagacctatcatcatctcaaggatgttattttggagaaatatggctcagacagctgcaacattggagatcatggtggcatatctgaaggcctggatcttgtcattgcggcaatagagagggctggatataatggaagaataaaattggcaattgatgttgctgccactgatttttgtacaggaaagaaatatgacctggagttcaaatcaacaaagaaatcagggcagaactttaaaactgctgatgatatgattgagatctatagccagctttgttcaggggatgacttgttgatgtctgatcctgaacgcattaagcgggcagttaatgagtacacttgcaacgctcttgttctcaaggcaagggctgtttggactggcacctacggcgccgcaccacgcctaaggtgcggcggccgatttgagcgccacaccagagcaaatcaagtgggcactgtcactgaggccatagaggttgtgaagcaggcaaaggatgctcattggggtgtgatggtgtcacataggtcgggagacactgaagattctttcattgctgacctggctgttggtgcttcagccggacagatcaaagccggtgccccctgccgtggagagtgtctcactaattacaatcagctgcttagaatcgagggagaacttggaagtgaaggcgtctatgcaggggagaattggagaacagtcaacacgagctga

SEQ ID NO: 8778 - DNA, 204 bp, Zea mays
  Peptide Sequence Number=SeqID_50557
atgtcgggagagcacgacaaaaaggagttaatcaccggggaaaagctcggatctttggggaagaagtatgaaggcaagactccatcaaaggaggccaacgtattcggcgacaagcacaaggagtataaggaagaattcgtcggctccatcaaatcacacaagaatggtgaaagggaattaggcttacacctaagtcctaaataa

SEQ ID NO: 8779 - DNA, 543 bp, Zea mays
  Peptide Sequence Number=SeqID_50558
atgccccacaaacataacttcattcaaccaaaattggcatttactcaacttggcatagagctctttctcatagagaatttgaagaaccactctaagatgttcatcatgctcatcatcagtcttaaagtataccaagatgccgtcaataaacactacaacaagctgatccagatcacttcggtgatcaatgtgaccttcgagatccggtcgaaacttctgggtcgagttttggggaataaaaagggtgattcagctaacgcatcttactaccatattgtaaatccatcgaccaacattgctgttgttggtgctgagatgacccatagcttctttaccaacgtgaccaccatcaccgtgggtacacaacatgcattggatccattaaccacaatcaaggcacgagcgaacaatgccggaaaggcaagcgcactcatccagcacgagtggcgcccgaaatccctttttaccatttctggagagatggatacaaagtccatccataagagccccaaggttggacttgctttggcactcaagccttga

SEQ ID NO: 8780 - DNA, 2400 bp, Zea mays
  Peptide Sequence Number=SeqID_50559
atgtccacaagaagggatgatgtactccctacgacatccaccggcaagaggacctcgtacattgtagatgatggtgggttggatgatgagttcgatgtgaatccacctcgaaagctcggccccaatggtgtaaaagttgcattattttctaagctggaacctattccaaccgaacctgaagatgttgaagggagtccagatgaagaagaagtagaagaaggtctgggatttagggcgtactcacctccagcccatatgcataatgtcgatctatcggtagatgatgcgttggagtttccagatctaccacacagaaagcgtgaccgtacaagttcgtcattacattcgggtgaaatagaagttggtaaggagttttccagtgatagttttcttggtgcattgaaacaacataacatcatgaatggggttaactacaacgtggttaaatccaaatccgagaagttcgaagccaagtgttcagttcaagacgcctctgcatctggcttcgacccgtcggagctccgatctttactcgagttcaaaaaaggcatcaaaaccgatccctttgataaggtactctccgtatgggatccggattcccgacccgaccctacttcatggaccggcgtcacccgcgaccccaattctggttctatcgtttccctcaacttagatcgtctcggccttgtcggagacctcaagttccacactctcactcccctcaagaacctccaaaacctctccttgtcagcgcgctttgtgaacttgagtcacaatcagttgaatggtgggtttttcaaagaggaagcgattgggttgtttaagaatttgcaagttttggatttgggtgataatttgattgctgggtcgttgccaagtttcgggtcgttgccgggtttacgggttttgaggttgggaacaaatcagctcttcggcccggtgccagtggagttgttagagggttctgttcggctggaagagttggatctcagtcgcaatggatttacgggttcagttcgtgtaattaactctacaactttgaaagttctgaacctttcttctaatcagttgtctggtgatttgccttcatctctaagaagctgtgaaatagtcgatttaagtggcaacacgatctctggtgatatatctgttatggagaactgggaagcctctttggttgttctcaacttgagttcaaacaagttgtcaggaagcctgtcaaacttgtctcactttgaagacttaaacaccttaaatcttaggaataattcccttaccggtgcattgcctcctctattggttacctctccaagattatctgttgttgaactcagttttaatcaactcactgggcctattcctggtagtttcttcacttctacaacattgaaaagcctgaatctttcaggaaatcatttaagtggagtaattcctcttcaaggttcacgtgttaatgaattacttgttatgtcatcttatccgcaaatggagtctcttgatctctcctacaattctttgactggtggtttgccttcagagattggtaatatagctgccctcaaactgctgaatcttgcaaacaatgacttatcaggccagctgcctagtgaattaagcaaacttagtaatctggaataccttgatttatctggaaacaactttaaaggaaaaatccctgacaggctttcgaccagtcttaatggatttaatgtgtcctataatgatctgtcaggtcctattccggaaaatttgagaggctttcctctatcttcattttctccaggaaacaggttgctaattttccctcatggcatgccatcagcaaactctgctcaagttcagccccccgatcatgcaggacatcataactcaaagagcaatgttagagtatcaattattgttgcctcagttgtagctgctgtaatgattgtttttgtattattggcttatcaccgagcgcaagttaaagaatttcgtggaagaagtggatttagtgaaacaactactgtaggtgatgctaagttgggcaggttttcccgaccttctgttttcaagttccactctaatgttcaaacaccacaaacttcgttgagcttttcaaatgatcacttgcttacttcaaaatctaggtcattgtctggacggcaagaatttgttgctgaaattgttgagcatgatgcacctgagagagccacaacctcttcggcttatgtgaatactaatcttctagataatgagccaacaacatctgggaggaaatcctccccaggctctccattaccatcatcgccacattttatagaatcatgtgaacagcctgcgatattggatgtgtactcaccagatcgtttggtttggagaattgttctttctggatacttctttaaaattcactattga

SEQ ID NO: 8781 - DNA, 324 bp, Zea mays
  Peptide Sequence Number=SeqID_50560
atggatattgaggttccacaagcgatacttcctgacactgtatttgaagcagttgttacaattccttataatatgcagctgaaacaacttcttgcttatgaattgttgggtgtgtttgatggtttatgcaaagccctggatatgggaattaggcatgtacttttggaagttgatagtctagctgcagttaagatgttagaaagtaaccaggaggagcctcatttcaactcaacagtgagagtcatacacaggttctacacctttgagtcacctccagcagaaattgcccaagtcttcagcaaagattaccaaggcatgtcttag

SEQ ID NO: 8782 - DNA, 1305 bp, Zea mays
  Peptide Sequence Number=SeqID_50561
atgaggaagggagctaagagaaaagccgcttctcatgagcaagaggagaagcaagtaaagacttcgtcttcttcgcaagagaatctcaacaacaacaaccgtaaacctgctcccaaagctaagcgtgctaagaccttcaagcctcagcccgagcctgagtatttcgaagataagcgtaacttggaagatttatggaaagctgcattccctgttggaacagaggttggaattttgaatttcgatttgaatgttgaatatttgtgggatcaactggactctgtttaccaattcaactggaacttttcgaatttagaagatgcatttgaagagggggggaaactatatggaaagaaagtttatctctttggttgtacagagcctcaattggtcccttacaaaggagaaaacaaagtcatttgtatacctgtgattgtggctgttgagtctcctttcccaccttcagataagattggtattaactcagtgcagagagaagctgaagagattgttcccatgaaacaaatgaaaatggactgggttccatatattccacttgagaaaagagacagccaagttgatagattgaaatctcaaatattcatcttaagctgcactcaaagaaggagactgaaaaaggagaagaaccccttatttattgcaatgctgtttggcctgtccctattgacagatttttaccagcctttgaaggaagatgagcttgaacaaagcactgaggttcaaataatttttccagcagaaccaaagccagcaatccttgattctacagcctgtaatcatttttattgggataaccaaggcagctattcttcaagatattatgttttttgtgaatttgattgggagttggatgaacttgatgagtttactgataaactgatagaagcagatgaattagataaagatcaaaaggatgcttttaaggattttgtcaaagagaaagttcgagaagcaaaaaaagctaatcggcaggcaagagaagctcgcagaaaagcccttgaagaaatgagtgaggaaactaaagcagcatttcagaacatgagattttacaagttctatcctgttcacactccggatactcctgatgtgtcaaatgtaaagaaaaaggagaataacaacatgactagtgacttaaattcgttttttcttattggcgattctaccttgcaggcgcctttcataaacagaggctacaatgtcgcctcaagcacccgacagatgatgccagatattttaaacttcaataatttgcccaaaaacttaggtggtgcggattcgtggacttga

SEQ ID NO: 8783 - DNA, 420 bp, Zea mays
  Peptide Sequence Number=SeqID_50562
atgagatttaatagaaatgtctcgttcgataatataaaggaaaggattagcgcaaaaattgttagacgttgtgggagaaggatctcgaaacttttctacaagtttccagtttcgacagatcccatcaaattcacagaaatgaaacttgtagatgatgaagacgtggagacaatgatcgctctttattgtgggaatcaaagagaccaaaatgcaccgattcagctgtttgttgagttagctggtgtggaggcaactgaagatctcattgcattaggtaaagaacatgaagctcaagaattgtgtatggtggctccaatatcgtctacaaattttgaggaaataggttcgggagtcggttacgaacgaggaagggttagcaccctcgtgacgcccaaaattggtaccgaatcgattgtttaa

SEQ ID NO: 8784 - DNA, 1578 bp, Zea mays
  Peptide Sequence Number=SeqID_50563
atggcatcatatgaaagcacaccaaaatgtgtggctgccgagataaggtctaagcttgatgaactgaagcgaaaacttgagaaggaaagtttccctcaagaatcccttctctactatcgccggatgttattagccaatatttcatcttcaaattacacattctccgccgtgattaaatcttctgccgatttaatggcttttagtataggtgaaactattcattgtcatgtttatatttgtgggtacggtttggatgcttatgttcaagctgctcttgtgagtttttatgctaaatctggtcgtgtgatgattgcccgtaaagtttttgataaaatgcctgacaaaacagtggtagcttggaattcgatgatctcaggttatgagcagaatggatttggaaaagaagcaattgagttgttttatttgatgcaagatttgggagttaaaccggattcctcaacatttgttagtttgttatctgcttgtgctcaggtaggtgcaattggtttaggctgttgggtgcatgagtatattgctagaaactgttttgatctgactgtggtgcttggtaccgcattgatgaatatgtattcgagatgtggaaatgttagcaaagcaagagaagtttttgattcaatggaggaaaagaatattgttgcttggactgctatgatttcagggtatggaatgcatggtcatggcagccaagcgattgagttgttcaatgaaatgagttttgatggtccacgacccaataatgttacatttgttgcaatcttgtcggcttgtgctcatgcagggctcgtagatgaagggcgccagatatttaccaccatgaagcaggagtatggattggtgccatcagtggagcatcaggtttgtatggtggatatgcttgggcgtgccggacacttgaacgaagcatatcagtttgtcaaaaacatatcacctaaagagccagctccagcagtctggaccgcgatgcttggggcttgcaagatgcataagaatttcgatcttggagtagaagtggcagagcatcttttaagcatcgagcctgaaaatcctggccattatgtaatgctttcgaatatctatgcattagctggtaggatggatcgagtggaaaaggtccgaaacataatgataagaaatcgtttgaagaaggaagttggttatagcacaatagatgttgatcataaggtttatttatttagcatgggtgacaagtcccatcccaagacaaatcaaatttatctgtatttagatgagttgatgagtaggtgcagagaagctggctatataccggcatcggaatctgtgatgcatgaagtggaagaagaggagagggaatatgcccttagatatcacagtgagaagctcgcgatagcattcggactattaaaaaccggccccggtgtggccatcaggattgtgaagaaccttcgaatgtgcgaggactgtcacactgccatcaaatatatctcaattattgctaatagagagattaacgttcgtgatagacttcggtttcatcattttaaagatggctcgtgctcttgtcaagactattggtga

SEQ ID NO: 8785 - DNA, 159 bp, Zea mays
  Peptide Sequence Number=SeqID_50564
atgaatgtgaatgaggcgatagattccagaaacgaattgaatggtaagtataaggttgacattagggatgctatgggaaaggccagcagtgacagacatttggcactgttcgcgtttgttgtatatgggttgattgtgttcccaaaagctctaggatat

SEQ ID NO: 8786 - DNA, 2676 bp, Zea mays
  Peptide Sequence Number=SeqID_50565
atggattttctcactgattcggactgggaaagttttagtgaaagtggcagtagtgaacacgaagaagttgactttctgtatggcggtcaggcttgtaccattctgtcgagtctggaggaaagtattggtaaaatagatgagttcctctcatttgagaggggatttcttcatggggacattgtccgctctataacagatccatgtgggcagatgggcagagtaaccaaaataaacatggttgtgaatcttgagaatgttcatgggaaaattgtaaaaaatataaattcaaaacaactttcgaagctccattccatttcagttggagatattgtggttaatgcaaattggataggacgggtggttaagctggttgattgtgtctctatcatctttgatgatggatctaagtgtgaggtcactgctgtggatcatgagaagcttgtgcctgtttctcccaacttaattgatgacccacaatatcgatattatccaggacaaagagtaagggttgtgccttcaaatgtttctaggtcaactagatggttatgtggtacctggaggggaaatcaggatgaaggaaccatttcaggtgtggatgcgggttttgtctatgttgattggatttcctgtgctcacgttgatcatgaatcgagtgcctctcctccttgtttgcaaaaggcaaaagacttgactttgttgtcatgtttttcccatgcaaattggcagcttggtgactggtgtatgcttttctcggctgacttcagggggactactgaagaggttctccacgcatcaactcagcatataactagggattcgtggaaacaagataaaggatttaaaagtggaaacccagattcaagattggaagagatctttaccatcattaagacaaggaccatggttaatgttgtgtggcaagatggtacttgtggtttaggattagattcacagactttacttcctgtcggcatcacgaatacgcacgaattttggcctcatcaatttgtcctggaaaagggaaccataggcaatagtcaaagatggggtgtggtgtgtggtatggatgcaaacgaacgcacagttaaggtacagtggagaactatagctgtgaatcaaataaatggttttgatgggaagcaggtggaggaaactgctagtgcttatgaacttgttgagcacccagactactcttactgttttggggatatcgtgttcaagaaggtggttcagaaccagtatggtgatcaagctgataaatgtatcaaaatccctgaaaatggttttggcacagaagctgtttcgaaaggcagaaacttgaatctggatcattacaaggatcccagtacatattgtctatcctgtatcggcattgtaactgggtttaatgaaggtgatgtggaggtgaagtgggcttctggtattacaacaaaggttgcaccatatgaaatttaccgtattgataaatatgaagattcagcaacaactcctgttctctttgaagaaaatactgaggcttataatcaagagatgtttgtggatgagaagcagtctgatagccacaaaggaaaggagttgttgaatttcaacagtgctattgaaagtggtgagaaattctcattggtacctacttctttcttctgtcctcaagctgctattggatattttacaagcattgcttctagcattcttggatctcttggtcccaattcactgataagccaagacccatctggttgtatttctcggaatgcaaaagaatatgacattctccttgagaaagaggtggctgaaacttgccatcactgtgctgaacaagatatgagtgagttgcagatatttgaaatgacaaacataagacaggaagttgaagagattgaagaaaacaaagttagtatgatgcctaaaccagttgaaacttcagatcaattcaggcagtttgatatggttagtgattgttcagatcatcactttctcggtgaaagtaaggtgttggctgtgtctcaggtgaaaagaagttggttgaagaaggttcagcaagaatggagtattctagagaaaaaccttcctgaaaccatctatgtccgtgtatgcgaggaaaggatcaatttactacgagcagcccttgttggtggtcctggcacaccctaccatgacgggttgttcttttttgacatttctcttccttctgactacccatatgaaccaccattggtgcactaccgttcaggaggcctccgcctaaatcccaacttatatgaatcagggaaggctcttgtgcttaatgagaagccatacttcaatgaggccggatatgataaacagttaggaagagccgagggggaaacaaactcggtgagctacaacgaaaatgctttcctcgtaacctgccagtctatgctttatatactccggcatccacccaagcattttgaggcacttgtcaaggagcactttagtagacgtgccaaaactattctctccgcttgcaatgcatacatggaaggagcgcctgtaggatttgctcttgaatgtggcaaaaatgggcacaatgtaaatcttaaagaaagttctactgggttcaaaatcatgctagccaagcttttcccaaagcttgtggatgcattttctgatcagggaaccaattacagtgaattccgtggggtggagaagtga

SEQ ID NO: 8787 - DNA, 306 bp, Zea mays
  Peptide Sequence Number=SeqID_50566
atgttgagcatagatccagatgcagcacatgcatctgagttccctgagtacgctgatatagtacctactcacatattggcatcaaattcacagttggaagagttgttcattgggcaacagttcaagaacaaggcggactatgtgtttggcatcaaacagtacatcatgaaggtgtcaattgattacaaggttgtcaagtcaccaacattatatgttggtaatgttgaagagtcggggatgggtgtggctggcgggttcagactgcatttatatagaggactcaatagtgaaaaatacaaaaattag

SEQ ID NO: 8788 - DNA, 789 bp, Zea mays
  Peptide Sequence Number=SeqID_50567
atgactaaaagcccaattgtgcccggtctcgacttcttcggtgcttcctcttcatgtagcctcattctaacccactgcatcttcaggggaatgcaagatctgctattttcaacctgctccactataaccgagggagacaaggcttgtgtcttcgatctgcttcgccgtcgatgcaggaaggaaggcaagatctgttatcttcaacctgctccactacaaccgagggaggcaaggcttgtgtcttcgatctgcttcgctgtcgatgcaggaaggcaagatctactatcttcaacctgctccactacaaccgagggaggcaaggcttgtgtcttcgatctgcttcgtcgtcgatgcaagaaggcaagatctgctatcttcaacctgctccactacaaccgagggaggaaggcaggatctgctatcttcaacctgctccactacaaccgagggaggcaaggcttatgtcttcgatctgcttcatcgtcgatgcaggaaggcaagatctgctatcttcaacctgttccactacaaccgatagaggcaaggcttgtgttttcgatctgcttcactatcgatgcaggaatgaaggcaagatctgctatcttcaacctactccactacaaccgagggaggcaaggcttgtgtcttcgatctacttcactgtcgatacaagaaggcaagatctactatcttcaacctgctccactacaactgagggaggcaaggcttgtgttttcgatttgcttcactatcgatgcaggaaggcaagatctgttatcttcaacctga

SEQ ID NO: 8789 - DNA, 111 bp, Zea mays
  Peptide Sequence Number=SeqID_50568
atgaaacttgaaaatccattgttgaacatcaagatggtctatatgccccgctatagggagttcgtgtggatgtcgtattccaggccagacattgccactgttattctgtag

SEQ ID NO: 8790 - DNA, 219 bp, Zea mays
  Peptide Sequence Number=SeqID_50569
atggagttcgccaagacgttaaacatggggatggtccgttgggacattaaacatggggtagaccaccaggatggtttaataccatgtgatgctgcaaacatcaacgagctgtacaacaccaaggttgatgtcgacgaacactctgagttcatggatgacatcacagatgaagaatgtgacctattggtgagagacttgtgtgtcgagggagcagtttag

SEQ ID NO: 8791 - DNA, 459 bp, Zea mays
  Peptide Sequence Number=SeqID_50570
atggacaatgagtattttttggaaaagttcaaatctattaacaaatatattaaggtgttgatggaggatgatcaggtaacatttaacatttttaagtccatacaatttcctgacacaattgatgattattctgcagtgtctgatttagaggatttaatcgtggagaaggaactcaattatgttgaggacccattggaacaaattttgacatcagatcctccaaatgatgaagaggaggatgaatacttaactttgttagaagctaatcaaaggggatttaatctacaatcctgctttgaatctttggagttagagaaaagggattatgcccaaccaaaagtgaaaatcgatgagccacctaaattagaattgaagatttgcccaaagcttaaattagcaatgttgaaactatcaaccttgccacatgtgtggccggccaagggagggctctttggttga

SEQ ID NO: 8792 - DNA, 969 bp, Zea mays
  Peptide Sequence Number=SeqID_50571
atggcctcggtatcaagtcagcctcagttccgttacactcaacccccatctaaggtgctgcatttgagaaacttgccatgggagtgtacggaggaagagttgatcgagctggggaagccatttggtaagatcgttaacaccaagtgcaatgttggagccaatcgtaatcaagctttcattgaattcgctgacttgaatcaagctattgccatgatatcgtattatgcttcatcttcagagcctgctcaatttaatttgggtcttgatgggaaaaaactcgaaccagaaagtaatgttttacttgcatcaatcgagaacatgcagtatgctgttaccttggatgtgctacacatggtcttctctgcttttggtcctgttcaaaagattgccatgtttgataagaatggtggactacaggcactaattcagtacccagatgttcagacagctgttttggctaaggacaccttggaagggcactgcatatatgatggaggattttgcaagctccatctctcatattcacgccacactgatctcagtataaaagtcaacaatgatcggagcagagattacacaatccctaacctggccatggttaaccctcagccttcaacattggggcaacagccagttcaagcaatgggtggtccagctgctcatcaatacaatgggactccatatgctccagggttacaacaacctacaatgccgcctcagccttcaggaccaatctatgagaactatgcacgaaaaaggggattgaggctgtctcaattcccaacagtaaattacgaggcaaaggtgaaatccagtaagataatgataaaagaagatttagaggaggatccgaaggaagaccccgaggaatatctgatggaagacccagaaaaagatcctgaaggaaatctagatttagaggacaacctagatgaagctaaggaggagtctaagcctaattctgactaa

SEQ ID NO: 8793 - DNA, 279 bp, Zea mays
  Peptide Sequence Number=SeqID_50572
atggacgagttgaagcaaatgatgcaaaagcgttacgttccttctcataactatagagaggtttcaatgagacttcaatgccttgttcaagatggcttgaacgtttcgatagccaatactcttaatcttcaaacctgtattgatcttgaagagatgacctcagattcccaaaggcagatttggttttggtccaaattgtggccttttgaagagccgttgttggagaagtggaacttgggggaggaggatgatgaagatggaaagaaacaatggagatga

SEQ ID NO: 8794 - DNA, 1824 bp, Zea mays
  Peptide Sequence Number=SeqID_50573
atgcacttagaggagccttggtttactggaatggatactgaggaaactgaaatgggacaaccaaacagtgaaattcaaggctttcgattggaaaaaggtgaggcaagcaatatggttttctcgactgaggcaccccttgtaattaaagagtcatcaacttctggtagttgtagttgtagtctgaagaaaatcaaatctacagtagctgcgaaaggctccgagttctgccagaaggataaatctgggcacgacaagaagctcagccgacaatacaggattgagttgggccaattatttcaaggggccgtgagttcccatgattgggaacttgctgagagtctaatcttgtcggcagatccacagactctaaatgatgcgttgtgtgtcaccttggatgctatctggtttttgagcacccaacaggagctttatgggattactgatttgattaagaagatcattgccaatggtgcttatgactttactagagccgctctccggacttcatttcttgcttcttgtgtctctgcttgccagagtcgcacgatgagtcttgctgacactgtaactgtgatggcccagaggttgcacgagcgcctacaagaatgccatggggatgaggtcttgaaggcagaagctggtgccaaggtgcaaaagttcaccgaatgggctttgaaatgtataggttcccattctcgctgtcaggggagcaacgatagagtgaatcattgctcagctattgaaatacaactccagttaactgcgtttaagactttcctagatcttgctggcaaccaacttacgggaaaggattttacagaagcatttgatgcagcttgctttcctcttacactcttctctagctcatttgatgctggctgggcttctgggatctcagctacggtgatccaaggtttgttggatatgttggtggaggggggtgcagacaatgtcaaccagtgtttccttgaagcctctcgattcggcagtacagaacttgttcgcattttattgcagattgcccaacggaatagcttggatgttgatgttgatcttgccttgggttttgcctcgcattactgcaagattgggacaatggagtgtctagtggaagagggtaatgctatggcgtttttgggccctttaatgagagcagctgaaagaggatgcatgcaggttgtccggtggtttgttaaaagaggttgtcgagacatggagctctgtctggccctcactgccgctacttccagcagccaagttggtgtggctgcatatctcctcccccatgttcctaagcatgtcctaacggccctcagcatcgaaattcttaaggctgcgggtgaacgaagtgggggatctcttgatggtgttgcgtttctcctccactctgacttcttaggtgatgctgctgctacttatgctgttgcagacagcattgcaaagtctgatgatgaggctgttgctcctgagctgagagcatttgttcaagaacactggtcagaggcagctttcttggatggattaaagcaagggcaagaacattacatgaagctgatgaggattttgaagaggggggaatctccaatttgcttaagggatctgccagctcctttgagggttggaattgcatacatgccactgtacagggaatgtgttgaggtggggggtcgtctgttatcgcaaaggctgagggggcagcttgttgaagctgttcgaatgcttggaggtgggtcattagaagaggtaagtcaaggcagagagcttctagctactttggaacatcaccttcctccatttttggttcgtgctcccagtgttggttag

SEQ ID NO: 8795 - DNA, 327 bp, Zea mays
  Peptide Sequence Number=SeqID_50574
atgtcagctgaatcgaaccgagctatagttaatgaagctaaaagtaatattcaagatttgaatcctgaagcaattaatagtgcgtctattccacaatcagttcgtgatgagatgaaaaatgtatttcttggaatgatgaaccaatggttcaacgagttcaagcaagcaaatcttgcaactccgccacctccaccccctgttgtgcctcctttggctcccccgaatactccaaaccctatacttgtgacagttaccctagtatcagtagataaaattcaaaaatgtggagcagaagaattcaatggtttggtagatgatgatccttga

SEQ ID NO: 8796 - DNA, 108 bp, Zea mays
  Peptide Sequence Number=SeqID_50575
atgggctatgaggagtccatgtcctccatcgcggagaagcacggcaagttagatagggttgatggcattacaagtttggtatcagaacccagtttagttggttcttag

SEQ ID NO: 8797 - DNA, 156 bp, Zea mays
  Peptide Sequence Number=SeqID_50576
atgggtggtgtctttgaggatatggaggttgtggaactttggcttggattagacagctctttcgaggacataatgggccacgttgggccgaaatgggtcgtgtgggctcaatgggctcgcaggccctacatggatgaaatccacgaactatggtga

SEQ ID NO: 8798 - DNA, 420 bp, Zea mays
  Peptide Sequence Number=SeqID_50577
atggcacggagcggccccgcggtggcgccgcacggcggcgagaaattgccaaccccaatccccgctgaccccttcgaaactacgtgtatattgcccacgacagaccatggagcagcggcggcggcgatacctccacaactcacgacgatagcgctcgacacagcatccagggcttcaacaaggaggttgctgcaacgcggcccgggtgggaaccagtggctcatccaccagtcacaaggcttgagggaggagggtgaagttcacgaccaaggcgcgatgcggaaagggaatggcggggcagtgagcgcgcaacagcggagtgcaggcggcggcggagcatctaggtcaggcttcggctttatagtctggcgcagggacaagctcgaccgactaaactcagggttgaggcgagatttctga

SEQ ID NO: 8799 - DNA, 216 bp, Zea mays
  Peptide Sequence Number=SeqID_50578
atggccgttcaaggtcgctggtgcgattggttcatcccgcaacctgtccttgggctacaaatactcgagaccccgcaccctctggccctgatgcgtaacaccaagccgtcgctgccattgcagagggagagaaaagagcctgtggctggggatcccggtgttcagcagatagaagttgctgagcaggagctcattgaaggcaagttgtgcccttga

SEQ ID NO: 8800 - DNA, 789 bp, Zea mays
  Peptide Sequence Number=SeqID_50579
aaacaggactacaaggcagctctcagaaagtacaggaaagctctgcgctacttggatctttgctgggagaaagaagagatagatgaagataagagcacagcactgcggaagaccaagtcaataatactcactaatagctccgcatgcaaattaaagttaggagattcaagtggggctttattagacgcagattttgcactgcgtgaaagggagggaaatgctaaagcttttttccgacaaggacaggcacacattgcacttaatgacattgatgcagccgtggagagctttaaacaggcattggagttggagccaaatgatggtttgttctctttagtcccattgaaattcatagatttaactgacgatctgatgggtttttctttgaccccattagctggaatcaaaagagagctggctgctgcaaagaagaagctgccgcagattgctgacagaagagatcaggagcggaaggcatttgctaggattttccaatcttctggaaagtctgacaagagcaacgaaactctaaggccatgtgtgccacacttcatctcacagctttacatattcaagcagtttctgcagcagctttttagtccagctgcttatctcaatgaactaaaagcagctgtgtttagacccgaatcatacacggtatttctgtcctgtccacattctggttctgtggattgtcacttgtcaggctgctgggctggcagctcagctgtggctgttcgttgcaaatccgtagagataaagataaaagtactgataaaaatattgtag

SEQ ID NO: 8801 - DNA, 1740 bp, Zea mays
  Peptide Sequence Number=SeqID_50580
atgaagctcccggccgcactcccctggatctccccgctgcagtaccgaagacccggccgcggcgcgtcgccctccccaccgcctccaccccctcccacccggcggccgcggtacctccaccacccggaactcgcgcgcctcatcgagtcctccccctccgcgcagcgcgcgctcgacctcttcaacgcggcctcctcccagcacgccttctcccacacgccggccactttctcggcgctcctcgtccgcctcgcgcgcgcgcggctcccgcgcgccgccgccgccgtgctccgccgcaccgcctccgagccctgccggttccaggagccgcagttcctgcccctcgtccgcctcctcccgcccgaccacgcgctcgtgctcctccgcttcctgcccgcgctgctccgcacgagccgcgtctcacacaaggcgctggccgtctgcctcgaccgccttgtctcctcccgcggctgccacggcgtcctcaacgagctcctagccgatctgcgcgaccctcggaacaagtaccttccaaggcctaacacatgcgtctacaacatcctcgtcaagcactacgtcaaaaacggcgaattggagaccgccttcaaagtgctcgacgaaatgcgcgagtacacctgcgcggacgtgaagccgaacctggtcacctattcaacattgatcggtggactctgccgtgggggtaagatgaaggaagcgtttgagctattcgaggagatgatcgagaaggaccgcattgtcccagatcagctgctgtacaatgtgatcatcgatgggttctgtagacaggggcaggtggataaggctcgtgcaatctttggatttatgaggaagaacgagtgtgagcccaacaccttcaattatgccacgctgattaatgggcactgtaagaaagcggacattgaggcagcgagatcggtgttcgaggagatgaggaattctggtgtggagccagatgctgtgagctacactgcactgatcggctgcctttgcagacatggaagtgtggatgagggcatcggtcttgttttggagatgaaggagaaggggtgtagggccgatgtcgtcacatacaatctggtgattgaggggttgtgcaaagatggccggactgtggaagcaatgggcctgctggagagcgtgccgctggaaggagtaaagttgaacgtcgcgagctaccggatcttgatgaactgcttgtgctcccgtggggagatggacagggcagttggcttgctgggattgatgcttggacgagggtttctacctcactatgcggcgtcaaacaacctgttgatcggtctatgcgatgctgggcgcatagcagatgctacgatggcattgtatgggttagctgatgcaggctttatgccagagcctagatgctgggagaggcttgtggagagtgttgaggtcttgaggaaaggaactggagatcgcggcagtgtatctttctgcccccatttgcactacagggctgaattgatgtttagcaacaacgaagagaaggctgctgggccctactggtactggagacagcaaccaacaggtcctgacacaaacttttcttccagaacaagctgctatatccagaaggtatcaaaccatgaaggcacaatggccgcattattcaccattctcgtcattggagacgtagtccaggatgaggtgccgcagttggctctggcaaacagacttccgctggggcctgtgtcagcttag

SEQ ID NO: 8802 - DNA, 1266 bp, Zea mays
  Peptide Sequence Number=SeqID_50581
atgacgacgcctcgccacaatgcgtcgccgccgccgctccccgtgctcacgctcctctggctactgctgctcgacgctcccgccgccgcgcagcagagcccgtcgcgcgacaaggataacgggggcggtggcggtggagggggcatgccagcccagacgcccagcttcagcgctcccatggtcgtgctgctggtggcgctcatcgcggccttcttcttcatcggtttcttctccgtgtacatgcgccggtgcgggcggggcgcctcggccggtcccgtgatcccggccgccgcgctgctcgctctgtcgcggcaggaggagcgcaaccagcagcgcgggctcgaccccgccgtggtcgcgtcgttcccgacgatgaggtacgcggacgcgagagagcttcgggtcggcggcaaggacgccgcgctcgagtgcgccgtctgcctcagcgagttcgaggacgacgaggagctccggctgctgcccagctgcagccacgccttccacccggactgcatcggcgagtggctcgccggccacgtgacgtgccccgtctgccggtgcaacctcgatcccgaggagccggccggtgaggcgacgggggaggggcggcagcaggaccatgtggcgatcgacgcgagccacgatggcgccggagaggagggggaggaggacaggaggcgggatgaggcgatggagctggagcggatcgggagccagcgccgcgcggtgcggtcccggtcggggcggccggcaccgctcgtcccgcggtcgcattcgacgggccactccctcgccaccacgcgcctcgacggcgacgtggagcggttcacgctccggctgccggaactcgtgcgcagggagatggtcgccgcggccggcgaggagagcctgcgccgcacgggcctgcgcgagcgcggcggcgcccggagcgcgcggctcgggaggtcggaccggtggccgtcgttcatcacccggacgttgtcgtcgcgggtcccgttctggtccgcgtcgaggagggcgcccgacctggaggcgtcgtccatgaccacgggaggggcggccgcgaggaccaggcgtgagaagatgggcggcgcgtcagacggctcggtgacccctgctaaaggcagcgtgcgcttcgactgcctcggcgtcgcccccgccgtgacgggcgcgagagtcggcgccgcgtcctgcgacaacgagatggaggaggaggacgacgaggaggacgaggagaaggcgatcgcccggcaccggcaggcttga

SEQ ID NO: 8803 - DNA, 330 bp, Zea mays
  Peptide Sequence Number=SeqID_50582
atggcggtggaggacggcaaaccagtggacatggactacaatagagggcgtggccgactcacgtcctactcgaggccacgtcggggaaagccagtgacggccgagcggacaattgtggagtggtcgacgacggagcagatggcggcacaacagaaggtagtcactagtcaggtcgctcagaagatgagcatgagaaagaggctcaatgaaaccgtgacgacgagccgtcagggaacggcggtgcgcacacgttttgcaatctggatcgacgaggacgtcgtcatgcagaacaaatactccccgcgacagggtggacggcgaagcaactag

SEQ ID NO: 8804 - DNA, 813 bp, Zea mays
  Peptide Sequence Number=SeqID_50583
atggaggacttcgcacgcgcggtggagggcggggctcaagctgtcgtagctcgtgctcccgggaggggtgccactgccgcgcccgccgacggggatggagcgcactgcagccgctgtgctccgccgcctgcggccccgctcgatgcggccatcgtgcctgtgcttctcctccgcggcggcgacgaccaccacctcgtcctcctcgcggcgtactcgcactctcgtagaggtggccacggctggagaagacgacgaacgcaaccttggcacgggagctgggctacggcacgtgtcgttcgcgaggacgatggcggccaactcggtcagcaccgcgacggcgagctctttttgccgcccgataatgcgcgttgccgcctcccagcttcccctccccaccaccaccccagcccgccggcgacggcgagcctcggcgccgcccaccgccgcgccgcggccacccccgagagcgctcgccgccatactgcgctcgcgcgtcatcgcgtgcctccgcgcgcaagagcggctcacgcggctgtccacggcggcattaccgtgctgcatgctgttgaggccctcggtacggtagcagtgccgggctgccggcctcagcttcaagttggcacggtcttaaatgctgctgatgcaaggaaagctatttgcgctggtgcacaatttcttatgagtcctggcacagtcctggacatacttcatgatcttaaagaaagtaatgttctttatattccaggagtgctgacatcaactgaagttttatccgcttgcagtgctggtgcaaaagttgtcaaggtttcataa

SEQ ID NO: 8805 - DNA, 288 bp, Zea mays
  Peptide Sequence Number=SeqID_50584
atgtcccatggtacagtagacctgtggggatcagatcaacagctcggctcaccgccgatgacctccgtcgtgatccgtgccgaccggcgtcaagattcacgcccggctcgcaaatttctcgtttcccccaaattggttttccgccgccgtgatgaacacctccccgtggccagcccaactcagtgtcccaagaccctcctcaagctctacgacccacctaatggagctaaaccaccctgcgtcgccgtgaacgcccgtgttcttccccgatgcccgcggtcgccgtag

SEQ ID NO: 8806 - DNA, 99 bp, Zea mays
  Peptide Sequence Number=SeqID_50585
atggatggagctctggccaccggctgctggtggctagaaagttaccgcgcgctagggaaaataaacaggtgggcccgccttaaggaaccaccagtgtaa

SEQ ID NO: 8807 - DNA, 1135 bp, Zea mays
  Peptide Sequence Number=SeqID_50586
atggatctcgcgacgaccccggcgcggcgggccatggagcctggcgtggcgcgtcgtgtgtggcacgtggtgctggccgtgtgccacatgctgcggcggggcctctccccgaagcgcatcatgatggacgtccacctcctcctcggccgtggcaagctggccgggaggacgctgcgcggccacctcgcgcacccgtcgagccaccaccgccacggccacggccacggccacctcaccacctacggcggcggcgcgtcccgcgcgtcgtcgtcgtcgtcgtcatccacgctggcctcgttctacggccacccgcgggaggtggagttcagctgcaccaccacgccgtcctacccgcagcagcactacgggctgttccccttcaagggcctccgcggccggggcggggcgcgatgcggcggcgaccccgccggggtccgcccgctgcgcgtcaccgactcgccgttcccggccgtgcccgaggacgggtgctgcaacgaccgcgtggacgccgacgccgacgacttcatccgcaagttctacgagcagctcaggctgcagcctaccgccgccacgccggacgcctacctgcgccgccgcgatcacgggcactcggcaaagaaagcaaataaacggctctccttcttcctttctctcctttctctccactcaccctctctctgttacgacgccgcgccgctcgctcgccgccgcgccttcccgcgccgctgcctccccgcgcccgcccgctcgccgcgccgtcgccccgccgcgcctccccgcgcccgcccgctccccgcgcccgcccgctcgccgcgccgccgccccgccgcgcctccccgcgcccgcccgctccccgcgctgccgcctcgccgcgccgccgcctcgccgcgcgccatcgtctcttcccgcgccggcccctcgccgcggtcgtgcctccctgccacgcgcacgccgccgcgcacgccgagtgtcaccgccgcccgcccaaaagccgcctcaccgcctcaccgccgcccgcgccccaccatttgcccgcccacgcgctgccgtccgcccgctcgccgccgtccgccagccgtccgcccgctcgccgtcgtccgcgcctacagccgcgcctccgccgtcctcgcctccg

SEQ ID NO: 8808 - DNA, 159 bp, Zea mays
  Peptide Sequence Number=SeqID_50587
atgtgcctgcacagttggagagatcaatgcaatctggcaggcaggaagagatcactgggaggagctgccagttgttctttggtgatgcatgatcttagccagggaagggatgggatggtttgggaggagcgggagaggggtgacgccgattgccggtaa

SEQ ID NO: 8809 - DNA, 153 bp, Zea mays
  Peptide Sequence Number=SeqID_50588
atgagctccgtaggatcaccacgcacccagccaccaagtattgtcctcaatcgatcaccagagagctccaatttcatacttcccccaatcagttcaaaaacaccgcaagaacaccctcaccacgaccaacttcttccaggtgataggaattga

SEQ ID NO: 8810 - DNA, 261 bp, Zea mays
  Peptide Sequence Number=SeqID_50589
atggtgcagccaaaagagaatggggaaataaaaaggagccacattgaggactaccactgttgtcggatgtgggccacgtgcggagaggaggagaagggaaagataagggggaaatggggaggaggaggtgaggctagatacgacatggtggccgaagctcgtgttctcgccgccatcgcgctggtcgaacgaaactggcgtggtagccagctgccacagtcgtccacggggcaggcgcctgctgcttctccaaaagcgtga

SEQ ID NO: 8811 - DNA, 753 bp, Zea mays
  Peptide Sequence Number=SeqID_50590
atggacgacggcgatagtgtggtccggagcgtcgagaaggctggcgccggcccgggcgacgacggcagcacgacaccgctcccggagacggttcaaattggcaattcacccagttacagaattgacagaaagcttggaaagggagggtttgggcaagttgcaatcaaatttgaacatcgaaccagcaaaggttgcaactatggtgctccttatgagtggcaagtttacaacactcttagcggaattcatggcgtaccaagagtacactacaaagggaagctgggagagtattatatcatgattatggacatgttggggccaagcctatgggatgtttggaataataactctcactctatgcctgttgaaatggtggcttgcattgctatagaagcaatttccatactggagaagatgcactcaaaagggtacgtccatggagatgtgaagcctgaaaattttttgcttggacctccaggcaccctacaagagaagaaactttttctcgttgaccttggtttagctaccagatggaaagacactggtacaggagagcatgttgaatatgatcagaggcctgatgtcttcagaggaactgttcggtatgctagcgtgcatgctcatttggggagaactggaagcaggagggatgaccttgaatctcttgcctacacacttgtatttcttctgcgtggtcgccttccttggcaaggataccaggtgaactttgttacaacctccaaattttcttaa

SEQ ID NO: 8812 - DNA, 288 bp, Zea mays
  Peptide Sequence Number=SeqID_50591
atggcgttaattgctagtggttggaaatctacatctaattggggacgttacgaaacgtttacaagaagggataatatactccctacgacgtccaccggtgagggggtctcgtacgttgcagatgatggtgggttggatgatgagtccgatgtggatccacctcgagagcccgaccccgatggtgcagaagttacattattttttaaaccggagcatgttctaaccgaacctgaagatgttgaagggggttcaaatgatgaagaagaagattcgcgattcagggcgtag

SEQ ID NO: 8813 - DNA, 177 bp, Zea mays
  Peptide Sequence Number=SeqID_50592
atggcgaagtcaaagaaccacactgcccacaatcaatcttacaaggctcacaagaatggcatcaagaaacccaagaggcaccgccacacttccaccaaagggatggatcccaagttcttgaggaaccagaggtatgcaaggaagcacaacaagaagagcgacaagggtaactcttag

SEQ ID NO: 8814 - DNA, 1554 bp, Zea mays
  Peptide Sequence Number=SeqID_50593
atgccctactccctttttcctcaattcaaaaatcaaccttcacctccggcaccaatccacctccaccgatccacctccggtccttcacggctccacccatttccagaatcagaggttagagcgaagctacaaacgtcttctacctttgaatttcaaagtggtggtatcatgttctgggcagatacagttgggtcgaagcatatctatttgagcctcaagaaatggtcagaaaggtacggtagctactttaaaccatcgagatatttggaagaaagagccatgaaaggcatgccactggtgatgctcacggtggagaatgaaattcctgtagcaacaaaaggtgtggttatgataaaagcacaaaagaacatcactgatcagaagctaaaagacttaaaagcaaagaaaatttcccaatgtttagattatgcttatatctgtatgaaaattgtttgtttttatagtgaaaatggtggttttaaaatatctgatgaagacaaaagttatatgcaaagttgcaaagttgcggtttttacttgtgcgtttggtggtggagatgatctttatcaacctataggaatgtcagaggcatcacttaaaaaggtttgctatgttcaagattttatgcttctacagaatggaagaatcgattatggtgaatttgttgccatgatccagaatatgatgactcatgacaaaagtgatcgggaaacggttttggttcgtcgcatgctccaggacaggcctattacaacacggatgtattcctcattttctctgcttcaacaacgattagccattctgttccaaaagttgtggcaacagcaaccgaatgtagaccatatcacagggaataaaatctggaagagttctgtgttttcgaaggggaagcttcctggtcctcttaggcaacttcaaatggatttgagaaaattgatgcttccttatactgctctcaaactcaaggagaagaaaaggaacaatctgaaagactttttgaatgttgcagggccaatgggtgtaacccatttcctcgttttatctaaaatcgaaacttcgcctgtccttagggttgcaaagacccctcaaggccctactctcaattgcgccctcgttgcccgcaggatcttttcaagaatcctcctttgtaattctaaatatatctttgggcagattgttctgtctggttttgcagcagcagatgaacaattaaggctcacgactatggtgttcaagaacatctttccggatattgatatcaacactccttttcaaacaaggagtcagttgttcacaaagaaagatcgtagtgttggagaggcagtgacatcagcattattggatgattcatggttttcttctgatagctttctgcactgcttctgcaaggatttcttttcgttagtgcaagatgcttcagttgttgatggagatcttctctcatggacaaggaaattaaaagagctgcttgaaaatagtttaggatgggagttccagcagaaaagtgcagttgatggaatctactttaaagagaatgatgaggtctctctctga

SEQ ID NO: 8815 - DNA, 1485 bp, Zea mays
  Peptide Sequence Number=SeqID_50594
atgaacgaggttaactacaacgtggttaaatccaaatctaagaagtttgaggccaagactctggaaaacatagttcttgttcactatcgtgaaacaaaggagggttctccagccacacctgtgaattcaaattcctgtttaacaactgatcagtctactcctttgcttgtcatggaggactttgattctggagccgctaatgcatattataaagatctcagtgatagcattaatgcaaatcatgaaatgactcttcatgagattaatacacttgaatgggatgagcttctggtgacaaatgatggtaatgactcggctgtatctagtggagacatgagcacttgctttgaccaatggaaccaaaaaatggtaaatggcctctcaaatgatggtggccctatctcagcctataattcatcaccggacatttcattgcttgacaatttagttgatccagttgctcagagtaataatgcttacctcaacaccccaggagtagttcctctagaagacaagtccaggtgggaggagttccggttgcagatgaggcttgcttacttgctcttctccacttccaagagccttagcattctatcgggggcaaagccgaacttggtgacggaccccaccacccaaaacccgagcggttgcactgctgctgatcttgcgtctttgaatggttatgatgggctagctgcttatctttctgaagaggctctagtggcacagttcaacgatatggcactagctggaaatgctagcgggtctcttcaaaccagtagaacagaggcaacaaacctcgttaaccttaaagaagatgaactgtatttgagggaaactttagctgcttataggacagccgctgatgcggctgcgcgcataaacactgcattcagggcacactccttcaaagttcgagctaaagcagttgagtcttacaatgcagaggaggaagcaagaagtataattgcagctatgaagattcaacatgcctttcgcaactacgaggctaaaaggaaaatggctgctgctgcccgcatccaatataggttccgtacttggaaaatgcgtaaagatttcctaaatatgcgccgccaggctatcaaaatccaagccgctttccggggcttccaagcaaggaggcagtactgtaagattatatggtcagttggtgtgcttgaaaaagcaattttgcgatggcgattaaggagaaaaggttttcgtggactacaaataaccacagacgaagcagttgaagagcaaaggcaggaaacttacgtagaagaggcctactacataagcagccgaaaacaagctgaagaacgtgttgagaaagctgttgtacgagttcaatctatgttccgttcaaagaaagcacagcaagaataccggagaatgaagttggctcatgatttagcaacgttggaatatgaaagccttatcggccctctttcggatatgatgctcaaagaccatagaaagtag

SEQ ID NO: 8816 - DNA, 2499 bp, Zea mays
  Peptide Sequence Number=SeqID_50595
atgcggtgtgcgctgtgcgctgtgccgagacagatgcgtgcgacggtgcgagggagactcagcactccactcacctggcgccacgtcgccctcccgttgggcctctttgcctcgcgggccgactgggccggctattgtgaagagagaaagggtcttgtgtgggctggctattccaggccatctggcccgtccatctacgtgacggatacttctcgtttcccctcctcacgcggccgcttctgctcggtgccccctctcctctacagctctactctcccctcccgcggaggcgtggacggcatggagttgggggagcccggggcccgtggatgccgtggtcccgtgcgattactcggatctctcggtttgctgatcaaagcgtcgtcctccgatgcagcaatgatgggaacagagtgcatcatggccacactcggcggggatcctgaaccctcaattccacctggattcggaccttttgttgccctcgcgctacagggcatccaaaacaatgccaaatcagctgatgctcattctagttctgctcaagcagcacactgcatggagaaagatgttgaagttctggaacacggttcggcgcatggttggagtgacactcctgctagtacttcagggacccatagttgcaggaggtcacttcgtaacaggcctccaatagactatagccagttcgaccttatctcggacgaagaatctgatgttgaatcagcagaaaagggagtgggattagtgagacgcagacgacaattaccgaaaggagtacttcggggatgcgcacaatgtgctgattgtcaaaaggttgttgcaaggtggaatccatctggtgcaaggaggcctgttcttgaggaagctcctgttttctatccatccgaagaggaattcaaggacaccttaaaatacattgagagtatacggtctacagcagaaccatatggaatttgtcgtattgtcccgccgccttcatggaaacctccatgccttcttaaagagaagaacatatgggaatgctcaaaattttgtactcgggtacagaaggttgacaagctccaaaaccgtaaatcatccaagaagggcagaagaggtgggatgatgaagaagcggaggaagcttttagagctggaagataacaataatattaatcacaatcaaactggggtgcagcaaaaccaagagaggtttggatttgaacctggacctgagttcacacttcagacatttaagaagtatgcagatgatttccgtgaacaatattttaagaaagaagtgtccgcggactcaccaccatcagtagaagacattgaaggcgagtattggcgtatagtcgaaaagcctactgaagagatagaggtagtatatggtgctgatttggagactggaacttttggtagcggcttcccaaagtcttctcccgaagtaaaatctgatgttgagcataagtacttagagtctggttggaacctaaacaacttgcctagactacaaggttcagtactatcttttgaaggtggggacatctctggaaaggatgccgtaaatttggaggcagcaatgaggaaacatctacctgacttgtttgaggaacaacctgatttgcttcacaacctgcatgagggagagtttgtcctaacattccctcgggcataccatgctggtttcaactgtggcttcaattgtgcagaagctgttaatgtggcaccaattgattggttaccaattggacaggatgcagtcgagctttatcgtaagcaagctcggaaaattactgtttcccatgataagctgttgctaggggctgcaagagaagcaataagagctcattgggatattctgttccttaagaaaaatactgctgataacttgaggtggaaaagcatgtgtggacttgacagtactatatgcaaatcgcttaagccgctgatccaacgcgcgcagccgctgatccatcactgccagacgccatcgcgcccagccgcccagacgtctgagctgccagccgccgtcgcgcgcgcccaggagctgccagccgccatcgcgcgcgcccaggagccgccagagctagacgtcgtcggccgtcctccaccgccctccaggtacgtcgccggccccctcctccctcctccctccgccgccacccccaaagccgccgctgccgccagctactgcctctcccgtaccgccgccgccgtcgtacgagcaggccgtagggtttcgagtttggagttctgcctcttcctactgcctctccccaaggtccccactcgcatccaaggttgtacgagcaggccgccagctactgcctctccccaagcgctggtggtttgtttggtaaatggggaatgggcaatactctgttggttccctgttaagtgttacattttcaatgcggtcatggaaatggaattagatgttgctgttgtgaagagagatgaccttggaaatgctcatggtcttaatcttgatgagttcgatgatggttactaa

SEQ ID NO: 8817 - DNA, 1131 bp, Zea mays
  Peptide Sequence Number=SeqID_50596
atgttggggccaattagggtatccttagtatgtagcgcgagccccaaccaccataggccaaggatttcggatatatcgcaactacaaaaggaggggtcctccagagggaaaggaaggtcgtaccaggataaagatgactctgagaacatcgatgaatatgatagcgatatcatgttctccaggaatggaccacctatctctttggcaagcacttcccgtcctcaagacacttcagctcctggggaaagagagatggagattgtggagctctttaaaagggttcaagcactgctgcgagctagggtgaaaggcagggaaaagaagcctgaacctgcaaaagtgcatggcgaaaggggcagtgttgattcacttattaagttgcttaggaagcactctgttgaccagagaaggaagagcagtgacgagaaagagcagaattttggtgtaatgaggagaagcaatgattctggaaatagacgaggttcaaccatctttggcacaaaaagtgacatccaggaagagcagaagaagcaacctccggcacccttcaaaaggccagcttcaaatttcaggcgaaggtctcctgttcctggagtgaagttccagcctgttatcaatgtggatgtagacacagatgccgatcgcaagtctatgcgcaataatgttgccgatgctgtacagatggctaagacagctcttgatgagaggactgctacagatgagcctgactacatgtctccatatgaacctgattctgtaatcgaggcagagaacatttcgttggacgacctcgatgacatttcagacgatgacgaagaatctgatgctggtgaaccagacaacgagtatccagaactgtctttggaaatcgctgatgttacagatatagatgaattgcacgaaagttcagatctaagctctctgaaggttgcagagctgagggagcttgcaaagtcccgaggaatcaaaggctactcaaagacgaagaaaaacgagctgattgaagtcttgagcagcagcatggcatggtggatgaagactggcaattattggcctgcgctgcggtctcgacgccgtgcagaggcgtcatgtggtttcgtgatccacgcggggatgggaggagccgcatga

SEQ ID NO: 8818 - DNA, 348 bp, Zea mays
  Peptide Sequence Number=SeqID_50597
aagcagtcctacgtgcccgcatgcgccgctgtgtacgacaagctccagtgcagccgccgcttggacgcggtccagagcggttgcaccgcactgtccatcgtcaagcagggggacctcatggtcgtcgccaatatgtactaccttgctgatgagcctagggtgcacttcgtctggcagcccagacaagggtcatcggtactcgccatgtcgcgcacgttcaatgactactatatcaaggactgtggcgtcatctcggcgctggaggtgactcagagaaggaccgacaataacgaccagttcgtcatcctcgccaccgtcggggtagcttttgtgtcggcctgcctttaa

SEQ ID NO: 8819 - DNA, 507 bp, Zea mays
  Peptide Sequence Number=SeqID_50598
atggaggcagtagttgtggggagggacgtcgatggtggctggcgcggcattcagcggcgtgggcaaaagcgcgatgatttcggtgcgagtggagtggggttggatggaggtgggggcgggggtggcgtttgtgcgtggccagaatcgtcggaggagagctcgggcgcatcgttcactcaagcgaaccgcgaggcaggcagcggcgtagcagaggagagcccgtgcgcatcgtccgctccggcaaacgtcgaggtaggcgacggcgtatgcgtgcgggctcagacaacggacatcaagtggcggtcctacgtgcccgcatgcgccgctgtgtacgacaagctccagtgcagccgccgcttggacgcggtccagagcggttgcaccgcactgtccatcgtcaagcagggggacctcatggtcgtcgccaatgtcggcgactctaggattgttctgggcaccgcatccgacgacggcgccatcacgtcgttcagctcatcgtctacctaa

SEQ ID NO: 8820 - DNA, 336 bp, Zea mays
  Peptide Sequence Number=SeqID_50599
atggctcgccggagtttctccgacccacccaaggccttctcaccgccgttctcccctctctgccagtggattcatggccccttccccgccaatgagttcatcgtggtgccctcttcccctctgcccaactccggcgaccccggagccaccctagctcgcgctagccccaaccccagcgacctcaccgacgcggagaggcgcgacaccgcccgcagccgtctgtttccccggtctgattttcccccgtccgatcttgatcgcatggcccggaccgcaggataccgcttcgcgcccgcgcgcctgacgccgtggcccgcctgtcagtgccgctcatag

SEQ ID NO: 8821 - DNA, 693 bp, Zea mays
  Peptide Sequence Number=SeqID_50600
atggtacagacagaaaaatatttcctatttcctgtagaaatgcagaaaatcaagtgttatgatcagatctactacagcgcgcagattatcgacggccaaagagggccgtcgcccgccgcggcggcgagcgggcgtgaaaagctggacgtgctgaccttgtatgacggtgaaaggcggccggcgagatgcgtcatgcaccgggatcttaaaccagagaaatttttaaatgcaagcaagcaagcgagtccccaacagctacccagtcggaggccgggtcttccaagcggctcccagcgaatcccaggcggtggctcgtcttcctgcccgtcgtcctccccaggcgatgcccgtcgtcctccccaggcgccaggcggccggccgttcatccccaagcgccaggcggccgtcgtcctccccaggcaccagtcgatcgttacttcccaggcgctgcccatcatcctccccaggcaccaggcggtcgttcctccccaggcactcgacggcggcggtctacagggatatgggtgcattaacatcaccaaaacaatcaggcttgattggttactgccgcacctcccgcggcattttagactggaggtctcaagctcgattcctcttgagtgcatcttttttttcccgatgcaattactcaggggcagcgacgtccaaattccagacccacgcgcgctatga

SEQ ID NO: 8822 - DNA, 1560 bp, Zea mays
  Peptide Sequence Number=SeqID_50601
atggcagaacagcacaaaggcccaacaaacagggtagcctccgatggcctcccggacggtgttgcgccgccgcggaagaagagcaacgtccggttcgccttcgcctgcgctatcttggcctccatgacctccatcctcctcggctatgacatcggggtgatgagcggcgcggcgctgttcatcaaggaggacctcaagatctcagacgtggaggtggaggtcctgcttggcatcctcaacctctactcgctgatcggctccttcgcggcagggcgcacctccgactggatcggacgccggctcaccatcatccttgcggccgtcatcttcttcgtcggggccttcatgatgggcttctcggtcaactaccccatgctcatggccggcaggttcgtcgcgggcatcggcgtgggctacgcgctcatgatcgcgcccgtctacacggccgaggtctcgccggcgtcgtcacggggcttcctcacctccttccccgaggtgttcatcaacttcggcatcctgctcggctacgtttccaactacgccttctcccacctcagcttgaaggtcggctggcgccttatgctcggcgtcggcgccgcgccttccgtcgtcctcgcgctcatggtgctcggcatgcccgagtccccacggtggttggtcatgaagggccgtctcgccgacgccaaagtggtgctcggcaagacctccgacacgccggaggaggctgctctgcgcctcgcggacatcaaggaggcggccggcatccccgctgacctcgacggggacgtcgtcgcggtgcccaagcggaccggcggcgaggagcgcgtgtggaaagagctgatcctctccccgacgccggccgtccggcgcatcctcctgtcggcgctcggcatccacttcttccagcagtcgtcgggcatcgactcggtggtgctctacagcccgcgcgtgttccagagcgccggcatcgccgacaagaacaagctgctcggcaccacgtgcgccgtcggcgtgaccaagacgctcttcatcctggtggccacgttcacgctggaccgctttggccgccggcctctcctgctggcgagcaccgggggcatggtcgtcagcctcgtcggcctcgggttcggcctcaccgtcatcggccaccaccaagagggcaccaccatcccctgggccatcggcgtctgcatcgcctccatcctcggggtggtggccttcttctccatcgggctcggccccatcacgtgggtgtacagctccgagatcttcccgcttcacctgcgcgcgctcgggtgcgctctcggcgtaggcttgaaccgcgtcaccagcggggtcatctccatgaccttcctgtcgctgtccaagggcatcactatcgggggcagcttcttcctctacgcgggcatcgcctcgctcgcctgggtcttcttcttcacctacctccccgagacacgcggccgcacgctcgagcagatgggcgggctcttcggcatccccaacatggccggcgacagcgaccagctgaccagcagtcgcccgagaaggagaagaccttga

SEQ ID NO: 8823 - DNA, 270 bp, Zea mays
  Peptide Sequence Number=SeqID_50602
atggccgccgctaccacacagcgcccgccctactccgccgttgcggccttggccgagcagcccctggcgtgccttgccgcagccagcgcgcagtcatggccagccgttgtggccttggccgagcgcgagcggcccgcctgctgtggtgatgaggatgatggttatgattatgcttatggtattggttgtcctcattgcaaccactgctcaggagaagatgaagccgtggaggaagacttccaggagttccaggagtatgatgagttctag

SEQ ID NO: 8824 - DNA, 249 bp, Zea mays
  Peptide Sequence Number=SeqID_50603
atggccagatttcctgcagtcctgctcgcgccctactccctgcgcactgctctgctcggagctccctgtccgtcctctctgccaagcgactttccagcgcgcgctcagcagctcctctgctccttccctgcgcacagccgtattcctcaagcaccgtcccgtggagcccctgtgctcaccggtcgtgagcccctatccatggccgccgaatatgctcctttgttcaaggtgataggagttgtgtgctaa

SEQ ID NO: 8825 - DNA, 366 bp, Zea mays
  Peptide Sequence Number=SeqID_50604
atgacttctcacgaatcctcgaaaggagggaacgcacattcccacatggatgggcttgcacaagagggtttcccccgtattttgtgggaggtcgtgcaaggtgaggcaatgtcccagttgatgggtctagtggagtctaccaagatcaccctggataaaagggaggaccttgttgtcaacttgtccactgagctggtggaaaaggatctccaggtggaacagatggccacccaaatccaagaacttgaggatcaagtggaggcccgggagaacactatcgagattctgcaagatcagcttcaaactacccagcaacagcttgaggaagccaaccagcacttggatccgcaccatcaagagatttag

SEQ ID NO: 8826 - DNA, 528 bp, Zea mays
  Peptide Sequence Number=SeqID_50605
atggcgctccacaagctctatgacgacggcggcccccagctctcttacggaagcagagcgacgaaggaccagggccttcttagagaaggttggccgcgcgggaccgaggacgggacaggcgctctcttggggccgctcgcttccctcacccgcgtggacgcttgtaacccccctactgcaagcgcacccgacctgggcgcgggacgaacacgaaggccgcgggacttccacctctctcacgctcgactccggccacctcgcctctcccccttcgcgctcgcccacgcgctcgacccatctgggctggggcacgcagcacactcactcgtcggcttagggacccccctgtctcgaaacgccgacagcccccaacacggccccaaggaatacagggaagaagcagacccgcccaggcgcatggctaccgaagcggacggagttaatcgattcataggtcgtggcgcatcgaatagagaacttaccgagggtaggtgctacaccaaagagatcatccaagggacgcagtga

SEQ ID NO: 8827 - DNA, 390 bp, Zea mays
  Peptide Sequence Number=SeqID_50606
atggctgcgagagcggcgctgctcctggccattggcctggtccttgcaggctgcagccgttgccagcgcgacctactgcccgccgccgccggccccaaagccgccgacgccaacgcccgacggccaccaccacgggtcgtgccccgggacgcgttgaagctgggcgtgtgcgccgacgtgctgggcttggtgaaggccaaggtcggctcgccgccgtacgagccgtgctgctcgttgttggacaggctcgtcgacctggaggtcgtcgcttgcctctgcaccgccatcaaggccaacatcctcggcatcaaccttaacctccccatcgacctcagcctcatcctcaacaactgcggcaagaactgccccaacgacttccactgcgcatag

SEQ ID NO: 8828 - DNA, 168 bp, Zea mays
  Peptide Sequence Number=SeqID_50607
atgccgcgcctcgccgctaccgttgtatcacgccgcgccgacaaggccctgcgtcgcggcgcgtttgggggacgactgtctctctccaccctccaaccatcgaacgccgcctccagcgacgaggggagcactgtgcaagggggcgctacagtgctccccttgatctag

SEQ ID NO: 8829 - DNA, 1167 bp, Zea mays
  Peptide Sequence Number=SeqID_50608
atggatttgaagacaggcctcaattcacctgttattgctgaccatctccctacgttagcattgcctgctgctgtcatgactttcacaacacctactagctttccctctccggggctttgcttgaacactacaaagaagatacctctgcctggtaagattgaagaagttcgtgctgctggatggcttgatctcatgaaggcctcatcacctacccgcaaaaggcagatcaaggatgtcatctgtgatgctcaatctgatcttgatttgcaatactgcaactggacagtgaactatccttctgctttgatctcatttgaggcaattagtgatcttgctgggagtaaaaggttggcattgtttcttgactatgacggaacactttcaccgattgtggacaatcctgaaaatgcattaatgtctgatgagatgcgtgctgcagtgaggcatgcggcatcacttttcccaactgcaatcattagcggaagatctcgtgataaggtttttgactttgtgaagctaaatgaattgtactacgctggaagccatggaatggacataatgggccctgttaggaagactactgactccaatggcgtggaatgtattcggtcaactgatgtgcatggtaaagaagtcaacctgttccaacctgctagtgagtttttacctatgatcactgaggtgtatgaaaaacttggtgagagtgttaaggacattgatggtgcaaggatggaagacaacaagttctgtgtatctgtgcattaccgtaatgtggcggaagatattcctactcttgcatctcaggactataaaaaggttttccatcgtgtaactgctgttttggaaggttacccttgcctaagactaacccatgggaggaaggtttttgaggtccgtcctgttattgattggaacaaaggtaaagctgtggagtttttacttgaatcgcttgggctcagcgagagtgaagatgttctccctatctatgttggagatgacagaacagatgaagatgcattcaaagttctgaaggcaagcaaccgtggctttggaatattggtgtcgtctatacccaaagagagtgacgccttctactccttgagggatccagctgaggtgatggaatttctgagaatgttggcagcatggaaggagcagtccacctga

SEQ ID NO: 8830 - DNA, 315 bp, Zea mays
  Peptide Sequence Number=SeqID_50609
atggcggtgaaccaatcccgcgcccaggtgtactacctcccaaaaccgactggccttctatcatgcggagattcaggcgagtgtgcgtgtaagggcactgtaccggttcctaaggcgcagagagcccatgctcgtatcgatggccgatccatagcggtcacttcctacggcaggacgcgacagcggggtactccgtactcatccatggcggaggccatggccagcgcccccaacacggccccaaggaatacagggaagaagcagacccgcccaggcgcatggctaccgaagcggacggagttaatcgattcatag

SEQ ID NO: 8831 - DNA, 225 bp, Zea mays
  Peptide Sequence Number=SeqID_50610
atggacatcactggcggcgctactagggttctggcaacgagagagggctcgggagttgggttctgcgaagaatggttacaacatggatcttatgctgcgcacatcgggtctaggtgcggttcggtggccggagatcgtggcatggctgaacggctcgcgaccggctcagcgggtgcattgactatagccgtgcccgtgattggtctcctgcgtaggacgagatga

SEQ ID NO: 8832 - DNA, 1854 bp, Zea mays
  Peptide Sequence Number=SeqID_50611
atggtggtggcgagaaaaccgcagcagcagcccgcaggcgtcgcccgccggcgcggtggcggcgtcagggtggggcccgcgaggctcgagggcctccccgcggcgtgggcgggcgccgccgccgccgccgtcaaggtcaagtggcccgcgcccgggggcgcgctgtcgcagatgctgacggggcggtgggcgcgcggggtgaccgccgtcgaggccgtcggcgccggcgggaccgtccgctgggagccgcgcgacggcaaccggttcaggctcgacgacgtcgtcggccccgccggccggccggagcgcggggtcttcttctccgtcctctatggattccaagaacaaggccggggcaacaaggagctggtgaggctggaggagatcgggacagccatgataagcctggaggagtgctgctgggagatgcagctgcagcagcacgaccaccagctggtggctgtccccgtcagggtcaggaaggacggatgggcaagcgatgccatgctttatgtggacgtggagctcgtggacgcgaacacacgcccggacgtcgatagggcagtctcgttcagggagaagccgagaacgtacatggcgcctccgccgacaatgcgaggtagccgcaagagcttggagtcagcgacgtgccatgatgtccttgacctgaagcagctgcttgatctggctgagaaggaaggccgggtggccgtgtatggcaacataaggagctccgacaccagcagcgtgagcagcactagcagcagcagcagcacgattagcgtcagcagtgctagcaccagcggcggcgcgagcccggaaccggcctcgacgtcgaagcgccggttcctgccatggacgaggaggagcagggacttcgacaagaggaccgccgagtcgctctcccaagaactgcccacaaagtgcacggtgagcctcctcctggcacgtgatggaaatgaaatgctacgttcctcgtcatgtgcaccggcgctgatcttgtcacggcgggcgacgaaccctgcgcaggacgacggtccgggtccggccggcggctgggagacgcgcgagttcacgagcagggacgccgagacgaggctgaggacgccggtgttcttcgcgtccatcgaccagcgcgacggcagcgctgggggggagggcgcgtgcgcggcgctcgccgccgtcctcgcggcggcgctccacgccggccacccggcgatgcccacccgcccggagctggacgcgctcatccgggacggctcgtcggagtggaggcggctctgcgacgacgaggcgcgcgcggcgcggttccccaaccggcacctcgacctggacaccgtgctggcgtcccgggcgtggcccatcgcggtgcggcacgacagggccttcgtcggcttcttccagccggagagcttcgcgtcgctgtccggcgccatgtcgttcgacgacatctggcgcgagatcgccggcggcggcggacgtgggcgcgggccgggcggccgcgcggacgtgtacatcgtcagctggaacgaccacttcttcgcgctcaaggtggagagcgactgctactacgtcgtcgacacgctcggcgagaggctgcacgagggctgcgacaaggcctacatgctgaggttcgacggctcgtcggagatgcgggccgaaggcaccgaagaggtggtcgtcgccgggaaggaatgctgcagggagttcatcaagaggttcctggccgccatcccgctgagggaggagctggagatcgagaaaaagggcggcagcggcatcgacggtggcggcgcgccgcaccagcggctgcagatcgagttccacttcacagcctttacaagacgacaatag

SEQ ID NO: 8833 - DNA, 363 bp, Zea mays
  Peptide Sequence Number=SeqID_50612
atggttgatcaacggtttgctggctttcttccaccctccgcccaggcttgcgcgtgcacaacaccacggcggcggataggacactccaccgtcaacgcacgactagaatacgtcgaggcacaggaaaaaaatactcactgcaatagaaacgcaccggtcggcaacgtcacagcgaagatggagcttacggaggcgcgtgactccacgccaagacgctatcaccggagcctgacgagcacgggttcgccggtcaccaatggtggaaagatggctgcacaggacacccaataccgtgcgacgcttcgaaatcgcgactctcacccagacccccagaaagaggacggcgcgcggtggttcggctga

SEQ ID NO: 8834 - DNA, 432 bp, Zea mays
  Peptide Sequence Number=SeqID_50613
atgcagggttcttgcctaatcgccatcacaacaaaatcaaccaaggacctccctacactgaccactcccctactgcccttgcccctttcggcaatagcaaactacccaagtgattcgggggtaaacaaggcttgcgcgtgcacaacaccacggcggcggacaggacactccaccgtcaacgcacgactagaatacgtcgaggcacaggaaaaaaatactcactgcaatagaaacgcaccggtcggcaatgtcacagcgaagatggaggttacggaggcgcgtgactccacgccaagacgctatcaccagagcctgacgagcacgggttcgccggtcaccaatggtggaaagatggctgcacaggacacccaataccgtgcgacgcttcgaaatcgcgactctcacccagacccccagaaagaggacggctga

SEQ ID NO: 8835 - DNA, 519 bp, Zea mays
  Peptide Sequence Number=SeqID_50614
atggggaagcctgtcccatcactcctcatgctcctcctcagccgagtgaccgcacttgtacccaccataaccggaatgggagaccacgtctcaggtcgcgtgaggagggcaatctgcgggcaggttcactcaggccatgtaatgcagctactcaagaatgatatcttaccgaagaagacacggatggaggacgccgggcgtggatttaggccgccggcagggatcgtagacgcgggtgggctgagccggttcggaggaggacgacgacgggatggagtccgccgtggggatcgaagacatgggcgggagggaggctgccagcgcagatgcaggacgccggcgtggatggaggccgccgtggggatcaaaggcgtgggcaggctgagccggttcgatggaggacgacggcgggatggagtccggcggcggggattgaagacatatgtgggacggacgctggcggcgcggatgcaggacgccggcgtggatggaagccgccgccggggatcaaaggcgtag

SEQ ID NO: 8836 - DNA, 903 bp, Zea mays
  Peptide Sequence Number=SeqID_50615
atggagtacgtgaaccccctcaccggcttccgcgtcgacggccgccgccccaacgaggtgatgcatcctcgcccgctttcccctacgcgcggttcacgcgaacagccctatctcacccggtgctggacatcacgcagatgcggcaactcaagggcgaggtcggcgctgttcgagatgggcaacaccagagtcatcgccgccgtctacggcccgcgagaggttcagaacaaaggtcagcaagtaaacagcaaggaggctttggtaaagtttcactcctccaagtgcattattttgttagaggctgttctttgtgctgtgttcctgagggagttctgtatgcaggttcgttgtgagtacaggatggcagagtttagtacaggagatcggaggagaaaaccgaagggtgacaggcgatcaacagaaatttctcttgttattcgacagacaatggaggcaagcatattaacacatttaatgccacactcacagattgatatatatgtccaagttcttcaagctgatggtggaacaaggtcagcttgcataaatgctgcaacactagctcttgcagatgctgggattccaatgcgagacattgccacatcatgtagtgctggttatctgtgttctactcctttgctcgatctgaattacctcgaagacagtgctgggggttctgatgtcactgttggcattcttgcaaagatggacaaagtgactttgcttcagatggatgcaaaattaccaattgatacatttgaaaatgtaatgggacttgcaatagaagggtgcaaagcaattgcaacttacatccgagaggacctgccattgacacgttggaacttctgggttgttgactatcgttctggaacaggtgctattggagaatacaaagaagcttga

SEQ ID NO: 8837 - DNA, 651 bp, Zea mays
  Peptide Sequence Number=SeqID_50616
atgaagacccagtgccagtggtcccagaagatggttcagccagcagacaatattcaaggggattgggaccagtggattgttaatgacccacctgctcagcaaccccagcaagacctgccacctaacgagcaacaaatcagcaatcagcattcgagcctgtcctcagatagttcttttggtcccatccagggtgttcctgtgcagaatgggcatattctggaggacttggatgtggttgggcctgtgctgcacaataatgccccaaatatccctgctatgggtgatgttcctatgaatgggcttcaggaggttgacgacccacctaaccaaggagaccaccatgtgctagaggatattcttctccctaatgcccaactaggggaacaaatcaacaatggtcccaacaatgtgtgcagatccctaagaagtggtctcctttttttcctgtcaaacctgctccatgaagattccttcagctggtcaaagtcattcttgtcttcagacattcctcctgccttgctggagcctgagtttgagactctctcttttgctatccccaagaaatgtcttgatagcaagttcctagagtctgttcaatcagaggaatcaactggtagtgttggggacttgttctcaaatgctatgagttaa

SEQ ID NO: 8838 - DNA, 315 bp, Zea mays
  Peptide Sequence Number=SeqID_50617
atggagttgatgtcggctgtttcctctccctcccggcgccctcttcccttccctctcctcctctataaattggacagccacgcccaagagctctccctccccaaactcgccatctctctcgttctccttgctctcaccataggccacgctcgcgccgtacccagctcaacgacggccgtcgacgcaaccgcgcagcaccccggctggaccatccaccgcctcgccgtgctcggaccgcccgtggaactcgccggaccgtccgcctgcaccacgccctcgccacgctcgtaccctgctcgtcgtaacgacgcctag

SEQ ID NO: 8839 - DNA, 1830 bp, Zea mays
  Peptide Sequence Number=SeqID_50618
atgaaagagaggtcaaaatcttcttctgtaagcaatcttccactcatcctgaacattgatgactttaagggcgatttttcatttgatgcattatttggcaacttggttaatgagctcctaccgtctttccaagaagattcagcagattcagcagatggacatggtattggtggaactgatgtgctgccaaatggacatacccgtacctcttctgatgcaacaaaatttgcacaaggactgtctgcacctctatttccagaagtagatgctctattattgctgttcaagaactcctgtaaagagttggtcgatcttcgcaagcagattgatggaaaactctccaatctaaagaaagaggtttctactcaagatgataagcatcggaagacactaactgagctggaaaaaggtgtagatggcttgttcaacagctttgcgcgattggattcgcgtatttcaagtgttgggcagactgctgctaaagtaggagaccatttgcagagtgcagatgctcagcgtgaaactgctagtcaagccatagagctcataaagtacctcatggagtttaatagaaacccaggcagtttgatggaactttcacctctattttctgatgacagccgtgtcgctgaggctgcatcaattgcacagaaattgcgatcattcgctgaggaggatatttcaaaggctatgccatcagttgtgggaggtgcaactgctagcagaggattggaagttgcagttgctaatcttcaggagtactgcaatggtatgtatctgagaatgctagctgtggcatatgagaagactcaagaacttgctagagatcttcgagccgttggatgtggtgacttggatgttgaaggtctcacagagtctcttttttccgctcacaaggatgaatatcctgaatatgagcaagcctctcttaggcagctgtatcaagcaaagttggaagaactgcgtgctgaaagccagaaagtctctgagccaagtggaacaatagggcgttctaaaggggcttcagtggcttcttcccctctggagatatctgttgcagctgtgacagaatttgtcagccaatatataacagatggacttgaacgggctagagatagcttgactgaagctgcaagtttgagggaaaggtttgtgataggttcaagtgttagtagaagggttacttctcaggcagaagctgccgcagctgctggtgaaagcagtttcaaatctttcatggttgcagtacaacgtgctggcagtagtgtggccatagttcagcaatactttgcaaattctatatctcggctcttattgcctgttgatggttctcacgctgccacttgtgaagaaatggcaacagcaatgtctagcgcagagggtgctgcttttaaagggcttcatcaatgcattgaaactgtgatggctgaggttgaccgattgttatcaactgaacaaaaggcagcagattaccactcacctgatgatggaatggttcatgatcatcgtccaacaaatgcctgcacaagtggaggactacgactgaaacgtgacataacagagtacggagaatttgtgcgcagttttaatgcccctactgttgatgagaaatttgaactccttggcatcttggccaatgtattcattgttgctcctgaaagtctctcctctttgtttgagggtttattcagcttagagacgactacaagagtgcgaaactggcatccaggcttagctccttatggtccagttgagagtcgacactttgttaataaccagacagtgattgaaccaattgtatgtccagttctcggttcaatcagattttag

SEQ ID NO: 8840 - DNA, 624 bp, Zea mays
  Peptide Sequence Number=SeqID_50619
atgggacatggtgcaactgctgactggtggtctgtaggtatcattctttttgagctactagtagggcttcctccattcaatgctgaaaccccaccactaatttttgacaacataatgaatagaaatataccctggcccaaggtaccagaggagatgtcgtatgaagcatatgatctgattgacaagctgttaacagaaaatccagttcaaaggctaggagccacaggagccagcgaggtgaagcaacatgttttcttcaaggatattaattggagcacacttgcaagacaaaaggctatgttcataccatcaactgaagcacatgacactagttactttatgagccgatatatatggaatgcagaagatgaacaagttcatggaagtagcgacttcgatgacttgactgacacctgcagcagtgggtcactcagcaacgtgcaagatgaagatggggacgaatgtggcagtttgacggatttcagtgctcctgcccttgcagtgaagtactcatttagtaatttctcatataagaatttatctcagttggcttccatcaattatgatctggttgtaaagaacgccaaggaatcagcagaagcccccaaaccctctgggccatga

SEQ ID NO: 8841 - DNA, 744 bp, Zea mays
  Peptide Sequence Number=SeqID_50620
atggcgaaaaatgatgcctctctaaggaatttggagaatcaagtgggccagcttgcaactgaacttagaaaccaaccacaaggtgctttacctagtgatacggagaatctgaggaatccagggaaggagcattgtaaagcgttctcaaatgaagttcaaccgagtgttgaaattccagtttcaccgaaaattgaatctgcaaaatctgacaagaaaattaatcaaccagttccagtaaagaaacctccaccaccctaccttcaaagaattcagaagcaaaagcagggaattcaattcaagaagttcctagacgtactcaagcaacttcatatcaacatcccgttggttgaagcacttgaaaaaatttcgaactacgtcaaattcatgaaggatatcctgtctaaaaatgaaggcttggagaatttgatacggaagttggggataggtgaagttcaattagcagatcgatccttagcacatccaaaaggaaaaattaaggacatattgtctatacgatttcctgacacaattgatgattattctgcagtgtccgatttagaggatttaatcgtggagaaggaactcaattatgttgaggacccattggaacaaattttgacatcagatcctctaaatggtgaaaaggaggatgaatacttagctttgttagaagctaatcaaaggggatttaaaccgcaatccctctttgaatctttggagttagagaaaagggattatgcctaa

SEQ ID NO: 8842 - DNA, 273 bp, Zea mays
  Peptide Sequence Number=SeqID_50621
atggacatttctagacatttcaccttcactttttctgccaaaaacgccataggagagctctttgaactagtttccatatttttgcttcaactccatgagcttctgctcaaccttcaagcttctaaaaatgatgtactcttatccgtaagccgttctccgatttggaaagattggttcgatttttgtgaggttaaatcaaaatgggtgaaaaatgtggccttgaaatggcctattttcgtccacacgggcagagatacatatgtttgtggataa

SEQ ID NO: 8843 - DNA, 108 bp, Zea mays
  Peptide Sequence Number=SeqID_50622
atgacgcgagatctgcaaagggccgtggggtccaatttggatttgtgggtcaaggtcagtgactcggcgacttcagttgaatgtgatcaaggaaatgaaagagagtaa

SEQ ID NO: 8844 - DNA, 603 bp, Zea mays
  Peptide Sequence Number=SeqID_50623
atggtggcacatgctctgctgtcatatcagacctgcaatgaacgttcaggatgtttccgcctgggtcagcaggccgctcatgaaggggaaaacaaatgcttgaactcagagctatggcacgcctgcgctggcccactggtgtgcctccccaccgtggggagccgggtggtctactttcctcagggtcatagcgagcaggctgatgttgaaacagatgaagtatatgctcaaatgacgctacaacctttgacaccagaagagcagaaggatacatttcttccaatggagttgggaattccaagcaagcagccaacgaattatttttgcaagacacttactgcaagtgatactagtacccatggtggtttttctgttcctcgtcgtgctgctgagaaagtctttcctccactggatttctcgcagcaaccacctgctcaggagcttattgcaagggatctccatgacattgagtggaaatttagacatatctttagagataaactggaccactctttagagttcattatcataattatatatcttaaacatattatacacactttccaaaacacacataaacttattgcacccgacttcacttag

SEQ ID NO: 8845 - DNA, 3195 bp, Zea mays
  Peptide Sequence Number=SeqID_50624
atggaccctggtcgctaccctgttcaacaaggacatggatgggataataacagcgctcttgagggttttcctgctgctcttgaccacaattaccgggtcggtggttcatatgatgagaggagatatctagatgaaaggtactcgagggataatgtgtatccaagaagtaactaccacagagattttctggagagggataaccaaccccctcctcctgctgcttctgctggtatctggtctcaatcaaggaggacaacttatgaggaagaatatccccacaatcgggattctaggcgtcatcagaagccttatgctgattcttatagtgacatggatacttttcgtgatcatgagatcacttcatttcaagattttgataagtttcgggatggctatcggggtgttgacagctttcgtgatcatgaatttgacaggccctctaggtttgggggacgagaacgagatgacaactcatatgatgattatgactataggccacgtgtttcccatcagagcagggacaacagccgtgagagggattatgaatatggccgacatagttatgattctgattatgaaagaagtagtcgaagagatggcaattggaggaggcgcgatcgagatcgcttgagtagagagagagatcagagtccacatagaaggcatgagagatctcgatcacgatcccatggacgtgatgatcgtcctagatcaagatcacctcgaagtcgaagccatggacgaagtcatcgtgaggacagctatgatgatggtcggaatgataaaactgagaagcgaagggatcgtgaagagaaatatcagcgggaacattattctgtggctgaatgggggcctcttcgccatgttcgagtgatcaaagagcgacattctggaatttctcgtggatttgcttttatcgattttccctctgtgggggcagcaagcactatgatggagaggattggtgatgatggtcttgttgttgatggtcggaagcttttttttgagtacagtagtaagccaactgggggcactggtggaccttttggtaatgataatgccgcgaagtcgggccattcagttcataggggcatcactgtgccttctgattggatgtgcaccatatgtggatgtgtcaactttgcacggcgaacttcatgctttcaattaccatttaaggtggtgtccatgaccagtagattacatttctgctattttgcaacactaggtcaagaagagtgtaatgagccacgtacagatgatgctccagcagctgacatatctttatcacattcaacatccttaggaaagaaaggaactgattcaggtcctactcatgtactggttgttcgtgggttggatgaaaatgctgatgaggaaatgctccgttatgagttctctaaacatgcaccaattaaggatcttcgccttgttagagacaagttcacccatgtgtcaagggggtttgcttttgttcatttccattcggtatatcttgctttctttatggttgctgatgccacaaaagctctagaagctacaaatggaacaacgcttgagaagaacgggcaaatcttaagagtagcatatgcaaagagtatccttgggccaggatcagggacatcaggagcttcacagtcaagtagccttgcagctgctgcgattgaggcagcagcgttttctcaacagtacgatgctgttggatggacaccgaaggaatataatccagatgacaaacagtctactagctggcaggagcaagttgttggttcagttccagttcaacaggatggttcggggttgcattctggttttgtgtgggatgaggcttctggttactactttgatgctgcttctgggttttactatgatggaaatacaggtctttactatgatggtaacagtgggatctggtattcgtatgataaccagtctcagcagtacataccttgcggtgatcagaatgacaacaaaacacctggtaagcagtctgagccttccaaaggaactgatggtaggaaggtggtaatatctgcgccggctgctactgtcacttcagttgagaaggcagcctctttacctgatgcagttcaagcagctgcaacagcagcactagctgcggagaagaaagaaaaggagaaagcaaaggagataaaacttgcttcgaaaagcagtatcctggctaataagaagaaaatgaataatgtgttgacaatgtggaaacagaggagtcatgaagggcaggccacgcgtttaactcttgatgaaaatcacttgtctacttcatctgaggatagacctctgcaatctggacaacatgcaaagaccaaagttaaatttgatgtgacgggcctgaaggagagtagtatatcaagttctggagtcaatacaactgcccaagctgcattgactgggggtttggagtctccagtcaaggcaaggcctgtaagcaacagctcaggggggactttaatgggagtaataagaggctcggcaagaggcgtggtaaagtctgatactccatactccggagcatctgctggaatttccacttcagctgttggaggtgctgaagtttcttcaaccaattcagatatgcccacagttatgactccctttaggactgatgcttctgcattgggttcttatacaccttcaactgtatctgcaagtggtaagagaagattttctgaaacaccagtgacttctactaccagcaaggagcaatctcaaactgcttacagagaccgtgcggccgagaggaggaacttgtatggttcatcatcttccacgggagatgatctgcctgaccctgagctcaggaattcaaatcgagatatggcattcaaaaaattctcctcagatccaatgcctttcccacctggtgttggtggtggacggggggttgtgtcagatgatgttcaaagctttgaggtgatcacagcagagaaagcaattgatgagaaaaatgtgggcaaccaaatgctccgcaatatgggttggcatgaaggattgggattggggaaggatggaagtggaatgaaagaaccagtacaaacgcaggcgatggatggtagagcaggactcggaagtcagacgaagaagttggaccctagccttgaggtgcaagccggcgatagttacaaaactgtgattcataagaaagcacttgctaggtttcgtgaaatgtcttag

SEQ ID NO: 8846 - DNA, 1581 bp, Zea mays
  Peptide Sequence Number=SeqID_50625
atggaagttagcaacgctctaaaacgaaagcgatacgacgacgacaattacatggaggcggaggtggacctttccctcctggaagccgtcgagaaatcccaaaacaccgtcgaattacttgacctccgcaccctcaagaagctagtcctttccttcgagcgccgcttaaaggagaacatcgaggcccggctcaagtacccggaccaaccggagcggttcgccgactcggaagtggaactgcacgaggagctagagaagctaaagattcttgctggagcccctgagctgtaccctgagctggtcaatctcaacgccatcccttccattctcaacctcttgtcccatgacaacaccgacattgccatcgacgttgtgcatttgttagaggacttgacggacgaggatgttctggaggacaacgacgagcctgccaggattctggtggattctcttattgagaacaatgtgttggagctgttggtccagaatctgcaacgcctatcggacaaggaccctgatgagatgagtgctatttacaacaccctggccagcattgaaaacatgatagaggtgaagcctacagtggctgagttggtctgcgagaggaccaagttgttgagatggttgttggggaagatcaaagtgagggaattcgatagtaacaagcagtacgcttcggagatattggccatattgcttcagaacagcactgccaatcagaagagattggggcaaatgaacggcgtggatgtggttttgcaggccgtggctatgtacaaatcaaaggaccccaagacatcagatgaagaggaaatgctagagaatttgtttgattgtttgtgttgtttattgatgccattggagaacaaggagaggttcgttaaggccgaaggagtggagttgatgatcattattatgaagcagaagaaatctgcttatgcctctgccatcagggcacttgatttttccatgaccaagtatccccctgcttgcgagcgatttgtggatgttctgggattgaagaccgccttcgctgctttcatgggtaaggcaagtatatctctctttattcctataagtaagaagaacaagaaggaaaggtaccaagaggagttggaagagcgcctggtatcactaattgcatcattgtttggtggaattttgagaggttccagaagggaaaggttgttaagtaaatttgttgagaatgaatgtgagaagatagaccgccttatggaactatatataagatattccgacagagttacagcagagacacaacgactggagcaactggaacttgatgatttggagatggatgaagaggaaaagtacaataggaaacttgaatctggactttacactcttcagttgattgctgttattctgggtcatctttggtgttctgaacaccctcaaatgagggcaagaattgaattactgctcaagcagcagaaacttactaagaatgatatcaagaatatacttcaggaatatcatgacaatatcggtgacctagatggagccgaagagaaggaacaagcacaaacaaggatccagaagatcatttcatccttctga

SEQ ID NO: 8847 - DNA, 1100 bp, Zea mays
  Peptide Sequence Number=SeqID_50626
tgccagtggtgcaccggctgagcccatgctcccctctcgccggagccgcacggaaccagcagccggaaaggcgatccgtggccgacgtcctccaccgcgacgcgctccgcctccgctccctgctgcacagggaggaagacaaccaccgcacccctgcacccgcagcacctcctggaggaggggtctcgatccccagcagaggcgaacccatcgaggagctgcccggtgcgttcgagtaccacgtcgtcgctggcttcggcactccgatgcagaagctccccgtgggattcgacacgaccaccaccggtgccacgctgctacagtgcacgccgtgcggctccggcgccgaccacgccttcgacccatccgcgtcgtcctctgtctctcaagtcccctgcggctcgccggactgcccgttccacggctgctccggacgacccagctgcaccctcagcgtctccttcaacaacacgttgctgggcaacgcgacgttcttcaccgacacgctgaccctgacgccgtcgtcgtcggccacggtggacaagttcaggttcgcgtgtctcgagggcatcgcgccgggcccggccgaggatggctctgctggcatcctcgacctcagccggaacagccactccctgccgtcccgcctcgtcgcctcctctccgccgcacgcggtcgccttctcctactgcctgccggcctccacggccgatgtaggcttcctctcgctcggcgccaccaagccggaactcttgggacgcaaggtgagctacaccccactgaggggaagccccagcaacgggaacctgtacgtcgtggatctcgtcgggctgggcctcggcggcccggacctcccgatcccgcccgccgccatcgccggagacgacaccatcctcgagctgcacacgacgttcacctacctcaagccccaggtgtacaaggtcctccgcgacagcttccgcaagtccatgtcgggagtaccctgccgcgccgccgctcggaagcctggacacgtgctacaacttcaccgggatgatgattgtgatggcggcaccgtgattgggagcatggcgcagatgtcgacggaggtggtgtacgac

SEQ ID NO: 8848 - DNA, 825 bp, Zea mays
  Peptide Sequence Number=SeqID_50627
atgaagaggttgtctgccgggtcttcaatggcggcatgccgtttgtcccttccatcattcgccttcacatcaaatgctgactccgcggaaggcgttgatcttttagtcttcaagctaagtgcatggtgtgacgagccagagctagtgccggcggaattggatcttcttgcgaaggagccgcagttgcgtgccagtgaatttggccgctgtcctcgcacattggtgttccctatctccgtgcgggtgttctgttcagacgtggtcctaggtagaagcccctcgccaccgccgccgccaccctattccggcgacgatcacgagcagaaccacgacaagcggcggcggaatcaacattcaactccaacaatgtctgttcgcaggccggtgcacgcgtgcctcgggcctagcgtctgtgccgactctgcgcctggtgggacaagtgtgacggtcgcgctcctggtccccttgggggcagagaccaccacttcggtttccccacccctggcgcgccgcaggccttgtgccccacaagccgccactgcattaacaaccactcttccatccgaagatcctgggctcgcctcagtaaatggtgtgatctcttctgacctaatggattctgggaagccaactgtcggagattccttggaacctagccttttagatcctccccacgacacctcatttgaaatatcggtttttgaggagactggcggttatccgaggataggccagagcccagaaagtcactgtgctgatattttaggtcgggcctctatgccaattatgcaggacccgggagttccagttgctaatgctgcacag

SEQ ID NO: 8849 - DNA, 2244 bp, Zea mays
  Peptide Sequence Number=SeqID_50628
atggctaacctcttgcaaacacctttccttgtacccttcctactttccatggccctaataaaccttgtgtgcttcacggccactgtcagcagtgaggacgatcagttcgtctactcgtgcttctccggcaaaaacctcaccctcgacggagcagccgccgttacagcagacggcgtccttgagctgaccaatcgcacggtgcacgtcaaaggccatgccttctacccagctccatggcgattccgcaggtcccctggtgagacggtgcagtctttctcggtcacctttgtgttcggcatggtccccatctactccgacaaatgcaccgacggcatggctttcctgatctccccgaccaaggatttctccggtgcgcaggagtcgcagtacctgggcctcctcaacaaaacaagcgacggcaaagcaagcaaccacatatttgcagtcgagcttgatagcagcgagaactccgagttccatgacatcgacgacaaccacgtcggcatcaacatcaacagcctcacctcatttaggtccctttcagctggcttctacgacgacgacgacaagaacggtctcttccaaaacttgtcccttgttagccgcaaagagatgcaagtttgggtggactataatggagataccacgcagatcaacgtgacactggctcccctcaaggtcaatgtagccaaaccgtccaaaccgctactcacagctacctacaacctctcaacagtattggcggaagacccatcttacgttggcttctctgcatcaactggtccaatcaactcgctgtactgtgtgctcggctggagcttaggcatcaatgccccagctccacctattgatgtcgccaagctgccaaagctacctcgtgctggcccaaagcctcggtccaagctgcttgagatcatcctaccaatagtcacagccactttcatcatccttatcggaacaagcatatttctgtttgtgcggaggaggatgaagtatgctgaggtacaagaagactgggaagctgagttcgggccacaccgcttcccctacaaggacttgttccatgctacggatggattcaagaacaagaacctacttggcttaggaggattcgggaaggtgtacaaaggcgtgctccctgtctcaaagctagaggtcgctgtgaagagggtgtcacatgaatcaaggcagggaatgaaggagtttattgcagagattgtcagtattggccgtctccgccatcgcaacctggtccagctacttggttactgtagaagaaagggtgagctactgttggtatatgactacatgtcaaatggaagtcttgacaagtatttacattgcgaaggggataagcccactctaaactgggaccaaaggtttcagatcatcaagggcgttgcttctggcctgttctacctgcatgagaggtgggagaaagttgtgatccaccgtgacatcaaagccagcaatgtgttactggacagtgagatgaatggacgcctaggtgattttggtctggcaaggctgtatgatcacggtactaacccacagacaactcatgtggttggtaccatgggatatatagccccagaactggcccggaccggtaaggcaacacctctgacagatgtgtatgcgtttggtatcttcattcttgaggtaacctgtgggcaaaggccaatcagtagccatgcagaggacagttctcaggtcctaattgattgggttgtcaaccattggcacaaaggatcagtcacatacacagtggacagtaggttgcaatgcagctacaatgcagatgaggtgcgcctagcgttgaaccttggactcatgtgtgcgcacccaatttgtaatgcaaggcccagtatgagacaggtcgtacaatacctcaacggcgaaatgccactcccagaaatgatgcccacagacttaagctatagtgttctggccttcatgcaaaatgaaggctttgaccagtatacatccacagttgggagcagtggcatcaccgcctcaagcctctcgagtggaaggtttcaccctaagtgtgagaaaagggtaaaaattagtgagttcattctctgtaatatttatgaagctcatgtaatatgtggtgtaatattttttgaattgtgtgctataacgggtggggctgatgatcttgaagaaaacgatgctctggcacaaatgtttcatgatgaagagaaatactatgacaacaaaaatgttataaaaaattag

SEQ ID NO: 8850 - DNA, 285 bp, Zea mays
  Peptide Sequence Number=SeqID_50629
atggtggttgacacctatgacacgcactcatgcgaggacgtggtggagctggacatgttgcaggcgcagtcgagtactggtgggacatgtgtccaggatgtgggtgatgcgcacgcgcgagttggacatttgtctacagctcacaagatctggtccaccctcgagaaattctatgagggcaatgatcatttgaagaccagactctttgagacgtaccggcgagagcacgagaactttgttcagttggctagaaagaccatagacactatgatttctcagttctag

SEQ ID NO: 8851 - DNA, 429 bp, Zea mays
  Peptide Sequence Number=SeqID_50630
atgcccatgggacagtggcgcgcgagggtgtggggcactttggccaccagatctcggatcaatggccctgggttcaatgaaccacatgaaccgttatctgaacacttgggccatcggatcaagggtggatggccaggatcaggcgtctgggggtttaatagctccagccggccaggggtggtgctgttcacacccgcggtggcgcggccgtcggagacgaggcagactagggtttccaagggcactagggtggtctgggtagctagggaggagtgctctacacctaggtttgggcacgaggaggggctgtaccggccggacgccgtgaagacgcgagggggtgatgaaagggggaaccgccgcaggttcctagtgcacagagctcaggcgaagctcaccgtgggcgaggcgatgatagaggcccggtag

SEQ ID NO: 8852 - DNA, 744 bp, Zea mays
  Peptide Sequence Number=SeqID_50631
atgtcaaatggaacctatgatctgcaaggaaatagttactgtttctgcaaaaatcttgttgctgattctttttgcttttttatgtttcgagttcagatatttcattttatgatcgcatctttgaagtctgggcgatcttctgttctactggacactattattaggcttgtgtacccaattctctcactacaggaaacatcaaataaagatttatcattgcttgctaagtcagctttcgagttgctgaaatggaggattctacatcggccttttcttgaaactgctattacgtctattcttcctttagtcagtgatcctaaactggcgtaccagatctgcactgttatcgtatctcaggacctttacctacaggttagggagcatgctgctggtgttcttgcaagcttaatgaagggtatagatgaagatctatcaaaggatttccgtgaacggtcatatgcacaagcccagcatatttttgttgcacggagaagaaatttgaagttttctgttggtaccatccatggtgcagtccttgctttgacagcttcggtcctttctgttccatacgacatgcctagctggcttccttctaatgtctcgctacttgctcgcttcatccgggagcctccccctataagatcaacagtcacgaaagctgttgcagaatttaagcgcacccatgctgacacatggagcatccagaaggacgcattcactgaagacgaactggaggcaagctag

SEQ ID NO: 8853 - DNA, 237 bp, Zea mays
  Peptide Sequence Number=SeqID_50632
atgaacgccagaccgacggctccgcccctcagcgccaccggccgcgccctgcggctccgccgcccgcgcgcgtgccgcctccatggcgcgggtcccgtgcgacgtggtggagatcgcataggagggcatgacctgggcgaaagcgacgctggcgtcctggagcccaacgtggccggagtgacgcgaaagccgacggcgagcttgaagatcatggcctcgggcacggcacagaggtga

SEQ ID NO: 8854 - DNA, 183 bp, Zea mays
  Peptide Sequence Number=SeqID_50633
atgtccccagcagagaagcaataccatgttaaaattcttgatgaactacttgacagcatgaaccattcatctgctcagtcgtgctcaggccctccctccctcaatcgcgagccccccttccacctcaagccacctctagttcttctcctggtgaaggagcagggcgcatgtccccttctctag

SEQ ID NO: 8855 - DNA, 2436 bp, Zea mays
  Peptide Sequence Number=SeqID_50634
gtataccttttgaagcctaaaagtttagcatttgagtattttgagaagctcattaattttttggaacagttctatcatccgtcaaatgggggtcgttggacctactcattggaacgcttcctgcgctatcttgttgtttactttgagaaacgccttcagcatgaacaatttgttatggcagttgaggaccatgatcaatcttatctgggaaaggaagaaaggtctgtttttgtcaaagctatcttgaaattattggatcgtggtcagtacagcaaggataattctcttgctgaaacagtttccgttgcaacttcgatcctgtcttatattgaaccaaccctcgtgcttcagtttgttgcaaaaaacttccaacgagccttagagacaactacagctacccatcagttaaagaacgctgtcacatctgttgcattttctggacgtgctcttcttctatgttctttatgttcatctcagaatgatgatagcagtgttgttgattcattcagtgatcttgttgtcgcttccctttcaaatgcgttacttggcatggatgccaatgatccacctaaaactattgctacaatgcagttaattgggtctatcttttcaaatctagctgcagttagtgatgatgtgcctatattgctccaatctactactctatcgaactggctagatgaattcttttcccgactgttttctgtgcttcataatctggaatcaagtagtcccattaatgagggttaccaaagctcattcatgtcagggacttttcttgttgacagtccatattacttttgtatgcttgaaattcttctagggaagttatcaaaacccttatttaatcagtccctgaagagaattgccaagttcgttaatgcaaatatcctccctggtgctacttcagaagttgggcttctttgttgtgcctgtgttcattcttatcctgaggaggcttcagtctaccttgtaaagccaatcttagagaccatcatgtcatcctttgaggggactccaaccactggttatgtaggaagagtagttgcagataaagcatctaccaaggctgcactttctcctgctctggaaacagcaatagattactatctgagggttttggccatatccatcagttatgccggtcctaccttactcaattataaggaggaactaaatcacataataacatctgcgttccagtccccttcttggaaggttaatggagctggggatcatctccttcgctctctgctaggaaatctggtttcttattacccaattgatcagtacaagccattcacttgtcagcctattggaaatattattgaaccatgggggtgttcgaaagctcatcaggatagggaggatgaaatgcttaatttccctccaaagtggcatgatccaagtcatgatgaactctcttttgcaaatgaattactacaacttcatttccagtcagctttagaagatcttttgactatttgtcagacaaaagttcattctgacacagaaattcgcccgtcatataaagatgggaggtccctggaagtggagtcggctttcttcatagcaggatctgctggtagcactgttggaagctcagaaatgcgtgaaaaggctgcagaatttgtgcacatagcttgcaggtacttattaaaggaaagaactgatgacagtattcttctatcccttgttgtgcgtgtcattgatgctttggtaaactatgttagctgtgtaggaagcttggaataccaagaatggtcaagccatgttcaagcttggaaactagaatctgcttccataattgagcctccatgcaacttcattgttccatttcatgctcaaggaaaaaagagacctagatgggcacttgttgacaaagcaaacttgcatagtacatggaggtgttcacaatcatcatatcacagatacagaatgaatgcagatgtttcgccatctgtccccatgattaatttgatgaatgatctcttagatctctcactacacaactatgaaactgttcgatcgtatgctggaagatcgcttacaaaattgttgaaacgttggccttctctaatttctaattgtgttctcacactcacgggaaatttgcgtgacccaaaagctcctgaacatgttgttcttggttcttgcagcattctgatctcacagactgttttaagacacttgaccactgattctgtttccctctcttcctttatcatgggaattctggaaagctctcatcatgaatcgttgaagtgtcagaaagctattactgagctctttgtaacatataatatacgtttctctggaatatcaaggagcttctttaaaactcctgaaaatcaagctgacaagccaggatttctcagtctaatttctcaaattaatgctttgggctttgagactaatggactacattggaggtag

SEQ ID NO: 8856 - DNA, 129 bp, Zea mays
  Peptide Sequence Number=SeqID_50635
atggggaaggagctagatgtgaaaagtgctttcttaaatgggaaacttgaagaagaagtttacatggatcctcctctagtatttgacaaaaatttggaactcaagtatgaatgcaccttctatgggtag

SEQ ID NO: 8857 - DNA, 996 bp, Zea mays
  Peptide Sequence Number=SeqID_50636
atggaaagcgggtttcttgataaagtgaaggacaatgcggctgttcgaacttggtctgaaacaacgcagcaagaaaagggtgatagtttggctgatgggcatgtagataagcgtttgtttcaagccctcgcccaattctggaatcctgcttacagttgctttacattcgggaaggtcgatttagtgcctacgatagaggagtatatggctttactccattgttcaaagtttcaagaggacagggtctattcgagagcggtaaatgtgccaactttttccaagaagctgatgagtgtaactggaatgagcgagcagtgggttgtcgcacgaattaagcaaaagggggacagtaagtgcgttccttggagaggtttgaaagatgcaatcctcacacacccagatgtcaggaaaaggttagatgttttcactttaagtatatatggcttggttgtcttccctaaagccttggggtatgtggatgaaacagtcactgatttattcgaccggctcgataagaaagttacgccgattccagcaactttggcagaaactttcaggtcattgagtgcgtgccagaaaacaggtgaagaagaggacattgagtggaaagctccttggttacttccagatgagatcctgtataggtgtggtagttttgattgggttcctttgctaggggtttggggagctactggatacgccccattattggtgctaaggcaatataggtcaaggaaatttatacctgcgacccaagggatagctgattgtgaatattcatacaaggatgatggttatagaaagaaggttcaagagatggctagtgcatggaaacaaactcgccgaatgaagaggctatctgtgggtccaatgacaactcctgagtatcatcaatggtgggctagaaggataaatgataatacacctaagataaatcaggaagagggccagtcaatagaagagcatttgcgagtcattccttctgagttggaaatg

SEQ ID NO: 8858 - DNA, 387 bp, Zea mays
  Peptide Sequence Number=SeqID_50637
atgggccatatagcggcaaattgtgaaggaaaggcaaagaggaaggaaggagaatttgatgagaaagctgatggaaaaactgtggccagaaagccatatcagtttgatgagcagaaggatcaagttgcaatagaacaaatactacgggttgttttcctagatcctaagcgtccttgtcttgcacttagattaaggtcgaatgagctaaaattggagaggcaattggagaacacagaggctgaaatttcttctttcaggcgaatcccgagggatttggcagccttcgaggccaaaaggaccactgagaacggcgacacaggtgttcatgacaaggtcaacggcgttgggaagccacacctttccattttggtgaaagaggcagacaag

SEQ ID NO: 8859 - DNA, 1989 bp, Zea mays
  Peptide Sequence Number=SeqID_50638
atggaaccccactttctcaacatttctgattatgatcaaatggctcaaagtggagcggcatttgcaagaatgtttaaagaagatgatcctgtgttggacatggtagatgaaaagatcctcaagcgcaagcgaaaccaagctgccccaggggcatggtgcactggccgaaagagctggtggagtgatacttgctcacagtggggtgatgtaaatgtcttgaaacccggacctcaagcgaagaagtttgcagaaaccataacgaaccttcttgatgactggaattcacagtccaatcagtgcaggttaagcagtaattgggctacggtaggaggtgagccctcaaacatgaaaatgagtctccttcgatttctgaattttttgtcaaaaacccacagaaaacccattgctgcagctcttttcacacgatcactcactacctactcaaagcaatccatcgaacgtcgaattttcaatcgtaactcacttccaggccatgaaacctcatttgggtattcctcaactcttcaccgtatcatctatagatcgatccatgaggatttaacgccgaaacatttgtctgtcgaacactatgaaaagaaccctgcagaaaccaaactcgaacaagatgctgctagaatttgcacactcctctccacccactctggttctcatgccgataaattgctcgaagatgcttcaattaaagtttctccttcacttgttgtagaggttttgaagaggctaagcaatgcgggtgtcattgctttgtcattttttacatgggcagagaagcaaaaagggtttaaatataacacagaaagctacaatgctttgattgaagctttgggtaagattaagcagttcaaattaatatggagtttggtgaatgaaatgaagaggagaaaattactgaataaagatacttttgcattgatctcaaggcggcacgcaagagcccggaaggttgaagaggctatagaggcttttgagaggatggaggagttcggtttcaagcttgaaacatcggatttcaatagattacttgatactctgtgtaagtccagacatgttgagaaagcaaacaaagtgtttgataaaatgaaaaagagaaggtttgttcccgatataaagtcttacacgattttgttggaagggtggggaaaagaacacaacttgttgaggttagacgaggtttacctagagatgaaatatgacggtttcgagccagatgttgtgacttatggtattttgatcagtgcgtattgtaaggcgaagaagtatgatgcagccatcgagttatttcatgagatggaggcaaagaattgcaagccaacaccccatgtttattgtactttgattaatggattaggttcagagaagaggttaagtgaagctctggagttttttgaacgtttcaagagttgcggttttactccagaagcacctacttataattcccttgttggggcttattgttggtcaatgcgaatagatgatgcatttcaagtgatagatgaaatgagaaaacattcggctggtccgaattcgagaacttacgatataattcttcatcacttaataaaggctcggaggacgaatgaggcttactttagattccagaaaatgttgaatgagccgggctgtgagccaactgtgagtacttacgaaattatagtaaggatgttctgcaacgaggatcgagtggatttggcaaagcaggtttgggatcagatgaaggccaagggagtgcttccagggatgcatatgtactctgatttaattaccagcttgtgtcacaagaacaagttaggtgaagcttgcaaatattttcaggaaatgttggatgcgggtattcgacctccggccaagatgtttagtaatctgaaacaggctctacttggtgaggggaagaaggatgaagctttaaatttggctcggaaaatcaataagctgaggggaactccgttagttgttagagaccagaagtga

SEQ ID NO: 8860 - DNA, 241 bp, Zea mays
  Peptide Sequence Number=SeqID_50639
tgtttcggagtttgacatgagagattctgattttgaggctagtttcagtgaacatgggtttatgagacttaaagccattctcaaagttgataagcctgtaacaagaggcttcaaactgataatgcaaggatttgagtacattcgtgatttggtgtatgatggggttttggagtggagatggtattggagggtctcgaaggctcgattaagggacattgtgattgtatttgaatatatttag

SEQ ID NO: 8861 - DNA, 159 bp, Zea mays
  Peptide Sequence Number=SeqID_50640
atgtacacaaaggaaatgctcaagaagtttgagatgaacactttcaaaccacaagctacacccatgagatcttctacaaagttttacaaagatggggaagttgaagacgttggtggagcttcaacaaaccgggataaatgcaagcaaaaggttgtctag

SEQ ID NO: 8862 - DNA, 147 bp, Zea mays
  Peptide Sequence Number=SeqID_50641
atgtccccggtgggcatcgattatgcacagattcatggtattcacgtgcctaagcctccactaaacaagtctaactgtatctcttcctcccctaagtttaaaacaaaggctcttagtttaatcaatggtcattccatcttcggctaa

SEQ ID NO: 8863 - DNA, 270 bp, Zea mays
  Peptide Sequence Number=SeqID_50642
atgcgagttcaagatgaacaggtgacctttaatgtactcgaggccataggatctccttatgaagttaaagattgttctgctgtctccaaggcagatccactgttcgaatcattagaactatcagcatatgagtacatgcaacctaacacatcaagagaagagccactcaagttagaattaacggttttgaaaaggcacgagaagggtatcgagtggaccattgcaaatattcgagttcaagaaagaagtggaatcgaccttgatctatga

SEQ ID NO: 8864 - DNA, 495 bp, Zea mays
  Peptide Sequence Number=SeqID_50643
atgcctcatggacattcatatggtggtcctccatatggaacatatggcacgatagtgcctccaagcagtgacaatgatgtcatgtcgaaccggtccgctcactctgatgttgacctttcagaagcggatgcgccacaaagacctatgggcaagaagaagtcgaaggatgcattgcgtcgaggtggtattgatgcttgcaaagaagcattggacattctttgggctaagaagtttgatgctgatgcggagaaagagaggaagcgggaggaacgatatgccaagtcttatgctctcgataaagagaggcttgaccttgagaaagagaagattgtgctggagagggagaaagctagcaatgaggccaatacttcatatttgaagagaatcgcagaagaagaaagaattatgaccattgatatgaattccttgaatgagatgcaacaacaattctacatgaatcttcaggccgagatcatggctcgtcgcaacaactag

SEQ ID NO: 8865 - DNA, 948 bp, Zea mays
  Peptide Sequence Number=SeqID_50644
atggccgttaagcccacacccgccgccgccgccgccctccatggagaccagcaagttgccgccgctctactcgccgccgcgggagccctctgcgactacggtgatgttgtgcccgtgcctggcgttcttcctccttgccctcatcgtcatctccatcgcactcactgtccactttcgcctctactgccacacccctcttgcacacctcatctccccgcaccgctgtccccaccgcatctgacctccggctccgcccgcacctctgccgtcgtcctgcttcccagaggtgcgctccctctgctgccgccgagacgccgatcccttacgggttcccctcaactcgcgacgccggcatgcggggcttacgacgtgctctggggcttcgcggccggaaggttcctctccacctcgtctgcctccgatgaagacgggggttcgttggagcaggaggatgcggcgacgagcaacccggagggagtgggccgcgtctgcgcggccatcgcggacgtcatcgccgccggcgccgacgcgaacctggaggctgcgctatccgcgctctcgccaccgctctgtgaggctgtcgtgctcgctgtgctccaccgcttcaagcacgcacacaggccgtcgtaccgcttcttcaggtgggccaccgcgtccggcggattcacccacaccaccattacctactgcaagatgttactcatcttaggcaagacgaggcagttcgagtcgatggttgcattgctccaagagatggggaaggcggggaccctgtccatggacgccttcaaggttgccattaagtccttcgctgcggctggtgagattaagaaggcagtcggcgtgttcgagttgatgaggaagaacggttttgatgatggggtggagtcattcaattgcttgctcgttgctttggccaatgagggattgggcagggaggccaggcag

SEQ ID NO: 8866 - DNA, 102 bp, Zea mays
  Peptide Sequence Number=SeqID_50645
atggttgagccttccctaacgtgtgccacagttggcggagtggctgcctacgggattcgtggtggggcagtcactgtgctcctgtgcctctgcatggagtag

SEQ ID NO: 8867 - DNA, 822 bp, Zea mays
  Peptide Sequence Number=SeqID_50646
atgtcgagcgcttttagctcgagggcacgcgtgctgctggcgctgcttctggggctctacgccgcctgcgcggcggcggcggccagggtcgacgacggcctggagctgacgtggggcgacggccgcgggagcgtgtcgcccgacggccaggtcctgacgctgtcgctcgaccacacctccggctccgggttccgctccaaggacaccttcctcttcgcgcgcgccgacgtgcagatcaagctcgtccccaacaactccgccggcacggtcaccaccttctacttcgtctcggagggcccgtgggatgtgcacgacgaggtcgacctcgagttcctgggcaacgtgagcggccagccgtacacgctgcacaccaacgtgtacgccggcggcagcggcagccgggagcagcagttccacctctggttcgaccccaccgccgacttccacacctactccatcgagtggacgcagcagcacatcctcgtgctggtggacgggacgccggtccgggagttcaagaaccacgcggactggggcgtgccgtacccgtcgtcgcaggggatgcgcctgtacggctcgctgtggaacgccgaggactgggccacgcagggcggccgcgtcaagacggactggtcgcaggcccccttcgtggcgcagtaccgcaacttcacggcggcggccggcggtgggtacgggctgcagatggacgcggcggcgcagcaggcgatgaagtgggcgcgagacaactacatggtgtacgactactgcgccgacgccaagcgcttcccgctgggcgtccctcccgagtgctccatgccgtag

SEQ ID NO: 8868 - DNA, 1962 bp, Zea mays
  Peptide Sequence Number=SeqID_50647
atgggttctgccacaacaatctgcagtgacaagactggcaccttgacgttaaatcagatgactgttgttgaggcatattttggtggaaagaagatggactcacctgataatgctcagatgttatctgctgatgtcacatcgctgattgttgaaggaattgcacagaacacttctggaagcatatttgagcccgagggtggtcaagaaccagaggtgactggatcacctacagaaaaggctatcctgtcttggggactaaagctgggtatgaaattcagtgaaacaagatcgaagtcatctattcttcatgtatttcctttcaactcagagaaaaagcgaggcggggttgcggtgtacctggctggctctgaggtccatatacactggaaaggagcagctgaaattattttggattcatgcacaagctgggttgacactggtggttcgaagcattcaatgactcctgaaaaagttgccgaattcaagaaattcattgaagatatggctgctgctagcctccgctgtgttgcgtttgcctatagaactcatgagatggatgatgttccagacgaagatcggagagaagagtggcaacttcctgaagataacctgattatgcttggaattgtgggaataaaggatggttcgacgacaagtgatttggaggacaacagtgaggctgcctctctggtattggactgtgaagtcttgatgtattgcatagagaaggggacagatgaggttccaagctctcgggaccttcacattgtggagcctccaattgttcatatgatagtgatgcccgtcacccatgacatcggcagcgtcaggagtcctcgtcgatgctcgatatgcagcttccgccctgttcacaggtcggagaaggcagctggcattaaggtattatcatgtttctgtgttgctttatacgattatactagatgcatccagaagggacaggtgcgcatggttactggtgataatcttcaaactgcaagagccattgccctggagtgcgggatacttgatgatcccaatgtgtcagagcctgtcatcattgaagggaaaacattccgggcgctgtcagacttggaaagggaggatgctgctgaaaaaatctcagtgatggggaggtcttcaccaaatgataaacttttacttgttaaggcactgagggcaagaggtcacgttgttgctgttactggagatggcacaaatgatgccccagcactgcatgaggcagatattggtctatcaatggggattcagggaactgaagttgctaaggagagttctgatattattatcttggatgacaattttgcctcggtcgtgagggttgtcaggtggggccgatcggtgtatgcaaacatacaaaagtttatacagttccaactaacagtcaacgtcgcagctctgataatcaatgtagttgctgccgtcagttccggaaacgtgccattgaatgctgttcaggctacgtttcaagtttcagtcctccttagtctcaacttcaaggggataagcctcctgcagttgaaaaatgatgatccagcacatgcagataaagtgaaaaataccttcatattcaacacatttgttctctgccaggtgttcaacgaattcaattcacgtaaaccagatgagctgaatatattcaagggcatttcagggaaccatctttttattggcatcatagtaataacagttatactccaggcgcttatcgttgagttcctcggcaagtttgcctcaacagttaggctaagttggcagctgtggttggtatcgataggtcttgctttcttcagctggccactggcattcgtgggaaagcttattcctattcctaaacgtccattaggagaattctttgcgtgctgctgtaactgtaaggggagcaaacaaggccctgatgacgcaacctctaatggtaaggaagacaacaagcttgagccatga

SEQ ID NO: 8869 - DNA, 357 bp, Zea mays
  Peptide Sequence Number=SeqID_50648
atgtcggccatcgaccgatcaataaataaacatggacagaatcgaattggcaagcaggacgacactggtggccgcgctctacccaagttcggcgagtgggacgtgaacaacccggcgtccgcggacgggttcacggtcatcttcagcaaggccagggacgagaagaaagctcccccgacccaaggccacatcaggaacaacaggtcggtgtcggctgacagcaaggactccagggccgagaagatgacctcctacaacgccaggaccaacgcgtcggtcacagcgaattctcagattgctgcagtgaccgccaccaacctgacaaacaaaaatgctgcgacgttttcagagctgtag

SEQ ID NO: 8870 - DNA, 2022 bp, Zea mays
  Peptide Sequence Number=SeqID_50649
atggaggcggcgccgatgcgaaaggcgtcgtcgcaggcgtcgctggcggacccagacgacttcgacctgacgcgcctgctgaaccacaagccgcggatcaacgtggacaggcagcggtcgttcgacgaccgctccctcggcgagatatcgctcgccggcgcgggcacggccagccgcggtggctggggctacggcggcggggggatggagagctacgagagcatgtactcccccggcggcgggctgcggtcctactgcggcacgccggcctcgtccacgcggctctcgttcgagccccacccgctcatcggcgaggcctgggacgcgctgcgccgctccatggtgtccttccgcggccagccgctcggcaccatcgccgccgtcgaccactcctccggcgaagtgctcaactacgaccaggtgttcgttagggacttcgtcccgagcgcgttggcgttcctgatgaacggggagccggagatcgttcggaacttcctgctgaagacgctgctgctgcaggggtgggagaagcggatcgaccgcttcaagctcggcgagggcgccatgccggcgagcttcaaggtgctcaaggacccgaagcgcggcgtcgacaagctggtggccgacttcggggagagcgccatcggccgcgtggcgccggtggattccgggttctggtggatcatcatcctgagggcctacaccaagtccaccggcgacatgaccctcgccgagacgcccatgtgccagaagggcatccggctcatcatgaaccagtgcctcgccgagggcttcgacaccttccccaccctgctctgcgccgacggctgctgcatgatcgatcgcaggatgggtgtgtatgggtacccgatcgagatccaggccctgttcttcatggcgctgcggtgcgcgctcctcatgctgaagccggatgcggaggggaaggagatcatggagcggatcgtgacgcggctgacggcgctgagctaccacatgcggagctacttctggctggacttccagcagctcaacgacatctacaggttcaagacggaggagtactcgcacacggccgtcaacaagttcaacgtgaacccggagtccatcccggactggctcttcgacttcatgcccacccgcggcggctacttcgtcggcaacgtcagccccgcccggatggacttccgctggttcgcgctcggcaactgcgtcgccatcctcgcctcgctcgccacgcccgaccaggccgccgccatcatggacctcatcgaggagcgctgggaggacctcgtcggcgagatgcccgtcaagatatgctacccggccatcgaggggcacgagtggcagatagtcacgggctgcgaccccaagaacacaagatggagctaccacaacgggggatcttggccagtgctgctgtggctgctcaccgcggcatgcatcaagaccgggaggctgaagatcgctcggcgcgcgatcgacctagccgaggcgaggctcgcgagggacggctggccagagtactacgacggcaagctgggtcgctacatcggcaagcaggcgaggaagctccagacgtggtccatcgcggggtacctagtggccaagatgatggtggaggatccgtcccacctcggcatgatctccctggaggaggagaagccgaccaagccggtgctcaggaggtcggcctcttggacaggtcacttcgccactccactgaccggcctgacagaaggacagcgccgcctgcgccgctccgactgctgtgccactcgacagagtgaggctgacaagcagccaggcccggcctcaggcaccataggaaactccgctccgcccgacccagggctcggactcgggctcaaccccggaagacggcgaactccgctccgcccgacccagggctcggactcgggctcagccccagaagacgacgaactccgtttcgcccgaccccagggctcggactcagccctggcctcagccgacggtctccgcctcgcccgacccaggggctga

SEQ ID NO: 8871 - DNA, 273 bp, Zea mays
  Peptide Sequence Number=SeqID_50650
atggctgcttacaacgtactggcgcaacaagtaatgaactcttggtttctagagcaggcacaacaacaacctttcgttttccctcaagttcagccattgatgcctcagcggggattacatgctttgacacctccatctcagggatctgaggttatgggccacaacacgccaccaccggtgataccagcatcaggaggagcttctagaggggagggagctactacagaagatgttagtttgacaaactctggaggggagggagctactgcataa

SEQ ID NO: 8872 - DNA, 228 bp, Zea mays
  Peptide Sequence Number=SeqID_50651
atgccgttcccagtaccgtttccagtgccccgctgcagcgtgtatgcatgcgctaaaccttccgagtgccgtttccagtgccgcgctgcggccagcctgaagctgaagggaatttttaaagcgctctacagggaaaggagggcccagttgttcgacggatcccaattgtcagaggctaatcgatgggtcctagggacctggggtcttatgctcgacactgtgcaatag

SEQ ID NO: 8873 - DNA, 123 bp, Zea mays
  Peptide Sequence Number=SeqID_50652
atggctctttgctatggcacagtaactgatatccaatgtctgaagaagctgaaggcatcagttgatcccgacaataagttagaatggccattgaggctaaaaattgccatttgggagtcctag

SEQ ID NO: 8874 - DNA, 180 bp, Zea mays
  Peptide Sequence Number=SeqID_50653
atgagtgctactggtcaggaaggcgaggtgcttggttgttctgtcgttgatactagtttcctccctgttagttgctctggcgatactattgctgttgctactgagggaactgcctctaatatggttgttgatgctaacgttgaagctggtgctggtgtccttgagggtgactttgcttga

SEQ ID NO: 8875 - DNA, 594 bp, Zea mays
  Peptide Sequence Number=SeqID_50654
atggaaaacagcgccgcctgcgctactccgactgctgtgccacccgccagggtgaggctgacagcagccaagtccagcctcgggtgccataggaatctccgcctcgcccgaccccagggctcggactcaacctcgactctggaagacgatctccgcctcgcccgaccccagggctcggactcgacctcacctcggacgacggtctccgcctcgcccgaccccagggttcggactctacctcaacctcggaagacggtctccgcctcgcccgaccccagggctcggactctacctcgacctcggaagacggtctccgcctcgcccgaccctagggctcggactcgacctcgcctcggacgacggtctccgcctcgctcgaccctagggctcggactctacctcgacctcggaagacggtctccgcctcacccgaccccagggctcggactcaacttcgacctcggacgacggtctccgcctcgcccgacccccgggctcggactcagcctcgacctcggaggagccaccgccacgcccgaccttgggcttggaccgaccacgccacaagggggaccatcattaccctacccctag

SEQ ID NO: 8876 - DNA, 249 bp, Zea mays
  Peptide Sequence Number=SeqID_50655
atggccccagccctgatggcccgggcacgggctcggctgcccagccgtggctccctgagcgggccccccggcggcgcgggctctgcacagttgcacgggcgtggccccaacggcgcgcgcaaacccggcgagtgcggccatggatccgaccagggtttgagagtcgccatcgtcatggagcacgcggggcgccatcattatctattttccggggccagccagatgggaagccggtcctgttacccgtag

SEQ ID NO: 8877 - DNA, 661 bp, Zea mays
  Peptide Sequence Number=SeqID_50656
atggcgaacaaggccgtctcgggggcgcggagcccgctgaacctggtggtggccatggcgctgtgctgcttcttctacgtgctcggcgcgtggcagcgcagcggctacggcaagggcgatcgcatcgccgccgcggtgagccggcagacggcctgcggcgacgtcgccgcggggctcagcttcgagacgcaccacggcggcgccggggccatcaacgcgtcgtcgtcgttgcccttcggggccgacgcggcgccgccggcgttcgcgccgtgcgcggcggcgctagcggaccacacgccgtgccaccaccaggaccgcgccatgaagttcccccgcaagaacatggtgtaccgggagcggcactgcccctccgacggcgagcggctgcggtgcctggtgcccgcgccgccggggtacgtgacgccgttcccgtggccccggagccgcgactacgtgcccttcgccaacgcgccgtacaagagcctcaccgtcgagaaggccgtccagaactgggtgcagtacgagggcgccgtgttccgcttccccggcggcggcacgcagttcccgcagggcgccgacaagtacatcgaccagctcggctccgtcatcccccttcgccgggtggccgcgtccgcaccgtcctcgacaccggaatgcgggc

SEQ ID NO: 8878 - DNA, 486 bp, Zea mays
  Peptide Sequence Number=SeqID_50657
atggcgaagcgaacggaggcgaggccggccgccgcgcggccgcgggcgtcggtgtcggtgccggcgttcggcgggtgggaggcagcaggcggcgcggcggcggcggactactcgctggacttcaccaagatccgcgccgcacggatgcagcgcaggaaggcgctctcctggtccagcttcgtcggcaacagccccgccgtcgtcgtcgccaccgaggcacccgacagcggcgtcggcggcggcgaggaggaggaggaggaggagaagcggcagtggtcgtcggtggctgccagcgacgacgacgaccgcgaacgccgccgatacaggcacaggcacagtcaccggcaccgccgcctgcgcagcgacgacgacgaccgccagccgatccagcccgctcccaaggtgagtagaatgcgggggagaggtcttgtgcgcgcgtttgccgaagctgacactcccgagacgccgccgtttgtcttcttctaa

SEQ ID NO: 8879 - DNA, 792 bp, Zea mays
  Peptide Sequence Number=SeqID_50658
atggcggtgctactccgccgcgccgcggcgctcctcgtcgtggctgctgtctgcgcggacggcgcctccacgttctactcctccgaccccaacctcggatccgcccgcgtcgtcttccagacgaattttggtgatattgagtttggcttctttcctcatgttgcacctaagactgtcgaacacattttcaaacttgtgcggcttggatgctacattacaaatcacttcttccgggttgacaagggtttcgttgcacaagttgctgatgttatgtcaggtcgaaccgcccctatgaatgaggagcagaaaaaagaagcggagaaaacaattgttggtgaatttagtagtgtcaagcatgtcaggggaatcctctccatgggaaggcactctgatccagacagtgctggctcttccttttctattcttctgggcaattcaccgcatcttgatggccagtatgctgtatttgggagggtcactaaaggtgacgatacattgactaaactagagaggcttccaacccggagagaaggcatttttgtaatgagagctgtgaagcagaaaaatctattctccggaggagactttctgaatcagcatcagaagttgagcgatggagaagaaaatgctttgcttaatggtggaataagggcagcaacttgctatatgcattacaaaagactgcatattccgtttcatgatgctggatggtttcctgaggctggatatggacgacggtgtggaaatgtgtatgccgcgtgttcttatgctatcactgtaatacttgagtag

SEQ ID NO: 8880 - DNA, 1896 bp, Zea mays
  Peptide Sequence Number=SeqID_50659
atgggcgcggggcagcgcagcggctacggcaagggcgatcgcatcgccgccgcggtgagccggcagacggcctgcggcgacgtcgccgcggggctcagcttcgagacgcaccacggcggcgccggggccatcaacgcgtcgtcgtcgttgcccttcggggccgacgcggcgccgccggcgttcgcgccgtgcgcggcggcgctagcggaccacacgccgtgccaccaccaggaccgcgccatgaagttcccccgcaagaacatggtgtaccgggagcggcactgcccctccgacggcgagcggctgcggtgcctggtgcccgcgccgccggggtacgtgacgccgttcccgtggccccggagccgcgactacgtgcccttcgccaacgcgccgtacaagagcctcaccgtcgagaaggccgtccagaactgggtgcagtacgagggcgccgtgttccgcttccccggcggcggcacgcagttcccgcagggcgccgacaagtacatcgaccagctcggctccgtcatccccttcgccggtggccgcgtccgcaccgtcctcgacaccggatgcggcgtatgcgcacctcatcgacgcccaaatcatggttttggttcccccctgatcggtcacctcaacgtccgtccgttccgtgcgtgcatgcaggtggcgagcttgggcgcgtacctggactcccgcggcgtgatcgccatgtcgttcgcgccgcgcgactcgcacgaggcgcaggttcagttcgcgctggagcgcggagtgccggccttcatcggcgtcctcggctccgtcaagctcccgttcccgccgcgctccttcgacatggcgcactgctcccggtgcctcatcccctggggcggtaacggcgggatgtacatgatggagatcgaccgcgtgctacggccgggtggctactgggtgctctccggcccgccgatcaactggaagacgaaccacaaggcctgggagcgcacggaggcggacctctccgccgagcagcaacggatcgaaaagtacgccgccatgctctgctgggagaaggtcaccgagatccgcgagatcgccatctggcggaagcagctcgacccctcggcggcgtgccccgacaggccgccggtccggacgtgcgacgacgccaactccgacgacgtctggtacaagaacatggagacttgcataacgccgccggctgctgccgtggccggcgagctgcagccgttcccggcgcggctaacggccgtacccccgcggatatccgccggtgctgtgccaggcttcacggcagagtcgtacgaggaggagaaccggcggtgggagcggcacgtggcggcctacaagaaggtgaactacaggctgaacagcgagcggtaccggaacatcatggacatgaacgccggcgtgggtgggttcgccgccgccatcttctcgcccaagtcatgggtcatgaacgtcgtgccgacggcggccgagatctgcaccctcggcgtggtgtacgagagggggctcatcggcatataccacgactggtgtgaggcattctcaacttatccaagaacatacgacctcatacatgccaatggcatcttcactctctacaaggacaggtgcagaatggaggacatcctgctggagatggatcggatcctgcgcccagagggaaccgtgatcctccgcgacgacgtcgaggtcctgctcaaggtgcagaggacggtgaaggggatgcgttggaagacgctgctggcaaaccatgaggacggccccaacgtgcctgagaaggtgctcttcgctgtcaagcggtactggacagccgccggcgaaggcacggcagcagaggagaagacgccgggcagctcttcagtagcaggcatggattcagaggaataa

SEQ ID NO: 8881 - DNA, 327 bp, Zea mays
  Peptide Sequence Number=SeqID_50660
atgccgcatcggcttctccgaccaagatttcctcgcttcccacaccaactcgcaggacatggactggagttaagcatctaccgcggtggagtccccggggtaaccgacggcctccgcgcccgtgagagcggaggaggatttcgtggcgggagcggcacccgcgaggagcgacgccgacgacgcggcggcggttgcacagaaaggtggatcaaggagcggataagccttcttccgccgcggctgagagttcaaagaggagaaaggagccagagcaacagcagcctgcagcgccatgggcaaagctgctctcgcagtgctcacagatga

SEQ ID NO: 8882 - DNA, 324 bp, Zea mays
  Peptide Sequence Number=SeqID_50661
atgccacggcggtgcccagccatcaacagcgagcagcgcagcgcaggcgagcagcaacggtgcgttctgcggtcgtgggctcgtccgctcgtggcggagccccaggcggacgccaacacgacgcagtacctgggcgtgcggcgccgaccgtggggcctgtacgcgacggagatccgggacccggccaccaaggagcagcactggctgggaaccttcgacacggccgaggaggccgccgtggcctacgatcgcgccgcgcgctccctccgcggcgcccgcacgcgcaccaacttcgcctacccgaacctcccgccgggatcctga

SEQ ID NO: 8883 - DNA, 358 bp, Zea mays
  Peptide Sequence Number=SeqID_50662
atgcacatccatgatcaatatggctcttctttaaagaagaaagatttagctctcaaaaccaaccaagagaagaagggcaaagcaaaaacacaagcaattgaagagagctcagttggtgatgccatgattgtgttaatggtaaagaagaccaccaaaatatcgaagaagctcaatcgcgaaggcatcaagtttaattcaataaaaaataaattcttcaatagtagtaagagaaaatccgtctcggagatggattgctacaattgcggtgagcttggccatcttgctcatcaatgcaccaagcccaagaaaaacaagttcaaaggcaaggaaaatgaagatagtgatgatgagaagaaag

SEQ ID NO: 8884 - DNA, 513 bp, Zea mays
  Peptide Sequence Number=SeqID_50663
atggtgacgccgcacattgcggtgtctgttccggcatcggtgtgtgtcgcgctagggggctcctccctcggcacggtgggctcgtcgtcgaaaatgggtgcaccctccattcttctctggatgaagaggatatccaagaagaaggagctcggcacggtggcgggatcctcgctggcgttgttcgtgacttccttgcagccgcctttggcgtccccagggaaggaggtggatctgaagcagaagattgctctagggttgaaggtgattatggtcttgaaggacgacgtcattgatcgcgactcgatggttcatgctgtaacacaacggagtgacgtgcagacttattcaggttcgggctgtgtggagttgcgtaataccctacttcttgtggtggttctggctatatccctacatattcggagtccttctcgcccattcacccgagctatcactgagggcttatcatgtaaggtgatcccaacagtaccacctgatacatccgtgctcctgtag

SEQ ID NO: 8885 - DNA, 195 bp, Zea mays
  Peptide Sequence Number=SeqID_50664
atgacgaggagcacgttggagcgggccgacaggcaatggctttcggaatttgccttgtttgatccgtgcagacttcgcgctacgggaagaatagttcaggtcacctacctgatcacagcattgcagctaactttccaccatttgcttctctgtactactgaagatatttcatactatgatgaaatgttggactaa

SEQ ID NO: 8886 - DNA, 426 bp, Zea mays
  Peptide Sequence Number=SeqID_50665
atggatggtaaggtaacaatgcttggactggtacccagcatcgttcgtacttggaagaatacggactatacagctggactagactggtcctccatccgctcctctggggaggcatccagtgtggatgattatttatggctgatgggaagagctggttacaagccagtaatcgagtactgtggaggtacagagattggtggtggatttgttactggatcgatgctacaacctcaagcgttgtctgcattcagcacacctgccatgggttgtaacctgttcattcttgatagcagtgggaatcctttggagcctgacattatgtcctactgcgttcatgtactgcttgcaaattctaacacttcatatctggattccatggatatcgtcaagacctttttgatctcttttgactgcatgaccacataa

SEQ ID NO: 8887 - DNA, 951 bp, Zea mays
  Peptide Sequence Number=SeqID_50666
atggagcctggtcccgacgggcctgctggtggccaaggaaccagtgcgccagcggaggccgggccgtctccgtcgtcgtcatcggccgccgcagccgcctcgtcgtcgagtcggaagcaggcagagcagcaagcgccgccgcagcaacaagcaggagcacagcagaggcaacagcaggcagcaagggcccagcatcaggaagctccagcgccgcaggcggcccaggcccaaccgcagccactggcgcagcagcctccgccgcctcctcctccagcggggctgagccggtacgagtcgcagaagcgccgcgactggaacacgttcctgcagtacctgcggaaccacaagccgccactgacgctggcccgctgcagcggcgcgcacgtcatcgagttcctccgctacctggaccagttcggcaagaccaaggtgcacaccgagggctgcgcccacttcggccagcccaacccgccggcgccctgcgcgtgcccgctgcgccaggcgtggggcagcctcgacgcgctcatcggccgcctccgcgccgcgtacgaggagtccggcggccgccccgagtccaacccgttcgcggccaaggccgtgcgcatctacctccgcgacgtgcgggaggcgcaggccaaggcgcgcggcatcccctacgagaagaggaagcgcaagcgcggaagcgcggccgcggcgcctccagttgcgccgcctcctgttgtaactgcagagaccgcagggaccacgtcagggaccgtctgtgacgaggaggaggaaccatcgccgtctgcaggtgatgaaccacagaagcagaccaccacgccgacgtccgcctcggctcctcctacaagtacttccagcgctagtgcaagtagtagcagtgccgccgcggccaccacgtcgacgacgacgacaaggaaggaggaagaaggatccgcgccaagctcgtga

SEQ ID NO: 8888 - DNA, 717 bp, Zea mays
  Peptide Sequence Number=SeqID_50667
atggccttctctggtgcagctgaacaagtcatcggaactataggaagctcaaagggggtgtgggttaccttatgggaaatccatgactgggcatgggtactgctcaccaagcactatgacagaagagggcaatatgacattgctttgaataaaatcgatgaggctatctcacatacactgactgtcatcgatttatattccgtaaagcatgttgccgcattagcagatgaagctaggtccatggatcttgctggtcgttatttaaacagcgagtgtgttgtgcagatgcttcaggctgaccagtttttaaaaaggttgttgtcaaatgtgtgtattggagaccattttgatatgacaatgctgggtacaagaaaagggaatatatggagagtagcatttgtccaaaaagaaagtactagagcttcttggcattatatttgcaagctcttccgcatttatctgatttttgtgatgtatcaatgtatgaagtgcatgtggtatgcgctctttctcctctgctatctatcgcctatgtttactctctatccaactacaagatatatatcacttaagtttgtgcctctatccaggatagttggtgatgctgttggcacaatctgtaggtgttatatgaaactacatgattatccaacaatattttctatagaagggaatgatgagatatcaaaactgccacatgctcaaagaaagaagtag

SEQ ID NO: 8889 - DNA, 2967 bp, Zea mays
  Peptide Sequence Number=SeqID_50668
atggcccttgaggcaaaacaagctgctctgtgtttcaaggaagttttgagatcttcaccaaggctctttgtgttcctgctttcttcttcacctgtaaatatatgcactgctcttcttcttggaatcctactgagttatggagaagttaatcttcctgaggccagtaaagatcacagggacactacagaagtttcaacttccatggttggaaattcgtccagtgatgtccactttgaagcaaatcagagaccttctgtacttgaatttagggagaatgcatcaaacttcaaagagagagaaaccaaacagaaagtttccttcagggagagggctagcgagcatgttgaccttgatgattatatccctcttctgaagagagctggtgaagaagatgagagaggtgatcggggtaacatatctagaacacttacaccatttccttctatggtcaatattcgccaagagtctgtgataggggaggacttgaccttcaccaagaaaagacaatcggaaggttcttttttcatgcaggatagggccgactgtcagactagcctatttgatgaggcctgtctgtgtggtctgaatgacaaagatataccttttggtttgttttcttctagtgagaatgttaataagaatgatgagatggaggaaaaatttaatcaacagagagtatttgcagattcaacagctaccaaagagagagatagttctgaagcgatgccaaccgaagagcttgctggaactagcaaacaagctgcttctgtccctattgaccaatgggaaaacaatggcagacttaatgttgatactagcaatgtttttgaggacaacttgcttgattcctctcttggctcaccatgggcaagagttagcagtcatgatggttcatctggttttgattctgatcaggctgagagttctcctgatgcttccatgactgacattgctcccgttcttgatgagattgatccacttttgcgtgctgattccaatcaccccgatcctgttcctaatgatgattcagacacagattctcatgtctcagaggatcatcaaattgacgatgatagtaatgatgagggtgatgacattgatgctaaagataatgtggagggggagaaggaaaatgatgggaaggaagctgcatttctttggacagcagatgatgaaaagaatctgatggatcttggatattctgagatagaaaggaaccgcaggttggaaattttgatggctagacgaagatcctggaagaacatggcatttgaaatcgataacaacttgatagatgttcatagttctggctctggtacaagtttagatgatttgtcacgcttccgtgcacaggtacctcctattgcagtgcccaggaggaacccttttgaccttccatatgattctgaagaagcagcaattcctggctcagctccttcaatactgcatgcacggaagaacccgtttgaccttccccttgaacagtcaaatgacagtgttgttgtccatgcacatgatattttaaactctggagaacctgcgacttctcgtcgtgacatgatctttagaaggcatgaaagcttcaactttggaaggatggatgtgatccaggagaagcgtttttctagactcaagccatattttgttcctgaaactgtggaatggaatgcaagcaatttcgaaagacagttcaatgataagtctgagtctaagatgagctctgttactaaatctgatattgcttcttcagttgctgatcaggaggatcataaggaccaagatgaaaaggaccttgcagatgttggaagtgaatgctcagatggtatcaactccatagatgttgaactagaccacagtgacatcgatgaccgtgagattgctctacagcaatttgtctttgaaagagcacaagaaagggaagcacatcttgtttcaactaaaggaaaaggacgtgaagaagattatgcaccagaatcagctgggagttcaacgatgccatttcatgcagtccctgacctgcttagctgggaagatggagatggtgacaacagccttggtgctaaaccttctttccagcttaacacagaagttaaatgctcagaatgggtttcttcttccaggccacccgtggagggagaatctgattctggggatcttccagagtaccttgatactgaagttgcatcaagctcaaacacagccatacttggtgcaaacaatgcagctgagaaaggtggaaatgttgatcgcatgtcatattcaaacgatgaaatgcctttagataacctgattcatcggtctatggagctgccttctgaatttttcactgaaacattgccagtcatatctagggacctacaccctatcccagaggagagagttgttgagaacttcaacgtgcaagaaaatcatgaagcagcaatttttactgattcagttgttgccttgactgggttgcatgtaattgaagagcactttgatgatggaactgacagaactctaagctctgaagttgtttcctcatatcctcgagctaatggtgtcacccaatctccatcaagtgagcatgcagaaatcttgaatccatttgttttgatggctgctgaacataataaggtggatataagcgacatgcatggtgaagcaactgccggatatctacttgattctgatgatgaggctggtaaaatctatcctgagcctatggaaggcagtggaattgatgaaagtttcctgtctgaattggatgtggtgggagactttggagttgaaccgatgagactggaccagcaggtgacagatcaggcttctcatggtgataacactaccgatagtgttactgcagattctgttattagtcctcagacatctgacgatgtctccttgatcatgtcggaagttggtgctgaagaatccagggagcagtctccattggttgatgacctaaatggctccgaattatattaa

SEQ ID NO: 8890 - DNA, 432 bp, Zea mays
  Peptide Sequence Number=SeqID_50669
atggaggaggggttcatcggggcgcgcaggaggagctgcaacggctaccagcggctgcgggcaccgccgccgccgactccgggcagaggcacctgcaggctcgaacggcgagcggtcctcggctcgggaggctggaggttcgttcggttacgccgctgccgtgccatcgcgccgcggtggtcgtcgccgctgcagctgctcagccggatcctcgacacgtacatcacctccatgctgtcgcagccactgaacatcttgaagccactgaacatgccgccgccgaagctgcgccgtgatgcttcaccggggacggggtcgtcgagacgccgcgatgccggcgggagcgggagaggcgtcttgctcgcggaggcggcgcccgagaacgccacgacggagggaggaggaggcgactcctcatcgcggaaggcctag

SEQ ID NO: 8891 - DNA, 528 bp, Zea mays
  Peptide Sequence Number=SeqID_50670
atgggcctgatggtgcacatcgaggactcgcacctgacccgcatccagccgcacgccgtcggggacgccgtgtactgggagaccaccaccagctccgccctggaggactaccgcgccgtggagggcgtcatgatcgcgcactcagggcactccgcggcgaccctgttccggttcggcgaggccgccatgagccacaccaagacgcggatggaggaggcatggagcaccgaggaggtggcgttcaacgtccccggcctgtccgcggactgcttcatccgacgggacctttggcggcgtgggcgccgagccaggggatatggcgccagacgagccagccattcgagcgacggcagctgcctctgcttcttggccgccggccaccagcgtgcgcttccgctgctgcacggcgccgcgggagaagagcccggccagctcaaccggaagagcccgaccgcgggagaagagctcggccgctgctgtcctcggagcgccgccgtccgccccagcagccggcagaggcgaccgtga

SEQ ID NO: 8892 - DNA, 618 bp, Zea mays
  Peptide Sequence Number=SeqID_50671
atggaccaactcctaggttttcgatccgacggccacatccttcgcacggagttgcttcgccttgacaaacccttcacgatcatgccacgtgccgccactggcccaaaccaacaaactcgccgtgagtaccgcacctcgtctgcggcctctacgaccagacgtgtgtcccaccagtactcgactacgccggcaacacgcgccgcctgccctgctccgactgctgtgccactcgttagagtgaggctgacagcagctaagtccagcctcgggcgccacaggaagctccgcctcgcccgaccccagagctcgggctcaacttcgatgccggacgacggactccgtctcgtcgacccccagggctcgggctcacctcgacgccggacgacggactctgcctcgcccgaccccagggctcggactcagcctcgacctcggacgcgatctccgcctcgctcaaccccagggctcagactcagcctcgaccttggacgacggtctccgcctcgcccgacccccgggcccggactcagcctcgacctcggaggagcctccgcctcgcccgaccccgggctcggactgaccacgtcacagggggggccatcattaccctacccctag

SEQ ID NO: 8893 - DNA, 1146 bp, Zea mays
  Peptide Sequence Number=SeqID_50672
atggacgaggcaaaggccgtcgatgaagacctgtttccgcacccacacagcactgaagcagccccagaccgacgccaggcgcccaggccagtggtcgacgcctgtggtgagctgataggcgatgtcgtcaccgtctccggtgctggcaagggctgcgcgtctcacgttttcctgatggctctcctcactattatggatctgcaggttgtgatctttctgcccagagatacaatcgcatcacaggctgggggaggtggaagaggcatgggtagtagtggtggtgccggtgcagcgcaacgcgggcagatgcagagtctggcaagacaagggtctctgtataaccttacccttgatgaggtgcagagccatttgggagaacccctacacagcatgaaccttgaggagctgctgaagagtgtctttcctgatgacctggaccctgatggtggcactaccagccaatatgagcagagttcgggcctcttgcgacagggaagtatcacaatgccgcctgagctcagcaggagaactgtggacgaggtgtggaaggacatccaggatgcaccaaacagaaatgttggggagagtggtcggcggaagcgggagcggcagccaacgcttggagagatgacgcttgaggatttcttggtgaaagctggggttgtcgccgaaggatatctgaaggacttgaatggcataggcagtgtggaacaggttggtagcactggggctgcgggtttgacagcaggggcacaatggttagaccactatcagcagcggattacagctatcgagccccatcagcacaggcaacatagtttgccaggtgcttacataccgggtcagttaagccttcagtccctgaatgttggaccaagtgctattttggagtcatactctgatggccacatttcttcaccgatgatgggtgcactttctgattctccgatgcctggtagaaagcgtggttccccaggagatgtggctgataagttggtggagagaaggcagaagaggatgatcaagaatagggagtcagctgctcgttcaagggctaggaagcaggcatacactaatgaactggaaaacaaggtttctcgattagaagaggagaataagaagctaaccacgttaaaggtactttag

SEQ ID NO: 8894 - DNA, 357 bp, Zea mays
  Peptide Sequence Number=SeqID_50673
atgggcctttctgcatgtgccgcaagccagaagctcctacatgcagaggaagggcatgtcgagcttctgggcaatcttctgtatgctgcaaaggttgtagcagagcaggaagggcttgctgatggcttcagaattgtcatggacgatgggcccagaggatgtgagtacagttcactgattctaacaggacccatcttgttggtgccctgctcaatcggtctaccaccggcacctacacgttcatcttctcgggggacggcagatgaattggccaccgggtttgctattagggttgcacaaatagtcatcggtagacgctgtcccaatgattttgtgtacggagctcaaatagtataa

SEQ ID NO: 8895 - DNA, 531 bp, Zea mays
  Peptide Sequence Number=SeqID_50674
atggacgccgctgaccccctctgcgccatctcctcgactgcgcgactccttccgcggacccttggccccgcccccgccatcgggccttccccctcgaacccccgcgacgcgctcctcgaggccatcgcactcgcccggtctctggatttgactgcagtggcatctcaacgattggcagaagtagcagaggagttttttacccaagcatatgggtggaagtttagtgtacggattgactctatgtcatggttatatagaagccaggagtggtacaagaaagaaagaaagaaatccatgtggtctctcaccttcctgtttgccattgtcggtgccgtcagtggcatcgtgaatggtataattcgaaacagttgggagggtcaacttgtgctgttggtgctctttgtgtccctcttgctggcttttccttccccggtcgtcttccccagctacaaagatgccaccagcaaagattcagagtgccttgttgcgccagatgctgcagcagacgaatacaagctgattcatcagtag

SEQ ID NO: 8896 - DNA, 633 bp, Zea mays
  Peptide Sequence Number=SeqID_50675
atggccctggtctctagaggtggtgcttcctctaacccctcatcttctatgtttgttgtgtctactttattgaccatcacacaggagcaggtggaggtccatggggatgaggagctggcgcatgaggctggctcgcgcgaccaccactctggtcggcgcaagggcaagaaggattacaccttcgacaagcacaagtctaagggaggattcgacaaggaggtgctcaagaagaagtacctccagaaggccaagatcaaggagtgtgtcttcctcacctccctcggtgacctcgaccacaactccgacgatgcagtgtcctcgagcgatgaggagactgacaggcgagccgaggacaagttgaacggactctacttcctcactgacaccgcagacggcctttgcatcatagaccttggtgatgatgatactgatctagcggagagggacgctaggatagccttacttgagaaggctagctcaatgagtgcttctgcacttgcgcatttggtgccgtgcattgagccccagttgggcatggtggtcaatcagttcaagaggggaactggcggatcgagatttggctttgttgctaaggatggaagagtcacttgctttggaaaggttggtgagtga

SEQ ID NO: 8897 - DNA, 483 bp, Zea mays
  Peptide Sequence Number=SeqID_50676
atggagaatgagagatccaatgcacctcaaacattagatgaagactctatgcatagtgacactcttgttcctagcatgttgtttacatacattgctcattctcatggtgacacagaggatgttcaggaatgggcagatacaactgctggtgacacacaccttggaaagaggaagaccaaacttggttcatctaaacaaaaagggaaaaagttaaattcattgatggatccaaagaggaggaagatattgagagtgacgatagaacaactgaccatagtgaacatgatggtggagaagatgatgatggtagtcatggggatgggggatgtgatggtggaacatatggtgctgggggtagtggtgatggatggagtgatgacagatgcagtggtatggtggattggagattcactaaagagagtgagttcatccatgccgcacaagattgacatcaaggagcacctcagtccgaatgagagataa

SEQ ID NO: 8898 - DNA, 1625 bp, Zea mays
  Peptide Sequence Number=SeqID_50677
catcaggagatgctaaaattgccgagcataacttggaaaatgaaatgtttaaatttgctagaagtatgctctataatgggagacgcccgggcatcaaggatggcattggcttccaaaggggagacaatgtcaaacttaatgcccctcctaaaaatttgtctaactttgttaagggcaaagctctcatgcctcaggataacgagggttacattttgtaccctgccggttatcccgagagcaaaattaggagaattcactctaggaaatctcactctggccctaatcatgcttttatgtataagggtgagacatctagttctaggcaaccaacccgtgctaagttgcctaagaagaagactcctaatgcatcaaatgatcataacatttcatttaaaacttttgatgcatcttatgttttgactaataaatccggcaaggtttatgcatccgggggctcaagttggatactcgacagcgggtgcacaaaccacatgacaggggagaagaagatgttctcctcatatgagaaaaacaaagatccccaaagagcgatcacattcggggatggaaatcaaggtttggtcaaaggtgttactgtctttagaagaagtgatgattcaatagcatttatgggagtgttagagggtcagctatacttggtagattttgatagagctgaactcgacacttgcttggttgctaagactaacttgggctggctctggcaccgccgactagcccatgttggaatgaagaatcttcataagcttctaaagggggaacacattttaggactaaccaatgttcattttgagaaagacaggatttgtagcgcatgccaagctgggaagcaagttggaacccaacatccacacaagaacatcatgacgaccaacaggccgcttgagctactccacatggatctattcggcccgattgcttacataagcatcggcgggagtaagtattgtcttgaaagatctcatacccaagaaacattaaagggattcttgagacgggctcaaaatgagttcggcttaaggatcaagaaaattagaagcgacaacgggacggagttcaagaactctcaaattgaaggcttccttgaggaggagggcatcaagaatgagttctcttctccctacacccctcaacaaaatggtgtagtggagaggaagaatagaactcttttggacatggcaagaaccatgcttgatgagtacaagacttcggatcggttttgggccgaggcggtcaacaccgcctgctacgccatcaaccggttatatctacaccgaatcctcaagaagacatcatacgaactcctaaccggtaaaaagcccaatatttcatattttagagtctttggtagcaaatgctttattcttgttaaaagaggtagaaaatctaaatttgctcctaagacagtagaaggctttttactaggatatgattcaaacacaagggcatatagagtctttaacaagtcctccggacaagttgaagtttcttgtgacgttgtgtttgatgagactaacggctctcaagtagagcaagttgatcttgatgagataggtattgaagaggctccgtgcatcgcgctaaggaacatgtccattggagat

SEQ ID NO: 8899 - DNA, 216 bp, Zea mays
  Peptide Sequence Number=SeqID_50678
atgtcgctgacggagagtacatgctcatccccgagcaaggagctgtccaagaggaggaccaggagcaagcccccgagactgccactgaggatctccacgcagccccagcatttgaaggcaagccccggtacgcttcaggacatggttgacggtgtgacttggcctaccaccctgccaccgggttggacgatcgagtgggatgctgctccagcatga

SEQ ID NO: 8900 - DNA, 713 bp, Zea mays
  Peptide Sequence Number=SeqID_50679
gctccgtcgcgggatccgaggggcgcgcgcttgcgtcaggtccaggtccgccagaggcgatgctcacgtgcatcgcgtgctccaagcagctcccgggcgacgcgccgccgctgcgcgagccgtcggacgacgatgaccgcgccaacgccggaggcgggggcgaatcggcggcaacgcccggcacgaggcaggccatcagggtgctcaccgcccagatcaaggacatggcgctgaaggcatcgggcgcgtaccggcactgcaagccctgcgccggttcgtcctccccggcggcgtcgcggcggcagcaaccgtactaccacggcgcgtacgcggagtccgggtccgaccgcttccactgcgcgtaccagcgcgccggcagctccgcagcatccacgccggggctgcgcacggggggcgcgatgtccagcggtgacatcacgccatcggtcagcgcgcgcaccgacttcctcgccgacgacgaggaaggggacgatgaagagggaacggcgactggcagcagcgaggaggatgaggagaaggagtgggtcgcccaggtggagcccggggtgctcatcaccttcctctcgctgccgcggggcggcaatggtctgaagcgcatccgattcagtatggtcctgccagggccggacctggaggggggcaactggagcggccgcaccgggcccccgattttggaagggcccttcaagtag

SEQ ID NO: 8901 - DNA, 429 bp, Zea mays
  Peptide Sequence Number=SeqID_50680
atggggaagactctggtgagcgcggaccgggcaaaccagaggggctgggggcgaactgaggggtgtcccgagttgctgacgagtgttacagtgtccttccttgttctattcacttgggcacccccggtcattgctagggccagatcccctggtgaggaggatgggggtgctaccgcacccgctgtcactgcctcaacaacggtcgctatttgtgtggtcgtagctaaggctccccctactccttgcggggaggttgtgacccccaccatcactgttgccgctaccgcctccgtcgcgactcgtgcagttgcagttgggagcactcttgcaccttgtggggatgttgccaccctcaccattgttgatgggcatatcgacgcttggtggtggtcggggcctgttgcgtcgacattgctgctttgcccctag

SEQ ID NO: 8902 - DNA, 714 bp, Zea mays
  Peptide Sequence Number=SeqID_50681
atgtatctcctgtttgagaaactactaaacaagcttgaaggtccagtgttaatcctcggatcaaggattgtagatatgaacagtgatgaggaatcaaacgacagattgactgttctgttcccatataatatagaaatcaagccacttgaaaatgaaaaccaccttgtaagttggaactcccaattagaagaagacatgaagatgattcagtttcaagataatcgaaatcatattatggaagtgcttgtagaaaatgatcttgaatgtgatgatttagtttcgtatcacttgatgaataacaaagatccagagtatcgaattgggaaattagttctatccacaaagagcttgtcccatgcattggaaatttttcaaggcaacaagataagtgataaggacatcatgaaattggaagcgacagatgacgccttaaagaaaattgttttctatgtgtgccctagaggaactaatttatcaattaccctcgaggccgcccgggtcggcgaggccgccagccgcccgccacccggctcggcgaggccgcccgccgcccgactcggcgaggctgatggccgccaggagccccgcgccgtcggcccccaccacgacctcaggcgaaccggacagggagcgccgcgcggcggaggagaaagcgagcgggcacaacagcaggctgggcaggcagatagcaactgggcaggagacgcgcggtag

SEQ ID NO: 8903 - DNA, 525 bp, Zea mays
  Peptide Sequence Number=SeqID_50682
atggacggttgcgatggggcgcgcgaggctttacagctcggtggtcggcgttgcctcctccgcggcggcgaggtcgccggagataagggggtcggccatggcagggctctagaagtttggagaaaagctcgggcgcgttcagggcgacatggtgaactcagcatgggcgcaacgctagcgcggggtcaccagagggcgcagaacgtggcggggtggcttaacggcagcgcggatcaactccagcgagcaaattacgcggacactagggcagtaaaaggcgaaataagggcatgggaaggtttctcacctcgagtgcagactcaggggcgcttgggcgacggcggggacgcagggaatccgcgggtcgacggtggtagactccggctgcacggggaagtctccggtgagcgcgaactgggcgaaccagaggggctaggggcgaaccgaggggagtcccgagtttctaacggtgaggcagaactcaccgaggcaacaggcgcggcgagggctcgacagcgaccgtag

SEQ ID NO: 8904 - DNA, 255 bp, Zea mays
  Peptide Sequence Number=SeqID_50683
atggaatgggacaacaactatggcgaggtcagcatgaactctgtaccagacggcatcgtgcagctcatcttgtcgatgcttcacaacgcccacgacatggccgcctacgcctacatcaccggcgctagcgagactgtgtaccctacctgcttgtgttcctctcacgaaatgcctttgacgcgatcgtcgtggccaagagccatagacgatgtcatcagcgagatggcggggtccatcacatgcctcaggagctag

SEQ ID NO: 8905 - DNA, 1040 bp, Zea mays
  Peptide Sequence Number=SeqID_50684
atgccgccccataagattgagactgggcatcaagatgtggtccatgatattgccatggattactacgggaagcgcctagctacagcctcctctgataacacaataaagatcattggcgtaagtggaacctcacaccagcagcttgcaaccttgagtggacaccagggcccagtatggcaagtcgcatgggctcatcccaagtttggttccatgcttgcatcctgcagctacgacggccgggtgatcatctggaaggaaggaagcaagcctgatgaatgggcactagcacacacctttgctgagcacaagtcctccgtgaactccattgcatgggcgcctcatgagctgggtctatgcttggcttgtggttcatcagacgggaacatttcagtcttcgctgctcgttctgatggaggttgggacaccacacgtatcgaccaggcacatccagttggtgtgacctcagtttcctgggctccagcaatggcaccaggagctctaatcagcgcaggatcttctggccagtttgagtatgttcagaaactcgcttctggtggctgcgacaacacggttaaggtgtggaagctcaacaatgggagttggcggatggactgtttccctgccctacagatgcacaaggactgggtgagagatgtcgcgtgggccccaaacctgggccttccaaagtccaccatcgccagcgcctctcaggacggaacggtcgtcatctggacagcagcaaaagaaggtgagcagtgggacggccgggtgctgtatgatttcagaacccccgtttggaggctgtcgtggtcactgactgggaacatactggcggtttccgacggcaacaacaatgtgaccctgtggaaggaagctgtggatggcgaatggcagcaactgttggcgaggcacagtgcacgagacatggtttcaggctcgggcaaaaagcttcagccaccattccctgaatctgaaatcaggtactacatcgcgtgctcggcccagacggcctttcggaagcagaccgaagctcaaatcag

SEQ ID NO: 8906 - DNA, 744 bp, Zea mays
  Peptide Sequence Number=SeqID_50685
atggctggtggtgggggcgaggccacggtccacaggaacgggaccatcagtcacttcccttggtgcgcgggcgggagggaggggtcgggggactacaacgtgaccgtcgtgtactacctgacgcactacctggtggacctcgtgacggagccgcacaccggccggcgcgtcctcaagctggacgccatcgaccaggcccgcgactggctcgccgccgacgtgctcgtcttcgactcctggcactggtggccgcgcaccggcgccacgcagccctgggactacatccaggtgggcgacacggtggtgaaggacatggaccgcacgcaggccttcgccaaggcgctgcacacctgggccaggtgggtcgacgccaaccttgtccagaccgacaccaaggtcttcttccaggggatctcgccttcccactacaggggccaggactggggcgcgtcgccgaagaagacgtgcatgggggagacgcggccgctcaacgccacggggccctacccgggcggcccgatcccgcagcaggcgatcctgcgcggcgtgctggcggccatggccaagcccgtctacctgctcgacttcacctacctctcgcagctgcgcaaggacgcgcaccccaccaagtacgacggcggcatcttcggcggcgactgcacgcactggtgcgtcgccggcctccccgacacctggaacgtcctcttctacgccgcgctcaccgccgggcaggggcacaactga

SEQ ID NO: 8907 - DNA, 456 bp, Zea mays
  Peptide Sequence Number=SeqID_50686
atgggagaatcgggtgtctgcgcaggatgggttggggaggggtctgccgccgccgtcaagggcacgattggccacctcctggacctcagcatggggttcggatcgggcgcagggacgcttggaagccagggccgccgcgaattcgacaaacggtcgatcggtgctccaccaatttctcgccgagatcgtgcctccgccgcgggccgctgtccgccgtggacactcgtcggtgggtcgtctcccgctctcgtaagtcctctgttggattcgtggcatcgcgtggcgcagtggaagcggtggttggtgaaacggggccctgggcgcgctgctcaccggcgatggcgccgccacggacggagctctgccaccatcgggtcgtgtctggggaaagcgataacgcggacccgttggatcctagccaacggtgatctggttggtgacgggctgaggaagtag

SEQ ID NO: 8908 - DNA, 471 bp, Zea mays
  Peptide Sequence Number=SeqID_50687
atggacattccaagcacccagccacccaggccaaattgtgggagtacagcctgtgtagctttgatcagaaataagcaactctttgtggcaaatgctggtgactcccgctgtgtcatctcaaggaatggtcaggtcgagctatgtgatgacgacgaattcattgttttggcatgcgatggcatatgggactgcatgtcaagccagcagttggtcgatttcatccgcgagcatatagacacattggtggagtccgaaggagttgcaggtgaagaccctgagcagcagctggttggtgaaggtggtgatgaggatgatggtttgattatgcttatggtaatgtatgttgatgtgtactcacccttgctttacacaccaaaccccctagattgtcctcgttgcaaccactgctcaggagaagatgaagtcgtggaggaggacttccaggagttccaagagtacgatgagttctag

SEQ ID NO: 8909 - DNA, 549 bp, Zea mays
  Peptide Sequence Number=SeqID_50688
atggggcgcactgtggaggttgatgtttcttacgtcgaagggctaatatttcttggtgttgaaggcatgtttgttgggggaagtgcttgtggttttgttgttggggttatatcggtgttcgttttggtattggtcgtggtggtatggttgcggttggtagccaacgggaggcctgcagctgtggtgcaagagggcttcgctcgtcaaggtaattcagcccttggaaggcagttggtgcgaaggctggacttcaccatctttggtgatgtcatcagcctccggcggggtaaaatctggcgaggcatcctgagggaggttctcagaactacaggtgtgaatggtacattcgggagtgggtgggtgttcagttcggagacgcttgttatttatttctctgtcattgttttcgggtacatcttaaggggtgtcatcaatgagggctatcttgcctttcttttcggtgagggtcgccttcgcagcgtcgtccaggaaggtggtggccttggaagtcgtcttcttgggaaccatcgtgggtttgctttatcgtag

SEQ ID NO: 8910 - DNA, 250 bp, Zea mays
  Peptide Sequence Number=SeqID_50689
atgggagaatcgggtgtctgcgcaggatgggttgggggaggggtctgccgccgccgtcaagggcacgattggccacctcctggacctcagcatggggttcggatcgggcgcagggacgcttggaagccagggccgccgcgaattcgacaaacggtcgatcggtgctccaccaatttctcgccgagatcgtgcctccgccgcgggccgctgtccgccgtggacactcgtcggtgggtcgtctcccgctctg

SEQ ID NO: 8911 - DNA, 267 bp, Zea mays
  Peptide Sequence Number=SeqID_50690
atgacgtacgatacaacttcccaggtctcctgtggtggtagatccaacgacgagaaccataacgcgaaatccaaactgggtggaagcatgcagacggattgtgaagcagaggatggagggaacggggcgtgtgcgtgcaaccagatcgggagggaagctttttgcagcttctggccactaaaagctgttgcggactgtcaaacgctcagcttttcagccagcttctatacaattcgtttgggcaaaaaccattcaaaatcaacgtaa

SEQ ID NO: 8912 - DNA, 693 bp, Zea mays
  Peptide Sequence Number=SeqID_50691
atggagagcggagcagagggggaggatgtcgggagagctgctagtggccggtctatggacggccgaagggacgtcgacgacggtggcgtcgccggagcggcggcgcaggagcggcggtggcgcggtggcggtggcgacgacgaggagagtagtggtttgagcaacggcggcggcggcggaggaggcgttgagctcagcctgcgcctcaggacgggggcggacgacggtgccgcgactgcggctgctcttcctccgccgccgctgccgccgccggcggaggcgaggaggaacatgaccatcttctacaacggccgggtgtgcgccgccgacgtcaccgagatccaggcaagggcgatcatatccatggcgagcgaggagaccctggcggaccaccggggacggcggcggcggcagcagcagcagctgacgcgggtagacggcggcgacggccggcagcaggacggcgacagcagcagcagcagcactacgactagcgccgtggcgctggcgcggcggtgcgcgcgaggcagaggcctcgtgggaccggcggtcgacatcgaccaggcggcggacgccgggctgtccatgaagcggtcgctgcagctgttcctgcagaagcgcaaggcccggacggccgccgccgccgccccgccctacgccggcggacgccaggctcaggctgtcaggcgatga

SEQ ID NO: 8913 - DNA, 211 bp, Zea mays
  Peptide Sequence Number=SeqID_50692
tccagaactcgagttcggcctcaaccttctcagcgacctcaactctagcttctccaacactaccgacgatgtcgcaaactccatggtgttgcccaacttcgccatgacacgcaacatactcaccctcaaggagtttcctggcgaatgggtgtcccagcctggtgttggtggtggcggaagatggtgtcctcgcacagttgtcatccttgag

SEQ ID NO: 8914 - DNA, 288 bp, Zea mays
  Peptide Sequence Number=SeqID_50693
atgtgtgccgagagtaatgacacaacaaaaattctgatgggactgagcggtgtcataaggtcaaccaggatgacactggttcttggagcacccggatccggaaagtcaacatttttaagagtattggctgggaagctagatccttctctcaagttcgaaggcaaggttacatacaaagtagaggcaaagtcctctgcgcctgagcacctgagcgcatatgttagccagcatgatcttcatcacgcagagatgactgcaactgttgttaggagaaggaagcaaccttaa

SEQ ID NO: 8915 - DNA, 2091 bp, Zea mays
  Peptide Sequence Number=SeqID_50694
gtgttctactttaagaattccaagacacttggagaagctattctgatgcttaggggtttgctcaatgaatggcaatggtattggacctgtataggaattttatttggattcaccctggtcttcaacatcctaagcgtacttgctttacacttcctgaaatctccacacaaacgtgaagtaaatatcaagtcacaagacagacagaataaagagtacaacgatcaggcagttgttaatgtgaatgcctccattggtcaaagcctaccattccaaccactgacacttgtgttcaaaaatattaactactctgtggaactaccaaaaggtatgagaaaacatggagttactgaatcaaggctccagctactgcgagatgttagcggctctttcagaccaggagttctaacagcattgatggggattactggtgcgggaaaaacaacattactagacgttttagctgggcgaaaaactggaggttacattgaaggagtcatcagcatatgcggttacccaaataagtatgaaacagtctcaagaatcacgggctattgcgagcagactgatatacactcaccttatctaacagtatatgaatcacttaagttctctgcgtcccttcgcctaccttcagttgttaaatctcatcagagagatatgtacgtagaagaagttatggacctagtagagctaactggcctgaggaatgcgattgtgggcattcctggggcaacaggcctatcagctgaacaaagaaaaagacttacaatagcagtggaacttgttgctagtccctccatcatgttcttggatgagccaacaactggtctagatgctcgtgctgcagcaattgtcatgcgtacggtgcgaaagatggtgaacactgggcatactgttgtctgtacaattcatcagccaagcatccagatatttgaatcttttgatgagctgttactaatgaaaagtggaggacagctcatttacagtggttcactaggtcccctgtctagagatttgataaaatattttgaggctgtccctggagttcctaaaatcaaagatggtcagaatccagctgcatgggtgctagacattagctcacatgccatgcaatacatgattaacgtggactatgctgaaatttactataactccaatttatacaaggagaacatggctatgattaatgagttgagcaaaccgaaaacaaaccatgaggatctgcatttgccttcaaaatattggccaggctttaaggaacaatgcatcgcttgcatctggaagcaacatttgtcttacagaaagaactcagagctcaatgtgtttcgcttcatcaacacatttgcaacctcgatcgtgtttggtattgtgttctggcaaactggttcaacaataaaggtggagcaagacgtgttcaacatactggggattggatacgggtcggcactgttcctaggcttcgtgaactgcactagtttactgccagtggttgctgcagagagagccgtttcctaccgagaaatgaattctggcatgtactcttctatggcattcatcatagctcaggtagctgctgaaatcccttacatggttatccagccactcattttctcagcaattgtgtacccaatggttggattccagctggctgtgaaaaagtttttcttgtttgtgctatacatgatcctgattttcatggactacactctgtatgggatgatggcagttgcactgacacctactgctgagatagctactggtctgtccctcaccatctttgtagtgtggaatttcttctcaggattcattgtcacagtaaaggcaatgccggtgtggtggaggtggatgtactgggcctgtcctacagcatggaccctatatggccttgtgtcctcgcaacttggtgaccataaggaactaatccgcgtgctgggccagccagaccagccagtgatcacattcttgcaggagtaccttggcctggaaaatggctatcttcccctggtcacagctctgcactttgttctgagcgcactcttctgttttgtcttctgcgtgggtatcaagtatctcaggttccagaaaagatag

SEQ ID NO: 8916 - DNA, 138 bp, Zea mays
  Peptide Sequence Number=SeqID_50695
atggcggtgccctctgcagaggcgcggacgattggttttgacactggtccgtatgggtactcgtaccaggaaaaagctcgttcatacatggggatggatggagacaatatttatttgaaagttgcacagctattttaa

SEQ ID NO: 8917 - DNA, 99 bp, Zea mays
  Peptide Sequence Number=SeqID_50696
atggaggatcgctggtgccacaagaacctgctggtggcgtcttcaaggcgggtgtccagcggatgggaggataacggcggctggatgtggaggtgctaa

SEQ ID NO: 8918 - DNA, 234 bp, Zea mays
  Peptide Sequence Number=SeqID_50697
atggcgcctgaggccggtcttggtggctgtcagcctcaccctgacgggtggcacagcagtcggagcagcacaggcggcgttgttttcctgtcaggtcggtgttgtaaggtcgtcatgggtttgtcatgcacgttaggaccctggcctaagtattgtcccaaatacatggaagacataataaggatgttcatggacgttttccttggcaacgataacatccaagaacttgagtga

SEQ ID NO: 8919 - DNA, 276 bp, Zea mays
  Peptide Sequence Number=SeqID_50698
atggcggcagagggcaacaaaagcagggaggcgcctccactaacgccggcagagaatgaggcgttcctgcgcatgctcagagacgccggccaaagattgggtagcgcagctccagaggttgaggtccagtttgatggagtcagcgtgggtgcccaggcgcacaattgcaagctgagcacgttagcgtgctcacggtgggagcttgcaatgacggtgcccatggagctcgatgaagaatccgtacatctggccgaggttggtggcaataccgtgtga

SEQ ID NO: 8920 - DNA, 423 bp, Zea mays
  Peptide Sequence Number=SeqID_50699
atggatcctgcaatatcaaaggggaaatggaaaaatgtacctccaacagactcctatctgatctctctaaagtcccgcacgcgcaaacgtcctgtttcgtggcacaaatgttcgctgctggccaggctcccaatccactttctcttttccgttcccgcgcctttgcccagtccgcgcctctgtcggtcgttcaaatttagccactgttcgtcagcaacacgagggcaccgtctagaaaacaaatacgacccacacctgctactctggccacgtgacaggactgattgctgccgccgattacctacagcaaggagacgatggcgcaggatcgtcttcgtcggccacttgggatcccttggcggcgcatgcaagacagaaatagagccccagagacccatatttgaccagttcaacaggttttag

SEQ ID NO: 8921 - DNA, 723 bp, Zea mays
  Peptide Sequence Number=SeqID_50700
atgccaaatggtggaggtggtggtagtggcaagagcaagggggaagacatgccggtggagaactggatggcaaggccaagaacaccagtgggtgcggtcgcaccgctggggagggtggccaccgagcaaatgatcggtatgggcggcggcggggcgaacgggaaggcgccgaaggagtggcctagccgcggtgagaaggcgcagcctcgggagggcgagtggtcttgccacggcgagaaggcgcagccccgagagcacgacgaggtgcagcgcgggcaagggcggcagccgcgttgcaagggacggcgcggcgggctagcggaagaggaagggagaagccagcaagggagccggcggtgcagcacggtgatgcgaccgcgatcggggtggttggagcccaggctgggcggatctagcgactgggatcccaagctcgagggggaggggcaacggcggaggagtgtggcctccggcaggaggcgcggcctgatgcagccggcgaacgacgaggagcggcaccagtggatggcacagcctggtgtgccgacggacgagggcgagcaagaagatgacagtggtaatgatcaggcaccctcaaatgaagagccaccagatgctgcagcaacatgtgcaatgggggatgatgagtctgaatcagctggagcagcagttactggtgaagccattcggttagatgatgatatgctcctttatgtcttgtaa

SEQ ID NO: 8922 - DNA, 699 bp, Zea mays
  Peptide Sequence Number=SeqID_50701
atggtcgccgactcctatcgtgcgcccatgactgcagctgccacgaccattgacgcgtcggcgtgcgaggacgacaacgatccgatggcgcctccttcaaccttgacttcacgttactcgacaacgagagcgtgcgaggagcgggtctgtgccgctggcgtcactgcttcgtccggccatcaggaaaagtacctaaatgcaacatctgccgatgatcaaagttgcaaccctggacagatgatggatggagcacaaataaatgttgatgttactgcacctggagcaatacttgctctagccttgatatttttgaaggccgagtctgaggagattgcagctagactcaatatccccaacacttacttcgatttgcagtatgtgaggcctgattttgttatgcttcgcattatagccaggaatttaatattgtggagcagaatacaacctaccaaaggatgggttgattctcaaattcctgaaacagtcaggtgtggtatttccaacatgagtgaagggactattgacagtgatgaattggatgctgaagctctttttcaagcttatgttaacatagtgactggcgcatgtattgcacttgtcacatccacgttctggttgaggtctcatgtttctagtagaggtaagggggtagacgcaacactggaggctcccatagaagggggtctagggaatggataa

SEQ ID NO: 8923 - DNA, 141 bp, Zea mays
  Peptide Sequence Number=SeqID_50702
atggggccctctgcccagtctctctcacccgcgctcgctcctccctccctctctctggtccgcggggtccgcatgtcgggctcgtcttcaacagctcgccgcaacaaacgcgcgcggactccgaagctcgccgattattaa

SEQ ID NO: 8924 - DNA, 402 bp, Zea mays
  Peptide Sequence Number=SeqID_50703
atgcgcggccccgtcacctgcatcccacccgacatgcttcaccaaccccgcccgcatttaccaccgtcacaggcggatcgatccaccgatccccccgccctgccggctcgttcctgctctgagccatcggtgtaccacccgtccgccatgcaacccagccacgtccaccaaatggtgacatgtcgcttggttggagttctctgtcccgtcaatccattggttctgacagccgacactgctccagctgcctccccggtcccctcctctgttcgcgccgctctcgccgattcccacgggcgccccaccatggaagagtatgtggctgtgctgggtaaccacacttgggacctggtgccgcatccaccaggcaccaacgtggtctgcatggaagctcgccagtaa

SEQ ID NO: 8925 - DNA, 534 bp, Zea mays
  Peptide Sequence Number=SeqID_50704
atggcggatctagccgggatggccgtagcaacagggggggcggggaacagagtcagcggccagatccacggccatggcggcggcggcgaggcccagggtcgtggcagcgctgacggcggcggctgtggcagtgctcgctcccaggaccgcaacggcctgtgcgcccagcccggcctccgcgcccagcccggcagctgcacccacgcctgggcggtgccggcgggttggatctggcgcccgcgccgggacgcgcccccgctgagccatgcctggccggaggccacgagcccgcgccggagttggggagggagggcgccgccgcggggaggggcacctggggtggcggcgtcgacgtccacgtttaggcgcgtgatggggctttgctactcccgccggattcggctgccgagcgaacgctcgaaccggagcttcctggagccctgccgtgacggtcgcgtccatcggagggaagagggccagggcagaggggtggccggcggctgggaagggagccgccccgggtgggaggaatga

SEQ ID NO: 8926 - DNA, 1593 bp, Zea mays
  Peptide Sequence Number=SeqID_50705
atgggccgcacagtaacttgcgcattaccgagacggggcaagggcacatcaagccaggagatctacactgtgaccaagagaagatatctgttctccaagaaccgatgctccattacttcatatccagcaatagattgctgtgctcacttgtcggggctcggtcaccatgcttgctggtgtaggatgaatgctatcagtgatgctcttctatgtgtcctgcaagttgatactttatctctatacaatgtaactggtgaaattgtttgtattcccttaccttatgctgtttcatcaatatggccactccctttcggtcttctacttcagaaatcaactgatggaggtcacatggtgtcatcctcgagttcactgttaaatgcaagggatttaaatcgtcctagcaaggaatatggattgacctacaatattccattccaagcaaacatcttggagacagacaacaaagctaatggcgccattatctcgtcacacctcatcttgaaacatccatttgaagagcctcaggtttttttggcaactgatattgatgggatgccgataattagttttttactgcatgagcaaaaaatattgcttgctgtaaggattcaagttgatgatgctactgaagaagcttttggtgatattaagcctcacatgagctggaacattcctgcatttgctgctgcgccagttgttgtgactcgtccaagagtacgagttggagttcttccctttacagacatccttgttttgagttcagacaatgatctacttctctattctgggaagcagtgcctctgcagatatactctccctaatgaattgggaaaggggttcttttcaaatcatgagctaaattcagatatttcagatacttactctgatctgaagatcacaagcatagctgatgctgttgaagggcgtataaatgtgacatgcagtaatggcttgccttcggttgatcttattgcaattttgtccatttactcctttccagatgctcagatgttcgttgcgcaaaaatccttcctcttctttgttgccagtggttcagcgagaaacactgaagaacttactgttctggctatggttgctgaaaagtttggtcatcggcagttggatttgttaccagttggtgtatctcttgtgcttcgtcatgcactggacaaatgccgtgactccccacctgatgattggcctgcaactgcttatgttcttgttggcagggaagacctagctacggcaaagatggggacagttaggaaagaaaacctgttgtggaacaatgataatttgacatcaatgtcagtcccttatatgctacatctgcaacctgtaatcataccgacaactgcacctgacatccctgcatcagaagttttgaattctgatgattcagattctgtctataaatctgttgaggatggcatggaacatatctttacttcaacaacacaactccgatttggtcatgatttgcgcttgaatgaggttagacgcctcttatgctcagcaaggcctgtgcctatacaaacacctactaatcctagcgtgtcggatcaagacctacatcagatattaagctattag

SEQ ID NO: 8927 - DNA, 510 bp, Zea mays
  Peptide Sequence Number=SeqID_50706
atggctccaggctcattaaaaataccctgccccaaaccaaaatccgcggcgcccaaaattttccctccgtcgctagggtttcgtcctatagcaggaaaccgtttgaagcgcccaaagggacggcagcttgccagctttcgcctcactccgccaatagtccacaccgcgctccgcctgctccccggcgccgactcgtttcccctcctccttgacgccgcggccgccagcagtgggatcatggcttcggtcggttcgcggcggctaacggtgctgcgggagttccgccctcacgggctcgcagtcgaggaagccgacggccagggcgtccctggggcgccaccgccgcaagactacgactacttcctctttgaccctgcactcgccatttcccccacccctgaccccagcgatgaggcctcctcttctggtgcagacggcgaccacgagctcttcatccgtgacaatcagtgcgcctcgtctcctttttctctatcagtagctctcgattaa

SEQ ID NO: 8928 - DNA, 435 bp, Zea mays
  Peptide Sequence Number=SeqID_50707
atggaggatatgcgtcgactcaccaaccagaacaaggtgtgcccgaaggatctgtttcccctcccatgcatagaccaggtggtcggctccacctcaagccacgagttattgaacttcctcgacgcttacttaggctatcaccagatcatgatgaaggaatccgaccaaccaaccacctccatcatcacccccttcggctcatacaattacatgacgatgccttttggtctgaagaatgcaggggcaacataccaacgatgcatgatcaaatgctttggcgacctcgttagaggggtcgtagaagcatacattgatgacatcgtggtcaataccaggtggtccgagggcctcgtatccgatctcaagttgatgttcgataggctaaaatccaacgacatcaagttaaatcctaaaaatgcgtctccagtgtcatag

SEQ ID NO: 8929 - DNA, 651 bp, Zea mays
  Peptide Sequence Number=SeqID_50708
atggccgaggacctggatgtatacccagaccacccaggttcaaatcctcgacaagaattttgggaagtatgtggaaagtgcataggtttaaaccaggtctgtgatgcaccatctgctagttgcagtaatcaaccaaacagcactaatggtagctacttcagagttgatcagctagcctatatcagtttttacacaacaatagagttaatgtgggagcatttgaagactgggaattttcctttttataattcccttttccttcccaacttgaaggtcgctttggcctacaacgaagcattagttgattctagaatcacaaatggaggaattattcattcgacattcttggagtcacttatgaagcgagtgggagacatctttgcggagctgccaaacctcaaggacaacctccaccgatacttgagcacgggcacatggcctgacacacaaaacgacgtggtggttctctcgtggtacctccaatggtacaatataccacctgcccatgttgtggcttctgcagttgagaaggtcagaccgagagtccctgccggtgtatctatgctcccactgcttcgcctcctgctgccaaccacacaccttgtgggactgatggagatcgagaaggtacagattgtcatggaatgctaa

SEQ ID NO: 8930 - DNA, 357 bp, Zea mays
  Peptide Sequence Number=SeqID_50709
atggcacttggtttggtggtcgacggccggcggatactggctagggttctgggttcatgttcatggctagggttctgggttcatgttcatggcaatggggttcatgttcatggcggatactggctagggttctgggttcatgttcaaggtagcacacagctatctcactccgacggcccgacgagcgctggacctggcttggtcgtgggcctgtgggctgcggcatactgggctgtggcgctgtgtgctggtggagcttatcctgttggggacttgtttggtgtaaaaaagatgtggaaggacttgtttagtgactttagcactcatgcagaaacaaagcttataagcgccaaataa

SEQ ID NO: 8931 - DNA, 273 bp, Zea mays
  Peptide Sequence Number=SeqID_50710
atggggcgccaaccaaaggcaggccgtgcgtccatggaagcagccaggtctgtgtacgcagagccgcgcacagagccaaaatttttggctccggctctcagccgtattttggctcctgctcctgtgcaagagctggtttgggagatggcgtttgggatggcttcagcgaggagccggtactggagctggcgaggagccctcccaaacgcccccttagggtcgtggtacctggccatggattttgaatcaggcggcctagatcagggcgcgtag

SEQ ID NO: 8932 - DNA, 786 bp, Zea mays
  Peptide Sequence Number=SeqID_50711
atgtggaggctaaagatcggagagggaggagggccatggatgcagacggcgagcgacttccatggccggcaggtttgggagtacgacccggtcgccggcaccgacgaggagcgcagcaaggtggagcagcttcgccgggcgttcacagagaaccgcttccgaaggagggaatcgcaggacctcctaatgcgtatgcagttcgctggacaaaaatatgtgcatgcggatctgcctgcggccaccaagatagaggaggaggatggcgacgaggtgccggtgacggaggagaggttgcgggagtcgctgaggcgagcgctgggttgcatggctgctctccaagctgaagatggccactggcctggtgattacagtggggttatgtacctcatgccgttctggattttcgcactgcacatcacaggcacggtcgatgctgtcctatcgaaagagcatagacgtgagatctgccgccatatctacaaccatcagaacgaggacggaggatggggcttaaatgtcatagacgagagcgccatgttttccacgtgcttaaactacaccagcttgagacttctgggtgaggtgcagcaggaggagaacgatgggctagctaaaggtcgagcatggatcctatcccatggaactgcaactgcagcaccgcagtgggcaaagatactactctcgttcctggacagtgccgtcttagaaactaagatagttttcattgtgaggaggtggggtttgaacccatgccctgatggaagaagggcaggagacactgggtga

SEQ ID NO: 8933 - DNA, 168 bp, Zea mays
  Peptide Sequence Number=SeqID_50712
atggttgtggtgatcgtccgtggtggcatccaaacacaacgatattctccgatgcggcgcatcggagggcatcctccttcgacaaccaccttcgacccgatggcctctgacgcgtcctttgatctgacgacctcagaatcgtcctccggcaacgaactatcagtgtaa

SEQ ID NO: 8934 - DNA, 159 bp, Zea mays
  Peptide Sequence Number=SeqID_50713
atggggctgcaccccattttggttgaaccaaaacccaataaagggtcgtcgatatcagatcgggtgggcaacattagattggccatcataaaatctgggtcatggatctcagatcctatggcctctgttaagtacctgttcaacattatgaagatctaa

SEQ ID NO: 8935 - DNA, 1818 bp, Zea mays
  Peptide Sequence Number=SeqID_50714
atggcggcggagctggccgccgccgccgcgctcggcgctgacgtggcggagcttcgcctcgactgcctcgccgggttcgcgccgcgcagggacctgcccgtcatcctcgccaagccccgcccgctccccgccctcgtcacctacaggcccaagtgggaaggaggcgaatacgaaggcgatgacgaatcacggtttgaggctctgctattggcaatggagctgggagctgaatatgtggatgtcgagcttaaggtggctgacaaatttatgaaacttatttctgggaggaaacctgataactgtaaacttatagtttcatcccacaactatgagaccactccatcgtccgaggaacttgcaaatttggtggctcagattcaagcaacgggggctgatatcgtgaaaatagctacaaccgctactgaaattgttgatgtggcaaaaatgtttcaaatacttgttcactgccaggaaaagcaggtgccaatcattgggctggtgatgaacgacagaggttttatttctcgggttctttgcccaaaatatggtggattccttacttttgggtcactcaagaaaggaaaagagtctgcacctgcacagccaactgctgcagacttgataaatctgtacaatattaggcagatagggccagacactaaggtctttggtataattggtaaaccagttggccatagcaaaagcccaattttgcataatgaagctttcagatctgtgggtttcaacgctgtgtatgtgccatttttggtggatgacttggctaaatttcttgatacatactcttcaccagactttgctggcttcagttgcacaattccacacaaagaagctgctgttaggtgctgtgacgaggtcgatcccgttgccagggacattggagctgttaacacaattgttagaagacctgatggaaagcttgttggctataatactgactatgttggtgctatatctgctattgaggatggaataaaagcatcagaatcagaaccaacagatccagacaaatcaccactggctggaaggctttttgttgttataggggctggtggtgcgggaaaagcactagcatatggggcaaaagagaaaggagcaagagttgtaattgcaaaccgtacctttgcacgagcacaagaacttgccaacttaattggtgggcctgcattgactcttgcggatttggaaaactaccatccagaggaagggatgattcttgcaaatacaacagccattggaatgcatccaaatgtgaatgaaactcctctatctaagcaagcactcagatcttatgctgttgtgtttgatgcggtctacacaccaaaagagaccagacttctccgagaagctgcagaatgtggagccacagttgttagtggtctggagatgtttatacgccaagctatgggccagtttgagcatttcacgggcatgccagcaaacaatacaccatttcaacaatgtttaagagttcttactcctctcatcaaggctgcaaggattgttagatctttgatttgtgcaaacagttggactgatagggaagaaagtcaaaatcagcctgtttgtatcgggctcctgtcagtgcacatcaaagaacaacgagaaagctttgcatgggattttgtgccagtaagaaatatgcaggctatgtttgatactctagtatttatctcaatacatattgatttaaggggattgaggggtaccctcttctacagtatgaaggcgatgcacccgtactacgcctccaggtcgcacggagagtggcacctaaccccaccacgtggacaggcctaa

SEQ ID NO: 8936 - DNA, 543 bp, Zea mays
  Peptide Sequence Number=SeqID_50715
atggagaggcttatcagcccccaccgctctagatcatcctgtagcattagcggcatctgcctcgtgccttgggtgggtgttcaagacacctttgggcatattagaacacaaaaattggttctagccttagtcatcttcgctgttctcaagtattctgttattcgctatatttccgtcaaggctgtacatttagttgccgactacggttcctgtggcgtcggcaccgagaccaacggggaagacaccgctgaaggggaggaggcagagggaagcccgtggaacaaagccccccgcctcgacgacgctgctcggactacgcttcctgtggcgtcggcaccgagaccgacggggaagacgctgctgaaggggaggaggcggagggaagcccgcagaacaaagctccccgcctcgacgacgacgctgctcggactgccgcaatggccgagatcccccgcccccacgcctcctcgaatcagcctcgatctgccgccatggatgacgacgacgtgttgctcgacgtctccccatcactggcccacttag

SEQ ID NO: 8937 - DNA, 519 bp, Zea mays
  Peptide Sequence Number=SeqID_50716
atggggacgcaggtggtggtgggcttttccaacgccggtgttggtgttgggtgcgtggagtcctggtgtggagcggcagcgaccctacacacacgattggtgaccttgcgcgggcggtggttgggccggggcaggggcaggagcagttggaagggagagggcaagagagggaggcacagggagagggaagggaggaagggcggcgatggagaccgggtagatatcagtgcattgaggtcgtccgggtggcgcaggaactcaccgactcctgcaccggagatgctgtccggtagcggcacgccctgccgccacctcgttggcaaccgggtgtgctgtcctattggtgcctggccctggcccgcctcggtgttggcatcgcgacttgccactacaaccctcgtatatgcagagcggaggcatcgccccgccaccgaggtcgacgtcctcgtcctccatggggaggggagcagcggcggcgtcgggacgccgaaccgcctctccctatgcagaagcagttga

SEQ ID NO: 8938 - DNA, 390 bp, Zea mays
  Peptide Sequence Number=SeqID_50717
atgtacttgtgttacgatcatcagttttttaaggttgacacgactaatatagcggagaaaagaggcgtcccatgcgtgggcagggcaaatatgggaacatggcaacaagcggataattttcgagtattcttgacatgctatgtttacaaacctaagagatacacaatgaaaatcgacaatttatgtggagctgcacttattcagttaacgacgtctaaaggtattgtcttcctcttccgtacttcagctaataaatcattattagaaaatgtcaccatatttgaaacaagaaatgacacctactctactaagcaattgaaaaccccgagatatgtggcatccatcgaagtacatgtttcaaggaaaaatgggaattccgtgcaaatatag

SEQ ID NO: 8939 - DNA, 759 bp, Zea mays
  Peptide Sequence Number=SeqID_50718
atgtgcattgatgctacattaatgagaatagaagatacagtgaattactttcagaactatagaaataatggatttgcttctagtttgatcattgccaaagagattgcatctgaattgggtgtagagccatcatttccagtgaaacgtcatgctaagaggaagaaacaatatgatgaaactgattgtgaggaagcaaatcttgaagctgaaaaagcttttgaagttaattattttttggtcatagttgatattgcaattagttcactgaaaagtagatttgaagaactccaatcattcaaagacatatttggattttttatggactccataaccttgaagtcattggatactattgaactaagagaatgttgcaccaaatttgcaaacactttctcttttgatgactcatcagatgttgatctaaatgatctaattttagagcttagtgttttgcagttgactttatcagataaaccaatgtctgccatggatatttttgagtatgttagagaagtggattcttatcctaatactgctattgcttatcaacttttatttactgtgcccgtgaccgttgcattagctaaaagaagtttttcaaagttgaagttgctgaagaattatttgatgtccaaaatgtctcaagaaagactaaatggtttggctattttatgcattgagaaaatattattagatgaaattgatactgatgctatcatcaatgacttcgcttcgagacatgttagaagacaattttaa

SEQ ID NO: 8940 - DNA, 1830 bp, Zea mays
  Peptide Sequence Number=SeqID_50719
atgaagacaggagccagcgcaggcctactcttcatctcgcccctcgggaagcacctacgctacgtgctacgcctccatttcccggcgtccaacaatgtggctgagtacgaggctctggtcaacgggttgcggatcgccatcgagctaggggtccgacgcctcgacgcttgcggtgactcgcagctcgtcatcgaccaagtcatgaataactcccactgccgcgacccgaagatggaggcctactgcgatgaggttcagcgcctggaagacaagttctacaggctcgagctcaaccacatcgcccgacgctacaacgagactgcggacgagctggctaaaatagcctcggggcgaacaatggttcccccggacgtcttctcccgagacctgcatcaaccctccgtcaaggtcgacgacacgcccgagcccgaggcacccttggcccagttcgaggcaccctcggctcagcccgaggcaccctcagctcggcccgaggcaccctcggttcagcctgaggtaccctcggcccccgagggtgaggcactgcgcgtcgaggaggagcaaagcggggtcacgcctaaccaaaactggcagaccccgtacctgcaatatctccaccgaggagagctacccctcgaccgagccgaagctcggtggttggcgcgacgcgccaagtcgttcgtcttgctgggagatgggaaggagctctaccaccgcagcccctcaggcatcctccagcgatgcatccccatcgccgaaggtcaggagctcctacgagagatacaatcgggggcttgcggccatcatgcagcacctcgagcccttgttggaaacgcctcccgacaaggtttctactggccgacggcggtggccgacgccactagaattgtccgcacctgcgaagggtgtcagttctacgcgaggcagacccacctgcccgctcaggctctgcagacgatacccatcacctggccttttgctgtgtggggtctggacctcgtcggccccttgcagaaggcacccgggggctacacgcacctgttggttgccatcgacaaattctccaagtggatcgaggtccgacccctaaacagcatcaggtccgaacaggcggtggcgtttttcaccaacatcatccatcgttttggggtcccgaactccatcatcaccgacaacgacacccagttcaccgacagaaagttcctggacttctgcgaggatcaccacatccgggtggactgggccgccgtggctcaccccatgacgaatgggcaagtagagcgtgccaacgacatgattctacaaggactcaagcctcggatctacaacgacctcaacaagttcggcaagcgatggatgaaggaactcccctcgatggtctggagtctgaggacaacgccgagccgagccacgggcttcacgccgttctttctagtctatggggccgaggccatctttcccacagacttagaatacggttccccgaggacgagggcctacgccgaccaaagcaaccaagctagtcgagaagactcgctggaccagctggaagaggctcgggacatggccttactacactcggcgcggtaccagcagtccctgcgacgctaccacgcccgaggggtccggtcccgagacctccaggtgggcgacctggtgcttcggctgcgacaggacgcccgagggcggcacaagctcacgcctccctgggaagggctgttcgtcatcgccaaagttctgaagcccggaacgtacaagctggccaacagtcaaggcgaggtctacagcaacgcttggaacatccaacagctacgtcgcttctacccttaa

SEQ ID NO: 8941 - DNA, 402 bp, Zea mays
  Peptide Sequence Number=SeqID_50720
atgttctggtttgccccggaagatgaacaagcagagaggaatttctcgctggagttgtcgctggagtttgggcgggagtcaaactttgatgagctggaacgagatgacgagttagactttgttgaagccctcttcactagtggaggtaccgaccatcactcgtcgttgtacctcgatgcctgcttggtcaaagatgccataggggatttccgttcctttgttcctttacttcttgaaccacccttcttggtcctgtcctctcttctggatgagcaagtgcgtgatagtgacatgccacagtgtggtttcgatgatgttgaaggtgcacaggtcgcctggcttgatcctgttctcctggcagaagctcttccaggccactccgacgaggcagcagtagttctt

SEQ ID NO: 8942 - DNA, 255 bp, Zea mays
  Peptide Sequence Number=SeqID_50721
atgtacgtgtatagagtgatgaagaaggtcggggaaagtggttgtatcatggtcgcccaccagctcggcgcttaccgcaagtacatggaggatccacaatgcatcgatcaaagatccgacaagaagttccctaaaacacttatagtcaggtgcaacttcttgtgctccaaacaacctcatgtgtcagttctatgcagattctatgtctgcgagtatcttagagcctgtggcaaattcaacactagttataaatag

SEQ ID NO: 8943 - DNA, 2928 bp, Zea mays
  Peptide Sequence Number=SeqID_50722
atgctcagtaacatgcgtcccatcaagctgcaggcttgggaggacaccttcgggggcaaggttcgcgacatccggcgagaagagctcgggtggctggccaagatcatgctcttcatgtgcgccaacacggtggtattctcgagcggtccgctcgctatgacggtgctcgtgttcgggacctacctcgcctccggtgggcagctcgacgccggcaaggtgttcacggccacggcgttcttcggcatgctggaaggccccatgcggaacttcccgcagactattgtcatgtccatgcaggcgtttgtgtcgctggatcggctgaacaaattcctgacggacaccgagatcgacaccgcggccgtggagcgcatcgagagtggcggcgctgaggacacagtggccgtcaaggtgcaaggcggggtgttcgcttgggatgtgccagcggacgaggagatgaagggcaacaacaacaacagcagcaggccccgccatgaggtggcagagaatgaccaaggaaatcgggcggagttggtgacagtgctgaggggcattgacgtggaggtgaggaggggcgagcttacggcggtggtcgggacagtgggctccggcaaatcgtcgctgctgtcctgcatcatgggggagatgcacaagctctccggcacggttagcatatgtggaagcacggcatatgttgctcagactgcttggatccggaatggaaccattcaagagaacattttatttggaaagccaatgcattcagagagatattcggaaatcgtaaatgcttgctgcctggaaaaggatttggaaatgatggagtttggtgaccagactgaaataggagagcgagggatcaatctcagtggaggccagaaacagcgcatccagcttgcaagagcggtttatcaagactgcgatatatatcttctcgatgacatatttagcgcggttgatgctcatactggatcagctattttcaaggaatgtctgaaaggcatactcaagaataagactgtgttgcttgtgactcaccaagtggacttcttgcaaaatgtggatactataattgtaatgaaagatgggttagtcatccagtcagggatctatcttgagttactagcatcatgctcagaattttctgatcttgttacagctcatcatagttcaatggagacagcaggggcacaagcttttcatgttcagaacacagagagctctcaggcttccactggatctgtagatgccccatctttggcatcgaaatccaatgctgaaaatggtgaatcagttggcagtgcaacaaacaaagaagcaggttcttctaagctgatccaggaagaggaaaaggagagtggccgagtaagctggcgtgtgtacaagctatatatgacagaggcctggggatggtggggaattgtggtcattttagctgtgtcactgctgtcagagggctccagtatggctagcaactactggttatcatatgagacatcaggaggccctgtgtttgacacttccttatttcttggtgtttatgcttcgatagttgctacgacaattatattggaaatgatcgccactcttattgtgacattcatggggcttcaatcagcacaggcctttttcaacaagatgtttgacagcattttacgagcgccaatgtcattttttgacaccactccttcaggaaggatcctaagccgggcatcatcagaccaatctaagattgatactaaccttgtgttctatgttggttttgccacatcaatgtgcatctcagtggttaccaacgtcgctattacttgccaagttgcatggccatcagtaattgcagtatttcctctgctgcttttgaacatctggtatcggaaccgttacattacgacatctcgagagcttacccggcttcaaggggtaacaagggcgccaattattgatcactttacagaaagctttctgggtgccccaactgtaaggtgcttcagaaaggaggatgagttctaccagataaacctggacaggatcaattcgaatctgcaatttgtcggcatgtccctttcctacggcatttctctcaattccttggtgtactacacaatttccataagctgtatgatcgagaatgatatggtagccatagagagggtgcatcagtacagtactctcccttctgaggcagcatgggaagttgccgacggtcttccctcacaagattggcccagccgaggagacattgatgtgaaagatctgaaggttcggtatcgtcaaaacacgcctctaatcttgaaaggcattactgtgagcatcaaaggtggagaaaaggttggagttgtgggaaggactggcagtggaaagtcgactttggtgcaggctttattcaggatcgtggagcctgcagatggccatatcatcatcgatggtgtcaacatctgcactctggggcttcgtgatctgaggtctcgcttcggtgtgattccccaagaacctgtgctcttcgaaggaactgccctcgagtgctgccagctaaaggatatagtagcctcaaaaccagagaagcttgatgcactagtcgccgacatgggggagaactggagcgtagggcagaagcagcttctgtgcttcggccgagtcatactgaaacgcagccggatcctcttcatggacgaggcaacggcttcggtcgattctcaaacagacgcggctatccaaaagatcatccgcgaggagttcactgaatgtactgtcatcagcgttgcacatcggatcccgactgtcatggacagtgaccgtgtcctggtgttggacgcaggtctagtggcagaattcgacgcaccctccaagttgatgcggaggccatcactctttggtgcgatggttcaggagtacgcaagtcgctcatctagcgtgaaggaaaccgttggatga

SEQ ID NO: 8944 - DNA, 183 bp, Zea mays
  Peptide Sequence Number=SeqID_50723
gcgttcgaggacgggctggatttgcaaaggcagatgaggcttggctggacaggtgcgggggagaggctgtcgcgggcggcggcagggtcaggcgagatttgtggaggcgggggcatgacggttagcctcaaatttctacaacagtggatgtggattcgagtgctgggcagacgcagtagctag

SEQ ID NO: 8945 - DNA, 1100 bp, Zea mays
  Peptide Sequence Number=SeqID_50724
atgacggacggcagcgacgagtacaagcgcgacgagtcggtgatcctgctggtcatcgtctccctcgccgcgctctcgctcctatccctcatcgccgccttcgcctactactgctacattacgcgcaaggtctcccgccgccttcagtcactccatctccccaaacgttccagctctcctcctcctcctcctcctccccgggctctgccgccgccgcaacagcaggggaaggacagcccgttcagcagctccgccagcgatggggccgctgcggcggcggcggcgatgtcggttgtggttgctggggagaggggcgtgcaggtgttcagctaccgtcagctccacgcggccatgggcgggttcggccgggcgcacatggttgggcagggcagcttcgggaccgtgtaccgcggggtgctccccgacgggaggaaggtcgcggtcaagctcatggaccgcccagggaagcagggcgaagaggagttcgagatggagaaggtgggcaccgtctactggtatacgagttcatggccaatgggggtctacatgagcatctctacccaaccagagactctgcctgataatgccaaaagcaccagttcctgtggtggaatctcaaaattggactgggacacaagaatgagaattgcacttgaggcagccaaaggtttggaatatcttcatgagcgtgttaatccacctgttatacatagagacttcaagagtagcaatattctcctggacaaggacttccatgcaagagtttcagactttggtctagccaaacttggatctgatagagctggtggccatgtctcaactcgagttttgggcacacaaggctatgttgcaccagaatacgcattgactgggcatttgactaccaaatcagatgtgtacagctacggtgttgtgcttttggaattacttactggcagagtaccagttgatatgaagaggcctcctggagaaggtgttttagtaaactgggcattgcctatgctcactgaccgagaaaaagttgtgcggatcttggatccagcattggaaggtcaatactccttgaaagatgctgtccaagtggctgctattgctgccat

SEQ ID NO: 8946 - DNA, 540 bp, Zea mays
  Peptide Sequence Number=SeqID_50725
atgcaccctagcgccgaggtccctgttcctagacctcaaacctaccactcgtactacctccgtaaccctagttccaacaatttggtatcggagatgccaggttccgacgatgtgctgccaggatcaacaccacccaccacctccaccgtcgccacaactattgatgcgagggctgctgccaccaacccaatttcacaggcggacttcatggcattccatcagctaatgatgcagcagttcgccgccctcaccgccgccatcagtggcatgttcaacatgccatccaccaccaccaccatctttcccttcccatctgccacgacactcgttccatcgccgatctctgcctttgtgccatcagcgtcaaccatacctgtacccatccaacagatcgccttcccacactctccatccttgatccccagctttcccgaggatgctcttcctacacaccatcaccctgctgcaggcgccatcaccaccaccaccacttccacaaattatccttccccacgttcgacgggaaagatgatcccgtga

SEQ ID NO: 8947 - DNA, 564 bp, Zea mays
  Peptide Sequence Number=SeqID_50726
atggtgaaatattcgacggagccgtccaaccccaccaagtccgctaaggccatgggccgtgacctacgtgttcacttcaagaacacacgtgagacagcttttgcccttaggaagttgtcactcaccaaggccaaaagttaccttgaggatgtgatcgcccacaagcaggccatcccgttccgcaggtattgtggtggtgttgggcgcactgctcaggctaagtctcgccactcaaatggtcagggacgctggcctgtcaagtctgctaaattcattctagaccttctcaagaatgcagagagcaatgctgaggtctacaattctactttgcgctgtcagagctatctttgcatctataatgtgaaaggacttgatgtggataccctctatgtgtcgcacattcaagttaatcaggctcagaagcagcgacgcaggacataccgtgctcatggacgcatcaacccttacatgtcctccccatgccacatagagctcatcttgtcggagaaggaagaaccagtgaagaaagaggccgagtctcagatcgcaaccaggaaggcttag

SEQ ID NO: 8948 - DNA, 882 bp, Zea mays
  Peptide Sequence Number=SeqID_50727
atggcaggagcagaggttgccaacggcgtgcacgacggcgccctggatttggaggaaggcagaggaggcggagtcgatggagcggggtgtgagagctcggagcaggacggagccggtcgcccgccccatgttctccgtgccgttcgtgcagaaggtagctttcttgatggtttgtgtgacatcctggcggaggcgttggggacctacttcctgatcttcgccgggtgcgcggcggtggcggtgaacctgcggacgggcggcacggtgacgttcccgggcatctgcgccgtgtggggcctggccgtgatggtgatggtgtactccgtgggccacatctccggcgcgcacctcaacccggccgtctccctcgccttcgccacctgcggccgcttcccctggaggcaggtgccggcgtacgcggcggcgcaggtcacgggggccacggcggccagcctgacgctgcgcctcctgttcgggagcgcgcgggagcacttcttcggcacggtgcccgccggctcggacgcgcagtcgctcgtcgtcgagttcatcatctccttcaacctcatgttcgtcgtctccggcgtcgccacggacaacagagccatcggcgaactcgccggcctcgccgttggagccaccgtcctgctaaacgtgctctttgccgggcctatatcaggagcgtccatgaacccggcgaggaccctgggcccggcgctcgtcgtgggccgctacgccggcatctgggtgtacttcgcggggcccatctgcgggacggtggccggcgcatgggcctacaatctcatacgcttcaccgacaagcccctgcgagagatcacccagacctcctccttcttgcggagtgtcaggaggagctcgagctga

SEQ ID NO: 8949 - DNA, 213 bp, Zea mays
  Peptide Sequence Number=SeqID_50728
atggccaccgggcggcccgtacgactcgtgctggatgcctccctcctcctcgacccctcctccaccagggaggcggcggcggtggctctgcggcccggggtagaggagctgttgcggcggttgcgctactccaacctgactgtgtgtcgttctttcaaggaaatgctctcgctgatagattgtcccaggaaaacgaatcaagctgattcatga

SEQ ID NO: 8950 - DNA, 495 bp, Zea mays
  Peptide Sequence Number=SeqID_50729
atggttcgcggatcgctcggcaagcttgcatcgcgcgccctctccgtcgccgggagatggcagcaccagcagctccgccgcctcaacatccacgagtaccagatagttgttaaaagtcaaatccttgctggtggccgagggctgggaactttcaaaagcggattgcaaagtggtgtccatattgttaaggctgaggaagctgaattgattgcaagtaaaatgttaggcccagattctgataacgaaacaaactggtccagagggaaagattgtgagcaagatgctaagaacattacaaatgttctccatcatgtgggttctccatctttcatttaccaagttttggcccttctgcacttgagttatttgcaatatttccttgcatatcgaagatttctagagattgatacttcaaactcattattgcttgcagcaggggaggaaaacactatagttgacctcaatgttcaaaggatggccagtgatgatgcatga

SEQ ID NO: 8951 - DNA, 240 bp, Zea mays
  Peptide Sequence Number=SeqID_50730
atgactatacccacgggtaaaattttgtacccgtgcccatacccatcgggtatcgggtggatatcgggtatctgtcgggagaggactcacccccaccacccacccacccgaccgtctccgtcaaagtcgcaagtcgcggcatttttcgcgcgctacgcggttattagtaatcgaaccgtcgacctcaccctcgcgtgtactctccactaccactccgcttatggcatgcattgtgtctag

SEQ ID NO: 8952 - DNA, 189 bp, Zea mays
  Peptide Sequence Number=SeqID_50731
atggaaattattcaagataaaccgaaagcgaagcaccacttgcgtgtagagaaggcccgaggctatatacgaagttacttgtccgagcgtggtagagtctgctcaacaccaaacttcgacgactgcgccggccgtcggccgtcgctgccgccctattttgaccccatcgccggcgacgataatcgccag

SEQ ID NO: 8953 - DNA, 327 bp, Zea mays
  Peptide Sequence Number=SeqID_50732
atgtggccgaacgccgccgcctctgcgcacacgcggaccatccggctcagcacagagaagacttcgctcctgtcacagtcgcagaccatccgcgctgtcgcagagagcatcgtcgctggagattcaagagatcacctcgatgtctttcccagcaacatcattgagccaactatggagattctgtcggctgaagatcagctggaattcgaggagcaccaagaacagctgattaaggagacccacacaaatggtaggattggtaaatgggcttatgcatttatagaatatgatttggcttatgaatcattaaaatctatgaaaagctag

SEQ ID NO: 8954 - DNA, 438 bp, Zea mays
  Peptide Sequence Number=SeqID_50733
atgcatgtgcggcctgaagcgttagctctcgtcgcctgtgcttatttatacattgtatatctatacaactctattaagaccctaaagtgcttcgcggcatcgttgcgccatcgaatcaaggaccagacagttgccaatgtgcacctcgcggaggaggccaacgtctacatcgaggacgacatcatcgtcgtcgtccgcccaaacatcccggtttcatcaccttgctctgttgaagttatagaattttcagcaaggatatggagtacaccccctacacaacaagctcctatgtatctcacatctcgctgctcgaggaagttcttggctggaggttttggctttacggagacttcatgttcatctgttttgtcaactgcacctgaggatcaaccagcagttagcgactgccttgaatggtcccatgctgtcagacattag

SEQ ID NO: 8955 - DNA, 1647 bp, Zea mays
  Peptide Sequence Number=SeqID_50734
atgggctgctcctcgtcgaagctggacgaggaggcggccgtgaagacctgccacgaccggaagagcttcgtgaggaaggcgatcgcgcagcgggacctgctggcctcctcccacgtcgcctacgtccagtcgctccgccgcgtctcgatgggcctcttctactacttcgccgaggacgagcacctccaccggctgcaggagtcctcgtgcgtgcaccgcccgggatcgcccgacaaggttctcgtcgtcgtcaactgcctgaggccggcgggtgctccggtgcatccggtggtcgagcagtgggagccgactgatgaggccattgaggctgccacgatagacggattcttcggggcggatggcccgttcctccgtcctccgtccattgatccgatgtttggcccatcggtgtcgccgcagccgcggagatgggacctcttctgggaccctttctcttcgctgaccgatcatccgagttacagcgtcgaggaggtgagagatgatcaagaagacgaacagataccagagctggaggaagagagtgacggcggcggcggcgactgtcaccgagaaggtgaaggcggagcagaggaggaggagggtgaacaggcagcagtagcagcacaggtggcggcgccgtcgagggagcaggtggggagaaaggtggaccatgtgagcaacgagctgagggtgctggcaagcgcagaaatcgagcagcatggcgcgcctggcttcaccgtgtacgtcgaccggcccccggcgagcatggcggaggccgtgagggacatccaggggcatctcatgaagatccttgacactgccaaagaggcctccgtgctgctggaggttgtcccctaccagaggagagttcaaccacctgtcccgagggacgacggcgaggagcagggcgcccccgaggtcccgccggagccgttcgagctgttccagagccacaaggagagccttgacaggctctacgagtgggaaaagaggctgtacgaggaggtcagggcaggggagcgagtccggctggcctacgagaagaagtgcgcgctgctgaggagccaggacgccagtggcgccgagccgttcgccatcgacaagacgagggccgccgtcagggacctccgcaccaagctggacatctccctcacatccgtcgacgccgtgtccaggaggatcgccgcggtgcgcgacgacgagctcctgccgcagctcctgcagctcgtgcgagggttggcgaggatgtggagagtgatcgccgacgcgcaccgggtgatgaagcgcaccgccgacgactcgatcgcgctgctcacggcctcggccgccgcggccgcagccgcccggcccgacccggccgtggacgtggagccggcggccagggccgtggacgcggccgctgaggcggccgccgccgtcgcgtcggccgcgaagcggcagcgcagcggcgggggcgaggagtggttcaacgaggacgaggggaagaagaaggtctgcgtggggctcgccgcggcgctgggtgccatcgctgaggccggcgccttggccgtcttcgggtacgacgagctgctgctcgagatggagatgggtgcgagggaacgagagcgcgagatctccggcagggacgacgaatgcttcaatccgtaa

SEQ ID NO: 8956 - DNA, 432 bp, Zea mays
  Peptide Sequence Number=SeqID_50735
atgggggcggcgccggtcctcgtcctgctgctgctggtcgccgctgccgcattgccgcggcgggcaagcgcggccaccgacgccggcgacggggaatcgaacccaggacttggaggtgctactcggaagtccttaaccactaggctagagcccctttcgctgctggaagtgaaaacactattgaagatgacagaaaacagcgaggaggatgcacttcttggtggcggacatgatcccacttctctaactcaagaagatgatgaagaaatagaggagaggatgaatctggagcctggattgaaggagtgggtctttcaaattgtatattgctttggatggctgaatgctgatgtgctgcaaaccgtgcttttgatgatgacaagtgacaagctgtctttcgtagcagttaccatcacgacctttcagatttaa

SEQ ID NO: 8957 - DNA, 1338 bp, Zea mays
  Peptide Sequence Number=SeqID_50736
atggactctctcctcgccagctacgcctcttccgacgacgacgctgatgaggccccacctgctcctcctcctgctcattcccccgccatcgccacttcctccggtggcggcgcaggcgggtttttctcctcgctcccgcaacccaagtccgcccccgcaccgctcttctcctccctcccggcgcccaaatccacccccacgccgctcttctcctctctctcggcgcccaaatcctcccccgcccctaaccccaccttctcctctatcccgccgcccaagtcttccggaggaaaccctaagcgcgtcgtccagtatcgcccgcagccgatccggcagcccacaggcgacagctccgacgacgaggaggacgatcccaagaagcgccgcgcgagcaacaacgaggcgcgcttgccgcccgtgtctgctggctcgggtcccgtgtcctcgttcctcccgcctccgaagcactcgctcgggctcggcgccggctctggcgcgggagcgaggaggtcggcaatcgatacggctgcgccagagaagctaaatctcggcaccgctctgccttcaagctcggttgccaacacaggagccccggaaaggcctgacaccggcgcaaccgacgacgacgattcggaagatagtggcagtgatggtgacatgcctgcgccggagctggaggaggagcatgaaaaccagcaggcttttaatgctgcaaccggggagcagcagcaaagctatgatgctggagctgggagcactagtggatatgaaacatatgcgtgggatccaaaccactatgcgcaacacggtgcttatggttgggatcctagtgccagtgcgaattatgaggatggaacacagtatgccgcatatgaaagagggcaaagtgcagggtatgttcatgcgcatggaggggagcatgccagtggatatgaccatgttgcggcagtgccatatggagtagattatactgctggaggttatggtcatgaggtagcagcgacattgccaccggtgcatgaaccgatattgccaccagagatgggtaggagtggagggaagagaggtagaaatgatacgccggtccagattttagaagtaaatcaagcagagctgatgaagaacagaccaaagcaggataagtctaagctcacggggttggccttcggtcctagttatcaggcggcaccagtcagaggagaaaggacgcagtggagggagagctgcgggggaggggaagaaagaggtgctgctggcgcggggttggaaacgaagagatgctggcggcagggggagaagaaaggcatgctgtcggctgcaaggagacttgatatttaa

SEQ ID NO: 8958 - DNA, 189 bp, Zea mays
  Peptide Sequence Number=SeqID_50737
atggcccaagggcacatttccctttcagtaagtgccgatatcgagcagatactgaaggaagctcaacaccgatggttacgccctgctgaaatatgtgaaatactgaaaaactacaggaacttccgtattgctctagaaccaccaaacagaccaccaagtatgacatttattttctatgctgaacattga

SEQ ID NO: 8959 - DNA, 303 bp, Zea mays
  Peptide Sequence Number=SeqID_50738
atgccgcaagcggcgggatctagtgcctgccgccggctagatcgggctagggctcgcgcgcggcggtggtgggagacgacgaggtggaggtggtggcctggtgggagtgttctagtggaatgtgagaggaaggagagacagagggatttaagcagtggccggccagtgggattaattaaggctgagtttttaaagaaccgaatttctacaagaaccgaggaaccgaaccgaaccgaagaaccgaatgtccaggcctacgctgaagaggcgaccgggcatcgaaaaaacagagaagaacaatag

SEQ ID NO: 8960 - DNA, 1092 bp, Zea mays
  Peptide Sequence Number=SeqID_50739
atggtggtggtcgaccaatctgcgctatcctcgcgtgactctgtgcagccgcgacctgtcgtgcgcccgacctatctgactccagcatctcgcttcgccgcctggggcgagccacgccaggccacattatcgctaactgcatcacctccggttgggtattgccttgttgggtacacccgttcccttgctgttatatctttttgctccaacaacgcgtcaaccgaccacaactacgtcaaccttggctatcttctgcatgtcttcaaccatggctattgcacccttatgctcggctacctcgacatcggcacaaagggctatcaaatgacctccttgttggtagtatgggggaggatttcgatggttgatgcagagaagaggctgttagcaaatgcattggaagatgtcgataatcaattttttgtcttgctttctgacagcttcctggatcctggcccacatggaactggaaggtattccatggaaatgcttcctgaaatagaacagagggacttcaggaagggtgcccagtggtttgctataacacgaaggcatgctttattgattctggctgacaacctttactacaataagttcaagctgtactgcaagccagcagagggacgcaactgtattgctgatgagcattatttgccaaccttcttcaatatggtcgatcctggtggaatagctaactggtcagtgactcatgttgattggtccgagggaaaatggcatccaaggtcatatagagctgcagatgttacctatgaactcttaaagaacataacgtctgtcaatgagaatttccgcattacaagtgatgataagaacgccatatgtttgacgtcacttcatctaccctactttgattctacgactaacatcttcattaatatcccaacattgattttaaataccgaaagaggcttaacacagagttacgggtacagggccagtgatgtaattctgattgaacttacaaagtccgtaactcttacaacaaaatgtgcaacaaaaattcacgcatctcaattctacagctcccagcctcccacacaggcaaccaagccaattctttctgaccattga

SEQ ID NO: 8961 - DNA, 531 bp, Zea mays
  Peptide Sequence Number=SeqID_50740
atgggtgccgctggtgacgccgcggcagcgggcacgcggacgcggtgcgagctctgcgggagcgcggcggccgtgcactgcgccgcggactcggcgttcctctgcccgcgctgcgacgccaaggtgcacggcgccaacttcctggcgtccaggcacgtgaggcgccgcctgccgcgcgggggcgccgagtccggggcgtcctcgtccagcggctcctgcctgtccacggccgactccgcgcagtcgagggcggcgccgccgccgccagggagagggaggagggcggaggacgtgctggagggggggtgggccaggaggaagagggtcgcggcggggcccgcgtgccgtcgtcgcgtcccgctccgcgtcgcgatggccgccgcgcgctggtcggaggtccgcgccggcggtggagcggaggctgcggtgctcgcagttgcggcgtggtggatgacgcgcgcggcgagagcgagaccccccggcggcgggcgctccggacctggaggagggatgggccgagtgctctcctga

SEQ ID NO: 8962 - DNA, 246 bp, Zea mays
  Peptide Sequence Number=SeqID_50741
atggttcaaatgcatataagagaagaagagactgtgatctgtatctatggacagaaccttgatttcgtgttggtggaagttagtcttaacaatatggtaccagagacttcgacaaactatgatttgttaaatcacatactgaatgaacttagagtccctcttatcgcaatatgttcttatgacgatgaagttgcgctttctaaatatatgaacctggccacctgggtgcatgcttccatgtgctga

SEQ ID NO: 8963 - DNA, 423 bp, Zea mays
  Peptide Sequence Number=SeqID_50742
atgatcattgcggtgctgcgaggaagcggctggggtcgattggagcaaatccggtcgttgcgtggactggaattcctcgtcggagaacggattctgccgcacaccgtggacgcctccgcatggtccttagtcctcggtgagcacctttccagagtgtatctcatcgttcgtgctgcccgccactacattaggatagaagttttagcgcgcgaatcgcgtttgggttgttcgccggtgatggcaccgccgccggtactcgggtgccgccgggtcatggcgaaagctgggagggtagattgtgaccgtcagatgcgtcgttcgtggttaggaatagagcttgtgtaccccttcgcctgggttgatctgcaccgtcggatctcgtgcgggcgaatctggggccttcagaaattcataactaaataa

SEQ ID NO: 8964 - DNA, 135 bp, Zea mays
  Peptide Sequence Number=SeqID_50743
atggaccttttcaagtactcaagtgcattaacgacaatgcatatcaaatcgatcttcccgacacaagtagggtccgccaacaatggcaaaaacattaagggccagttcttcattgcttttgagaagtgcttttga

SEQ ID NO: 8965 - DNA, 447 bp, Zea mays
  Peptide Sequence Number=SeqID_50744
atggcgatggagcaactgtatggggtttacgattcgtcgtataacgagcttcaaggttggatagctgcgtacgagttagagccacatattttccggcaaagaatgatccgacttgagagtgacatggaggggcagacaaacacatctttcccacaatggttgggcacaatggagccgtggcagtgggctcaaagttttgacgaggactttcgttatggccaaatgaccacaaacttagtcgaggggatcaacgctgtcttgttgaaaacacgtcatcttccgcagcacctcttctttttcttcttatttttctccattcagctagacagagctcgtgtttataatatgagtagtcccgccaatcagtatggcaccattggtgccgccaaccagtatggcactatcggtgccgccaatcaaaaaccctccaccaggaaaacagattga

SEQ ID NO: 8966 - DNA, 456 bp, Zea mays
  Peptide Sequence Number=SeqID_50745
atggagcaaaatgaagatgtcaatgcatctgatgaagaacacggagctcaagaaccatggatggtggctccaatatcatacgttgatagtgaatcgactatgggtgggattggtatcgacctgaatattacgcccgatgttgatatggttggtggtaaagaagaaggtggtggcgatcattgggatgaagaggtcgatagtgacggtgatctcgatgtggacgatgtacctgatgatattgacgatgaagatgtcaacaacgatgaaggcattaacgcttcttcggtcgaggagcagatgcggcgtattttgatacacaataatcctgggccacacatgtcgctcatagaccccggcgcagcgtatgtaactgagttcccggagtaccctgaaaaagtttatcctcacgggctggccgtaacatctaatgatgaggagttattcataggccagtga

SEQ ID NO: 8967 - DNA, 1038 bp, Zea mays
  Peptide Sequence Number=SeqID_50746
atggccagacgtctagctggatttctggttctcttacttgtagtgtcgatctgcgaagccgcttttctttttcaacccatctccgattctcatcgatctgccgctcttgaactcttcactcccgaccatggatcattcaaaaggtgtagacaagggacctatgagaatgaggtttttggaggtatctcatttgatataattgatctaaacagcttggaagaaacatatgaggcactaagaacatttcagattcttggaattgaaaagaagcctgatttaacagctacagcttgccgctcaatttctgaaactgttgggtcatcttcatcgactgcaaaggatcttttctatgctttaaaagcaaatagtatagcggaatgcaagattgacaagaaagcttctaagggcattatttcaagacttaatgctgccgtaagtggtgcgagttcattgcttgacttctactattcagtaggaggtttggtacttatcaaggatcaaagttctgaagctgatgttcatcttgctgatgctgagggagtgttccgctctgtcaaggctttcagccagagtgatggcaggtggcgttatagttcaagtaatcccgaatctagtgcttttgctgctggaattgcacttgaaacgcttgctggaattgtttcgttagcatcttcagaaattgaccaatctttgattagtactctaaagaatgatataatcaagctttttgacagcatcgagaaatatgatgatggggccctttactttgatgataaacttgttgatggtcatgaataccaaggtcctttatcaaccacctcatctgttcttagaggcctaacagcatttgctgcagtgactgctgaaaatctcaatcttccaggggacacaatgcttggattagctaaattcttccttggtatttgtgttcctggtgatgccaaagatttcttcaaccaaatagactccttagcttgtttggaaagcaacaggcaaggctttgctttaggcagttttaatgtattttcatttatttaa

SEQ ID NO: 8968 - DNA, 651 bp, Zea mays
  Peptide Sequence Number=SeqID_50747
atggtcgatctctactgtgagaatgggagtgacaagaatgcaccgattcacttatttgctgagttagccggtatggagcaaaatgaagatgtcaatgcatctgatgaagaacacggagctctagaactttggatggtggcttcaatatcatacgttgatagtgaatcgactatgggtgggatcggtttcgacttgaatattacacccgatgttgatatggttggtggtgaagaagaaggtggtggcgaagaagaaggtggtggcgatcattgggatgaagaggtcgatagtgacggtgatcccgatgtggacgatgtacttgatgatattgacgatgaagatgtcaacaacgatgaatacattaatgcttcatcggtcggggagcagatgcggcgtattttgatacacaatagtcctgggccacacatgtcgctcatagaccccgacgcagcgtatgtaactgagttcccggagtaccctgaaatagttcatcctcacggactggccgtaacatctgatgatgaggagttattcataggccagagattcagctgtaaagaagagtgcgtatatgccattaaacggtacagtatgaacatatccgtggattataaagtcgcagtgtctactccgacaatatatgttgggtag

SEQ ID NO: 8969 - DNA, 684 bp, Zea mays
  Peptide Sequence Number=SeqID_50748
atgggcggcaccggtggtgccattcccatgggcggcaccgatggtgccattcccatgggcggcactgcccttataatggggaccattcggctgctcctaggagagtcgccagaggacgaagagtcaaatttttcgggcttaaaatttacatggctgaaagccaaatttggacaattatcagcgaccgccactgaagtgttgtaccggaagctttgtcgggtgacaaacccggatgttgtagacatgggcggatgcctcacactgctgcagtcttgggcgctctatcggatgccatttttggcatccgttagtcaccaaccgtatgtttatccactggtgaagtgttcgtccgggtatcgggaggtcgcacactatcccgatataccgacttatgatcgaacagtatacccgggaagagggggcaaatacgcttacgagtttgaactctttggatcctacccgccgcaatacggcatgcccggcccgtccgacctgtatccgcagcatcatgggactccttccgcttcaagttcgtcggtaccaaacgagccacaggattttttctccccatttgccacacccccacctgcgccgaatgatgatgttggttgtcgcccagaacgtgatcgtcgatctccgaataggtatacccctaggaccacaccatcgaaccatcaaatttag

SEQ ID NO: 8970 - DNA, 595 bp, Zea mays
  Peptide Sequence Number=SeqID_50749
agaaaggggaaaagcgaaaaagctgaagaatagaaggcaagcagaaacagttgttgctgacaccaagactgtcgccaccaccgttgttgccgctacacccgacatcaatggtgacattggaaacattggtaaagctgcaggggggctgggcagataccaccccccagaatcgcctcaggaagaaagggttcgatggtgccaccggtgggagaagcagaaagaactggcaatgcatgctcaatcttcagttgctgttggcatgaaaggtgccaccaaggccatgtcagccatgaataagcaaatggccccagaaaaacaagcaaaggttattcgggaatttcagaagcagtctggccagatggatatgactactgaaatgatgtcagatgccatagatgatgctctggacgatgatgaggcagaagatgagactgaggacctgacaaatcaggttttagatgaaattggtgttgatgttgcctcacagttgtcatcggctcctaaaggtaggattgcaggaaagaatactgaaggtgttggcagttcgggtgttgatgagcttgagaagcggttggcagctcttagaaatccatga

SEQ ID NO: 8971 - DNA, 1278 bp, Zea mays
  Peptide Sequence Number=SeqID_50750
atgacggtagctgagtccgtggtcaagcttggtctagggaaagataaacttgggtcttccaagtccgaggaaaggggcgcaagtgaaatggatcacaaggaagatattgttgatagcaatggtaacgacgacaatggtggtaatgggaaaccacgagttgggaagaagaaacctaagaggaaaagggacaagcgaaaatactttctttgtgacggtccacacatgttaaagaaatgtccgaagaaatccgagcttaaggagaagccggtgggtgaggccttggtacttggttcgagtgcaagggatgtcgaaaccaaggaggccgaaagtgagaagaagtcagtggagtgcttcttatgtcatggtccgcataggttgcggaagtgtccgaggaagtctgtcatcgaagggaacgatggagcagacaatgagcccaagaagcttggttcgagcaagggaaaagccgaagccaagagggcaaagaggagcaaaaagaagcgagtaaagtgcttcttgtgccgtggtccgcatgagttgcggaactgtccaaagcaagccggcgtcaaaagaaagacaacgtctgagcttggtgagtcatcagagggacttccacccaaggaagaggtgagtttgtcatcggaattagaggaaagagttacgatgaaaacagtgaagttgggaccaatgaggctcaagttgagtaaagcgtcaaagttggccgagtcatggacaaggcttccacctataggagaggtgggtggtgcatcgaacttcaaggaaaaagaagtgatgcatgtgggacagttgaccagagtaaatgcaaaggtacattccaaacactgtgatagtgttttgcattctaacttgttgacttggcaagaacgtatgggccctttcgaagttcttgagcaaagaggccgagagactgtgggcaaagtgaagccaagtgtggtgaatcaagaggattctgttcgagcaaagttagaatgtggacaagagagtgacataacttcttgtcatcgagatgtacaaacgagtaggacggttcgagtgaagaagcgacgtaagccgaagcaaaagtcccgaaggaagggaaaggctaaggcgttgagacgagaccgaggcgaatcaagtcagtgccattcagaagtcgcaacgaggacgttgcgagaatgggtaggggagaatgtcatgggccgcagttcaaagcccgtgaccatcacaccaaatgcatccaatggaggtctattgcttagatggggatcattttgcctatga

SEQ ID NO: 8972 - DNA, 1251 bp, Zea mays
  Peptide Sequence Number=SeqID_50751
atggatcatgtgattggtggtaagttcaagcttggaagaaagattggcagtggctcttttggagagctttatttgggggtaaatgtgcaaactggagaggaagttgctgtcaaactggaatctgcaaagaccaagcatcctcagctttattatgagtcaaaattgtatatgcttcttcaaggaggaacgggtattccccatctcaagtggtttggagttgagacggattacaatgtcatggtaattgaccttcttggacctagtttggaggatttgttcaactactgcaacaggaaactttccttaaaaacagtgttgatgcttgctgatcaaatgattaatagattagaatatatgcattcaagaggctttcttcaccgtgatataaaacctgacaacttcttgatgggcttaggacgcaaggcaaatcaggtatatgtcattgactatggtcttgcaaagaagtatagggatcttcagactcataagcacatcccgtacagccttccctggcaggggttaaaagctggtacaaaaaagcaaaagtatgataagattagtgaaaagaaggtatcgactcctattgaggttctttgtaagtcatatccgtctgagtttgtgtcttattttcatcactgccgatctttgcggtttgaagataaacctgattattcatatttgaagaggcttttccgagacttgtttataagagaaggttatcagtttgactatgtctttgactggactgtattgaagtacccaaagattggtggcagctccagagggcggcattccagtggaagggcaggtttagctgctggaccaaccattgaaaaacccgaaagaatctcagtgggaagagagattcgggatagattctccggtgctgttgaagcattttccaaaagaaatatttcaagtaccagtcctcatcttgatcattctagacacaagactgttgatgatggggctttgtcaaagcatgcgctccctgattcagataaaagacgcagttcttctcgatatggtagcacttcaagaagagctgtagtagcaagcaggcctagttcatccgttgaagccaacgacgcaccacaaaaccgactaacatcaagtggtggccgcatgtctaccacacaaagaattcaacttgcctttgaatctaagacatctagccgagccactcctgttagaggaagccgtgatgatcatcctcttagaagttttgagctcctctcgattaggaaataa

SEQ ID NO: 8973 - DNA, 693 bp, Zea mays
  Peptide Sequence Number=SeqID_50752
atggagaaagaggcgaggaaccactaccgcacgcggggatcctcgcgcggcagcggcggcggaggcaccgctgccgagcgcgacctgctgttacagtggggcaaccggaagcgcctgcgctgtgtcaaggtgcagcgccgcgacgtcgaggccgccgccaccgcggccgccgagaaggccgccatcagccagcgccgcgccgcggccgcagccgcagccgcgcagcaccacccaaccggccacacccaccaccgcgttctcaggaagtcagaagagtttgcaatcatgaaattgccagcacggcaacgacagaatgacaggatccacacagttgcttcaccagacagggagtgccctggtagaggtaacaacaacaacggagttccacagacctatccggatgacaagaaaggctcttcatcagggagtgaggggtccatctggccgaagtttgaaatcaccctgtcaaacagggaaaaggaagaggatttcctggtgttcaaaggatccaagctgcctcaaagacccaagaaaagagctaaggtcatccagagaaccgtcaattttgtatgcccaggaacgtggctatgtgacttgactcttgaaagatatgaagtccgggagaagaaggtttccaagaagcgccccaggggattgaaagctatgcacgacatggacagtgactcggaataa

SEQ ID NO: 8974 - DNA, 441 bp, Zea mays
  Peptide Sequence Number=SeqID_50753
atggccacggatgccttggccttgatcgatcatttggggtggaagaaggctcacgtcttcggccactccatgggtgccatgattgcttgcaagctagctgccatggcacctcacaggctatgttcgctggcattgcttaatgtcaccggaggtggctttcagtgcttcccaaaggtagacgcgcagatgctatctcttgcattccgtttcttaagggcaaaaactccagaggaaagagcccttgtggacctggaaacacattatacgaaggtgaacaatgcacttatggatttgataaaggccaccaaatctgagataaaacctgaagagtggtcagcccagcccgagaacacgtcgggcatgatactcatggggtttgaactcatgaggaacattgtaagggtgatgaagccagtaagggttgcagcaattgagtcgtaa

SEQ ID NO: 8975 - DNA, 489 bp, Zea mays
  Peptide Sequence Number=SeqID_50754
atggcggtgatggagaagctcaagatctttgtcgttaaggagcccgtagtcgcggcctcctgcctcatcgctggattcgcagttgtccggccaatcctggattcatggcagaccgcggaacaagttcctccacctcttctaaatgataatgtttatgttagcagccatgttcttgatgaaggtgatgaggagcacaggaaaccacagaacccagcaaccccctttggtcgaaggacgtcgcccccatctgcggcgctggagcgtggtgaaaagcgtcggcggcggtcgacatctcccggcagcgcgtgcttgtcctcggtgaaacacattaagcacaagtcaatggacaaagaccccctcgacatggtcgagactgcagttcaagtgattgaggcacatgtcgacatcattcgcagtcttgtaactgatggggttgtcgaaactactttacctgagtcggtctacacacttaagaccactttgttttag

SEQ ID NO: 8976 - DNA, 360 bp, Zea mays
  Peptide Sequence Number=SeqID_50755
atgaattcgacagcatgcatcgagatgatcgaaaaattccaactggacagagctaagtttgaagaacaagctgctacatctgcaaatgccgagagggaagacctaaaagaatatagacaaaggaagatgaagctctctgaggacatgttcaagcttcagcagcaggagcgcgatgatcggattatgaatatggatttggacaaggtcgctccatacgcaagaaattactacttgtacatgcagaaggccattttgtctaggttgccaccacctgaggacattcagcggcgttgtcgaagtaataagacttatggaaaccttgagttgagtcacctggcgaacaacatatctgcaaagtaa

SEQ ID NO: 8977 - DNA, 606 bp, Zea mays
  Peptide Sequence Number=SeqID_50756
atggctataaatcaacggactgtccggtggtgcaccagactgtccggtgagccatcagcgcccgcgctcaagactccggcgacaaactcgtcgctctcgggaaaaagcggaggcgccgcggctaaaattcaccggactgtccagtgtgcatcggactgtccggtgagccaacggtgctcgcggccaatgatcggctgcgcaatcagcgggcgacgcgtggcctgcaccaacggtcggttggtcacaccggactgtccggtgtgcaccgacagtgtccggtgcgccaatgggaccgaagggccaacggtcgactacgccagaaaggaaggagatcaggcaccagacaggtactgctcatgtccggtggtgcaccggactgtctggtgcgccacccgacagaaggatcacctattcaccccctctaggtgctctcagggagttctcaccacaaatcaccaagcgactagcttagtccacggtagatcgtggctccgcagtggacccacctgccagcgagttaacctgatgagcgcgggcgtggcagaacggctgggaagagggccccacctggcggtcactaggacggtgaagccactggactggtag

SEQ ID NO: 8978 - DNA, 396 bp, Zea mays
  Peptide Sequence Number=SeqID_50757
atgggcgcgagtaatcgaactatggcttaccgtttggtgccttttgctcaattatatttacatgtgataatgtttacaaatgtgggtgtggagggaaaaatcctgagtaacacctggggtgttacaggcttcaccgtcctggtgaccgccaggtggggcccccttcccagccgttctgccgcgcccgcgctcatcgggttaactcgctggcaggttgtcttttacctccgctacatgtatcaccttccgtatggagtttcgtgggcatggttgcgagttcgggggggctccggcaatggcgtcagccgcgagagggccggtggatccagatggcagggtgatggaggggaagaagaatgcgggaccgtggatccagtgatgggcggcccagattag

SEQ ID NO: 8979 - DNA, 2025 bp, Zea mays
  Peptide Sequence Number=SeqID_50758
atgaaggagtccgaccagctcgcgacctctttcatcacacccttcggcatgtactgctatgtcaccatgccgttcggtttgaggaatgtgggcgcgacgtaccagcggtgcatgaaccatgtgttcggcaaacacattggccggacggtcgaggcctacgtcgatgacatcgtagtcaagacgaggaaagcctccgacctcctttccgaccttgaatgtgtcttcggggtgccccgaggcatgctcttggggttcatcgtctccgagcggggcatcgaagccaacctggagaagatcgcagccatcaccagcatggggcccatcaaggacttgaagggcgtacagagggtcatgggatgtctcgcggctctaagccgcttcatctcacgcctcggcgaaagaggtctgcctctgtaccgcctcttaaggaaggccgagtgcttcacttggacccctgaggccgaggaagccctcgggaacctgaaggcgctcctcacgaatgcgcctatcttggtgcccccagctgccggagaagccctcctaatctacgtcgccgcaaccactcaggtggttagcgccgcgattgtggtcgagaggcaagaagaggggcatgcattgcccgttcagaggccagtctacttcgtcagcgaggtactgtccgaaaccaagatccgctacccacaagttcagaagctgctgtacgcggtgatcctgacacggcggaagctgcggcactacttcgagtctcatccggtaactgtggtgtcatccttccccctgggggagatcatccagtgccgagaggcctcgggcaggattgcaaagtgggcggtggaaattatgggcgaagcaatctcgttcgcccctcggaaggccatcaagtcccaggtcttggcggacttcgtggctgaatgggtcaacacccagctcccaatagctccgatccaaccggagctctggaccatgttcttcgacgggtcgttgatgaagacaggagtcggcgcaggcctactcttcatctcgcccctcgggaagcacctacgctacgtgctacgcctccatttcccggcgtccaacaatgtggctgagtacgaggctctggtcaacgggttgcggatcgccatcgagctaggggtccgacgcctcgacactcgcggtgactcgcagctcgtcatcgaccaagtcatgaagaactcccactgccgcgacccgaagatggaggcctactgcgatgaggttcggcgcctggaggacaagttctacgggctcgagctcaaccacatcgcccgacgctacaacgagactgcggatgagctggctaaaatagcctcggggcgaacaacggttcccccggacgtcttctcccgagacatgcatcaaccctccgtcaagatcgacgacacacccgagcccgaggcaccctcggctcagtccgaggcaccctcggctcggcccgaggcacccttggttcagcccgagaaggcacccgggggctacacgcacctgttggtcgccatcgacaaattcttcaagtggatcgaggcggtggcgttcttcaccaacatcatccatcgtttcggggtcccgaactccatcatcaccgacaacggcacccagttcaccggcagaaagttcctggacttcagcgaggatcaccacatccgggtggactgggccaccgtggctcaccccatgacgaatgggcaagtagagcgtgctaacgacatgattctacaaggactcaagcctcggatctacaacgacctcaacaagttcggcaagcgatggatgaaggaactcccctcggtggtctggagcctgaggacaacgccgagccgagccacgggcttcacgccgttctttctagtctatggggccgaggccatcttgcccacagacttagaatacggttccccgaggacgagggcctatgctgaccaaagcaaccaagttaatcgagaagactcgctggaccagctggaagaggctcgggacaaggccttgctgcactcggcgcggtactag

SEQ ID NO: 8980 - DNA, 189 bp, Zea mays
  Peptide Sequence Number=SeqID_50759
atggctgatctgtacgacgaggataagggcccgtcgctaaagagccagcagtcgtgccctggcctccgcctcaagccctccattgagatctttaattatcaggtatcttcggaatcgggttatgagtatacaagagtatggtcaggacgaagcctgagcgagacgaaaggcgattatgacgaaggataa

SEQ ID NO: 8981 - DNA, 180 bp, Zea mays
  Peptide Sequence Number=SeqID_50760
atgacgaaggattttgccatgacaacagcattgcccccatacgaggatattgttgcctcagcagcccctgacaccattgtcttcttcggcggcatgtcgaaggttgatgctttgccgaaggtttgtggcagtgagttcaccggaggtgggcgccaatgttggtcacttgttctcaaatga

SEQ ID NO: 8982 - DNA, 1191 bp, Zea mays
  Peptide Sequence Number=SeqID_50761
atgacgaaccaggacgtggtggtcccggacatgggcattgcggcggctgcggccttgccgccccccggcctcttcgcgtgccgcggcgtcgcgggggccgtgtcgtcgctgcggggcacgtacggcagccttggcctccccggcggcgccgccgccgacggtggcgagttccgttcccccgtggcggcggcggcgaatgcgccgccgggtcggaccagctgcaccagccgggtcgtcgaggccatccgcgcgtcgtcgcccgcccgctgccccgccgtcgacgagtacgacgcgtggacgaggaagcacccgtcggcgctgggcagcttcgaccagatcgcggcggcggctaaggggaagagggtcgtcatgttcatggactacgacggcacgctctccccgatcgtcgccgaccccgacatggcgttcatgacccccgaggtgaccgttccgatccgttgtgctcgtcgatttgagatgagggcggcggtgcgcaacgtcgcgaagcgcttcccgacggcgatcgtgaccggccggtgcatcgagaaggtctgcagtttcgtcggcctgccggagctctactacgccggaagccacgggatggacatcaaaggcccaaactccaaggaggacaagacggtcctgctgctgcaaccagctcgcgagttcctgccggtgatcgacaaggcttacaaggctctggtggagaagacgaaggacacgacgggggccagggtggagaacaacaagttctgcctctccgtgcacttcagatgcgtcgacgaaaagagctggagctcattggctgagaaggtcaaggccgtgctccgggacttccccgagctggagctcaccgagggcaggaaagtcgtggaggtccggccgtcgatcatgtgggacaagggcaaggccgttgagttcttgctcaggtcgctcggattcgacgacgaccgcaccaacgtcctgccggtgtacatcggggacgaccggaccgacgaggatgctttcaaggtgttgagggagagaggtcaagggatagggatccttgtttcgaaatgccccaaggagactgatgccacctactctctccaagatcccactgaggtcatggagttcttggtccgtctggggcagtggaatccactgcgatcaccatcgccggcggcgcgcccaagggggcgaaagcagtaa

SEQ ID NO: 8983 - DNA, 192 bp, Zea mays
  Peptide Sequence Number=SeqID_50762
atgaccaccaccaccacgcccacggtggtggcgcccctggtccccgtcctccccggccgcctgcccctcaacccacgagataatcgtcttgtattgaccatgtataatctttctaaagcagtgcatgaggtggagtcccaacttcgatactttcacgtacttgctaaacgagcaatctccccaacatcttga

SEQ ID NO: 8984 - DNA, 222 bp, Zea mays
  Peptide Sequence Number=SeqID_50763
atggagaacttgtcggctaaagatcagcaaggattcgaagagtacaaaaggcaactgatcgaggagggcgagacgaagtatttagccaatttcaaggtggacatacatcaaaaggttgtccggcaaaaggagtttgacctatcatctcttcgacccactgcacccgccctaattgatgttgtgcccatcacacacaattcatcaactacaagtgggctttaa

SEQ ID NO: 8985 - DNA, 789 bp, Zea mays
  Peptide Sequence Number=SeqID_50764
atggggagccattccccgacggggaaatccccgttgccatccctagaccccagggctcggactcgggctaagacccggaagacggcgaactccgctccgcccgaccccagggctcagactcgggctaagacccggaagacggcgaactccgctccgcccgaccccagggctcggactcgggcaaagacccggaagacggcgaactccgctccgcccgaccccagggctcggactcgggctaagacccggaagacgacgaactccgctccgcccgaccccagggctcggactcaggcttggccccggaagacgacgaactccgcctcacccgactccagggctcggactccgccctggcctctgccgaacgatctccgcctcgcccgacccaggggctcgggctcggcctcggcaacagaagacagactcgacctcagcttcggaggagcccccacgtcgcccgacctcggacgcagccccgactcgcggttctgcatctgctcgcgctgcatccgcctcaacgccgcccaacgacctagatcccggcctctcgcctctgcgttcgcaccggccggtcccccgtgccacgcgtcggctgctggtcaccaactccgtcgccgcctcaacgactttatccggccatccaggggcgcaacatcgttccattcgacttccgctagcgccaagacttgcgcctcgacggttgccacgccggtgaagaagccatacccacccgccacggtcacaggcaagcccatccctcccatccgccgtctgcgcttgatctag

SEQ ID NO: 8986 - DNA, 468 bp, Zea mays
  Peptide Sequence Number=SeqID_50765
atgggcaagaataagaagggtagcagttcctcgcctcgctctggtgataagcgcaaacgtgagccgactcctccctcggaggacttcagcaactcggagtactcggaggaggagttctcctccgagtccgagggttctccggcccccacctctccccggcgtcgtgtgatgattcagatgactcccaggggattgtcgcggaggtctagacttacatccgggccgtcgagcgcgccgggctcgagggctcggatgagtcagagtactcctcggatgaggaggactccttggactcgtccgaggagggcagcggcggcaatggcggagacggcgacgacgacggaggtgatgacgacggcggcgacggcagcggcaagggcggtgacggcagcggcaagggcagcagcaggggcagcaaccaagccagtggctagatgccactggtttttagatattagtttagattag

SEQ ID NO: 8987 - DNA, 174 bp, Zea mays
  Peptide Sequence Number=SeqID_50766
atgaagttcgaagtcctacagtacggaatgctgacctccgaagcaaagagtctgatgcagagcaccaattttcgagtgataaaagcagaaagagacaaggttgtggagtcagggaatagagacgagccaaaacttgaccaaggaggagtatctataggtccaactcatagatga

SEQ ID NO: 8988 - DNA, 288 bp, Zea mays
  Peptide Sequence Number=SeqID_50767
atgtactttgccgagtgtccaaagaagacactcggcaaagacttctttgccgagtgcccccagggtggaactcggcaaagatgtactgcatataatctcatccagcatgaagtactgtcctgtgtttttcctgatgtggtgaagaacaccatgcatagcagtcttatgaactatctatggcatatcaatccttaccttactcttcaaggattcattgatgctcattctgacataagttgtcttctaagaactgttgagatatgtgaagacctaaaggaaaaatgttaa

SEQ ID NO: 8989 - DNA, 173 bp, Zea mays
  Peptide Sequence Number=SeqID_50768
atggatcttatcctctggctcttgcatctgtctgaaggccttagcaaatatgatatccgttgcactgcctgtatcaaccagaacattgtggactataaatcccttgatgacacaagatatgacgttaccatcattgtgagggtaattcttgagctgaaggtcctctggagaag

SEQ ID NO: 8990 - DNA, 1194 bp, Zea mays
  Peptide Sequence Number=SeqID_50769
atgaagccaccagcttccggctccatgtgcgcactcgcctgcctcttcctcctctccgccggcatcctcctcgccgccgccgtctaccggccgttccagtcgcgcgcggcggcgtcgtgggacccattctccagggtgcagcagaaggaggaggccccggcgccgccaccgctcgcccgccgcggctcgtaccgtgctgcgccaccggcgccagacgccgtctcaccatcagccggcggccctgctgactggagcccggacgacgacgacgacgccgacgctggaccgccttcaccggccccggcgccgtccgaggaaggatggggggacggcgacgaggacgcccagtgcgacctattcgacggagagtgggtggaggacgcggcggggtacccgctgtacgacgcggcagagtgcccgttcctgagcgaccaggtggcgtgccgccggaacgggcgcccggactccggctacgagcggtggcggtggcagcccaggggctgcggcggcaccacgaggctgggcggcgcggaggccctggagctgtgccgggacaagcggctggtgctggtgggcgactcgctgaaccgcaacatgtgggagtcgctcgcctgcatcctctacgcggcagtgccggaccggttgcggacgcgcctcatcgacgacgctggctccgagtacatgatcttccgcgccatggattataattgctccgtggagttcttctggagccccttcctcgtgaagctcgaaacaaaagacaacaagaccaaggcactcgagctggaccagctgccgccaatgctgcagcggacgctcggtgctgacgtcctcatcttcaacaccggtcactggtggactcacaccggcaagctcagggccgtaaattggtgctacaaccaaacggctcctatctccagggggaacatcgctccatggtttccacaaagtttgatagacatcatcgagaaaaacatcaagaggatgaaaacgcctattgtatatatgaacatcactcgcctctcagaactccgaattgatgcacacccatcaatttacaccatcactcacgaaggaaaaccacttagcaaagagcaacggcaacaaccactcacatacagtgactgcagccactggtgcctaccagggctacctgatacatggaacatgctttttgttcaacttcctaattag

SEQ ID NO: 8991 - DNA, 324 bp, Zea mays
  Peptide Sequence Number=SeqID_50770
atggcaggtgttgccttagatgtgaattgtgatgatctaaatggggaggagaagatgcagcaacatgagatgacaaatttaaaaacgatgatggtgtcacgaccttgttacccactattgtttgcatgtttcctcccatgcttggaggtcctaatcgagatgaaagtggtggcagccaagatgaaagtggtggtggccgcatcaaaggagaaggtgcaacaagacgaaccgaaagctgctatctcagatgtgaaatgtgacaacccaaaagaggagggcaatgtgcagcaaaccaaaagttgttgcctcaaatgtgaaatgtga

SEQ ID NO: 8992 - DNA, 744 bp, Zea mays
  Peptide Sequence Number=SeqID_50771
atggaggcctactgcgacaaggttcggtgcctagaagacaagttctacaggctcgagctcaaccacgtcgctcgacagtacaacgagactgcggatgagatagctaaaatagcctcgggcggacaacggttcacccgaacgtcttctccagagacatacatcaaccctccgtcaagaccgacgacacacccgagcccgaggaagccttggcccagcccgaggtatcctcggccgccgaggaaggcacccgggggcttcacgcacctgctggtcgccatcgacaaattctccaagtggatcgaggtccgacccgtaaccagcatcaggtctgagcaggcggtggcattcttcaccaacatcatccatcgctttggggtcccgaactccatcatcaccgataatggcacccagttcactggcaagaagttcctggacttctgcgaggaccaccacatccgtgtgaactgggccgccgtagctcaccccatgacgaatgggcagcacggtatcagtagtctctgtgacgctaccacgcccgaggggttcggcctcgagacctctaggtgggagacatggtacttcggctgcggcaggacgcccgaggtcgccacaagcttactcctccctgggaagaattctgcaaaacgagtaagagcgcacgtaagcggcaaggccgaccgagccgagggactcctacgcctccgggatacggatacctcactcgtcaccttccgcaaaaagtaa

SEQ ID NO: 8993 - DNA, 510 bp, Zea mays
  Peptide Sequence Number=SeqID_50772
atgaagaaagtggtctactacgagaccgactcttcgtcgccctccacctccggctccgacgccgcgtctgtcacttctaagcgccatgagcgcaagaagtttagcaaaccaccgtttttttatggtgaggactattgtatgtggagtgataaaatgagacatcacctaacctcactccatgcaagtatatgggatattgttgagtttgaagcgcaggtaccatccgtggaggacgaaggctacgactcggacgaggtcacccaaatccggcacttcaactcccaagccacaactatactcctcgcctctctatgtcgagaggagtataataaagtgcaagggttggagagcgccaaggagatttggcaaagtgtggatttccctcacactattgttcctctggctaggcggacgtcaattcttaccttgatacatatgtcccctcttcattctctcccgatgcccttgatggccttcaaggaggaaggggctccttccggccgtcaatga

SEQ ID NO: 8994 - DNA, 333 bp, Zea mays
  Peptide Sequence Number=SeqID_50773
atggccggagtcgtgcgactggtggttaacttcgccgccatgaacccccttttccctcgcctctatataatcggtcgcggggccccttcctatcccctcggctgcaactccaaatcggagaactgtggccgccaggggacctcaagctcgggcggtgctcggggtgccgctgtgggaggggaaatcctcatcatagtcgtcgttcgcgccctcggtggcgttcgtattcttgtttcgcgggttcggacaccagcatcgccggaattcttcaccgccaccgcgggatgcgccctgtgctgctgccggacactctgcgacgctaatcactggtga

SEQ ID NO: 8995 - DNA, 381 bp, Zea mays
  Peptide Sequence Number=SeqID_50774
atgggttttcccggggccccggttcctttgggcggcccggaacgttggaattgggagttcgcccgggccccgaggagggttttcccgggggagggtttcccgggggcggcgcgggacgcgcccgaggggggctcgctgggggaggggctcgtcgcgtggggcacgggacgccggggcaggggctcgccggggagggcgagggcgggcgcggggtcgggccgagggggcggcgcgggcgcgggggccgaggcggcgcggggcgcgggcaaggaggccacgtgggggagaaggatgggagggggaggagagggagaagggaaggggaggggaaaaactcacctcggggatccaaattccggcgatctcgactccaaaccctag

SEQ ID NO: 8996 - DNA, 219 bp, Zea mays
  Peptide Sequence Number=SeqID_50775
atggagatggggcgaggtatgagggcgagaggggcggttcccgattttatagcccgaggcaagtcccagttaatacccgcagggttggagccccacgcttcggccggtactgtcactgggatcgccggcggcaaatacggtgatggtagttgggcgcggcgacttcggcgggaggctgagggagcgaaggagtcatcgcgtgctgggcccacatggtag

SEQ ID NO: 8997 - DNA, 240 bp, Zea mays
  Peptide Sequence Number=SeqID_50776
atggccagatggagagatgaagaattggagattatgccattatgggatgtcacaagtcacatgtcaggttcagatgatgtgctaagtgggcgcaagacttatactggttcgagcagaatgtgcctacatccagtcttcggtggcatgaactactggcaccttgctcatgagtggaaggaggaccgacttccctatcgtggcttggcaccaggcgtactcaatatgttcagtcatttatga

SEQ ID NO: 8998 - DNA, 489 bp, Zea mays
  Peptide Sequence Number=SeqID_50777
atggcgcagttattggcgaagattgaggaagggaatctaaaagcatctaggcccctgagggaccctacagcggcagatcttttcagtaccaggattcaggaatccttcttccgagcacagttgacagcgcatatcgccctgcgagcgcaccgactcttggatctacctgcctttctgctagcagtcggtgccgattcagagggcaccctcgaggtctcacgcctccagtttggatcatatcgtccagcccctgaggacccagccccagtgccagatctagtgccagacattcaggctgaggatgaggcgttccgccagttcaagacccagggtacaactactgatgatgctgctgttgatgatgatgactttgggatcccgccaccgcctcctatgcctcatcgctcacatgatcatgaggccgggagttccagtgctgcccctgctacccctcctgctattgatcctgctttggctgcgatactctag

SEQ ID NO: 8999 - DNA, 1173 bp, Zea mays
  Peptide Sequence Number=SeqID_50778
atgttatctcctaagatcagatctgatttatttaacaacctgtctatctgttcagttgctgtgaatcccgctcttttcctgttacctgttatgaaaaaattagtgctattcacttacaccttccctttttctgtcagggaaggagaatcatcacctccaattacattccatgacttcatgggacaacatgtgtttacggagcaagtagctgtatctgctgcaccagggacaactcatccttgcccatatgtggcatacttgcatcctcttccaccactgacatcgtcaagctcccatgtccctgagagaaccactgatcgtactgcataccatgatcattggaaccccatggttgggccatcagatgttaggcccatgcaaacaatgcaacctgctgatttccatcatagccattgggcacatgtgccccattcttatgctcaacccaacagcaacaatgagcagccaggaatcccttttggaacaagggctacacgggttgatggtgatagccaacgtcgaatatctgttgtttctccatcttacttcagcaatggatctagacctcccagtgttcctcctctgatgcctcagttcatgagggcccatggcagcatcaatgaacaataccaacagaattcatcatctagcctatttgctggggcacataggtcaggaggcatgcgacctgcgccgacacctctaccagagaaccccaccttttccttgttcccaccgggttcatccggccatagttcgatggagactgatgacgctggaggaagccagttctatgcctgggagcgtgaccggttcgccccatttccgttgatgcctgtggactgcgagataagctggtggacctcacagcagcagtctcatagcacatcagagccttcatctgctccaaggaggctattcgggcaatggctcggcgtcggcaggtcgtcccctgaaaatagaccacccgagggctcttcgtatcggcaaatgatgcctgtggactgcgagacaagctggtggtcctcacagcatcagtctcatagcacatcggagcctacatctgctccaaggaggctattcgggcaatggctcggcgtcagcaggtcgtcccctgagaacagatcgcccgagggctcttcgtatcggcaaatgcactcgccacggatgtag

SEQ ID NO: 9000 - DNA, 111 bp, Zea mays
  Peptide Sequence Number=SeqID_50779
atgtgggtcaccagagcgtcgggaatccctcaacaacgctctgttcatgtcgcagacccgccccgaaccgtggacgagctcgctactccttcaatcgcgggtgctaaataa

SEQ ID NO: 9001 - DNA, 336 bp, Zea mays
  Peptide Sequence Number=SeqID_50780
atgtgggggatgatggtctgggcaccgggaacctatgtgttgtcctcccaaacgatgtgggtcaccagagcgtcgggaatccctcaacagcgctctgttcatgtcgcagacccgccccgaaccgtggacgagctcgctactccttcaatcgcgggtaagaatctcccttccgtgctcgccatcaccccgtctaggtttagcaccggccaatttcaggttaggggcgtccgggcgtcggattgtgcgtccgccggtgatgctccgccgtgggtgagcagtgctcagccgtcgcgtggatttggcggagagaagaagaaccgtgggccagagatctag

SEQ ID NO: 9002 - DNA, 105 bp, Zea mays
  Peptide Sequence Number=SeqID_50781
atggcgagctccacaagcagttcctcgccgctagcccgtctctggccatcactggctgatccaaaggcaaagaacttcaaaaaagtcataactcaagatttatga

SEQ ID NO: 9003 - DNA, 357 bp, Zea mays
  Peptide Sequence Number=SeqID_50782
atggacactcttccacaggatggtgactggcgcatcgttagactcaaaattcatcaacgtcatctgcgaagtcttcgtcatcaccctctgatcaaaatattagcaaagggagctcagctaggggaggggcgacgggtgcacagggcgaggcgcggctccggcgaggctaggcgaggtcggggaggcgcggacatcgaggtggtttggctccggcgaggcgcgttggcggacaccggcgaggtccgaagagctaatcgcgggcgcagagagaagagctccggattggcaagggagaggagtggggcgagctcagctgtaggggagagaagggctcgaccggtcctattcatagagtga

SEQ ID NO: 9004 - DNA, 414 bp, Zea mays
  Peptide Sequence Number=SeqID_50783
atgtggaaatccttgagcgaggggggcatgttcgccttcgccaaacatttgccctctgaggggccagttcgaccaagtcagctggtgccgaagactgccgtgatctggctcgtatcaaggaaaccgcgcgccagcgccgacgtagaggttttgaggaagttcgaggtacaggttcatcagttgacaccaaatgtagtggtggcgcttgcgaactacgtctgggccgtctcctcatacgacgggcagccatctgtggaagtcttcgctaagaattattttctgcactggcagaagaggaaaataggtgataagatagcccaatttggatcatgctctttcacaccaaggactgggaagacctcggctgaagttgtcgagattgttccgtgtgctaggaataagtggggcaattga

SEQ ID NO: 9005 - DNA, 255 bp, Zea mays
  Peptide Sequence Number=SeqID_50784
atggagaaagatcgccaggatgcgcagcggaagaagcgctgggcccccgtcaggttggtggacccaaggcgggaagtgaaggtggcgcggcccagcgcgaagtccgttgcctcggcgtcggcgattgccttcgcggaacgttttatttcggggacgctgaccttagagtttgccaccgaaaggcaatggcttgagagaaggattgaacgcctccgcacacaacatacggaggcggtaaggggcaagaccatatga

SEQ ID NO: 9006 - DNA, 210 bp, Zea mays
  Peptide Sequence Number=SeqID_50785
atggcgttccatgatggtgacacggcgttccgaggatcctgctacggtagagttgaactgggcgggtcgatgagcatcgtgatacgcaggaatctcccaggcgagcacgaatcgcggtggaggatcgccagtgtcgggttcacggaaccgaagatcttttcagttactgtaccatcgctagccccattcagtgacctgacagcaacttga

SEQ ID NO: 9007 - DNA, 288 bp, Zea mays
  Peptide Sequence Number=SeqID_50786
atgacgtcggtatttttaccgaggtatccggaaccacgcaaggtcccgactaatcctcgttggtgccccttgaaagggaaatgtgcccttgggccatttctaagtattttggtgattaagtgccaacacaagtgcttaaatgtgaatcaatgcccatggatgaacaaagtgcaaatcttcaacaaagggacccctaggcgcatggaggagaagaccaagcattcctacaacactcctaagcaccaagacattgatttcgcgcatttgtttcattgtgatagcatatag

SEQ ID NO: 9008 - DNA, 1023 bp, Zea mays
  Peptide Sequence Number=SeqID_50787
atgtccacgggcgcgggcgctggcggcggcggcgacgccgttcgccggccccgccggcggacgtggcgactgtactggtgctacgtgtgcggccgcgcagtgcgcgccatctcgtacccggcctcggaggtcttctgcccgcgctgcttcggccgcttcctgcacgagatcgacctgcccgcgccgcggcccgtggtcccgccgcccgaccagttcttccagccgccgttcctcccgcacgaagggcctcgccgctgggtcatatacaccggggccaccgacgccagggacgaccccttggccgacacgggcgcaccgctcccgcgccgccgccggcgcgtcccttcgccgccgccgccaggtccgggcccggcgactcggcgcccagacgaggacgacgacgtcgacgcgccactgccactgccaccgccaccgccacccctaccaccggccgtcgtcggctgggacgagttcttcgccgggccgaacggcctgaacgccctcatcgagcggctcacgcaggacgaccgccccgggccgccgccggcgcccgagtcggccatcgagtcgctccccacggtccaggtctccccggcgcacctgtccgacggctcccagtgccccgtgtgcaaggaggagttcgagatcggggaggccgcgcgggagctgccgtgcaagcacgcctaccacacggactgcatagtgccgtggctccggctccacaactcgtgcccggtctgccggcaggagctgccgcagccggcggatggtgggtcgcaggatgctgcccgcgaagaagggagcggcgagacggaggcgccgccggcgccggggccgctagtgatggccggatgggcgcccctggcttggctggcactgccgcgcgggccggacggcgacggtttggcgaggaatgaaccggatgacggtgacgcccgccgcagcggtgtttgtgcgccggctatcctccagtcctttgccgtcgtcgctgcttgctttttcatcctctcgttccttgtttga

SEQ ID NO: 9009 - DNA, 150 bp, Zea mays
  Peptide Sequence Number=SeqID_50788
atggagaacgtggtcgccgacttcttctggaaacgtttccatctccccatggaggctgtgggcgccacagcggcgtgcttcggcgcgaccaccggcgcggcactgtgcgtgttggtcggcaggatgggcgctgcggaactcccacactga

SEQ ID NO: 9010 - DNA, 1485 bp, Zea mays
  Peptide Sequence Number=SeqID_50789
atgcccaacataccgagggatgtcgccgagcactcgctggatatccgagctggagcccgacccgtgaagcagcctctgcgccgattcgacgaagaaaagcgcagagccataggcgaggagatccacaagctaatggcggcagggttcatcaaagaggtattccatcccgaatggcttatcaaccctgtgcttgtgagaaagaaaggaggaaaatggcggatgtgtgtagactacactggtctaaacaaagcatgtccgaaagttccctaccctctgcctcgcatcgatcaaatcgtggattccactgctgggtgcgaaaccctgtctttcctcaatgcctactcagggtatcaccaaattaggatgaaagagtccgaccagctcgcgacttctttcatcacacctttcggcatgtactgctatgttaccatgtcgttcggtttgaggaatgcgggtgcaacgtaccaacggtgcatgaaccacgtgttcggcgaacacattggccgaacggtcgaggcctacatcgatgacatcgtagtcaagacgaggaaagcctccgacctcctttccgaccttgaagcgacattccgatgtctcaaggcgaaaggcgtgaagctcaatcccgagaagtgtgtcttcagggttccccgaggcatgctcctggggttcatcgtctccgagcggggcatcgaggccaacccggagaagatcgcagccatcaccagcatggggcccatcaaggacttgaaaggcgtacagagagtcacgggatgccttgcggctctgagccgtttcatctcgcacctcggcgaaagaggcctgcctctgtaccgcctcttaaggaaggccgagtgcttcacttggacccctaaggccgaggaagccctcgggaacctgaaggcgctcctcacgaacgcgcccatcttggtgcccccagctgccggagaagccctcttaatctacgttgccgcgaccactcaggtgagaccagtctacttcatcagcgaggtactgtccgagaccaagatccgctacccacagattcagaagctgctgtacgcggtgatcctaacacggcggaagttgcgacactacttcgagtctcatccggtaactgtggtgtcatccttccccctgggggagatcatccagtgccgagaggcctcgggtagaattgcaaagtgggcggtggaaatcatgggcgagacgatctcgttcgcccctcggaaggccatcaagtccaaagtcttggcggactttgtggctgaatgggtcaacacccagctcccaacagctccgatccaaccggaactctggaccatgttttttgatgggtcgctgatgaagacaggagtaggcacaggcctgctcttcatctcgcccctcgggaagcacctatgctacgtgctacgcctccacttcccggcgtccaacaatgtggccgagtacgaggctctggtcaacgggttgcgcatcgccatctag

SEQ ID NO: 9011 - DNA, 483 bp, Zea mays
  Peptide Sequence Number=SeqID_50790
atgacaggatgtgatgagacgcagggccatgccagcaaaagcctaggccctgttacatcaccctatggcaatactgtgcatcataatgaaaatgctacaacgggccagtttgcattcaccacttcagaagctggaaactaccttgcatgtttctggatagacagcgtggagaaaggatcaggaacatctctaaatcttgattggaagatagggattgctgcaaaggactgggatactattgctaagaaagagaaaattgagggcgtagaactagagcttaggaaacttgaagctgcagtcgagtccatccatcataacttgctgtatctcaaagcaagggaagctgacatgcgaacagtgagcgagagaacgaattctagagttgcctggttcagcatcctgtcattgggagtctgcgttgccgtctctgtgctgcagctgtggcaccttcaagggttcttccggaagaagaagctcatttaa

SEQ ID NO: 9012 - DNA, 261 bp, Zea mays
  Peptide Sequence Number=SeqID_50791
atggcggcgtcggtctttccagcgctgctgctgggccgtagcggcggtgcttctcctaccggtggcagaggccgtgtggctcgagctcccgccgtcggggaccaagtgcgtctccgaggagatccagcccaacgtcgtagtgctcgccgactacgctatcatgtacgagtcccaccccagctcgcatcccaccgtcgccgtcaagatggggataatcttcaatttgggtactgctatgctggatggcgctctctcaagtaa

SEQ ID NO: 9013 - DNA, 246 bp, Zea mays
  Peptide Sequence Number=SeqID_50792
atggcgccccgcctgctccgtgacgacggcggctctcagcccccttacggaagcaagaggacgtcagcaaggacccaactgttccaacagttgtcccttcgccaggctccatcgctcctccgacggccacgacatcacaccagctgggtgccaaaatctctccggctgccacatcggcattttataacctgcatattgatgttgcaagatgttgatgttatatcaatacttgtgtacaaagactga

SEQ ID NO: 9014 - DNA, 525 bp, Zea mays
  Peptide Sequence Number=SeqID_50793
atgggcgcatgtcgatcgattttggcttgttgcaccgtggctttctccaccaggttacggaggttgcagtacatcacccttacctctggtttgtctgactcaaggatgggccgaagcatcatggctgttgcgtccatgttctgccctgagttgaggaggtactgtgtcattgctgcttttggtgagctggtcatggaccttcctcacccgaggcctttcagcctcaaggtgcttctgctcgatgtcaccgtaaacccgatcgagtttatagacgggagcatcgagctccttctcctgctgctagagggtggcctcgcgggggaggatgcaggcctagcactagcactgatattcttcctcctagttaggggactccttatccccctaccattatcgttctgtgatggtgttgccacaaaacaggccctcttcaccatcttgtcaacatcagagttgggctcagtcgagccatggctcgatcgtcctcgagcaggtcgaggacgaatgctggttaatggccgatga

SEQ ID NO: 9015 - DNA, 423 bp, Zea mays
  Peptide Sequence Number=SeqID_50794
atggcccagttatggtctggtgtcgctgatccgctgccccaaatgcgaaaggtcagagttgctcgtgagactaagatcgaaaaggttgttaaaatatgtatttttttcatgtggatggacgattatgtcaagatgcttgaaggggcaggggtggtgggtggctctggggagatgatggcgtctaatatctgggatgaacgagcagtagcaaatagagcagatgtgactacaaactgggacaaatttgctgccgaactgaagaagatgaatgacaacatggtcgagttgaagaagataaaggacaacatagttgagttgaagaagatgattcatggtgaacctatgctgaatatttgtgatgttgaatctgtgatggacatttgtggtggtaaatgtgtcgattcagtcagggtcttgttgtga

SEQ ID NO: 9016 - DNA, 660 bp, Zea mays
  Peptide Sequence Number=SeqID_50795
atggctggaggtgcggaggcctcaaacaagtttgctgaggagctagccaagatatgcactaagccgggagaggtcatgacttcgcatgtcctgcaggaagcatctgctcggatgctggaagtgactgaggctgagtgttgtagagacgatcacattcctttggcttctggtgaggacgattctacgtcttttctagcttggtatttcaaagtttttcctgatgggcagaatgttggcgttgttgtaagagctatgatagacaagaaccgccatgagcctacgaaaaagaagaggaaggctctgttacggctagtggaccctcgttgtgagatgaagtccctctgcactattgcggctgaaggatcgaagttcggagctacagagattgtcgttgccgcagtgtcgatgcctccgctaatggcgtgggttgttgcggctgtggggacgacttcaactggcaaggctggccaggacgcagcactaaggggtattgaggcaggcatagttggtgtggtggtccccgatgtttttgtcgaggattacttgttcgaaggcgtcagcgaattcgacacccataccgggctggcgtcctatgatacgtattgtatctgtgtgctcattttaaatttttttgtttttacggatgaggcttggatgtag

SEQ ID NO: 9017 - DNA, 522 bp, Zea mays
  Peptide Sequence Number=SeqID_50796
atgacgcgctcaactgtgcgagtgctgcaggaaggcaaagcagcctctgacgagaacagcttgtatgtccttggatcactggctgatttgcaacgaggtccaaatcctggtcaagatctccatgtgatccctctcgcactgtccagaatgtggagaagggaatctgctgaagattggtccgtccgtcagtctccatacttatatattcccgccaatctacatatccctgccctggcggctggtgcagcatgtgcttcgccctctctaccatcgttgaggtattttctggtagcatctgtgagtctcccctcccctgctcatcggcatctgaaagggagcttccatgtctctgtccctgccatgagctactggattggagatgccgctatgaacaaactgagtttttttttctcctcggaaaagaagaaaaagaacaacatactgagagatgccttacctcctgccctgctgcaagagcactacttattagaccctctttcggaacagccgaaagtcgcctga

SEQ ID NO: 9018 - DNA, 222 bp, Zea mays
  Peptide Sequence Number=SeqID_50797
atgggggtgtccacgtgctcgacgccatcggagcacatcctcgttagcgagtacacgcgactccggccggaacacgagaaagaaactatggttaaagaagaagttgtctcccaagctgaaaatcctccagccgagaacaacttctacttcgacatctgcagagtggaccttgaacctcctgcaacacaaggcaagccccagtgcattatcccttttccttga

SEQ ID NO: 9019 - DNA, 1281 bp, Zea mays
  Peptide Sequence Number=SeqID_50798
atgccgcccaggaggattgaatccagggaggttgcggttgtgaagacggccccgagccagaatgaagcgcctcccagggaatctgggtccatcaggccatcactggtcacttcaaagcacaagcacaagccatcatctgaaacggcagcaagcattgagcctcctaaaggaagctgttccgttgccaaaaccgcaaaagcgttcacattccgtgagctagccacggccacaaagaacttccgttccgactgccttcttggagaagggggctttggcagggtatacaagggcaagcttgaaaatggacagcttgttgctgtcaagcaactagacctgaatgggtatcaaggcaacagagagttcctagttgaggtccttatgctcagtctattgcaccatccaaacctagtcaatttggtcggctactgcgcagatggagatcaaaggcttctggtgtacgagtacatggcacttggctcacttgcagatcacctgcttgacagcactcctgaacaagtgccgctgagttggtatctcaggatgaagatagctcatggaactgctaaagggcttgaatacctccatgagaaggcgaacccacctgtcatttaccgggatctcaagtcccccaacatcctccttgatgagaagtacaaccctaagctctcagattttgggcttgcaaagcttggtccagtcgagggaaagacacacatctccactcgggtgatgggaacatatgggtactgcgctccggaatacataagaacaggccaactaactgtcaagactgacgtgtacagttttggggttttcatactagagttgatcacaggaagaagagcagtggacacctccaggccagcaagtgaacaaatcctagttaactgggtcaagcccatgctgagagacaggaagaggtacaatgagctagtagaccctcatcttagaggtgagtacccagaaaaagacttgagccaggcggtaggtgtggcagcaatgtgcctacaagaggaagcctcagtccggccttacatgagtgatgctgttgtggccctgggattccttgcagaaatgcctgctggctataaacacaaatctggccctatactccaaatgaaagttggagatccctcactaaccggtagcgctaagcaagataaggatgcatacaatcgtcaaaaagctgtagccgaggccattgagtggggctcactgaggcagaaacagaaggctcaaagccaaggtacagtatcccctccagaagccagcagattgtga

SEQ ID NO: 9020 - DNA, 1404 bp, Zea mays
  Peptide Sequence Number=SeqID_50799
atggggacacagaaaaaagcggcagaatgggcagcacgtgatgcgatcagccatcatcaatccgccgccgcgccgcctacagctcctcccgagacgggaggcgaaggaagacgagaactagacgccactcctacagttttacgtttacccatcaccaccagtccagcaccgagcaccgaccagatcaaccaggcccgccccgacccgaagatgcagcggtggctcccggcgctcctccgccgcgccgcgcccggcggcggggcggcgcggctcttcgcctcgtcctccctcctcttcgacgacacgcaggagcaggagaacatcgcgccgcgcgccgcggccatcgacgcctccaaccacttcccgcgggacgtggacctgtggaggctcatgggggacttcaacctccacggcctcaccgcgccggaggagtacggcggcatgggcctcggctacatgtaccactgcatctccatggaggagatcaccagggcctccggcgccgtcggcctctcctacggcgcgcactccaacctctgcatcaaccagcttgtccggcacggcagtcccgagcagaggctcaagtatctgcccaagctcatcagtggggagcatatcggggcactggcaatgagtgaacccaactctggctctgatgttgtcagtatgaagtgcaaagctgagaaagtggacggcggctatgtccttaatgggaataagatgtggtgcaccaatgggccgtctgctcagacgctggttgtttatgcaaaaacagatctagctgcgggatcaaaaggaataactgcattcataatcgagaaagggatgcccgggttcagtactgctcagaaattggacaaacttggcatgagaggaagcgacacatgtgagcttgtttttgagaactgctttgtgccacgcgagaatgtcctcggtgaagaaggcaaaggtgtttatgtcatgatgtcagggcttgatctggaaaggcttgtattagctgcgggccctattggccttatgcaggcatgccttgatgttgtacttccatatgttcgacagagggagcaattcgggcgtccaattggtgaatttcagttcatacaggggaaaatggctgatatgtacacctcattgcagtcatcaagatcatttgtatactcggttgctagggactgcgataatggcaaagttgatcgcaaggattgtgcaggggtaattctctttgctgctgaaaatgcaacccaagtggcacttcaggcgatccagtgtcttggtggaaatgggtacataaatgagtacccaactggtcgtctcctgagagatgcaaaattgtttgagattggtgctggtactagcgagataagaagaatgataattggccgtgagctcttcaaagaggactga

SEQ ID NO: 9021 - DNA, 225 bp, Zea mays
  Peptide Sequence Number=SeqID_50800
atgccgaccgagctgagggactcctacgcctccgggatacggatacctcactcatcaccttccgcgaaaaaacgactttcgtgccgcttcgactgctttgatagcagaaccctaaaaacgacgagagtacatgttcagacatcggcagggggagcagcagcaccctcggcgacgtttccaccctcggcagatcctggcccagccttggacggcgactcgggctga

SEQ ID NO: 9022 - DNA, 441 bp, Zea mays
  Peptide Sequence Number=SeqID_50801
atggctgagctcgcgtcgggcgccgtgagctcgctgctgggcgtgatcgggaacgaggcgcggctgctgcgcggcgtccgtggcgacgtgcagttcatcaaggaggagatggagagcatgaacagcttcttggtgcacctggcccgcacgtcgcacaccggcggcgagcacggcgtgcaggtgcgcacgtggatgaaccaggtccgtatcctcgccaacgactgcaacaactgcatcgacaagtacgtgtaccgcggcaaccccgacgtgcacctccgcaggagcggcctcttgcgctacctcctgtggcctccatggtttgtgaggaagatgttcgcgcagcacgacgccgccggccagctgcgggtgctcaaggaccgggcgcgggaggtcggcgagcggaggatgcggtatgacgtgaaggtcctgttgaataattag

SEQ ID NO: 9023 - DNA, 2295 bp, Zea mays
  Peptide Sequence Number=SeqID_50802
atggagagaggcgacgtcatgcactccgccgccgtcgtggcgccggaggcagaccaggaggtcatcgctctcgcacgcagggccttggcccaggggcatcgcagcgtcttggtggacattccgcaggtgcacatggatttcgagccgctgcggccccaggagatcctctactacatcctgtgccagctccagcaggatcgagcgtcatcgccgccgcaactcgggtcgttagaaggaagcccagacacattggtgaagcagtatctcctctacagaagcaaacgggagatcagccatggaaaagagagtctactcggcgaaactgagatccagcaggacattcagaatgtgatgggcaagcttgacgaggtgaagaggggcattcaagatgagcaacttctgttgcagctgctggaagggatcagggacgtcaaggagctggaagagaagcccatatccgtgctcttcgagctgctggtgctgcaacagcaagctgcccggcgagaccaagcgaggggcaaagccatgcgcaaactggcagcatggcacgcccacatcctccggataacagcagagagtctcaagaagtacatagaggcagagcatctgccgcaacaggaggcggagaagaagacggccaagaagtttgatttctatgatgcaagatatggatatgtcatacacaaggtgtttgcaacgaaggccagcaacagcaaaaggcgccatgggcatgtcaagatccaaggcatgatcagcaaagtcccacaagatgttgccaccgaaaccgaggagaagatcgatgagatcaagaagacggtccaagagcagatggaaacggggtggatcgtacgcaagatcatcgagaatcacttcgaggacgacaagaggcctctggttgttatcctcagaatcggcgacaagatctatgaatccaactgggacgagaatagatacgctttcacccgcctggagaaacatgttgccggtgtactgaccgtcaccaccacaaggagcacccagcaggccaaagaaagcctccggcagcaggagcttatagacagcttccgacaaggggagcctctggactattcccttgctggcctctaccatgacattgtgctccagtttacaagccatctcatgagtgaagacaagaacgaagaatacagcgatccccagatcatccgtgacatcctgggggagtgcgagcagttcgagttctgcatgaagatcttggcgcattctttctacgccagacccaaacggagcaaccaagaactgaccaagctgcgcgacagccttcaggcagtttcccccaagtcgttcgaaggcgttgctgccaagatgctcaagttctcctacaatgacctgcccaaagagtacaagtcctgcttgctgtacctggccatcttccctccaggacgcagcatcaggaggtcgacgctggtagcacggtgggttgtcgaaggtctgatcaaccgggatgattggaacgccgcggttcgtcagtccgatcgatgtttcgaagccctcatcgaccgggggcttgtcgatcctgctgagatcagtggtaccgggaaggccaagagctgcatcgtgggcaatcgggttcatggattcattaccatgatcgccaagaaacagcacatagtggagactcgcctgtcacagcacttggcccagcacttctccattttcagtgacgtccgactccgcgcctccgagaagatccgagatttcctgcaagttctccccaaacagtaccacttttcccggctcaaggtgctagatctagaaggctgcaagtgtgttggtacgaagaacacgagttacctcaaggacgtctgctgcaacctgctactgctcaagtacctgaacctaaggagcacaaatgttacgcagctgccaggagaaatcaaccgcctccacgagctggaagtactggatatccgccacaacaatgtgcacaagactgcaacgagatacctccggctcctaaagctgaagcggctgctggctggttgcattgacgacccaactctaccaagtgtcgagcttcctgaaaagattgggaaaatggaaggcatggagtgctccaagaaagccaagatcagcttcgccgccggatcttgtcctaagctcgagaagctcgtcaccaacatagagtccctctccggcatcggcaaccttgtacgattgaaggagctcgagctcaaggtcgagggtgactctgtccctgcagagctgggcctgggcaactgggacatcgactccatgggctgcacgcagccgtaa

SEQ ID NO: 9024 - DNA, 420 bp, Zea mays
  Peptide Sequence Number=SeqID_50803
atgggcaagagcaagaaaggcggaagttcatcgcaccactctggcgacaagcggaagcgtgatccgagtcccccctccgaggacttcgatgactctgagtactcagaggaggagttctcctctgagtccgaggggtcgccagcctacgcctctcccccggtgtcatccgatgactcggacgattcccaagggatcgccgccgaggtgtggacgtacatccgggccgtcgagcgctccgggctcgagggcttagatgagtcggagatctcctcagacgaggaggactcctccgactcgtccgaggaggggagcggtggcgacgacgatgacgagggcgacgacggcgacaagggcgacggtggcaacgacaaggacgacggcggcagcggcagggccagtggcaaagcgccgccggcttaa

SEQ ID NO: 9025 - DNA, 522 bp, Zea mays
  Peptide Sequence Number=SeqID_50804
atggacaaagccttcctcctctccggcaatgagggcatcgtcggctcgtcgctaacatggggaagaggtaggagtagctcagcagtaggatggagtggccaggacagctcgctccaaacaacaagaaacactgagagctgtgaagagtctgagatggcttatgtaagccccgcgactgatgatacatcaacagatctagatactgacgagaagaaccaaatgggactcccttctggaagcctgacttctattttccacccccttgtatgtctggtggacacgcagatggccaaaccagagtaccaggctatggagaccggacgagagtccaaggagaccaccccgcgattcgtcaacgtctccgggatggcgaagccgcaacccgacgcctccctgtcctttttgttacctccggacgccgctgccgaggggctgcatgacatgattctgaatgctcgcgacgaccttgatgttttatctccgtggtcggtgggggcgtcggcgtgtggtgtaggcagatga

SEQ ID NO: 9026 - DNA, 249 bp, Zea mays
  Peptide Sequence Number=SeqID_50805
atggccatatatgaatggccagatatagccactgttctcttacttgcattattgaaaaataccgcatccttcaatctttgcttgttggttgtgcaatctgacttcccatccttcaatcttatgtcctttgtggcttatggtgctgctggtgagtacgttcatgtggtgctcctacctctgataggattatcacacttttttagctctcacatggggcccgagtgtattcacgagtgctttcttagttga

SEQ ID NO: 9027 - DNA, 2280 bp, Zea mays
  Peptide Sequence Number=SeqID_50806
atggcggtaatgagctctggcggccttctacccacgctgtgctgcctctgctacgtgctgtcctccgtccacgttcccctcgccgcctcgctctctttccatttcaacttctcagaccccgattccacctgcaccgcccagaacgcggagctggcctgctccagcgacgcctacttccacagcaccgaggacgcgatcgagctgaccaagaacggcatggacaaccacaacaacaaaagcgtcgggcggctggtgtacacgcagccgatacccctctggaacggcgccaccggcgagctcgccagcttcaccacctccttcaccttccggatcaagcgagcacaaccggggtccccgagcggcgacgggatggcgttcttcctcgcgcacccacccccggacgggtgccccccagcagcttcggcaggaacctgggcctcttcaacgacagcaccaacaggaacgccacgggcgacgaccgcgccgtggcggtcgagttcgacacgttcgagaacgacgagttggaggatgcggatggcaaccacgtcggcatcgacgtcaactccatcgtctctaccgattccatctcgcccgacaagagcatcaagtccggcgagaccctggcagccgacgtcgcctttcgacaacacaacggagacgctgtccgtcaccctctggatgagcggggcaccgtaccgtgtcagcgccaacgtcgacatgaggaaaagcttgccccagatggtggccgtcggcttcgctgcttccaccggcaacaacgtggagatgcaccagctcctgtcgtggtccttcaactctaccctggcgtcgtcgaaggatggtgagaccaggccacctgcgccctctcaggccatcgtctccaaaaacaaatccaaggcgcgtagcagcgcgatagcagtgtcttctgcagctgcgtttgtggtcgtgtgcgctttaactgggtttcttctaaggcggaaactgaggatgtggaagacgtccaaggaagcatccggcgccggcgagctcgacgacgacgaacacgacggagaggaggctgagtttgagaagggcgtcggcccaaagaggtattcctatcgcgaactcgcggccgcgacgcgcaacttctcggaagagacgaagctcgggcgaggcggcttcggccacgtctaccagggccgcctcaacattgacggccaggaccgccgcgtggccataaagaagttctcggagtcgtccatgcaggggaggaaggagttcgaggccgaggtgaagatcatcagccggctgaggcaccgcaacctcgtgcggttgatcggttggtgcgactgctgcaaggggctcctcatcgtctatgagctcgtgtcagagggcagccttgacaggcacatatacaacgctgccaggtggcttacctggcctcaaagaggtgaagctatttcgcaaatcgtttggcagaaacaacttatcgtaaagtcaaagtcatttccatgtattaaagtgccagagacagccaaaatggctctagcttttaagtgtttttcgcagtacaagatcatcatcggcctggggtcggcgttgcggtacctgcacgcggagtgggagcagtgcgtagtgcacggcgacatcaagccgagcaacatcatgctggactcctcgctggacgccaagctgggcgacttcggcctggcgaggctggtcgaccacggcgtcaagccggccacgaccaaggtggtgctgggcacggcgggctacatcgacccggagctcgtgaacacgcgccgcccgagcgccgtgtcggacgtctacagcttcggcgtcgtcctcctggagctcgtcacgggccggcgccccgtggaggagcccgacgacagcgacgagctgttcgtgctgatcaggtgggtgtggcgcctgtacggcaggaacgccatcgccgaggcggtggacgagaggctgaagctggtaggaagggaaggcgatgggggcggtggcgaggtggaggaggaggaggagcgcggacagatggaacgcgcgctggtggtggggctgtggtgcgctcaacccgaccgcggcgaccgcccgtccatcgcgcacgccatgcacgtcctgcagtccgcggacgtgaagctgccggtgctgcggccgcacatgtacgccagcgccgccgacacggttcatagtaccattgccatgggaggagatggttacagcgagctgtctttcggggtgacgtccactgatggtagcgacacgtcgactactagcgagagggaaagcaaatga

SEQ ID NO: 9028 - DNA, 336 bp, Zea mays
  Peptide Sequence Number=SeqID_50807
atgcagggttcttgcctgaccgccatcgcagcaaaatcaaccaaggacctccctacactgaccactcccctactgcccttgcccctttcgggtaagggttctcggtgtaagttttctaagacacagagcacaacacgagtggatggcgggttgattactgctttcctcggggactcttcaacaaaaagtacccgcgaaggggtattggctgactctggccgttggatcagagatcgagcgcccagatcagcctactcactccatgaatcggtatttgatcccagccgttggatcccccatcagtggccctgctttaatgagccccagtgcgagtaa

SEQ ID NO: 9029 - DNA, 444 bp, Zea mays
  Peptide Sequence Number=SeqID_50808
atgccgctcttgctggtcgccgcctctgcctccgcggtggctgccgaagctgctggactggttgacgggggagcggggttcgacagggctggaagcctgggagttcctgcgtggctaggggaacaagagagcaagcgaggaggacggcgaggggagcggcaatcgcagttcgaggccggggcgcagacagcggtggggaagtggatgcgcactgccggatccggtggggaagggcgtggtctccggcagggaagtggggaagggcttggacggagggcgggaatggcgtcgcactgtggtggggaatggcgtggacggcgggcggaaatggcgtggacgcaatgggaaagcgcgctgcgtgttgcagtggggaagggcgggggcatggtgaagcctattgtggagcgagatctcggcggcgctcgaggacgcgatggtgtatga

SEQ ID NO: 9030 - DNA, 562 bp, Zea mays
  Peptide Sequence Number=SeqID_50809
atggcggccgcctcgaggggcctgctcgcgcgcctccgtgtcctctcactctccggcggcgggagcccgtggctccgcttcccgccttcccggctcttctccgcggaggccttcgtctcccattccgatgacgacgacgctgggggcgagggaggaggcgggggccggatcatcgaggcacggtccggggtgatgggccccacctcgcggcgcaccggcgtcatcggcgtcaagtgcgggatgtcggcgatgtgggacaagtggggcgccaaggtgcccatcaccgtcctctgggtcgacgacaacgttgttacccaggtcaagaccgccgagaaggagggtttcttcgccctacagggtgtaatgaaaagatatggttttggtgggatgcctgcatcacatggaacatctttggcgcatcgcagtggtggctctactggtcaaagagatgctcctggaagggttcctggtcctcaaggtagctttattttcgttaaggattctatatataagaaacctgacacggctttgctcccatttcctacatacttcacgcgtgaag

SEQ ID NO: 9031 - DNA, 243 bp, Zea mays
  Peptide Sequence Number=SeqID_50810
atggggcggttgcgactgcgagatacggggatggggcaggcgcggatcggtcgcgagattagcggggggcggggggagggcgagggcagaggcgtggatcacgcggctccgatgtccccgctggtgacggttgctgcggggatgcggagacggggcgggcgcggatcggcgggggcgcgactgcgagccgcggggacggggcgggcgcggatcggcagcgagattagcgatgcttttcactaa

SEQ ID NO: 9032 - DNA, 282 bp, Zea mays
  Peptide Sequence Number=SeqID_50811
atgcagaaccatcgcctcaaccagtggggccaccgcccccgcgacgccctcgcggggccggtgaccgccgtcgaagctaggagcctaacgaggagctctaggggcagtgggggtaggagggtgcgtgccccccccacccgtcgtcgaagggcgaggggcctggccggtggaggacacgtcgtggtggacacgagggactcgacgtccatgggcggtgttggtgacgactcgctaggtgacgtcgccggcggcggcgcgctgatgcagggctgcttcatgtag

SEQ ID NO: 9033 - DNA, 450 bp, Zea mays
  Peptide Sequence Number=SeqID_50812
atgggccgtggtccctgcagcacggagccaccacgccacgaggcaggccgcaggcagcggaaccatggctcccggctggttccggttccgcccaggcccggccgctttgctttgcctagcaagttgttactactagctgtcgtctcctctagttctgtctggtcgaagcgaaagcaagccacaagcgactgcgacaaagcgggcggcgtggcagggcagggcatcaaaggcgcgcgtgctgtccccgaatccacggccggcagattagcagcagtagtaaaaactggagcgacggtggaaatcgcgacgttaatcacggacgggttgactggcctcaaattgatcaacgtcccttttgctaccctgaacgccatagaacttatggcaggcgagttggatctcagtgccggtgttgaacccctttggagcgcgtggaatatccctgtatga

SEQ ID NO: 9034 - DNA, 1629 bp, Zea mays
  Peptide Sequence Number=SeqID_50813
atgcagcggcacgcggaggagctgttccgcaagggcactgggcgtacaacaggctgcatgcggttcgagaagacaggccgcatgagtgtaatagtagtctgcctcctgccgttctgccgttctgccatcctgcaacctcaaccgtccattccattgttctgcaatttcaaccgttcgatcaccagccgctcgatcccccaccgtcgccagtcgtccgatcccatcgcccgatccccgccccggaggttggagatgcgagggatggcccctgccccggtgccccccaccccgttaccctcgtccgatcctcttcctcccccacagtctccgatccgcccggcttcaccaaatccacccctccccacgcaacagccaccgaccatgttcgccgccccacctccccgcctggcgtccgtgttgctcaccggcctggaaaggagacgtgtccacaagaggcaaggccgtgcccccgcccgcccccgcgcaaccgccgcggcgctcgacgtgtggacgtccgagccagcgcccgtgcaggagcggcgccggaagctgctccagatgctggggctcgccggggaccccgccctggcgcgcctcgagatgggccgatcggtctcctacgacgacgggcctgtgcccgtccgcccggcgccggcctcgccgcccatctcccgatccagatcagacggcggcgccgtgccggcctcggcgaccaagccgccgctgggagggcggtcgccgggctccttcgaggccacgcccgaaggggaggaggaggaggaggccgacccgaggtgtctgatccggaacctcgacgacggcagcgagttcgtggtcaaggaggggtccgagctccgcgaggtcggcacgggccggcagctcaccatggaggagttcgttgacctctgcgtcggccgctcgcctatcgtccaggagctcatgcggcgcgagaacgttgcgagctccggctcgtccacccccgtccagcgctccaactccgactccagcaacggagtgacgcgccaccggcggcggcggcatagcagctggcttcggggcatccggaacgtcaccggctccgtggtggccagctcccgcgatcgccgcagcagcgacgacaaggacacgtgctcggagaaaggcgggcgccggtccagctcggccacagacgacagccaggacagcgctggagccgtgcgccacgacccggtgcgcgttaaggtgaggcagtatggcaagtcgtacaaggagttcagtggcatgttcatgaaccaggagattcagactcacgatggctccatctggagcatcaggtttagtccagatggccggtacctcgcgagtgctggggaagactgcgtgatccatgtctgggaagtgtcagagttcgataggaaacgcgaggagaatggagcgtgcaatccttttgttgcgatggtgtgcaacggttcgccggagccaacattagccgtggccagcaatgtggatgggagcaatcgtgagaagaagcgtcgggcaaggttcttggagggtcgtaggtctgtgagctcagaccggctaatgctgccagagcatgtgtttgcgctgtcagaaaaaccgattcggaccttcatggggcactcagaagat

SEQ ID NO: 9035 - DNA, 435 bp, Zea mays
  Peptide Sequence Number=SeqID_50814
atggaaggagaatcagacgccccggatcgccgccccagcctccatggaaggggagtcctctcgatctgtgtccgtgctgtccatggaagaaaccttgctgtcagcgcgtctccacttggtttgtatcgctcacggtcctacatctccaaaccccctgaagtcctgccaaacaggcagcttctgcagcagcttatcagttcagctgcttctcaaaatgaactaaaagcagccaacaagcagaagctgctttttaccagcttatcagataagctgctttttcaacaagcagcagctgtcccaaacagggcccttgaaccttgcatagaggttttgcttacaagctctaaattgctttactctaacatcactggaaagttatccgtggatgtttcgaggtcctatgacggtgtgctctttgctctgcatgacagctga

SEQ ID NO: 9036 - DNA, 153 bp, Zea mays
  Peptide Sequence Number=SeqID_50815
atgaccgtagctggtggacagaggaaggggaagtctgtggttgacaagggccccaccgccgtgactgtggtggcagagaaggcggtggtcacggttgttagttctcgtgaatgtcctgttatctcgaaatacagagctgttgtccacacctaa

SEQ ID NO: 9037 - DNA, 117 bp, Zea mays
  Peptide Sequence Number=SeqID_50816
atgtcggcatccaagagagaaagcaccacggtgcggctgcacggtgggcccgtagtgtcggcaccgtttttccaaagttgggccgcgctgagacttgtaaataaggtctcaatttaa

SEQ ID NO: 9038 - DNA, 441 bp, Zea mays
  Peptide Sequence Number=SeqID_50817
atggctaagcgtcgtggctctccctacgcgcagtcgcgcttcctgccgagcgcctccagctcccgcaccgcagccctggtttctgctcgcccggatgagcgccggccgccaggtcttcttcctcctccatgtgcgcgctctgctcccttccccacggtgctcgacaaaaggttcgaacgagtcgtactgccatcgtcttcgtcgaatgaaaaatcgtcacgcttgcatgtcgatgtcgttgatcaccatcctcgtctacgccaagccccaagtcgtgaggacgctcttgtgatggccacgcgtcaccgtctcgacaaaaaggaatccatgggtatttggtcaagaatagaaactatgtgctttgctcgccagacgtgtgtgatcaaagacgtcaaccggaaaccgtcatcgtgcttccgactatcacgtcgaattagttag

SEQ ID NO: 9039 - DNA, 1197 bp, Zea mays
  Peptide Sequence Number=SeqID_50818
atgtttccatcctcttcttcatcttcgtctaccgcgatcgcgtcctcaaatgcaccatcgtcggataagatgattagtgatctagcagcagtcgtggagctgcggccagaccatagtattgaatttggaactttgaggatttactcaggccgcgtgcacgagatgcaacgcttgggttattttgagaatggagttgtgcgggcgccgggggctaaagatgtccccgagccagaggaggacatcgaaggggtgcctgggctgcccccatcaatcctgtgttcacactgctatgtggcatttccacaatataaagtgaagaaaggagataagggcgaagaggccctttggtacgtagcccagatgagcagcggccgagatttggttgaagattttgttgcctactatgtgtggctgctggctcatggatggaatttgggcaaagtgaagcttcgcccgttgccctttttgggtgatcggatggtgcagagccctgccttcacaattgattcgcgagggcgggatgtgactgccatcgttagggaagttgagtcagaggctgctaaaattgtcagtaaatattcgctgaagacagagttagtagggagctgggatgtacgagcgatacggtccttacccggaggtggttctgctgatgctaggaatgaccgagggaaaaaggtgaagacctggtcagaagaaggcacctcgaaagggaaggctatgattgcggcgactcggaagaggaagatggaggcaaaaggtacaaagaggataatggcgaggccgagggcctctaggtgtttcattgaggaaatggcgaggacatgtgcgggacctagggaggttatgacttcgcccgatctctgggaaacatctttgctaatgttgaaggtgaccgagggtgcagggactaaaactgggcaattggtggtggcaccggtgaggccgcccgctaacaccagggcttctgagaagggcgtgtctgtgacctcgttggacccatgggtgcaattttgcgccattgctgatgggggcggagaaattgtcggcgcttctatggccgaaggcgtgccagcggttgtcgcccgacagctgtgttatgcgaccgtctttgccgatcaaattgtgtctggagcgctagttaatgttgtgactcgcaactgcgttccaagaggagacggctggaaggcaaaatag

SEQ ID NO: 9040 - DNA, 489 bp, Zea mays
  Peptide Sequence Number=SeqID_50819
atggagaccgaaattgcacgagcggaggcccaagctgcctctaagcttgctgccgagcttgagcttgaggtgaagagtatgcgcgccaaccacgagagaatggaggccgccatgcgtgtgggggttgcgaatgccttggcccacaagggctacaagcactttgaggcctttgatcggagcaatgaggactttgatgctggtgtattctatgttgaatctgacgtgttgaagagatcgaccggggcgctttatgataggatgtggggacctcacggccgcgatgtcgtccaagagagggtcgaccagccgctggcacatgtgatgagggacgaggaggttgaggacctcgccagactagagatctcgttagcccgaaaaggtgccgatgttgaggtgggagctgaagaacagttttcgctcgcgaaagtcagggctgaagaccctatgacggaggggactgtgcagccatctgcatctgctcaggtgtaa

SEQ ID NO: 9041 - DNA, 165 bp, Zea mays
  Peptide Sequence Number=SeqID_50820
atggagcccttctcgatgtctacagaactccataagtttgaccgcaaaaggcagaaggtcactgactttgaggcgtaccagtatagcgtcggagttgacatacatcatactatgcagtgcctcattaacaccacgctaggacttggaccttccacaactgcatag

SEQ ID NO: 9042 - DNA, 450 bp, Zea mays
  Peptide Sequence Number=SeqID_50821
atgatcaacaactcctcatcaccaccaccgtcacccgcgcagcctccgactcccatcgacccgtggggcgatacatttctctcccgcctctccgccgtcgtcctcctcctcgcctactcctcctgcgccgccgtctgcctctaccacaccgcgcgcttcctcctccaatgcctcgagcgccgccgcgccgcgcgggaggcgcaggatcctaagcccccctcccaagccgtggacggcgccggcgccggcgccgtgtgggcggaggccgactgcgccatctgcctgtccgagctcgacccggagggcggcgagcgcgttcgcgtgctcccggcgtgcggccacgcataccacgacgcctgcgtgcaagcctggctcgccacgcgcgcgtcctgccccacctgccgcgcgccctcccggtcccggccgtcacggacgaccagagcgccgtag

SEQ ID NO: 9043 - DNA, 1221 bp, Zea mays
  Peptide Sequence Number=SeqID_50822
atggccgccgcgccgccgcccaaggccgacgagctccagccgttcccgcccaaggagcagctgcccggcgtcgccttctgcatcaccagccccccgccatggccggaggccatcttgctagggttccagcatttcgtcgtcatgctgggcaccaccgtcatcatacccagcgcgctcgttcctcagatgggaggcggaaatgaagagaaggctcgggtggttcagaccatactgttcgttgctggcataaacaccctgttccagacgttattcgggacgcgccttccggtcgtgatgggcggctcgtacgtcttcgtcgggccgaccatctcgatcgtcttggctggacggtacagcaacgaagcagaccctcacgagtatctgcctcaggttctggacttcggcaagtccgtcttcagccggttcagcgttctcttcaccgtcgccatcgtgtggctgtacgcctacatcctcaccatcggcggcgcttacaagaactctccgcccaagacgcagaggtttgtgtccaatactcttttcgtgcaaagtttgtcaagtttgagaaagctggacttagtaacacctcttgagatatgcgagtgcaactatgattcctccatcgattatcagtcggggcgtgggatggcagggcattggtctgttgctcgattcatttttcgggacagcgaacgggacatcggtttcagtatatactgcaatgcagttttctgctatgttcatgtatattttcaccgatgccgtggaaaatttggagctttgtttgcgtcgattccgctgcccgtatttgccggcatgtactgtctcttcttcgcatatgttggtggcgttggcctgagcctccttcagttctgcaacctaaacagctttaggaccaagttcatcatggggttcgctttcttcatgggcctatcggttcctcagtacttcaacgagtacacagccgttgcaagctatggtccggtgcacactggcgccagatggttcaatgacatgatcaacgtgccattcacgtcgaagccgttcgtcgctgggttggtagcctatatcctggacaacaccctccaggtaaaggagagcgcggtgcggaaggacaggggcaaccactggtgggagaagttcaggagcttcaagaaagacgcgaggagccaagagttctactcgctgccgttcaatctgaacaagttcttcccgtcggtctga

SEQ ID NO: 9044 - DNA, 507 bp, Zea mays
  Peptide Sequence Number=SeqID_50823
atgaacagacaccgccactcgcgccactaccgtgcctcctcgactgcggaaccagacaggcggcacctttggcaagcgaagcaggcgacgcttcgcttccgccataatgaccgcgtcagaaaagggaccgggaaaggggataccccgaaagggatccttctccgcgaaggaaacgggccccgagcccccctactgatcagaggttcgaaggctggcccctcgaaggggttcaacagccgcctcagagtgctcgggctccgcgcccactactggtcagaggttcgaaggtcggcccctcgaaagggttcaagggctgcctcaggccactcgggctccgcgcccactactgatcaggggtttgtaggctggccctcgaagggttcggcagccgcctcagacgcagagcgagggatgaccctaggctcgggggctgctctcgcaaacccggctccagccaaaccgttgacagtgtcaacataccagtccgagaacttggaactcgactga

SEQ ID NO: 9045 - DNA, 699 bp, Zea mays
  Peptide Sequence Number=SeqID_50824
atgtggagtggtgatccagacagaatcgagttgttgacctttgataggttttgccgttttggaatcctaccgcgactatgcgaaggagtcacctggggtcccacagaacaacttgagctaagaagccatgttcttggaatgggaacacagaatacaaaacattattttttagaaccatggctcgatgatctcatattagaagctataaggaagcttaaggagccttctgggcccagtaaggcagccattgctgcatacattgaggaccaatactggccacctgctgattttcagcgcctgctatctacaaaactgaaggcattggttaattccggaaaattaatcaaggtaaaccaaaagtacagaattgcaccaagtccacccccctcgggcagaataggcactaaggtatcctctgctgaagggatgaaggcagaaaataataatgctaaacgtctaactaagcatcaagtgattgctgagctggagaagatgaaaggcatgaccaaggaagaggcagctgcctttgctgccaaggcagttgctgaggcagaagtagcaatagcagaagctgaggaagcagcaagagttgcagaggctgcagaaaatgatgctgaagctgcaaaggcttttcttgatgctgtcactttatcaatgagaaacaggaatgctgcttccatgatgcttcgagcttgctga

SEQ ID NO: 9046 - DNA, 144 bp, Zea mays
  Peptide Sequence Number=SeqID_50825
atgccacacatgcagcgcaagcacgacacggctggcataccgggccagtacgagcctgttagtcaccatgccggccccgagctaggagaaggaattggcggcgctgcagaaggtggagtagagcgtgcgatcggcctcgtctag

SEQ ID NO: 9047 - DNA, 237 bp, Zea mays
  Peptide Sequence Number=SeqID_50826
atgacccgcacgcctaagcagacggagaaccccagcagcggcaccggcggcaccaatctggtgaagtcttccctggcgcgtgcagagaccggaacacccaatgcctattgtcggtgttttgaacccggggggtccctggaccgacgagtaaattgtcgccgtgtgccccagcccagatgggtcggcgcgagacggagcgcgaaggggggaagaggagccggagggagacaggcgtga

SEQ ID NO: 9048 - DNA, 507 bp, Zea mays
  Peptide Sequence Number=SeqID_50827
atgcggaagctaaagagcaaaggtagagatgaaaacactcatagacgacgccagtatttttaccgaggtatccagaaccatgcaagatcccgactaatcctcgttggtgtccctacacaaagggtagcccaagcgagggccaagcaccacgcactcgtagagagtcgcggaccttcaccacgcacaagtggtgctctgcttccagcctcctctcggacgctccacaccgtcttcaatatagagtttctggctaaaacgccgcggacctcgttctctctggtacacggtggcgaccgcaccacgaacgcggttgatgcggtctcgcaagactctcgctgcacttggtacaattacaatggctcacgcaagagccaaggagtttttgggttgtctaacctcactcacacaactaggaacaaacctagagagataatagagttaggcggcaaggcagtgtaccatgcgaaagcggtaccagtaagggacaaagaaaacaaatggacatga

SEQ ID NO: 9049 - DNA, 282 bp, Zea mays
  Peptide Sequence Number=SeqID_50828
atggccacaatctggaacggcttcgtccccacgaacggcacgaagaagacgagaagacccatctcaggagaggagcagcgcgggcggccaggcggcgtggggctgtcgagcgggcggcgcggcgcagcgagcgaggtagcgcgcgagcggggtggtggtgcggcgcaacgcgctgggtggcggcggccgggcgcgcagtgtgctcgggctggcggccggcggcgggtgcgagcactggtgggaagccggaaaggagataggaagagagatgcgcgggattag

SEQ ID NO: 9050 - DNA, 204 bp, Zea mays
  Peptide Sequence Number=SeqID_50829
atgagctcgctgacggcgaggctcgctctgctggcgtacctgctgctcgcgacactgctgcacccctgcctctgccatgccgcggcggcggctccggccgctcgtggtgccggcaactggagaatggatccgaaagcgatcgaccagggggtcgcctacgtcctcatgctcctcgcgctcttcgtcacctacatcgtgcactga

SEQ ID NO: 9051 - DNA, 624 bp, Zea mays
  Peptide Sequence Number=SeqID_50830
atgtctcgtggcttggcaacgacggcgcgccgcagtcttccttctcctgtgctggtgtttgtaatcgtcgtcgtgtttcctttggccttgtgctgcccgtcttgggagtcggagctcgtcacttatgttgagctcggcaacgatgactcaggatgggcactattggcttatgttgcaccagagtcacgagtggtgggagctggagacttggttgatgagccaaaaaaagttgctatccattatcttcgtggttactttttacttgatttctttgttgtgcttccactccctcaggtgatgatactgctagtagttcctaaagttgggttatctgctgcaaactatgctaagaatttattgcgtgtcactgttcttcttcaatatgtcccccgtatcatcagattcgtaccacttcttgatgactgtggacgtggcattgggagtggactgtacagacagcagtggttcaatgactcgggtgcagaagcttgttttaacactggaaatgatgctactttccaatatggaatttatgagcaggctgttttgctcactacagaagacagtgctgtaaaacgatatatatattcattattttgggggtttcaggtcgttactatctaa

SEQ ID NO: 9052 - DNA, 378 bp, Zea mays
  Peptide Sequence Number=SeqID_50831
atggccgcctgggcctcagccgccgcccgacgagcactgcggcgcgcgccacggcgtgccccagcacggctacggccacccataggtatcgtgccgccgcgtgctccactgccgatgtgccgcgccatctcccaccagatccgcacaaaacacctcgccaccgccatcctaggggccgagcagttattgcagtacttcgactctctaaacccaattaaatgctggggtagaagagatatggttgtggacaattattgcaaaacagagggagtaagatcaggatggcaaggatatgcaatgtcaacaataaaaaattgttctgaacagtgcaacttcagtatttctagaaatcagtatatgatcaaaggtttgttttga

SEQ ID NO: 9053 - DNA, 744 bp, Zea mays
  Peptide Sequence Number=SeqID_50832
atgactgatcaggagcgagatgatgttcccatgttgctaagaaatgttgagctaccaagatttcctctaagaagtacttcaatgtgtataccagtcagggatgatgattatgaagaagacacctttgtgccccatactggtcctctattcgtccagccatcaactcagacggcaccgggaatttcatttacaggtagagacacacctgataggcttcctaaaccttcacagggaaaacaagtcagcaagccacatgcaatcatgccagaagaaataagaggaaataagtggtcttacagtgggcaggttccaaagaatgaacacttgatgatgtctgggcctttggggcaatgtgataatcccgactgtgtgaattgccctcctgcttgtaaaaacagaagacattttcagagaggttcaaatgctttagacaataagatccataatattctttatggtcacagtcgtggatggaagaagaagattgagcaaatcatggcatgcattccgattatgaacccacatgcaaagcctgttcagcggtggaatcaattctttgtcatatcatgcctgattgccattttcattgatcccctgttcttcttcttactatcagtacgacaggatggcaactgcatagtgttaaattgggaaattgctacagcgcttgctgttgtgagaagtgtgactgatgctatttatttcctccacatgttgcttcaggccaacattctggaggtctaa

SEQ ID NO: 9054 - DNA, 750 bp, Zea mays
  Peptide Sequence Number=SeqID_50833
atgcaactcaggcgccgtgatgttgaaaagtggatgagccataggcgattgcctgaagatttgagaaggagggttagacgagccgaaaggttcacctgggcagctactcaaggagtgaatgaagaggagcttttgagtaatttacctgaagacatccaaagggacatacgtcgccacttctttagattccttaataaggaaaagattttgaacgttagcttttgcgacaatatatacatctatagatgcactatggatgtccgattattcaccttgatggattggcctatattggatgcaatatgtgacaaattaagacaaaacttgtatattagtggaagtgacattctttaccaaggtggcactgttgaaaagatggtcttcatagtgagagggaagctggaaagcatcagtgcagatggcagcaaggctccattacatgatggagatgtatgtggagaggagctcctcacgtggtacttggaacactcttcagcgaacagagatggtgggaaaattaaattccaagcttttgtactcagagcaagtgatctggaagaagtcacctcgcagtttgctcgattcctgcgtaatccacgagtgcagggagcgatcaggtatgaatccccctactggcgaaccattgctgcaactcgtattcaggttgcatggaggtatcgtaaaaggcggctgaagcgagctgagaagtcgaggttgagcgaagagacttatgcctcacttggatcttga

SEQ ID NO: 9055 - DNA, 558 bp, Zea mays
  Peptide Sequence Number=SeqID_50834
atggagctgctgctcgtcccatgccgcgccgcaagcgcccgcccgctacgcgcagccagccccagagcctttcgctgccccagcgccaggccggcggccgccagctccagcaacgccgaggtcatcgacaccacggcgacgacgtcgtcgccggacgccccgaagcagtggcgcgcgggcgggcttgggctggagctgtcggaggagttgcggcgcggcatgacgtggcggatgctggcgcctcccgcggcggcagtggcggcggacgccgcgttcctggggctgctcgagcgcgcacagcccggggacctgccggcatgggccgccgccgcgggcctccgccgtgctcttcgcggcggggctgctcggggtccactacggcttcctgtcgtcgagaccttggttgatctaagaaaccattcaaactcgggacaaatgacctttgaaatgctcgccgtacggtggagggaatacagcattttttacaacgagcaagagaacagaactgtagctgcagcagggttaaagggagtgatgggtgaagaggataaaaactga

SEQ ID NO: 9056 - DNA, 471 bp, Zea mays
  Peptide Sequence Number=SeqID_50835
atggcgctcctcgcgccgagcccgcgcgcgctctgcgtgcgggaggccgcggcggcgtcgccgcacccgcactcgttggcgaccgccgcctgctcgaccgttggcggcggggtggctgggcgggcgctgtggctgtggaacggcggcgggacggggaggaggaggagggagcgccgggagaggttccgggcggaggcatacttctgggacgtgtccaagccggtggagatggaggagatcgacagcatggagaagctcgacgacgcgctcaggtggtccgtcgagaacaaccagcccatcatcatcgactggttttacttcgtcgatgtcaacaaagttccacaggcggtggtgaaaagaggaaatgtaactctctggaaggacggagagtggaaagcagaagtaataggtggtcacaaagcttggcttgtgatggatgaggtcagagaaatgatccagaagaacaagtga

SEQ ID NO: 9057 - DNA, 2085 bp, Zea mays
  Peptide Sequence Number=SeqID_50836
atgaagggcgcgtggaggcagagcggcgtggcggccgtggccgaacacctcggccacctcggcggagcagggctcgtcgggcgagcgctgcccgtcaggctctgcctctacggcctcacgctcaccttcgccggattcgcggtcttcctctgcttcgcgccctccctcatcgtgcccccagcctcgtcgccgggcgtggcgtggttcgacgacggcctgatcgcctccgcgtcgccgtaccgcgcgcaggtctcgggcttcctctcgtccctgtttcccgccatctcctcctccacggtgcctcctggtggcgtcgcggtgagctgttcccgaggcaatggctccagcgcggttcggcgcggcgagcagttgggaagcggaggtggagctccggtcagcagcaaggaagcgccagttcccggggatgctactgcgacggtgctgagcggcgcggcgcccgttgatcatgtgcaaggcggtgccaaagccaagcattccgcctggagtgccgctgccgagtcgaagggtgggcctggacctggactcgcgagcggcggttcagcccagaatgtcacgtcggcgaaaggaggcgtgcctgttgggatcaacggttccgacgacacgaacgcgagttccgtggatgccggggatggcaacggggtgagaccgagtgcaaggtatactgccggctccacgcaccagttgggaagcggaactgcagctttagtcaatggtgctactgcttcattccttaatcagactgcgagtgaagttgcagcggccatggacggcaatggaagtgcagctgcagtcaacaaccagaccgtcccaattcaggctcctgcagatagcaagagccacagttcagctgcttcagatggcagcaacagtactgcagccaataagcagaatgaatcgaccgctagtcctcaggggagcactagtccggtgaaagatcgatctgcacgaggggccaccccaacagccagtgacaacggtgatgtgccggtggaagcagatgctaatgccggttggcgcatgaaggctgattggattgagaacatggcccgctgcgacatgttctacgggaattgggtccgagatgactcgtaccctctgtatcctgcgggatcatgtcctcacgtcgatgagtccttcaactgccacctcaacggccgtcctgacaaagcttacgagaggctccggtggcaacctagcggatgcagaatcccaagattgaacccaactgatatgttggagaggctgagggggaagaggctggtgtttgtgggtgattcgctcaacaggaacatgtgggaatccctgatttgtatcttgaggaattctgtcaaagacaagagtaaggtttttgaggtatccggcaggagccaattcagggctgagggctcctactctttcttgttccaggaatgggagatgccaatcagcaacggaaagggtacccgggaaactctcaggcttgacgtcatcgatccagcgttcccgaggtacaagaacgcagatatcattatcttcaacactggtcactggtggacgcatgacaaaacttctctagggaaagattactaccaagagggcaaccgcgtgtacagtgagctggacgtccacgatgcctttcggcgagctctcaacacctgggccaagtgggttgattccagtgtaaaccccaagaaaaccactgtgtttttcagaggctactcggcatcccacttcagtggaggccaatggaattcgggcggcagttgtgacaaggaaacagatccaataacggatggccagtacctcacgccgtacccagagaagatgagcattctggaggaggtgctccgtgagatgaaaacgcccgtcgtgtacctgaacataacacggatgaccgactacaggaaggaggcccacccttcggcctaccgcaagcaggagctgactgaagaggagaggcaatcgcctgagctgtaccaggactgcagccactggtgcctccctggagtaccggactcctggaacgagcttctctacgcacagattttgctgaagcagcaacatgcgatggcgatgcaacaataa

SEQ ID NO: 9058 - DNA, 822 bp, Zea mays
  Peptide Sequence Number=SeqID_50837
atgtccggtgtgccaccggacagtgtctggtgcaccaccggacaatgtccgaacgcattcaatgcgctacagtgcgcgtcagtgtcagagcagcgccagaaggcgcaccggacagtgtacaccctgcctgcgtcgccctccatcctgggcgactcgaacgtcaaccctagccaccgccgcaccctctccccctccctccctcccctctcctgctacgccgccgctgaagcagaaggacagcgccgcctgcgccactccgactgcagtgccactcgacagagtgagtctgacaggcaatcaggccttgccaaaggcgccacggcgaactccgctccgcccgaccccagggctcggactcgggctaagacccggaagacggcgaactccgctccgcccgaccccagggctcggactcgggctaagacccggaagacggcgaactccgctccgcccgaccccagggctcggactcgggctaagacccggaagacggcgaactccgctccgcccgaccccagggctcggactcgggctaagacccggaagacggcgaactccgctccgcccgaccccagggctcggactcgggctaagacccggaagacggcgaactccgctccgcccgaccccagggctcggactcgggctaagacccggaagacgacgaaactccgcctcgcccgaccccagggctcggactccgccctggcctcggccgaacgacttccgcctcgcccgaccccttggctcgggctcggccacggcaacagaaaggcagactcaacctcggcttcggaggaaaccccacgtcgccctgcctag

SEQ ID NO: 9059 - DNA, 2700 bp, Zea mays
  Peptide Sequence Number=SeqID_50838
atgccgagcgaccattttttgggaggtcgacactatgaccacgacaccgatctcctgccacgtagatgccagctcgacataccggagcaagatttcggcgccatttatattggcgtcgagacgaggaccactcaatccaccttcacttcaccgggcgggatctggtcgcaatcggatccacaccgccgccgcggccgcctcctcgggtggagtcccgggctcgacgagacggaggccagggtagacgacggaggcgacgaggacgacgaggctgaggaggggaagcccatgccggccgccggggcccgccgctccactcgcgtcttcatgcccaaggcggctaagccgccgcaatcccaggagcacgtcgatcccgccacccgggtcctccgctccggcaagcgcctcgccgccgaccggatccgctgggacgccaaggaggcggcagccttccacgtcgacatcaatcacggccacgaccagcagcaccaaaaggaagattaccccaaaccgggattgccagctctgacaaagtccttcgggctcgtgtacagaaggaaacgccgtcgccgccggaggcaccccgccgatgaggtcgtcgccgaggacgaggacggcagcaggaggtttgggatagtatacaccaggaggaagggcaagcgatcgaaggtcagccctctcctggtcccgcaagagccagaggtcccctgtgacatcgccgccgccataccatgctcctcctcccgggagtttgcgtcaagaactggtttcttggatgcccatttctcggccctggtagatgatgccgtcacttactctggggctcagatgctcgtcatccttgtcgatacgtcttgttctgggagctctcaccggctcactggccttcttgtacccatgctgcggtggatgcgccgcagttggcagcgggggaagttccggaaccttgcgacattcatcttctcttcgggtatagctgctgcgtttgcatcccacggggtgcactttgtcaagctccagtgccagagcgcttctgcattgttacacaggcctcttgcgcattgtgggtggtgtgtgcttcatggttccaagaaatctgaaccgctgctctcagtcgatttctcagcacttccttcatacttttcgagcttgcattatgctgtagctcttgattcgatgtatctgtcagctatgattcagcacagcaggctgctggttgagggatctgaagaaatctatcctcgctctcctttatatttggaatctggggctcagagcagtggttttgccgctacggccgcgggtaacaatgaaccttgcagagttgttccgaactacatgcccctcgaacaagttgctggactagtggcacatggtctgaggttgaagaagcatcaaaggcggagaactatgagacatccccgaaatcggcggcgacttattatagctagattacctgacaatggaattgggatgaagcacagtacaacttccatgcaaacagaagaaaatgtgcgatcaagtaggcaaggacctcctgtggagcctgtctatcctaaagcagcattagaaatttctcttgatttgcttgaaaacatggatgaaagtgatgtttcgactcccatcggatcagctaggagaaagagatcttctttgaagagccctgttgagagaatgaatgaaaaggtggccttggctgaggtgagacagaacatagattctgttcaaagcaaagcgaatcttctaaatcttcaagctgataggtgctggagggaagaaggtgctgaagttatgctagaactatcagataccaataagtggtgtatagttgtgaagatacaaggtattactaggtattcacttaaaccttcagatgttaggtcatatgtcattaatcgtcattctcaagcctacatgtgggcagttgatgatgcatggaaacttgagttcactgataagtgggactggctgttattcaaagagctgcatgttgtgggccgtgagcgtaattcccaggggaagacaatcccaattcctggggtacatgaagtttctgatggcatggaagggattgttacagatcctttctcacgccctgtgccagactatattaggatggtggatgatgaagttggacgagctatctcaagagattctatttatgacatggactcagaggatgaacaatggctcattcagttgaatcctgcagattcagattcaaacagctctcaaaggaatcatctctcttacgaagactttgagaggataataagcatatttgaaaaggatgcctacaacaatgcccaaggaaaaaatgatttgagtgagtttttttatagatatcctgctttaggaaaggatgataacgtgcatgctgtgtataaatattggacaagtaagaggtccaagagagctgcaccattgcttagggtatttcagaataatcttatttcacttgtctgtgcattatggttgacagacaatgctgaagaggacgcagctttgcacagagttgcccaagctgaacgtgcggcaaaacaggctgtagaaagagctattcgactgcgcaacagagcccagtctctcatgacaaacgcagagctcgcagcatacaaatccgtcatggctctcaggattgccgaggctgctaggatatctgactcgtcccgagatattgtttgtactatcctcgactaa

SEQ ID NO: 9060 - DNA, 282 bp, Zea mays
  Peptide Sequence Number=SeqID_50839
atggaagaagagaagaaagctgatgcgaagcgcattgccgatcttgaatctgctctaccagcacaagtggagctacataagtctgaggtgctaaaattagaggaaaaacttgatgaaaacaatttctgcacaatggaattttctccactaatagaaccttataatgtcaaagacgatccaatgttgaaaaaaatccttgctgaattcaaggtagtgcatgcagcaatagacgaagctcttgatacagtgctgaatgaagctgctgagaaagtcctgaagtaa

SEQ ID NO: 9061 - DNA, 483 bp, Zea mays
  Peptide Sequence Number=SeqID_50840
atgggatgctccctgctgccctgcactgtgaagggcgacgctggtgtttccctggtcggtgtgctgctggaatggggcgctaaggaagggaaggaagggctgctgctcttgggtgctgagctgaggaaggggaaggttcaggaggctcgaccatggggaagaggagtacctgcgcccagggagctgagtggaggggctggaggtgagggtgccatggctgcaacagagggggcgtcggcgtccaccatggggaaaataggaaccacctgcctccatggatgccgtcttgagggagcaagggaggtgcttgccatggacaacagatggagaggtttcctgctgctgagccccatggagaacagggagaggtgccatcttggggagaccacgagcaggggttggcgccttggtggttgctgtcctgggaaaccagagaggaggatggcgtggggagaagaagtggagaaggttgatggtggctag

SEQ ID NO: 9062 - DNA, 372 bp, Zea mays
  Peptide Sequence Number=SeqID_50841
atggggaactctgtggtggagagagcctacatccaggacatcgagcaagcagggatcgatgacttggatgactcagatgactccaaggatgaggaggagtccatggaggaggaggaggacgaggacaggtacgatggtggcaaggaggggggcaaggacgataaggtcatcagcggtggcggcgacagcgacaagggcggagaaaacagaggtggcagtggcaagggtggaaacgacagtggtggcaatggcaagtgtcataggagcttcggcgctagaataccttcggagcagggcatagagaaagacgatggtgtcaacttcgtcatgacaacaaggaaacgaagacagaagatcaacaaagccaggtga

SEQ ID NO: 9063 - DNA, 448 bp, Zea mays
  Peptide Sequence Number=SeqID_50842
atgcaacgacgacacgccgggtggctctgcacaacggcactggcaaggcgcgcagcacggcaggacgaaggcgaggcggtgatagtggcgaggtcgagacgcgatgacgacggcgagcacgcgggctacgcagagaaaacagggcggctgggagcagttcgtgagggagacaggggagagactacgtctagagaaaagaatgcaggcaggggcaggcagggtcatgagcagccgcgcgtccgcgcgacgtgcgcgacgtgggcacagtcggtggcggaagacctggctggagtgcgcaggcagtgtggcgcgtgcggctggctactggcatgcggctgggacgcgctgcttgccgcggaatggggcgtgcgcggggcggctgagagcagcggcgcgggagtggggccagtgggggtagcgctgggccgcgcgctggctgtgggtgggg

SEQ ID NO: 9064 - DNA, 2496 bp, Zea mays
  Peptide Sequence Number=SeqID_50843
atgattgtcaataccatcctgaaggacctgtcggacagtagcttccatgttggtcgtgttgctggcaagagcaggaaggcgaccagtaagtggaccaagatcaagccagtcatcaagctagaaggacgtggcttggccatctccaagatttaccgacgtgtttgcatagtacaacgggatcagctttttgagttgagtccagtggcagctgttgaagtggggattgacattgatgatggctctactcttttgaagctggcatcaaaagttgattccatcatagaatctcttgagaatgataagcagaaggtcggggttggcgctgagatttcaagggaggctctgaaccatctgcttaatttgatttcaaagaagatgattgtgttaactgcagtgcttggcggcttgaagtatggatatagtgctggtaagtacgaggacttgatcgcttcgctggtggaactattggccccactaagcctcggagcagcatgcgggaggctctggagaaggaggacaaggagaaggcggcggctgctgcggcggccaaggagaaggcggccgtccccaagaacggcaaacggcaacggcggcaagaatggcggcggcgccggcagcggcaacggcggagcgcccccgcagtccggggaggagacggcccgcgagatccaggtggtcagggaggcgtaccgccgcgagacggccgcgccggcctacgtcatacccgaggagccgccggccgtggtcgagctcgtcggctggtacatctacggcttctgctcctacttcatcacccacctgctgctgccggtcctcttcccggccatcatcacgcaggtcgccttccccaactccgacttcacgcccgaccccaagtacaccctcaagggcgtcacctgctccgtccacgagatgtccatgtaccagaggcttaccaagcactccattgtgatcgatggatcccggatgtcaccattgggctggagtggactgtcgtgggcaatcggcatcctcatcgtggcgccgctcctcacccagaccgctcaccatctcgaccgtggccagtaccagtcgctgatcctcattgccgccacgtccttcgggtccttcttctgcctgctaacaggcttcttcaagacggtctgggtgttcctgttctacatcctcttcatcgctggctcgatcatcgtcgctgaggcggtgcacacccgcaaccttgggctgatgatccgtggcctggctgcgcatgactcgggcaagcaccttgtccttcgccgccgcgctgctgccagccagctcagcctgtactgcactgccataggaggcattggagctgccctcatggcagctttcatgtaccacatgctgcggcgcactgaccagctcactggcctctgggtcgtgtccatcttctgtggccttatctggttcatcggcatctgccatggcctcttcacaaacaggcccagcagctcgtcacccaccaccgcattcgagcccaacttcttcaccaagctcagctacagcatgaccctcctccgttacccgcaggccattggcagcctggttgcggtgttcctgtcctctttcgccacaatgtgcatcttcaccagcggcacgctctatgctatcggtggtgtctgcatcaagccggtgctcgtgcttgcgctatggatcctctactttctgttccccttgatctcgctcccgctcctccacccgatccagatcataatccgcgcggacgccgtgcgcatgcagctgctcgggttcataatctgcctgttcgtgtccggtgccgggttctacttcaagagccacaggtggagggctgcccacatcatcgtcatcgccctggtccagagcaccgccaatggcatactgtacgcgttcggccgcatcctgctcctcgatgcctcgccgccggggaaggagggtgcgttctcggtctggtacgcgtttgttcgtgtcaccggtgccatgatcggcttcgctgcctcctccgctggccctgggcgcgcgggagggtcctttgctgctgcgttcctcgggagcttcctgggcatcatcgtgctgatcttcggcaacgtcagcaacatcggggcgctgaaggcggccgggcacctcaaggggatggacgacgagaagaggatgggcggtctcgggatggagaagggcgagggcatgggtagcgccgtcgctgattctggcgagagcagggggagggttgttgttttgagcaaatatgcggatgtcaactataagcttgtccggctgtccttcaaccgcattcgaactcctgcacctgcaatccataaagacaaaatactgtataagcccgaggaggaagacgaccctgcgacatcgcggaccgtccggtgcgacacagggaaggcgccactcctgtgcctagaaagcagaccgtccagcccagagctgcggatggtccacgccgccacagatggcaacgccaggcgatacacccctagtgattag

SEQ ID NO: 9065 - DNA, 381 bp, Zea mays
  Peptide Sequence Number=SeqID_50844
atgacgtgtcggtccgagccttgggtcaggcgaggcagaggctcctccgaggtcgaggtcgagtctgtcttccaaggtcgaggtcgagtccgagccccgggtcgggtgaggcggagaccatcgtctgaggccaaggcccgagtccgagccctagggtcggacgaggcggagttcatcatcttccggggccgaggccgaggccgagccctggggtcgggcgaggcggagcttcctatggcacatgaggccggacttggctgctgtcagcctcactctatcgagtggcacaacagtcggagcgacgcaggcggcactgtcttcttgtcaggccggtcagtggagcggcgaagtgactgcggtcacttcggctctgtcgactga

SEQ ID NO: 9066 - DNA, 345 bp, Zea mays
  Peptide Sequence Number=SeqID_50845
atggcggtgatagagaagggggagggcggtccaaccaggcaggcagctgcgccggatccaaccaggcaggggaacagcgtcggcggcggaagaagggagaggcgttgcagggccggctcaggcgatgtacgccagcagcctacacaccaaagcaggaaatacgacaagagtagaggtggcgcaaggagggcgccggtcgcggcgagcgcaacaggggaggacgtcgcgatcagcagggggagggtcagagggggaggtctgggtggccgccggtggcaggggagatggcttgcggcgatagggagaagggtggtggcagctagaggggggagggagaaaccatag

SEQ ID NO: 9067 - DNA, 471 bp, Zea mays
  Peptide Sequence Number=SeqID_50846
atgtcatcgctcacccgcgacatcgtcttcctcgtcctccagttcctagacgaggagaagtttaaggagaccatgcataagtttgagcaagagtcggggttcttcttcaatatgaagtactttgaagcgaagggccatgctggggactgggatgaggtggagaaatacttgtcaggtttcaccaagatagatgacaataattattcgatgaagatcttctttgagattaggaaacagaagtatttggaagcgcttgataggcatgatggagcaaaggctttagatattcttgttaaggatcttaaagtcttttcgacattcaatgaggagtcatataaggaaataacacagcttctcacttttgagaattttaggtttgttcatcttgctttctcaatccatggcatcagatcgttgcaaagcatttacaataaatatttcttagagcttcttactccttcaatgttttag

SEQ ID NO: 9068 - DNA, 831 bp, Zea mays
  Peptide Sequence Number=SeqID_50847
atggagagggcgaagagactgcccccgcccctacccgatgcctaccgcacgccagcccgcgcgaaacctccgcacgcccgcctatcccccgcattcgcctcgaatctcacgcccgtaagccagtccccgcgaacccgccgctaccgcacgcccgcagtcgccgcgaaatctgccgccacgaaccgcccgcacgccagcctaccacctccctacgcccgcctgcccgcccgcaatcctgccactaccgcgatctggttgcctgccctccgcaatccagccaccccactgcgaccgctccgtgcatgccgcaaccgctgcgatccgcccgccctcctcaatccgcccgcccgccgcaatctggccgcccgcccgccctcctcaatcgcccgcccgccgcaatctggccgcccgcccgcccgccatgaccggcgagatccggtgcagcggcaaatgcaggaaaagcgggtgcataagcacgtggagacgctggacgccaaccaatgttccgcgagaacaggcaccgccaccaggggccctttgcggaggcggtgccgctccatgaacgacttcgctgccgcccggctcgccacccgcgtgcacgacgacgtggagcttgcctgcgaccacctgcacgctgtcgaggtcctgctggttctagacgaggccagcaacggttggagccaggagctccccgcctctcacgctgccaccgctggaggaagaggtggagatgcgagtgctggagccgatacgtcgttgcccccttggttcaatcgccgatttctagaagtaggttcagctaaaacatacacggtagaagcaacaacctaa

SEQ ID NO: 9069 - DNA, 309 bp, Zea mays
  Peptide Sequence Number=SeqID_50848
atggctttcaggagtcactacacattacaagagatgttgtggcagactgccagggcaaaccaagaaccggaagattccacccagaacagctggaacaatcgggaaagtggccagagttctggccggttttgccaggatgatgggacatggagacgtgagctttataaggattctagaggaactcagacttcatctgaacctacttctagaaatctgcaatcaaacaaaaaatcccaagcgcaacaaaaggttgtgaagaaattactagtttcagatcgtcgtggaaagttatctggtgtcgcgagctag

SEQ ID NO: 9070 - DNA, 264 bp, Zea mays
  Peptide Sequence Number=SeqID_50849
atgaaccaagacatacccctcgatgtatcgcagaaggtcctggccacggtggagggtggaaccgcggcgcattttctgcgacgtgaagcccccaggcacgacaccaaggacgcggtggtgaagagcgctcgggtcgactatggcggctaccctttccgctcggtgctcacgacaatgtggtttacggggaagaggatggggtcccgatggcgcgtggcggtacagggtgagatggtcaagaaagcgaggaggttttacggttaa

SEQ ID NO: 9071 - DNA, 1788 bp, Zea mays
  Peptide Sequence Number=SeqID_50850
atggcgtcgtcgtcgtctacgaccgctactaccagctgctgccccctactgctggcgctcttatgggtcctcatggcggcacaccgcggccacgccgccgccgtgttcaccggcctggtcttcgagagcccgggtgaggcggaggccttcgaggacgcgctgctgcgccaggcctgcttcaacgtctccttcttcttgtccgcgggtggccgccgcgaggcctgcgtgtcgcggctcgacacggcgcggggaggcgcgggcagcgggcccgtgcccgtgctccgcgccgcgctgcgcgacacgctcggcgaggccgtgggcgccgcgggagcggtccgggggctcgcctcgctgtccaaccacgcgcgcgaggaggtagcgctgcgcgactgcgtcgagctgctgggatactccgtcgacgagctcgggtgggcgctggacgctatggccgccgacgacaccgacgacggcggcggcctggagctgctggactcgcccggccgccgcagcgcctcaagccgcgccgagaacgacatccacgcgtggctcagcgcggcgctgggcaaccaggacacctgcgtggccggcttccacggcaccgacggccgcctgctgcgccgcgtcgaggccgccgtagcgcagctcacgcagctggtcagcaacctgcttgccatgcacaagcgcctgcgcagcatcacgccgctgcgccacggacctcctaaaagtaacagcgcctcctccggcgccggcgacgacgagctgccgccgtgggtgatggacgtcgaggacgaggaggagctcgtcgccaagcgcgcccgccgcgcaggcaggacgtcgtcgacgcgcgtggacgtcgtggtggcgcaggacggcagcgggcgctaccgcaccgtcagcgaggcggtggcacgggcgcccagccacagcaagaggaagtacgtgatctacgtcaagcgaggggagtaccacgagaacgtggaagtcaggaagaagaagaccaacatcgtcatcgtcggcgagggcatgggcgagacggtgatctccggcagccggagcttctccagcggctggaccaccttccgcagcgccaccttcgcggtgtccggcgccgggttcatcgcgcgggacctgacgttccgcaacacggcgggtccggcggcgcaccaggcggtggcgctgcgcgtggactcggaccgctccgccttcttccgcgtggccgtggaggggcaccaggacacgctgtacgcgcactcgctccggcagttctaccgcgactgccgcatcgccggcaccgtggacttcgtcttcggcaacggcatcgtcgtggtgcagcgcagcctcgtcgccacgctgccgctggcgcccggccagacgggcagcgtcaccgcgcagggccgcaaggaccccaaccagaacacgggcttctccttccacggctgcgtgctggaggccaagtacccgacgtacctgggccgcccgtggaagcccttctcgcgggtcgtggtcatggagtcctacctgggctctggcatccaggcccgcgggtggctcgagtgggcagctgctggctcgggggaccacagcccgggcctcgccacgctgttctacggagagtacaggaactacgggcccggtgcgggcgtcgcgggccgagtgaagtggcctggctaccacgtgatcatggacgccgccgtcgccagccggttcaccgtcaggcgattcatcgacgggcttgcgtggttgcccggcaccggcatcaccttcacggcggatctattcaggagatga

SEQ ID NO: 9072 - DNA, 384 bp, Zea mays
  Peptide Sequence Number=SeqID_50851
atgaaggactgccacacgcgcgcgcgcgccgccgccgccgccggccgggccgtggccgtggctcgtggtgatgtttggtttaagaaatataacataaatgataatggtaatggtttatactcaattactagcggtaagccggctgcagagccgagcgtgtggcgtgacgggcagcaggaacaggacccgcgcgaaggaatgcggcacagggaggactgcggtcgtcgcgctcgggctctcggagtgggacgtgtttccattatctacgtgattggttggttggccggctgcatccagacccacggcgtcccgttgaccttgcgcagcttctgtttggttaaccggagaggaggatggcagcctgtacccgcacatgcagcatag

SEQ ID NO: 9073 - DNA, 999 bp, Zea mays
  Peptide Sequence Number=SeqID_50852
atgagcttccaggacctggaggcgggccacgtccggggggcgccgcccggcggcggccggaggagcggccgggcggggggcgccggcgccggcgccggcgcgtcgcaggccgtggcgtcgggcgtcttccagatcaacaccgccgtcgccacgttccagcgccttgtcaacacgctcggcacgcccaaggacacccccgacctccgcgacaggatgtgcgtccgctcccccacccgcctacccgccttaccttttgccccccagcctgttccgatcgccgtacctttaatccccatctgttttggtattgcggattcggcccgctctgcttttggtccgcctgggaaattacgtttcgtccctgtggtagaccgtggatgcgtcggttcctgtcgcaagtggttgacacatcgattactgttgccaatggttgcttggggcctaacttttctcccacccattcttctagagattgcttccgctaccaagaagattgctgatgcaaagctagctaaagatttccaagcagtcctaaaagaattccagaaagcccaacgattagcagcagagagagaagctgcatatgcaccttttatttctcaagcgggcttgccacagagctacaactcaagtgaagtgaataatggtgctgataggttggcagagcagcgcacacagcttctagaatctagaaggcaggagttggtcttcttggataatgaaatcgtgttcaatgaggccatcattgaggagagggatcagggaatacaagagattcagcaccaaatcactgaagtaaatgaaatcttcaaagatctcgctgtgctagtccatgatcaaggagcaatgatagatgacattgattcccatatagagaacgccgttgtagcgacttcgcaggctaaaggccagctttcaaaggctgctaaaactcagaagtcgaactcttctctgggcaggtttgtttctgagaatctgaggataatttgtgtattttga

SEQ ID NO: 9074 - DNA, 630 bp, Zea mays
  Peptide Sequence Number=SeqID_50853
atggggcctctatcccacaattatcttctcagagtagcgcacctcagtaatcctcttatggtggatatcagggttggtgttatcattggaaaagctggggaaactattaggtatatccaacttcaatcaggatcaaagattcaagtcacaagagaccatgaagctgaacctggtgcactgacaaggcaagttgagctttctggcaaacctgagcagataagcaaagctgaacagttgatcaaagaagttctggcagaggccgatgttgggtcatccggtgttggatctggaggccggaaatacaatgcaacacagcaaggtgctgagacgttccagatgaaaattgctaataacaaggtgggactgattattgggaagggtggtgagactataaagtccatgcagaccaattctggagcccgtattcagtcttcaatcagtgatggtggtctttctcaggatgctaagcaatgcaggaacctgaagttcctccataccgaagggtgcttgtccatcactaaggcgtcactaagagcccttgtgcagtatgccaagagactcgagtctcttactctgggaagctaccctcaaattgagcaacatgacatcttttccttactgatgaactaa

SEQ ID NO: 9075 - DNA, 423 bp, Zea mays
  Peptide Sequence Number=SeqID_50854
atggaggtggccgccgccggtcgctactcgctaccttctctcccgtctgtgggtccactgcggcgcggagagggggaacctgggaggttggcgaggccggctgcgaggtgggaccgtgggagggcatccgggccagccggacaggatgttgagggccggccgactcctgcagtcccgtcgccgtcggaggaaggaggcgagctcggcgacggcttcggggagcttgttgtagatggaccatggacctgtggagcgcaggcgcggaggcggccgagaggagcacgcgcggagcgtgtactaccgactgcgtggcgggcgaacggcgcgtggttgatgacggactggaacgacggagcgatgacaatgaggccgccatgggcgctgaagggtcaggggtgtgccgaccggggagagcagcagtag

SEQ ID NO: 9076 - DNA, 1431 bp, Zea mays
  Peptide Sequence Number=SeqID_50855
atgagagagtcagaggagctcgacatcgagatcgcaaagccagcaggcagcctggtggaggagatggacgttggtcggtcagtttgctcaccggccgtagagatcgaaggcttcgcggaacgcgtcgggtcatcgaccatagctcccagtccttgtataccgtctcatgatatgaatctgcagtctttgcctgttgctactggagctccttatccagcatctatggcaccatcttccagcgctttctccacggttactacgcatggatgctttccttattcgacaccatccaccgcgcatccttccctttctggaatcctgccctgcaacaacaacatgatatcctattctgtactaccagaagaaccttcaggtggtattttctctggacagtctcctgaaggctgtgcagaccctggtgacattgattaccgtgttgagagtcagcaaattcctggtcctggcagaaccgtcgacgaatccgacaatagagatgaatggtttgtccccactgatataacttggaactggcaccaaatggctgaatccgcacccgttccctcgtatccgaattctaagtcatggcaacatgatgagcagcacatgaatttcggcactgtatcactatcaccgtataaagtactgttggctttctattgtgctaaacctaaagcaattcttgatataatgaatgttgaaggtctgactcgcgatcaggtcaaaagccactttcagaagtacaaacttcaagtaaagcagcacccttctgaagttccaggtacatcagtggagatgaccatgcgtagcgaagcaataccttcagacgtacagaagttcgtaacaacgagaaaaaacaaagcttttgcaaactatcatttgtgccaccatcgtcacttttacaaaaagtcccttatatttctttgtaatcaacctggcgtccatctaactcgacacatccaagactatgcattacaggtgcaagtagagtttcagaagaaactacatgatatggtagagagcacaatgctggagactagtaggagctctgaacaggggcgggcgctgcagcgtgatggtgatgatgatgcagtttcggagcctgagccgattggtggtcgttatgtaccggtgctggggcacggtgaccgtgaggacctggtgcgtggtggtgaccgtggtggccatgaggacctggcgccgatgctggtgtatgatgatggccgtgatgaccatgatggcttggcgccggtgctggtgcatggtggccgtggtgaccacgatgacctgccgccggtgcaccatcgtggccatgagcatgatgagaacccgacggctgcgccgccgggccgcgatgaccatggtggtggtgacgagggctcggagcggcggcaggagcatcggccagcgcctgatgcccgtagtgcgccgtag

SEQ ID NO: 9077 - DNA, 273 bp, Zea mays
  Peptide Sequence Number=SeqID_50856
atgacgagagagcagacgaagttcgggttgtcaaacgtgccgaggaggaggtcgcacggtgttggactggggagcagcaaccaatggagatggagtcaggccgcacggatagagaggcagacgacaatcgacattgacggggacctgcggggcaaattggagaggcggacagtggtgcagcgtgcggtgggatgggtgccggcggcgcgagcgagagaggccaccgtgatgcttctagaagccggtggatgccacggccacataaaacgctga

SEQ ID NO: 9078 - DNA, 132 bp, Zea mays
  Peptide Sequence Number=SeqID_50857
atggagatgctcaagaagaaccataagaggccgctctgcgaggcgctttcaagatcaaagatggttacaaaggagctaatatatcctcctacaatgtacttcactgataagcacacccatatattcagttga

SEQ ID NO: 9079 - DNA, 948 bp, Zea mays
  Peptide Sequence Number=SeqID_50858
atggcgttcttcagcagcggatcccgggtgctggtcgaaatcctgacgaggatgcagagcgctgaaagaccaatgcctgtcgaccacaccttcttcgagtcgggatccattcgctaccatgtggaggcttcagcgtcggatcccgagaacgtgttcctatcgatatcgacgccatcgctctcctacgactacgaggaggctgcagctgctccctcgtcgagccgcctgcctgagctgaccctgcaggaggcgaggaagacgtatcacaggttcgccgagatggtggagccgccgagggaagggtacgtcctgacgctcaagctcaacttctccggcctcacccggcccaaagatcgcgtcaaggccattaaccaggtgtcgctgctgcaatccgtggtgctgagctcgcagctgaagcacatgctggggagcctcggctcgtcgggcacgatgaggctcgtgtacaacaaccagagggagcccttcttcgtcagcaagacggctgagaagataaacgctatcttccccatgcgtttcagggatgacacggacctggccatcgccacctccttcttccaggagctgcaggaggtcgggaactcgttcgcgagggcgcccaagtgcagctggtcgccgatcccaccgccggagctgcgcggggagaacgtgcaccacctcaccaccaacggcggattcgtctccttcgttgtgaagaagaggagcaagagacgtctcgccagcctggcgaaagcgagcgacagggtgcgcaagggtttcagggccgtcctggacaagatgaagcggctgcggctgagggtcagggtgaagggcctggaccggctccggcggcagttccggtgccggtgcttcgccgtgcctaggctgcccgcgccatctcgcaccggcagaaggaaggagcactacagataccacaaactggccgagtaa

SEQ ID NO: 9080 - DNA, 789 bp, Zea mays
  Peptide Sequence Number=SeqID_50859
atgaccgcgacaaaaaaggtgtgccacatcattcgatttcgtatccttttcctcttcctctttctctctcttacaactgggaccgggaaaggggataccccaaaagggatccttctccgcgaaggaaacgggccccgagcccacctactgatcaaaggttcgaaggctggcccctcggaagggttcaacagccgcctcagagcgctcgggctccgcgcccactactggtcagaggttcgaaggccggcccctcggaagggttcaacggccgcctcaggccattcgggctctgcgcccactactgatcagggcgggaacgatcttgtaacggaatcccatcagagggaggcatcgagccctcggaccccgtcaaaaggggaccagccaagtccggcctcgagcgccataggaaactccgcctcgcccaaccctagggctcgaactcgggctcagccccggaagacgacgaactccgcctcgcccgacctcagggctcggactcgggctcagccccggaagacgacgaactccgcctcgcctgaccccagggctcggactcgagctcagccccggaagacgacgaactccgcctcgcccgaccccagggctcggactcagccctggcctcagccgacggtctccgcctcgcccgacccaggggctcggactcgacctcggcctcagaagacagactcgacctcgacctcggaggagcctccgcctcgcctaacccagggctcggaccgaccacgtcacaggaggggccatcattaccctacccctagctag

SEQ ID NO: 9081 - DNA, 318 bp, Zea mays
  Peptide Sequence Number=SeqID_50860
atggaggaggagctggtcgccactcgacaggcgcggggcatcgtactcatggtggcggagaacttcgtctgccgcgtggtggtcgtcgtgctcggctgccacctcaccgacaagtactcttggggggccgggtcactcaggatggctcgtgaacgcagctctgccgctgtgggcgcgctggcgtgctcgtcgtcaagggctgcgcgggcactgctatatccacagccagaggaagaagaccatctcgcaaccgtccgatccggattgcggatgggattggatccggagttaacccaatgtgaaccatcgatctcgtga

SEQ ID NO: 9082 - DNA, 420 bp, Zea mays
  Peptide Sequence Number=SeqID_50861
atggattcgacgtgtgctcgtgcagagagaagttgtcggggcgcggctgctcccctacgccattgctgcacactcgccgtggagctccactggagaagcagcaggccccgcgcgttggagattcgtcgtcgtgcgccacgcgtcaacaggttgcaggcggtcggtatcaactggtggtcggggacaagctcggtcgctcgggaagagggggctctcgggaagtcggtcgctgcttcacccgcacgcgccgctggggcaggattgctggcgtggctgcggcagagccatgccaagcgcgccgggcaacgagacttcggcgggcgggcaagagggcacggcgagcgttggttggaaatgtgctgctcgcgaagacggctgctggcgctgctcgaggaaggagatggcggcgatcgaccgtga

SEQ ID NO: 9083 - DNA, 762 bp, Zea mays
  Peptide Sequence Number=SeqID_50862
atggccgccgccgccagggccaaccacgactgcgccaacaagtgggcccgctggtggggctccaaaggagggggcgctgctaccggcgaccaggccatgggcgtgcacggcccctgcgtagaacgggtggccggccgaccatcgcgccgagggggagagatggggggggaaagtgtcacacccgggttttgggggcacccaagacccgagcgcgaatattttatcagcagtgcccgcgcagccctcgacgacgagcacgtcggcgcgcccacagcgacagagctacgttcacgagccatcctgagggacccgacccccaagagtacttgttgcatgcacaaccgggtaggctacggccagcgattggttgcccagaagcagatcgtcgatggagacaccagcgggtcgtttccggattccgctcgatttactagcgattccgcggccagcatgaaggggaaagagatgggcacggactcgggctcagccccggaagacgacgaactccgcctcgcccgaccccagggctcggactcgggctcagccccggaagacgatgaactccgcctcgcccaaccccagggctcggactcagccctggcctcagccgacggtctccgcctcacccgacccaggggctcggactcgacctcggcctcggaagatagactcgacctcgacctcggaggagcctccgcctcgcctaacccagggctcggaccgaccacgtcacaggaggggccatcattaccctacccctag

SEQ ID NO: 9084 - DNA, 384 bp, Zea mays
  Peptide Sequence Number=SeqID_50863
atgtcgggagaacacgccaagaacgagatggataccggcgacaagcccactacaagccatgggaaggcttcatcgggagagtctcgcaacaaagggaagggaaggagaagaagccttcttcccacaagcaagccaccaacttttgatggtgaagattatgcaaggtggagtgatttaatgcgatttcatctaacctcactccataaaagtatatgggatgtcgttgagtttggtgtacaggcaccatccgtaggggatgaggattatgatgaggacgaggtggcccaaatcgagcacttcaactctcaagccacaaccatactcctcgcctctctaagtagggaggagtacaacaaggttcaaggattaaagagcgccaagtaa

SEQ ID NO: 9085 - DNA, 522 bp, Zea mays
  Peptide Sequence Number=SeqID_50864
ccgagcaagtttgcgagacagcggatgaccaagtctccagccgagcaagtttgcgagacagagcggacgaccaagtcccccgtcgagcaagtctacgaggcagagcggatgactaagtcccacgcggagcaagtctacaaggtggagcagatgacgaccaagtcccccgccgaacaagtctacggggcagagcggacgactaagtcccacgcggagcaagtgtatgaggtggaccagatgaccaagtcttcaaccgaacaagtctgcgagacagagcggacgaccaagtcccccaccgagcaagtctacggggcagagcggacgactaagtcccacgtggagcaagtctacgaggcggagcggatgaccaagtctccagccgagcaagtttgcgagacagagcggacgaccaagtcccctgcggagcaagtctacgagacggagtgtacgaccaaattcccagccgagcaagtctacaaggcggatcggacgactaaactctgccaaacacaatcttactga

SEQ ID NO: 9086 - DNA, 1443 bp, Zea mays
  Peptide Sequence Number=SeqID_50865
atggccgccaccccaccgctgtcgtgggacgcgtcgctgcagccccggcggtcggcctcctcctcggggcccgccaagcgcggaggcctcctgctggggcgctacgagctgggccgcctgctcggccacgacaccttcgccaaggtgtaccacgcccgccacgccgacgacaccggcgagaccgtcgccatcaaagtgctcgacaaggagaaggccctgcgcaacggcctcgtcccgcacatcaagcgcgagatcgccatcctccgccacgtgcgccaccccaacatcgtccgcctcttcgaggtcatggccaccaggtccaagatctacttcaccatggagttcgtccgcggcggggagctcttcgcgcgcgtcgccaagggccgcctcaaggaggataccgcgcgcaggtacttccagcagctcatctccgccgtcggcttctgccacgcccacggcatcttccaccgtgacctcaagcccgagaatctcctcgtcgacgagcgcggcgacctcaaggtctccgacttcggcctctcggcggtcgccgaccagttccaccccgacggcctcctctacaccttttgtggcacaccgtcctacgtcgctccggaggtgctcgcgcgccgcggcaccaaacgtatacgcctcctccgcgatgccctcagaccgctcgtcctcgcccaacggctccttgccgcatatgctcgcagcggctccctcgcatcccgtcgcagatctcgtgtcctcaccatcccaagcccacccccttccttggatctaacccctcctcatgtctccgcggctagagctgatatcctcgttcatggcgggcggcgtgggtgggttcgtcacgcagaggcctttgaggccctgcccaaggagcgcgctaccaaccgcggcaagttcgccgcgctgcagcaatccattcagtcatatcttggtgtctgcggcccctttctaccctctcctccctcgcattgggatctcgtgatagcttcaagggggctacaacaaagggcgcggtcatcacggcgcttgggtcagttgggcgcgtgctcgacgggccgtaggccgagctggtgcctggtgctgcagccactccgcctcaccatcgagaccaagcacatgtactatatagaatgtgaacttagtgttgatgattttctttgtgttgatgattacaaaataaatatttttgattctaatgaagatcagttcgataacccacatgggattggccaattgataactctgagcaaaatactggagatgtctttgttcacatgtcagacttgcttacaacaatatggccatcaccctctcagtatttggggccaaaatgtgcactttaggaccgtggtaggccagttagagggacagaggactctagagattactgcaagtctgcaacccttaccatgctggtttggctttgaatga

SEQ ID NO: 9087 - DNA, 435 bp, Zea mays
  Peptide Sequence Number=SeqID_50866
atggtgcactgcaaaataacaatagcacttttgtatatattattgttattatccttaaggcacactcctggtacattcaccaaccagttgcaaacctccttcagcgagccacgccttcttatcctcactgatccaggactggtcaccaggtcgatcttttttcttctacaggacatagaggaagcaaaggagaaggaggaagaagaggctctggttgctccgggctatggcgcagttgcagaatatactgcccctagagctgacaactggggtgacgagtggggagctggtgagggtgaggccgtgaggctgcagctccacctgctggcgtcccggctgctggtgcagactgggttgctgctccagctcctcccgctgatgcgtgatgatgtgtgggatgcagctgcgcctcctccagcagcagcagccgcctag

SEQ ID NO: 9088 - DNA, 699 bp, Zea mays
  Peptide Sequence Number=SeqID_50867
atggcgctgcgtggcagcatccaaatggatacgggaagcgggcccgcgctccagtacctcctgtgcctcgcctgggtcgcggcgaccctccccatcgccgccgccgcgctgccgatccccgcggccgctggcggcaggttcatccacggcctgctctgcgccttctcgtcccgcgggaagacagtcaggccctcgtcctcgtcctcgtccaaggcggtcctgagacgcctatatgagactgaacatgtcttccactacagtccttcagctcaaatgcacatcataggatacctaacgggtattttctactatgtggccgcacctttatcacttgctagttcttgtcttcctgaagcaatacagtatcttcgatatcaaatagctgagttcatagtgaagggtagagcaagaatgccagatctatcaattgacccatcacatctcttgaagcctcttctaaagttggggtggtgccagtggattggtgctgttattttcatctggggctcactccatcagatccgctgccatgcaattcttggatcattgcgtgaacacaaagattctgatgaatatgtaattccgtgcggtgactggtttagtctagtgtcttgccctcattaccttgctgaactaggtctgggagcctgggatattggaatggattccttatttgtggatgagggtgctagcaaatag

SEQ ID NO: 9089 - DNA, 3510 bp, Zea mays
  Peptide Sequence Number=SeqID_50868
atgccgctgtcgcggtcgctgttcctgctgctcatgctcgcgctggcgccgcttgcgtccctggccgccccggcgccggcgccgccggtggcgaggacggccggggtgcaggcggagatcgacgcgctcctcgcgttccgccgcggcctgcgcgacccctacggcgccatgtccggatgggacgcggcctccccctccgcgccctgctcctggcgcggcgtcgcgtgcgcgcagggcggcgccggcgggcgcgtcgtcgagctgcagctcccgcggctccgcctctcgggccccatctcgccggcgctcggctcgctgccgtgcctcgagcggctcggcctccggtccaacgacctctccggcgccatcccggcgtcgctggctcgcgtcacctccctgcgtgccgtcttcctccagtccaactcgctctccggacccattcccccgtcgttcctcgccaacctcaccaacctcgacactttcgacgtgtccggcaacctcctgtccggccccgtccccgtctcatttcctcccggcttgaagtacctcgacctctcctccaatgcgttctccggaaccatcccggcgaacattggcgcatccatggcgaacctccagttcttgaacctgtcctttaaccggctccggggtaccgtgccggcgtccctgggcaacttgcagaacctgcattacctctggctggacgggaaccttctcgaggggaccatcccggcggcgctggccaactgctcggcgctgctccacctgagccttcaagggaactcgctccgcggcatcctgccgtctgcggtagccgcgatacccacgctgcagattctctcggtgtcgcggaaccagctcaccggtaccatcccggccgaggcgttcggcggccaggggaactcgtctctgcgcatcgtgcagctcggccgcaacgagttctctcaggtggacgtgccgggaggtctcgccgcggatcttcgggtggtggaccttggcggcaacaagctcgctggtccgttcccgacttggattgctggggcgggagggctgacgctgctcgacctctcgggcaatgcgttcacaggcgagttgccgccagcggtcgggcagctcagtgcgctgcttgagctgcgcctcggcggcaatgctttcgctggcgccgtgcctgcggagattggcagatgcagcgcactccaggtgcttgatctcgaggacaaccacttcaccggcgaggtgccatcagctctaggtggtctcccgaggctcagggaggtctatcttggtgggaacactttctccggccagattccggcgaccttggggaatctggcgtggctagaggcattgtccatacccaggaacagactcactggtcgcctttctcgtgagctcttccagctgggaaacctgacgttcctggacctatccgagaacaacctcaccggagagatccctccggccgtcggcaatttgttggctctccacagtttaaatttgagcggcaatgccctttttggccgcattccaacgaccattggcaacctccagaacctgcgagttcttgatctctccgggcagaagaacctctctggcaatgtcccggcggagcttttcggcctaccgcagctgcagtacgtgtcgttctcggacaactccttctctggcgatgttcctgaaggtttcagcagtctctggagtctgcgcaatctcaatctctccggcaattctttcactgggtcaataccggcgacgtatgggtacttgccgtcacttcaagtgttgtcagccgcacacaaccatatttctggcgagctaccagccgagctcgccaattgttccaacctcactgtgcttgagctcagtggcaaccagctgaccggctccatcccgagggacatctcacgccttggtgaattggaggagcttgacctcagctacaatcagctttcaggcaagataccaccagagatctccaactgctcatcactcacccttctcaagcttgacgacaatcattttggcggagacataccagcctctgttgccagcctctcgaagctacagacgcttgacctgtcgtccaacaatcttaccggcagcatccctgcttcattggctcagattcctggccttttatcattcaacgtgtcacacaacaagctttccggcgagataccggcgatgctcggctcccgctttggctcttcgtcagcatatgcttcgaactcagacttgtgcggtccgccgtcggagagcgagtgcggcgtgtaccggcgacggcggaggcggcagagggtgcagcgcctggctctgcttatcggtgtggtggctgctgcggcgttgctcgttgcgctgttctgctgttgctgcgtgttcagcttgatgggatggaggcgtcggttcgttgagagccgtgacggtgtcaagaagagaagacgcagcccaggacgcggcagcgggtcgagcggcacgagcacggagaacggcgtcagccagccgaagctgatcatgttcaattcaaggatcacttacgctgacacggttgaggcgacccaccagttcgacgaggagaacgtgctcagccgaggccgccacggcctcgtgttcaaggcttgttacagtgacggcaccgtgctggcgattctgcggctcccgtccaggtctgccgatggcgccgtggtgatcgacgagggatcgttcaggaaggaggccgagtctctcgggaaggtgaagcacaggaacctcacggtgctccgtggctactatgccgggcctccgccggacgtccggctgctggtctatgactacatgcccaacggcaacctcgccacgctgctgcaggaagcgtcacaccgggacggccacattctcaactggccgatgaggcacctcatcgcgctcggcgtctcgcgcggtcttgcgttcctgcaccagtccggggtggtgcacggcgacgtcaagccgcagaacattctcttcgacgccgacttcgagccgcacctgtctgatttcggcctcgagccgatggtggtgactgcggccgccgccgccgcgtcgacatcggctgcaactgcaacaccacccgtgggctccctcggctacgtggcccccgacgcggccgctgccgggcaggccacgagggagggcgacgtgtacagcttcggcatcgtgctgctggagctcctcacgggtcggcgccccggcatgttcgccggggagaaggaggaggaggaggaagaggacatcgtgaagtgggtgaagcggcagctgcagcgcggcgccgtggcggaactgctggagccgggcctgctggagctggacccggagtcgtccgagtgggaggagttcctgctgggcatcaaggtcgggctgctgtgcaccgcgtccgacccgctggaccgcccggccatgggcgacgtggtgttcatgctggagggctgccgcgtcggcccggacatcccgtccccgtcctccgccgaccccacctcccagccgtcgccggcctga

SEQ ID NO: 9090 - DNA, 290 bp, Zea mays
  Peptide Sequence Number=SeqID_50869
atgcccctgggcgccgcttcccctattgagggtgtcatgttccccagctttgtctttcgtgggcgaaagcccggtccacctcggaccggcaacgatggcatccccgacgtcactcccttcctgaaggcgtcactactgaagggatgtggctcggcaacgatgatgtgcggtgatccccctcttcttcgtgggctggtttgcttcgaagatgaggtatttggcggaggcggggcggtggatcatggttttggaagtctcgctggtgaagaatcagagttgtatcgagaggg

SEQ ID NO: 9091 - DNA, 690 bp, Zea mays
  Peptide Sequence Number=SeqID_50870
atgggcggcaggtggatggcgggcgcgctcttccttgtggcatgcgacggctaccaggcctcctcccaacgtagagatggggatgggcggtggattcgtgggtccggggcacgctcgggtggcaccgtgccgtccctggtgcctttggtggtgccgtcactgtcgcctaggttgggttatccgatcgggaggatagtgagctttgggatggtggcgatcgggaggatagtgagctttgggatggtggcggtggttgtctccgctggtcctgtgggcgcagccaggtggtggactggcgacatctgctggtggtggaggggttgcgtcatttcggcggcgggcacgcggcgtggtggatctagggctggccggccggcgtgctcctcgtggtgtcggggttgtggcgtgtgggtcagatctggacccttggcagctggcgacggttgcgtcggcaacgacgacggtggtttagggctcgtacggggagacaaccgtgcggcggtgaggagcggaggatctggctcctcaatggtggtgtgtggtgtcgcggttgccgccagggatggccaacgggtggtgtggcgcgagatgttgccgccgctcgaccaggaccgtgggccaaccggaggtggtgacgatcggcgctgctttgcgactattatggcagtcggcacgtcattggccctctag

SEQ ID NO: 9092 - DNA, 183 bp, Zea mays
  Peptide Sequence Number=SeqID_50871
atgtccgccgcggaggctgctggggcgggcgctgtcccccgcgccgtcgtcttccctgtccctggtggcgtcctgacggtgcacggcggatcaacaactcaggcgccatgttgggtcacgggcaccaggttccacgtggggaggaggctcatgaccggggcgttcacgcccgcgtgggcgtag

SEQ ID NO: 9093 - DNA, 132 bp, Zea mays
  Peptide Sequence Number=SeqID_50872
atggctgcggctatgaacaacaatgaaacaaccacaatcgagctgcctaattgtgggcagcagaaaaaatgggcaaccatttactccgcaggacggttgctcaatcatgagggaactcctgtttacatgtaa

SEQ ID NO: 9094 - DNA, 477 bp, Zea mays
  Peptide Sequence Number=SeqID_50873
atggtgaagtcaccagagacggggcaggagcggcctctagggggtctggggtcgccggggttggctggaactgatggggagggtccagcgaactcactggtagaactccagccgccagaacgggaccggaggcgagagaacggtggagggggtgctcgaggcggatcgggggaattgggcgtgctaaggcttgggctagctctggtgagggaaggggaacgctatggaccacaaccgaggtttaggacgaggctaaattggccagacaccgcgtgtgcatggcgaactagcatggccgagctccggcaagggcgaattaaccacggtagggcggaatcaagagaaaccaagcacagaagcgagttcctcacctcgggactgcacttgggaaggcttggcgcggttcctggcgtcctggacggccagtacatcgggtgcgggtcaccggcgggctctagcggcggcgatagagcgtga

SEQ ID NO: 9095 - DNA, 645 bp, Zea mays
  Peptide Sequence Number=SeqID_50874
atgcagcaggcttttcaaccatacttagcttcatattttggcacgaaaaattctatcataacaggaatcgtgatgtcaattgtcaacagcaagagggggaagagttcaggatgcttggacaatgcgggagcagctggaacactttatgaagcagtacctaagagtattactgttagcaacaataacttgagcacacaaacggatacagtttttctagaccccccatatgagccactctggacaaatgtttttgtcagaaattgtgccaaagtttctcttcccttacggtggagccgtattcaggctcaaggacagattcttttagctggtggtactctaacttttggcctgacacattatccatattcagaatttgagctgttggctgaggaacttcttatgagtgattccataatcaagatctctagtcagaatccatccgtggagacgttgttggcagtgtgttgtgtccacatgttggcacactaccatgtgcaggaggcacttaatggatggttatggatttctgatatcagtggtgggctctcggttggtgtgttgatggattatcttgtcttgtgggatttgcttgaagaagttgagctacaagtaggcattgaggacagacaagttgtcaggacctaa

SEQ ID NO: 9096 - DNA, 243 bp, Zea mays
  Peptide Sequence Number=SeqID_50875
atggatgtccctgcaaatgatcatcgccagaaaccagatgatccatggttaagcggcctcccagaagaatatggcagcttcggaacgagcgtcgccgccgccggcgaggacatcgtttgtccgcgcgcctcaggctcgctccgggcgccgaggagacgcgcgagcttcgggagagagcggcgcgatgctgactccggggtcccgcgagccaactacgccgtctacgcgatgcgtggagcgtag

SEQ ID NO: 9097 - DNA, 2859 bp, Zea mays
  Peptide Sequence Number=SeqID_50876
atgggcgcgcgctatcgcagcctcggccgcacgagctactcagcagcatctgcttcttctcgcaaggcgcgccgcgctttccacggtgcggcgcccgctaccggtcacatgcagagtcagtgcggtagcgcgccgctcgggctcgctgcccccgccgcgcagcacattgggtgtatgctcggcgagggccaccggccgggcgcactcgagcttgccgcggcgatcaggtcgtcctcggcgctcccgggcagcggcagcgcgctcgcgaggtgcctccacgggctcgccgtgaaggccgggcgcgtggcgagcagcgcgacggtggcgaaggcggtcatggacgcgtacgggaggttcggatccctcgcggatgctctcctgttgttcgacgaaatggcgcgccccgacgcggtgtgctggaacatcctcatcactgcatgctctcgccgtgggctttttgaggacgcctttattttgttccggtcgatgctctcttgtggcgtgggacagggcatgccgactgcagtgacggtggctgtaattgttccggcatgcgcgaagtggaggcatttgcagaccggcagaagcgtccattgctacgtggtgaaaactggtttggaatcagatactctgtgtggaaatgcattggtgtcaatgtacgcaaaatgtggtggaagtagggtaatggttgatgcacatagagcattttcttctattcgctgtaaagacgttgtttcatggaattcagtcattgctggatatatagagaatcagttatttggagaggcgcttgcgctgttcagtcagatgatctcacagggatatcttccaaattattcaacagtggctagtattcttcctgtgtgctcattcacagagtttgggaggcatcatgggaaagaagtgcacagtttcgtggtcaggcatggtatggaaatcgatgtatctgtttctaatgcactgatgacacattattccaaagtgcttgaaatgaaggatgtagaatcaatatttactagtatggatgtgagggatatcgtatcatggaacaccattattgcaggatatgtgatgaacgggtatcaccatagagcattgggcctgtttcaggggcttctgtctacaggaattgctcctgattctgtttcttttatcagtctgctcactgcctgtgctcaagtaggtgatgtcaagacagggatggaggttcatggttatatttttcaaaggccagtacttcaagaaacatccttaatgaatgctcttgtcactttttatagccactgtgataggtttgatgatgcttttcgtgctttcaccgatattctgaacaaagactcaatttcatggaatgcaattctctctgcttgtgccaccagtgaacaacatatcgagaagttttttgtactgatgagtgaaatgtgccgtggggtaaatcagtgccagtgggattcagtcacagtcttgaatgttatacacatgagtaccttctgtggtattaagatggtccgcgaagctcatgggtggtctctaagagttggttatacaggtgaaacttcagtagcaaatgctattctggatgcttatgtgaagtgtggctactcacacgatgcaagcatacttttcagaaaccacgctgggcggaacattgttactgacaatataatgatttcttgctacttgaaaagtaactgtatagaggatgctgaagtgatcttcaaccatatggctgagaaagacctgacttcatggaatttgatgatccagttgtatgcacagaatgacatggatggtcaagctttcagtctgtttaatcacttgcaatctgaaggcttgaagcctgatattgttagcattgcaaacattcttgaggcttgcattcatttgtgttctgtacagcttgtgagacaatgtcatgcctacatgctcagagcatccctagaagacatccatcttgaaggagctcttgttgatgcgtactcaaaatgcggcaacataaccaatgcatataacatctttcagatcagcccaaagaaggaccttgtcacattcactgccatgattggatgttacgcgatgcatggaatggcagaagaggcagtagagctgttctctaaaatgcttaaacttgacattaggccagaccatgtagttctgaccacacttctgtcagcatgcagtcacgcaggcttggttgatgctggaatcaaaattttcaagtccatcagagagattcacagagttgtaccaacagcagaacactatgcgtgtatggttgatcttcttgcccgcagtggacatatccaagatgcatatatgtttgccttggatatgccccctcatgcagtcaatgcaaatgcatggagctccctgctaggagcatgcaaagtccatggaaaggttgaaattggtcaactcgctgctggtcggttgttctcaatggaagggggggatattgggaactatgtcattatgtcaaacatctatgcagctgatgagaaatgggatggtgttgagaatgtccgaaaactgatgaagtccatcgatatgaagaaacctgcagggtgcagctggatagaggtcgagaagaccagacacttgttcatagcgagcgatattaatcatcaagataggtcttgtatctacgatatgttaggaagtctgtatcagcaaatcaaagatacacacacacagaacatgacaatgggcttccacttcctggctgcaaatagtaacgaatttgcctttgtctcactgagaggctggagattaactccattatgtaaatatgtgagcactgacaaggatcttgaagccaagaaagagaccatggaatttcaagttaaccaatgtccttag

SEQ ID NO: 9098 - DNA, 204 bp, Zea mays
  Peptide Sequence Number=SeqID_50877
atggcggtcgggctgacacgagcggcggtggtggcagtatctgatctgaagatggtggcggcggagggctcgcgcccctctgcccgtcctggacccaagagtacggagacgatcgacggcgatggtaaagatcagatgggttcatgtccatgtactagaagcagtgaaggggatagatgtcgagccttgaccaagggacaataa

SEQ ID NO: 9099 - DNA, 519 bp, Zea mays
  Peptide Sequence Number=SeqID_50878
atgcgctggatgcaagaacacacctggaggtcacgattgtccgacacccttgaacgttgcgacgctactatctgtgggaagaagctggccaaaatcaagcggaagtatttccaacaacacggtgggatgcttctgctgcacgagataagcctaaagcaaggaactgccttcaccgtcttcacagaagcagagctcatcgaggcgactgacaacttcgctgacaagaacatcctcggccgcggtggcttcggcaccgtctataggggcctgttcaaggacgacggtgtcgtcgcggttaaacggtgcgtctcgttgatggccagcgagcagcagaagaaggagttcggcaaggagatgctcatcctctcccagatcaaccacaagaacatcgtcaagctcctgggctgctgcctcgaagtggaggtcccgatgctagtctacgagttcatcgccaaaaattgcagagaagctagttgtcaatcccatcttaatggactctgccagaacaaatgcccctag

SEQ ID NO: 9100 - DNA, 468 bp, Zea mays
  Peptide Sequence Number=SeqID_50879
atggactccaccactgctgctgctaccgcggccgcggctgcggcgccggcgccggtgctgctggtgacgaacgacgacggaatcgacgcgccggggctccgcttccttgtcgaccgtctcgtcgccgcagggcgataccgcgtactcgtctgcgcgcccgacacattctgcggaaggatcacgggatttaccccgagaggacgtacagatgaccgcttagttgatgttttccctcttgatcattgcattggtatgaaaattgtgggtgctaaatttgcggtaaagaatttaagaaataggaaatacaagtttggccttgagaagcaaaatttatcaattaatgtttccatgcaatgtttacaggtgttttcggcacaacatcaggctgctcttcagtacaatattatccaacttcaagtcctggtggcttatcctctgttcttaaggcatcgcctaggcgacgcctag

SEQ ID NO: 9101 - DNA, 687 bp, Zea mays
  Peptide Sequence Number=SeqID_50880
atggccggcccctcaaagggttcaacggccgcctcaggccactcgggctccgcgcccactactgatcagggcgggaacgatcttgtaacggaatcccatcagagggaggcatcgagccctcggaccccgtcgacaggggaccgggtccagcagatcacccgcagcgccgtctgcgccgctccgactgctgagccacccgacagagtgaggctgacaacagccaaggccggccacgagcgtcataggaaactccgcctcgcccgacccagggctcggactcgggctcagccccggaagacggcgaactctgctccgcccgacccagggctcggactcgggctcagccccggaagacggcgaactccgctccgcccgacccagggctcggactcgggctcagccccggaagacggcgaactccgcttcgcccgacccagggctcggactcgggctcagccccggaagacggcgaactccgctccgcccgaccccagggctcggactcgggctcagccccggaagacgatgaactccgctccgcccgacccagggctcggactcgggctcagccccagaagacgacaaactccgctccgcccgacccagggctcggacttgggctcggccccaggagacgacggactccgcttcgcccgaccccagggctcagactggccacgtcgatag

SEQ ID NO: 9102 - DNA, 960 bp, Zea mays
  Peptide Sequence Number=SeqID_50881
atgtggaagctcctccgaagcccaggtcgagtccgagcccccgggtcgggcgaggcggagattgccggctggtgccggggcggagtccgagccctggggtcgggcgaagcggagttcgtcgtcttctggggccgagcccaagtccgagccctgggtcgggcgaggcggagatcgtcgtcttctggggccgagcccaagtccgagccctgggtcgggcgtggcggagatcgtcgtcttctgggacttagcccgagtccgagccctgggtcgggcggagttcgccgtcttccgggacttagcccgagtccgagccctgggtcgggcggagttcgtcgtcttccgggacttagcccgagtccgagccctaggtcgggcggagcggagttcgccgtcttccgggacttagcccgagtccgagccctgggtcgggcggagttcgtcgtcttccgggacttagcccgagtccgagccctgggtcgggcggagcggagcggcgctgtccttctgtcaggccggtcagtggagcggcgaagtgacggcggtcacttcggctctgccggctggggggcgcgcgtcaggataaagggcctcgagcgagccgggaatatgttcgccgctgaaggggggcctcgggcgaggcggaaatcctccaggctttgtgctgatgggggttaccagctgagaattaggagccttgaggatcacaccaagagggagatggagaccggcgacaagcccactacgagtcacgggagcacttcatcggaagagtcccgcaccaagaggaaggagaagaagaactcctccaacaaagggaaggggaaggagaagaaatcctcttcccacaagtcacatcggaggggcgacaagcacaagaggatgagagaaagtggtctactacgagaccgactcttcatcaccatcgacctccgactccgatgcgccgtccataacttctaa

SEQ ID NO: 9103 - DNA, 525 bp, Zea mays
  Peptide Sequence Number=SeqID_50882
atggttgatcttgaatatggattgaccaatgactataacttttgtttggttgcgggtcggagcagtgttaatgacctcaaggtgtctgcagaggtctgcatgcctctgataaatgctatcgtgactgagatcaagaatgggacttaccctcaaggatcattcttgaatgtagatgtacctacagatgctgcacaccccaagggctacaaaattacaaaacaaggaacatatatggccagaattagttgggagcagacggtttacaagaagcctgcagtagaaagttaccagacagcaaacatggatgttgatggtgaaaaggatagcgaactagttacttcagaaaatgacctactgtttaagagagtgattgtagggagaagttccaatggagtggaaggagaggaaacggaccacaattccctagttgatggatatatcactgttactcctttgggtgctctttcccgcacagaaccagacgccataccgtatttcaaaagcttgtgtctcacgtctggttga

SEQ ID NO: 9104 - DNA, 492 bp, Zea mays
  Peptide Sequence Number=SeqID_50883
atggccgccgccgccgccgcccccgacgccgacgtctacgatattccgtggctggagaagtacctccccgcccgcgtcgctgacgtcatcggaaactccgatgccgtcacccgcctagaggctggcaatgtgattgatgatgaaactcatttggaagagcatattcccccattccccagttcaacggatgttaaaagggattcacctctggttcctccccccaccctccatcacctacccttgaagaacctgtggaagaagcacccaagacatatgcttctgttgcgaacgaaatcaaaggcaacgatggcgattacagagtcacagcaggctcaacagttggcccagcagccacagtctgcctcagtgcatgaaaagtctaacctggacaaccaccgagatgttagcatccctgaggatgaatgtctttttcattttttgttcactgtttcactcatgcttctaatgagtttttattggacctatgtttaa

SEQ ID NO: 9105 - DNA, 423 bp, Zea mays
  Peptide Sequence Number=SeqID_50884
atgaaagctgaactggaaatgatgcggaacgagaaaacatccatagaagcattgctgagacctgccgaaagtgcacttgcagaaaataagagagtactttcagtgtataaagccatggcaaaaataaccgatgatttgttggacgttgtattggcaacaggaggtgataaagttaacgagaataacggtcaggaacttgacgacgaaaccatgaaggaattgatagaggaagctatgagggattttactcgagcacttaaccaagctcaatcatgcaggagccgccccacagatggccgaaatggtggaggctatgacggtagctctggtggtgatcatcacagtctcgatggaaccaatattaattttgggaaggaagctggcggaagcggcggtggcaacggtggtggccacgctcagtag

SEQ ID NO: 9106 - DNA, 297 bp, Zea mays
  Peptide Sequence Number=SeqID_50885
atggaggttgtcgatggtcagagctcgcagcaatacatggcttcggggagtcaggctcaagctgaaattcagaggttaaaagaccagatgactcagatgcaagcgaccaaaattgaggttcaaaggaaatatgaagaactccagctacaacttaaagcagaggcggcagcaagggaagcagaggcggcagtgagagaagcagaggttcaaaagaaatatgaagaactccagctacaacttaaagctgatgcggcatcgagagaagcagagcagagcaaaaagtacgacgaactctag

SEQ ID NO: 9107 - DNA, 141 bp, Zea mays
  Peptide Sequence Number=SeqID_50886
atggcagagcagctaagggctgatggagctgcactggaagccttggaaaataaacatgataacatgaattttgttgctcaaagagctatgttgaaccggattgtagatttgatgagccgtgacgccgctcgcggcgtttag

SEQ ID NO: 9108 - DNA, 198 bp, Zea mays
  Peptide Sequence Number=SeqID_50887
atggccaaagatgtagcagcgggtggtgatgggtttgaagcagaggaggaaagtcaaccaacggttgaagttcttacaacagaaatgctggatgctgaaaaatttgatgagatttacctcctcagaaaagttgtccatatcaacctagagttccatatcctcaaagacttcagcagaacaagtagaaacaagaggtag

SEQ ID NO: 9109 - DNA, 345 bp, Zea mays
  Peptide Sequence Number=SeqID_50888
atggagcagatggatccagaggagcaggatgtcattaagttcatcttatacctcatgctcttggaagttgaaatgagaaagaagagagagaaaacaagggagatggaagagcagctaagggcagatcgagctgcactggaagctatggaaaatgaatgtttgatgcttatgagtgagagggatgacaagatcacagagaaaaaaactgtggacaaattggtcgctgattttcttcaagcagatgctaacggcgattttgaagcgcagaaagctatggagaaccagattgtagctttgatcagccgtaacgccggcaacacgggaccatctggaggcggcagttag

SEQ ID NO: 9110 - DNA, 216 bp, Zea mays
  Peptide Sequence Number=SeqID_50889
atgagtcaaaatgcaacaaaaaaagagaaatctttcggtttcttcccccatttcgatgcggccttaggcaaatccctagggatttggaagcctttcaagctagaagggaccaccaacaacaaaggtgcaggtgtttgtggtagtcaacgacgatgggaaacaatgccttgccatttcagtgaaaggagggtaggcctcaggtggcgtacctgctga

SEQ ID NO: 9111 - DNA, 189 bp, Zea mays
  Peptide Sequence Number=SeqID_50890
atggccgtgatgggttcaacatcggacaagatgtacctctgccaggtaccaaactttgagattttaaatgataaagctgagaccgggcaggtgaggaaacaacagacttttgctttttcttttcactggtggtacccaaataagagccccagcagtgaagtcagggaggatgttggcctcccactttaa

SEQ ID NO: 9112 - DNA, 216 bp, Zea mays
  Peptide Sequence Number=SeqID_50891
atggcgctcgcgccgtgcgcgctgccgagtgtattgagtgcatgctcgctttatttagacaacgagcagtccgaggttcctgagtgtgttgttggagaccttccagagcaacaacctggtggctcaggcctttttcctgagtatctctcctgcccaggaggtgatgctggcaacatggaggactttgaggagtttcaggactacaacgagttctaa

SEQ ID NO: 9113 - DNA, 708 bp, Zea mays
  Peptide Sequence Number=SeqID_50892
atggtcccaggcgccaccattttggctaccctgacccctggcctctatagcccaaggctcggcacggtccatcgtgtagcgccctacaagaggtcaagagtgggaagtggaccggcgctcgcgctgttaagtgcggtcagcttatatggcaggtcggacggtgtcccgtcttttcattccccgagaaatcatggcgtcccctcagaacctaacgtcgtatttatggtggtcaatcatctcttgggacaaaatcgggcgctcttcgcctctttttataaacctcagccggtcgttcgcctactagtcattcttgatgtgtccctcgagcttgccttcgaccaggttgatgggagctacgatgcctctcatgcgacggtggaggccaccaaggctgaggtcgagcggtggaggatgcagcttgccgaggccggcggtcgagtcgttgacaacgctctatgccgtgtccgggacatcgccgacttcggcgttcatcagggggctgcggtggtgctgctcatgaaggaggattgctccgactgccatcttaaagacatcattggtcctccttcctccctgtcagatgaggggttggaggacatactggaaggctatgattatgtggccagtcatgtcgtgcttagggatttattgggtgcactgaaggtgcacccaatgggtgtagccctcgagcttcgagtggattactga

SEQ ID NO: 9114 - DNA, 192 bp, Zea mays
  Peptide Sequence Number=SeqID_50893
atggcgcttgggccggttctgccactgttcggcgcattcctacgcgtggccgagttcctggcatcaggcgctgacgtgcgggggccacttagattagacccggagggtggtgttgtgaaccattcgatccgcatctggcggatgggattggatccagagagcattacatcacgtggtagatctgggccgtag

SEQ ID NO: 9115 - DNA, 330 bp, Zea mays
  Peptide Sequence Number=SeqID_50894
atgcccgcccacgcacccagctccctttttagagccccgccagtgccccccacacacccctcacctcatttcgcgcagcttcctactctctcgcgctctgcccacgccgccagccgccgccagagacccgcacccgcgttcccggccttccagctcaccgaagaccgctccaagcctcctcgagctctgccccgagacaacgagcagtctgagattcctgagtgtgctgttggagacctcccggagcaacaacctggtgaaggcaagtgtcctcagacctactatatcctactatactttataattcactgtcccacattacattactga

SEQ ID NO: 9116 - DNA, 258 bp, Zea mays
  Peptide Sequence Number=SeqID_50895
atggagacgctggccagcgccatgctgcgagaaaaccgtcgatccaatgtcccggcctcctctgatgtttcagccctcctcctccgatgccttcgccctcgcctcgggcagggtccctcttgccatggctttcctcgcctgtcacgcctgtctctacgtcaccggacggtcctcaaggttctctcggtggaggacaagattaggaacattggatgcaaggcgattagaaggaaaattgttgaggtggagatgacctga

SEQ ID NO: 9117 - DNA, 3144 bp, Zea mays
  Peptide Sequence Number=SeqID_50896
atgccccgcttcgcgttgtggcccaagtgcagagaggtggacgtggcggccctcgcggggcccgcaccgtcgctgcttccacgtgggcccccacctccccggtaccccacagttcaagatctgaattcgtcaggggagagtgagacgcaaggtctccggcagagcctagaggagcagacaggagaagcggaggcggaagcgatgctgcacggcgcgagcggggctgtcgcttcggcttcccacgaatcgaaggagcagtcggcgttggaagctccggtgatgtcttccgtggaagagacatcgttcacgtttgagttcaaaagggcaaagaaggcaatgacgccgccgtcgctgctgccggtggatgagccgaggggcgaaaacaattcaagagagggcctctccaacaagccaagcgctgtccctgcgaagaaagacacgccgaagcaggtggagttcacccattgctcgcctggtattgttggcaggctgatgggcctagacaccgtgcctcgccccaagaaatctcttgaccgctgccagagtgacacccggggtaaccggcgacacttgtcaggagttgctcgaggcgtggacagcgcttcgtctggggatcaggcatgtaacaccagttctgatgagctgccagcatttaacgatgttttcgaggtaacagagatggagaacatggcgatgcatgggccgctgcagcctggaaatcaggagccatatctgacaaacattgaagctgatcttgaatttgtgaggcaaaagttcttggatgttaagcgccttgccactggcgaagggaatatgaactctaaggagttcagcgaagcactcgaggtactgcactccaaaagggatgttttccttgaaatccttcaggagaacaggactgcagtgtcaggattctcaggacacatccttagccacagtgggttgcagtgctcttcttataccagcaatgctgctgctgctgctgctgcacaaccgtttgagaaagaaatcccttgtggcatggaaggtgtgtgtgacgggatgcatgtcataccaaaagagtttgaggaacccgttcctagcatgccgcccagagaaacttcagttacaccagtggcgcccttggcaccaaatgagggcaagagtaaaggctcatgccgtcgctctgaaatcgttgttctgaagccaaaccttcagaggaaaagtttcacacctgttctctctcaaattgttgttctgaagccaaaccttcagaggaaaagtttcacacatgttctatcaagccaagaagcatcacaatataaacagaagagagatacacaacatttgaagcctccacaccatagtaaacaattttctgtggcacgaaacgatgaagttctcgaaggagaaaggggttttgcactacagaaggctagaaagcaagcacataggagtggtagcaggaggagatcatcccaggaagaatataaccttgaagcagatactgagaaggcaagagttagttctacttctacctctcatgaagacaccgtgcccatttattcaagcatccattcttcgggaccatcagtaagtagaaaggctagaaagcacctctcgaaaagatggcaaatgacctgccaatctgattcagaagattcaattcctaaaggcataaaaacactaggtgaaatgctcggactgtctgatagagatgcaccaagagaaaccacccacatggtaggatcagatccaaacttcagtccctataatgtgagagaggtgccagacagccctcttggcattagcagtaaagatgggtggaagacagggatttactgtgaagatgattcaagagctggtatatcaaggaattttctcaggtccaaatctcttccagcctcatctaccacttctacaaaattatcatgcaggagacagtctgcaccaacctgtaggttgcccattctgaaagatatattgaatgcacccactgatgaatctgaaaatgcacatatcaggaagagatcaccaatcagaaatgcaaaacagagaaatgaaaaagcaactgcccatctaggaagggaaaatatgctacctgaaaaagaaattcatgtaacctcggaaatagccaggcacagcatctgcgtttctgatatttctcgggcaagcaatatacatactgaaaagtgccctgatgatgctatcaaaactgaggatcaggaagagtctgattctgctcttcaacatgattacaagaaaaaaacacaaggttttatgggatgctaccagacaatagcaacatcatctccggagacaaaagaagttatatcaattcagaatcaggattgcatagaattgaaggaggaaaggaacccatcagtggagattgaagctgatcaagtctacactcgaacagcagaatcagcaagtattgcaagtgctgaatgttgtgactgctcaagtccatctgctttatcgcaacaaagttctggtgaagagacttattctggaatctttaaaagcatcaacgtcggtattcaagaactcaaagagcaactgaagatgctgaagatggaagaccaaaatgacatttgtggagactattctgatacattgtcaagcgacgagttcgataatatgaacatctcaatatatcgaaccatggaagagcagttgtctatgtttaaggatggggaggacagagatttctcttatgtacaggacatgcttgctagcgcgtgcgacttgccagagcacctagaagattggcaagtgagctcagatgtgttcctttgtcttgaaaacaagtacagcaagctggttctgtggtcaaaatccgacaggaaacttctgtttgatcttgtgaactcaattttggctgacatgaccattccagacattggcttgtgttcaaagctcatgatgaagcgctggcctgaaatagatcacggacagttaactgaaatcgtcaggcaaatggtgcagaagcgaagtaactgtgggcactttttcttggaggatgttcagcctttgccattggaccatggttctgaggtagagctggttggaacgaagattgccatgatgatccatgatgacattatgacagattttatcgtcggaatcatgtcccaggagaacctccttgttatcagctaa

SEQ ID NO: 9118 - DNA, 180 bp, Zea mays
  Peptide Sequence Number=SeqID_50897
atgcaacaaaccgttgtgaaagcaatttccaaaaatgaaatcatcatggtgacaaaatatccaccaaagatggatcaaatcatagaggataaagaggaggataaggacatcaatcaaagcaaaaggccatcttcgaacgttggacaagctgaagaagacagaagcatagcttcggcgtga

SEQ ID NO: 9119 - DNA, 339 bp, Zea mays
  Peptide Sequence Number=SeqID_50898
atggacaggagcaagagcagactggtagaacgactcatcatcaacatattctccatcttcatcttcttaggcgcaagaaaagatcggacctccttctacgaccccttcctcgactgccttggtccatcaaacgagaagagtcggcagcacgtgatgaggtctcatggagcgtatgctgaggttgaggctcatcagaggaagctggaccaccagagccagctggaactcgctttgatctgcctgctggattcttggagtcaatctagtagggaatgtagcaggcagccgaatgcgatggatttggcgaggcaggagaaattccccatcaaagaattctag

SEQ ID NO: 9120 - DNA, 183 bp, Zea mays
  Peptide Sequence Number=SeqID_50899
atggcgttggacaagatgggaggcggactgttgatcctagaacacaccgacgaggaatcgtgtagtctctggattcgcacgtgcggcgctagggaagctgagtcgctgaccgagcgggacctgctcgtcatactaactccttgtgcacgcgagtacactgtacaggagaccgaggctggctga

SEQ ID NO: 9121 - DNA, 522 bp, Zea mays
  Peptide Sequence Number=SeqID_50900
atggcgcagttcctgcgagctgaaggcaagcttgcgcgcaggacctcgccgccgtcttgcctcccagtcaggagctgggacgagacgctccctgtctcatcggccatccctgccgccaaggggagcatggagcatcaggagcaccagcatcgatctggccaccctcgaggcctcgacatcgtcatcccgtcgggcctgatcagccggatcagagctaacgaactgttaggcgggccctgctgcacggagctagatgccgtcaaggtcgtccgggcgacggctggcgtggtggctagcagcggcattggccacctcgttgctgttgggtccccgacctcgacggtcggctttgtagacgacagcgatgggtggcgaatcgagcttctgagcgcggtcaccgtggtaaggacaaacgccgccagagacaaaacgcacacaggatcacagtggactggtgcagcgcgtccaagcgacggggtcgtcctgaccagacggtcacggcgcagtcagtcgcggatgtaa

SEQ ID NO: 9122 - DNA, 1227 bp, Zea mays
  Peptide Sequence Number=SeqID_50901
atgcacggtgaagcaagcgcccagcgtaatgagtggactgctggtaccgtagtgatcaccaaggcctcaccggtggtggtccggccgtcggagttggagctgggacgaacgccaacgccgacgctgcccgccggtgactacaccaccgttcctctatcctctttcgacagacgcgtgcctcctatgccggccacctcgctgctggtgttcgagcgcaccatcaacgagcccatcgagacgataaagcgggccctgtcccgagtgctggctcactaccgccccatggccggccgcctcgacggtgccggcggcatcgcgtgcaccgatgagggcgtgacgttcgtaggcgcggcagccagctgtgctctcaaggaggccaccacgacggcgctgcaggagatggacctcgccgtgtgctatcccggcttgctctgccgtgatgcggaccccttgcttctggtgcaggtgacagagttcgcctgtggcggcttcgttgtcggggtgacgtcgaaccacgtcgccgcggatggcctcgggatggcacagttcctgcaggctctcggcgagctcgcgcgcgggacctggccgccgtcttgcatccctgtcaggagctgggacgagtcgctcccggtctcgtcagccatccctgctgccaaggggagcatggagcatcacgagccccagcatctggctaccctcgacatcgtcatcccgtcggacctgatcagccggatcaaagctgacgggtgctgctcggtgttagacgccgtcatggcggtgctctggcgctgccgcactcgcgcgaccatgtcgcccggcgacgccgaatctcccgcgccgctcaacggcatcggacaccttgttgggctcatcaggcgcgccaaggagaaggtgccggaccttctgtccacgcctggcagcggggcggcagcagatcatcagggacatcaggcggcgccgccgacgtcgtcgctctggtacgagacgttcactgtgacggactggaggaacctaggcttggacacggtcgacttcggcagcgggccaccagagcgggtgctgctgaggcacgacaggagggcaatggtgccgggctgtgtggtgtgcccgccgcgcagggcgaggaggcatggatgcgatggggtggtcgtgtcgtccaagttcgtcaagccacaacacgtcgatgctttgcttgccgagctcgcggcgctggcaacttcagggtag

SEQ ID NO: 9123 - DNA, 309 bp, Zea mays
  Peptide Sequence Number=SeqID_50902
atggatctgatgcggcggatgccgccacggagcgcggagacggcgctcaacgcgctgctctccctcctccccgaccactccctcgacctcctctcccaggtcgacctcccgctccaggtttgcatggataaggagagcctgaaggaatacattctatgcgaatataaccgtgatgctgactcctaccggtcagaaattcacgatttcctccatcgtcacatttacattttgttcatgttctccaccagcactggactgtcattatttggtagcgcatgttgcaaaatagactttcagtgcagtgcctga

SEQ ID NO: 9124 - DNA, 315 bp, Zea mays
  Peptide Sequence Number=SeqID_50903
atggaaattacccggaaacatgagcttagcgtggattttaccattttgagggcaccccatctcttggtgactgtcgttcgctacaggatgacggcaaagctttatttagcgctggtcggtgtcagtgtcactcatatggttgttagagctcatgctcagggatttctgaatgctgaggccttggatcttctcgctcccaaggccacgggcaggaaatcacaaacgggagaagttctatggtgtaacacccttgtacttgcacagttttacagcaaatcaaatgatagcagagtagcaggaagtaccatgttttaa

SEQ ID NO: 9125 - DNA, 417 bp, Zea mays
  Peptide Sequence Number=SeqID_50904
atggagaaagatttgagctctccatttgatcacacagtaatatccaatgcaaatgaaatgcagtgcaacagaaatgcagatgacaatggtttacctgaggattcaagcaagcatactaaaagaacaggtcgcaaggtgggcattttaagtcactgcccaaagcgactagttgctctcaaagtcatgtatttcggccagagattctatggtttttcttctgaaggtaacattgaaccaacagttgagtctgagatatttaaagcactggaaagagcaaaactgatggttgccaataggaaagaatcatgctactcgaggtgtggaagaactgacaaaggagtttctgctactggacaggagttagcactatgtatattgccaaacccagataaaaatgataggcaaatacgtctctaa

SEQ ID NO: 9126 - DNA, 453 bp, Zea mays
  Peptide Sequence Number=SeqID_50905
atgtcgcgtgcgagcaaccccttcaatgcaggacatggatggcccaggtatgggtctgtgctgctcacccgctgccctgagtgcgaacgtccagagccactagtgaggctcgtatcgaaaaggtcagagaatggcaactttggtagtgaattcgttaagtgtgaaagcaagccacgcccagggaaggttcaggaaaaatgcaaaattttcatgtggatggatgattacattaagatggtcgaagggacagggtttactagcggcctgggggagatgatggcgtgtaattatggggacgaacgagtggcggcgaactatgacatgtttactgcagaactgaagaagttgaataacaacttgagcgacttgaagaagatgtttggagttttgtatgcttccatgatttttattgccttgcttttctttgttatgaactatggttgcaagcgttaa

SEQ ID NO: 9127 - DNA, 282 bp, Zea mays
  Peptide Sequence Number=SeqID_50906
atgctgccaccggccgcgcgccttgcggcccgccgcctcctcggcctcgcctccgcatctgcgtcggaagccgccggccgccgggtagcttcctctccgcaccttgattccccggagaacaagccggacatgaaatgggagttctcacaggcgaatatgaagaaggtcaatgagattctgtctcactatccaagcaactacaagcaatctggtattattccgctgcttgatcttgcacagcagcagcatggtggatgggtgccagttgcagcaatggatgct

SEQ ID NO: 9128 - DNA, 1464 bp, Zea mays
  Peptide Sequence Number=SeqID_50907
atgagggccgaggcgacgggctccgcggcgaagctgctggcgccgcggatggtggtgtccgcctccagccgcgtccaggagctggagaggttctcgcattacgtcgctaggcagatcggctttgacgatgtgaaggaatgccctcacctgtgcacgctagcttacgattatctcaggaagaacaagggttacgaagagaacatttttgcgttctttcagaatagcatggatcccgagcccctgattgtgaagtttatcgaggagcttgacaaatgcatagttggctacttctccttccattggaaatatgccacttacataattacccaggttctcacggtagaaggtgcgactaaaagaaagttcaagaattttgtgttagaggccaccagggaacagagattcgagagagtgacaagaaacttgaaggttacaaggattttctccacactggtggaggaactgaaggccataggactatctagccgtgatgattctccacggaatgatgtgatggttccagtagcacactgcaaccgcagcccagttttactcctgatgggtggtgggatgggagctggcaagagcactgtacttaaagatatccttaaggaagcattttggtctggagcagcagcgaattcagtgatcgtggaggcagatgcattcaaggaaactgatgtaatctaccgagccattagctctagaggccaccacaatgacatgctgcagactgcagagctggtgcaccagtcatccttggacgcagcctcgtcgctcctcgtcactgcactcaacgaaggccgggacgtgatcatggatggcactctgtcctgggagccgttcgtgcagcagacgatagccatggccagggccgtgcaccggcagcggtaccgcatgggatgcggctacaagctcacagacgatgggacaataaccgaggagtactgggagccggttgaggactctaacactgacgaggaaaacgaagtaccggcaaggaagccctaccggatcgagctcgttggtgtggtctgtgacgcatatctagcggttgtcaggggaatcaggagagctgtagtcactgggagagcagtgagggtgaagtcgcagctgcagtctcacaagcgatttgctacggctttcaacagctactgcagcctcgtcgacaacgccaggctctacagcaccaacaccttgggtgttcctaagctgataggatggaaggatggcgagagcagcttactggtggatcccgaagaaatcggctgcttggacaggctacgaagcttgaacgaggaggccgactgcgtccatgagctatacgccgacggccaaccgacaggaggctcgtcgtcagcgtggcaggacctgctggtcatgtcgccgtccagggtgtcggcgcagcgggagctcaaggctgccatcgagaggaacgaggggcgcttcgtcaaaccggcatag

SEQ ID NO: 9129 - DNA, 3954 bp, Zea mays
  Peptide Sequence Number=SeqID_50908
atggcaggttctgtggtaacggatgattcagctgctagcacaactggaatgagggatgatgaaaacagtctctctggcgagtccttctctgagtggaggtcctgtgatagggcagacagcgataccccttcaacatccccacccttctgggatagcgatggtgatgatgatgatcctggcagagtgtggcatctgccagctggtgtgaaggaggatgagaaggtgcaggtggagacgtggaagaagggggatggtggtgatggcccaaagccttcagaattgtttggacatcacacttggaggattgaaaacttctcaaaggagaagaaaagagaaatgaaaagtgagccatttgaagctggtggttacaaatggtatattcttgtataccctcaaggatgtgatgtctctaatcatctttcattattcctttgcgttgctaatcatgacaaacttctcccaggatggagtcattttgcacagttcactatagctgtagccaatatagatcctaaaaagatgaagtactcaggtgagctgaacttggtttgttttcttcttggaaggttttggaagaaggaacatgattggggatggaaaaagtttatggagctgtcaaagattcaggatggttttcttgttgacgatgttcttgaaatcatagctcaagttcaggtcatcagggagaaagtggatagaccttttcgttgccttgatcgtccttatcggagagaattaatccgcatctatatgacaaatgtggaacaaatctaccgacgtttcgttgaggagcgaagaagtaaattaagcaagctcattgaggacaaaatgaaatggtccagtttccgtgctttctggtcagcaattgacccaaacaccaggcatcacatgtccagggaaaagactgagactatattgaaaattttagtgaagcaattctttgtagagaaagaagttacttccacattagtgatggactctttgtatacaagtctgaaggcacttgaataccggatgaagagcaagaaatgcaaaacaaaattagcagatttggaagaactacctgcgcctatggtccatgttgacatggacatgtttgttttggctgatgatgttatagctttgcttgagagggcagccttagaacccttgccttgtcaacctgtagcccccaaggatgacaaaacttcccaaagccgcatgaaggatggaagttctggcgaggtttacaaagtttctatggagcgtgaggaaagacgcctaactgagcttgctcagaagatactagagacatttgtgctatctcatatatttagcggaattgaagttgcataccaagaagctgttgctttgaaaaggcaagaagagcttattcgtgaagaggaggaggaggctggacttcttgaacatcagatgaaggggaagcgtggtggtggtgcaaatgaaaaggacaagcgtgccaagaaaaagcagaccaagcaaaagaagaacaaccgtaaggctaaagacaaggaaagagatgtgaaatgtgaggttaaaattctggaaaggcttcatgatgaaactgttattgataacagtgatggcttaccagctaaggtggaagtgatagccaaggttgatgccttggaagaaggttcttcagatgggtcagacatgccaaatagaggaaaaaatcagtgtaacaagggcttaagcattagtcttgccaaagaaggtgatggtcttccctccacctctagtgttacaggtggttcaggccgcaatagttctggctgctgcacagctccaaaactggatcaggatactgttctgcttaccttgagagataaacttcgtaagctagggcagcgtctgcaagagaaaaacattgaggggcagaaacttctcaaagctcattttgaagctagggacacaaaagtgaaggtagaagaatcttctgactcatctaattctttggataggccacctgatgttccagagagctcgatgcattcttcagaagatacagttgatcttaaagttaatggaacaccaaataaggatgcctctgtggtcaaccctgtcctggaggaatctgtttcaggcataccagtcactgcaaagaatgaatccttgccttctgccagaacaaaagaaggcccagtttcaaacaaagataacgcatcaagtttgaaaatgaaaaccatggcatcttgcttgaaattgcatccagctgatgtggataaagatgccccttttccttctaaatcaccacgaatcaatagggctgctccagttccctcgaagttaccttcggctgataaagctactccagttcttccaaaatcatctctgtcagtaaacaaagcagctctggtccgtcccaaatctccagcagttgacaaagcaactccagtttgtcctgaatctccagcagttgacaaagtaactccagttcgtcccagatctccagcagttgacaaagcaactccagttcgttctcaatctccagcagttgacaaagctactcatgtttgccctcaatctccatcagttgacaaggcaactccatccattgacaaagcaactccagttcgcccaaaatctccagccatagataaagtaactccaattcctcccaaatctccaccagttgacaaagcctctccagcaccaccaaaatcactatcaggtgctaaagatgtgcctgttccttcaaggtcgctgcaaattgataggttcattccagcccccccaagattatcgcaagttgataaagctgctctgccttcttcagaacagccacatatatctccagctactaattctgaagcccaaggggcaactacttctaggaaggtcacagccagctcagttttggaggttgctgcagcatcgaggccttcaagtgctcctgtgttacccacaccaagatcaactgcaccagttgcttcacatattcaaacttccacgttgctttcccgctcgatgagtgaggcagctgggagaaggtcagtaaatgatccttccttttctgccccatcttatactccccagacctaccgaaatgcaataattggtaagactggtctggctactacctctgcaaaccttgcatatcagtcctattctctgggtcaagatactgctccttcacagcctctatcagcatatgcatcaagcacagcagtcatgatgcctcctgctggaagatctgatcaatcatcagctaggcatggattcaagtctgggtctggtaagctagaagcacatgacagctggcagcagtggaaaggtgataataatgttgatatgcatctctggagggatcacactacctatcaacaaatgaccaggggtcaagcgtatgaccaatctcggagggacgatacttatcagcaaacatgcagcagaggaacagaaaagttcagcaggcacgcaggactgcaagctaggcagttccaaaccgagacacccgccagccatgtctggcaccaacaacaggggcaagtggcagaagagtttccacaccttgacatcataaacgatttgcttgaggaggaccagatcaacggcagtataccagagtcatttcatcaagattacaatgtgtttggcctgccattttcaccaagaggaaacgtgtcagatatgggaatggcttctgttagaagtcctgctcggttcaattcaaccaagtatgagtatgacggtggattctcgggggcttatgacataaatgcggtcaatgggttgagggaacggcagtttccctcgttggatagttactctaatggcctgtctgacgtgagtgcatcaaagccttggctgaatggctctcccagtccatcggtgatgagccttggggttaacacaaatggataccacccccaggttgcggactaccccagtctgggaaatggggtgaacggagtctccttgtggcgccgccatgctaacgggcgctggtaa

SEQ ID NO: 9130 - DNA, 378 bp, Zea mays
  Peptide Sequence Number=SeqID_50909
atggtgggcgccggcgtgttcgtgaccacgggctgcgtcgcccgcctctacgcggggcccagcctcgtcgtgtcctacgccattgccggcctctgcgcgctgctctccaccttctacgccgttgtcgatgagttgcgcaggatgctggatcctgggaagccatccttcaccccagcaaagggaagcccaatgtggtcatgttcgtcggcgcacaggcttgtcacttccaatcgtgtcgctgtgcccatcccaatgtaccttggtcttctttgctctgctctggtgcaatttgcgaggacggcaaagaccgaaagcttcgatcgcccggacggccccaacgagattcacggctctcattctcatcgccgtcttgtttaa

SEQ ID NO: 9131 - DNA, 354 bp, Zea mays
  Peptide Sequence Number=SeqID_50910
atggtgctcgcggagctgggcgggagcatcgcccgcgcactggcgcggatgagcaacgccaccgtggtggacgagaaggtgctagcagactgcctcaacgagatctgccgcgcgctcctgcaggccgacgtccgcttcgacacggtccgcgacgtcaaggccaacatcaatcgcattgtcaatctcgacgcgctcgccgccggcaccaacaagcgccgcatcatacagcaggccgttgtcgatgagttgcgcaggatgctggatcccgggaagccatccttcacccccagcaaagggaagcccaatgtggtcatgttcgtcggcttgcagggtcagtatcgttcatctgcctaa

SEQ ID NO: 9132 - DNA, 671 bp, Zea mays
  Peptide Sequence Number=SeqID_50911
aggtgaccagtgatggtttattttctgttggagaaatggagtgcatgggttgctgtgtgaatgctcctatgattgctgtggctgactactcgaaaggctcagagggttacacatataactactatgaggacctcactccaaaacgagttgttgagattgttgagatgcttagaagaggtgaaacaccccctctctcatgtcggctccccacctccgcctacaccgccgctggcgtaggcgacgtcgagcgacgaaaccctaacgtccagcccgttcttcgacccgatgtggatgcacccgtgtcgccaccgctgcagccgagcgacaccctcgacgacgacaaggacgacgaggactacgagttcgacccgctgttctcggagaccaccggcggcgcgaggtcttcggctggcggctcgcgtggcgcgtgcaggggctcggcgcgaggcggctcggcttcctgctcgggcgtcgagcgcgcgcggcgcggcgctgggtgcgcgcgggcggggcctggcgcgcagggcgcctggagcgtcgggtcgtcgagcggtcggcgtcgagcgcgcacggcagggcgggtcggggcttcactcgggcgcagtcctagcgtagcttgggcgagtggctcgatgggcaggggcacggtccttggcggcttcgcgcggtga

SEQ ID NO: 9133 - DNA, 162 bp, Zea mays
  Peptide Sequence Number=SeqID_50912
atgacttgccagatccctgactataataagggtgtaggagctattgcccatgtttttctggaggtggttattgctctgataagtgtggctgccaaccatgtttcaacaaagaagcttttgcagaaacagttcatactactcgcaagaaggcataatggctga

SEQ ID NO: 9134 - DNA, 1140 bp, Zea mays
  Peptide Sequence Number=SeqID_50913
atgttcacaagaatttatgaaggttctgggaaaactactacctgcaccaagtacgcagattatcatcgacggaagggatttaatcctgcacttgtttgtgctgatacattcagagccggtgcttttgatcaactgaaacagaatgcaacaaaagccaagataccattctacggaagttacaccgaatcagatcctgtgaaaattgctgttgagggtgtggacatgttcatgaaagaaaagtatgatctcattattgttgatacaagtggacgccacaagcaagaagctgccctcttcgaagaaatgcgccaagtttcagaagctacaaaaccagacctggtgatattcgttatggatggtagtattggtcaagctgcatttgatcaggcacaagcatttaaacagagtgcttcggttggtgctgtgattgttacaaaaatggatggtcatgcgaaaggtggcggtgcacttagcgcggttgcagctacaaaaagccctgtgatatttattggaactggagaacatattccagactttgaggttttcgaagtgaatccattcgttagccgtctcttgggtatgggtgacttgtctggcttggtgaacaagatccaggaatttatgcctgataatcagcaaatgcagatcatggataagttgggtgaaggaaccttcacactcaggcttctatatgagatgttccagaacctccagagaataggtcctcttggacagctcgtctctatgatacctggatttagcggccagtttattgaaaagggaaatgagaaggaaggccaagcgaagattaagcggtacatgacaatgatggactccatgaccgatgcagagcttgacgggacggacccaaagctgatgaaccagtcacgaatcaaccggatcgctcggggatccggcaggcgcgtggaggaagtggtgcacatgctggacgagtacaagcgaattgccaaggtgtggaagaaattgccagtgttgaacaacaacaggagatcggatatgaaccgcgacattaggcgcataagcgatgcgattcctcccaatatgctgactcagcttggtggcatcgctgggctgcagaatatgatcaaacaaatgggcgggcgcgatcgaagtagatga

SEQ ID NO: 9135 - DNA, 333 bp, Zea mays
  Peptide Sequence Number=SeqID_50914
atggagccagtcatccacagcagcgaccaccgctcggggaaaacatgctctcgcagtcgcacagcgccgccaaatcggtcgtcacgatcgaccaagtttaccagtggatcgaccagcagccggacagagatgtcgacaggacatgggcttctacctcgcgttcgcgctgttcaaggtgctgaagcgccggttctacggcaaagcatgggaaactggctagtatttacttacgagtgccccgagataaaaaggactccgaggctttccgggtataatgagcctaaggtcttggtatcttggggcaccataggtctcgggcttggagtgccctag

SEQ ID NO: 9136 - DNA, 342 bp, Zea mays
  Peptide Sequence Number=SeqID_50915
atgcaggcggcatgcaaccgcaccaagggggcacaccctttcgacttcgacgcgtccagcatggaggcccaggcccacacatcatgtaaccggcgtgccggttactacgtgcgagaaactgcaccgccactcgcgccagtaccacgcctccttgactgcggaaccggtgccgcgactcgaggcaaccctgcgcatgacccgacagtgccaaccgagcacatcggtaacggggaccgggaaaggggatactccgaaagggatccttctccgcaaaggaagcaggccccgagcccccctactgatcagaagttcgaaggctggcccctcagaagggttcaatag

SEQ ID NO: 9137 - DNA, 3138 bp, Zea mays
  Peptide Sequence Number=SeqID_50916
atgagcatggcaggcattgcgcgcggcagatcgcgatggagacagggcgacgggtcgtcgaatcggaatgcggcacactccactgttcctaaccccgatcaccaaggttcattgcaaagtggcttttgtatgctagtcactaagcaaataggagtatttgttaaacgtggattggtagttatagaagataagtacaactcctttaagcaccagggtccaggggtgaaacttgctctggatttcttctgcttgttcaatgaaggatggaagcaagcaacttaccctgggatgctatctgattcggtgtttgctacagtagacaggcaaagtaaaacaagaaaagccattgctgtaccaatgaaaatactgatagaagaagaattttcaaatgatgtcaattctaggcatatttcaccaggtgctgtaggaaggctcatgggtcttgattcgttgccctcatctggaatccataataagcatagacataccaaaagtcatgcaccaaagacttcacctagtagttttcatggtcgaactggtttgcatgacattccacacaggaggagtgtagataccattaatgtttttgaaggtatggaagccacaaaaacaaatatgcaccggagtccaagatctaaaattggaagtacaacttccagatcagacaaggttgttagtgctgatatcgatttcataaggcagaaatttatggatgctaagcgtctttctattgatgaatcccttcacatatcagaagaatttaatgagacacttgatgccctggtatctaacagtgaccttttgttggattttcttcaaaattttgatcctgctgtcataagggacctacataatcatggttctccatcctctaccgcaaactgcatcacaatattgaagccatctcgaagaaatcaatttattgacatggacaatatttatccgcaagagaaaggaaccgagagcatcttcaacgagcaaatggaagggaaacattctttatggaagccatattctaatgtgcccttgcagtccctaaaagaagattcttgttcatcaaggcagaaactgtcaaggtccagtcaccaagaaaatactggaaaacgtggctcccccacccggattgttgtcttgaagccaaatcttgagaaacctcatgatattgaagaagcccttcccctacatcataaaatatcccattctgattatagaaggcataaagaatgtccggaggttgatagatggactccaaatactgaagattacatgtgtcaggtgccccttggagattctgaaacattaagtcgtatggggaagggatctagagaaattgctagggagatcaccaaacagatgagagctgctaggggtggaagtaggaaacattctgtcaaaccggagactagaactcttgcttcagatgaaaggtcacagtttcagtcatctgttactagacccaagactccagagtcaattcatagatattctgagtcatgtgatgcttgggcttcttcaagtctcaactctttgccaacatattcgactgaaacatcagaaagcaaggaagcaaagaaacacctctctaacagatggaagaagacccgtcagtgtcagcatcaagaaactgataatgacagcttcaacacgcttggggatatgcttgctctctctgatcagaatgcatcaaatgttgctacccataaaatgacatgcaggaaatgtccaaagtcagaagtgcagagtgatagaatacaaagctcatatcctcttggcatcagcaccaatgatggttggaaagacacaactactagtaaattgacaaggtccaagtctcttccaccatccttcattcgtggagttcaaaagtcaaacaatagaaaaagaagcggcagcgttacatacaatgagttttcaatgcttaaagatgttcttaaggttggaccccactattctgaatatgcatatcgtagcaggcaaagacgatctctaagtagagattctacaattcatggtgatgaatctgatccgatgtccacagataatgaagaaaatatggtagttgaacgtgagatacatgtaaattatgaggaaccaattaatggtactgctgtgacatatacatctgggcagtcacaacatcctacaaatcttgaccatgaactagatgcaataggtgtactagataccagttctgcagtccctttcagtaataaaaagtctctttctcctgctgaacaggaccagcaagtgcttaagatgaccacaacagcactagataactgctttcttgtgcctaatctcgatgatctgatgcctaagcatgagcaaattgaataccatcaagctgatgattacccagccacttatgatcctcatatagcatcagattctcctgaggagaataatcatcacctaggggatgtcagtgaaaccctttgtattctacctgatgtattagaatcgccagcgaactccaacaaagatgaccagcaaaagctcagattgcaacttgggcttctgaagagggagactacagacactagagatggcagcgagctttctatattgagtgatgatgagacagcacgtcgatcacttcctgagactggggaatcccatgcttttaggaatacggaagaaagggacttctcctacgtgtttgatatgcttgctgctctgggcatccacgcggccaacgaggatgacctccttgacaactgctacttactggagtgctctgcaggccttgatttatacgatgacctcgaacagaagtacgacagcctcattttatggcctgtgcatgagaggaagctcttgtttgatatcacgaatgctgttcttggggacatgatcacctccgtgatgaacggctgctcgaagggactgatggcgaggtgctcgcctggatggaatcgggaagagtttgctgagctcgtgtggcaaagggtggtgcagctccggcaagagatagagttcaaccaggaagccctgctgttgagcgtagagtgggctggctctgaagatggcgccagtctggtcgggcgcgatatcgggaatatgttgcaagatgatctcgtacaggaaattatagctgactttctgggggcaactaaatccgccaagctccgtggctag

SEQ ID NO: 9138 - DNA, 411 bp, Zea mays
  Peptide Sequence Number=SeqID_50917
atggccgtcaactgggagctgcagggctgctgccaccgcgaccagaggatcttcatcgccgccgttggagtctccaccgtcgtcatcctcctcctctggaggacgttcctgctcacgccgttcaagctcatcaccgtcttcctccacgagaccagccacgcgctcgcctgcaagctcacctgcggcgatcgttcaagtcaggaattctggtcaatgagtgccaactgtctgcaaaaatgtgcactccttggcagcactctccagcctcctggtaatggaaacgagcaatggctctttgttaggtgtaaaagggaagtaatgcctgcttttggagtccgcgattatgtagactaccacatgattaagtgtgaaacctttggaggtagaaggcatgcaggtccatgcgaatga

SEQ ID NO: 9139 - DNA, 1065 bp, Zea mays
  Peptide Sequence Number=SeqID_50918
atgtacagtacccacggctggctctcgtcataccctgcacggctcctatataatcctggcatatcgcagcgacatgcacagcaacagcaagccccacagtcctcgctcttctccacctacgctacgcgccttggtgccttgcgagacatggccaagaacgcggtgcaaaccgtcagggcggtgctgtgcctggtgctcgctcttgctgtggcgaactgcgcattcgctggtcgtttcctcgacgacgaacaggctgcggctcccctgccggctgaccccctgcccgccccgacggatcccccgacagacccagccgtggcgccagcgggtgcgggtgcgggtgccgccgcgacgggcaacgcaggagccgccagcgaccacccgctgacgttcttcatgcacgacatcctcggcggctcgcagccgtcggggcgcatcgtgaccggcgtggtggcgagcgcggcagccaacgggcagctcccgttcgcgcgccccaacaccaacatcttcccgatccagggggcggtgccgcttccgcaaggcgccagcagcctcatcaacggcaacaacgcgccctacgtcgcgggcctcggcggcacgtcctccgccgtcgtccagaacaacggcaaccccgccaacggaggcaacaagaacatccccttcgtcaacgccggcgacctgccgtccggcgccacgctccagaacctcctcttcggcacgaccacggtcatcgacgacgagctcaccgaggggcacgagctcggcgcgggggtcgtcggtagggcgcagggcttctacgtcgccagctcgcaggacggcaccagcaagaccatcgtgcttaccgccatgttcgagggccccgaggcaccgcatggcggcgacacgctcagcttcttcggggtccaccgcatggcggcgccggagtcccacatcgccgtcatcggaggcaccggcaagtacgagaacgccaagggcttcgccgccatccagacgctgcatcctggcgacgagcacaccacagacggcgtcgagactctactccagttcaacgttcacctcatataa

SEQ ID NO: 9140 - DNA, 700 bp, Zea mays
  Peptide Sequence Number=SeqID_50919
atgagggcaaatagcgtcggtggtccttgctgcaaggggcacaagaagtcgttgccttcgtccggcaccactgatgacatggccactgctgatgatgagggccaccaccagctttcccacgcgcctcggcttcgagcacttgctgcatatgggagcagagggagtcggcggcagtggagggtcatgggccacgacggcgagaagactcttgagggggaggggttcgcggtgggggtggacatcacgggggcatgccatgggggaggctgtcgctgtagaggtggcggggcatcgggtgagcgaaggatggggccgggcaccaccgccctttcccacgtgccgaggccgccatccgcgccatcgccttcctttccccacgtgcgccgccatcaccttccttccccacgtgtcgaggccaccatccgtgccatcaccatctttccccacgcaagccccttctctgtggtgatggcatggtggcgggcgaggcgcgtgggaaagggcggtgatagcgcgttggggaagggcggtgacgacatagtcgcgcgaggcgcggtcgtctccggcgatggcggccacgcgaggcgtgggtggctctggcgtccttcgatgaccaactcctccgatccgatgggttcagcggcgtcctttgatctagcggcctcaggatcgtccttcggcgatgaactatctgattcat

SEQ ID NO: 9141 - DNA, 1113 bp, Zea mays
  Peptide Sequence Number=SeqID_50920
atggctggaaatgacgttggtgtttcacgagctcctagagcaatcgaacgctttgggaactttgacaacaccctcagtaacgaagaaacgacgaatagtgcctcaaaagccctgactccccttgagtcacttgacatcattggacgccttcaccacctccgcctcgacccctcaaaaggtgggagcatgcgactaggctcatcgcaacccattcttgccaaggccttggaggtatcaggtcctgttcagggaccgtcgtttggtttcccctttgttaggatcgggaggcagaccggattctctgttgaatgggactactctcgcttcagcccaagaatgcctcgtaatctcgtcgatcggggggggacctccttgctctcagggaaccttaaggggagcttcgctgacactgcgacacgcgccgtggtgtcagccccagctcacctcgacctgccatgccagggatcgctaccaggacaggtccccgcccggagtgaccgaggtctcttcactaggaagcgagtactatctcaatggcaaacgtacatcgaagcagcccgtgccctacaccgtctgaccttcggccagtctgaagcagacccggagcaggtcccaccccatcggaacctgaaaaagatgagggagcgtggagcacgcctaacccatggagcgacagggagggcacatacgtatgcccaggaaacccatggaacttcggcagaagttagacgaggccctgagggattatatctggtgcttttcacaacattgcaatcggttgaccaacctcatggacatcaactttattggctcctttacccggggaaccaccaacaaaccctggtgcataagctaggacggaaaaccccacgaacgacaaaggagtttttttttgacattgcgaccgaccatgcgttaggagaggacttagcgagggccattgccagtcatcgcaaatggaggactatgcatgacaggggtcggatgaagacgtcgatgacacctcaacgcaaaaaggagaaaagaccaacaacaacgagtcgatgtgtcggtgaatatggtaagccagacgggaggaaggcctctagccaaggaaacccccgatcattttga

SEQ ID NO: 9142 - DNA, 342 bp, Zea mays
  Peptide Sequence Number=SeqID_50921
atggccgcaggatcgttgatccacggtacaaataaaaatcccgaaccggtatccttaggtttagatctgggccgtccattcccagatcaacggcctgcacctatcttcttctccctacccagagcacgacggcagcgccacgactccacagcggcgcacccaccagacttctccaattcggcacgccagcacctaattcccaaatcccctagtcctacggcaagctcatgcaagaagggatcaaccgagggggttctcaccgtggaattcaaggcacaagtcattggcgacgacgtgagggagatccgccgcaccgcaccatcatcgatttctaaattttga

SEQ ID NO: 9143 - DNA, 114 bp, Zea mays
  Peptide Sequence Number=SeqID_50922
atggcgagtccaccgtcgggcactccagcggctgggcacgagcgtcgcgtcagggaagatgtgcgatggtcgttggatggccagggagcggccgtgattagaagacattattaa

SEQ ID NO: 9144 - DNA, 1101 bp, Zea mays
  Peptide Sequence Number=SeqID_50923
atgaacactacaaacaagatcgaagaggagttaaaacttcaggggaacatgcacgctgaactggtcaagaaaatgcgggaacaagcttctttagatcatgtggcatccacggttcagacttgcatgaagcagtacgaagtgacagaagaggaagccaacgagaagcttagagctataaacgagatggcatggatggacatcgtccaagacaaccttgagcaggaacgccccatagcacttctcgacacggcgatcaatgttgcacgaattgcagatttcttatacaagcgtgaagatgcgtacaccctcccattcagcctcaaggacattataggttcaatggacgacaagacgtggagacaaattgaactagcggtgaaaagttctatcatcgtcgggtatacattggatccaacagtgatccttggtgactgtttctctgctggcggattatgtggtggtcaccagtcaccacactgcacaaagttggtgacctggtgggaggcaaggtgctacatccccgtatacgagaagaagggcacacaagatgaaaccctactagagtttggaccggtgagcgtgagaagagaggaacagagggggagggggcgaactgaggggtgtcccctggttgctgacgttgaggcgaagctcaccgaggccacgagcacgacgaggactcgacggagaccacagaacgagctcgagaccaaggcggtcggcgatgacgtcttctctggcatgcacacagcgctaggcgaggacggaagctctgcgggtgtgcgagtgagggaggtgaggggagtgagtgagggcgcgacttcaaaaggggtcgagtgtgtgggcgaggtggccgggagatgcgcgacgtgggcgcgtccacggcaggaggttagagggaaggagggagatgacaagcggggtcagcggggcagtgagagagggcgcatgggcgagtggggtggcgccgataggcggaacccactgcagagggagaaagagggggcaacgggcgcgcgcggggagcggggcggcgccgacaggcggggcccactggtcatagggagagcggggacgggagcgagggcgagttgggcctag

SEQ ID NO: 9145 - DNA, 327 bp, Zea mays
  Peptide Sequence Number=SeqID_50924
atgaagctgtggaaggagacttccaggagttccaagactacgacgagttctaggtgtgggttagcggcaacccccagtcggctgcctgtgaaggccgcgttatctacgtttcttttctgcactttgatttattgtaagaatacatccattgtgatcgccatgtcgtgcacattatgtagctccgttcaatttgacaatggtgctcgggggaggccgattggtgtcacggtcgttcttctccaccgcacggtcatggcgacggtggccctgcttggttggtggggggaagacgaagggcgaccgttgatctggcctgggcggctgtga

SEQ ID NO: 9146 - DNA, 522 bp, Zea mays
  Peptide Sequence Number=SeqID_50925
gaagccccctacgcgccctttctgacaccgtggaccccgctgcccaacctctcaaatgtgcgccccttccgtttcctgtgtatggttccggggttgcttgcgtgtgggccacccccatctgtcgctccctctaccgcggcttgggcactggcaggtgggccccggagcgtcaggaccttctaccacccgcctttcggactcgcccatccatgggactatataatcaagagccccctagctgtcttcatcacgggtatgcaccaggaaccgagggctcgcgcaaggagaaagaacagtgaggtgcccgacctccgccaccgccgtagctgcctctggtctgggcgcgagtcggatgctggtaaagtagtcgtgacggttcgtggtggcacgctgcacgtgatcatggccttctcgggcgaagcggtcctcctgtgctctaccaattgctcaccagagcaacttggccaccatggttccgctcttcaccgtgggcggagtccgacgcggctaaactacgggtaa

SEQ ID NO: 9147 - DNA, 1590 bp, Zea mays
  Peptide Sequence Number=SeqID_50926
atgaccaccagcgtccccgtccctctggcttcacagccacaggcgccgcagcgcaagccacggacctacaccccgagcccatggggtgacttcttcctccaccacaccccatgcactccgtcacagctcttgtcgatgaaggagagggcaaaggtcaaggagcaacagcgtctcggggtggactaccgctactacgaggagatcgaccagttgcttcgctctgtctacgacgacggcgacaaggatggaggcggctccgacgatctctacctcacctcgctgcggttctacttgctcaggaagcatgggtatacaacctcttcagatgtgttcgagaaattcagggacgagcgcgggagcgtctcgagcgacgatgccagctgcttgctcatgctgtatgacgctgctcatacgagaactcacggggaggagattcttgacgacatcatcgcttggagcaagagccgcctgcaatccctgctggaggagaagaacctggagccagagcttgccgaggaggtgaggtgcgctttggagacgcctcggttcaggcgggtgaagcgagtggaggcgaggcgctacatctccgcgtacgagaagaagggcgggcgagatgggaccatactagagttcgccaagctggactacaacatctcgcaagctatctactgtgatgaactgaaagaacttacagtatggtggaaggatttccaatcacatatagatatgcgcttcacgcgggacagattggtggagcttcatttctggatgctcggagtcatacatgagccatattactcgtattcgcggatcatgatgaccaagttcttcatatttggaaactttttcgatgacctttacgacaactatggcaccacagaggagagcgatgtcttcaccgcagccatggaaaggtgggatgaacagatcgctcatcaactttcagcaggcttgaaggtactcttggccagcatattgaacgctacaaacaagatcgaggaggagttaaaacttcaggggaacatgcacgctgagctggtcaagaaaatggtgattgacactgccaaatcctaccatgccgaggtgaaatggcgcgatgaacactttgtgccagccactgttgaggatcacctccaaatttctatccctagtagtggttgcatgcagatcacaaatcttgcgctcatttcatcaaggggaaacatgactactagagaggacgtcgagtgggttttcaccttccccaaaatcgtcagaggcgcttgtattgtgggccgcatctgcaacgacatcatgtcacatgagcgggaacaagcttctttagatcatgtggcatccacggttcagacttgcatgaagcagtacggagtgacaacagaggaagccaacgagaagcttagagcagtaatcgagatggcatggatggacatcgtccaagacaaccttgagcaggaacgccccatagcacttctcgacacaatgatcaatgttgcacgaattgcagatttcatatacaagcgtgaagatgcgtacaccctctcattcagcctcaagggcattataggttcaatgtacgtctactctgtgtga

SEQ ID NO: 9148 - DNA, 294 bp, Zea mays
  Peptide Sequence Number=SeqID_50927
atggcgggcggcgcagtctcctttccccttcttctggagctgccggccgtgactccgattccgtgggtttggggtgttaaatgtcgtgctcacccacgaaccctaaaccctaaagctgcacgaacccaaccgtcctcccccgtgaccgagagaaccatcccgtgcgggccgccgccggtgattactgcccctgtggacgcactgcctccggagcttggggtcgggacttcgtcgttcggtgtggtgtgcgtgtgcagtgtcgcggtgatcggagaaccagcggggcgcaagtaa

SEQ ID NO: 9149 - DNA, 105 bp, Zea mays
  Peptide Sequence Number=SeqID_50928
atggtgaaggaaggttgcatcttatcattcttgtgtgagaaggtagcagttagttggttattgggagtgaaatacgaacaacaatatagccttcgatcagtgtaa

SEQ ID NO: 9150 - DNA, 420 bp, Zea mays
  Peptide Sequence Number=SeqID_50929
atggccaataccaggaagggaggtgccgatgtacctacacgcattcaccgaaggagggcagtagctaaaccagaaccggagatgaattgcccaaatcctctgtctgctggctcaccagaaccacttcaagatgatgattggtttaagtcagtggagaagatgctcaatatttcccaatgcaccaacatagagaagattaagaagaaggagttcctttcacttaggcagggaagcatgttaagacttctggacaagggcatggctcttgaacacaagtgtgttcagctaggaaaaatgaagaggaaggctatcactcagggacagggaggcaacagtagtcgttctcgatacactcagcctcaaggtacaatagctcatgtaggaggtggtcaacaatcataccaatgccctattcagtag

SEQ ID NO: 9151 - DNA, 399 bp, Zea mays
  Peptide Sequence Number=SeqID_50930
atggccggggagcgatctgtccctgaggtgctcttggaaccttcgtcagatgtgctagagacaagagttgaaggtttttccgaggtgacagaggacatggcctgccaaaccgaggctgctaccatggatccttctaaagacatcaatggtatcagcatcgaggaagatagcaccattattcatccaataaagccgagtcatgtggacttcagcaaatcgaagatcaaagaaggacacattgaagcgctacatgtggggaagatggtgaatcaaacggtagggttccacactgaggacgggtgcccatgccccgactgtggtgagaatcgggcaatcggcctacaacccgcactaactctggtgagcaggtttcagcagctgccccaaagtggggactag

SEQ ID NO: 9152 - DNA, 162 bp, Zea mays
  Peptide Sequence Number=SeqID_50931
atggctcgtcgtgctcaaggcaaagtccggcaaactctggcttgggcaggactgagagtatgcgggggagtacggtcgaggccttggggcagctttataggcatggcgtgggcgagggcgcgtggtagacttgaccgggcactaagaaggaagtcctcttag

SEQ ID NO: 9153 - DNA, 432 bp, Zea mays
  Peptide Sequence Number=SeqID_50932
atgagggtggtatgggacacccttggccatgcgtcgtcccacgtctttttcctgaggacagagtgcataggtttgggtacatcagaagaagctcttgtcgtcgccactgctcccaccctggcccttgtcgttgccctcgccgtcaccctcgccatcgccgtcgtcatcgccctagtcctcgtcgccatccatgccatcactggacgcatgttcctcgtccaactcatcagagtcgacgaggccggtgcgctcaatggccttggcgtacgccctccccgcaaagagtactccgagtcaccgaaggggtcagaggagggagtcatcgaccgcttcgaccttttgagctttccatcgtcgggcatggtgctgggaagatggggtattctagagaagagtgaagacagaagtctcaagagtgcacaggcgaaatga

SEQ ID NO: 9154 - DNA, 237 bp, Zea mays
  Peptide Sequence Number=SeqID_50933
atgctcttatcaggattactagactatgaaagctgtgtatctccacccttcattgtgacgtggatcggtgtgctcttagcgtactggaatcctttaaaattcaatgaccaggaaaagggaaacaagatggaaaagaagaagcgaaacaggaaggcaacggacgagggacttatagccaacgagagggatagcgatttctcttctaaggattccgacagtgacggactaagtgcttag

SEQ ID NO: 9155 - DNA, 807 bp, Zea mays
  Peptide Sequence Number=SeqID_50934
atggatatggcgaagtcactcatcccaagtcaaatcaccaacaaaacctacacaaacgacatggagacgaagcacattgactttgtggatgatctccaagcaatgttcccatggaaggagaagcaccaggtaaccaatttatatgttgagctactagtggagatcatgagggcacagagcaacaaccaacatgttgtgccaagtagcgtccttgtgaatgataactttgggatgctgtcaaaacccatggacaacatgaaagtgatagaagggtatctaatggatgagatggaggccatgaggattctagaggagcaaccaaatatgctgaatgtcattcataagaaaaagaggcatggagtgaagttttggaccacagacgagcacaggaattttcttcgtggtctggaagcatttggccgtggtgaatggagtaacatctccaagtactttgtccccacaaggacaccagtggacatctctagccatgcacagaagtattttcgtaggcaggagtgcaccacaggaaaacaaggcttcaacatcgacaatgttagcttctatggcacacaaccatgggtgcaaaacaacccttccagctgtgaggcgctcaccttcactggtggtgcttacaacacaaactacaatgacttagacgagaaacatgttgccttcaacagcttcgcaagtgacaaccagttagctacatggtttgtagaccagcatacaagttcttatctagctccactgatggaggaggatgtgagccagacaaataagtggatggacctagaaaatattgactag

SEQ ID NO: 9156 - DNA, 984 bp, Zea mays
  Peptide Sequence Number=SeqID_50935
atggatcctaagggcaaggggattatgatcgatgataaggagaaggagaccatcaacaacaatggtccaaagggagataagcccatcaactcaggctcaaacaacaagaagaaggacaggaaaaagaagaggcacatcacgaagatagtctactacgacagtgacgcctcctcatcttcaccgaaggacgacgacgatgactcgtcttcaaagaaaaagacgaaattcagaaaaaatgtccaggctactactgttcttttagcatctctatgcagggatgaatacaacaaggttagtggtttggacaataccaagaaaatatgggacaccctcaaaatctctcatgagggtaatgatgccacaatgattaccaagatggagttgatggaaggcgagttggggaggttctccatgaatatgggtgaggagccaactaaaacgtacaataggctcaagaccctggtgaacaaaatccgaagctatggaagcacaagatcgacggatcatgacgtcatgcgcctcatgttaaggtcatttactgttattgatcctcatcttgttaatcttatctgtgaaaaccacgggtataccaaaatgtcacccgaagaaattcttggtaagtttgtaagcgggcgcatgatggtaaaagaagcaaggtacgtcgacgacatcgctaacggacctcttcctcactacgagtcgcaactcgttgcactcaaagcaacaaccaacaaggtggtgctccctaacaaggtggtgcaagttgaggcagctagacttaatgaggaggaaatggcgcttgtaatcaagcgtttcaagaccgtgttgaagggacacaaggactaccccaacaagaacaaatcaaggggaaagcgttcatgcttcaagtgcggtaagtctggtcattttattgctcaatgtcccaataatgagaatgaccaagaacaagacaagaaagggaagaaggagaaaaggaagttctaa

SEQ ID NO: 9157 - DNA, 1527 bp, Zea mays
  Peptide Sequence Number=SeqID_50936
atgtgcctggccctccgcaagaagaatataccaaagaataagaagaaagtaagtcaggaggtgcatgagaaacagaatgtgatagatgacatccccatggacattgttgaacttctcgccagaaatcagcatgagagacacttgatgactcagactgacaccaattctttggaaaactgtcatgatcaacccaaggcaggtgaagttgattgtgctgaatctgcagccaaggattgtcccgtgaattcatcgaatgctaattttgagaaacctttggcattggaaagtaagcagaagtccttacaggatcatgcatcatccagtacacaggctacaaacgtgaatccgcaggatttacatactcagaagttgccacagtgtcctgcagcatccagcaccaaggttccaaatggtcctccttcagaatcgcaaacgcagaattcgcttcaggttcacgcattaccagtaccacccatcgtacagtctttcaatgcgtacccttcaaaattacctgcccttgacatactggagtgtgcccaggaacaaccgacacgattccacagggacgatgaagtcaccatcgcatgtacctcgcctatattttcaaactatcaacatattgctgaaacgcctgctcggagctggagggacagcagggaaaagaagctaatgtgggattctttcaagacagcttcaaggaatccaccatcaccaccaccgtcatatggttttcaattcggaaacaggcttcaagaagttgattcagctcccattcatgcatatggagctcaccagccagtaattgtggccgtagatcagccgagaagtgttccaagcacagcgttggctatggaggctggtaggctgtacgatcaaaggatccctggacagccaggcctttacccaaaagagcccatgcctgcaacacatctcctgaggctgatggactcatcaacagctccaggcttcacaaactaccaaagagctaataggcggcagatggagcttcaaacgcaagctctcggctcgcagtacacacagcatgagcattacaatgcgtcaccgagcacgtcatatggaagccaaccgctgacactggaagacttgtctcggcgtcatttccagcaagacttgcgcaggcctttacgccctcaccctcgtgtcggtgtgctcggttcattgctgcagcaggagatcgcaaactggtctgggaactgcgggccgcagtctgggtacagactaggtgattgtaaagggacaaggccgcctgatgccaacagagcaggaaactacgagaccttgagctcggcaggatggaacaccctgcagttgggttctgttagctctgctgccaatctggagtaccggtttccatggtatggtacgggtcagccttcgaccagtggcaatgggaggaccattcatccgttggataagctcgtgaggaaggatatctgtgtgactaacagaaacccagccgatttcactgtaattagtgacaagaacgagtacatgagaaccctttga

SEQ ID NO: 9158 - DNA, 1713 bp, Zea mays
  Peptide Sequence Number=SeqID_50937
atggaagcagctgctcttgctcgtagaactagagcagtggaagaactacggcgtttatctacagttgctgaatctgatgacacaccagaacagcgcctatctacagttgctaaatctgatggcatgccagcagaagagcaggaatgcgatcacttctccctgaggggttatgttgctatgcttcagaagaaggatccaaaactttgctctcctcatattttccatagccagccacaatatgatgagcaccatggttcgtccccacttttggtgtcaaagtatcgtcgatgggattgctcaaaatgtcttgaaagagtgaaagtttcaggccatcgacctacatctggaaatgtttctatcgagcaggatggaatgaatgatggctgctctatttcaattgttcggattttgcctaatagggttgatcccagaagaatgttttattgcaaacaacaatcatctcaagggaatgatcaattgaccctttcaaagaccgcccaagaatgcaattcaaaatgcagttctcctggcaacaaagcaattactgcgatgaatattccagtagctgaagaaaatgttctagaggcactcgttgaaagaagtgttccagcgacagaagatttacaggcctctcccaataatattgatgtctcagcaaatatcttgaatgttgtccccaaggatgccagcgatttacctgatgatgttcaaacgatatcaaccattgaagaaaatggcacaaaaaatccatgtagcccaaaacttcgtgtgatgccaaatgaagatgagagtaacatagttcaagatgttcctaattttgaccccaatgagtctaatgtttgtaaaccattatcttgccacaaaggcaaacaaatatctgggcacaaaagcagccaagtctgcaacaagggtccacgccgagcatcgttaaaaaggaaagttggatctgatggtaagaagaaaagggacaaatcaactgacctgcctgatatttcaggtctaaaattttgtcagagaaagccaaaaaagatgaggcttttatcagaactcatagatgctgaccaggtagggatttctgcaaatgccgttcaagtggaccgtactgacagtgttgatctttgtgagggtggtaaaagaaaaaggcaccttgaggttggaaaagataatgatactcctaatcagaaactggacaaaatccagtcaagagctgtcaagaacaaggcaaaacacacagcagtagacaaggtagacgatggaccctctctaatgaactggctgaagaacactcataagaaaattagaacagatagaaaagactcagaacacaagaatcttgattcctctgctatttcaagatcttacccagatatagttgcttctgatgatatgtatcatgattttataccctcagttggggatgtggatcaggtaaagttaccatctactaccagtgccaagcatgggaaggtaaatgcacagaatgacaacctggagcaaaatatgcagaaggtggatgaatccaggaacttgaaacagaggttcttctcaagtgaaaaatcaacgattttgctaaagcgaaaggtacagtccacttcagttgcccatgacgagaacattgagaacagtattataaagagagacatgctcaggccagatgatgtgcctcaaatgggacatgaaggctctgtccagagatgtttggcaaaggtatga

SEQ ID NO: 9159 - DNA, 261 bp, Zea mays
  Peptide Sequence Number=SeqID_50938
atgaccaatagaggccgcgacgggccatatatctaccggtgggggtctgaggaggggcccaaattcaattgtcgattccaatcatgcatgggccctaaaatagcttacgtttgcaactacatcacgttcgtgtacatagccccctctatttctctcccactccgcacgccattcccgcctagcttttcttccgattgcttccagaaaatcgttgagccctcgctgacgtacggctgcgaccgtggggacgacggcctttga

SEQ ID NO: 9160 - DNA, 597 bp, Zea mays
  Peptide Sequence Number=SeqID_50939
atgaggcctgacccggcgaacagcgacgcggagaacaaagtgagggacagaggacaggaagggcacgggccgggctcggccatcggcgcggcaatccgaagcttcggccagcaggacaccgagcagaagttcgacgcacacagggagatggacgccgagagcttgaagcagactggagcaccactacgcgcaggggagagccacggcttggagacgcgccgcgatggagagcttcctgggcgcgtggccagagaggaaattcgagctgggaagatgccggggctgggcagaggatgggctcgagctagaggcgagctcggtcgggacctgggcaccgggcgcgcgagatccagcgagcgcaggggcgcggcacagggagccgggcgagcagggagcttcgcgcggcccacgatgaaggagaaggggcgcgcggggatggggcagagggaagctcgacggcggccgagcgaaggggcgagcgcagggatagactcggcggggaagcaaggagatgggcttcgagctgagcagagcgcggcgaagggctgcagcgctggggctcgactggaagaagagcgctcggctggccggagatga

SEQ ID NO: 9161 - DNA, 270 bp, Zea mays
  Peptide Sequence Number=SeqID_50940
atggactggacaggcacgccgcctgcaggatggcctggatgccgcctgccagccgatggcagcgcggcccagaggccttacgtcaggctccgtccactcgcttacgtcacgggcgatagtccacgtggcagcatcgggcctccgcctgagcggggagtggaagcacactggataaagcctgggcacgtacctcatccaaggggtccaacttgctcacttgggagtcctggaccgtactcggagttccaggctatgcgtacagggatctga

SEQ ID NO: 9162 - DNA, 768 bp, Zea mays
  Peptide Sequence Number=SeqID_50941
atgtcctcgtcagtcaacctcaatccaggaacctcccctcttggccacgtctggatctctctgcaagaaaccaggggctcaggcgaaagaaactgggacaacaggttgattcatgggaagctgggggtctctttaacaaaattaccaggcgaaggggtatcaggcttcctcggccatcagatcttagatcaatggccgagaacagatcctacaggcgagtgcgcgggcgcgggcgcacaactagcaggcgggccaaggcggtcagcagctcggggtgggggcaaggctgaccgatcgggcccagtgacaagagcgcaagggactgacgagcaggacccaggggtagagaggggggggggtgatcgagattgggtgcccatggggtttaacggctccagccggccatcagcggcgccgctctggcctgcgatggtgaggtcgccggaaacaaggcgggcccgagttctagggggtctaggatcacctgagcgggccaggtctgatgaaaggaacctgacgtaccttgtggttgcatggtggagggggcgctctgggtgggtcgaggggggggggggtgctccgacgagcaatcccggtcacggtgagggacgattgagtgcatcgaggctggcgtttgggacattcggggccaaggtttgggcacggggcggggctacattggccgggtgccatggaggcacaatggatcgacgcaccacagctgcagcgatctctaattcgctgcagagaagtagaattgaggcctaa

SEQ ID NO: 9163 - DNA, 474 bp, Zea mays
  Peptide Sequence Number=SeqID_50942
atgacgacggtggttctcagccccctacggaagcaaggaggcgtcagcaggatcccagcagcaccgtcagctgcgcttctacagggctcaggcacttctccgacggccacgttatcgcatacgcagggctctagcacctctccgacagccacattggcatgtacacagggctcaaccacctctctgccagacacaattgcgagcaggaaaagaatagagtgcaagcccaaatgcaatagtgtgatgttctaccttcggccatggcatggaaggactccgacgctgatcagggcgacgcagaacggcaacacagtggcgcatgagggcgcatggagtttggggttcgagagagggggcaccgagggcttgaagggtgcttcaacggtggcggggaggctcgggatggccctggcgacgtacgacggcgacggtggcactctttgtgcatggatagggcatgatggagcttggtag

SEQ ID NO: 9164 - DNA, 1413 bp, Zea mays
  Peptide Sequence Number=SeqID_50943
atggggagcgagtcggagcccgccaaggggctgctgccctacctgcagcgcgcggacgaactgcagaagcacgagcccctcgtggcgtactactgtgagagacgcttctatcccctcgtcggtcggctctacgcgatggagaaggggttgaggataccccagaaggagcgcaccaagaccacaaactccattctcatctcccttatgaaccagctcgagaaggcacgttcctacatccgggacaagaagtcgttgactttggggcctgacgacaatcttcatttggaggggtttgcattaaatgtctttgctaaagcagataaacaggaccgtgctggacgagctgacataaacactgctaaaaccttctatgctgcaagcatcttctttgagattcttaaccagtttggtgagcttcaacctgatattgagcaaaaacagaaatatgccatctggaaagctgctgaaataagaaaagctctcaaagaaggccgacagcctgaagctggaccacctggtgggggtaaagatgaagcgcctgtcaataccaccaccatttctcaggattttagtaggcggggtagcttttctgctgtgcagccaggaaataatttgcctccccaaagtacagaattcaatgatcatccctctacccagtcaccctattcttccccaccaccctcacagtcccagcacccttctccatcacaatcttattcctctccctcataccaggcaacagattacccttcttctgatattcacaaaccatcccccaattattcatcttccccctacacaagcacagactaccctaccaatgagctccacaaaccaccttccaattattccccacctccttacaccaggacagatcacccttctaatgatggctacaatcctcacagcaatgataaaccggatgtttcggcttaccctcaggcataccaacccccaccctacacaattgaccctcagcacatctctcaaaactactactccaccaaagccccagctgctccatacaactaccctaattttcagtcatatccaagttttcaggacagcacgtcaccttctgtcccgactgagccgacgtatcaatcttcattctatcctgcaactgatggtcctgcagctacttcgtacactcctgcttcaaattcctctgccccaacacattaccactcaactgctgactattcacctcaagttactcctccagctgcgccaccagctagccaatataaatatgatagcagttaccagcctgaagttgagaagattgctgaggctcacaaggcagccaggtttgcggtcggtgctcttgcatttgacgacgtatctgttgccgtggatcacctgaaacgtgcactggatcttctgacaaacccttctgctgaacctcgctag

SEQ ID NO: 9165 - DNA, 354 bp, Zea mays
  Peptide Sequence Number=SeqID_50944
atggactgcacagtctctaacactatcccaccttttggattcaaaagtgcgagttctgggtttcaagagaagaccaccacgactgattgcggtttcaaggtcgtgaaccatgcttggttgagggtgatgctagtgcgggcccatcgtgggacctggcctcacctttgtaaggctccactagtgcggttggagcttgagcacgccatggggcttggttggaggctggcagtgaggaatacttcatccgccaagggtgaggcagaagccggcacaacatatcgtgcagcctttggtgcgccccatggcaccctaccaatggattccagggaggaaaacatgttgacaaaggcatag

SEQ ID NO: 9166 - DNA, 840 bp, Zea mays
  Peptide Sequence Number=SeqID_50945
atgtcgtgggaggagaagaggtcgtggtgcttggtggaggtaacaacatcggcggtcaggggcggagggcccagtatggtccagtattgcctgggcaataccttgggtcggcccactaagagaatagagattagggttcgtcccgcacagccgcacaggcgcgtcccgacgtcccgcactcctgccggcgctcattcctccaggcctccagcctccaaccgctcgcccgctcggctgcagaccgctcctggcggcgctccagccgctcggagcctcggcacgctcggcgctccagctgtccgctccggcgcttcgctgatctgcttgtctgattgtcttgtcccgcccggcggccggctgcaggctgcttgccgcttggtcccgccgaggcgtcgacccgcaccgcacggctgccgcctgccgctgcttcctgcttggccgcacgtctgcttgtctagttgtttgcttggctgcttgcttagtgcttctagttgtctgcttgcttcgtgcttctgtgtttctagttgtctgattgtgacttgtgagacttgtgagcatagaaaggtcaaagatttaaagagctattttagtcaagcttctagtggaagtagactaagcactcgcgctagtggagtttgcaatgaaccggaatacaagttggaattcaagagaataatagtgaagataccaatggtgaaaatgttaatggtcaagtcgaagataagaaaactagacaaatgcaattgtctagatcttctagaactagacacaactaaacattttattcgctatatggtatttggttgtaaatggattgtaatcaagatgactactaaataa

SEQ ID NO: 9167 - DNA, 477 bp, Zea mays
  Peptide Sequence Number=SeqID_50946
atggcggaaagggtggtaccccgcataccttggttcgaggcgaaggtccccccccccccgaccacgcggtggcacgattccgcggcagagctcctaccacgacgagaaattccgcccgcaccggtcgttcgtactcactgcgcctcccttcgcaacgcccgccacagcaaccacgaacacccagagctccccacgggatggatggggacgaggatcatcgattccgagcggtggtgggttctttgcgccgcgctatggccgagatggtggatgtcgacggattatggaggcgagaggttcaaggaaggtgcgcgaggtggcccccaggacccggtatttaaccccgctcggtcattcgcaaggtgggcgcgagatttgcgtcggcgtcgtgcccgccatgctcagcaatccgttgagggcggagctgacccgctggacccaccagacagcgacgtagagacggcgactgagaagtag

SEQ ID NO: 9168 - DNA, 390 bp, Zea mays
  Peptide Sequence Number=SeqID_50947
atggcggtggttctccggctgcgcaagaaatgctccggtgagcgtggaccggacgaaccagcgggggagaaggcaaaccaaggggcgttcctggttgtgggtgatagggcggagcttaccggggcaacagacgtggcggggagtcgttctggtgcgcgtgcagggcgagacatggcggagcttatcgtagaatgggcggcgaacgtcggtgagcggcggcggagctgtctggtgcgcgtgcagggcgagagagctcggctgagggcgcaagtgagcagggggaggtgggcgagcggggcgcgggctctaaaggggcgagggcgtgcggaggtggtcggggaatgcgcggacgtgggcgcgtccacggtgggggcgtgggcgagaggttag

SEQ ID NO: 9169 - DNA, 987 bp, Zea mays
  Peptide Sequence Number=SeqID_50948
atggttttaaaaggtgatgctgtgggaagtataaaacgtgtggagaaggcgaaggtggctgtgtttgcaactggtgttgattcatctgctactgaaacaaagggaactgttttgattcactctgctgagcagctagagaattatgcaaaaactgaagaagctaaggttgaggagctcattaaagcagttgctgattctggtgccaaagttatcgttagtggtggagctgttggggaaatggcattgcatttctgtgaccgttacaagttaatggtcttgaaaattagctcaaagtttgaactacgacgcttctgccgcacaacaggcacttctgctcttctgaaactcagccaaccaaagccagatgatttgggatttgttgattcaatttcagttgaagaaatcggtggttctcgggtcactgttgtgagaagtgaagatgggggtaacaaggttgccactgtggttctgcgaggaagtactgatagtatattggatgatcttgaaagagctgttgatgatggagtcaatacatataaggcaatgtgcagggatagtcgtatagtacctggagctgctgctacagaaatcgagttggcgagaagactgaaagagttctccttcaaggaaacaggattggatcagtatgccattgctaagtttgctgaaagttttgaattggtaccgagaaccctggcagagaatgctggactcaatccaatggatattatttctaagttgtatgaaaagcatgcatctgggaatgctaaagtgggcatcgacttgaggggagacgaccctgaggatggtgtttgcaaggatgtctcaaccgtgaatgtttgggacctttatgtcactaagtttttggctctcaaatatgctgcagatgctgcctgcactgtgttgcgtgtagatcagattatcatggcgaaaccagctggaggtccagcgaggagagatcaaccggcaggaatggatgaggactaa

SEQ ID NO: 9170 - DNA, 589 bp, Zea mays
  Peptide Sequence Number=SeqID_50949
acggctaagtctaagggactgcaatctttgtgaaggagatattccacgtgatatttctggtctatcctctttgaaacatcttgatcttcgtggtaacaatttcatcagcatacctgcatctcttactcgactctcgaagcttgggtttcttgacttgtcaaattgcaacatgtgcactcttggtgaagcagatattcatagttatatttctggtctatcctctttggtacatcttggtctttgtggtaacaatgtcatcagcatacctgcatctcttactggactatccaagcttcagtttcttggattgtcatattgcaagatgcttaaattgttgcctgagataccgacaaggttaggacaagtgtggctagatggttgttcttcacttgaagtatgcaatttagtggattcggctgcctttagagccattaactgcttcaaattggctgagaatatcaatgcattaacactacgtgaagtatgcaatagaacagataagggtgcctttagagccattaactgcttcaaattggccgagaatatgaatgcattaacactgctgaaagaacagcttaaggtcgattaa

SEQ ID NO: 9171 - DNA, 2712 bp, Zea mays
  Peptide Sequence Number=SeqID_50950
atgggtggcatcggtaaaacaactcttgcaaaagttgcttacactcaaatgttacctcatttcgaagacgaatgcttcaattttttcaatgttcatgaagggaatgccataattagccataggttgtctagaaaaaaggttcttgttgttcttgatgatgttgataacgtacaacacttgaaatgcttggttggaaggcgtgattggttcagtttagggagtaggatcattgtaacaacaagagatgaacatttgctcagatcttatcgaatcgatgatgtgtataagcctacaacactgaatcccaacgatgcacttaggcttttcaatttgaaagcttttgatagtgatacaacgccgaaatatgatttcattgagctttctaaacaagttgtacattatgctgatgttctgcccttagctcttgaagttttgggttcatttttgtgcggtagagatataattcaatggagaagtgcaatccaaagacttaaacaagattctaacaaagaaattcttgacacactaagaattagctttgatggattggaagaaagggagaagaatatatttctagatatagcatgctttttcaatggggaggagaaagatttggtaatgaaagtattggatggttgtgagtgttttccagatattggaatcgatgttctcattaagaaatctctcataaaagtcagtgatgacaaccaatatttgcggatgcatgccttgttgcaagaaatgggaagaaaaattgttgaagaaaaatgtgttgatgaacctggaaaacgttgtagattgtggaaggaaagggatgtccatcatgtcctaacaaaaaacacggttacagaaataattgaaggcataatcatcgataatcaaggggaatcaagcaagacgctcaatttgagtgacgatgtcttctcgaagatgaaaagattgagattgctcagagtgctttgcctctcaaattgtgatgatctcaaatatctttctgatgagctacgacttttagattggacaaaatatcctttaagatcattgccttcaagctttcaaccggacaaccttgtcgcacttctcttaccatatagtcgcattgaacaactgtggaagagaaatagacccttgtataagttgaaaataatcaaccttaaagggtcccaaaatctcatcaagacaccaaacttcacaacagccccatatctcgaagttttaattatggaaggttgtactagattagtagatgttcatccatcacttggagtgcttaagagacttaaacttttgaatatgagagattgcaaaagtcttaggagtcttccaaccaaaattggaatggaatcccttgaaactttaattctttcgggttgctcaaatcttgcaaggtttccagagattgatgggaaaatggaacatctaaaaactcttcatctttatgattattataaagttgaatatttgctggagagtttgcatcaagcagaatctttggaagagcttgacttgagtaaaacagccataaaagaaccaccatccttcatttctcaattgaaaaatcttaaagttctatatttcgatggatgcaagggtccgtgcaagttaaaaagaaatctcctttctcttttcaaggtaagccaaagaggaaggatgaattccatagcttcaatgctaccttcattatccggtttgagttcattaacaaagttggcagtaaggggctgcaatcttggtgaaggagatattcctagtgctatttcttgtctatcctctttggcatttcttgatcttagagataacaatttcaacagaataccggcatctctgaccggactctccaagcttgaagaacttagtttgtcaagttgcggcctgtgcaatatgggtgaaggagatattcctagtgatatttctggtctatcctcattgaaagttctgtatcttaatggtaacaatttcaccagcatagctgcgtctcttgctcgtctttccaatcttcaatatcttggagcatttgcgaattcaagagaaagatttgatgttattatacctggaaatgaaatcccagaatggttcagccaacagataggcggctctgtaatcgaaatacctttgcctctcaatattcagaatgacagtcgatggattggagttgctttctgctgcattttcggtgatgatgatggttccgagataaaggttatcggtggtccaacttatatccattctagatattctggacaatctagtagtaatggatctgtttttcaagttaaaaatagtcgaaaggtcgatttcagtttccttaattttgttggacgatgcataacgaaggaccacctttatcttcgttatttctcggcattatccttaaaggataaatgtgaaaccaataatttatcgcttgagatgtctttccaatcttctccaaaagggtatccttctgttaaggtgaagaagtgtggtgttagaataatgtatgagaaagatttggaagaaatagaagagctgcagtgccatgccattcaatcttctccaaacttggaacatatccatcatcactctactgaaaacgatggatccgcaggcagcacttcccgtgtaaaacgaaaacgtgatatcgacgtggaaacagaggaagaagggccgcaccctaaaaggatgcaaaacattttcaattttataacgggccgatcagggaagaagcaataa

SEQ ID NO: 9172 - DNA, 3213 bp, Zea mays
  Peptide Sequence Number=SeqID_50951
atggcccccgatgtggatgaaaacaaagaaaaagttgaagaagccttcaccaaacacgaagaaagaaagaaatacgatgtgttcttgagttttagaggtgaagatactcgcaaaaattttacgcatcatctctacgatgctctaaatagaactgggatcgtcacttttagagatgatccaaagttggaaactggtgaagagatcgcaccggaactcttcaacgcaattcagcaatcatggtgctcggagcttgcggagattgttaaacaaaaaaatgacaagggtcataaagtatttccgattttctaccatgttgatccatccgatttaagaaaacaaaaagaaaaagttgaagaagcctttgccaaacacgaaaaaggatacaaggaagataaagacaagatccaaaagtggcgaaatgctttgactgaagtggctaacatcaagggatggcatttaaaaaataggcacgaatcagagtttattagagacgttgttaagaagatatcagcaaaattatgtcagacatatcctgttgttcatgatgagttggttggaattagtttacatttggaggagttgtattcgaaaataaatattggggaagacgatgtccgcattataggaatttgcggaatgggtggcatcggtaaaacaactcttgcaagggttgcttacactcaaatgttacctcattttcaagggaatgccataattagccacaggttgtctagtaaaaaggttcttgttgttcttgatgatgttgataacatacaacatttgaaatgcttggttggaaggcgtgattggttcaatttagggagtaggatcattgtaacaacaagagatgaacatttgctccgatcttatcgaatcaatgatgtgtataagcctacaatattgaatcccaacgatgcactaaggcttttcaatttgaaagcttttgacggtgatacaacgccgaaagttgatttcattgagctttctgaacatgttgtacattatgctggtggtcttcccttagctcttgaagttttgggttcatttttgtgtggtagagatatagttctatggagaagtgcaatcgaaagacttaaacaagattctaacaaagaaattcttgacacactaagaattagctttgatggattggaagaaagggagaagaatatatttctagatatagcatgctttttcaatggggaggagaaagatttggtaatgaaagtattggatggttgtgggttttttccagatattggagtcgatgttctcattaagaaatctctcataaaagtcagtgatgacaaccaatatttgcagatgcatgccttattgcaagaaatgggaagaaaaattgttgaagaaaaatgtgttgatgaacccggaaaacgttgtagattatggaaggaaatggatgttcatcatgtcctaacaaaaaacacgggaatcgagcaagatgttcaatttgagcaccgttaccttctcgaagatgaaaatttgagattgctcaaagtgtttcgcgtatcaaattgtgatgatcatctcaaatatctttctaatgaactacggcttttagattggacagaataccctttaaaacttttgccttcaaacttccacccagataatcttgttgcacttcttttaccatatagtcatattgaacaactatggaaggggaatagaccattgtttaagttgaaaatgatcaacctcaaggggtcccaaaacctgatcaagacacctgacttcacaacagcaccaaaacttgaagctttgattatggaaggttgtaccagattagtagatgtccatccatcaatcggagtgcttaagagccttaaacttttgaatttaagagactgcaaaagtcttaggagtcttccaaccgaaattggaatggaatctcttgaaacattaattctttcaggttgctcaaatcttgcaaggtttccagagattgatgggaaaatagaacatctaaaaactcttcatctttctggatgtttcaaagttgaatatttaccagagaatttacagcaagcagaatctttggaagagcttgacttgagtgaaacaagcataacagagccaccacccttcatttttctattgaaaaatattaagattctatctttcaatgggcgcaagggaccatcatataagtcacgacaaaatttgccttctcttttcaaggtaatccaaggaagagggacgaatcccttagctccgatgttgcctttgttgtcaggtttgagttcattaagagagctaaaactaagggactgcaatctttgtgaaggagatattccacgtgatacttctggtctatcctccttgacagatcttgatcttagtggtaacaatttcatcagcgtacctgcatctcttactcgactctcaaagcttgagtttctttacttgataaattgcaagaagcttaaatatttgcctgagcttctaacaagtataggaaaggtgtggatcgatggttgtgcttcacttgaagtagttgcaagtccatcaaaaggatgcaatttagtgggttgggctaccgttagagccattaaccgcttcaaattggctgatgcattagcactgctgaaaaaacatcttaaggcatttccaaatccaagaaaagcgtttgatattattattcccggaagtgaaatcccagaatggtttagccaacaaaaaagtggctcttcaattaagatacccctacctatcaaccttcggaaagatagtcaatggattggagttgcttcttgctgcagttttgtcaataatgatgcttcatgcgatatcgaggttatcgattgtgaagcatttatctattgtagaaattctgaagaagccagctggaatggatctatttttcgaggtagaaatcgtcgacaaattgattggagtggctggttggtgggcaaacgatttaacgagcccataatgaaagatcacctttttcttcgttattggccgcgtaataaactatatccaatttccatggaagataaatatggtgactgtgaaaccaataatttatggacaacagattgtttagatcagaaatgcgatgagctcgagttgtctttcattaaaagcagtgttaaggtgaagaagtgtggtgttagaatagtgtatgagaaagatttggaagaaataaaaagagttgcagtgccataccactcaatcttctccaaattttga

SEQ ID NO: 9173 - DNA, 381 bp, Zea mays
  Peptide Sequence Number=SeqID_50952
atgccccgcggcacgccccacggcagcgccataaccgcagggggcccgtcctccttctcgctcagctccgacgcgacggcccttggctctcgggttggttcctggaacctagacctgagggagactgcagagggtagtcggcatatatggccgcgagatgagcccgcaagtgagggcggcgcctgtgcttgttacacaagatccacgagcggatgggagggcgaagagattggatcgccccaatttcgcgcaacagggaaacaaatttctgttggggcgacgagtctgcagtccggccccacctggcggcggaagcaacaacacaggcgcgagaggtcccaacaccaaccggtttcaaagatcaaccaatttatgatatga

SEQ ID NO: 9174 - DNA, 324 bp, Zea mays
  Peptide Sequence Number=SeqID_50953
atggccaatgactcgtccacgcccatgctcgaatcctacctatccgagactagatcaacggttgagatgagcccgacccaaatcctggccgtccacgacatccaacggcagatgaatgtcttcaacctcccaacgctagaccgagctggtgttcacccaagccatggcgcagcaggcctccagcgatgcggatccgcaagcccgatgctgcttcccaggcttgaatgtaggtccccccttactaccctaggcagtcggatgaggccggatcacggtgttgtgtggacaccgcgatggagttttgaatccggtgatcaaagctag

SEQ ID NO: 9175 - DNA, 414 bp, Zea mays
  Peptide Sequence Number=SeqID_50954
atgaccgaagaggtatcggagatccatatccatccgatcagaaatcaacgccgtggatcgctttatatttttaaaatgaacagggggcttacagggtataatgacggtagcggaccaggcggatccacgacggggatgagcgcatcggtgaggaattaccaccgctcgttcggtaatacggccccggaacgtcaacgagaaccaaggagacgacttggagaggcctcgggtcacgacaggttgacttccgcgaaggcgtacgcgatggtcgattatggcggcaaacttcctcttccctccctctcactgctggctactgtgatggacacaaggcgacgatggaggaactaccagggctatataggcatgcaggtaccggggaaacggtccgcggattgcggcacaagcagatga

SEQ ID NO: 9176 - DNA, 1758 bp, Zea mays
  Peptide Sequence Number=SeqID_50955
atggctcctcgaccttggttgtcaccactggctttgcctcttggtcccagcgtcgccttgttggtgcttgcttgttgctgcgttgctgaagcttcgatcgtggagcacaccttcaatgtcggaaacctttccgtgagccagctttgccagccgccgcgggtcatcacggcggtgaacgggcagctcccaggcccggccatccatgcccgcgagggagacactgtggtcgtccacctcgtcaaccagtcgccctacaacatcacaatccactggcacggcatattccagcgcggcacgccgtgggcggacggcccggcgatggtgacgcagtgtccggtcaagccgggcggcaactacacgtaccgcttcaacgcgacggcgcaggaggggacgctgtggtggcacgcccacatctccttcctccgcgccaccgtgtacggcgcgctggtcctccgcccccgcgccggcgccgacgcctacccgttccccaagccgcacgccgaggagaccgtcgtcctcggcgagtggtggaacgacaacgtctacgacctccagcagatggcgttcctcaccgggctcccggcgcgcagcgccgacgcgtacaccatcaacggcaagcctggagacctgtacaactgctccgacgggaaccagacgtaccggttccaggtgcggagcaacgagacgtacctgctgcggatcatcaacgccgcgctcaacacgcccctgttcttcaaggtggcgaaccacagcttcaccgtggtgggcgccgacgcggcctacacgacgccgtacgagacggacgtggtggtggtggcgccggggcagaccgtggacgcgctcatggtggccgcgcgcgccggcggccgctactacatggcggcgtcgccctacgacagcgccatcccgcaggggccaccgttcagcgacaccacggcgacggccgtggtcgagtacctcggctcggacacggaccccaccacgccgccgacgctgccgccgcggccggaggtcaacgacacggccacggcgttccggttcctgtccaacctgacggcgctggtgcggccggggcagccgacggtgccgctgtccgtggacacgcgcatgttcgtcaccgtcgggctcggcgtctccgactgccagccgacgcagctgctctgcaaccgcagcgccaccgtcttctcctccagcatgaacaacgcctccttcgtgctccccgcccccggcaagccgtccatgctgcaggcccactacggcggcgacggcgagacggcgggggtgtacacccgcgacttccccgaccgcccgccgctcgtcttcgactacaccgccgacgccagcgacaccgccgcgctgcagtacacggccaagtccaccagggtgaggacgctccggttcaaccagacggtggagatggtgctgcagaacacgcggctgatcgccagggagagccaccccatgcacctccacggcttcaacttctacgtgctcgcgcaggggtttggcaactacgacgaggccacggccacgccccgcttcaacctcgtcaacccgcaggagcgcaacaccgtcgccgtccccaccggcggctgggctgtcatccgcttcctggcaaacaaccctgggatgtggttcatgcactgccacttcgacaaccatcttgatctgggcctggccatggtgtttgaagtaccggacgggcccacgccggaaacgtcggtgccgccgcctccagcagacctaccacagtgctag

SEQ ID NO: 9177 - DNA, 441 bp, Zea mays
  Peptide Sequence Number=SeqID_50956
atgcccgaggctgggacgcttctccttgtcagagatcgcctgttatggtattgctgcctgcggatggatggcgaggcctcagcgcgactcaacagcacgagctcttggtcatggcaccgcgcagcctgcagcaacagcaacgccgagtcgcatcgcaccccactcggtcagcggactcggctgtcgcggactcgcggcgcagacgtcgatcgggcacaaactcgcgcccggggcaaccagtcgatgcagccggggaagttgagatgcgcgcctttgtccacggccgcgcgatcatcatcccacaccgccgctcatgggagtcgccgccgctcgctgtcaaagccaaccaaatacgctttgcccaatcagtacttctctgcttgtttgttgcttgaggggcaaaagtgtttcctagaccacaaatacatggacacgaattag

SEQ ID NO: 9178 - DNA, 903 bp, Zea mays
  Peptide Sequence Number=SeqID_50957
atgtcggtgaatgtgaaggaagatgattctttaaattttcacatattgattgggggcctcatccttactgttttggttgggaagctgggtatagcaatgccggatttaagtttgtcacttgtctcacgcatgcaggatctaagtttcctatttctgacaagtagtggagaccctggaataatacctaggaattcaaaagcatctgaaccctcctctgaagaatcaaagaagtcaccgcagggtccaccatgtgactgggccatcaacaaaacaaaccttaaaattccaaaggtgaaggatgtagtattgaaaaatggtcaaacggttaaagtcaagttttgcgagacatgcttgctatatcgttctccgcgtgcttcccattgctccatttgtaacaattgtgtgcaaaaattcgaccaccattgtccgtgggtgggtcaatgcatcggactgggcttatggactgccatgtctcgtgatgtactatctgttattctcattgtgtattgcttcctagctgtctggtttgttggtggcctaacagttttccatttctatctcatttgcactaaccagacaacctatgaaagctttcgataccgttatgataagaagaaaaatcctttcaacaaaggcgtactaaggaacttcaaagaagtgttccttacaaggattccatcttcagagctgaatttgcgggcatgggtctcagaagacggaaacctttcaattaaagatgacaaaagcaataaatttgacatggaaatgggacttaagcacaaccaggatagtgctaaatttccatcacattggcagaggttcgactatgatggttttgataatagtttaaaggggaaggacggagagtttgatgataaacctaaatcctcttcgaagatgtaa

SEQ ID NO: 9179 - DNA, 306 bp, Zea mays
  Peptide Sequence Number=SeqID_50958
atggccagggcagaaggagtggaaatttttagggattcaaaattagtgatatcccagctcacagaggattataagtatgagagcaaatcgttattccagatatggatggaatgccggcttcgggggatgaacatgattggaaaaatcaaccccttgtctagaaaaggccataaatggactttagctatcatagactatttcacaaagtgggtggaggccgtccccatgatcatgaagtcagtggcaatgaaggacgtgatcagctttgttagggagcacgcaattcacagatttgggattccttag

SEQ ID NO: 9180 - DNA, 354 bp, Zea mays
  Peptide Sequence Number=SeqID_50959
atggcgccgagcatcgggtccaaacgtgcaaataaaatttctgggggtccaaacaacgatgcgaggcatgagatggcggcctccatcctttcctccacgaggagatgcacagggcgagcccaccggtcgcccgtgagaagtggtggtggcaagacgactgccggtgtggaggaggtggcgcgccagggagatatggccgccggtgtggaggatgaggtgcgctgggggagcctgtcgacttggaggaggatgcacaatggggaaagtcgccccgccgatagcgaggttctaggcggtgatgtggaagaggtggcgagatcctcggcgatgggggcgaaaactgcaaggtcctag

SEQ ID NO: 9181 - DNA, 2085 bp, Zea mays
  Peptide Sequence Number=SeqID_50960
atggcatccggtgcttcacgaaatgtcaggttccagaacgagatcgaggtccagagcttcagaacaagccctctgcagagcctcagcagaaagcacggcaaggctcacgatcccaggaaatgccggctgggtttccgcggcggctgcctggagaaggcgtgccggaaccggaagccgatgctgaaggacagggtgctctcgcgcgccttctcggaggagctggagtccctgatgcacgccgccggcggcagccacctcttcttcgacccgcgcgggcagctgatccacctgtggaacaagatcttcctgtccgcctgcctgctgtcgctgttcgtggacccgctgttcctgtacctgacgggcacgcagcggaacacgtgcgtcgagttcaaggactcgctggcgctcacgctgtccatggtccgctcgctgctggacctcttctacgccgcgcacatcctgttccgcttccgcaccgccttcatcgcgccgtcgtcgcgcgtgttcgggcggggcgagctcgtcatccagccctacgagatcgccaggaggtaccttggccggacgttctggttcgatctcgtcacggcgctgcccttgccgcagttcgtgatctggatcgttataccaaggctgaatgagtactcccggacggcgaacacgaagaacatcctccggttcagcatcatcttccagtacctcccgcggttgttccagatattcccgctctcggggcggatcgtcatggcgacgggggtcatgacggagacggcgtgggccggcgccgcgtacaacctgatcctctacatgctcgcaagccacgtgcttacttcgaccgtgctgggagcgctgtggtatctcttctccgtgcagaggcaggaggcatgctggagggaggcgtgtctgctcgtgagcccgacgtcccagaccatgttcttcgactgcaaggcgttgagcagcaacaggacgatctggtatgagctgagcaacatcacaacaagccggtgcacgcctggcaacggcttctacccgttcggtatctacgaggaggcgctgtacgccaagctcacgtcgtcgtctttcacccagaagtacttctactgcttctggtggggactcaagaacctcagctccttaggacagaatctgtcgacgagcttgttcatcggtgaaataaccttcgcgatcgtcgtcggcgttcttgggttagtgctgtttggcctgctcatcggcaacatgcaatcttacctccaagcaacgatggtgcggctggaggagtggcggacgaagcggacggacatggagcggtggatgcaccaccggcagatcccccagccgctgaagcagtgcgtccggaggtaccaccagtaccagtgggtggccacgcgcggcgtcgacgaggaggccttgctgcaggacctccccatggacatccgccgcgacatcaagcgccacctctgcctcgacctcgtccggagggtgcccctgttcgacgagatggacgagcggatgctggacgccatctgcgagcggctgaggccggcgctgtacacgcgcggcacgcggctgatgcgggagctggaccccgtcgactccatgctcttcatcatccggggctacctcgactcgtacacgacgcagggcggccgctccggcttcttcaactcgtgccgcatcggcgccggcgagttctgcggggaggagctcctgacgtgggcgctcgacccgcgccccgcggcgaagctgccgctgtccacccggaccgtgcgcgccgtgtccgaggtcgaggcgttcgcgctcgtggccgacgacctccgcttcgtggcgtcgcagttccgccgcctgcacagcgcgcgcatccgccacaggttccgcttctactcacaccagtggcgcacgtgggccgcgtgcttcatccaggccgcctggcggcgatacaagcggcgccgcgcgtccatggagctcagggtgcgcgaggtgcgggccggagggagcttgctgcggtcccgccgccacagcatcgagggcaaggcgtcgattaggaaacccatggaaccggacttcacggtggaagaagaggactga

SEQ ID NO: 9182 - DNA, 102 bp, Zea mays
  Peptide Sequence Number=SeqID_50961
atggtggctgggcgagagtctaaggaggagctcatgcggggagatgttaaatcattgaacattaagactgaccccatatctgctttcagtgttgcgggctga

SEQ ID NO: 9183 - DNA, 1005 bp, Zea mays
  Peptide Sequence Number=SeqID_50962
atgactgccggtttccagctcggcgtgatcgggtctctcacgctctccgtcgcgtcgtcggttgccattgtcatctgcaacaaagccctcatcagcaccctaggctttccattcgctacgactctgacaagctggcacctgatggtgaccttctgcaccctccacgtggcgcagcgcctgcgctttttcgagcccaaggcgatcgacgggcagacggtagttctgtttggcttgctcaacgggacctcgattggccttctgaaccttagtttagggttcaactccatcggattctaccaggccagtcctcttctctttcttcttctttttctcttgattgaatatgaaggctcaaattcagtatgttctgcagatgacgaagttggccataatacccttcacggtgctgttggagactatattcctgaagaaaagattcaggaaactaggccggtcccttccatttaccgctatgataaatatgtcttgttgcaatatgcaaggaagctgaaggtctcgtcaacgcagctcctgtaccagtcagcgccttaccaagcagccattctgttcgccactggccccttcgtggaccatctcctcaccggccgcagcgtcttcgcccatagatacactttcccggttgtgggcttcatcgtcctgtcgtgcttgatcgcggtgtcggtgaacttcagcacgttcctggtgatcgggacgacgtcgccggtgacgtaccaggtgctgggccacctcaagacgtgcctggtgctgtcgttcgggtacacgctgctgcacgatcctttcaccgtgcggaacatcctgggcatcctcgtcgccatcttcgggatggcgctctactccatcttctcggtgcgtgagggcaagaagaagtccgcaggcgacgccctcccggtgtcacagatgcctgacaaggagacggagccgctgttggcgaccaaggacaacagcgacaccaaaaaggcgaacggggttgctcacgactgctaa

SEQ ID NO: 9184 - DNA, 1443 bp, Zea mays
  Peptide Sequence Number=SeqID_50963
atggcgacgcccgcgctggtgctcctaccggagtgggggtccggccacctcatgtccatgctcgagtcctgtaagcgcgtcctcctcagcagcagcggcggcaaggccttctccatcaccctgctcgtgatgcgcccgccgacggccgaggccacctccgaggtggaggcgcacgtgcggcgcgaggccgcgtgcgggctggacatccgcttccaccgcctccccgccgtggaggcccccaccgacgccgtcggggtcgaggagttcatcgcgcgctacatcggcctccacgcgccgcacgtccgtgacgccgtggccgccatggcgtgccccgtggccgcgctcgtgctcgacctcttcgccgcgccgctggtggacgtggcgcggggcctcggggtgccgtcctacgtcttcatgtcgtccacgggggccatgctcgcgctcatgctgcacctgcccgtgctccacgagtccgtccccgccgtggacttcgacgagatggagggggacgtgccgctgccggggctgccgccggtgccgccggactccatgccgtgccccgtggcggacaagaggagccccaactacgcgtgcttcgtgcgcctcggcgaccgcttcatggacgccacgggggtcatcgccaacacagcggacgagctcgagccggggcccctggcggccgtcgcccggggccggtgcgtgcccggccggcccgcgccgccggtgtacccgatcggccccgtgctgtcgctcggcggccgctcgccgtctcacgagtgcgtcgcgtggctggacgcgcagccgccggggtccgttgcgttcctctgtttcgggagcatggggtggttcgacccgccgcaggttgcggagatcactgccgcgctcgagcggtgcggccaccgcttcctgtgggtcctgcggggaccaccctcggacgcgtccgggtcggagcacccgacggacgcgaacctcgacgagctgctcccggaggggttcttggagaggacggggggcaagggcctggtgtggccgacgtgggcgccgcagaaggagatcctggcgcaccccgccgtgggcggcttcgtgacgcacggcggctggaactcggtgctggagagcctgtggcacggcgtgcccatggcgccgtggccgctgtacgcggagcagcacctgaacgcgtttcagctggtggccgacatgggcgtggccgtgccgctcaaggtggacaggaaacggggcaacttcgtggtggccgcggagctcgagcgcgctgtgcggtccctgatggacgccgacggcgagcaggggaggagggcgagggagaaggccgcgcgtatgaaggccgtgtgccggaaggccgtggaggagggcgggtcgtcgcacgcggcgctgcagagactcgcagaggcgctccacgacggcgccgtgatcccgaagaagtga

SEQ ID NO: 9185 - DNA, 480 bp, Zea mays
  Peptide Sequence Number=SeqID_50964
atgaagctacaaaaagtcgttcctaagggagcgcagtcccaagttcgggcgaggcggggactcctcctgaggctgaggtcgggcgaggacgcgattcctcccaaggtcgaggttgaggccgagccctggggtcgggcgaggcggagaccaccttccgaggtcgaggttgaggccgagccctggggtcgggcgaggcggagaccaccttccgaggccgaggcgggggccaagccctggggtcaggcgaggcggagaccaccttccgaggtcgaggcgggggccgagtcctggggtcgggcgaggcggagcttcctgttgcgcctgaggctgaactcagctgctgtcagcctcaacctggcgggtggcacagcagtcggagaggggcgagcggcgctgttttcctgtcaggtcagtcagcgggagggcgaagtgattgcggtcacttcgaccttgccgactgaggcacacgtgtcaggataa

SEQ ID NO: 9186 - DNA, 612 bp, Zea mays
  Peptide Sequence Number=SeqID_50965
atgaaacacgactattttgacacgacacgagcacgacatgatataatcgtgcctgggtcggcacgaggcccatcatgggtcgtgcttgggcttagaggcaagcccgttgggcagcacgcacacggcacgattagcgacgacccaattagcccgctgattggcccgttcggcccaaaaagcccagcacgacctggcccggtccatttatggcccgactaccaggcagcccagccggccagaccggcccagtcggcagcgacggcaggactatccaccaacgatgatggccgtgtgccaggtttgtctagtgatgattgcaatgcagaaggggaagccgcaatgttgggttcaactccctcatgtcctgctagtttggatggcgaaggagcaagtcttgagagcactgcgggtggtgacaacaagagaatgaggaccagagcatcaacatctgaggtttggaaagatctaaagcctctattcaaaatcttaaatggtaagcaagtcaggtatgctgctgtatgtaagatttgcaatgtagaactgtctgctaaatctactgggggtactggtaatttattgaggcatgttgctgcctgtatggttgatgcctga

SEQ ID NO: 9187 - DNA, 786 bp, Zea mays
  Peptide Sequence Number=SeqID_50966
atggcgggtttgggaaaggcgatgtacgcggtgggattctggatccgggagaccggtcaggccctcgatcgcctcggctgccgcctgcagggcaagtacttcttccacgagcagatttcaaggcatcgcaccatcatgaacatctttgacaaaaccccacatgttcatagggatgcatttgttgctccaagtgcatcccttattggtgatgttcaagtcgggcaaggagcttccatttggcttggtgcagtggtgagaactgtctcactgactcaccaggccgtaggggacgcaaacaacatacaaattggatctgggaccaatatacaagacaattctcttgtgcatgtggctaaatctaatctaagtgggaaagtctttccaacaatcattggcaataatgtcacaataggtcacagtgctgtgttacaaggatgcacggttgaggatgaagcttttgttggcatgggggcaaccctattagatggtgtcgttgttggaaagcatgggatggtagctgcaggatcccttgtatggggagggaaccctgccaaatttctgaggaagctcacagatgacgagatcgcatttatcacggaatcagcttccaactattccaatctgtccaaggtgcatgctgccgagaatgccaagcctcttgaaaagattgagtttgagaaggtgttgcgcaagaagtttgctcaccaggatgaggagtatgattcctccatcggcatcactcgagggtccccaccggagctgacatccccaaatccagcccaataa

SEQ ID NO: 9188 - DNA, 564 bp, Zea mays
  Peptide Sequence Number=SeqID_50967
atggcgagtgactcttcgtggtccagagtgaagcaactcaaggacggcacctttcatctcccaaacgaagtacagcaaaatttgttaaagcggtttgggatgaaggacgttagcccgcaaagactcgatggggaccgacggacacacagacctcaacgaaggaggtcccctggtgtccatggaactttaagaaaccaaacttccgttgccctatcccacccgctgaggcccgagtacgttgccgcaggtcagtgttgcgcgcaactactttggatgaggcaaacccttcgggactttggctacattcgaagcaaagtcccactcctatgtgacaatgagagtgctatccgcatggcggaaaatcctgttgaacacagccgcacaaagcacatagacatccggcatcactttctgagagatcaccagcaaaagggagatatcgaagtgtttcatgttagcaccgagaaccagctagccgatatctttaccaagcctctagatgagaagaccttttgcaggctgcgtagtgagctaaatgtcttagattcgcggaacttggattga

SEQ ID NO: 9189 - DNA, 237 bp, Zea mays
  Peptide Sequence Number=SeqID_50968
atgaggctttcacaaaatacccttagtacaaagctacccgctaaggtttccatgtcagtatttatggccctctgggtgaggcgcgcccagttaaaggggcgtgacggtcagttctgccaggggcgcggggtcggcgcgggcgagcgcaaggcggcggcgcagccagaggtggaagaaggcccctatgggtggggcccatgcgcaagagagagagagagagggggtgaggggaattag

SEQ ID NO: 9190 - DNA, 195 bp, Zea mays
  Peptide Sequence Number=SeqID_50969
atggcgcggccaggccagttcctcggcgtggccgtgtgtgtgtctccggcgcggcctcgcgctcgcgtccggctcggcctgcgcagcctcgactcggcctttgcgcgaccccggcgcagcagcagtatcgccatcctcgtgcttccccgcgagctcgtccaaccgtccgccgtcgtcgcggaacttttcaattaa

SEQ ID NO: 9191 - DNA, 297 bp, Zea mays
  Peptide Sequence Number=SeqID_50970
atggccatgatgggttcaacatcgaaaaagatgtacctctgccaggtgaagaagcagcaaacttttgttgcttctgttccaaggtggtaccaaaagaagagaatcaagaataaagctgcgggaggaaagggtcaatttcaagaaggggaggaagggtggacaatgtcaagaactacaacaactacttttgcaagtgccaacaactatgagtcaaggatgactcaaaaccaagaacggggaaatgatgaggacatgacacatactaatacaactattgattataagttgaatttttag

SEQ ID NO: 9192 - DNA, 618 bp, Zea mays
  Peptide Sequence Number=SeqID_50971
atggccgcgaccagcagctttgcatggggcagaaaaggacatggggcagcggtggttggccagggagcctcggcacgacaacgtagtgctgttgccggtgtccaccgacgactggtcaacggagaagggaggacggatgagaaagaaaaagaagttcggtggggaaattcaccacggatgaggcgcggttggcggcgaagctcggagcggcggtggtggaccacggtcaggaacagcagaggggccttgcatgaaggatccgaggcacaatgggctcggtggcgggagagttccgacaagcttgggtgcgggcgagtgcagctcgggtgggggcgctgggacaaaggaaatgagatggggagggaagtgggcgtgcacagtgacttcaaagggggtcgaggcagcagtttcgtgcaggggtgcgacgtgggcgtgaccaccttagcgtgcatgcacgtggcttgtgtggtcgagcggttgaaggaggggaggggactgtcaggggatcagtgggttggcgtcagcagggcggtcccaccggttagagaaggggggagcacgcgcacggctggagtgggccgaaaggctgaggggagggggatttctgggcttttttag

SEQ ID NO: 9193 - DNA, 471 bp, Zea mays
  Peptide Sequence Number=SeqID_50972
atggccttgcggaataatgggcctggggccttccgtgaggccttcttgccttctagtggacccgagggatatccgtcccccacagttgtgattgtaacaagtgactggcgtgtgctcaagcgggtgcacgaggtcttgccggagtggctttctgcactgaggtatcacttcaagacatcctcctcctcctcgctctctccgcctcgtgacctcttgattcttctcgaaatcgtcgtctccactgccctccccttcgacctccctaccagtgtcgtgtctgcggtcctccgtcctccccctttgcctctgcaccgtatccacgaccctccccctctgcctccgcgtcgtctctgtagctcggaccgcctcgtcaccgttgttgcgcccgtttctgcccgtttgatgcctcagtcgtcgaaattgtttgagaggtgctctaggaagtcccccgagaagatgcgactattgtag

SEQ ID NO: 9194 - DNA, 351 bp, Zea mays
  Peptide Sequence Number=SeqID_50973
atgcctccccctggcgcgcacacacaacacccctgctcgccgcgaggatgtccgcaccagcgccatttttgtgcctggatagatggtgaccgcgccagggatgagaccacctccatccatgtgcgcctcgccaacgccggtacccccccgaatccgagtggtggaactagaggcgtgcgcgccaagcacgacgaaacagctcaagacacacgtgaagatgacaattctcctgctgaagatgaacaagaacaagagacaacaagacaaatggatgatgatgaaggcaaacaagaatcaggtggaaggggagctgtaggtgatgaatttcagttggatgaagatcttcgttag

SEQ ID NO: 9195 - DNA, 309 bp, Zea mays
  Peptide Sequence Number=SeqID_50974
atgtcaaggcggccgagggggtggtgtgacgggagacgatgcacgcggggcaaggggcatgtgtcgcgagcgggggagggggaggtaaccacaagcgggcggggcacgacagtcgcacgtcatctgttggggcaaaggctaggggtgggtattgcgcggctgagggtgaagacgagggtggggggcgtcggggcggaggcattgcctcgccctgtgggcgagctggcggacgcgtgggcaggggcaagcggtgtggacgccttcgttgtactcttaaaactcgacctgcgggggtcggaaattaagtga

SEQ ID NO: 9196 - DNA, 876 bp, Zea mays
  Peptide Sequence Number=SeqID_50975
atggccgctgggcgcctgcctgggcgtgcgcgccagcgcggtgcgcatcgtgggcgtgggcgcgtggcccgacaggcagggccgctggccgctggccgctggccgctgggcgtgcgcgagcgcgcctggggagatggccgctcgccgctgggcgcctggggagatggccgctgcccgctgggcgcctgggcggccgcagcggtgcgcatcgtggcgtgggctagtgactgcccccgctcccggctccacccgcccgcccgaccgaccttcggaaacctcgccgcgcttccaaccgcctcctcaaacaacgccgggaacgccgcaaaccccgccgcacgcagctcctctgtcgcctccaccgcacacagcatgcgcgctccttccccgctctgttctcgtccccgcgtcgctcagatcagctctggctcctcgccacgcgcgccctcggacctcgacccatggcgcgtcgatctgcccgcggccccgagaccctgccccggctcccgactcctctcccttccctacatcgtgcttccacaatatcgcgcgcggggccacgacaacgtcgtcatcgcggtgccacaccatcgccgcgggccccaacatcgccacatcgtcgcctccgctttcccggtgtcgatcgtggtcgccacctctaccaacaaatgcctccattgcgtcgagctctcagcatggtcgcgccatgaattcctcaactcgccatgggtccgcgtgcgggagctcctcaaccaactctgccatcccaccgcccccattgcgatccgccaacccagctcgatcccacgcgccccccttaaaagcggcggcgcacacccgtgtctccctcacgcccaaccacccccaccctcgccctag

SEQ ID NO: 9197 - DNA, 399 bp, Zea mays
  Peptide Sequence Number=SeqID_50976
atggcatccaccaaggacttctcgtttgtctctgccttcaggctgccctttgtgctcaagttcttccgagacgtcaagcgtgtgcgagaacaaggagctatagatgatcgtgacactttcctccatgcaattggagatctcctatgttttcactcaagaaggtcggtttggttagaaacacatggaggtactgatggaggctatgaaacagataaggtgaagctagattttctagacaaagtcctcgcgtctgtaagtggacactatggatctatctgtggaacatcggtcatcataagatcattgacgttttggagcaatagctcgatgtatggacccttcagcaccaaggacgggacgctgttcttgctcccagtcagcagcatcaagatcatttga

SEQ ID NO: 9198 - DNA, 564 bp, Zea mays
  Peptide Sequence Number=SeqID_50977
atgagttctccaacttcacatttgagcctcccgagcccacagagtagaaatggcgcctatggcttcatcggtggtgatgctagacctgacatggttctcctcgtgcaaggtagaggcgacagctatgctgtctacacaagcaatcaccccaaacagcagtacacaaacacttcaccggactacaacgatggagcactctggatcaagatagtttctgtccctagttactatggagatgcaggagctgcagccatgagcaccagcctcagacctatggcccctaggatcaacttgacacgcgcaatgggaatctcttctatcaaggtcctgtatgatcggaatgggcatgccgtgtggggtaacaagcatggattcagcggcggtgtcatacctgataaggttctacgattcagcaataatcatggggccgaccatggtcaggtctctgacgtttcacacgaacaagcgggcgtatgggtcatactaggactgggcgttcgggtttacccgaaaattcgggtcgggcttttcgggttttttaaatttcgggttttcaacagttga

SEQ ID NO: 9199 - DNA, 423 bp, Zea mays
  Peptide Sequence Number=SeqID_50978
atggggggcgtgccgcagccgccgctggtgccgcgccaggaacagccgccgctggaacagccgccgctggtgccgcgccagggactcaggacagccggacaaggaagacaggactcaggagttagggttggctggattgggaggtttcgatttcgtagtaggctgccaactgggccgtgggctgtggagcttgcgctcggcctggcgcctggcggccttctagtagaatggatatcgggtagaatgggtacttcgggtaccgcgggttgcttatggcatggtgaaagaaccggttccgatgggaccagggccatggggtggggagggaggctaggcatgggacgactgggtttacaagaacgtgaagcagatctatgtcatgagaggagcattcatcgagtcgatacagatcgagtatcatag

SEQ ID NO: 9200 - DNA, 156 bp, Zea mays
  Peptide Sequence Number=SeqID_50979
atggcggagctgcctccgtgggagaacgtacgggagcggctcagcgtcagggtcggcttcggtgacaagggtgtaggctggctggccgacaagcgccgagtaaagataaggccttcacaggcagctgactgggggttgccgccaacccacacctag

SEQ ID NO: 9201 - DNA, 213 bp, Zea mays
  Peptide Sequence Number=SeqID_50980
ggctttcattcaagatttttgaagatctatctagaacttccaccaatagtccaaccattacaaatggaagaggatctagagcaactgaaagttcttgaaaacagctatcggatgaagttcaaaaatgaactagcggatgataaatatttaagaacggaggtgatcaaagtggagcaaaatgcccgtggtgtggatgcacctgaggtgcattga

SEQ ID NO: 9202 - DNA, 747 bp, Zea mays
  Peptide Sequence Number=SeqID_50981
atgtcggtggaattgaggaacgggcaaacgccggtggcaaaagggggccgtgcagtcgacgcggtgaccgggacagcacagcagagtggggtctgtaaatgcgatggaaagtgtaccattttatatgttcaaccattacctgtatttcataggtcggtctcattatcggaaaaggtggtgagacaattaaaaggcatgcagaccaaatctggtgctcgtattcagttaataccccaacatcctccagagggtgttacattgactgaaagaattgtacgtgttactgggaataagaagcagattgaagctgcaaaggatttgatcaagcaagctatgaatcaggctggttatgcctcctctgcgccagcggccagccagagcctgcctatggccaggcaggatacacccagccacctacaaatcctccaagttatgatcagtctgcagcaccagcggcgactcagagcggttatgctgcgccccctgcaaatccacaatagcctgctgcagcaaaaggggtctcgccacagcctgctgctgctgctgctggatatggtgctagcgggcagtggacggcatgagctttgtcttcccaacttcgatgacagcaaggtcaggttggatatccgcttttggcgcgtgttcgaatgtttgcatcttttggacggtatgtatgagcctcgtcttccgaacttcgatgacagcaagggctttaccccgttatcgaaagagattgtaaccccttga

SEQ ID NO: 9203 - DNA, 231 bp, Zea mays
  Peptide Sequence Number=SeqID_50982
atggagaagcagtcacatcaagttactactcagaagcaatttgctaaacactcagcgcaccaagccgtcccttgcccacacccattggagggggacgcccaggaattttcaatagattttcccaagcagtcgcgtccatacagtatgtgcaatgaatacatcaatacaaaaagaagatatcgacagaagatcaaaggaaagccaaaaatagccgacgagatacaagtctaa

SEQ ID NO: 9204 - DNA, 1527 bp, Zea mays
  Peptide Sequence Number=SeqID_50983
atggcggcgcttccggtccacccattcctcctcctccccctcgtggccgtcatctccttcctgtggctccgccttgcagctttgtcccgtcgaggcagcggcccgcggcttcccccatcgccgtgggcgctcccgttgatcggccacctgcatcacttcgcgggcgcgcttccgcaccgcgccatgcgtgacctcgcggcgcgccacgggccggtgatgctgctccgccttggcgggctccccgtcgtggtcgcctcctccgcggacgccgcccgcgaggtgatgaagacgagggacctcgagtttgcgacgcgccccgtgacgcggatggtccggctggccgtccccgagggcgcggaggggatcatcttcgcgccctacgatgacaggtggaggcagatccgcaagatctgcaccgtcgagctgctcagcgcccggcgcgtccagtccttccgccccgtccgcgaggaggaggtctggcggctcgtccgctccgtggcggcggcggcgccgagcgcgcgggcggtgaacctgagcgagctgctggccgtgtacgccgccgactcctcggtgcgcgccacgatcgggagccggttcaaggaccgggacacgttcctgtccatgctgcagcgcgggctcgagctgttcgctaacatgagcttgccggacttctacccagcgtcgcgcctcgccctgctcgtcagccggatgccgggccggatgaagcggcaccggcaggaagtggtcgcgttcatggacgccatggtccaggagcacgcggagagcagagtacctgacggcgacgacgacaaggaagacttcctcgacgtgctgctgaggattcagagggagggagacctgcagattccgctcaccaccgacaacatcaagtcagtggtcggggacatgttcgccggaggcagcgagacgcctgcgacggcactgcagtggatcatggccgagctcatgaggaacccgagagtgatgaagaaggcgcaagatgaggtccggcaagcggtcgccgccgccggccggcagagagtgacagaggacgacctcagcaacctgcgctacatgcacctggtcatcaaggagggccttcggctccacccacccttgccgctcctgctcccacgggagtgccggagctcgtgccaggtccaggggttcgacgtgccggcgggcacgatggtgttcgtgaacgcgtgggcgatcgctagggaccccagccactgggacaggcctgaggagttcgtgcctgagagatttgaaagcagcagcgtcgacttcaaggggacggacttcgactacctaccgttcggggcaggacgaaggatgtgcccgggcatggcgtttgggctcgtgagcatggagcttgcgctcgctagcctcctctaccattttgactgggagctgccgcctgggatgacggccgcggatgtagacatgaccgagaagatgggggtcacggctcgacggctccaccacctcctgcttgtcccctccgcccgagtgcccgtgacctag

SEQ ID NO: 9205 - DNA, 825 bp, Zea mays
  Peptide Sequence Number=SeqID_50984
atggcggcgacgactgtggcaagccggaagcgagggacggcggccttcctcgatgaccccttctccttccccggcgacctgccgtgcctgcagacgaagcgcggccggtgctcgtcgtcgattgttgccgccgacctcggcctcagcttcccgctggagttcgacccggtcgaggcactccatctcatcttcccgggcgaggatcggcaggttctacaaaaccatttacaagcgtcaggaaatgtcctggatgctgcgatcagagcatacaaagattatttggcagaaagaagcaaagaatctgcttctgccatcaactatgttccatccgacaacgaggaaggagatagcattctatctgaatctgaatctgatgtttacctaaaagaagaaaccattcccaccaattgctctggatgggctgaggtcatcgtcaaggagatgtcctctgcttcggatttgaccgatgccaagaaccgcgccttcaagatactcaaactgtttgagaaatcggctgacaggagcagtagcccagatgaaaagagagaagtgaacaaggagcacgagatagtgaagcagatgctaggatccctgctccaccagaacggcgttctgaagcgcgcgttcctcatacagcacaaccgactcaaggagtaccaagagatggtgcaggagcggtctcagttcaaccagattctcgagaagtaccgggagcaaatcaaggcgttagagcaaggacattccgctaatccctacatgctgctacatctgcatgctacaacatgtgtcgagcttgggagaaagatagggagtgcaaaatcctga

SEQ ID NO: 9206 - DNA, 507 bp, Zea mays
  Peptide Sequence Number=SeqID_50985
atgatccgaccgtgctccgccccctcccctcccccgtcccagcctttggcaaccaccccgcccccacccttcggcggcgtcgcccacgagggcacgaggccgatccaccgccaacagcccgccaccgccaccacccgcctctgcgccgtcttgccgtccccgtcctcgccctcccgcgtgggctcgttcggcttcgacgcgctcaaggagaccttctccgtggacgtgtcggcgaccggcgcgcgcccgcttcgcgtcccgcttgtcgcgcccttcaccatcgcgtcctcgcgcctcgccgcgctctccaacgtcgtcgtgcgcgtcgatctccgcagcggcgccgtcggctggggcgaggcacccgtgctgccctccgtcaccgccggggaccagccgacagcgctcggagccgcgggccggacgtacgccgcgatgccccgccgtgggcgctctggcgcggccgcccccctcctccccggtctcgcacgcgatgccccgccgtga

SEQ ID NO: 9207 - DNA, 783 bp, Zea mays
  Peptide Sequence Number=SeqID_50986
atggtacaaatgaatggacgaaggcaagcggcggccggatccgccgcctccgatccggaccccgccgcgccggtcttcccggtgtgggcgcgcacaccgagcgagtgcctcgcggagctgggcgtctcggcggaccgcgggctcagctccgaggaggcggcggcgcggctgcagcgccactactcggagttcgacgcggcgggcgtcgtccgccagatcgcgcgcgggctgcaggcgctccacggcgcgggcgtcgtgcaccgggacctcaagcccgagaactgcctcttcgccgacaggggcgaggcctccacgctcaggatcatggatttcggcctcagctccgtctgcttagtgtggcttgcgctagcgctatccagcactgctgcctatttctttccctgcgtcgtagtgctgctcctttttcctctcccctctcttcctctatacccgactacccgagcactacctgccaagccatggatcaggacaatgaggtcggctaagacttctcaatgttcctcatccgctacaagagtggccgatgaccgtgtgcgctgcctcagggtggatgtcatctcaggtgtcctctccagggataacatcgccatggacgccttggctgtctcccagcagcatcctttgcgtttccaggaagctgcccctccttttctgcatccactgaggagtgctgaggaagagaggaagtctggtcatggaagagaagagctgagcctatgcgggacaaaggagatggacgacgacggcgtcgatgaaggatga

SEQ ID NO: 9208 - DNA, 408 bp, Zea mays
  Peptide Sequence Number=SeqID_50987
atggcgcacgcggaatcccatgcgagcccgcaccggaaggtctccacgaccgatggtgaggcacccaagctggtcactcgggtccaaagggcggcggcacacgacgaagagcggatccgcggtggtgatccacgacggcaaggaatttctctggctaccgcaggcgccctcccaattagtctctcacccagttgctatgaggccagcccaacacccacacagccctactggcacctgaatcccaccatcgacgagtatccgcggcaacgctcccacggcgacggaaatcttccgccaaggcgactcccggtgcggaatttgggacagcgcaggcgagtatgggtgggagagttaagggaggagagagggtccgcatttagcatcgtgcacgcggagtcggtggggtga

SEQ ID NO: 9209 - DNA, 294 bp, Zea mays
  Peptide Sequence Number=SeqID_50988
atggggaaggaagcttggctgcgacacgcagagaagctccgatccgaggacagagcgctcaggcgctatggagggagcaccgcgagggagctgcgtggagagggagagctcggctgggaggagtggaagaccactcggctgagcgagggagaagatcagtggctgcaaacaaataatctgtcggatgggaagcggcggcagcagataacttcacctaccaatcgaacacttgatcgctctgtcatagatgatttattggagaatcaaatctcaattaaaaactctcggatgtga

SEQ ID NO: 9210 - DNA, 240 bp, Zea mays
  Peptide Sequence Number=SeqID_50989
atgaccccgctagaggcagtcgccgttcatgatggtcccccctggggcctgtcacctgtgccaccggtgttccaagggcagggtagtgcccagacctatgcagtccactacgtcggcacgttgctaggcctcgcatcgccaaggctcaacccgttgaccgcggcacaagcccatggcgttaaggttgcctgtctcttcgtcagccgagtgaccctgtctcttcgtcagccagccgagtga

SEQ ID NO: 9211 - DNA, 435 bp, Zea mays
  Peptide Sequence Number=SeqID_50990
atggtggaggagcaggtcccgggcgcaggaacgctcggaccaggggcgcacgagctaagagagcagctggggcgagcagggcgctggggaggagcggctgggctggaagcaggcgagcgcgatcggcgagatacaggaggggcgaccacaaccggctgcaggaaggaggccgagctaggactccaaggcgccatgggagatggacacaaggaggagcagccgacgcggtggagaagctcgggacgtgccgaactcgactatgcgacgcgcgcagatgagccggagcagggagacgcggccatggctggagaggggcgcagtgcttggagccggactggagcagggaggaagacgcggcgccatgggagcaggggtgctgagggagcaaggacgcacagcgcggagaggaagaagagtgtcgccaggagaagataa

SEQ ID NO: 9212 - DNA, 210 bp, Zea mays
  Peptide Sequence Number=SeqID_50991
atggagccagcgcgctcggttctgcccagtttgcgtcctgctggcgcgcgtagcgttccgttgttcctgcgcgtgctgccgcaaagcaagaaatcccaagcgtcaggtgaagacggagccagcagcatggtgttcatcgagtgcgtgacaaaaagctcgaacaagtcgtcgagcgtcatactcgtccaccccaagccccccaagccatga

SEQ ID NO: 9213 - DNA, 195 bp, Zea mays
  Peptide Sequence Number=SeqID_50992
atggccctgggacaagggtactctagatcaaacatatcaggctacgtctcaacctacaccaagttctgtgtttgggacaaggtagagggtcaggatcatgagcctaacaccttgattgatataacatccctcttacccactggcgagcatggtcggggcaagtccgctggcatttggcacaagatggagaagtga

SEQ ID NO: 9214 - DNA, 387 bp, Zea mays
  Peptide Sequence Number=SeqID_50993
atgacgccggtggctctcagccccttacgacagcaaggagacgtcagcagggtcctcgccgcgctgcaagccttgtcagctccgtcttccccgcaaccgccgctgacccacgtccccgcgcacgccaggaggactggccacgtcgcctgcccacgtgcccagcttctttttgagccccacccgcacccgctctccctcccctgcctcattttgcccatgctcgccctctctcacgctctgccgccgccacccgtgctcgccggtgatccatgcccaccgtgcaggccgtctagcccgccagaagtcacgtcgggccgtcccgagcaccgtcccgaggtgagaaactcgctctcgtgctcggtttcttttaattctgcaccgccttag

SEQ ID NO: 9215 - DNA, 390 bp, Zea mays
  Peptide Sequence Number=SeqID_50994
atgtatggtcaaaatgagaattttgatgggagaatctatgctctttctgctggttactatgatgcatactacaaacgagcacaacaggtgaatgttaatttggccgggcttcttgcatcagttgtgccttgtggatttgttgaaggtggagctgcagggctcctagtgggactccagattatgggatctccattttgtgagggctcctcgttgaattcaggcgtaggtttggtgatttccataatggaccttgtgttggattgctatttgcttttctctacagttgtgaaacttagctctgtatttaaattgtcaacaatagaagtagcttgtgtcgttgcatttgttcaatgcaaccactatgttttacccttctctatctcactttag

SEQ ID NO: 9216 - DNA, 579 bp, Zea mays
  Peptide Sequence Number=SeqID_50995
atgaggttcccaggattgaggcatatgactgtgtgttcaagacatggtaagggcatggtactaatatggcatgttgtgtttagtggaaacctccctatcttgaggtttcttcttgatcatggtgatgatctccatgaagaaggaagcctagaaggtaagagcatggtactaatatggcatgttgtgtttagtggaaacctccctatcttgaggtttcttcttgatcatggtgatgatctccatgaagaaggcagcctagaagaactatttttatttgtttccttcatgttatatggttggcatttgcaagcaatatcactctttgcgccttctatcttcttttacttaacaagtactattgtatggttggcaatttggcatttgcaagcactctggaaatcagcttttgcagtggaccgttgcgcgaaggagccgttgctccgctggtgcaccggacagtccggtggcgtactggacagtccggtgaattatagcggagcggcgctggagaaacccgagactgccgagtttgatcctgtacggtcctggtgcaccggacagtccagtgcgccagactag

SEQ ID NO: 9217 - DNA, 360 bp, Zea mays
  Peptide Sequence Number=SeqID_50996
atggggaagaagcttgagaagggaataattataccatacacctatctccatcaagaaaagaaagttcctagagcaaccaagaaacaagtaaagaacatgggaaaggataaatgtaacaattcaagtgttcatgttgattgtgctaacaatgtctccatttccttcaagaatagaaaaaggagaggaaacaagatatgctataaatgcaagaagaaaggccacatgattgcttcatgtccccacatggagaaccaaagccttgcatcaccaaatatgaccaacatcaagaaagagaatgagaagcaaatgccaagcaatactcgcaccgcatttgccattgtggtgaaaaggccatcttaa

SEQ ID NO: 9218 - DNA, 396 bp, Zea mays
  Peptide Sequence Number=SeqID_50997
atggcgatggggcggccaagcagggaactagagggggaagtcacgggcgctcaccagggggcaaccggtagggcgctggggagccgagctgagggaggagcagctgggcgcgccatgggaggagaagtgaaagctccagcgaatcaagcagaagaaagggcagggagtggagggcgcgaccagaacggaagtagggaagagctccgcgtgccggaggagcgtgcgaccatggatgagcagagcaggggctggggacgcgcgcgcaagggagctcgacgggagggcggctggggcaggggcatccccagcgagctcgccatgggagaactgagcgagctggagagagccgcaacgctgtggagaagaagaagcttggagaggtcacagatattttag

SEQ ID NO: 9219 - DNA, 294 bp, Zea mays
  Peptide Sequence Number=SeqID_50998
atggagaccagatctaacaacagcattgtaccagggcgggctagagatggcctagggggtcatgggcacggtagagcaggatgggacgccaaagtagcgcgacacaatgattcccttactatcgagcatgagccccatatcgaatctccaagcagagcaccaggacaacagcgaggtatccctgacggcacccaggacatgctccacgactggagaaggttgaacgcagggacacacgacggtttgggaaggcctcgtgagctagaaactgggaccgacagcgttggcacatga

SEQ ID NO: 9220 - DNA, 582 bp, Zea mays
  Peptide Sequence Number=SeqID_50999
atggtcgcgcgcgcgggaacgcactgcgcacgccgggggcgcgcgaaccacgccgggacacgcaaggccgcgctggggcacgcgcaggggctgcctgggaagggcgcggggctgccaggggcgtgcagggccgctgagaggcgagggggcgccgccggggggggcacggccgacggggagggttgcggggccgcggggcgcgagccaccgctgggcaggggcgcggggcgcagggccaacgccggggcaagagcgcggggccgcggaagacgcgagcagccgctgggcaggggcgcgggacacggggtgcgggccgcgcgtaggggcagggttcggccgccggggaggggagccgccaggcgcgggacgctgggggagggcgtggccggcgcgcgtgcaggggaaaggaaggggggcgcgcatggagggaagagggaagggagagagagaaagagagagagagggagagctcacctcggggatccaaatccggcgataaccgtcactaaatcacctagggcacaacggggaagagagagagaggtgggggagagggagttgctgcgtgggaaaattgaatga

SEQ ID NO: 9221 - DNA, 207 bp, Zea mays
  Peptide Sequence Number=SeqID_51000
atggagggagtgtctgcggtggcgttccacggtggcgacacggtgttccgggattctggctgttccatcggccagcacggtaagcaacatgaggctaaagggatgccaaaacaaaagttcgacgggtacgaactgacccaaggaaagctggccatggttggattcttcacggtggcaacaatgaccgcgcccagggaaattcgttga

SEQ ID NO: 9222 - DNA, 1347 bp, Zea mays
  Peptide Sequence Number=SeqID_51001
atgagcccgaggcaccctcggttcggcccgaggtaccctcggccccccaagggtgaggcactgcgcatcgacgaggagcggagcggggtcacgcctaatcgaaactggcagaccccgtacctgcaatatctccaccgaggagagctacccctcgaccgagccgaagctcagcggttggcgcggcgcgccaagtcgtttgtcttgctgggagacaagaaggaactctaccaccgcagcccctcaggcatcctccagcgatgcatttccatcgccgaaggccaggagctcctacaagagttactcttgggggcttgcggccatcacacagcacctcgagcccttgttggaaacgccttccgacaaggtttctactggccgacggcggtggccgacgccacaagaattgtccgcatctgcgaagggtgtcagttctacgcaaggcagacccacctgcccgctcaggccctgcagacgatacccatcacttggccttttgctgtgtggggtctggacctcgtcggccccttgcagaaggcacccgggggctacacgcacctgttggtcaccatcgacaaattctccaagtggatcgaggtccgacccctaaacagcatcaggtccgaacaggcggtggcgttcttcaccaacatcatccatcgctttggggtcccaaactccatcatcaccgacaacggcacccagttcaccggcagaaagttcctggacttctgcgaggatcaccacatccgggtggactgggccgccgtggctcaccccatgacaaatgggcaagtagagcgtgccaacggcatgatcctgcaaggactcaagccgcggatctacaacgacctcaacaagttcggcaagcgatggatgaaggaactcccctcggtggtctggagtctgaggacaacgccgagccgagccacgggcttcacgccgttctttctagtctatggggccgaggccatcttgcccacagacttagaatacggttccccgaggacgagggcctacgccgaccaaagcaatcaagataatcgagaagactcactggaccagctggaagaggctcgggacatggccttactacactcggcgcggtaccagcagtccctgcgacgctaccacgcccgaggggttcggtcccgagacctcgaggtgggcgacctggtgcttcggctgcgacaagacgcccgagggcggcacaagctcacgcctccctgggaagggccgttcgtcgccgccaaggttctgaagctcgaaacgtacaagctgtccaacagtcagggcgaggtctacaacaacgcttggaacatccaacagctacgtcgcttctacccttaa

SEQ ID NO: 9223 - DNA, 729 bp, Zea mays
  Peptide Sequence Number=SeqID_51002
atggctccgccgcggactggcctgaaggccctgaatctcaaacactacatcctggcagctctgatggcgatcctcgccgtggcggtcgtcgtcaccgtcttctccgtcctgctgagccctgcacgcattttcttctccgtaaccaatcctaggagccacctgttggtgggcaatggaggtgcgaatctcaccttcaccctcgccgccaacaacaccagccagcgcgcggcagtgtggtacaacaccatcctcgtcgacgtgctcaacagcacggtggtgaccccggcgtcgatctggaccaaggccgacctgaagaagaacgcgacgtcgctcatggctgggtggcagacccgtgggagcgtggcgactgtcgacgctacagtgtcggtgtctcggggatcgatggccatggccttcatcaacggcgccgacgtcaatagctctgctttcaccgtgacggtcaccgccgtggcccggttcaaggtcggcatcgccaagacgcagttgtacgacatcaatgtgatgtgcactcccgttatcttcttgctccaaaaccgctcaggcataagtgtggccgcctcagcttacctctttagtttcttgtgcaaatggagtgatgtgtcagctcacatcattatgttggacactaaatttggcaactggacagctgaacggtccagccttgtggcctcaacgattcgcgtaccaaacggtctgcgattaaattaa

SEQ ID NO: 9224 - DNA, 192 bp, Zea mays
  Peptide Sequence Number=SeqID_51003
atgaagagtgggcctagcagggcaactgtaacccttctgtggcccgctagcttagctctccttcgaggccttcgagttcctaggcgtcttcgcccgagcatgcgatacaccaccagcgaaggcttcaacctcacttcagtcgccacggtttggctctcgcttgaagggtatggactccccaactctatataa

SEQ ID NO: 9225 - DNA, 1008 bp, Zea mays
  Peptide Sequence Number=SeqID_51004
atgacatgccaagctagggtctttgatagcccccatgaagtgcacctagtcactttagctagcatggttttggccctcgcggtagggggcactccttccatgcctattgcaacattggcaaagacatcttccccagttgtggtggttgcatccactatgaaagctacacattgcctttgctccgaacgaatgtgtctcgctaacacagagttgaaagagctgcgaagggaatatgatgaggcggaggcctcccttcacagcagtgtgcgggcggtgcacattcagctgcatgacacacatcgcctgccatcatttcaatcatttcgggttcccggctttgaaatgtacaaggtcgaagatgttgatatgcaaaggcctgctggcgtgctgtttgacatgatgtgggagccgcatggcattggaattgtacgtgaacgcgcgagccaggatgtggagaaggttctgttgctagggcctatgcagcacattttgctggttattgatggtacgatggagacagaagttgatgcaatttttgtttctccgaaccgtcgtagtccatcagtggaatctattgaaatttatatgttgtttgggttagaggagtccttaaatatcaaggacaaattagtgtgttttgcgcttcttgatgaagtgtcatcggctcctcttgcaatagaaaaaggggagcccttgctggctaatcgttccgacttcggtagcggggtgcccgctttgggagaaaatattgaagggcaagtgccttcgcccagcttcagggaatatcatcgcgctgacttcgtcagccatgacagaagccgggacttcgaagatggagttgctctcttttcaagggaaactgaatttgagttcttgcagggtcatggcttcggcccaaacattagtttgaacggagcaaatcctgttggcctggtctctgtcgtgtttagtgagcataggacttctggcagttgctctgcccattttcctttttttgtctttgagtag

SEQ ID NO: 9226 - DNA, 117 bp, Zea mays
  Peptide Sequence Number=SeqID_51005
atgacttcccccggcttcgagaacgttgcagccaagtcttcgcagaaaccagctgttgctattgttgcaccgaaccctttgtccctcacgaccccatcggatttgaactgcaagtga

SEQ ID NO: 9227 - DNA, 357 bp, Zea mays
  Peptide Sequence Number=SeqID_51006
atggctcattcacgtgtgctgtcgtactcttggcacaacgttctgtctcgtctgtccggcgtgcgagtccctgtagcttgctctacgcctgcactgtcgtacctgatgggtcccgtagaacatgctctcgacttgcttggcggggacttgtcgttcgtgccgccgcgcagacttgctcggcaggaacttggtcgttcaacccgcctcgtgggcttgctcggtggacgggctaggaagaggtttatgggcctcgccatgggtaccctgttcctgggtacccggcagcagcccctgagcctttgtgtgactctttggagtctgtcggaggctttcttgctggggatcaaaaaaccctag

SEQ ID NO: 9228 - DNA, 788 bp, Zea mays
  Peptide Sequence Number=SeqID_51007
ggaataaggccaagtatgttggtcagtacataattactgatggagatgcaagaaaggctgcaatggatgcagctggtagaatacgattgacaatagaagctaaactttctcctggtcctccaatgttaaatcttcgtaggcatggtgttattggacgctggcatggtcttgtggatagcattgcaagtggcaatttccttggtgctaagagaagaggggtggttaatggtattgactacagattcaccggggaagttacgaaaatagacgtttcacggataagagaaaggcttgatagtgatagcatagttgttatcagcaacatgggcttcagttcatcaggagatgtgttaaattgcaacacctacgaggttgctactgcatgtgctttagccttggaggcagataaacttatctgcgttgtagatggtcaggtatttgatgagcatggacgggccattcaatacatgtctattgaggaggcagatttgttgattagaaagcgtgataggcaaagtgatattgctgtaagttatgtcaaggttgtggatgaggaaggcatcaattctttgcataaaggggacaacagaccatcattgagtcccaaggcttacataaatggcataaacgtgatatcaattagtgattctcgcgtgtcacgcgccatatccagcactcttgctgtcgtgttcgtgcgcgtcatcacgctggccccacgtgtcgtcgctgttgagcacacgctaattcacgcgttgtcagcacgtgttattaaaccgtttcgcttataa

SEQ ID NO: 9229 - DNA, 417 bp, Zea mays
  Peptide Sequence Number=SeqID_51008
atgggcaagaacaataagggtggaagttcatcgcaccactccggcaacaagcggaaacgcgagccaagtcccccctcggaggacttaggggactccgagtactcagaggacttctcctccgagtccgaggggtcgccagtctatgcctctcccccggggatcgctgccgaggtgtggacgtacatccgggccatcgagcgctctaggcttgagggctcgaatgagtcggagatctcctcggacgaggagaactcctccgactcgtccgaggaggggagcggtggtgacggcgacgacgaaggcgacagcggcgatggaggcgacgacggcggtggaggcgatggcgacggcgacggcggcagtggcagcggcaagggtgacaacggcaaggccagtggcaaagcgccactggcttaa

SEQ ID NO: 9230 - DNA, 291 bp, Zea mays
  Peptide Sequence Number=SeqID_51009
atgggcccccgtgcaggacacgccccagccacggcgaggagggttgaggggaacaaattctacttccgccgagcgattgggcacgacgggcgacagaatgtaccccagaactccgatgaggaattgggtaaccgtaggccggtcggtgttgaggaaatccactccgacgcgacccccggtgacacgggaactcccgtagccggttgcagcgacccagacagtgcagaccagcggcaatcgcaggcgagggtgcggcggcgtggttccacggctaaaactctggtgccctga

SEQ ID NO: 9231 - DNA, 312 bp, Zea mays
  Peptide Sequence Number=SeqID_51010
atggccgcggcgcatcacacactcttgtccagcgcatcgtcgctgatcaacagcctcagcaactcccgcgagggcagccctgaccgcgacagcggcctgtctatgctcttctctaagaagcctttggcgcaggtcggccgggcagccggtcccgcggtggcggcggctcgacgaggcgacgacggcgcaacctccgtcttcgcttacgagctcgtcccaccatcccctttttcccctcactcctcccacccgccggcgcccaagaggtcccgccggtcccactcgcaccacgacggctccgacggacactga

SEQ ID NO: 9232 - DNA, 2139 bp, Zea mays
  Peptide Sequence Number=SeqID_51011
atggcgcagtcctgtagttggggaatcctcctcgccgtcctcgtcgcgggactcgcggcggccgtcgccgtcccgccggcgaccgcggcggtggcgagcatcgacctcggctcggagtggcttaaggtcgcggctgtgcatcttgccccgggccgtgctccgatcgctgttgccaccaacgagatgtccaagcgcaagtccccggccctcgccgcgctcgccgacggcaaccgtctcattggggaggaggcggcgggcatcacggcgcggcacccgtccaaagtattcgcccgcgcgcgggacctcttggccaagcccttctcctacgtgcagtccgtcacggagtcgctcttcctcccctacgacctcgtccccgacgcgcgcggcgccgccgcggtccgcgccgatgacgggcaggtatactccctcgaggagatcgtcgccatggtgctccactatgccgcggggctcgccgatgcgcacgttggggcgcccgtgcgggacgctgtgatcgccgtgccgccctacttcgggcaggccgagcgccgggcgttgacgcaggccacgcagctggctggaatcaacgtgcttgctctcatcaacgagcacgctggggccgcgcttcagtacgggattgacaaggacttctccaatgcgtcgcggcatgtcatcttttacgacatgggcgctggtagcacctatgctgcattagtgtgctactcggcatacaacgccaaggagttcggaaagacagtctccgttaaccagttccaggttaaggacgttagatggaactctgaacttggaggcgtcgaaatggaaatgcgtctggtcaactattttgctgatcaattcaataagcagctcggtaatgtggttgatatccgtcagtctcccaaggcaatggctaagttgaaaaagcaagtcaaacgcaccaaagaaattcttagtgcaaacactgcagctccaatttcagtagaatctctgtataatgatgttgatttcaggagtagcataacacgtgagaaatttgaagagctctgtgaggatttatgggagcaagctctgactccagttaaagaagtgctgacacattctggcatgaagatcgatgatatctatgctgtagaactaataggaggagctaccagggttccaaaactgcaggctaaactgcaggaatttctgggtcggcgcgggctggataaacatcttgatgctgatgaagcaattgttcttggagcttcacttcatgctgctaacctgagtgacgggattaagttgaaccgtaagttgggaatgattgatggctccacttatgctttggtacttgagatagatggtccgggttatttcaaggatgaaagcattgatcaaattttggtgccaagaatgaagaaaatgccaataaagatgtttagatccatcagacataccaaggattttgatgtgtctctcaactatgacaaagcttatgaactgcctccaggcattccatcacacaagtttgcagagtattctgtatcgggactgacagatgccagtgaaaacactcccattgatgagggcaatgttcaagaaattattgcagagaatgtgctaaagaaaagaacatttagggttccattgaaggttgtggaaaaaacaactggtgctggaacaattctttcaaaggagttgtattctgaagcaaaaaataggttagaggcactcgataagaaggatgctgagcggaggaaaactgctgaacttaagaataacctagagtcatacatatattctatgaaggagaagttggaagaaagcacaggtattttgactgtctcaactgaacaggagagggaatcctttgcgcagaaacttagtgaggtgcaggattggttgtacatggacggtgaagatgctcaagctaatgaattcaaagagcgccttggtcaacttaaggccattggtgatccgattcttttcagattgagtgaattaaaagcccgaccagctgcctgtgaaaatgctcgattgtatcttgatgagctgcaaaagatttggcggagtattccccagaggacgtgggtagccgtctgtgccaatcaagaacccctggatgaagatgaatcccctgaatcaagtcctaaaccctga

SEQ ID NO: 9233 - DNA, 1239 bp, Zea mays
  Peptide Sequence Number=SeqID_51012
atgacgtggcagggggcaccggactgtccggtgtgcaccggactgtccggcgactttcactgctccacccgcgagttcaggtgggcgttgggcgttgttgacggagagcgcacaccacgggatcgccatgacccggctccggtcgccattgatggtcgccgtgacgacgatgatgatgacatagagcgtcgcggtcgccgcagccgtaatgaggactcctggagctcccgtctcttcaggagcctttcacgtgctcctcatagggagcgagaccgctcggagccacgcaggggtcgccatgacgacagaagatcgaccaccggcggccgccggcaccttcctgactctctggatgacagcttgctgcagcagaatgggagccagcaagtcagccttgacgtcttccccgaccacgtcgtgccgcgccagcttgtgtgcatagatggctctgcatcaagtggaggcggccgagagcagcggcatcaccaattcagaggcaggggacagagcatgagcccgtcaccgcgtccccgccatgacgcctcccctaacagtgggatggccatggctgctcgcggtcgcagccgggaacggatgcctcgccgacgccctgggaggcgcgcgcggtccgtccctcgatgtcagcatgggaccggtctggactctaccgctgggggttcacgctgtacctcggatgcccgccgcgacgacctcgacagcacgcacccacctcccccaagcccgccggcgattggcaccaccatgtcggcggggtcgaccacacccgtgtgccgcttccgccccggatgcgtctaccgcagacgcagcagatcggcgtcgcaccaggagctgcaagcagcaacgtctttcatcgacagcatctccgcccctgtcgcccaacctatattgcgcccgcaagatcagcggtatgagctccccaagaagacacaaagaagtttcatgggacgtgcaagaacttctacccgcaagagcgcgaggctagcggccatcgcttggccgcgtggagacattcagagccgcgcgcgccaagtgctcatgaagcgactgggaatcctaccagagtcgggctctaatcagaggcagaaccgggcaactgacgaggagctcaagcgctacttcagcctgttcaatggcccgctgacccacctagccaccaaggctttggtcgccctatgcggattggatgaccctaatgaggctggactgcagtcatcttga

SEQ ID NO: 9234 - DNA, 348 bp, Zea mays
  Peptide Sequence Number=SeqID_51013
atgtcgtgcgcgttcgacgactactatatcaaggactgtggcgtcatctcggcgctggaggtgacgcagaggaagaccgacgacaatgaccacgtgtatggtggtgcgtgcctgatgattgacgatgtacgaggaaacttcttccagtgtgtgtgggacgtgctctccaatgacgagaccaagcaaatcgtggcatatattgaagtctgcatgagcggctgcaccacgctgtccattctcaaccagggggacctcatggtcgtcgctaactttggtgactcccgggttgttctaggcatcacatccgaccacggcaccatcacgccgtccagctcatcatccacctga

SEQ ID NO: 9235 - DNA, 835 bp, Zea mays
  Peptide Sequence Number=SeqID_51014
atggctgaaacagatcgtgaggcaggtggtaacaaaggtgtatcggataggcagatacggttgaagatcttttctccgaatgtccttaacattactttagtcgatttgcctggaatcactaaggtgccagttggtgaccagccaactgatattgaagccagaataaggactatgataatgtcatacatcaggcacaagacatgcatcatcttagctgtttcgccagcaaatgcagatttagcaaactctgatgctcttcaaatggctcgggttgctgatcctgatggttctcgaacaattggtgttatcacaaagttggacataatggacaggggcactgatgcccggaactttctgctgggaaatgtgatccccttaaagcttggctatgttggtgtcgtcaaccgcagccagcagtactttgctctctctctatcttggttaagcaaactagcgatagctttattaaactatcagagaattctgtatacgacaacaacaacaataaagccttttagtcccaagcacattgggggtctgacggatatcaactctgacctcagtatcaaggatgctctggctcgtgaagaaaaattcttccgtactcagccagcatatcatggtattgctcagtactgtgggataccacaattagcaaagaagctaaaccagatcctggtccaacatataaaaacagttttgccggggcttaagtcacgcataagcagtcagttgactgctgttgctaaggagcttgctgtgtatggtgatcctgttgattcaaaggctggccaaggtgctaagcttttgaacatactagctaaatactgtgaag

SEQ ID NO: 9236 - DNA, 585 bp, Zea mays
  Peptide Sequence Number=SeqID_51015
atgaagactcggtgccgtcgcgatagttcaccggcgtgggcagagagaggatggagagcgaatgagagagagagaggaggagagggcctatggttctcacctatggtggagctcggccaagccaactcgacggtgcttcgggtgtggcagctctacggcttcggctatggtgggcaggtgggcgacgtgcgcggggagggagttgggttggtagttggccaggggaaaggggttgacaggaagccaggccctgccaaaggcgccataggaagctccgcccgacccagggctcggactcgggctcagccccggaagacggcgaactccgctccgcctgacccagggctcggactcgggctaagccccggaagacggcgacctccgctccgcccgacccagggctcggactcgggctcagccctggaagacggcgaactccgctccgcccgacccagggctcggactcgggctaagccccggaagacggcgaactccgctccgcccgacccagggctcggactcgggctaagccccggaagacggcgaactccgctccgcccgacccagggctcggactcgggctaa

SEQ ID NO: 9237 - DNA, 216 bp, Zea mays
  Peptide Sequence Number=SeqID_51016
atgggcgcctcgctagacttgagcaacattctttatgggactagcagattacgttcgcgccttcgatcatccagcactcatgatccggatgatttccaatccgatggtgatgttgatggcgactataatgagcagtgggtttcggacgaagacaactctttggacttggatgagatcaatgatcgtcgtctatcacatatgaacgagcctatctga

SEQ ID NO: 9238 - DNA, 1482 bp, Zea mays
  Peptide Sequence Number=SeqID_51017
atggtgggcgatgggatgaggacgaggagggggaggaggagcacctgtaggacggaggaggaggcacaccaggaagatgacactcagcaacaggtggagcagcaggccgttgtcgatgacgacgctcagcgggatgccataggttatggtgcctcagggggccacgaccgcaacccaatggcatcctcaaccttctgtgcagggaacacttccttggactggttgaacctcgacgccatgattcatggcgccgagcttggccacgtcgacgccgcgtcaacccgctgtcgccaacggagcgcgcacctcgcgccaagatctgcaccagctgacaccggcgtcgttggctcggcagaagcggcgttccgatccgagatggggggccagcagaacgcgctccaccagctcgtgtccttcatcctcggggcgtccgccgccgccgtcctgctcttcttcctcacgacggcgacgagcggagcgcggttcacggggatctcgagctgggccaacggaaccacgggctttgacgacgatgctcccgtccaggcggctcctgctacccgggcaaatcacgccgacgcaaagtttcttgacaccgtcgtctgtggatcctgtccggctcgatcacgcgtggtgaagcagggcgcggcggcggagcaggaggacgagctgcagcggctgctgcgcgcagtggcggacgaggaccggacggtgatcatgacgtcggtgaacgaggcgtgggcggcgcaggactcgctgctggacctgttcctggagagcttccgcagcggcgagcggatcgcgcacttcgtggaccacctcctggtggtggccctggacggcggcgcgctggagcggtgccgcgccgtgcacccgcactgctacctcctccccacggccgccgcgcgcaacctatccggcgagaaggtgttcatgagcaaggactacatcgacctggtctggagcaaggtccggctgcagcagaggatcctcgagctcggctacaacttcctcttcacggacgtggacattctgtggttccggaacccgttcgagcggatgtcggtggcggcgcacatggtgacctcgtcggacttctacttcggcgacccgtacagccctatgaacctgcccaacacggggttcctgtacgccaagtcgagccggcgcacggtgggcgcgttcgaggcgtggcacgccgcgcgggaggcgttccctgggaagcacgagcagcaggtgctgaacgagatcaaggtggagctgctggccacgcgcggcctgcgcatccagttcctcgacacggaacacaacgccggcttctgcaacaacacccgcgacttcaacacgctctacaccatgcacgccaactgctgcgtcggcctgggcgccaagctgcacgacctcggcaacctgctgcaggagtggcgcgcgtatcggcagatggacgacgaggaacgcgcccggggacccgtgcgctggaag

SEQ ID NO: 9239 - DNA, 1188 bp, Zea mays
  Peptide Sequence Number=SeqID_51018
atggcctcttcctcctcgtgcccgctcgcccccgggacaagcggatgcaagcccaggacgacgcggaccagcggcgtcgggttcggagtcgaagcaatggcgcggagcgtggcggcagtgaagctggagccgaagccggagccgtgggcggcggaagcagaggaggggtcgtcagttgtgccgcggtcgatggaggggccaccgtttccggcgccgttcgtggcgaagacgtacgagatggtgtcggacgcggccacggacgccgtagtgtcgtgggcgccctgcggcgcggggaacactttcgtggtgtgggacccgcaggcgctcgccaccggcatcctcccgcgcttcttcaagcacgccaacttcgcgtccttcgtcaggcagctcaacgtctacggattcaggaaggtgaatccagatcgttgggagtttgcaaacgaatcattcttagcaggccagaagcatctgctgaaaagcatcaggaggaggcgcgcgtccaagcctcaggtagaagcatcgccaagaaacagcgcaagtgcttgttccggacagcccaacaaggatcccggggtggtcgagagtttgaaacgggaccgcgcagcgctcagggctgaagtcatcacgctaaggcagcagtacagcatttgcaaatcccaactcgtcgccctggaggagaggatcctgaacaacgagagggaccagcagaaggccatcgccttcttcgcaaaggtgctcagcaacccagctttcgtgcagcaggtcctgcgcaactacgccagggagagagagctacacggcgcttccaaaagacagcggctgatggaaaacgaaggacatcggcagggcgatttgccactgaggggtagcaccgaagccgcgtttgcgaccggtgcggctggcgtctctgtggggactgggagcacaaatgttggcacagccgcgagacaggaggagtctggttctgagttgaatgatcaggaggtgaacagtatttggtctgacgtgtgggacgagctggacctggacctggacgcggtaccaggcgctgaaatggaccggcgagaagcggacaagggcgtcgctggcttccacgacgtcgaggacttgagtggccggccttgcggttggggtgatgagttctcgtatctcgcggagccgatgcagttcgtggagcactatgactag

SEQ ID NO: 9240 - DNA, 972 bp, Zea mays
  Peptide Sequence Number=SeqID_51019
atgttctttcagaggaagaaatcaaagaaagccaaagactccagaggatcgcagaagaaggggaaagatgggcgtgggaagaatgatcttttcgatcgtgccaagggagggcttgatgccctcgcaggaagcctgcaggaagccaagaaggacgccgaaacggcgactgagaagcttcaaggggatgtgaagtcgggcatggaaacgatccggcacaagggctcaggcctccttgagaaagccaaagaagaactcgggagtcactccgacgccagccgttcctcaaaggaactagtttcatccgaaaagccactaaaagcaggtccagaggatcaatgcaagtacaagggaggaatagaatttacccagctggagcaagtgacactctggatggcacatactgctgcgccgtttaagagcttgttcgagcgaggaagcgaggaacaggggaacaacaaggacatggacgctttcagtgcagtgatggacaaggtgaagggccacccagaagcgatggagaaggtcagcgctgtgatggacaaggtgaagagccacccggaagtggtggacaaggtcaaggacgaggtgatgagcctcgctggcgctctccgtctgcggagacatggatccgaagataaagaagctgagtccgaagagaaggcagaaggagcgcagagcgccgacgagggtgcctctgatggcatggctggagaacctagtgtgttggagcaggccgtgcaagagattcaggctgtcgccgcagctttgcagcagacagctgaacccgaagctgaaattccagctgagaccgctgctgctgctgctgcagaaacttctgctggaggagacaagcctgaagaaacgaacggggaggtggagcaagatgacccgaagaagcggctcgacttcgctgggttcttcgccatgctgctcgagaggttctgctccccggccagcaagaagaaagattaa

SEQ ID NO: 9241 - DNA, 201 bp, Zea mays
  Peptide Sequence Number=SeqID_51020
atgggccgacgggttaacgagtcggcccggcacgtgacatcaccaatagatggaattttggaaagagtaggacaaaaggaaggaggcatgtcaatgactttggatcacataacaagtgtgttgaatgatttagagtgcacttctaccgctaataacccagaagaattcacattcggtaaggacctatactgctatgcataa

SEQ ID NO: 9242 - DNA, 684 bp, Zea mays
  Peptide Sequence Number=SeqID_51021
atggtgtccaacctcaagatgcagtgtccgttccccaccttctcggaggtccgcaccctgctgctcctcgaggaactcgacatcaacgacatctgcgacgacgctccttccgactccaagtctggcgctcaggccctggtcatgcaccagcaatcgcagcagcagcggcactccaccgcgcccgctggctctggtgctgccaccagtggggctggcagcaacggagggaaccgcaaccgccgtcacggacacggtggaaatggcggcaacgagggcaacaatggtaacaagagtaccgggcaccctgggcctcgtccaggcgcgcccataccaccgcctggctatgggaacccctggtccggctgcgtccaaatgtggccacatggctatagtgtgttcccaggccacatgccgcgcccgccgctcgaccagcagcctcagccgggcttgcacatgatgccagcctcaactcctggtttcagctatggtggtgcctccacccctggttttggctatagttgcgggccacctacaacaccgtctctttcggccggcatgcctctgcacgccccctggaatcccatggccggcgggtcttgggaccaggcgtccctcaccagcaacttcaacaccatgtcgctgacgccgccgaactccgtcgagtggatcttgaaagtcgcctag

SEQ ID NO: 9243 - DNA, 216 bp, Zea mays
  Peptide Sequence Number=SeqID_51022
atgaagatgagcaagacaaggaggatgaacaagagattcaggcttaaagaccacttcatccaagagtccatcaggattgaggacacacttagagatccggaatgggtgctgacaatgcaagaggagatcaacaatttcaagaggaatgaggctggtgccagtgcgggcggcagcgcgggcgagaagaggccgctgccgcccgcgcgcaggcgatag

SEQ ID NO: 9244 - DNA, 408 bp, Zea mays
  Peptide Sequence Number=SeqID_51023
atgaaggcggacgacacgttccagcagaaatccacgggtcctactacctttttctacatcaagttcttcaggaggaaccttgcttttgacaccaggaatgttgatatccatgttgaagttgtcaagaagaggcgttgtcccaccaagaagccatactccagaaatgcaatagatattgatgctcgatacctctcaactcatctaaattgtcatgaccttgcagcaagatcaagaagtgtgtcaagaagacgaaggatgagaagaaagcaagaaggcaaaggtgaccaatcccctgaagacgcaaacaaatggcacaatccagaagggttccaatgccccaagttgggtgatggcggtaggaagcactattttcattgttactatgctatttttgatccaatgttgtga

SEQ ID NO: 9245 - DNA, 474 bp, Zea mays
  Peptide Sequence Number=SeqID_51024
atggaggcaaacctagagttttctgagcgcgttccaaacaagcattttcctaaacacctagtggggaggaggcatcctttaggtggcagagatggaggtgctcaaggaggagctcatgccgcggagggggagccggagtgtaggtgcagccgagggtgcggcgatgaatactacgatgtggacgaggcggagctggagggggagagcaggagaggagacaacgatgttggggcacgaacgcgcgatgaggcaggagagctggggcgcgggtgtgaactgcggtgggggagcagtgggcgtgatgagcaaccatcacgaagcggtttgaggctggggcatcacgagagcggagacagacggggggttgggcgagggcggtgccatggatcccacggtgcaacgagattagcgggggagggcagaaccatggtgaagcgagttggtagacacctactttgctctcttatagagtag

SEQ ID NO: 9246 - DNA, 516 bp, Zea mays
  Peptide Sequence Number=SeqID_51025
atggcgaggcactccgtccccacacacatcaaccgtccccatcgattccccgtcaacagaacagggctcaccgccttggcgtacaatgccaggttcaatcaggcgggtgaactcgtcggcggcgagcgctccggcctaaccacgacgctaccggtcaatccaatggcacggggagcttcacggggtgacgtagaggctattcgtgcagtgaatcggaaaatggtgcagagactcacccggtccacgtgtgccggcggggttccgaactccggcgagcatgattgcgcttttccggtggcgggggtccgcagttcaagctctggcaagctttacggcctcccaggggatctatctaggggcttggatcgagtggaggagggcgggagagggttcggccacggtggttgccctcgggcggctctggcgggtcgcgaggaggttgccggagctacgggcgagctccggggagtttggcgcggcataaaggatgaaacggggaagacagccgggcactag

SEQ ID NO: 9247 - DNA, 567 bp, Zea mays
  Peptide Sequence Number=SeqID_51026
atggcgtccaacggcagcgacgtggtgatgatgtatgggacacggcgctgctggagccgtccaagcagcccaagtcagcgagtttctccgtcaaggtatcataattcctggattccaaatctgagacgaatgttgatgttgactataatagcttgtactcaaagcagggctttctacaggattcatgctattagagattcatacctcaggtttgcaagatctcacacggcagggcggtacatggcggagtaccaggcatcggctaaggggaaactcacattcggccatcgggttcagggagctcccagctacgaggttttgaggaatagttttcagattcttacaacttcttctattttaggtacatcgccattgtccatgcaccgtgtcactgtctatcttagaaaaagaaggtgttgttttcagtgtgaggcctacaaagaaaagttggaaaaacatttccaatatcttggggtgagaagaaattatgggaaaaatgaatacagtgaagacatgggcacacgcacaagaacaatttgctttaaagttcttatccatccgttttaa

SEQ ID NO: 9248 - DNA, 543 bp, Zea mays
  Peptide Sequence Number=SeqID_51027
atgacccacctagttgtctccttccccatgccaaacccaaacctcaaccccaagccgaacgctaaccccaatgctgtcgccccgggccccaaccccggcgcgcgccttatgcagctgctcgagaactccgggccgacacagttcgagaccgtcgtctccatgccgccgcccacatcggagttcgcacaactgcagttgctcccagcgatgccatccgcgccgccggccaggatgctgagcagcactagcagcaaggcttcgcggggaagggcagccaccgtagctggaggtgacaccgattaccaagtacacatcggatcccgggctcgtgctgggcagacagatcgctgtgaaccggtcgtgtatgggctcaagctcggtaacatccgtgtgctgaacatcaatactgcactccgttcactcctccatggtcacacacagactaatgaccagccaacagtttcatcttatgtacatagtccgactgagttaaaagtggcatggccttgtggtgaaatcttgaagaggaacctgttgccatga

SEQ ID NO: 9249 - DNA, 372 bp, Zea mays
  Peptide Sequence Number=SeqID_51028
atggcggttcggaaagggccgaccacggtgaagtggcggggctcaaacgacggtgaggtcgccggcaaggccttagggtatgactggggatgggaagtagtgttccgtgctcgtgacgaagtggtgaagctaaggggagggagagcttaccggagcggagggaggggcggcggcgccggcttgattgagctcagggagaggggtgagggttggctgaggccggtgcaaggagaggtggagctcagggcggtcccttttataggcacccgaggaggaaacagccaaggccagctggcgctggtgaggtgcatagcgacgacgctaatggcgcacaacgctagggacgaagcggctcggggcggggtgtcgtga

SEQ ID NO: 9250 - DNA, 246 bp, Zea mays
  Peptide Sequence Number=SeqID_51029
atggcgaagaaggatcgagtgacacaagacaactcaagtcaggtgttcgccaccttggaggacttgggaggaagattggagaccgtagaacatgctctgcagcaactaatgatgcaagccaaactcgccattacagtggttgaacatgccgcaatggagagaacagaactatatctcaaagtgggagaaattaggaaggttgtggcccaaatgaggttggaagagttggggaaggaattcggataa

SEQ ID NO: 9251 - DNA, 138 bp, Zea mays
  Peptide Sequence Number=SeqID_51030
atggtgggcgatatggacgtcgccggccatggcgccgctgctgggcaggcctcagcgtcactgccgtcggcgcgtctggcgactggttggggtgtgtcagatcgggtggtccagatcgcgtaccccttcgtcgtctaa

SEQ ID NO: 9252 - DNA, 132 bp, Zea mays
  Peptide Sequence Number=SeqID_51031
atggcgctcggcggatggctggatcgaggagaggtggcgctcatatatatgccccagcttaatcccaactacccgcgaggaacccgcatcaacgccgctggcagcaacaatccccgcgatttttatttctaa

SEQ ID NO: 9253 - DNA, 435 bp, Zea mays
  Peptide Sequence Number=SeqID_51032
atgaagacgtgcaaccgaggagttgcatctcctaaaatcacaatttctggtacatcaactatcaaagagggtagcaaatgtagccacaatgcgacacacaacaacaagaaggaaaacacatccaaacgattaacacgggtcataaagaattgggatgataagagttggatgttgaaggatgtggatggttttgggacgcaacaacaggaggagatccctccaacaaccttgcatatcccaatagcattctcccccaagacggcacatgttgctccacacaactgctcattgcaattgttagatgtggagcattgttcccctcctaagagggcacgaccaccttggcttgctggcatggtcgaagcaagaagagctaataatattggaacaacgagaacaacaagagtcttcttagagaacgccatgaagctctag

SEQ ID NO: 9254 - DNA, 237 bp, Zea mays
  Peptide Sequence Number=SeqID_51033
atgggggtgggacgatgtggatgtctcgggcgggcggggagacgggggcgcgggcacaatggggtgtacacgcctctgagctcccaaactgcgggtaatcatgttgttgttgttgctgttctcgatgggggagtggatcgtgggatagagcaggtccccgtccttcctttgaagagcagcgtggatctcgctgagaaggaggaaagtagctcggtgggggagtggattgcggggtag

SEQ ID NO: 9255 - DNA, 228 bp, Zea mays
  Peptide Sequence Number=SeqID_51034
atgaattttatctctttggcgatggtcgtagaggttatggtggtggtcgccacggtgatttcgataatccgcgtggaaggcgtcctgcatacggacactgacctcgcaactgttgccgagctgatgtggccgacgttgatcatgcagccgaccgttgcacgcctggtcatcagacacttccggtgcacactggacagtccagtgaggcccatgtttggccagacttag

SEQ ID NO: 9256 - DNA, 531 bp, Zea mays
  Peptide Sequence Number=SeqID_51035
atgggcccgaatcctagtgagcatgtcttggacctctttgacatggcttatggcatcgaacccggacatgcacagggacgcgtacaggacttccacatgtcccaacaggggaggtgctctgaagatgcatccgtagatctggacctcatcgatggtactgatgatgtcagacctggactcgtccagggacgggtctggggccgccacatgtccaagagggtgaggcgcttgagagctgcgcccctgggtctagaccccatcgatgggactgatgatgttggacccaatcctcggagcggtccttcatccaggcgcaaagaggaagactctacggaggaggaggaggacagcgattgcagtgggggctgcaacggcttcagcgatgaccctggtggcgatgacggtggtggagttagcggcatggacaacggcaagggtggaggcagcgacatgggtggtggtcagggttacagtagcagcggtaatggtggcgagggcgatcatgctggtggcaaggcaccaccaccttag

SEQ ID NO: 9257 - DNA, 432 bp, Zea mays
  Peptide Sequence Number=SeqID_51036
atgagtacaacaatattgtgcttgtccatcaagcaaatcaggtgtactactaaagttatcctcacccaagcttggaggtttggtgggttgtctacaaagttaatccaacagttcaccctgatcgaaaaggattatgatgttgtactacaatttatgtatgttattatgttcaagatgcttggtaaggggaaagggaagaaaaagggtgaaggctcctccaggtctactcgttctaggtcgagtagggaggccgatgctactggagacaccccctcttccttatttatgggtcgctatattgaaaatttgcaagagaaacatggacaagacgtggactggaagtcagccaagtttgacttagctatgtcacatgggaggtttcctaccagcgatggtgtcatggaccgccaaagttatagtaggcaatcttaa

SEQ ID NO: 9258 - DNA, 159 bp, Zea mays
  Peptide Sequence Number=SeqID_51037
atggcgcgcctgcaagccaagtcccgcaacaaacctgatttcatggggaagttgtacacggtgcggtgttgttgggcatttgagaacaagtccccaacaggtgccatggttgccaacaacaagcagtgcgaggcagagcacgccactgcacatgaatga

SEQ ID NO: 9259 - DNA, 288 bp, Zea mays
  Peptide Sequence Number=SeqID_51038
atgggggctccagagagcgcagaccgcagtgaaaaaagttccgcggcggcgcagctaactccggcgagcaattgcgcgggctctggtgcggtacttggcgaattaagggcatgggaaagttgctcacctcgagtgcgaactctggtacgcttagagaacggcgggggtgcgatggagcctcaggtcgacggcggcgaggctccgaccgcgcaagaactgctccggttatcatggaccgggcgcaacagggagggagagggcacaccgaagggtgtcccgagtagctga

SEQ ID NO: 9260 - DNA, 240 bp, Zea mays
  Peptide Sequence Number=SeqID_51039
atgacgtggcaggggcaccggactgtccgtttcgccctattcaccccccctctaggcgactttcaacaaccacgtgaaggggtacagggtaacctcagccgtcgaatcagacatcaacgacccagattagatcacgcaggcgcgtgcgcgggcgcggctgacaagcggggccagggcgccagcgagccagggcgggctgaccggccgggcccaggggcagagacatgggtgagggggtga

SEQ ID NO: 9261 - DNA, 300 bp, Zea mays
  Peptide Sequence Number=SeqID_51040
atggaacataacgcattgacggcagtagtttgtgtcgagttcttcaagtggagtttctcggattacatcatggagcgtgccttcacaaaggtcgggagggttgatgacatggagatacaccacgatgaagtcatcttgagtgcaagtggcatcttcagaccgggcagccgtggtggcactaatatgggggaggagaccatgttgaccaaggatggcatggaggtgtacaacccactcgatgaagttatgaatgttgaggtcaaggatggttggtgcaaagggggtgcatggtggctgtga

SEQ ID NO: 9262 - DNA, 348 bp, Zea mays
  Peptide Sequence Number=SeqID_51041
atgttgggagatcatgccaagagggagatcatgaccggcgaaaaggccgcaagctcgtggaggactctctcaagggagtccagcaacaaatacaaggaggaatcctcttcctccaccaagtcgcattggaagggtgacaagaagaagaagatgaagaaggtggtctactacgagaccgattcttcgtcaccctccacatcatcaagctccgactcattcgtcgcttctaagcgccatgagcgcaagaagtatagcaaaccaccaaattttgatggtgaagattattgtatgtcgagtgataaaattaggcatcatctaaactcactctacgaagcatatgggacatag

SEQ ID NO: 9263 - DNA, 135 bp, Zea mays
  Peptide Sequence Number=SeqID_51042
atggagcacgtgatcggagggaagtttaagcttgggaagaagatcgggagcggatctttcggggagctctatctcggtgtcaacgtacagagcggcgaggaggtggctatcaagttgatactgacatggttctga

SEQ ID NO: 9264 - DNA, 354 bp, Zea mays
  Peptide Sequence Number=SeqID_51043
atggcgccggaaccggaccactccgcgtcaggaggctactacggcctctcttttgcgccgcagcaggaggtggcgcacgagctcttccacagtattacggcggcggcacggtcaccgtcgaccaccactacggcttcacgcgagccagcgggggaggagtcgccggcggtcagtgcgggtttggctgcttcgacgacatggccagccttggtggagacaccggtactcttgaaggagtacaattattatgacatggggtttgacagtgttttgatgtctagattcacagcatggttccatgcatttggaccccaacttatatttagatttatgcatgtttgttttgaggattga

SEQ ID NO: 9265 - DNA, 411 bp, Zea mays
  Peptide Sequence Number=SeqID_51044
atgccacccgcgcccaccaccggcggcgcaggggaggagccggccatcctcaaggcggcgctgggctccggcaagctgcgcatcgagggatattgtagattcatatcagcgggacacccgcaaggccgcaagaagaaacatcgcaacaacaaatacgctgaagagtggaaagtgagagcctgtgctggtcgactcggcgttggatcgatgaacatggacgacatcatccgtaacatctacggccccgaggccgtcaacgctgccgccgccgaaagcgccggcctcggcctggcggagccctccctggcagccccggaggctgcggcccggcggacgtcggaggaggtgtggaaggagatctctgccgctggagggctccccacgcccatcctccctatccctcccgctggg

SEQ ID NO: 9266 - DNA, 201 bp, Zea mays
  Peptide Sequence Number=SeqID_51045
atggcactgagggagctggtgtgccactgcctccacaagaaggtggccttcgacttcgagcgcatcacgccggggacgctcgtcgaggtcgacctgcacgcccgcgagccgtggcccgtgggagctcccagcttccgggaccgcaagtacgcgacggggtcgcgcaccagccgtgccaccaagtcgggctactgctggtag

SEQ ID NO: 9267 - DNA, 507 bp, Zea mays
  Peptide Sequence Number=SeqID_51046
atgaccaatgtgtccgagtcggtgataccacgactgaggataggcttcgacgagcagggctgggaggagcggccagaggacccgactgaggaacctgaggcggtccgagagcagcaggcctataggcgtcgaaaggaggagcatgtagaccgggcgtggcccagccacctgggggaaaccacgaagcaggtagtggcccatgaggaggtagcggcccagaggccaggcaggctgcaaaggcgtgtggctgccccatgggttgagactgtgccatgggccgaatcgggccactggagacagtggcgccatggagagttcctagaggagcagctcagagcggacctcgacgaacttggggagggcccgctggagcttgtggaaagaccgaatgtgctcgaaccgctcattgaggtcgcagaggacgttaagggtgagtacacgatcggtcattggctcgccgagctcaacaagagtccgtcagggtcttcatcttgcggcaatagttag

SEQ ID NO: 9268 - DNA, 1428 bp, Zea mays
  Peptide Sequence Number=SeqID_51047
atgacgccgtcctccacatgccacgccgtcgccgtcctcctcttgctcgccgccgccaccctagcctgccatttcagtgtcttcgtcgtagccaccgatgtcgaatgtcattgccacggcgcgaaggggtgccgcggcctcggcatcaactacggcacggtggccgacgacctgccctcggcgtcgcgctccgtgcagctcctccgcgcggcgggcgcgagcgccgtgaagatctacgacgccaacgcggacatcctgcgcgcgctggccgggacgggtgtgccggtctcgatcatggtgccgaactctgccatcccgtcgctggcctcctcccgcgccgccgcggaggcctgggtggccgccaacctcgcgccgcacatcccggcgacgcgggtggcgcacctgctagtgggcaacgaggtgctttccaaccgcgccatcgcggcgtccacgtggcgcggcgtcgtgccggcgatggcgaacctccgccgcgccctccgcgcgcgcgggctccgcggggtcaagctcgggacgacgctcgccatggacgcgctgtcggcgtcgtacccgccgtccgccggcgcgttccgcggcgacatcgccgaggacgtggtcttgccgctgctccggttcctgaacgccacccggtcctactacttcgtcgacgcgtacccgtacttcgcgtgggcgggcaaccgggacgccatctccctcgactacgcgctcttccagggcgcggcgggctcgcgctacgtggacccgggcaacgggctcacctacaccaacctgctcgaccagatgctcgacgcggtcgtcgcagccatgggcaggctcgggtacgggaacgtgaggctggcggtctcggagaccgggtggccgagcggcggcgacgcgggcgaggccggggccaacgtgcgcaacgccgccacgtacaaccggaacctcgcgttgcggatgtccaatagccccggcacgccggctcggccaggggccgaggtgccagtgttcctcttctcgctctacaacgaggaccgtaagcccgggccgggcagcgagcgccactgggggctctactacccgaacgggagcatggtgtacgagctggacctcaccggccgacggtcgtcgtacccgccgctgccgtccgcggacagcgcgccggcgtggtgcgtgcttgccagcggcggcggcaaggcggcgaacgagacggctgtgtcggccgcggtggcgtacgcgtgccagcatgggagcaggacgtgcgccgccatccagcccggcggcgcgtgccacgagccggacgcgctggacgcgcacgcgagctacgcgttcaacgcctactggcagcagttcaggagtgccggcggcacctgcttcttcgatgggctcgcggagaccaccaccgaggatccaagtgagatctttacctga

SEQ ID NO: 9269 - DNA, 1302 bp, Zea mays
  Peptide Sequence Number=SeqID_51048
atggataacgtcgtgttcaaagccagtgtggatacgggaggagagattgttgaacgtattcttggtgagcgccttcatggacgtgcccttggcttggctaggggctctactgggccgtgcttgtgggcacctgaacctacagaggggggtgtgcactgggccctgcgtgctgcgtcccccttctaccccttcgtcgacggctgggattgcggcggcgcccttgtcttcgccggcgacgagcatcgccagatggacgacgacgatggcagcctgggcattcggaattggggcttctacgacaccatgaagggcaacctaggcctgcagctcatgtcgtccatgccacctgaccgggacacgaagccactgctcccgagagctggtttcttgcagcagcatgggcatcacaatgcatcgcaccagctccatgcacagcagtcgcaacattatcgtgattccacttgcggtggaggagcctctggtggcatgcccaccgagcagcactctatccacatggacttctcacgcaatgaagcttggctgcacccatcgcaccaccaccaacatccccatgaccagaaggtccttcattctcgccctaccgtaccagctgggcatgttgggcatccaggccatggtagccatcctgtgcatggtgggcatatcgtgcatcaccatcctactggctatgggtcaatatcagatgcacaacatactctccagatgatgcaaccacagcttgagtcacagcttcaggagcctcctccatgcaagggagacgaagcgccacctccgccaattgaggatcactctgtggttagtaccgggccacctgtgaaaaagaggcagcgaggccagcagcagagtcggcagcctaagtcaccaaagcctaagaagcctaagaaggttgctgttctgccagagggtggggcacttaatgggcatgcaccccgtaggaggggccctaagaaggctgtggggatggtgattaacggtattgagttggaccttgccaacttaccaacaccagtgtgctcatgcactggaactccccagcaatgctatcggtggggtgcaggtggctggcagtctgcatgctgcacgactgctatttcaacgtatccactgccaatgagcacaaagcgccgtggcgcacgtattgctggaaggaagatgagccaaggcgcattcaaaaaggtgcttgagaagcttgctggtgaagggtacaaccttgttaatccaattgacttgaagacattttgggctaagcatggcacaaataagtttgtaacgatcaggtaa

SEQ ID NO: 9270 - DNA, 297 bp, Zea mays
  Peptide Sequence Number=SeqID_51049
atgcgccaggagcgaatggtgcgacagcagcaagcgtcgttgtctccaccaccaccaccagttccaccctgggacaagcaccaggagttcatgagccacaagccaccgacgttcgccagctctccaaatcctctgcatgctgatgattggctgaaagttcgctacacagttcaagaactatcacatacctgctggactgatgaagataaagaagaaagagtttctgtcattgaagatgctaaggtaccttggaccaagacattgaggaaagcaacacctcaaaagaagacattatga

SEQ ID NO: 9271 - DNA, 552 bp, Zea mays
  Peptide Sequence Number=SeqID_51050
atgacggtggaagagactagcaagacaaggaagggcaaaatcataatagaaagcaagggaacaaacttgactgcagagacatcattgctgtgcaaaataaaggatatcgagaagttggccaattccatcagcaataagctgatcaagcttgttgctacaatagaggatatggacagatcacaaaatttgttctacgcttatactagggcctataacagctctattgtagccatattatataatcaggagcaagatggagctagaccggtggaagttgcagaggtaataagtgaggagtactacaattcgttggctatagtggtctataccggaccacttaaggtgatccctcctacacaagaagcagccgatgatgccagggtagagccggaacctgaggaacgatccgaggactgtgcaaagatcaaagaaaagaagagaaagcgctccaaagataaaaagtgcaagaatgaggagaaaaagaggaggaagaaacattgtgcagccacattgatggctgaggaaaatgagttagtctattttacgttttaa

SEQ ID NO: 9272 - DNA, 1158 bp, Zea mays
  Peptide Sequence Number=SeqID_51051
atggctctctctgtttccccttctttatcatttacccaaaatttcccacgcttcgtcacttcccattcgcttcctctctctcagtgtcatccaatttccttccaaacaccaccaccaaaaagcatccattaccacccaccaagagctctgagggaatggcaagaatacgaggaagcagtgaagaagaaggacttagctactgctctaaggttccttatatccattgaaaaagacaatagcgacgactctgttgatgaaaatggttccttatccacccagtcagctcggtcacaaattggcgatctgggtttttttggtgggtctgtgagggattgggaggtcttggatacctgccttaatgctgatgatatgagacttgttggcatggcttatgagttccttaaggccaaagttttggatggtgctagggatattagaccttctgtgttgaagtcttctactggcctagaagcttctaaattttctccaaagaagtggggtctttccggaagctcaagtgttgtattggctggctttcttggtggggtgtcctatctacttcaacaaggaattgatatcaggcctcaacttgcaatcatactagggctagccttcacagactctatcttccttggtgcttatcttatgggttgccctattcgtggagtgattttagacccaatagttgcgatgcaaatgggaattcaagggcaggctggaactcagttttgggatgaaaacatgaataatgaaatggcagaaggacaattgagtggttccacatttgataggttggctggttctgattaccccatgttgattctgttgcgaatgcttgcttatggaagatactgcatggtactttttgctggcactgcagctgaagctcttgtttatggtgacgctgagggtggtgagaatgatgagaacttgtttagaagcatctctgttcttcttcaacccccactctcagtagcgcagttcggcattacttttgagaagatgtcaaatcaagcaaggtggtcagtgctacagtcttacaatctgcttaagtggcatagacatgctcatcgagcagcattcaaagctatggaaaacggcgctagtcttagtgtcataattaggaaaattgaggaagccatgtcttccaatagatga

SEQ ID NO: 9273 - DNA, 114 bp, Zea mays
  Peptide Sequence Number=SeqID_51052
atgaaggctcaatggcagcaaggagtggctgatttaggcaactcaaaggaggattttgagactttgatcagcaagacaaatttagttaagataggtgcacaaaaaataagataa

SEQ ID NO: 9274 - DNA, 285 bp, Zea mays
  Peptide Sequence Number=SeqID_51053
atgcttgacaggtctcttgagtcttccagggaagtgattttggcttcataccgatcagtgctatttgatctgagctactatggggttagctctcaagggtggtggttcaacatcagcattgacaacttcccacaagtcaaatgcttgcaaccttcaccattgaatactggtggtggtgctggagagaaacctgatgaagacattgtttttgagagtagaaaggagaaaggtcctctaagaaatcagctctcgataccaattgttggagttgggaatcaaaactaa

SEQ ID NO: 9275 - DNA, 3171 bp, Zea mays
  Peptide Sequence Number=SeqID_51054
atgaagtttgacttatatgctccaatcagaagggatgcgctcggcaacctaatactgccctccaccgatcgccgccgcggaggtggacccgtggccaccgcctcccgtgtgtggcgagcccgccccgccgcctcttcccccggctccgccgcgggccccgccgccgccggcccgattttgcccctccctagctcagccccggaggcccgcccgccccgccgccgctcgcgccgttccaaccacggcaacaaccagaatcaccgccccgccgcgcctcaggagcaaaacgacaacgcaggacaccgtcgccgcggtccgccgccggagaggccggctcccgcgccgcctgcccctgcccgtgagcacgcaccggcgcctgcggcggtggagactcggggcgatggggcggtgccgcagctggtgcaggagatccaggacaagctcgcccgcggcgcggtggagtgcatgatctgctacgacatggtgcggcggtcggcgcccatctggtcctgcggcagctgtttctccatattccacctcccttgcatccgcaagtgggtgcgctccccggcctccgccgccgacgcatccccggcagcagaccccgcctccctctcctggcgctgcccggggtgtcagtccgtgtacgccaccctggcccgcgacctcgcctacacctgcttctgcgggcgccagagagatccccccaacgaccatttcctcacaccccactcctgcggcgagccctgctccaagcccctcgagagggcggaacccctttgcgccaagggtgaggatgttgacgccaccaggtgcccgcacgtctgcgtccttcagtgccatccgggcccgtgcccgccatgcaaagcatttgctccgaatcgaccttgcccctgcgggaaggagatcatcgggcggcggtgtgcggaccggagcacgcctgttacctgtggccgcccttgtgaacagctgctgccttgcaaaaggcatcgctgcgagaaggtttgccacactggttcttgcggggattgcgctgttcccatttctgcacggtgcttctgcgggaagaagaatgagacactgcaatgtggagatatgatggtaaaggggaagctgtctgaggaggacggggtgttttcttgcaacgaggtgtgtggccgcacgcttgcctgtgggaaccatgcttgcaaggatatgtgccacccagggccttgtggggagtgtgagctcatgccaggcaaggtccgtacatgccattgcggcaagaccaggctgcaggagaggagggcgagctgcttggacgcaattcccacctgcgacaagatatgcgataagaaactgccatgtggggtgcataggtgcaaggtcaattgccatgagggagaatgcccaccttgtttggtgctcgttgagcagaagtgtcgttgtggctcatcaggtcagatggtggagtgctacaaggtctcaatggaagagttccgctgcaacaagccttgtggccgcaagaagaaatgtgggaggcatcggtgcagtgagctctgttgtccactgtctaggaatgttgcgcagcttgaaggtggcaactgggatcctcatctctgccagataccatgtggcaagaagctccggtgtgggcagcatttatgccagctactctgccacagtggtcattgcccaccctgcttggagactatattcactgatctcactaatgagagaatgcattgggggacatgtgatgctgaggaatatcccttgcggatcgaaggatatcagacacctgcaaatggcgatgctagctcaagctctggtggcaaggcttcttgtggacaggtatgtggcgccgtgaggagagaatgcaagcatacatgcactgcctcatgccacccatcgtccccatgcccagatttgagatgtgaattttctgtgcctattacctgttcttgtggccgaatcactgcaactgttccctgtggtgctggtggatcctccatgggtgataatatgtttaaagtctccatcatacagaagctgccgatgcctcttcagtcagtggaatcaaatgggagggtacctcttgggcagaggaagctttcttgtgatgaggagtgtgcaaagatggagaaaaagagggttcttgctgaagcatttgacatcactccacccaatttggatgcattacattttggtgagaattcaagttcatcggatttggtttctgacttgttccggcgtgaaccaaagtgggtgctggccatagaagacaggtgtaagttccttgtacttggcaaggtgagaggcagttcttcaagcaatctgaaactgcatgtcttttgccccatgatgaaggacaagagagatgctatcagtctaattgcaggccggtggaagctttctgttcagtcggcttgtcgggagcctaggtgctttgttaccatccatgtcacatccaaatcaaaaccgcctgctcgcatcctgggatccaaggctggtgtacctgctacagctgcccatccttactttgatccacttgttgacatggatccgaggctggtcgtcgccatgcttgacctgccacgggatgctgatgtcaatgctctagtcctaaggtttggtggtgaatgtgagttggtctggctgaatgacaagaatgccatagctgtattcaatgatccagctagagcagcaacagcactgaggcggctggattatgggtctgcttaccagggcgctgcgatgtttatgccaagcagcgctcaggcatcttcaggcaatgtttggattggagagcagaaggatggggggttcgccgctaggaacaatccatggaagaagcctgcttctgctgagcctgatctgccctccggagactggtctggtgttgctggtcatgctccagcaccaggatggagaggcgtcaacactgcctctcaagtcatggggactacaaaccgatggaatgttctggaatcagacgctgctgcaagctctggttcaggcaacgagcggaagcctgctccgggcacagatgtgcacagcacagtatcaaacactgggaatgctgggccatcggtgaccaagctgcagccggatgtagagaggcgaatgtgccggcaaatgaatctctgcaagaccgctgcttattttggcaggccttctgtggaattctga

SEQ ID NO: 9276 - DNA, 660 bp, Zea mays
  Peptide Sequence Number=SeqID_51055
atggtggctctcagctctcttacggaagcaggaggacgtcagcaaggactcaaccgctccgacagctgtccctccgccaggctccgtcgctcctccgacggccatgacatcacaccagctgggtgccaaaatctctccggctgccacatcggcatgaaggaccagggccctcttagagagggttggccgcgtggggacgaggacgggacaggcgctctcttagggccgctcacttccctctcccgcgtggacgcttgtaaccccctactgcaagcgcacccgacctgggcgcgggacgaacacgaaggccgcgggattcccacctctctcacgtcagtctccggccgcctcgcttctccccccttcgcgctcgccctcgcgctcgacccatctgggctggggcacgcggcgacactcactcgtcggcccgagggaccccccggtctcgaaacgccgacagttggcgcgccaggtaggggcctgctgcgtgttgacgaacagcttcccgtcaagctccagatgggcagtctccagcaacctctcactaccggaatccaaggctttgccgagtgttgcaatctttgccgagtgctttttgtcgggcactcggcaaagagggctttgccgagtgtcaaaagggtgacactcggcaaagtgtaa

SEQ ID NO: 9277 - DNA, 186 bp, Zea mays
  Peptide Sequence Number=SeqID_51056
atggaggaggaaaaggccaaggttcacaaagctagtccttacccatacaccacagactatccgatgcttgtgtttatgtactacacaaggtccaagttcgttattgaagttaacttttcaaaggagcaggtgaactatcatggtgtaattttgctgggaggaactcttgaacttaaatctttttga

SEQ ID NO: 9278 - DNA, 138 bp, Zea mays
  Peptide Sequence Number=SeqID_51057
atgccgcaaatggcgggaaaaggcatgtttgaatatgttaaagattcaccttttcaaagtctactctccatgaacgtcctgattgctctggtctcctttgcttcctggatatcgaacccagctctaagagttggctag

SEQ ID NO: 9279 - DNA, 630 bp, Zea mays
  Peptide Sequence Number=SeqID_51058
atggtttttaaatggtttgaaatatttttgactgagtatgtcgtacaccgagtctccggcaccgattctctaacaaagaacccgtggcatcagcatcaaagggaaaggagaagattatcgaggagtaaactcaagaaaatcacggattggaagagttcagggatacttcgacctcgagtcgatgagacactgggtgtcactatatttctccggatagattcgatgaggtactgggtaccaacttacttcagcttggccaatgagacactgggtgtcaactattgcttcgaactatccgatgaggcactggctgccattctggtcgatagaagtcaaaagtcccggttcagcatccagactaatcccgacttcagcataactttggtgatgttggttatttatttaagaattatttttaaattgcttggtatatccggtaaatatatgggggcaagctacattgatgctagaagacgtgagtttctaaatctcacacaaagggatcgttcagtggccgagtttctaagattgagccactatgcgcgaggcatggtggtagctgaatatgagcgttgtgtctgcttcgaggatggaatcagggatagtttgagagttttgatagctccgtag

SEQ ID NO: 9280 - DNA, 366 bp, Zea mays
  Peptide Sequence Number=SeqID_51059
atggagtccgatactaagcatagtgtccaagaaattgatagccctagtaaaattgcaccaacaactacaagaaacaagaaggctaaggagcagaacttcacagctgggccacctttcaatgtcgacgaactagacatttcgtctcttggtcttagttcaaagaggtcgttggggagagattcatccaagtatgaaaagaagaaatgggattcagctacgtcagatggtagtgactacttgagcaagctccatgaccttgctgctacaaaatttgagcacaacctagtgaagaaagagaagagggaaatcgagcaagacaaagaaagagaaattgagttaaagaggctagatatagaagcagagaaa

SEQ ID NO: 9281 - DNA, 414 bp, Zea mays
  Peptide Sequence Number=SeqID_51060
atgacaggaggcgcagcattggcgttgtcgcggtctccgattgagtcattagccggggcgctcgttatcgcgcacgcggccttggaacggctgtgccaggcagacggagaccgcgacggtgtggtcgccggcgcgggtggcggccccgcggccgtaacggcgatggtgcgcgccatgtccgggcgcggggcggagcacgcggctggcgcgctggtggccgtcgtggtcgggtcggaggcgctgcaggtggaggcggtccgggccggcgccatggggcagctgctgatgatggtgcagggcgggtgctcggagcgcgccaagcgcaaggcgcagcacctgctgaagctgctccgctccgcctggccgaccaccgactgcaccgccaactccgacgacttcctccaacactactga

SEQ ID NO: 9282 - DNA, 822 bp, Zea mays
  Peptide Sequence Number=SeqID_51061
atgccggcgagcgtgccgctgtgtctgggcctggacacggcgggggtgcaggtgccgtggtacttccggtgccccatctccctggagctgatgcgcgaccccgtgacggtgtcgacggggcagacctacgaccgcagcagcatcgagtcatgggtggccaccggcaacaccagctgccccgtgacgcgcgcgccgctcgccgacttcacgctgatcccaaaccacaccctccgccggctcatccaggagtggtgcgtggcgcaccgctccatgggcgtggagcgcatccccacgcccaagcagcccgccgacccggacctggtgcgctccctcgtcgcgcagggcccggggctcccggcgctgcggaggctcagggcgctagccagggagtccgacaagaacaggctcgtcatggccacgcacgagaccagagccgcactgctggaggccgccttcggctccgggtccggggcggcgagcgaggagctcgaggcggaggccatggcggtgctggcgctggtcggcctcagggaggaggaggccgtggaaagtggtcgggagggaggagagggtggccaggctcggcaagtcacccgcaggcttgttcatagactattcttggcactgaacttattcccaagcttaataatgtgctcgttatggctgatattattagaggctagctcaaaccaggggacgatggacgagcgcatccctggatgtcttgacaaacatgggtatgaagagatggttattgcttggtccatcgtagccttgtatgtcaagaccgtatatgaacctgatgtgaattggggagatggt

SEQ ID NO: 9283 - DNA, 243 bp, Zea mays
  Peptide Sequence Number=SeqID_51062
atggcgaaggcctggaagacgaacgggatgtccgacgatggcaatatgatgccactgcgcgagtcggtatcggggctggtgtcagacgaatacagggaggaggcgcatgctcctacggcctctgctgagaatggggtggcacggaggtggaggcatgaggggagagagaaaagaagtagaatgacgaacgaggtggtggcaacggaggcgaggaccgtcattatcgtgcggaggtatagatga

SEQ ID NO: 9284 - DNA, 636 bp, Zea mays
  Peptide Sequence Number=SeqID_51063
atgcctttgcatagctcctcggggtccattgacacattcttcggcgtgctcgtggcggtcctgccgctcaccttggtgtcctacgtcttcagccgggtgtgcgcgggccacgccgaggggcccaaggagcgctttcgtattagatttgcaggccaagagtgcgatgaaccattccgtcgtgctgtgcataaaggttcaacacaaaccaataaaagattgaagaaagggttcaaaaacaaaggagcaaagaaaccaagagtgccctggtcttgcgcaccagactgtccggtgtgccatcggacagtgttcggtgcaccaggaccgtacagtctcaaattagccactctcgggtttcttagggcgcgctccgctataattcaccagactgtccgttgtgatagtggagtaacggctatccagcgcaacggtcgactgcaacggacccctgcaaacgctacagtgcgcgaacaatgcacgcagaagtcagagcagtcgtcagaggcgcaccggacagtgaacagtgcttgtccggtgccactagtggacaaagcctccaatggtcagaagctccagaaccctaacagttgggtgacgtggctggcgcaccgaactgtccggtgcgcccatcgacagtag

SEQ ID NO: 9285 - DNA, 219 bp, Zea mays
  Peptide Sequence Number=SeqID_51064
atgactgccggaatgagctccatgagtttcaagatgaagttgttcaagggacagactctagctgacaagattgttgtggatgccacctcagagaatctggatgggcctgactggaactcaaacttggagatttgttacttgatgaacacaaagaaggttgacagtgtggaactcatccgtggggtcaagggtccagtacctctccttggtcctgcttga

SEQ ID NO: 9286 - DNA, 2643 bp, Zea mays
  Peptide Sequence Number=SeqID_51065
atgctggtcgctagcgggaccgacgatggcgagctggtgctgctgccggtgaggcttctcagtggcccttccatcccagagctgctagacatggcggcacagcgatacgagaacggccaactgggcgtgctgcgggtgccctgcgacatgggtcacttccgccaggtcctcgagggcgccatgcacagatgcgggatcagcttcacatggctaggggtggcggctagggttcattggattttttgctgcgttctgggtcgtggtcgaggtggcccgaggctgcgttcgcccctgcacgcgatgaccgtggaaaaagtttctgcgttcctgccctgccgctatagaggaccgtacaattccaataaacaaaatagatctaacggctgtgatggacggagagggagagtttctgcgtttctgctgaacgctctgacctttgttgcaagattaacagcaggcatcattcagacatatctagaatgtgatcctgagtttaagtactcagaggttctaaatccaaaacgcttcctcaccaatccctctaccccagcccacaatgatgggcttgacaatgcaaattgggacctcatattgtacgtcaacttggagttggttaataagatgtcaaacagaaggtttattgtcaaggaaatgcttgggcagggaacttttggtcaagtagtcaagtgctgggacacagaaactaatgactatgttgctgtgaaggtgataaaaaaccagcctgcattttaccatcaagctatcatggaggtttcactattaagaacgttaaatcagaaatttgatcctgatgatcagcataacattgtccgtatgcttgattatttgtcatttcaaaatcatttgtgcatagcttttgagatgcttggtcaaaacctgtatgaactgctcaaaaggaatcacttaagaggtctgaaattgaaatatgttcaagccttctcaaaacagatattggatgccatggttgtgatgagagaagctggaataattcattgtgatctgaagccagaaaatatcctaggccaaccaccagatgaactgctaagggaagctaaaaacactgtaaggttttttaaacatgttggaagtatatatgctggcaatgcggcacctattggtctttctagtgcatacagaattttaagtgaagaagaggttgaagcgagagattccaagaggcaaaagatgggaaagtggtacttcccacacctgaagcttgacagactcatatgtacctatccttggaacaattctgaactggcagagacagagaaaacagatcgtttgggattagttgatttcttgaagggactccttgaatttgatccaaataagcgatggtcaccattgcaggctctacaccatccattcataacaggagaatcgtttactggtccatatgagccaatacccgagactgcaagaattcctgttgctcgtgcagcagcaattgatcacaatcctggaggggggcactggctacattcaggtctttccccgcaggttggaagtgtaaacagatacctacctttgaataatgtctaccctccaaaggttcctttttcttatgggagtagttatggaagctttggtagccatggcagctatactggtaatgctggttttggtaacagctatggaagcattggtgatgctaatgctatcaatatgtattactcacccttaggttcttctggattaacgcaaattggccctagtccagatgttagactaaggatgcgtctctcacatgatagaggaattcgattgagccctggtagtcttgggcctatgtctgttggagccagtccatcacagtttaccccaccgaactaccatatgcaaatcccagctaattctactgggacacatggttctggttctcctgcaagtggagtcattcatggttctccgttaggaaaagctgcagcagtgggcccatacaacatgaggagaaacttgccaatgccaccacatgattatgtatctcagcatggacaagggcgttttagagatggtgtcagctttagtcattctgatgcctgtgctcaaggacatacaggccactctcataatgcagcggtacctagttcttatcattctggttggagaccaaaaataggttcaaggagtggtatttccttggaggcctcgtctagtcatgtgccttcgaaggctccgtcacaatcatttgacttttcagcttcatcgacacttgatcctgctaattgggaccctaattatagtgatgagtcactattgcaagaagacaattcactgtcagctgatctaagcagcaacctccactttggagatgcaactggccaagaccacatctttgctacatctaaccctgtaccgacaaaccaaagaggagatcaattatttcatgtgtcctctcaaggagtgagtgcccattccagtgttctcatcaactacggtggttacaaccctcaaaattatcctcagcaaaatgcccgtcctcgtcatggacagccaattctccatcagcgatataatcaggcaacttccagtccaatgcggccaatgggaagccatcacaatgggcagcctgcgtggcctagtagttttggcatgggcgatggagtgccctgggggtaa

SEQ ID NO: 9287 - DNA, 984 bp, Zea mays
  Peptide Sequence Number=SeqID_51066
atggaggagcacatgggaagacgaacagtcggcggcctgctattaaccaagggaggatcaattcttctcttcagagaggacggttcgcgccccagggccaagaactgctgctcgcgccatggctgcagtggtcatcattctgttggcaaagccaaaggcaaggaggtgcacagggcagcggtggccaatgaatcaacaccggctaccccacggagaccaaagatttgtaggaatcccgacagaatgccaccacatggaaccagtgctccaggcagcatcagcaaggatgcaggaggctcttgtagcgaaaccggcaacaggtcaagagacactcccggtcccgggcgtgatctactggctcggctcaaggagagggtcaacacatcaaggaaacggtcattgaacagggagaacagcccacagtcaccgagtggattcactgctagttccccgagcaacagtcgatcagtctcgctctcaaggccgtcgcaccgggcagcttcgagggtaagaagagctgatgaaggtgcaaatgcaggagctgacagtgtgcacagaaatggtgctgggggtgctaggaggagttcacagaggggtgacgcaggcttgctgctagttgagcagcaggtagcaagaaaccatgtgccttctgaagggtttctttctgggttcatggcgagatacagaagcgggcttcaggaagggctttcgtccctggacgacagcgtggaggattcaaatgggtacttgcgctttgatacgggtggaattgaagagctccagaactatttaatattcagcgatcggcacagaggaatgaggatggatatcgacggcatgtcctacgaagaggagtatttatcgggtgaggatgtgggcaagatggcgtgtaaacactactaccacctttcctgcatagagcactggcttcggcagaagaaccggtgtcctatatgcaaatctgttgccctgaaaaccaagtag

SEQ ID NO: 9288 - DNA, 303 bp, Zea mays
  Peptide Sequence Number=SeqID_51067
atggcgtggtggcggaagaaggtggtgtccccggcgcgccgcgcgtgggccgccgtctccacccgcgtccgcgcgcgcaacgcaggcagcagcggcagcatactgaagctccacgaggacgtgcagacctgtggatacagggacgtgcaggtgatgttcgacatcctcacctcggagctggaggcgtcaacacagcgccccgccgtcaagcaccaacaccagcagcagcagcgcaagcggcggccgccgccgccgccgtggcccagccaccgctcatcctccgtgatcgcggccgcgcagtag

SEQ ID NO: 9289 - DNA, 300 bp, Zea mays
  Peptide Sequence Number=SeqID_51068
atggacccgtacccgtacccaccgggtatccgtcggcggggcagcgggctgctgcctgctggagtgctgggcgagggcgcggggctggggcctggccaccgcggcgccgcctgggagcctggacgggggcgcgcggttggggcttggggcctggccgccgcggcgccgcctgggagcctggacggggactgccgcagtgccgcgtgccccgcgtggccgcgtggggcgctgggtcctgggctcctggcctccacctccagggaaggctgggacgaggacgactgggactctggcctctag

SEQ ID NO: 9290 - DNA, 498 bp, Zea mays
  Peptide Sequence Number=SeqID_51069
atggcggtggcaggcgggcaggagcagcggccacgtcgtcagccaagctcacgtcccatccagggacagcgagggagccctctctcacggcgtgaagacaacgcgctcgtgctccgtccctcgaacggctcgcgcacgcacaacggccgccccgccaaccactcgccccgtcgcattaactccgcggcgggacaggcggcgcctctgggaccgggaaagggggataccccgaaaaggatccttccccgtgaaggaaccaggctccgagcctccctactgatcagatgttcgaaggctggcccctcggaagggttcgacaaccgcctcagatcacgtgggccctacacccactactggtcagaggttcgaaggccggcccctcggaagggttcaacgaccgcctcaggctactcgggctccgcgcccactactgatcaggggttcgaaggctggcccccgaagggttcacagccgcctcagacgtcgagcgagggatga

SEQ ID NO: 9291 - DNA, 353 bp, Zea mays
  Peptide Sequence Number=SeqID_51070
tcgaaccaggatcaagcggccttactggcccatttaaccaaggaatcatgcagccagaattgatgtgcaccattgccaatcccgttgatgttttgcacggagctattcacgacgcgtcaacaatgaaccatataccttctatgtgggaaggacttcagaatatgcctcagatgaacttcaaccctggcgtggcagccgatagcggcaccaacaactctggctccatgaagatcgagcagcctaaccattcatgccggtttccttctgttgcttccatactgtgcgacacattgtttatgaagcttgttggaactagggaccaggtgctgaatgctgatgggccaacatactag

SEQ ID NO: 9292 - DNA, 891 bp, Zea mays
  Peptide Sequence Number=SeqID_51071
atggcttataatggacagtatgggtttggatcttatggcatgggcttagaagataaactggggttgtatccatcttcatctggtacactgagtcaggacatccagatgagtgaagagcatagcggagttgtgaagaagaggaaaggagtggaggactgtgtcacattgttgcacgatgcaggtgatcaacaaacaaaaggttcgcctcagccagaaaggaattcagtggaggaggggaaccgaaagatttcgcccaaaatgcaaagcaaggaagattcttctgatggtgatggtactaaagaggactatgttcatatccgggcaaagcgaggccaagccactaacagccacagccttgcagaaagattgaagttaatgaaactgcagctgaggagaaagaagataagtgagaggatgaagcttcttcaagatcttgttcctggatgcagtaagatcactggcaaggcagtcatgctcgatgagattatcaactatgtgcagtcattgcaacgacaagtcgagatgctgctttcacaagacagacatcttgctttctatggagtcgaaccaggatcaagcggccttactggcccatttaaccaaggaatcatgcagccagaattgatgtgcaccattgccaatcccgttgatgttttgcacggagctattcacgacgcgtcaacaatgaaccatgttcatatatattatctgattgaagaggtgatgggcctctgtgaacctctaatgcagataccttctatgtgggaaggacttcagaatatgcctcagatgaacttcaaccctggcgtggcagccgatagcggcaccaacaactctggtatctatatgatcctctctattctcttccctgaaaaatacaaatgtccctag

SEQ ID NO: 9293 - DNA, 1290 bp, Zea mays
  Peptide Sequence Number=SeqID_51072
atgacgaaaaagtttgatgctgctggcgagggagcgtgcctcaagagatacactgacccctccttcttcagcgctcactctgccaaggttgatgagcaaggcatgctgaagcagcatcgtcggcaagcagaagcagcagcagccaacaggtgccgccctatctatgttcctgctgatgcagcaaacagctgctcacagggtcgaaccttcacctcaacagcccaacatggaacagaagctgcaagaagtagtcacgttgttaccacatcgaatgctgcggctcttagcagcagtgccacggtgaaggcggtcaggctgaactcagcatcagaggtgaaaggttgtgagagtaatacgacgaggtcgaggtacaaaggcaagatcgcctcaagagtcagcagcttgccgaggaagctcttcatgaacaccaccaagcatcacaacgaccgctcgcgctcttatcgtgcaggtagtagcagcctccgggtgacccaagccactggcatcggggattgcagccctgaacttgaagccatcgccatccccgccccagcagctgactccaagaacctgctgctgctgctgccaggaagtggtcctgttctggagccacctgacaattcttcttcttctgctgctgaagacgccaaagtagatacgccacttgcgcctattccaccgatgcagtggctgtcagagaaagggactccacctgcatctcctaaacacagaacaccatgtttccagcaacaatttggtagcagtgggcaatctgatgagaagccaagccaagagcacgaggcttcagacgacaacagcaatctgctgcaggagagcgtgttcttctctgcggcacaagagctagcgaagatgtcccctcctcctccttgggtgccaaggcccaaatatccactgcttgatgttaaggcagttaaggcagtcttccaagctgaaaccagcttctggagcgagctctcatgtgactgggactgggagtcctaccaacgccaccattctgaacagagcagatggcattcggcagcgtctgagtggagctataaaattgatcttatcattgatgaatccaagcagcaaatggcaccgcctatctatagtgttaaaaaaaggtcaaaacatacagctgttttgttaacaactgattcaccgccgccagcttcagaggtgacaccgccgccaaatccaactccggtgacacttgattttcaggtggctggctgtgctacaccctggatgaaacccaggcggtcaaaatcggctgcagccggctag

SEQ ID NO: 9294 - DNA, 513 bp, Zea mays
  Peptide Sequence Number=SeqID_51073
atgaagaaaaagaaaagaaaagagttggctgtgtacagccagaaggctgcttcggtctggagcaccggactgtccggtggtgcaccggacagtgtccggtgctcagcctcaagcgcctcccactcccgcaaaattgctgcctcagtttcactaaggactcggtgggcacgggataacatgcaggggagggggactggcgcagcttcttgcttggcacccgaacagagtcgccgcccaaacaccacctccatctcctccgaagcaggcggggtgttggagctggacgcgcctcttgcgtcacccccagtgttaggagtgggcacggatcccccagctgggatctcctccgccactgcgatgcctcctgacgctagcgccgctgacgccagacccccggctggggcatgggaagccgctagcgctgccttggcagcagctgggggtggaccgtcggcaccactcagcagattcctgctactgagagccagacccgtcggtgggcctggtatctag

SEQ ID NO: 9295 - DNA, 216 bp, Zea mays
  Peptide Sequence Number=SeqID_51074
atgaggcatccacatctgcaccagacaggaacaaaaggttcatgtgagcacacagcagagtacaagggggacaaggggcagaaggaccacaagggggacaacgatgtcatggggaactaccagcaggctgcagcacctgctgtttggaaacaactaataccaagactgcaccaccaagactggcttttgtcttttgtttatattctagaatgctaa

SEQ ID NO: 9296 - DNA, 414 bp, Zea mays
  Peptide Sequence Number=SeqID_51075
atgaagtcgtggaggaggacttctaggagttctaagagtacgatgagttctaggcgtgggtgtgacagcggtccatcgccggccaaaccccaaaaccctaccctgggcgccaggaatcgatccgaggagcgcaaaccactgcagatgtggagtgagatctgtggggtcatcataccggagtatttcgtgacggtcgagcgggtcaacggcaggggatttctcggcgtaggtttgaactccggcgagcaaacactggcacaccagtcaccaatcacgcccaggaaagagtggcacacggtccacgtggtcccgtgcggcgcaatggctgagctccggaccctgagcgccctcgtggacgaacgtcggcggtggcgacacactttcacacccggtggtgttaatttgtgcggctag

SEQ ID NO: 9297 - DNA, 420 bp, Zea mays
  Peptide Sequence Number=SeqID_51076
atggtggccactgatgtgaaagcggatctggatgtcgattgtgtctctgctgggattcttggagcattattcgaaggctccaagcgtatcgaagagtcggcactcttccctagttctcgttggagcaccgacgcaagagtatcactcccccttggtcctcgcaagaaccaagtgatcactatgagagaccctgcccccgggctggctggtcccactgtcaggagtcgcaccggacagtctgtctcagatctaggatctgctgtagaagctggagctggtaatgactctgacgtaggttgcggtgcaggatccgtcggagctggagcagtcacggacaccgtcacggcagcagtgacatctgctactgaatatctgtctatcgggcctgctctgctgccagatgagcctactgctgagtaa

SEQ ID NO: 9298 - DNA, 516 bp, Zea mays
  Peptide Sequence Number=SeqID_51077
atgcaggcgctcgggaaagaagataaacagtgggccatggtcccacctggcagagtgtgcgagcaagagctgcgggacctaccaaccagtgaaacaaagagggcccaaagggacctagcagctgcgccgctctttagcaccagaactcatgagtccttcttcagggcgcagttgttagctcagattgctttgagggcgcactggcttttggatctccctctgtttctgtcagcggtcggttccgagtcagagggtcacctctcttatctgccagctcctgaggatccagttccagcgctagacccagtagcagatatcagggctgaggatgagtctatcagacagttcgaggctcagggtgccatggcagattcttcttctgatgatgatgaggacctggggatcccaccaccgcctcctgtgccacctcgatcccatgatcacgaggccgatagttccagtgctgctcctgctgccactccagctattgaccctgccctggctgctattctttag

SEQ ID NO: 9299 - DNA, 612 bp, Zea mays
  Peptide Sequence Number=SeqID_51078
atggccatcggcgacgcctcggcggccggtagcctgctggccttctaccacccccaactgcgctgcgcctggatgggtcttggggctgccggcgccgccgacagctctccggcaagcgggggccggcgcctggccgccgagggctgcacgagcacgggggcgaccatgtccgtcgccgcgcacagcgcgccggcggtgtcgtcgggctgccgatgcagcagcagctgcggcggcggtgggcaccgccactgctgctgcgtcaacgtctacgtgaacaacaacgtgcaaggtgtcaccaactccgtgctggtcggcagcaaggtcgtcgtgaggatgagggacgccgggacgcgcgtcgcccgccggcaacgccagccgcggcgagacggccgccgtgaggggaagccaagctctcggcagcagcgaaaggcgaagacgacggaggtttggatcatcgtcgccgtcgtgtcgtcgctgttcgtagcggcagctgcgactgcggctgccgtgctttgtacgccaatttgttcgtttgaattcgctagaaatttagcaatggcgaaactgatttgtgccattgttgtacgcaagggagagccgacagccatataa

SEQ ID NO: 9300 - DNA, 201 bp, Zea mays
  Peptide Sequence Number=SeqID_51079
atgacctcacaccaaacttcgtttgggcgtcttgacaaggctataggccaaatacacgatccactcagctaccaatttttaaaggaagcccaacttacatggctgcaacgcagcaacctacaggaagccaagtttcgtgctaccagagtagcgggcaaagaagccatagagccatcctctgggctgggcctatacagttag

SEQ ID NO: 9301 - DNA, 1239 bp, Zea mays
  Peptide Sequence Number=SeqID_51080
atggcgtcgtcgttcaagccgcacgccgcaccgaagaggcgcgccctcgccacgttcaacatcggggctctgcccctggacctcctcgtgtacgagattctgctgcgcctccccgccaagctcctctgccgactgcgcacggtgtgccggttgtggcggtccatcctctctgacccgcacttcgccgcggcccacgccatgcggcacccggggccgctcatcatcgccgccatcgatgagagacccgacgtgcacgtcaacatcatggatctgtcagggcaaatcttaaagcaggtgcgcggcgtgccgggtcagagagtcgtgagcacggcccttgacctcgtctttgtcaagaaaaccgatagcagcagcagcagctaccgattctgcaacccgtttagcggagacgtgcattacttaccagatcaattgctcaacccagcaactggagctgtgtatcaaataccaaacagcttcgccgaagaacacatagatttcacatcgagctttatttcacagtccagatatctgtttggtcaggttagcagcacaggggaatacaaggtgttccggaagctttaccatctttccgttcagtttggaggcaggcagctgctcgagatctgcacagtcaacggtagcaaccacacagggtggagggcagtcacgcccctcgaaaaaaacattcagtttggtgtgttcaccagtgtggtaattaatggaatcatctactcccaatgttttgatccgcaccattctatcacttatgattgtcgagctactgaggaagacttgataattacatttgacattgagactgagaaatgggggccatttatgcgaggaccccccatcagcttttctgatgctgctgctcaggtgttcaatgaccttcggcttccacctataaagcagctaacattagccaatctgaatggctctttagctgttgtgcatggcccagctcccagtatggacatttggattctgatggactctggtaagggtctctgggtcaaacaatacatcatacagttcaaagagtatgccagttttcaatatgtgcatccattggtggtattacgtgacggaagggtggtcctatataaagaagacatgcagcttttacagatctatgacccaagaactaacacactcacagattccgtggaggtctactgttctggtttttattggtctatatgtaacttcattaatacatgttatttcttccattaa

SEQ ID NO: 9302 - DNA, 189 bp, Zea mays
  Peptide Sequence Number=SeqID_51081
atggctctgggcgagcccccgggcggcggcggtgggcaaagccgggcgcgggcggctcgaggccgcggcggcggcggcgcgctgtgcggggtcggggcaggctcctcgtgccggccgatctaccaccgctaccgaggaaagcgcgaggccgtccggcgccggccggaatccaccacgatcctatggtaa

SEQ ID NO: 9303 - DNA, 147 bp, Zea mays
  Peptide Sequence Number=SeqID_51082
atggcagccatcctccattgcttcctcccccaagatctccccctacgcagcaaggatcgagaagaggaggagcacgtcgaattgaagaggaagagaggatcaaggaggtggtggatcatggggattaaaggattagaggttgtatag

SEQ ID NO: 9304 - DNA, 534 bp, Zea mays
  Peptide Sequence Number=SeqID_51083
ctgagcgaatctagagattcgtcgctctcccgttcttccttctccttctttctctccactcctctctctgtggcccctacgccgcgccgctcgctctccgccgccgcctccccgagccagcccgctcgccgcgccgccgcgccgccgcgccgccgccccgccgcgccaccgcgccccgcgctctccgcgcccgcgctctccaagcccgcccgctcgccgcgccgccgcgacgcgcgctcgctcgcggccgccagccccccgcgccgccgctgtccgcctgctcgccgctgtccgctcgccgctgtccgcccgctcgccgctgtccccccgcgcccgctcgccgctgtccgctgtccgcccgctcgccgcgccgccgctctccaagccgtcagcccgatcgccgctgtccgcgccttcgtcctcgcctccgccgtcctcgcctccgaggtcttcctagccgttgcgggtctgcctcgcgtcgccactgcaccgacccgccacagccccactagcctgactccaccgccaccctag

SEQ ID NO: 9305 - DNA, 504 bp, Zea mays
  Peptide Sequence Number=SeqID_51084
atgtgctcctgttccacccgccgcccaaccgaaatcctcaccagtcaccaggaaactcggactcccctgtcacgtgggtcccacacgacggcagtccctgcaagctcggcgatatcaaaacagaaaccacgcgattctggccagccgcggagtccggggcttgattccaacaaaccccgctgtattccatggcgattcgatttggtgtcttcgatccaagcccttcggactcattcatccatgggactatataatctagagcaccccctagcagtcttcatcacggaaatagcgctgggggacttcgatttggaactcgccggcatgaatgccgccttggcatcacccttcgccgccgcgcttgggtaccagggtgaagacgcggatgcgccgtccgatcaggatcgcgtagcggggattggtctgagagtatacctcttcggtcatttaatcctagccactgaatctttggtcaatggccaagataagatcaccacagaatga

SEQ ID NO: 9306 - DNA, 225 bp, Zea mays
  Peptide Sequence Number=SeqID_51085
atggccagggcgcttcacggcgcgatactcggtatggacccatacaccctgctcgccaagtcatcctttacgcgtagctcggtccaatttaggtttggcgctcgggaacggccaattggatgtctcgccggcgtgctccaccacgagcaagccacggtggaatctgaggttcatcaagtagaagtagctgagcaggagctcattgaaggcaagttgtgcccttga

SEQ ID NO: 9307 - DNA, 336 bp, Zea mays
  Peptide Sequence Number=SeqID_51086
atggcttatgagtttgagatggctaaggttgctttagaggaagtcaagtctctcacattttttattggtacaggcaagctttgtcccatcgacggccctcagggcaagatcgaggcttcacgtgatcaagcgaaggtgtttcatagtggaggaagtgcgtgggagttctctgcggcgctgcaatttctcgttgtcgacctacgctccgccgcagatccgccttcgccgtggccggatgctctccgcgccgagacgaccgcgatgttccgccgctggccgttggcggcgccgccgtctaacggtgaagggattggggagaatcgcgtgcgccgttag

SEQ ID NO: 9308 - DNA, 3030 bp, Zea mays
  Peptide Sequence Number=SeqID_51087
atggatgctccccatgaactacgctttgacaaagtattgtacattgactgctctgaatggaaaagtagaagggaaatgcagagagcaattgcagaggaactgaaacttgaccatggaacaatggccatgtttgacaaccaggatgaggaggatgactacgatggaaaagataaagaatctagggatgtgatacgaagtattgcaatggatatttatcgaagactggcggactgtaaatttatgatgatttttcttaatggaagtgataacgagatcgatgtcactagatttggcatccctcatataacggaattcggtaaaaacacaatcatttggacattcaagagaaagttgttgacgattaatagccgtcatgatgagatagcagaaaagttaagatacagccaccttttcctctatggatcaattgtcgcaggacctaatctggtaagtgagcaggatttttgtgcattggtgcatggagaggctactaccatagttgctcgccaccaatgcatgctggatatggatgcaacaatggtgacagaatgttgcctctttgagctatccctacattacaatttccacaacatcactagattgggttgggatgctcattcttctaactattggatatgtgctggaattatagcaggcaataaaaaaatggagatcgcaaatgcattgcatggagagataagatgggagtgtgatgctcctctacttcaacgtttgcttgaagaattgagtcctaccttttcagtaaagaagattacaaagcctctagttgtttctatgaggtgtctagttaaagatcgtcattggatttcaatcacctcccaggaacatggattagatggtgtccaagatataccagcaggagcatcggcggtgttcttggcatttcaaagaacaggtcagctagaaccatatgcaagatcaggtcatccaacatcacttgaaggacaatattccccacccatactgccacctggcatattcaaatattctaggagcattgctgtgctggttctctcttattgtgccttcagttttgcatcacctcctttcctcatgtgcaatagcctaaggttccttggtttggacaagtgtaagcacaagccaagtgaacaatattgtgatacagatgcagagtggaccttcttgctcagtctatgggttctcgagatacgatacacagaatgggatgagattctgtccaaagaaaagatagatctcatgagtaacctgaaggagttaaatatagagggagtttggagctggcagtgcatcaatcaactaaggaaattaataccccacctttacaggttaaggattaccaatgctaggatttatcaagcagaaacagtagatgtagatgactcatttatggacaagggaaagctacagttactcgatctgtctggcaatagggagatgaaagttgtaccaggtagcctatcaaaggcaagtagccttgaggtgcttctccttgatggctgccttgggcttgaatatgttggtgcgcttccaccatctctcaattcctttagtctcgatggctatggagtagcatcccattggacaccatctattaataatctactacctcctgaaaatctgcgtccagcttctatagatgtgagggatgccaagatctccaggatatgcctagagggctgcacaggattggagaatttgttcctacgtgggctacctaatcttgtggagctggacctatcaggaactggaatcaagatacttgactttacaactatggtgattcaagtcccatgtctcaaacgattatttctgctgggctgtgagcgccttgttgccataatattggaagagaagtggccatacgatatagatacacaactagagctcctatgcattgacacacgagctgagacgggatattctcggccatgtattgaccataccaaaaagtccttcaagctacagatacatgccattctttcggactcaaggcttgctcggtccttgttctcaatcatagactaccacatttgcaacaacattgtggatatttactttaatatccttgtcaccgatgtgcccactgtgtatagtggggaggatgtacaacctgaagctgcccacagggtggttgcacttgcacagtatggtgatgtccctgccacggctggcgatgttcccatgcaggatttcccaccagctccaactagagatttggatcgccacgtaggaattgccaaggtgagccgttgtctggactgggtacaattcatagagttgtctaactccctgcacctgcatgacaatgacatctcaaccggtgtaaacataaccctggccggcgaattctactacctcaggcaatgccgtgtggagaggtgccccaagttggatactgtctttccaagaacagatgacttcagggctctcgagacgatttgggcatcggatctcctgatggcccgctgcatctggggcaaaggtcgtccgtcttacatgtctaacttgtttgacgcactacggcacctcaacttgcgtgcctgcccaagactccagtttgtgcttccagtctgggtctcctccttccccagattggagatgctccacatcgccgactgcacagacctgaggcatgtattcgtgctggatgaagagcaccgagaggaacgcatagcgttccccaatctgaaggccatgcacctgcacaacctcccatcgttgtggcagatatgtgaggcctcgatgctgatgctggcgcccgcgctcatgaccatcaagatcaggggctgctggtccctccgccgactgccatccatggaaggccgtggcgtacacatggagaagccgacggtcgagatcgagaagtatgtatgggatgcgctggagtgggacggggtggaggctggccaccatccctccctcttccagcagccacgacactcacgctactacaggaagaaatcgctccggggatctgtcctcaggtactcttttcccgctagcattctttgtcctgacgcacgctaa

SEQ ID NO: 9309 - DNA, 1176 bp, Zea mays
  Peptide Sequence Number=SeqID_51088
atggccttatcgagtcccttcgccgcctccaccacctccggggctctggtctcccccatatcgcagcggtatagtggctatctggactccggcatggcaggggtgcagtccgtccgtcgtgagcgtgtagaggtagagatgacctgcaaatggtcaaatcaatcaggccacccacccaaggcgcaacgggccaacggctacaactcccctacaagtgtccggcgccccttggtctgtctctgtccaccaccaccactagtccacgacggccgccagccatttcgccgcggcttccacttcgtgttcgttcccccaattgcgtctcctccttccaactccacgcgcttcaatcccacaaccgcgtcgccgtcccgatcccctcccctcccctccctttctcttccatataaaaaaccctcaccaggtgcatcaattgaaacccaatccagccccatccgtcgattggaacccagatccgcaggccgcagcacaagagggtgggatcggatcggatcggagcagagggggaccgaccagaatccgccggcgaccaccatgggctccgcgagccgtgccgtctcgtgcctgtgctgcccctgcaagtgcctggcgtgcgggctcctgagctgcctgtgcagcatcctcgtctcgctcgccgtcgtcctcggcgtcgtcgccctcatcctctacttcatcttcaagccgcacatgatcgccgccaccgtggactcggcctcgctctcccagttcgcgctgtcggcgtcctccacgctctcctacgacctcaacgtcaccatgacggtgcgcaaccccaacacgcgggtggggctctactacgacgacgtccaggcgctggccctgttcagcgaccagcgcttcggctacgccccgctcgacgccttctaccagggcacccaggcgtccacccagctcagccccgggttccgcggcacgcagctcctccagggcgacgtcaccgccgccgagttcaggcaggagcagtccgcgggcaacttcgccgtcgacgtcgacctcaacgccaagctcagggtgaaggtctgggcgttcaaggtccgcgggcccaaggctaaggtcacctgcaagctctccgtccccgcacccggcgccgccaacgcctcgcccttccagcccaccgtttgcaaagtctggttctga

SEQ ID NO: 9310 - DNA, 111 bp, Zea mays
  Peptide Sequence Number=SeqID_51089
atggcgaggctggcggtggccacgagggcgttctccgcttcggcctccgtcggtgacactggaggcggggtcggcgacaacatggggaggaagaccacggcgacacggtag

SEQ ID NO: 9311 - DNA, 1038 bp, Zea mays
  Peptide Sequence Number=SeqID_51090
atggtagtggtggccgccgcggccgcacgcggccgcgctgtaaagcccctgttcctcgtcctcgtccaccacagccgccccgcgccccgcctcccccgccgaaccgcccgcgcccggccgctgcgcttcctctcctgctcgacctcagcgccgccgctgttcgcagccgtcgcatccatggactcgccgccccagggttaccgcaccaacgtcggcatctgcctcgccgacccatccctcaccaaggcaagcgcgccccctccctcgagcacgatcctgctcctctcccccacgcgcctgcgctggattttctcggcttctaggatcgacattcctagcgcgtggcagatgcctcagggtggtatagatgcaggggaagaaccaagggcggctgccttcagggaattgagagaagagactggtgtcacatccgcagagatcgtggctgaggctcccgtctggttaacatatgatttcccgccagatgtcagaaccaaactgaatgccaggtggggaaccgattggaaaggccaagctcaaaaatggttagccccgctaaatttcttcagctgggaactctatgaagtaaagtttttatttaggcttactggaaatgacgatgagattaaccttaatggtgatggatctgagaagccagagtttggtgaatggacatggatgacacccaaggaagttatcgaaaagttgctgtgctccgtcttcgctgcagaatccagatcaaatgtggtggtggtggtgctgctgctgctggctacacgaatgtggatagcagcatttgtcgtccttgaatgcctgccgagaaagatgggatggcattacatgtttccttcctggagaagaggctaccgaggccttttcttggtgacgtcgatgcgccaccagccccagtcactgccactgcccactgggaccaaccccgcggacggaggaccacttgtacaccaggtcgatcacgaccataccgtgggctggcctgcagatcttcaagtatacgtgccagtctttatcttggcataa

SEQ ID NO: 9312 - DNA, 180 bp, Zea mays
  Peptide Sequence Number=SeqID_51091
atgaaacagttcaagactgaattggaccgtcggaaagctgagactgttgagcgtacaggctttcatctacagtcgtctggggctttgtcctctgcagcacccacagctaagcaatggtggggtggctttgcatcagtcttgccaccggccacacagtgctttgctgatgtccggcagtaa

SEQ ID NO: 9313 - DNA, 774 bp, Zea mays
  Peptide Sequence Number=SeqID_51092
atggtcaggaagctcgcgctggcctccctcttcttcttcaacgccagcagcgagggaagccagcgcctttcctccacgtcgtccacgtccgccgcctccttcagctcggcggtgtcgtggcagtggccgtcttgcacgcaggcgaggacgcgctccttccgcggcgacaccagcccggagatcgtgtccatgcgccacgacaccagcagcagcaagcgagaggagcaggaggaggggccgtacaattacaacaacaactacaagacgagcatgaacccggcctacgtccacgacgactactcggccgccgacgctgattgctactcagccgcgacccagagccttaccctttccaacgaggacgaggcgatcatccacggcctccgctcctccactacccggcggatcctgttcgagcccgagtccacgagctccatcatgaagaagacgaaaaagaaggcggcggcgttcgacggtgccacggcgctgtccatcgagtccgctgacccgtacggcgacttccggcggtccatggaggagatggttctgagccacggcgccgacgactgggtctggctggagaagatgctcgggtggtacctgagggccaacggcgagaagacgcacggcctcatcgtcggcgccttcgtggacctgctcgtggcgctcgcctcctcctctggtcccagtcccgccgtctgctcctccagcttcaagttgaagcagagccgccgtcatcttcagctgtctgtcaggacgggcgaacaccactga

SEQ ID NO: 9314 - DNA, 645 bp, Zea mays
  Peptide Sequence Number=SeqID_51093
atggttggggcagccatagcgtgtgctagactggggaggctgcggcctgggagggaggtgcactgtgtgttcttgcgccattttgaggatgataacttgttggtatggactgcattgattgatatgtatggcaagtgtcggagggctggggttgcgaggaagttgtttgatcggctcagaatgtggaacctggtatgctggaatgcgatgatcatagggcactgtgtgtatggtgagcctggtgatgggatcaaactgttccaacatatgatcacaccagggaatgtgcagccagatggagtcaccttcattggtgttctctgcgcctgtgcccgtttaggcctgttgcaggacagaagggcatattttaatcagatgagcaccgtgtacaacctcaagccaacatttgcgcactactggtgcatggcaatctttatgggagcattgggtagattgcttgggctgtgtcggttccggagggactggagactcggggaacggatagctctcaggttgatggagcttgaaccaagcaacaatgttcactatgcactgctttgcaatgtgtatgctgctgtagggagatgggaagaggtttacagggtgaaggctatcatgaaagagagagatgagaggccatgttga

SEQ ID NO: 9315 - DNA, 1863 bp, Zea mays
  Peptide Sequence Number=SeqID_51094
atgccctccgcagctaccgccatggacaggccgtcatcccgtccatcctgctccacctccaagccccggaagacctccccgtccccttccccatcaccggtgacggcgcctaagcccaagaccgttggttctagccgccgccgtagcccgctatccgacatcaactcaagggacgccttggccgcgcgcgagcgccttgggtgcttccgctttttcctcccctccgcctccgcctccgggtccagggccaggtccgcgtccaccccgcggaccccgaagcgccccgactccaagccccggcccgggaccaggaggccgaaccagctcccggataaggaatcgaggactagggggcagaaatgtcccgggaaagagccgacaatatgtggtcgggagccgatcggtgcgcgtatcaacaagatcgggccggccgccggcaacaagcagtggctggcgaaggacgagcagctggatcagttccaggccttgacgccggagaagaaagcggattccgaggccacgccgtctaccggcgcgacgccgcctgtccacgcgtcgatctcgcccgaggtggccgcggcgtgcgggtccgcgacgcccgcgtgcttcgcggccggccaccacgttgtccccggcgtcggggaccgccgcaagtgccggcctcggggaatcctggcgatcgcgggggaggggttgactagccaggacctcgacgaggagccgtctcgcgcgtccatccactggctgtcctcgccgtcgggggcggtggcctggacgtcctcgacgaaatgtggcaacgaggaggcgtcggtgaactggctggtgtccccgcgcgacgaaggcggggtggacctgctcgaagatgagatcttcgtgcccagatgctcctcggaggacgcgttctggcgcttctctccggactgcactgggctgttaggctcgccgctgctcagcggtctgctggattccggcactccgtcgtcggaaatgtctggggcaacgccgtcgtcagggtttctcccagtgcagaagactccaagcagtggcgatagcatcagtcctttctctcttattgtcaagcgagcatcggagtcctctgccagatttcggactttgtgtgcccagcagggactgggcagcagctaccggtacgattcggtggcggatccgacaccaatttctggtgagtcatggcctgaaagtgttagcaattgtacacggtcagggttgacaaggacaggcagtcgtcccctgaagatgatggatccagtgatggaatgtcttgagatgatgagtttgtctccaaggcctggggacgatgactatgatggaaatggcacactgcctgcaccattgcctcagcatagcttccagtttgcaggggatccgacgcctctggaatccatagacttgacctcttttaagaggtctcctcgtgacatagaattgaaggcaaaggacacaagtttccggaaatcagtcatggaagacactcggatctcttggcgggaggggcttgtcagcagaatgtttgatatgggtgacttggattgctgcaaatggctgtctgacgatgaagattcaccagtgtttttgcacactgacaaggctttggctgatggtaccaattttgagccatgtaatggttgttgcctgcatgagggtggcgaccgacaggaagcatgcggctttggctctgttgagctcagttgcattggtgatgaactgaacaatgatagcatcaaggcctctccaaatcctgttacagttgcagagtccatgaatgcagaaggattcgagcttgtcacatcggatgactctgattggactctcttctacaagaattacttgtttgaatcatga

SEQ ID NO: 9316 - DNA, 117 bp, Zea mays
  Peptide Sequence Number=SeqID_51095
atgatcgggtgggctaaggtgactcactgcggcgtggttaaagcaccaaggcacgtggcgcaaggtctcgagcgcggtcttgaagcgcttgatgataagcgccttcgtcctcgttga

SEQ ID NO: 9317 - DNA, 484 bp, Zea mays
  Peptide Sequence Number=SeqID_51096
atggtgagtattgtccatgttgccacaaagaccgtggcaggacgcaccgtagagggcgaaaaggatcaaccaaaccctctaatccatttcggcatttccaacgccttcgccctaccagccacgtcgcttcgaggccgatcgaccgagcagctggtggcaatggcggcggcggcggaggtcgtgctgctggacttctgggtgagccccttcgggcagcgctgccggatcgcgctggcggagaagggcgtggcctacgagtaccgcgagcaggacctcctggacaagggcgagctgctcctccgctccaaccccatccacaagaagatccccgtcctgctccacgccggcaggcccgtctgcgagtcgctcgtcatcctccagtacatcgacgaggcctggccggacgtcgcgccgctcctcccccaaggacgacccctacgcccgcgcgcaggcgcgtttctgggccgattacatcgacaagaag

SEQ ID NO: 9318 - DNA, 2292 bp, Zea mays
  Peptide Sequence Number=SeqID_51097
atggaaggagagaacctagcaagtactgaaatcccagtgaaggaagctcttaaggatactgaaaacattgccgagcctgttaatgtcggaaaggaaggaaacaaagacgaagaagaaaccgccttggatggagaattcattaaagtagagaaggaagcactagatatgaaggacggttcaaatgtcgctaagccctcacccaaccagggcgatgagtcaactaccatcgaaagaagcttaagcaatccaggtagagaactacttgaagcccaagaaaagatgaaggaactcgagcttgaattggaaagagtgaccggagcattaaaggattttgaatcagaaaatagcagactgaaggatgaagctttgcttgcaaaggagaagttggatgaagtgggaaagcagtatgatgaacttgatctcagtaataaaaaattgcaggagcagatcattgaagctgaacagagatacagtttagagttagcaaatttgaaagaggctttccaagctcaagaggccaaacaaaaggaactcgctgaagtgaaggaagcatttgatggtctcaacatcgaaattgaaaactcaagaaagaggatgcaagagttggagcaggatttgcggagttcagtggaagaagcacggaagttagaagaattgcaaaaacaaagtggcttgcatgctgagtctgagatgcaacgagctttggagtctgagagattgcttgaaactgcgaaacttggtgcaaaagaaatggaagatcagatggcctccctaaaggaagaaatcgagggcctgtatgagaaggttgctgaaaatcagaaggttaatgcggcacttcaaagcacaacagctgaactttctgctgctcaagaagaattggcaatttctaaatcactagttttggatttggagcaaaggcttgcttcgaaggaagctcttatcagtgaattggctaacgagttggacttgaaaaaagcttcggaatctaaagtgagggaaaatatctcaacgcttgagaatatttttgctgcaactaaagaagatcttcaagtaaaggtttctgagttggaagatattaagttaaaattggaggaggaagtcaaagcaagggaatttgtcgaaaacgagatgaaggatcaagaaattcagctctccgtggtgaaagaagaattaagcaaagtgctaaaagaaaaagaagctctagaaatagacatgtcggatctcagcagcaatgcagcacggctgaaggagtcgtgcagtgaactcgaagaaaaattgaagctttcaaacgagaatttctgtaaaactgattctctattgtctcaggctctatctaataatcaggagcttgaacagaaactgaaatctctggaggagcttcatagcgaatcgggagttgctgcagcaactgctactgaaaagaatcttgagctagaggatataattaaggcatcaaatgaaacagaagaggttgcaaaatcgaaactgagggagcttgaagcacgttttatagcggctgagcagagaaacgtggagcttgaacaacagctaaatttggtagaactaaaaggctttgaagccgagaaagagctgaaggaattctcagggaaaatatctgaacttactaccaaattgggagaggccgaggaagaaaaagaactattaaacaaacaaatgcaggaatatcaggagaaggtaaatctgctagaatcagctctaaaccagtcaacaattaagaatacagagctcttgaaggagttgaaggtttctgctgagagaagtgctcaacatgaggaccgagctaatatgagtcatcagcgcagccttgagctagaggatctgttccagaattctcattccaaattagagggtgccgataaaaaggtcaatgagttggagctgttacttgaagctgagaaataccggattcaggaactcgaagaacagataagcaaattagaaaaggaatgcggagacacagaggccgagtccagtagatactctgataaggcatctgaacttacacacgaactcgaggcattccaagctagagcatcaagccttgaaattgcagtgcatatggccaacgagaaggagaaggaattgacggagtgcttgaatttagcaacagatgagaagaaaaagttagaagaggcgtcccgaggctccagtgaaaagcttgctgaagcagaaaatctggtggagatactgagggatgatttaaatatgacacaacggaaattggaaagcattgaaaatgatcttaaggctgctggtttgagagaaagtgag

SEQ ID NO: 9319 - DNA, 582 bp, Zea mays
  Peptide Sequence Number=SeqID_51098
atggaactcttagacgatgacgacgttaagacgatggtcacacggtattgcccaccaaggaaggtgaacactgaaccgattcggttgtttgttgagttagttgatgcggagcccgttgaaaatataactccattaagtcaacaacatcgagttgaaaacccatgtgaagattttagtgatcccgatttaaatgatgtcacggatgatatcaatgacgaacgagcgggtgatggaaatgatcacgcctcttcggtcggaaacccgagtcgtggcatcgtcatacgtaatgatcttgtggcccatatgtcgattgtctatcttgatatggcacatgtttccaagttccttgagtactcaaacataatacttgctcacctgatgttagtagttcttgaatcaaaagagttgttcatgggtcaaagattcacgagcaaagacgagtgtgccggtgccatcaagtgctatagtatgaaggtgtctgtcaactacagagtggttgactctaaactgacgatctttgttgatgagtgttggaagttgaaagaacggtgcaggtggagggtacaagctgcatttatctag

SEQ ID NO: 9320 - DNA, 2469 bp, Zea mays
  Peptide Sequence Number=SeqID_51099
atgccttgtaatgatggagtaaatgaaaatatggttgatattgtggatgaaacggcacgtagtagagatagtgggatagttgatacctctaaaagggctgttgtcggatttgaaggggatgcagaatttgagccacataatggcatcgaatttgagtcacatgaggcagcatattcgttttatcaggaatatgccaagtccatgggatttactacctcaattaaaaacagtaggcgttcaaagaaatctaaggaatttattgatgctaaatttgcatgttcgagatatggagtcacgccagaatcagacgtgggtagcagtagaagatcaagtgtgaaaaagacagactgtaaagccagtatgcatgtgaaaagaaggccggatgggaagtggattattcatgaatttgtcaaggagcataatcatgaacttttgccagcccttgcttatcattttcgaatctatcggaatgtaaaattggctgaaaagaacaatattgacattctaaatgctgttagtgaacggacgagaaagatgtatgttgagatgtctagacagtctggtggatatcaaaatgtaaacatgcttcagagtgacgtaaaaaatcagtttgataagggtaggcacttggttgtggatgagggagatgcccaaattatgctggaatattttaagcgtatcaagaaggagaaccctgacttcttctatgcaatagatttaaacgaggaacaacggttgagaaatttgttttgggttgatgctaaaagcaggaacgactatccaagtttcaatgacgtggtttcttttgataccacttatgtgaaattcaatgagaaattaccatttgcaccatttgttggggttaaccatcacttccagtctatgttacttggatgtgcattgcttgctgatgaaactaagcccacatttgtttggctaatgaagacatggcttagagcaatgggtggacaagctcccaaagttataattactgaccaagacaaagaattgaaggctgcggtcgaagaggtcttcccaaacacgcgccattgctttgctctttggcatattttagaaaagattcccaaatctctagcacatgtaattgggccacatgaaaactttttgcctaaattcaacaaatgcattttcaaatcttggactgatgaagagtttgatatgcgatggtcgaaaatgataactcgatttgaactccaagatgatgagtgggttcaatcattgtatgaagaccgcaaaagatgggtacctgctttcatggacaatgtctttcttgctggaatggctacaagtcagcgttctgaaagtatgaactccttctttgataaatatatccataagaaaattactctgaaagagtttgtgaaacagtatggggctattctgcaaaatagatatgaagaggaagctgttgctgattttgatacctggcagaaacagccagcactaagatctccatcaccatgggaaaaacagatgtcaattgtttatacacatgcaatattcaaaagattccaagttgaagtcttgggtgtagttggttgccatcccaaaagggaaaatgaaaatcaaggaactataccgtttagagttcaagactgtgaaaagaatgaaaattttatggtaatatggaatgaagaaatgtcagaggtttcttgtagctgtcgcctgtttgaatacaaaggttttctttgtcggcatgcaatgattgttctccaaatgtgtggtcgcacaagtatccctcctcgttatatattgaagaggtggactaaggatgctaagagtgggcaatcaacaactgaaggaacagaccgagtgcaaacaagggtgcaacgatacaatgatttgtgcaaacacgcaattgaactgagtgaggaaggatcattgtctgaagagagttataacattgctttttgtgtattggtagaggctttgaaaaattgtgtcaatgttaacaactcttgtatcagtgcggtagaatctactggccatgctcaaggtcttcgtgaagcagaagaaaaaaatcaagggagtcttgcttcaaaatcaagtaaaaaaaagagcacaaacaggaaacggaaggggcaatcagagccagctctcatgtttgttgatacccaggacagcttgcagccaatggagaacctgagctcagatgggataactcttaatggctactatggtgcacaacagaatgtgcaaggactggtacagttaaacttgatggaaccacctcatgatggttattatgttaatcagcaaagcatgcagggtcttggacagttgaactctatggcacccggccatgacagtttttttggcactcaacaaagcatgcatggtctgggacaattggattatcggccttcagctagtttcacttatgctttgcaggatgagtcccaattgaggtcaacacaattgcatggtggtgtctcaagacatccatga

SEQ ID NO: 9321 - DNA, 308 bp, Zea mays
  Peptide Sequence Number=SeqID_51100
actccggtcagcattcggcgagtgctcgggcaatcggcgccatcgcgccggccaccatacacggtggccagaaaatcctaaaaaggtgcaagtggcgatgggatggtggcaggtgcggcgcgacagtggcggtggcagaggccaagagtcagcagattcggcgctgtcaggaggccaaggtcttcaaggctaatcgagcaaataagtatctatgcataatggtcgacctgttgtcgtgcccaagaaatttgggggaagataaaattgaaaacctaaaacctgaaataaacaagaaaaataaaacgtga

SEQ ID NO: 9322 - DNA, 1293 bp, Zea mays
  Peptide Sequence Number=SeqID_51101
atggaccacccacttaagggtgcattactggcaagattatatagtactgagccatctttgcagagagatgattcagatttaaaggatggcaatgggtttaaggggcatgatatgctggctccattcacagctgggtggcagaccactgacttacatcccctggttattgaaaagtctgagggaagctatgtttatgatgccaatgggaaaaagtatctggattctctcgctggtctatggtgtacagcattaggaggaaatgagcctcgacttgtggaagctgcaactgctcaattaaacaagttgccattttaccattctttttggaatcgtacgacaaaaccttcactggatcttgcaaaggatcttcttgaaacttttactgcaaccaaaatggcaaaagtcttctttacaaacagtggatctgaagctaatgatactcaggtgaagctcgtttggtattataataatgcacttggaagaccaaataagaagaaatttattgctcgagcaaaatcacttcctgctctacatcaaaagtttgacctgccagctccatttgtgttgcacactgactgccctcactattggcgctatcatctagaaggtgagacggaagaggaattctcaacaagattagccaacaatttagagaaccttattctgaaagagggtccagagacgattgctgcatttatcgccgagcctgttatgggagcaggaggtgttatacctcctcctgctacttattttgagaagatacaagctgttgtgaaaaagtatgacatactttttatcgctgatgaggttatttgtgcatttggaaggcttgggacgatgtttggatgtgacaagtacaatattaaaccagatcttgtttcactagcaaaggctctttcttcagcatatatgcccattggagcagtcatggtgagccctgaagtttcagaagtcatttattctcaaagcaacaaacttggtagtttctctcatggattcacctactctgggcaccctgtatcctgtgctgttgcaattgaagcactcaagctctacaaggagagaaatattgttgagaaagtgaagaccatttcaccgaggtttcaagatggtctaaaatccttttctgacagtcctattgttggagagatcagaggtgacaacataatgatgtctccaccatttataattactcctcaagaggttgatgaattaataagcaaatatgggaaggcgttgaaggctacagaggagagggtgaaggaactcaagtctcagcagaagaaacactga

SEQ ID NO: 9323 - DNA, 1050 bp, Zea mays
  Peptide Sequence Number=SeqID_51102
atgtcacttttacatttgtttcaagtctctaaaaaagcatttggcttcgtttcgcgacaagagagtcaaccaaattccacacttccggaggaactatgcattcgtcagttttcactagcagagatcaaagcttcgactgccaacttcgatgaaggctttattattggtataagtaattttggatctgtatacaaaggggttatagatgatgggacctttacagttgctatcagacgcatgaaatttagtcttagtgcattccgaactgaagtggtattccttagccagctgaaccacttaaatgttgaatctctcatcggattctgcaatgagaagggggaaacaatccttgtttatgaatacctgagcaatgggtcgctctttgattgtctccatggtaatggtatcagttgcaatccaattgcctgggaaaagaggctacaaatctgcattggtgcagcgcgtggattacattaccttcataccggagtaaagtatatagtactgcaccgcaacgtgaccagcaacactattcttttagatcatgaattggttcctaagctttctgggttctttttgtccaggttagggcctcatagcatgtcaaatgcttcaagtaaaaaacagtcactagatgtgatggctactttcggatacctttattcagaaaatctgttaggaaaaaatgatgtctatgcatttggtgttgtcttactcgaagtaatttgtggtaaaacaccagtctttgaagcaaatggtcaggaaagatctctggctgcctgggcaaattggtgtttcaagaatgggaccatttatcacaatattgatccatatttgaaggggagggtagccccagagtgcttcaacaagtatgtggagattgctatgtcttgtatctcttatagcgcagatgaacgaccatccatgggtgaagtagagtcgactctacaggatgcactggaactgcaaaagaaagcagactctgaaatgaaaagtataattcctcacagcgaggtcatgtatgaagatgaacaattttgtgcaccttaa

SEQ ID NO: 9324 - DNA, 123 bp, Zea mays
  Peptide Sequence Number=SeqID_51103
atgtctccaccacttataattactcctcaagaggttgatgaattaataagcatatacgggaaagcgctaaaggctatggaggagagggtgaaggaaatcaagtctcagcaaaagaaacaatga

SEQ ID NO: 9325 - DNA, 540 bp, Zea mays
  Peptide Sequence Number=SeqID_51104
atgtctaaaagaatggaagctgcctcaacaatgaaccgcactgcatatgttcctgtggaaaacattacttctgctattgcttcacagcatcaacagaatccagcttcacttacaataccatatgaaaggaattcaaatcccattggatggccaaatttttgtcctggttcaaatttagggacatatacacaccagggctcttcacaacctagtgtggacggtgtcattacaaactcagcaccctcccaatcctcggcatacagtcaggctgttcctcagtcaagcttgaaccaagatactaatcagcttcagaatcaaaatcaacctgcagcaattcatgccttttcagattatgacttaaattgggtcaacaacattggtgtaagcaatcaacaatcttctgttgatcatgtacagcttcaagccccagggtccacaaatgagaaagaaccatccatggagctgattagcattattgtgcattctagagaagtaaacatggttcttgtgacatataacgtaaaagagaagtttgattga

SEQ ID NO: 9326 - DNA, 4572 bp, Zea mays
  Peptide Sequence Number=SeqID_51105
atggctgccacaactagtcttgtagttggatctcttgtctgggtggaagatcctgatgatgcttggatagatggtgaagtcgtggaggttaaaggtgaagatattaaagtcctatgcacttcagggaagacggttgttgttaaagcgtcaaatgtttatcctaaagatgctgaggccccaccttgtggagttgatgatatgacaaagctggcttatttgcatgaaccgggtgtgctccagaatttacgatcaagatatgatatgaatgaaatatatcttttcatcatatttcaaaatttactgacaagaggaggcaattgtcccgaatcatacttccagacatatacaggaaatatattgattgctgtaaacccattcagaagactacctcatctttatgatagccatatgatggcacaatataagggggcagcctttggtgaattgagtccacatccctttgctgtagcagatgctgcatacagattaatgatgaatgagggaattagccagtcgattttggtcagtggtgaaagtggggctggtaaaacagaaagcacaaaattgcttatgagatatcttgcttacatggggggtagagctgctgctgagggaagaacagttgagcagcaagttctagagtccaaccctgttttagaagcatttggtaatgcgaagactgttaggaacaacaactcaagtcgctttggtaagtttgtggagattcaatttgattggagtggaaggatttcaggagctgcaatcagaacttatttgctagaaagatcacgagtttgtcaagtgtctgatccagagagaaattatcactgtttctacatgctttgtgctgcaccaccagaggatattcagcggtttaaattaggaaacccgagatcgtttcactatctgaaccaatctaattgctatgagttggatggcgttgatgagtctaaggaatatgctgcaacgaggagggcaatggatgttgttggaataagttctgatgagcaggatgccatattccgtgttgtggctgcaattcttcatcttgggaacattgaatttgccaaagggaaggaaatagactcatcagtgcctaaagatgaaaaatcacgatttcatctgaggactgcagctgagctttttgacctctcggaagagaacatagagagcatgtttaatggccagttttgttttaggtgcgatgaaaagttactagaagattctctttgtaagcgcgtaattgtaactcgtgatgaaaccattacaaaatggctggacccagtatctgctgcgcttagtagagatgctttggctaaaattgtgtactcgaggttgtttgactggattgtggataagatcaatagttcaattggtcaagatcctgactcaaagtacttaattggggtgctggatatttatggatttgagagtttcaagactaacagttttgagcaattctgcattaatttgacaaatgagaagttgcagcagcatttcaaccagcacgtcttcaaaatggagcaagaagagtatacaaaagaagaaattaattggagctacattgaatttgttgataatcaggatgttcttgacctcattgaaaagaaaccaggtggcataattgctcttctagatgaggcttgcatgtttccaagatcaacccatgaaacttttgctcagaagctgtaccagacgtttaaaaaccataagcggttcagcaagcccaaattgtctcgtagtgatttcaccatttgccattatgctggtgatgtcacttatcaaaccgagctgttcctggacaagaacaaagattatgttgtagctgaacatcaggcccttttgaatgcttcaaaatgttcctttgtctccggattatttccacctttagcagaggaatcttccaaatcgtcaaaattctcttcaataggttctcgatttaagactaatgggtcatgggcgctctctctttgtatttcacagcaacaactacaagcattacttgaaactctcagttccactgagccacattacatacgttgtgtaaagcccaataatcttcttaagccatcaatatttgagaataaaaatgttctacaacaactacgatgtgggggggttatggaggctatcaggattagctgtgctggatatcctactagaaaacaatttgatgaatttgtggaccgatttggtcttcttgcacctgaagttttggatggaagttctgatgaggttgctgcgtgcaaaaagcttctagagaaggtcgggcttcaaggctatcagattggtaagacaaaggtttttcttagggctggtcagatggctgatctggatacccgtaggattgaagtcttaggaagatctgctagcattattcagaggaaagttcgttcttatttagctcgcagaagtttcattgtgcttcgccgatctgcattacagattcaatctgtctgcagagggcaacttgctcgcaaagtgtttgaaggcatgagaagagaagcagccagtttaaggattcagagagatttgcgcatgcatcttgctaggaaagcttataaagaattgttctcgtctgctgtttccattcagacaggcatgcgggggatggctgctcgcaatgagttacgcttcagaaggcagaccagagcagctattataattcagagccaatgtcgcaagttcttggcccggttgcattatctgaagttgaagaaagcagcaattgcaacgcaatgtgcatggagaggaagagtagctcgtaaagaacttcggaagcttaagatggctgctagggagacgggagctctgcaagctgcaaagaacaaactggaaaagcaagttgaggaactgacatggagattacaactggagaaacgaatgagggttgacctggaagaagctaaaacacaagaaaatgcaaaactgcagtctgctttgcaagacatacaacttcagtttaaagagaccaaagaattgcttgccaaggaacgtgaggatgccaaaaaggcagctgaggtagtccctataattcaggaggtttcggtggtggaccctgtgatgttggagaagcttacaaatgagaatgaaaaactgaaggcattagtgacttcgttggaaaagaaaattgatgaaacagagaaaaagtttgaagagacaaacaaaataagtgaagaaaggttgaaacaagctttggatgccgaatcaaaaatagttcagttgaagactgttatgcacagtcttgaagaaaagatttcagacattgaatctgaaaaccaagttttgaggcagcaaaccctattaaattcgcctgttaagaaggtttcgcagcttccaccaattccagtctttccgaatttggaaaatggtcaccatatggatgaattgaacaaatcaaatgaaccacagagtgtgactccagtgaagaaggctggtgcagaatctgatggcaggttgcgaagatccaatcttgaacgtcaacatgagaatgttgatgcactgatcaattgcgtttcaaaagacattgggttcagtcaagggaaacctgttgcagcatttaccatatataaatgtcttctccactggaaatcttttgaagcagaaaggaccagtgtgtttgatcgtcttattcagatgattggttctgcaattgagaatgaagaaaacaatggtcatatggcatattggttgtccaacacatcaacgttactgtttttgctccaaaaaagtcttaaagctgctggttcaagtggtgcaactccaagtcggaagcctactgctgcaacctctctgtttggaaggatgacaatgggtttccgctcatctccttcttccaacaatcttgctgctgctgctgcacttgcagtagttcgccaagtagaggccaaatatcctgctttacttttcaagcagcaacttgcagcatatgtggaaaaaatctatggaatcattagggataacttgaagaaagagttatcatctttgcttgctctatgcatccaggtatgttttgttgatgtcctttgtggttttaattcaaatggtttgcttatattggcaattttgtcattttccagcctcctcctacgccgtgagtgttgtacatttagcaatggagaatatgtcaaggctgggttagccgagttagagctctggtgctgccaagcaaaagaagagttcgctgggtcatcgtgggatgaacttaagcacataaggcaggctgttggattcttggttatacatcagaagtacagaatttcgtatgatgaaattacaaatgatctctgccctattcttagtgtacagcagttatacagaatatgtacgttgtactgggatgacaactacaatactcgaagtgttgctccaaatgttatttccagcatgagggtactaatgacagaggattccaatgatgctgctagcagttcctttttattggacgacaattccagcatccccttctctgtcgatgacctttccaattcgcttcaagagaaagacttcttggaagtcaacccagcagaggaacttcttgagaatccagccttccaatttttacacgagtaa

SEQ ID NO: 9327 - DNA, 558 bp, Zea mays
  Peptide Sequence Number=SeqID_51106
atgggcattgaggatgataccactaagaaagaagcattctactggtttgaagacaagttgaagccgtgggaaaaacttgagttgggtagacaaggtatcactgagcttactatagccataaccgaggcagagtcctttgtagagcttggtccaaggaaagataagtttgagacttcaaagcccaaagagacagaaaatggtgggggagaccatgaggaagaacgagacaaaaatgacaatggtgacaacgaggaagatgatccaaataaagaaataatgaggcttggttcaatcatgagtggtgttgaagtcaaaaaggtgtttctttttcctttttttgattgtattcatatatttgattatccacaacaacgatgtgttgtgccggtaaatcaagacatgagggttaggaccaagttggcttggaaaaaacacaagggccctttcagagttttgaagcgatttttttttgtctttgagctgcttccactttatgttaagtgccttacgagaatttctatcgagaactctcactttgggagagttagacaaacttag

SEQ ID NO: 9328 - DNA, 525 bp, Zea mays
  Peptide Sequence Number=SeqID_51107
atgcacacagtgtgtcacgatcgagacagcttatggtttcgggtagcagagtttgacagaccacaccaaggtgttattggtggacaatatcgtgtacacttacaaaataggacttgcgactgtgggatgtttgatgcacttcgttatccatgcgctcatgtaattgcagcttgccagaatctccgtctggattcgatgagctatgtcgacgaagtgtacaaattagaaaacatgtacaacttctggagacacgttttcccaccggtcctagatgaacgggatttggttgtcggtgttgggacgatgacccaccttgatagaatagtgaatgtggaggtgtttgcatcaccaacgacgaaggtgtttgaaactcatacggtgatggcgtttggtaaaaagaagagctccccgacggcctctcttgcgatccctcctgtgacgatggcctatacatcggcggtccaatcggcgttgtcgaaaatagaaatgaaccgggccattgattccaacctgccatgggactag

SEQ ID NO: 9329 - DNA, 141 bp, Zea mays
  Peptide Sequence Number=SeqID_51108
atggctccgttgaaggctccaagagtcgatggacttaatgctcaaaattttcaaagtcaatgggctttcattggtgcatcaattgctagtatagtcaaagaagttttccatggtgctttggaatggcttgatgatggataa

SEQ ID NO: 9330 - DNA, 1473 bp, Zea mays
  Peptide Sequence Number=SeqID_51109
atggctggttttacctgctctgctgctgatcttcgtcctcttctcggcactgctgccaatgccaccgctgctgctgaatacatatgcaatgccttcgatactgtttcaaacaagttagttgctgcaacgtatgccattgataacacgtaccttcttttctcagcatatcttgtattctccatgcagcttggtttcgccatgctttgtgctggttctgtacgtgccaagaacaccatgaacatcatgcttacaaatgtccttgatgctgccaccggtagtttattctactacctttttggctttgctttggcctttggttctccttccaatgggtttgtcgggaggcactttttcgggctcgaaaagtacccttccccgtctggagactatagtttctttttgtatcaatggtctttcgccattgcagctgctggaatcaccagtggctctattgcagagaggactcagttcgttgcttatttgatatattcttcctttttgactggtttggtttaccccatagtttctcattggttctggtctactgatggttgggcgagtccggttcgagaaggtcaccttttattcggatctggggtgattgattttgctggttctggagtcgttcacatggttggaggcattgcaggcttatggggtgccttggttgagggtcctcgtatgggtcgattcgatggtgatggcaagcctgtgttgttgcgtggacatagtggaacattggttgttctaggaacatttttgttatggtttggctggtatgggttcaatccaggttccttcctcagtatcttgaaaacatacgaacacaccaattattcttcttattacggccaatggagtgccattgggagaactgctgtcacaacgacgatatcaggaagttcagctgctttgacaaccctcttcggcaagcgattgctcacaggccactggaacgtcaccgatgtttgcaacggtttgctcggtgggttcgcagcaatcactggcgggtgttcagtcgtcgatccctgggctgcaatcatttgtgggttcatcgcagcttgggtcctcatcggatgcaacaagctcgccgagatgttaaagtacgatgaccccttggaggcagcacaactacatggagggtgcggcgcatgggggatcattttcactgcattgttcgcaaagaaggattacgtaaatgagatatatccagggaaacctgggaggccacacgggctgctgatgggtggtggagcacggctgttggctgcacatctgatacagatcttggtggtgatagggtgggtgagtgtgaccatgggttcagtgttttggttgctgaaagtgtttgggctattgaggatctcggcagacgaggagatggctggcctagatgaaccgtataacgggaagctcgagatggcttataatgggatgctcataggagctgtggtgtgtccgcaacatatgtag

SEQ ID NO: 9331 - DNA, 1209 bp, Zea mays
  Peptide Sequence Number=SeqID_51110
atgggctggttatgtgacacattccctgatccggatgaagattcaaccgaaattgaaagaatccgatatgctcaggcatacattcttcaattaattggaggttatctgatgcccgacatgtcaccgagccgcgtacatctaagatggctgctgaaactcgttgattttagagcagccggtgaattgagttgggggtctgccgtcttggcaacattatatcgggagatgtacggggcgacgcgactgaggagagcaaaaattagaggttgcctgtcactactgcaatcatgggcacagtttcgctttccatttctacgtcctcgactagaccacccatatacattcccactcataacgagatggaaccatccggcaagtcatgctcgatttccgtcctctcttgaagatattcgacttctattagaccaacggtcgaaagcacaatttcaatggacaccatacgaggatccggtaattcgggcaataatcccggaagagttcttacaaaattcgaacgtttggcacgtgagagtcgtgttgataaactacgcaaccgtggagccgcaccagtcagacagagtgctacgacagtttggatgtagacaaccgattcccgtggatcctgaggatctatggcaagccgtatttactgacgccagaagagaggcagcgacaaatacgtgtcgaaagggaaatgcgcgggcctctaaatccaagacgacaagacggcggcagcctctcaacgaggcccagacattcacccggctcatcatcagcggccatgcaatcaccaggcccaacgagagcactgacacagtcacccgacgcagcagttcaactgatgatacccacgcaaccgccttttcagatgatgccagtcctatggcaggttggagccaaatgcccggttcagctccatttcctgttatgtcgagtgggccaccgatgtataggccagcggtgcacgagggattgcaagaggggctgtcggggagctctcctttttaccaatccccagcaacgtatgggtttcaaacatcgtcgccgttcgtgatgcaaacacctccacatacactattttttgaaggtggatcatcgtcccaagctcgacaaccagataccataccggaagaaccagaatccccgccggaggaacaacaaccgccgctggaagttagagaaaggaggaatccagcgcgtaaccgttga

SEQ ID NO: 9332 - DNA, 177 bp, Zea mays
  Peptide Sequence Number=SeqID_51111
atgagagtggagaagaaagctagaaggaagaaacagaagacgtggattttgggtaaaacagaagcgggaatggggagggtgaccctggtggcagagagaaatagagggcgtggcagcggcggtgctgaagaggacaggtgcgccatttgcgctgatgatgtgacgacgatggcgtag

SEQ ID NO: 9333 - DNA, 783 bp, Zea mays
  Peptide Sequence Number=SeqID_51112
atgaatgagtggtttatcgagttcgtacaaacaaaccctatggctcaacgacctccacccccacatgttccccaactagtgcccgtagttcctcaaggttttcaaccaataagagttagcaaggcttcagttgataagattcgtaaatatggggctgaagagtttagaggagtggaataccttaatttcagttgttctgagcgatcgggtagattaggagttcctccaaacagaatttcaaaagaattggttattcgagcaaagataggggaaaacaacatagatttcctggaaaggtctgacaaagaacaggctcagactgttcgatcgagcaacactactgcgagaagtagaccaccacggaacactggaaatgcgagaaatattcgtagtgggacaaaggactctgctgtgagattcgaggcacgaatgccggctagaacttatgtgatccgtgctcgagaagaagctttagcgccagatgttatcactagtacattttctatctttaatactgatgttattgctttgattaactcgaggatggatagtgaatctaatcttatatcagctatgtcaacacataagtatgttagaaaagcgtgtgaagcgtatcttgcttacatatttgattctagagtttctgagttgaagctagaatctgttccagtggtatggaattcatcttgtcacatggtttctttacttgacaatcttaatggagcatacactagattaccaagtagtatatcatgccacaatttgaatgtatttcactcataa

SEQ ID NO: 9334 - DNA, 1455 bp, Zea mays
  Peptide Sequence Number=SeqID_51113
atggagaaagaagagcagcaggccaatgattataccgacgaggacactgattacactgatgatgaggaggaggactacaacgacgacgaggactacactccagagcccgagacggcgtccaaacgccagaagcgccacaccctggagcagattcgggaactcagagctgcataccaacggtgtgaccacccagatgcgccgacacgccgcgcgctcggcgcaaagattggcctggagggcaggcaggtgcagtactggttccagaaccaacgctcccagacgcaggcgaaggccctggcgcagaacaacagggtggtccagcaggagaacgccgcgctgatggccgagaacgcgtcgctccggcacgccatactgaccgggtcctgcctcgcatgcggcggcgcgacgacggcggcggcgcccgccgagctgccgccggagagcaggcgcctggtggcggagaacgcgcggctcaggggcgagtacgcgcgcgccaccgcgctgctcaaccagatcctgctctcggcgccggcgcccccaggcccagcagcagcggcagtcgtcgtctcctccagctccgtcgcccgccccgtggccgaccgcgccgctcggctccgcggccacgcggaggccgccatggaccagttcctgctgctcgccaccaagggggagccgctgtggctgcccaccacccccgacggggaggcgctcaactaccagctggggtacaagcacaagaaagcactcccggtgcaccacgggctctgcccggacgagttcgtcatggaggcctccagggccactggcgtcgtcagagcctctgccacctacctcgtcgccacgcttacagacgcgaggcgctggtccgagatgttccccagcgtcgtggcgagtgtgaccgccaggagggacgcagccatctccggcggcgttttcggctcgcatattcagctgcactcgcagatgaacgcggagctgcaggtgcattcgccgcgtctgctcaaccgcagcatcaacttcttgaggtacaccaagcgggtggcggaggggcggtgggcggtgatggacgtgtccgtggacggcatccttggaccgccaggcagccgcgtcgctgacgccgccgccgccgctgccgctgcaaacggcgtcactcttgtgccggcatggtacacgggctgcaggctgctgccgtccggctgcctcgttgaggacatgcgcaatggctactgcaaggtcacatgggttgtccacgcggagtacgacgagaccaccgtgccaacgatgttcaggccactgttccgctctgggaaggctctcggcgcgcaccgttggctcgcgtcgctgcagaggcagtgcgagttcctcgctgtcctgcactccagccaggtctccagaggcggcgacaacacaggtcagtctcttaaaatcgtttttcttggactagcaccaatttaa

SEQ ID NO: 9335 - DNA, 357 bp, Zea mays
  Peptide Sequence Number=SeqID_51114
atggcgcgtattggtcggcatgttccgcctgaaaattccggcaacatcgccctcagtcggacttcgccgtggagtataaggaccgccacggccaagggccgcatgaactgccgtcgcgtgcccttggacgtacacccttgccggaacccgcttgaaggctctggggttcacgcgagtcaactgaaactcggactcggcggaatcgcgctcttgaccaatggagtgccttgctggaatgggagcttcgccatgctgtcgcgcatgccgtgggcagcttccctggcgtcgtttctgtctccgtgggagaaggaagacggcgcctgggccattgatccgataagggatggcctagattag

SEQ ID NO: 9336 - DNA, 3351 bp, Zea mays
  Peptide Sequence Number=SeqID_51115
atgaacgggaggtggaggagcgcgtgcgcggcggcggcggcgccgctgctgctgtggtgcgcgcttgtcctggcgtgcatgggcagcgcgctggccgtggacgcgcagggcgcggcgctgctggcctggaagcgcacgctgcggggcggcgcggaggaggcgctgggggactggagggactccgacgcgtcgccgtgccggtggacgggcgtgtcctgcaacgcggcgggccgggtcacggagctcagcctgcagttcgtcggcctgcacggcggcgtccccgccgacctgcactcctccgccgtcggcgccacgctggcgcgcctcgtgctcacgggcgccaacctcacgggccccatcccgccgcagctcggggacctgccggcgctggcgcacctcgacctcagcagcaatgcgctcacggggccgatcccggccgccctctgccgcccggggagcaggctcgagagcctctacgtcaactccaaccgcctcgagggcgccatcccggacgccatcggcaacctcacggcgctgcgggagctcgtcgtctacgacaaccagctcgagggccccatcccggcgtccatcggccagatggccagcctcgaggtgctccgcgccggcggcaacaagaacctccagggcgcgctcccaccggagatcggcagctgctccaacctcaccatgctcggcctcgccgagaccagcatctccggcccgctcccggcgaccctgggccagctcaagagcctcgacaccatcgccatctacaccgcgatgctctccggcccgatacctcccgagctcggccaatgcacaagcctggtcaacgtctacctgtacgagaacgcgctgtccgggtcgatcccgccgcagctcggcaggctcagcaacctcaagaccctgctgctgtggcagaacagcctcgtcggcgtcataccgccggagctcggggcgtgcgcggggctcgccgtcctggacctgtccatgaacgggctcaccggccacatcccggcgtcgctcgggaacctgacgtcgctgcaggagctgcagctcagcgggaacaaggtgtccggcccggtcccggccgagctcgcgcgctgcgccaacctcaccgacctcgagctcgacaacaaccagatatccggcgccatccccgccggcatcggcaagctcacggcgctgcgcatgctctacctctgggccaaccagctcacggggagcatcccgccggagatcggcggctgcgcgagcctcgagtcgctcgacctgtcgcagaacgcgctcaccgggcccatcccgcgctccctgttccggctgccgcggctctccaagctgctgctcatcgacaacgccctctcgggcgagataccgccggagatcggcaactgcacgtccctcgtccggttccgcgcgagcggcaaccacctcgccggcgcgattcctcccgaggtcggtagacttggcaacctcagcttctttgacctgagctcgaacaggttgtcaggcgccatccccgcggagatcgccgggtgccggaacctcacgttcgtcgacctccacggcaatgccatcgccggcgtcctgcctccgaggctgttccacgacatgctctcgctgcagtacctggacctgtcgtacaattccatcggcggcgcgatcccgccggacatcggcaagctcagttcgctcacgaagctcgtccttggcgggaacaggctcacgggccagatacctccagagatcggctcgtgctcacggctccagctcctggacctcggcggcaacacgctgtccggcgggataccggcgagcatcggcaagattccggggctggagatcgctctcaacctgagctgcaacggtttgtcgggcgctataccgaaggagttcggcggcctcgttcggctcggcgtgctcgacgtgtcgcacaaccagctctccggtgacctccagcccctgaccgcgctccagaaccttgtggccctcaacatctccttcaacggcttcaccggccgcgcgcccgcgacggcgttcttcgcgaagctgccggcgagcgacgtggagggcaacccaggcctgtgcctctcgcggtgccccggcgacgcaagcgagcgcgagcgcgcggcgcggcgcgccgcccgcgtggccaccgcggtgctggtgtccgcgctcgtcgccctcctcgccgccgcggcgttcctcctcgtcggccgccgcggacgctcgtcggtgttcggcggcgcgcgctccgacgcggacggcaaggacgccgacatgctgccgccgtgggacgtgacgctgtaccagaaactggacatcaccgtgggcgacgtggcgcgcagcctgacgccggcgaacgtcatcgggcagggctggtccgggtcggtgtaccgcgcgagcgtgccgtccacgggcgcggccatcgccgtgaagaggttccggtcgtgcgacgaggcgtccgccgaggcgttcgcgtgcgaggtgggcgtgctgccccgggtgcgccaccgcaacatcgtccggctcctcgggtgggcggccaaccggcggacgcgcctcctcttctacgactacctcccgaacggcaccctcggcggcctgctgcacagcgccggcggcgggtcggccggcgccgcggtggtggagtgggaggtgcggctctcgatcgccgtcggcgtggccgagggcctcgcgtacctgcaccacgactgcgtgccggcgatcctccaccgcgacgtcaaggccgacaacatcctcctcggcgagcggtacgaggcgtgccttgccgacttcggcctcgccagggtcgccgaggacggcgccaactcgtcgcccccgccgttcgccggctcgtacgggtacatcgctcccgagtacgggtgcatgaccaagatcacgacgaagagcgacgtgtacagcttcggggtggtgctgctggaggccatcacggggcggcggccggtggaggcggcgttcggggagggccggagcgtggtgcagtgggtgcgcgagcacctccaccagaagcgcgaccccgcggacgtggtcgaccagcggctgcagggccgggcggacgcgcaggtgcaggagatgctgcaggcgctcgggatcgcgctgctctgcgccagcgcgcggcccgaggaccggccgacgatgaaggacgcggcggcgctgctgcgcggcctccggagcgacgacggctccgccgaggcgcggaaggtcagcgggtcgaggccgccgccgctggactcggccaggtgggccgctgcctcctcgcccgccaaacccacggccctcccgcggccgtcgccgtccgcgtccagctcgctggcgtactcaatgtaa

SEQ ID NO: 9337 - DNA, 1359 bp, Zea mays
  Peptide Sequence Number=SeqID_51116
atgtcttcatctagcggctgtaaccgcgggcgagcagtcctcccagtcactgcctccctcgttcccttcctgctcctcctcgtcgtcgtctcgtgccaggccgccctggtggtctccgcgacgcacacgcacgggcacggcggcgggaagcatgccggcgccgcgcgggcggccttccgtgccggggacgagcaggaggcgtacgcgaggatcatggcgcgcatggccaggatggacaaggactccaacatgacgatacagagccccgacggcgacgtcatccactgcgtgccggcgcacctgcagccggcgttcgaccaccccaggctgagagggcaggagcccgaggacgagcccgtggagaggcccatgtccaagggcggcgccgccgaggaggaggccggcgtgttcccgcaggcgtggagcgacggcggcagcaagcggtgcccggcggggacggtgccgatacggcggacggcggcgcgcgacgtgctgcgggccagctccgcgcgccggttcgggatgaaggcccgcggcggcggcagcagcagcagcaacgcccgccgcgactccaccagcagcggccatgagcacgcggtggggtacgtgacgggggaccagttctacggcgccaaggccagcctgaacgtgtggccggccaaggtggcgtcggcggcggagttcagcctgtcccagatctgggtcatctccggctccttcggcaacgacctcaacaccatcgaggccggatggcaggtgagccctgagctgtatggcgacagcagcccgaggttcttcacgtattggacgaccgatgcgtaccaggagactgggtgctacaacctgcactgctccggcttcgtccagacgaacagccggatcgccattggagccgccatctcgcctacctcggtctacaacggccggcagttcgacatcagcctgctcatatggaagactgacgtacgcgcgcgcgcgcaggacccgcaccgggggaactggtggctgcagctggggtcgggcccgctggtggggtactggccgtcgctcctgttcacgcacctgggcgcccacgccgacatggtgcagttcggcggcgaggtggtgaactcgcgcccggcgggggcgcacacgcccacgcagatggggagcggccacttcccccgcgagggatccaaccgcgcagcctacttccgcaacctgcaggtcgtcgacgccgacaacagcctcgtcgccgccgccgcgctccgcctcgtcgccgaccgcccgggctgctacgacatccagggcggctacaacaccgcctgggggaactacttctactacggagggcccggcaggaacgtgcactgcccgtga

SEQ ID NO: 9338 - DNA, 192 bp, Zea mays
  Peptide Sequence Number=SeqID_51117
atgcggaactcgtccccaaccggcattcagggctccacggtggatctgagtgattcacggtgcttcttggaagtcctcgtggctgggagcgaagagatcaaccacggtgccgatcggagttcttcaccggacgtcggggcccgtcgcggcttgtgggcagagtgttgcatcgcactaatcacgttgcgttaa

SEQ ID NO: 9339 - DNA, 453 bp, Zea mays
  Peptide Sequence Number=SeqID_51118
atgaacgcgtcgcagttcatggacaagcagatcctcggcctggctgcctccgcttccccctccggcggcggcgcggggggcggtgggggtgtggatctcagcgatctgatgataccgatcccccaggaggacgccgagaaccgcctcggtcgccggcgtagcagcaccagcgtcaacggaaccgcagacgacatgctacccagttatgacttccagcccatccgcactagtggcggcgccgcggccgccgccgcgcctcaggcctcgtgggggtcgctcgactccaaggcaccctctgcctcatacaacctcaagcccacatttcatccattgctggtctctcatcaccatcaactatcctcaagaatattagaatatgttgtgaacagtgtttttaaggcgacgcctaagcgtccaggcgctaggagaaatcttgcccccttgcccgcctag

SEQ ID NO: 9340 - DNA, 297 bp, Zea mays
  Peptide Sequence Number=SeqID_51119
atggagaagaaatccaaccaccgcaaaaactatcgcgcgacgaacacgggagagaccagaggcgagaaagacgcgaattgggcgccggctggctcggagtcgcggcctggcatctgggctgtgcgcgtcgagcacgacacggtcggtgttgagtctgcgtgcttggtgcggtcggcgtgcagggaagggaggcaggaggcgtgcggcatatggctgggcggctccaggcgcgactgggcagggtcgctggcgcgcaggggaagaaggagcggcgtctgtagggagaggagtggctag

SEQ ID NO: 9341 - DNA, 183 bp, Zea mays
  Peptide Sequence Number=SeqID_51120
atggctcacggtgccctcgcgcgaccagcgcggctcgagcagctcggcacagccactcgcgccattgcgcgcaggactggtggtgatgaggaggatggttatgattatgcttatggtaatggtaaagaaggtgtcgaggcggatctccaggagtttcaggacgtcgacgagttcgaggattag

SEQ ID NO: 9342 - DNA, 465 bp, Zea mays
  Peptide Sequence Number=SeqID_51121
atggccgttggaagactactgtcgcatgtggcaccggacagtccggtgcgccaccggacactgtccggtgtgccagccacgtcagccagccattggggttcgaccgttggagctctaacttgtggggcctctgggctgtccggtggtgcaccggacaggtcctgtagactgtccgcggttgtcgtggtcgcactcgacgctaggagtttgcgtggcgaagggcggcgacggttccgatggccggtaacatcacatgcgagcccgatcatcacggtattggctgtggccgcgccgttgtcctcgacaatcgcagagactgcggttccagtgaccggtaatgtcacaggcgagcttgatcgtcgcaatgaaggcatccatggtggaggatgcggtgatgatctcatcctcgacgattgcgatggtggctatggcggcgtcggttgcagttgggagagtagggcgtag

SEQ ID NO: 9343 - DNA, 366 bp, Zea mays
  Peptide Sequence Number=SeqID_51122
atggcgtccaacagtccaggatgtcaccgcaacaatgattttgaggattatttcttgaaatgtgagctgcttatggaaatatatgaaaagggatttgaaaggccatctcctattcaagaagaaagcattcctattgcgctgactggaagtgatattcttgcaagggcgaaaaatggcactggaaagactgctgcattttgcattctggcacttgaaaaaatttatcttgaaaaaatgctattcaaggttttagatatggatgtttctgtactgaattacttgaattttgaaatgacagcacccacagcaaaagtgctttttgaggatcctgctttgcatctcaggttcctcgccaatgtacgctga

SEQ ID NO: 9344 - DNA, 507 bp, Zea mays
  Peptide Sequence Number=SeqID_51123
atggcgaggccgttggttgatgaccagttggtcgtggcttcacctttgcgaatctggtccagcagcatcacagttgatgatgcatgtggcattgaagtcaggcaactacaaagttgggctatgtttgagggcgtcaaaagcctggtcgacggctgcatcccaaccgtcggtcactcccctgccgctgacatctcccagttgtcggccctcccctctccccgccggcgcacccccagccgccggcccgcccccaagccgtcggccttccccgatctgcagcagccgccggacatggaccccgtcagcaccgccctgcaggactctccgcccgcctcctccgcgttggtcgtggccctcgccaccattcaggcggccgtagccacctcccaggaacgccagcgcgccgcgtccctggccttggagcaagagtaccatcggcactgccctaactgcctagatggccaccgtgcaacgccttctcctcggtcgcccgccgatcgcccatga

SEQ ID NO: 9345 - DNA, 204 bp, Zea mays
  Peptide Sequence Number=SeqID_51124
atggattcatgtagaaggaaaaacgtgactacgtacaacggtctggaaggaacacacattaaagtaactgagtttgtcagagacaaagattgccttgtatgtgggcctggtacccttgttgagctggatacgtcatctactctttcagatattgattcatgcattcttgtgcatgctatggatgaagttgtgaaagggacgtag

SEQ ID NO: 9346 - DNA, 1230 bp, Zea mays
  Peptide Sequence Number=SeqID_51125
atggcctcccctgacgcggaacagccggcgccgacggaactcgagcggtggcgtgacctcgacatgctcttgtcccgccctggaaacctcgtggaggccactttcgatcccagccccggcctgcgagacctactggggagcctcgtggaggttttggttgtgggcgcgggcgggcttggctgcgagctcctcaaggacctggctctctccgggtttaagaaactgcacgtcattgatatggacaccatagacgtctccaacctcaatcgccagtttctcttcagagttcaagatgttgggaagtccaaggctgaagtagcagcgaagagggttatggagcgagttaatggggtgaacatagttcctcatttttgcaggattgaagataaagagatagagttctacagtcagttccacataattgtcctaggtctggattcaattgaagctcgaagctacatcaattctgtggcttgtggtttcttagattatgactcaagtgacaatccactccaagagacggttaaacctatggtagatggtggaactgagggcttcaagggacacgctagagtcattatacctggaacaacaccttgctttgaatgcaacatatggctttttcctccacaggttaagttccctttatgtactctcgccgagacaccaagaactgcagctcactgcattgagtatgctcacttgatcaaatgggatgaggttcatcctggaaaaccttttgatggcgatgatgcagagcatatgcagtggatttattcagaggctttaaagagagcagagcttttcggtatttctggtgttacatattctttgacacagtgccactgccaaagttctggggctggggctgggaagatgacttcaacattattatgccgcctcctattctcatctgtagtggcacaacaatcaagtgaagcaccactcaagaggaggccaaggcgggcacaatactgctcaaggagtggtcgcctactcgcctgttcagccgctgaacagacaacagaggaggacaggagcacactggagggggggggggctctgcagactacaactgccgcgcgatggaggggcgcaactgctgctcgagcagagggctgcctgagcacaacagggcggcaggagaggagggcgacagcgatggagaaggggtcgcggcgttggggaagggcgcacgcgcaacagtgtgtaccgtattggtacatgtag

SEQ ID NO: 9347 - DNA, 132 bp, Zea mays
  Peptide Sequence Number=SeqID_51126
atggaattgaaccaacataggactctattgtggcggtaccagagttttgatagtgagattggtgccttgatcgaggttgtaccattgctttatggctctaaacaggatgggaaaggagactttgagatgtaa

SEQ ID NO: 9348 - DNA, 537 bp, Zea mays
  Peptide Sequence Number=SeqID_51127
atgagtttgttgatccaatgtgttaatatgtctactcgtaaagttgaggagtattttttgggtttcatgaaggtagatgatacatccggtgatggactttttaattcattacttgattctattatgtcctttggcctaaatattgaagatgttcggggtcaaggttatgataatggatctaacatgaaaggaaagcacaagggcgtgcaaagacgactgtttgatataaatccaagagctttatttatgccatgtgcttgtcatagtcttaatcttacactttgtgacatggctaaatcttgtggcaaagctatttcattttttgggattgtgcaacgagtaaatacattgttctctagttctactaaaagatgtgatgttttgaaggatcatgttgaaagcttaactgtgaattcatggtgcaatactcgttgggagagtcggattaaaactgccaaagcaataagatttcaagctcctcagataagtgaaagggaaatagggtcaaaccttttcctaaatgattttggtggttga

SEQ ID NO: 9349 - DNA, 294 bp, Zea mays
  Peptide Sequence Number=SeqID_51128
atggtggcatcccctatctatggtggcccctggtacggcataggtgagatgggaagtggttatcgcgactttataatcccatatgctggtcccaagctgggagatcagatctggcgcgagaattctggacaggttctggtcagcgcgggcgagctccgcgccttcagttgcggaacagaacggaggacagggacgctcctaacggacgaggcccacagcacgacgactgaggaaggcagaggcgtgcgcggaaatagaaaaactggcccgcgggcccgggtggtcaacgactga

SEQ ID NO: 9350 - DNA, 165 bp, Zea mays
  Peptide Sequence Number=SeqID_51129
atggttgcaaatgagtctcaagctgatagtgttctttttggaaatgctggtgctgtaccagttttatctgctggaacatctgtcatcctttcttctatagtttctcctggatttgtgatccacctcaacagaagattagaagataatgacttcagggacagatga

SEQ ID NO: 9351 - DNA, 216 bp, Zea mays
  Peptide Sequence Number=SeqID_51130
atggccgtgatgggttcaacatcggacaagatgtacctctgccaggtaccaaactttgggattttaaatgataaagttgagaccggagtaataccagaaagaccaacatgcattgggagtggagagatggcgagagtagtttgtaccctccgtggcaagaggctggacattggtgtatctatgctctcggttggcgtgaacccggtctggtcttaa

SEQ ID NO: 9352 - DNA, 294 bp, Zea mays
  Peptide Sequence Number=SeqID_51131
atggtggcatcccctgtctatggtggcccctggtacgacataggtgagatgggaagcggttatcgcgactttataatcccatatgcctgtcccaagctgggagatcggatctggcgcgagaatcccgggcggattctggtcagcgcaggcgagctccgcgccttcagttgcagaacagaacggaggatagggacgctcctgacggacgaggcccacagcacggcgactgaggaaggcaggggcgtgcacggaaacagagaaactggcgcgcgggcccgagtggtcaacggctga

SEQ ID NO: 9353 - DNA, 321 bp, Zea mays
  Peptide Sequence Number=SeqID_51132
atggccgccaccgtggttgctactgcaccgccgctcggtctacgctggggtgcttgggcggaggtgaaacaaccttatgttaatgacgaatatgtattcgtcactaaatctatgacgctcataaatatcacaaatatgattgtaaacgtcacaaaacatggcaccacacattgccacatggatgatgatgtggcacaaagctatgacgaatatgtttgtcatgaaattgatgatgtggcatatgatatggcagttgatgtggcagagcttcttgacatattgttttgtcataaatgtggtgacatggcaataaacttatga

SEQ ID NO: 9354 - DNA, 171 bp, Zea mays
  Peptide Sequence Number=SeqID_51133
atggccgctgtcgattgtccctggacggtctcaagcgccctcgtcttcctttggcttcagcttgccgtcgactttccttgccgcgcgtgccttggtccgagctcacccatgtcgagctccctcggcgtccctcccatgcccgcgctcgcccagggagtggcatatcggtaa

SEQ ID NO: 9355 - DNA, 102 bp, Zea mays
  Peptide Sequence Number=SeqID_51134
atggcgtgtgagatctccctgattgactccctgatcattgtttctataaatcaggtggagcacaatctagtagaggtctatatatttgttaccgactcctag

SEQ ID NO: 9356 - DNA, 318 bp, Zea mays
  Peptide Sequence Number=SeqID_51135
atgaggtcaccggagctggggcgggtgcaggctataggggctccgaggtcaccagagttggtcaggactggcgggaagggcccaacgaactcgctggggctcgagacggggccaatttggcccgacaccacgcgaggcggtgagcggccccggtcgagctccggcaaggacgaattagccatggcaaaggcggaattaaaggaaatagagaatgggagcgagttcctcacctcgggacgacgctcggggtggcttggtgcagcttctggtgggctggacggctggcacggtgaaagacgcctaaaggggggtggatag

SEQ ID NO: 9357 - DNA, 457 bp, Zea mays
  Peptide Sequence Number=SeqID_51136
atggacgccttcgtcgccggttcgcgcggccgcccagccctcagcttcctttgccctaagatatcgctattctccccgccctcgcactcctggttccgctggctcgtcgacgaaatccgggggttgctgccacgcggtttcgacatcataggggtgctgctcgtggggggagagggttctgatgcggacgtcactcgcgcactggagcaggctcgggcgctgagggagctgctgtttggtgtggcagcgagccatggcttggtaggaggccacatggatgcagccactggggagattcgatttgttgtatctgagagtggatggacgaactcggtggaaggatctgtggttacatgggaggatgagcccgggaggttgttgtgggagaagggatgcctcctgcgctgcgaactgctgctgaagcttccactctatcttaggcctgacgtgaattctg

SEQ ID NO: 9358 - DNA, 240 bp, Zea mays
  Peptide Sequence Number=SeqID_51137
atgccgagtgccgccacctgctccatcttcccctttctctctctctctctcccactcggctctctctcccctgcaccgacgcgccagaagccaagcagcccaggagcaggcgaccggccaaccccgagccgtccctgcacccgcgacttcggcctccccgcgccgcgcccgtgcagcctgcgcgccaaccgcccgaccgcgccctgtccatgccctgcacctcgcgccgcgcccagatga

SEQ ID NO: 9359 - DNA, 1677 bp, Zea mays
  Peptide Sequence Number=SeqID_51138
atggccgaccctccaacttcccgcatggtgcagcaccccttcggcgacatcccaagccagactcccaagcaattcctatactctggtagctcacagcacctctgccatccataccagtcagcttcggacgcccacgtcgcgccgcagcgtcactacaccgtgaggtctcagtctcagtctcagtcaccggatgctgggtctgaagactttgagacgcacagcaggcagtacacgctggactcctcttcggcttccggttgctcagggcacggttctccctcctgtcagagtgtccatgccgggagtcgcagccctgtgtctcactctcatgacgacagccactccggctccaccaatggcaacggatcgcctgcgagcgcgtcgtgtgtcaccgaggaccctactgacctcaagcagaaactgaaggatcttgaggctgtgatgctggggacggacacggacccagagaccgtggacagtctcgagatcgccatagcggaccggctttcggtggagcccgaggagtggaagaacaacatggtgagcgtgcctagaggggacctgaaggagctgctgatcgcctgcgccagggcagtggagcaaaacaacggctactccatcgacctgatggtcccagagctgaggaagatggtgtcggtgtccggcgagccgctcgagaggctgggagcctacatggtggaaggtctcgtcgccaggctcgccgcctctggcagctccatctacaaggctctgaggtgtaaggagcccaggagctccgacctcctctcctacatgcacttcctgtacgaggcctgcccctacttcaagttcggctacatgtcggccaacggcgcgatcgcggaggccgtcaagggagaagacaggatccatatcatcgacttccacatcgctcagggggcgcagtgggtctctctcctccaagcccttgcggcccggcctggcgggccaccgttcgtgagggtcaccggcattgatgatcccgtttcagcttacgcccgaggcggcggcttagagttggtcggcaagaggctgtcacacatcgctggcctctacaaggtgccctttcagttcgacgcggtcgccatctccggcagcgaggtggaggaggggcatctgggcgtcgtccctggcgaagccgtcgccgtcaactttactctagagctgcaccatatccccgacgagaccgtgagcacggcgaaccacagggaccgggtcctgaggctggtcaagggcctgtcgcccagggtgctcacgctggtggagcaggagtccaacaccaacacggcccccttcgcgcagcggttcgcggagacgctggactactacgcggccatcttcgagtccatcgacctggcgctgcccaggggcgacagggagcggatcaacatcgagcagcactgcctggctcgggagatcgtcaacctggtggcctgcgagggcgaggagcgggtggagcggcacgaggtgttcggcaagtggaaggcgcgcctcatgatggccgggttcaggccgtccccgctcagcgcgctggtcaacgccaccatcaagacgctgctgcagagctactcgccggactacaagctcgccgagagggaaggcgtgctctacctcggctggaagaacaggcccctcattgtttcatcggcatggcactag

SEQ ID NO: 9360 - DNA, 927 bp, Zea mays
  Peptide Sequence Number=SeqID_51139
atggcggtggaccgcgtggacggcgaggaggcgttcgaggaggtggacccgacggggcggttcgggcggtacgcggacgtgctggggctcgggtccgtcaagaaggtgtaccgcgggttcgaccaggaggaggggatcgaggtggcgtggaaccgcgtccggctgcggtcgctggccgaccgcgaccccggcatggtggagcgcctccacgccgaggtgcgcctcctccgctcgctcagccacgaccacatcatcggcttccacaaggtgtggctggaccgcgacgccggcgtcctcaacttcatcaccgaggtctgcacctccgggagcctccgcgagtaccgccaccgacaccgccacgtctccgtcaaggcgctcaagaagtgggcgcgccagatcctcgaggggctcaaccacctccacacccacgacccctgcatcatccaccgcgacctcaactgcagcaacgtcttcatcaatggcaacaacggccaggtcaagatcggcgacctcgggctggcggcgatcgtggacaagacgcacgtggcgcacaccatcctgggcacgccggagttcatggcgccggagctgtacacggagacatggtcacgcgggaggtgccctacgccgagtgcggcagcgtcgtgcagatcttccacaacgtcacccggggcgtcccgccccgcggcgctcaagcggctcaaggacgccgagctgcggggcttcatcgagcgctgcatcggccagccccggaaccggccctcggccgctgacctcctgcaggaccccttcttcaacggcgtccgtggcggggacgacgacgacgacgccgcggcgctcgccgacgcctccagcgtcgtcgccgccgcgcccgtgccgcgccccaggagctacgtcgacgacctcgccgggctccggctggactga

SEQ ID NO: 9361 - DNA, 495 bp, Zea mays
  Peptide Sequence Number=SeqID_51140
atgacgtatcccctgtggcatggtcggtccgagctcgaggcggagacttctcctggggccgaggctgaggctaaggccgaggcctggggttgggcgaggcggagctccctgttgcgcccgaggctgaacccgggggaggtcccctcacgcggacgcactcccttctacttcaacgacgattcgggcggtgtctccgtcaatgcactcatcacctccaccgaccgtgacaccctgctccatttgaactaccgcgtcaccgaactcatcaccaccgacgtgtcaccaaactcatcgccgccgacgccggatacagctccgacagctccatccatggaggcagcagatctgtgctgtcctactcctactgcgaggtcgccaacgagaccctcactcccgacgcccagcagctggagccaactcaagcagcccatcggcatgtacaacacgacatgcaaggaagtcattgacgccaagcaacagaccaaggggatgtag

SEQ ID NO: 9362 - DNA, 2088 bp, Zea mays
  Peptide Sequence Number=SeqID_51141
atgaagctggtgacgggggtggatttggagacggaggtggagctgtcgccgatcgccaaggccgaggaagcggccgtgtttagcccctactccagtccgagcaccgccttattgctgcagaggagagtcgtgtcgtggtccacggagaccgggtctccggcgacggtccgcgtgcgcctcggcgacagaagcttcgacctgcacaagatcaacaggtttgtctcgccggtgcaggaccctctggtgtccaagtgcaagtacttcagcgaggcgtcgctccagtccggcggcgacgtcgtcgagctgccggccagctccccgggggtccgcgaggcgttcgaggcggtcgcgctcttctgctacggcgacgccgtggcgctggaccccttcaacgtcgcggcggtgcggtgcgcggcggagctcctgggcgtgggcggcctcggcgcgcgctgcgacctgtacatcagccaggtggtgctgcagagctgggacgacgcgctcatcgtgctgcagcgctgcctgcccctgctccccgccgccgaggagctcctcgtcgtcagccgctgcgtcgaggcgctggcgttcatggcgtgcatggagatcctcgacccggagcagcggcggaaccagctgcccggcgccggcggcgcggcctcgcgcgcgctggtcggccgccgctgggacgccgagctcgtcaaggagctcgccgcgcgcgacctctgggtcaaggacctgctcgcgctcccgttccagttcttcgaccggatcgtgcgggcgctgcggcgccagggcatgaaggagaagtacgtcggccccgtcgtcctcttctacgccaacaagtgggtgctctccaagaagacgcacaggttctgggcgaccacggacgacgaggccatcgacggcgagaccgacgccaacaggagggccgccgcgatcctggagggcgtggtcgggctgctcccggccgagtcgccggcagtggctgcgaacggcgccatccccgtggcgttctacttcgccctgctgtcgcggtcgctcaccctggagctgagcgacgaaagccggacaaaactgcgaggacatgttgcgtcgaatttgcggttcgctcgcgtggacgacctgccgctgccggaggaagaagccgacggccggtccatcgcagatagcagggaggtgagggcaatggagagcatcgtgtcaaaccatgcctccgtccaaaggaaaggcgtggaggccgtctccgagctgtgggatcggtacctcctgcagtttgctggcgatcccaagctccggccggaaaggctagcagagctgatcggagccattccggcaagcgaccggaagacgcacgaccacttgtacgaagcaatcaacacatatttagtggagcaccggggtctgtccggggaggagaaggcgacgctgtgcggccacctggattgccggaagctgtcgcacgaggcgtgcgtccaggccgtgcagaacgagcggatgccgctccggctgatcgtgcaggcgctgttcgtgcagcagatgcacacgcaccgcgccttcacggagtgctccgactcgttccggtgcacgcgctcaggggaactcgtcccgggcgccggcgggtacacgccgagccccgggtgccccgccatccccaccagccagcccctcagcggcagcagcccgtacgacagccaccaccacgccccgcgcgacgccaagctccgcgcccgggacgacgcttcgtcggactacgagacggccagcttcaggatccaggcgctggagcaggagatcatctcgctgaaacggaccctgcagcagcacaacaccctgaggggctcggcctcggctcgcggggaaggcaaggagccgagcttcagggtcgccgtagacgcgggcgcgccggcgaccatcaagcgtcgagccacggtctccggcagctgcatcggctccatgcgctggggctcgcagcgccggtgcgccagcaggatcctgcgcgtcttcgcgaggctagccgtgttcgggaggggtaggtcgagggggaagcagagcaagtgcagcgcatcaacagagcagcagaattgcatgtag

SEQ ID NO: 9363 - DNA, 1143 bp, Zea mays
  Peptide Sequence Number=SeqID_51142
atggatatagaggagtgcaggacgaggttgcaggataaggtccgcctacttcatccaaagaatgccgaagggatcgttgactacatgattgcaaacacaccacttgagaatatcagatcatatttgttgactgccacagataatgtactaatgaacctatttgagggtgcaaaccgcctgcaaaatatcctgaatttgtccgaggaaaatgagcccctatttggtctattcaccccctttgatcagattggaccacagaagcagcaccagttttcttcaagaaaccattctcaggtccttcaggctccattgtaccccattggcccaagtagagcttttcagaatccatactcgaaactcactggcttcagggatcatttccagtctttgagcattctggatggtgacacgccgagtcactacaaatgtgctagtataaatgttggtggctatcccagtaatggcaaggtccaaacaaagacttgtcgtttttacttgtccattagaaagtgtaagtatggtgagaattgtcacttttcccttgtgtgcggttacccagagattaatgacatgaggcaagttgaccaccttggttcattgcaaatgttggagatggagatcgatctcctgttgctgcagccatcatcacaagtcccggtagatcatcttgaaaaaaaattccttgagatttatacaaagcttctggaaattgatggattccatacagaggaccagaggaataggaagactggttacggcctcacagatctgttcatgcaacttaacgccaccagagagactgagagacgaggacggtattatgttgtcctggtgaaagatgctcctaagtacgtcactcatggtttccaaccggcggtgcctcttgctggcagtgattttaacaagatttgtgttaccttcaaatctgaaagcatattcactcacacagatgttcagaactacttcagtcagtatggtactgttagtgaagagagattttcagaagagagacacatgcacggtcatgtgagttttgtggaccttgagactgcaaaacggatcatatcagaaagtggccctcatttcatctgtggaaatgaagttcgtgccaaagcgtacagggaaaaacatgaactgaagtaa

SEQ ID NO: 9364 - DNA, 264 bp, Zea mays
  Peptide Sequence Number=SeqID_51143
atggccgattcgccaaaccctagctccggcgaccttcccgccggcgctgggtgctcgccggagaagccggtcctggcggatcgacgtgtgtctgcgctcgccggcgccggcgcgaggtacaaggccatgtcccccgcgcggctgccgatatcgcgggagccgtgcctcaccatccccaccgggtttagccccggagctctcctcgagtcccccgtcctcctcaacaacttcaagatttcaccggtggttctaataaacctttaa

SEQ ID NO: 9365 - DNA, 273 bp, Zea mays
  Peptide Sequence Number=SeqID_51144
atggccgcgtccagaagagcggcggcggctatgctgtgcctggccgtggcggttgccgcggtcctggcggcggagaagagcggggcggaagcggaacggccgggatgcttctgcgactgcatgaagaaccggtgcatgaccctcggcgcgagcgcggcggacaagttcgactgcgcggccgcctgcaccgagggctgcgcgcagatcggtcagccgggccagcccagggccgacgacttctgcgacagtgagcctgattgtaccactgattga

SEQ ID NO: 9366 - DNA, 306 bp, Zea mays
  Peptide Sequence Number=SeqID_51145
atgacgagggggaggcgtgcctgcgcaaggtacatgttctgcgcagagcagagtggctcgtggccacgggaacatggctgcaacctgctggtgctcgcctacctgcgctccttctccgtcgtcgtggtctcgctggcttcgaggacgggctatgggcctacttccatcgcctacacaagggaatcttgggtatttggaggtcgtcattcgtgcatgccgcaatgccctaggggaggctgggcggttacacagtgttcaccgttttgcatgccgcctacgccgggcgtggagccggacccggattga

SEQ ID NO: 9367 - DNA, 1050 bp, Zea mays
  Peptide Sequence Number=SeqID_51146
atgcatccgagctgctctccactggcagtgcctccgggcttccggttccacccgacagacgaggagctcctctactactacctgaggaagaaggttgcctatgagcccatagatcttgatgtcataagggaggtggacctcaacaagcttgaaccatgggacctcaaagatcggtgcaggattgggacggcggagcctcaggacgagtggtatttcttcagccacaaggacaggaagtaccctacggggacgcgaaccaaccgggcgacgacggctgggttctggaaggcgaccggacgggacaaggccatcttcctcggcaacgctgggaggaggatcggcctgaggaagacgctggtgttttacactggcagggcaccccatggcaagaagacggactggatcatgcacgagtaccgcctcaacgatgacaacgtcgaggtgccgccgattacggaggatggatgggtggtgtgtagggttttcaagaaaaagagcatccagaggggattcgaccagctgggcacagcgtcggctggcgacgacgacgaactccaatccttccactccccgggcggcgtgatgaccactctggcggagcagaagcacggcctcctccaccagctcacgcacggcggagtcgtcgttcccgccttcgacccctgcatgaaccttccacacctcacgagtgcggaagggcagcttgccgccacggcagcatttacatccggcacatcggctgtggccatgaacctgctcgacatgggtcgttgttctcgccacaaccacaaccacaacatgctgaagatgacaacaacaccatgtggctctgccagtgacatgccgctgaacagcggtgagcgcttcggtgccgccgccgattggtcgatcctcgacaagctgctggcgtcacaccagaatcttgaccaactcttccattgcaagttcgggggaacaaccttcgcggtgcctcaccattatcagcaggagatgcagcagcagcacatggaaatcagcgcgtcttcactgcataggctgcctctacattag

SEQ ID NO: 9368 - DNA, 162 bp, Zea mays
  Peptide Sequence Number=SeqID_51147
atggctcttctttgctttggcaaaaagagaaggagctcttcttgcccatatgggagtggaagcttcagtgtgttcccagggggtagctgcttttgcatagaatggattttgggccttgcccgcttgcacacggaaaagaagaagcgaaatccatttccgtaa

SEQ ID NO: 9369 - DNA, 177 bp, Zea mays
  Peptide Sequence Number=SeqID_51148
atggccacttccttctattctaattctaagcagcagacgtccgtcgcccctattgctgaagaagcagctagagcgcccatggatgaccacagtaagacgcaggcagtcaaggataggctgaaggacaagacggcgaaggtggcggcgaaggcggtccgcgttttgtttggaaattaa

SEQ ID NO: 9370 - DNA, 470 bp, Zea mays
  Peptide Sequence Number=SeqID_51149
atggaggaggaggtgacggggagcggcgggggaattgggcggaagatggcagcgggggaggtggatcttaaggagaaatcggggacggcgtggagccactcgtacctcaaccagaagccgtggcacccgctctcgtacccgaacctgcgccgcaagtggatcgccgagcaggtccacgccaatcacgcgcgccgccaggaggaggtgcagcgggagttcgcacaggaacaggagttcttccggcagaccgctctcttctctaagaaggacaaggagaagatcatgccccaagtggtgcgaactccggggaccggagccaacgtcaaccgcgcgcacgcccagcacggcacctgcctcgtccactgcctctgcttcggcgtcctcctcatgtcaaagctaatggtcgttggggtgagggaggcagtggcggtggggcagcgcgtgggaatgcgagaggaggcgggcgagtg

SEQ ID NO: 9371 - DNA, 984 bp, Zea mays
  Peptide Sequence Number=SeqID_51150
atggaggataaagataataaagacaataaagagtttaaagttgattggaagagggtgggcatcacaagctccttcggatttgcttttgttggtccagttgggcattactggtatgaatacctggatcgcatcatccggcggaggtttcagcctaacacgttcaaattcgtcgcctcaaaagttgccgcggatggattcctcttcggaccactagacctcctcctgttcttctcatatgttggtctgggtcaaggaaggagcatagagcaggtgaaggaggacgtgaagagggacttcattccggctctggtgttaggcggaaccatctggcctgctgtgcagatcgcgaacttccgcttcgttcccgtgcggtaccagctcctgtatgtgaacttgttctgcctcctggacagctgcttcctgtcgtggattgagcagcagggtgacgcctcctggaagcggtggttcacttcgttccagaaaatcgaagaccagaagggtaagttctgggccgtggcggcggcgtcgtccctggccggcgtggcgtccgcggagaaggcgggcgggttcgtggtgacggggcgcgtgtactgcgacccctgccgcgccgggttcgagacgaacgtgtccaggagcgtggccggcgcgacggtggaggtggtgtgccggcacttcggcgcgtccaaggagacgctcaaggcggaggcgacgacggacgacagcgggtggtacaagctggagatcgaccaggaccaccaggaggagatctgcgaggtggtgctggcccggagccccgacccggggtgcgcggagatcgaggagttccgcgaccgcgcccgcgtcccgctcacctccaacaacggcatcaagcagcagggcgtccgctacgccaaccccatcgccttcttccgcaaggacccgctcaaggagtgcggcgccctcctcgagaagtacgatctcaaggacgcctccgagacgccatga

SEQ ID NO: 9372 - DNA, 462 bp, Zea mays
  Peptide Sequence Number=SeqID_51151
atgtggctggtaatccgggcccgcgctgttagcttcagatcacgcgctggtgacgccgacctgtggggcctcgcggagggagaaccgggggtcaccgcgtcggtgccgaacggggaagtgttccctggcctcactgggggaagtcgtcgtgggcaaggattaggtgccaccggtgtcactgctggggatcttcatctgcgcaggcgctcgggtcgcgacggtcgcctaggtgcttcaccattccgtgggggtgaatattcgtggtctccactggccgaatcggtgggcgaggggaagggaatttctcatcggcacgccactgttccgccgtatcgcgtcgacaacctcttcctcgtcaccaccgacggtgagaacgcctctggtacaacctctgcagagtgtaaaactggtatactagccgagctcacggtcatgagcagctcaggattctcacatgattaa

SEQ ID NO: 9373 - DNA, 2187 bp, Zea mays
  Peptide Sequence Number=SeqID_51152
atgcaccaagacagtttcaggtcggtggtctgcagatccctctcgaagagcctgcccccaaggagcaaagatggcagctgttccgaaacagtccagtgcactgtcccctgtatcgtcacgctgcagccttcggtctgtcggagctgccaaggtcgggatgtacagagcgcgtcgcagagctacagggaggatgaaaggtccatgtcgttccacggggactacctgatggtgccctcgctgtccaagcattttgctgaggacctcctaataagaggcgccatggatctccaggagtcccttgcgatgcttgagaggttccaagctgcgtcactgagcatgagactactgtccagcaagaagataagaccggaaactggtgaacagtctcctgcgatagacaccatagtccgtgaagttctcctgaggccatcgaacgccaagcaggtgcaggtcaatggattaaaacaacagctaagcgattctaccagtgagttgaaaaatattgtcaaggatagtttttacaagaagaaccactctctggtgtccaacaatgagcaggcctctttgactttgagccagtcggcacggcacttgccgaacagttacctgatgcccaagcctgctgctcatcagaagaaatctgtgcccatgtcgtcgccatcttgtgcagcagtgcgacctgaaaagtctaagacgccaagcttggtagccaagctcatgggtctcgatggattgccctcgccgaaagctaaatccaccatgaaagacgacaagaacaaggcagcgagttcaccaagagcgctgttcgataccgagaggcccaggtcgaagaggctgctgccgcagttactcaaacaggaggctggttttggctcagagatgcctcggtcagaaaagctgccaccattgcaatctaacgttcaaaagaactctaccagctcaaagaagggcatcgtcggcacttcgtatactaccggagcggttcatgatactgcatcgatcaaaccgatccaaagagcggcatacgttgagcaggctcgaccgaaatccccgaaagaaatcaagatcgtctcttctcctacaggcaggaagcaacgggcgaatgagatcaacaggaggagcacggagaaacaaaggccttattcaggtgaaagaagcagagaaaggatgaatgctgcgaagtcaagagctggatcagcgtctcgtagcgcggaagcagtagcgaaacagtgtgataggagatcagttgcgtcaaggagcaatcgtacttgtgactcggtggtgaagcccaactcaccgaaaccacagagcaattccagagcgaggagagtgcccaggagaaatgttaagagctccaccgttgatgaattagtggcttacgagatagaaaaagagattctccatgccctggaccaaactgacggtccatccacagaacatagcgcgacaccgagcgacgaagcctgcccgagcgctgactgggacgaagcatcttctgtgggcgacatcctgaaagatcctggcgaggccagcgaaacatcgcagtctgctgtccgtgactgtagaatcagctcagctggtgcggatgcagatgctattcactcaccgacgcacagagccccgacaagggaagctgaaataaaagacgagatcggcttgcttctcctcagtgacaaaccgttccttagcagagcagctgagctcataggcgttgatgtgtatggggatctgagtaaccagtgtgacaggatctccaaggctagaacgagaaaccgtcggctctatctggacgcggcaggagagcaactggagctgaaacaccgccagcagaacatcctgtggccttacgctaggccgctgggccggagatggaggtcatcgtcatcggcgtacctgtcgctggaggagctgctgagagatgtcagcgacggggttaggaatctggaggatgggtattgcagtggagatgcccgccgtggcagcaaggatagcctggacgtgaagctggagagggatctcacctcctccgcagatgcgttgatcagtagtgtttgggacatgggctggcaaggtttggcttgtgtggaggcggaatgcttcgtcagagatgccggggaggagatcctgtccttgctcgtcgaggaagctgctctagacatgtgtctgcactgccatagtgccatgtga

SEQ ID NO: 9374 - DNA, 1458 bp, Zea mays
  Peptide Sequence Number=SeqID_51153
atggagtccttgggcgtgctgctgctccaccccttcaacgcgtacctggagcaggagctggaccgccgcttccgcctgtaccgcttctgggagacgccccgcgaggagttcctccgcgcgcacgcgggcgccgtgcgcgccgtcgtcggcaacgccagctacggcgccgacgccgcgctcatcgacgcgctcccggcgctcgagatcgttgcctccttctccgtcggcatcgaccgcgtcgacctcgccaagtgccgcgaccgcgggatccgggtcaccaacacccccgacgtcctcaccgacgacgtcgccgacctcgccgtagggctcgccatcgccgtgctccgcaggatcccgcaggccgaccgatacgtccgcgcggggctctggaagtccaggggagactacaccctaaccacgcggctgagtggcaagagagttggtatcctggggcttggcaggatagggtcagcgatagcgaaaagagccgaggcattcggttgttccataagctacagctcaagatcagagaagcctttcccagactacaaattccacgtgagcgctgtcgacctggcagccaactgcgacgtgctcatcgtgacgtgctcgcttaccgccgagacccaccatgtcgtgagccgcgaggtcatcgacgcgctgggtccagagggcgtgcttgtaaacgttggccgcggagcacacgtggatgaacccgagctcgtcgccgcgctcctcgagggtcgcctgggaggagcggggcttgacgtgtatgagcacgagcccttggctcctgagcagctcctgggcctggacaacgtcgtcttggtgcctcacgtgggcagcgatactgaagaaacgtgcagggcgatggccgacctagtgctagcaaacttggaggcgcacgcgtcggatgagccattgctcactccgttcagcggcaagcgggtgggcatcatcgggctgggcaggatagggcaggcggtggcgaagcgagtggaggcgttcgactgcccggtgagctaccaccagcggacggagcagcgggcgacgtacccgagctacacctactacccgtcggtggtggagctggcggcgaacagcgacgtgctggtggtggcgtgcccgctgaacgcgcagacgcgccacatcgtgagccgcgaggtgatggaagcgctaggccccagcggcgtgctgatcaacgtcggccgtgggccacacgtggacgagcgcgagatggtggcggcgctggcggacgggcggctcggcggcgccgggctggacgtgttcgaggacgagcctaacgtgcccgaggcgcttctggggatggacaacgtcgtgctgctgccccacgtcggcagcggcaccaacgagacgcgcaaggccatggccgacctcgtgctcgggaacctggaggcgcacgtgctcagcaagccgctgctgactccggttgtctga

SEQ ID NO: 9375 - DNA, 183 bp, Zea mays
  Peptide Sequence Number=SeqID_51154
atgggcaagttcgttgtgcggcaactcgcgaagctgggcaaccagatcaccatcgcatccaccatggtaggtcttgtggagtgcaaggtgtacgcgtacaaggtcggtctggatgtgatcaagttgctggagcgcatgcagattcgacaagaggtatgtctacagctagaaacactgggttag

SEQ ID NO: 9376 - DNA, 537 bp, Zea mays
  Peptide Sequence Number=SeqID_51155
atgctggcacaccggacatcaaacagtacctgtccggtgtgcaccggacacccaggcgggcccacaagtcagaagctccaacggtcagaatccaacggcagtgatgacgtggcagggggcaccggactgtccggtgtgcaccggactgtccggtgcgccatcgagcagacagcctcccaacgaccacttttggtggagccggcggcggacaccgagatcctggggtaccacgtcccggcgcgcacgcgcgtgctggtcaacgcctgggcaattggccgggaccccgcgacgtgggagcgcgccgaggaattcgtaccggagaggttcttgggcggcggcgccgcacccaacgtcggcttcaaggggcagtacttcgagctcctgccgttcggcgccggcaggaggatgtgccccgggatcgcgttcgcggagggaagcgccgagatagcgctggcaagcttgctgtttcgttttgactgggatgcgactcggggaatgaaccggatagggacgccatccgacgtcatgagtagatga

SEQ ID NO: 9377 - DNA, 171 bp, Zea mays
  Peptide Sequence Number=SeqID_51156
atggcgttttaccgcacttacggctgggttcggtactccctggttgttgcgttgcgtcgtggcgaggaagatgcggatgacgccgaccagatggccccacacggcagtggctgggacacgaagacacttcttaagttgagacacatgggatacattatgcacatcaggtag

SEQ ID NO: 9378 - DNA, 450 bp, Zea mays
  Peptide Sequence Number=SeqID_51157
atgggtttgataaaaacgaacaggaccttagctgtgctactgaccaaccagagccccgccgcagtctggagatatgtcactacgtcagggacctcgttggctcgttcacaccaccacggccgacggcgccggccgattgatcagccggcgtgcacctccggggatggcaaccggggcagcgttccccgccacaaaggaccatgcagcggcaggaggaaaacgaaacgccgtggagagccaacgcacgagagaaaggcacagctcgtccgacggctgaggaagcggtacatgccgttctgcgcggcgtcgcaatcgaccgagccgcggaggtatgggaaggccgatggcgataagcatgggacgatagcgctgttgcccaaagactacaagagaaagaggaacattataatgaagatacagatgtgtcatgtgtgtctatttgctgaataa

SEQ ID NO: 9379 - DNA, 243 bp, Zea mays
  Peptide Sequence Number=SeqID_51158
atgtcgatgatgcagcgtgaagaaataaaaatccgagccggcacggaagcctatgtcctatggcaccagccgacagggccaggggagcttcaagagctagatgatgatgttcatttctcctatgcctctgccagattcaaacatgctctaaactggggcgggctgtcaccattccgctctcctaaagaattaaagttctgcgctagttgctgggccgcttctgccgccgcagtagaaccctaa

SEQ ID NO: 9380 - DNA, 1134 bp, Zea mays
  Peptide Sequence Number=SeqID_51159
atggacgcgctgaagtgtaacaacagcgtcctgccggaggagaccaccgcggacgccgccggggcgttcgtggagaaagacgggttctcggtcgaggacctgcttgacctggaggagttcgccgagcctgacaaggacgtcgccgaacgcgaggatgacgacgcgccaccggcagccgccgcggccgcggagaggtcgaaagcggactcgcagccgtcgtcggtcgtgaagtacgacctccctccgctgctgccgccgccgccggagatggttgacctgccgtcgcacgacgtcgaggagctggagtgggtctcccgtatcatggacgactcgctctccgagctgcagccccaggcgcagccgaagccggccgctgctgtggtcgcgtcgtcggcagcgcggccccctctggcgcagcagcggcgtccgttcgcgcacgacggtacataccgggcggtggcggcggcgccgccgcaggccggcccgcagcggacgccgaccatatgcgcgctgtcaacggaggcgatgataccggtgaaggcgaagcgcagcaagcggtcgcggggcccggggtggtcgaggccgggcgcctcgttcctgcccgactcggcctcgtcctcgtcgaccacaaccacttcctcgtgctcctcgtcaggttccatctcgccgttcctccgtctagactcgtccccgttcggcggcgggctggagctcggcgagggccttttcagctacggccacctcctgccgcggccgccgtcgaagaagtccaagcacggtggcaagggcagcaagcacaggcccaagaagcgcgggcggaagccgaagcacctcccccctccccacccgtccgcggccgcgtcgcagcccgggcccagcgaccggcgctgcagccactgtggcgtgcagaagaccccgcagtggcgtgcgggccccgagggcgccaagacgctgtgcaacgcgtgcggcgtccgctacaagtcgggccggctcctccccgagtaccgcccggcgtgcagccccacgttcgtgagcagcatccactccaactcccaccgcaaggtcctcgagatgcgccgcaagaaggagggcggcatggttgccaccgccgcgccggccgtggcgtcgttctaa

SEQ ID NO: 9381 - DNA, 336 bp, Zea mays
  Peptide Sequence Number=SeqID_51160
atggcgactacggcgtttctatccccgcccaagctgtcgctgcccgggcgacggttcgcgagcgccagaacggcgggacgcgtgagggtccctccggcgcgagcccaagagcagcagcagcaggtggtggtggtggtggaggaggaggacgccgagggggccgagctgtcggagtacacgcttcggttgatcgggtcggaccttgagcactacatccgcaagctgctgtacgacagggtgatcaagtacaacatgaggtccagagtcctcattttcagcatgggcaagccacggatcaagttcaacagcagccaggtcccagatgcgacgaaatag

SEQ ID NO: 9382 - DNA, 945 bp, Zea mays
  Peptide Sequence Number=SeqID_51161
atgtcgatcaacagaatattggtggggggggggggtgtaggcttcaacctcgagatcacccccctttcgccctccatgataatcccagactacgtcggcagcccagccgctgagcccatgcgcaccttcccggcctcgcttacagaagccacgggctccggcttcccaccgtcctatgagcagcagcgtccacacagctgggcttcacctgcgttctggccgcacacgccggcacaccaggccaggttctcgccacctccagtgttttatgcgtcaccgacgccatcgcctccccactttccgcccggtctcatgaggtgggagtctgcgccaatgcccataccacaggtgagcgagaggaggagccccgcacacctccagaatatgctgccaccgccttcgccgagaagagcagacacgggggcagcaggtgctctagagtttccatctgagagtggccggttgattgggaggatggaggaacttcggctagctgatctacatgcgacctcgtcacccagacacaagggcaaggacaataaagatgaatctggcagattctctgcactctcctcatgtgattcaccacggcaagatgatctggatgatgtggattaccattttgatgttgatgatgttgataccccagtctctcaacctcggagcactagcgggaaggaaacaggtgatcaggttggttcattgccccacaaatctcaagacgcacaggtcggttatctagtcaacctgctgagaaacgcccgcccgctgcgaaatcctagcaatccatcacaaacaccaagggctcagtccaccagagtaacctcagcaagctcggtcaccacatctgacgcgctggaggtgctccagtccttcaaagagacaagggagcgactgctgtcccggagcagcgcaaaacatcaagagccaccgggaaagccatag

SEQ ID NO: 9383 - DNA, 1203 bp, Zea mays
  Peptide Sequence Number=SeqID_51162
atgagaaaactggcagcgctcatgctcatcctaggtggagctctgggtgtctctgcgcgtgtgccatgcgctggcgctgctgctgccgccgcctgcaggagtgcatccataacatccctcccctcaaccttctcttcctccacttcttctccgacgcatcagcagctctctcaggtggcggagtacgtagcagcaccggcggaggcttctgcacctttatccatggcctccatctccgtccccgaccccgtcccttccgcaaccgaggacgccgagaacattaggaaagcagcagtgcaaggatggggccccgacaagaaggcgctgatggagatactgggccaccggacggcggcgcagcgcgcggagatcgccgcggcctacgcgggccgctacaacgaatccctcctcgacagactccactccgtgctctccggcgacttccggagcgcgatgatgctgtggacggcggacccggcggcgcgtgacgccaagcttgcccacaaggccatgaagaagaagggcgagcggtacgtgtgggtgctcatcgaggtcgcctgcgcgtcgacgccggaccacctcgtcgccgtcaggaaggcctaccgcgagtcgtaccccgcctccctcgaggaggacgtcgccgcgtgcccgctctacaaggacccccgcgtcaagcaggcgaggccgccgccggctcctgcctgccggctgtcatcctcgtaccggtactccggcgatctcgtcgacgacgagctggcgagggcggaggccgcggagctgcacgacgcggtggtggccaggaagcagctgctgcacggccaagtcgtgcgcatcgtcagctccaggagcaagcagcagctgcaggccacgttcgagcggtacaggcaggaccgtggcaaggccttcgacgaggtactggaggaacgccgcagcgaccagctcgcggcgatgctcaagacagcggtgtggtgcttgacgtcgccggagaagcacttcgcggaggtgatccggaggtccatcgtcgggctcggtacggatgaagaatccctgacgagggtgatcgtttcgcgcgccgagatcgacatgaagaaggtgaaggaggagtacaaggtcaggtaccgcacgacggttaccagcgacgtcaacggcgacacttccggatactacaattccatcttgctcactctagtaggccgtgagtga

SEQ ID NO: 9384 - DNA, 636 bp, Zea mays
  Peptide Sequence Number=SeqID_51163
atgggcaacggcctctccccttgtctgtgccccgggtacgcgcgcggcgctgcggcgcggctggtgttctggggcgggtcatcgaggatggccgacgagcggccgtccatcaccgccggggacgtcatggcggagctccctgaccagcacctcgtctgcgccgcggactccttctttatcggcctgccagtcccggccctctctccgtgcgagcggctcgtggccgggcgcacctacttcgtgctccccgcggcacgcttctcctgcagccaggcgctcaccgccgcgacgctctccaagctctcgccgtcctccgccgcgaacgtgcccctcgccggcgcagcagcgtccccgttcgagtacgtcacgggctctgacggtgcgccgctcatcaggatcttgcccgagttcatcgagaaggtgatcacgtcgtgcggcggcggcaagtgcggcgccgtggcggcggagcagctgtgcagcacgccggagctgaggaagcactacatgcagctcgtgcgtgcgcgggcggagaggccgtggtcgccggggctcgagacgatatccgaggccgacaagaggaggaggatgccgtcgccggtgaggctggtcgggctggcaaaggcttcttctagatag

SEQ ID NO: 9385 - DNA, 570 bp, Zea mays
  Peptide Sequence Number=SeqID_51164
atgaggaaatcgttgggtgggtactcactggcgatcaaccgcgtgaaggcgcacgcctgcggggaatggcggcactaccacaacccctggatttccgatgagcaattcaggctcgccccgccctcgatccagccccgggagacatcaatcgcgagcggcaagttcatgcgactccaattgcccccgcaacggtggtccgccggcgtcaaccatgggtccctggcacagcagtgtgagccaatggcgaacgcagagggcgatggagttccagcccgcacaccggcaaccgataagggaagggcacagggaaagccgagcttttatcccccagcccacggagcgctcggcttcgattcccctggcaacgcacggttgttgcgtaatttttgcggtggcgagaaggtcgcgcgagctacggggcagttctgttacgaggtggaagaacgggcagacaaggcggtcccacatggcagcgaccggctgagacgtgcatggcagggaggaggcaagaggctgtcctgcgggtcccacattacagtggacggaacctgcgcccgagcgcgtgaatga

SEQ ID NO: 9386 - DNA, 630 bp, Zea mays
  Peptide Sequence Number=SeqID_51165
atgtcagaagtcagaaacggtcagcgacagtcaggtagcactggactgtccgatgagtcacagggacagacggatccaacgatcgactgttacaaactccaatggtcggctaacgtggcagggcaacaggcaatgaacaatgcatgtccggccgacgacaagcacaaggagcataaggatggatctgctagctctatcaattcacacaagaagggggacaagaagaaaaagaagacgaagaaggtggtctactacgagatcgactcttccacgccctcaacctccggcgccgagtcaacatcttcgaagcgccaagaccgtaaaaagtatagcaaaccaccatactatgatggtgaagattattgtatgtggagtgataaaatgaggcatcatctaacctcactccacgaaagtatttgggatattgttgagtttggagcgcaggcaccacaagtgggcgatgaggactatgactccgatgaggccacccaagtgaggcacttcaactcccaatccacctccatactcctcgcttcattgtgtggagaggagtacaacaaggtgcaatggttgaaaagtgccaaagaaatttgggacgtcctcaagacggcgcatgaagggacgaagtga

SEQ ID NO: 9387 - DNA, 567 bp, Zea mays
  Peptide Sequence Number=SeqID_51166
atggagcctcctttcgcccatccgaagggagaaacccaccgatccgagtgcggcgaggacgacgccggcgaggaagaagacggggcggcggccgcagccgacaccacagccaccgcgctccccgacgcagccggcgcggaggacgacgaggatgaggacgaggacgcggcggcgacgaggagcgaccggatgtggatccacgatgaggacggcggggaggacgcggccgtcggcgaggaggaggacgacggggaggacgagggcggaggcaagaaggacttcgaggtactaaaagcaaggaagaaggacaagaggattgaggtgcctaaagccaaggagaagaagaggttcttgcaagcggttaaggttaatcgagttgagaagagacatggtacattgaagaacacaacatatggacatgatttaaagccaacgaggggcttgatccctactttagagtattataattttgacattctttttaaactaagttgggactgggggatgtcccttcgaggcccttatggtgctaagggtattggatgctctattggatatgtcccttga

SEQ ID NO: 9388 - DNA, 324 bp, Zea mays
  Peptide Sequence Number=SeqID_51167
atgtggctttacttctcgatcagtgacacctctagggagggtggtattaaatctccatggtcccgaaggaaaagaaaacgagcactttctcgtgaacagtgggagagtctgttttcagcaaatgggaagcttcgtgatggtgggaagaagtttctcaagaaagttcgcagcggtggcattgagccaagcattaggagtgaagtttggcccttcttactaggagtgtttttctttttagaaacccttaactgtttaaagctgacagttaaatactatccttttgagaaatataacttagggcttgttcggttaggggtggattga

SEQ ID NO: 9389 - DNA, 717 bp, Zea mays
  Peptide Sequence Number=SeqID_51168
atgacttacaaaacactaaaaaaatatgtaagctattgtgtcaaaattattagtactgggttaagctcccctaaaggtgctcttctcggcctggctagttatgattcagatgatgacgacgatgctgacactgacagcaaggataagatgccaatatcaaatttatcttctaaagataatgctggtgctataaatactgaaggtgataaaagcactcttggtaaaaggaatgggaatcacaatgaacagaattcttcacttggaagtgctccatcaggggaagatcttaaatctaataatcaaaactttcaaaggagtgcgaatgcagaacctgaacaaatgcatattcgtgatacagagaatggggagttctgtttcaaggccaaaacttgtactgagccaaagggtgcatttgacagaatggatgaggaggcaaatacgtatgcagagcacaatgatttggaaagcagtcacagacattcagaaaagagcagcacagaggactttgttaatgaggtgaaggctgatcatacaaaagaactcaaatattctagagcagaaaaatataataacgatgacaaatacagcatgtatggaaatattaacaaaaggggtagctgcaaggagggaaaaggttctggtagggctgcaaagcatgaatccgatacaagggagccacattacagaggtaactctaagcttgatggtgcaaagtga

SEQ ID NO: 9390 - DNA, 453 bp, Zea mays
  Peptide Sequence Number=SeqID_51169
atggggaggtcttcaccaaatgataaacttttacttgttaaggcactgagggcaagaggtcacgttgttgctgttactggagatggcacaaatgatgccccagcactgcatgagacagatattggtctatcaatggggattcagggaactgaagttgctaaggagagttctgatattattatcttggatgacaattttgcctcggtcgtgagggttgtcaggtggggccgattggtatatgcaaacatacaaaagtttatacagttccaactaacagtcaatgtcgcagctctgataatcaatgtagttgctgccgtcagttccggaaacgtgccgttgaatgctgttcaggtcctcttgaattctgttcatggttcggaatcagattacatgaagtacaaggatccaaaacaacctattaactctaggacagtgatcttattggtagaatga

SEQ ID NO: 9391 - DNA, 1758 bp, Zea mays
  Peptide Sequence Number=SeqID_51170
gtcctaaatgccaccaaggaatcagcaccgaccgccggcaacactactgaggaaaagaaagaagataacgcgaagaaaaggaaggagattgcacctagatcagaagtatggtctcactttgttaagatttgtgttgatggacacttgaagaaagggaaatgcaagtattgcagccatgagatcaagtgtgacccaaatttgaattgtacatctgccctacgtgctcattttaatatttgcaagtgcaatcctcataaaaatagagacccaaatcaaagcaatttacaattatctcatggtgaaaacgttgcaatctataagtttgatcctgaagcaattagaaaagcattttgtgaaatggtcattgaagatgagcaaccatttgcatgtgctgaaaaggcaggctttagaaagttcatgtcaattgcttgcccacgttggaatgtgccatctagaagaaccctcactagagacactgtgtctacatactttgaagagaaagcaaagctcaaaaccttttttaagcaacaatgtgaaagagtttgtcttacaattaatgcttggacttctcaacaacaagatagttatatggctgtaacagcacattttatatattctgattggaaattgcacaagaaggttattagttttttcttagtgaagggtcataaaggtgatgatattggaaaaaacattatgaggtgtttggttgaatgggggattactaaaatcatgacaattacagttgataatgctagctctaatgattctggtgttgattatgttcgaagacaaatgaataataaaaaaactagcattgctatgggcaagtttcttcacatgaggtgtgctgcacatatacttaacttgtttgtttctgatggattaaaagaaatggatgactcagttaaacgtgtaagggctgctgttatgtttattaagaattcaccttctaggttggcaaagtttaagaaaattgcagaggaggagaatgtacaaaccaatgctttcttgaaactaggtgtttgcactaggtggaattcaacatatcttatgttacacagtgcaatcagttatgagaaagcttttgcaaaatatgaggaagaggatccaacctacactattgagttatgtggagacaaaggtcatggaattccacttgaagatgattgggaaaatgaaaaaaagatggctgaatttcttggccatttttatgatatcactctttgtgtttccactcaactaactgtgacaactaatgagtactttcatgagattggtgaagtgaagatgctgctacgacagtgggctgatagtgacgattatttgcgccaaacaatggctacgagaatgaaggataagtataacaagtattggggcaattggcatgacaatgagaatgacaatgagaatgcaaatgaggggagggaaaagggcaagttgaaggagaaggagaacatgaacttgctcatctttgttgccacaactcttgatccaaggtacaagctatctaattacaccaagttagcaattggggaaatgtttggtgaggaaaaaggagaaaaagtttggaatgcagtgaggcaatgtttctatgatttgtttgaagaatatagaagcatctattctccaaatgatgattcgatggcagaagtcaatgaagatcaaactcaaaaaagagggggaagaatgatgagattgttgattgctaaaaagatgaagggttggcagtggttccataggcattaccaaatctga

SEQ ID NO: 9392 - DNA, 216 bp, Zea mays
  Peptide Sequence Number=SeqID_51171
atggccctggtctctagaggtggtttcttgtcacacccggttttggaaggcaaaccgaatgcgaaccatgtacgtgctaggatcagaaactcacgtacacaacgattacataattggacatcatcacacattgctcaaaataatagcggaaaaggtccttacggagagatactcaggaaacagcctgagtcccctaaagcatttgtgatatcctag

SEQ ID NO: 9393 - DNA, 939 bp, Zea mays
  Peptide Sequence Number=SeqID_51172
atgaaggcgtcgagcaggccaaccttcgtcacccctcgtagcttctttaactggggcaaaagcgcgagagaaaccgagacgccgccgccgcagctgcagttctcctaccacgacgtcgagccaccgttccccatgtcgctcgtggcaaaaacacacctcagagaccgtgagctcaggtgctgctacaaggccaccgtggacggcttcagtgctacggacttccaccggcggtgcgacttcaagggcccctgcgtcgtcgttggctacaccgacggtggcttccgtttcggcgggttcagcccggaggggtaccgaagcacggacgactactacgacacgctggacgcgttcctcttctactgggcggaatctacggaggtctcggcgccgcccgtggtgctgcccaaggtgggcgggagcggcgcggcgctgttcgactactcccgcggcgggccacagttcggcgccgacggcctgctcatcggcccgccgctcaccgccgtgatgggcgtgttcactggacccgactccagcgccggcgtcggcgacctccgcagcgctcgctcgcggcttggcctgtcgtacgcgaggcggccggacgggaaggagagcctgttcggcgacgagggcagggcccagctcgtggagccgccgcccctggctcctcctctctccgccaagccgcgcccaacgcccgagctcgagccccgagctgcgcagccgacccacgcggagcgccccgacgctcttctcccgtccaagcccgaccgcgcgcaagacccgtcgcaaccgcgtgctgccgccgagcgcaccgagtctgtgccccacgcgaatctggcgccgaccctgcgcgcccaaccgaagcccagcgcccaggacgccgcaaccgagtcacccgcccacgaccgttcgtcttcgtcgttaatggagcttcaatag

SEQ ID NO: 9394 - DNA, 324 bp, Zea mays
  Peptide Sequence Number=SeqID_51173
atggatggcggcggcggttatggcagcacgagtgctggggcgctaggtcatgcgcaggacgtgcctcgggcggctgggcgtggacgaagcgggaggtgggcggtttacggaaggaggcggcctgacgcgcggggcccacggcacagcggcacaagcgtgggcggggcagaccggctgggctggcatgcacttggcaagccgtcggcgcggtgggccgaccaggtgcgggagagggggcggggcgggatggcctggtgggccacgcaagcgcgggcccagggagagcaggaaacagatttttacgcagtgtaccgaaatgcataa

SEQ ID NO: 9395 - DNA, 258 bp, Zea mays
  Peptide Sequence Number=SeqID_51174
atggcgctcccggcgccgctcgagttgcgtctaccaccccctcctctttttccccatctttcctctaccctgtgcacaggcgtcgagcaccctatcccgtcctcgtgctcgcctagtcgagcaacccaaccggcccttggtcaagccgtgccctaccctctcggcgcttggcgcgaccgcgactgcctagccatttggctgtgtaaacacgctgttgggggccttcggcttccgaaggtcctcaaaaacaggatttaa

SEQ ID NO: 9396 - DNA, 324 bp, Zea mays
  Peptide Sequence Number=SeqID_51175
atggagggccggaaccacagcaacgagccggctgccctgctggcgcgtcgcgcgggcgacaaggccgccccgacgaccgactactcgatcaccatcgttgctggaagcaagcaggccgccggagctcacgtacgcgctcgtcaaggcgcggtggctgcggccgtggcgggccagctgccgcgcgggtcctgcaaggtggaggcgactgtgcagggtcctaggcacggaggcaacggcagcgggggagcgggcgtactcctgatgcgtcgcaacgggccgtcgcgtgtgctgccgtattcagtcgcacgtgccgtcgttgtgtga

SEQ ID NO: 9397 - DNA, 366 bp, Zea mays
  Peptide Sequence Number=SeqID_51176
atgtcgtggggtccagcacaagccccgctcgtgggtggcgctctccttcatcctggtgtctctgacctcctcgcaatccgcatcctctccaccctctgtggttcactaaccaccgtcggcgcgtgggcacaccagaaattgaggggaggtgtggcgatcggtgccgttcgcggttcaagtagtaatcgagaaccttgctcgaatttatgtttcgcgtggttgccgacaatggcgccaccgcggaactttgcgagatccgccgtggaccctgtttggggaagacggcgcctgggccgttggatccacagtggacgcacacgattagatgtgggcggcgtcttggcatcgggcattgtggatcgttga

SEQ ID NO: 9398 - DNA, 384 bp, Zea mays
  Peptide Sequence Number=SeqID_51177
atgggcaagaacaacaagcgcaagcgtgagccaactcctccatcggaggattttggtgactcgaagtactcaaaggaggagttctcctctgagtctgaggggtctccggctcccatccccctgcgtgagtcgtctgacgactcagacgactcccaggggctcgcggcggaggtctggacgtacatccgggccgtcgagcgctccgggctcgagggctcggatgactcggagtactcctcggatgaggaggactcgtccgaggaggacggtggcggcgacggcgaggacgacgacgacgacaatgacgacgacagaggcggtggcggcggtgacggcagcggcaggggtggcagcagcggcggcagcaacagggccagtggctag

SEQ ID NO: 9399 - DNA, 156 bp, Zea mays
  Peptide Sequence Number=SeqID_51178
atggctcaggacttgaagaagaggaagaagaaagtgaccacaacacgaattaaggttccgaagatccatgccagatcaactcctcaagctttggaggaaatcccggaaaataatcttttctttgatcttacatgttgtacccgaagccagggttga

SEQ ID NO: 9400 - DNA, 420 bp, Zea mays
  Peptide Sequence Number=SeqID_51179
atgccaacgcgttatctgctggctattaaagctgggcacttttccccctgtgaccataaccgagactggagaaaactcgaagtccctggcgcgtgctacagtggggagggatttcccaactgctcgtcggagctctcctccatcgttgatccgtcatcctacgtggccgtggtgaaccgctacacgaatcacggtacgaagctcactatattctacctcatggcctctgcatcgcgtattccctttcgtagcagagaatcgggcgcttgggcattgggtctatgctcgccggtggtgtggggtcaaccctggtacacgccgccgtgcctgggcgtgcagaggaaggagacgacaccgggaaccgctgatctaaccaccaacggtcgcgattggcgcacgtaccggttcggccggaattga

SEQ ID NO: 9401 - DNA, 726 bp, Zea mays
  Peptide Sequence Number=SeqID_51180
atgggccccatatcgaatcaccaagcagagcaccagggcgacagcgaggtgggtcgacagagcgacacgacggaaatgaaagttgtgcactgctcgctgggaattgaacgcgagttggaacctgggcacgtgcgcacacaggagcagcgacgaccgagtgccagagagccgagcagggcgcgcgcagggaagaacggatcgcgcgcgcaggggcgagctgaagcaggagcaccgagcagaggaggaaaaagcacggcgcacagagacttcacagcgcaggggcgagccaggcgcggcaacaggatgggcgcgcgtcaggaactcgacgcggcggccacggcggacacggcccggcaaagcgatggccagggccattgcgagggagctctgagcagagggagaccgacggtcaggccaagcagggagaaagcgcgtggctgggctggagcaggaacgcgacggaatgttgcgcgcggggaaggaggcctcggtacggcggccatggaagcaagctgcacggctgggagcgtgcagggatccggaggaagatggggcaggggcaccatggccagcagggagatggaggaggggccgttggggaagaacctcggctggctgggcgaacgcgccaaggagcctcggatcaagacgcagggagcagggcatagaaactggagagagatgggggagggagagaggaaaccacgaccatggactaggaaatag

SEQ ID NO: 9402 - DNA, 528 bp, Zea mays
  Peptide Sequence Number=SeqID_51181
atgaagttaaaaaggcttctcagcgctagagtgatcaaagaagtaacatacctagaatggctagccaacactgttatggtaaaaaagaccaatggaaagtggagaatgtgtattgattttacatgtctcaacaaggcatgctcgaaggataaattccccttgctaagaatagattaccttgtagacgcaacagccacttcagagctcatgagtttactggactgctattcaggttatcaccaaatctggatgaacaaggaggacaagcctaaaacaagcttcataactcctagtggaacttactgctaccttcagatgcctgaggggctcaagaatgctgaaggaagcttcagcggaatgacttccaaagtcctcaactctcagattggcaggaatgttttgacatatgtggatgacattatagtcaaaagcacgaagcaagaaaatcatattgctgatttgcaagaaacatttgctaacttcagaaaagttggcctcaagcttgtaacacccaaaatcctattctaa

SEQ ID NO: 9403 - DNA, 476 bp, Zea mays
  Peptide Sequence Number=SeqID_51182
atgacgacggcggttctcagccccttacggaagcaaggagacgtcagcaaggacccaacagccccgacagctgtgcttctacagggctcaagcgctcctccgacgaccacgacatcacatgaacaaggctctagcacctctccgactgccacgatggcatggccctcatacgagatggtggccgcgcgggaggacgggctgacggactggctctctctctccctcgcgaacgcttcgacaatttactcgtcggtccagggaccccccggggtcgaaacgccgacaagagaacaaaattatccaagtggagaacttatcagatataggcggacaaatatggagaaagagggcgcctctgacgaaggtgcgcctgatgccgaagctgaacaagcagatattgaagagggtgatgctgcgtctttatctgggctctctgaagccaaggagtggagccgcttgctgaggccttctgtcgg

SEQ ID NO: 9404 - DNA, 402 bp, Zea mays
  Peptide Sequence Number=SeqID_51183
atggacaatggctccgcggccctcatgaacttcgtttctattaaggagattgaggggcgtatccccttcaatcctcatacatctaaacaagtcggggtgtttggatgccttcattttgaaggaattgaagtttactcaataagtgaaaatatagcatataaatatgtcccacatatgggcaatggtgcggaggatcgtcggatcgatgctgtccacctcggagttgtgttcccggccggcttgagatcaggaggaaatcttgcgaacccatggggtgttcctcgtcggcatggcacggcggccacgcttgtcttgtcctacgacggcggcgtgttcaggattatgtcatgcgtcacaagtccattggtcaccatgaggaggaggagatcggagagattctag

SEQ ID NO: 9405 - DNA, 1677 bp, Zea mays
  Peptide Sequence Number=SeqID_51184
atggcgagctcgtggacgcttcctgaccacccgaagctccccaaggggaagccggtggctgtcgtcgtgctggacggatggggcgaggccaaccccgaccagtacaactgcatccatgtcgctcagactcctgtcatggactcgttaaagaatggtgctcctgagaaatggagactagtgaaggctcatggaacagctgtgggtctcccatctgatgatgacatgggcaacagtgaagttggtcacaatgcacttggtgctggtcggattttcgcccaaggtgctaagcttgttgatcaagctcttgcctcaggaaagatttatgatggagatgggttcaactacatcaaagaatcttttgaaaatggtactcttcaccttattgggttgttgagtgatggtggtgtccactcccgccttgaccaactgcagttaagttacaagcgtaccacaagatttacttttatttgctctatccagttacttctgaaaggtgtcagtgagagaggagcaaaaaaaattcgtgtgcacatccttaccgatgggcgtgacgttttggatggcagcagtgttggtttcgtggagaccctagagaatgatcttttggagcttcgaggcaagggtattgatgcacagattgcttctggtggtggaaggatgtatgttaccatggaccgttatgagaatgactgggatgtggttaaacgtggctgggatgctcaggtgctcggagaagcaccctacaaattcaaaagtgcacttgaggctgtgaaaacactgagagcacagcccaatgctaatgaccaatacttgcccccatttgtgatagttgatgacagcggcaaagctgttgggcctgtattagatggtgatgcagttgtcactatcaacttccgggctgatcgcatggttatgcttgctaaagcactagagtatgcagattttaacaattttgaccgtgtacgtgtccccaaaattcgatatgctgggatgcttcagtatgatgggacacttggcctctggaaagataatgtcgcaagctatctccactatcttatactgcatagtgagacagtgaaatttggccatgtcacatttttctggaatggtaaccgctcgggatactttgatgaaactaaggaagagtatgtagaagttcctagtgacagtggtattacattcaatgttgcacccaagatgaaggcgcttcaaattgctgagaaagctagggacgctctcctaagtggaaagtttgaccaggtacgtgtcaacctgccaaatggtgacatggttggtcacactggggatattgaggctaccgttgttgcttgcaaggcagctgatgaagctgttaagatcattctgaatgctgtcgagcaagttggtggtatttaccttgttactgccgatcatggcaatgctgaggatatggtgaaaaggaacaaatctggcaagccgttgctcgacaagaatggtggtatccagattctaacctcgcatacccttcagccggtgccggttgccattggaggccctggtcttcaccccggagtgaaattccggaacgacattcaaatccctgggctcgccaatgtagccgcaactgtgatgaacctccatggatttgaggcccctgctgactacgagcaaaccctaattgaagtggctgacaactaa

SEQ ID NO: 9406 - DNA, 468 bp, Zea mays
  Peptide Sequence Number=SeqID_51185
atgggcaagaacaacaagcgcaagcgtgagccgactcctccatcggaggagtttggtgactcggaatactcagaggaggagttctcctctgagtccgagggatctccggctcccatccccctgcgagagtcgtctgatgactcagacgactcccaggggcttgcggcggaggtctggacgtacatccgggccgtcgagcgctccgggctcgagggctcggatgagtctgagttctcctcggatgaggaggactcggacggcggcgaggacgaagatgatgacgacgacgacggcgacgacgacgacggtggcgatggagacggtgatggcggcaacggcggcggaggcagcggcggcaagggcagcaccagaggcggcagcagcacgggcagcaccagaggcggcagcagcaagggcagcaccaagggcggcggcggcaagggcagcagcggcaaggccagtggctaa

SEQ ID NO: 9407 - DNA, 267 bp, Zea mays
  Peptide Sequence Number=SeqID_51186
atgggcgtgccgacttctgcgcgcgctggctgcaataaatgctctgacacggacgttggggcgctcatcaacccccgccccgcaagtacccccgaaatgaccgggtggaatttaatggagccacccgttgacatttttccaaggcttgcaattttccaagcccgcgtccccttggtggccgaggacactgttcgtccaacactggacagtccggtgaactatagcactcccgctccgactcttcccgaggatgaccaggaagcgtga

SEQ ID NO: 9408 - DNA, 123 bp, Zea mays
  Peptide Sequence Number=SeqID_51187
atgggctggtggctgaacttgcggatgcagaacggcgtcccgtgcttcatgcagagcgcagaaggggcaccgtcgggcgacgtgctgccgtgctggtgcaggataccgcgccgacacgcgtaa

SEQ ID NO: 9409 - DNA, 2820 bp, Zea mays
  Peptide Sequence Number=SeqID_51188
atgctgtcgggctcgccggtgaagcgcctgctgcggcgggcttccaaggggcggcgggagaaggccgagatggcggtgctggccgtggtggccgccgcgctgctgctgctctgggccggtggggtctccatcgcggcggcggggagtggcgacgaggaggagtgcgacctgttcgacggggactgggtctgggctggcggcggcgatggggttcctcgacatcggcttccgatgcgccgagaacggccgccccgagaggacgacggaagattaacagtcccaatctggcgtggctttgagctccataatactaaactagcgaaatttgactccatgtcggcggcgctcgcggtgacggacgaggtggccctgccgatccgggcggtgggggatctagcggccgccgccgaggtctcgcgggaggaggtcgccgtcatcacccagtgcgcggcgctcgtcattaaaaacgtggaaagcttgagggagcaattggttgctgaaatcaggcgggtgctgaaagctggtggaagagtattggtgcagagccctgcaccctcatccagtcagaagccgaacactgatattgagcgcaagttactgatgggtggatttgctgaagtgcaatcttctgctgcaagctcgcaggatagcgtgcaatctgttacagttaaggcaaagaaggctagctggagcatgggctcttcttttccccttaagaaaacaacaaaagcccttcccaagattcaaattgacgacgactctgatctgattgatgaagacagtctcttgactgaggaggacctgaagaaaccacaacttccagttggtagagcaacaaaacccgtcaacttagttcaactcccaaagaaagcatgcaagaactgtacttgtggcagggctgaggccgaggagaaggttgggaagctggagctcactgcggagcagatcaataaccctcagtcagcttgtggcagttgtgggttgggtgatgccttccgctgtggaacctgtccctacagaggtcttccaccattcaagcctggcgagaagcctggatgcctcttcttaattgagacgaaggacgtggacacggacaacctatacattttcccgcctcccgcgctcccctgctcgcttcttctcctttccctgctctgtttccgagggacggcggccgccaagaacaattgtccagccacgagccaagaacaggcgccttactctagcgccatgtcgtcgtcgctagtgtccaccccattcgccgccgcggcgcagaagcagctcctggcggcgcccgtgccgctgcactcgttcctcctgagcagccgtcgccagcagccgcggcgcgccggcgccatccggtgcgcggtcgccggcggcaacggcttgttcacgcagaccaagcccgaggtgcggcgcgtggtgccggccgacccgcggggcctgcctcgggtcaaggtcgtctacgtcgtgctggaggcgcacagctcaacgctgacccgcgccgcgccgcgtcgttcgaggtcgtgggctaccttccgcgccgacctcgccgacgtcaacgtcttcatcggctccctcatcttcgtcgaggagctggcgctcaaggtcaaggccgcggccgagaaggagcgcgaccgcatggacgccgtccttgtcttcccctccatgcccgaggtcatgcgcctcaacaagctcggctccttcagcatgtcgcagctggggcagtccaagagccccttcttccagctcttcaagcgcagcaagtccaactccagcaacttcgccgacagcatgctcaagctcgtgcgcacgctgcccaaggtgctcaagtacctgccctccgacaaggcgcaggacgcctggctgtacatcctcagcctccagttctggctcggcggctcggcggacaacctccagaacttcctcaagatgatcgccggatcctacttgccggtgcttaggggcgccggcatcaagtacgacgaccccgtgctctacctcgactccggcatctggcacccgctggcgcccaccatgtacgaggacgtcaaggagtacctcaactggctcaaggaccccaacgcacccgtcatcggcctcgtcctacagaggagccacattgtcaccggcgacgacggccactacgtcgccgtcatcatggagctcgaggccaggggtcacattgtctggggtgccaaggtcattcccatcttcgccggcggcctcgacttctccggtcccacgcagcgctacctggtcgacccgattaccggcaagccgttcgtgaacgccgtggtgtctctcaccgggttcgcgctcgtcggcgggccggcgaggcaggaccaccccaaggccattgccgcgttgcagaagctcgacgtgccgtacattgtcgcgctcccgctcgtgttccagaccacagaggagtggctcaacagcaccttggggcttcaccccattcaggtggcgctgcaggtcgcgctgccggagctcgacgggaaatcacatgcattgcataggagagtggagcagctctgcactagagctatcagatgggcagaactgaagaggaaaactaaggaggacaagaaactggcgatcaccgtcttcagtttcccacctgacaagggcaacgtcgggactgcagcatatctgaatgtgttcagctccatctactctgtgctgtcagacctcaagaaggacggctacaacgtagagggtcttccggacacacctgaagccctcatcgaggaggtgatccatgacaaggaagctcagttcaacagccccaacctgaatgttgcttaccgcatgaat

SEQ ID NO: 9410 - DNA, 5163 bp, Zea mays
  Peptide Sequence Number=SeqID_51189
atgcgtgttacacaggatgcttctttatgtactgcgaactccacgattatccgaatgccattatcgtcaaaatgcctcaaagaacttgaagcaggttgcaatatagtacagcgggtttttgaccgatttacacagaatccatccagtactctcctattcttgaggtcaatcattcaggtatctttatcaacatgggaggatggggcctctcagtcaactctgaattattctgtacttgttgacccatctgttgcttctttgagaaacccattttcggaaaagaaatggagaaaatttcaaatatccagaatattttcaagtacaagtgcagctatcaaaatgcaagctatagatgtgcatgtgattgagagtggctgcagttatattgacaaatggtttgttgccctttctcttggatcgggtcaaacacgaaacatggctcttgacaggcgttatcttgcctataacctaaccccagttgctggagtagcagcgcatatagctcggaatggagtatcaaccaatatacatccatctagttgtatattatctcccttaccactatctgggtttataagcatgccagtcacaactttggggcatttcattgtgaggcacagtggtgggcgctatatttttgacagtccacgtgatgcatctctgccagaacttaaagaggacagggtcaggttggttgaagcatggaataaggaacttatgttatgtgtgcgtgattcatatgttgagatggttctagaatttcaaaagcttaaaacagaccctctatcttctgctattgaaccaaggtctgcacaatctgttagtgctatattacagacatatggtgatagggtatactctttttggccaagatcgaagcagaatccaacttcgttcactgggcgtgtttctactggaactaatatggattcaccaagggcatctaaagcggattggcaatccttaatagagcaagtgataaaacctttctatgtacggttagctgatcttcctgtttggcaactttaccatggaaatcttgttaaagtggatgagggtatgttcttagctcactcaggaaatggagatgacgataacctcccatctgatagtgtttgtagtttcattaaagagcgctatcctgttttttctgtgccgtgggagttggttagtgagattcaggcagttggagttaccataagagagatcaggcctaaaatggtccggggactactaaaagcttctccatccattttacttagatccattgaaacatatatagatgttcttgaatattgcttctcagatatggacccttaccgcttctcggatgatctacctgatgaatcaagagttaacagccaacatgttggaacaacgaattcttcaatatcacattctatgccttcttcgagcagctcactgtcttaccaatcaagtactcagatggcaggtacttctggaggcgatgcacttgaaattatgacatactttggaaaagccctatatgactttggtaggggggttgttgaggatatcagcaaaaccaatagtccagcattccacaggactcaagctgctgaaactaatgtgttgtcatccatcatttctgagcttaaaggtgttccatttccaacatcgacaatgcgtctaacaaagttgggaatggctgaactctggatagccaatgagcagcagcagctattgatgagccctttgctggatcaatttatccattataaatgtctggaaaaacccttcttggctctgctgctttccactcaggttatccataggcctctgaaactgaggagcttttctccccacttactagcaggttatttgaagcgcatacttgatgagcgttggatacggattgtactagagaacaaatcctcatggattccttgggacaataatgctgaatcatcaactactccaactcccaaatggattagaagtttctggaaaatttttagttctttgaacggtgacctctctcttttgtctgattggcccttagttcctgcttatctggataagccagttctctgtcgtgtgaaggaacgccatctaatatttgtgccaccaattagtgattcaccagaccctcctggagatgatgtagctggacagcttgatacaccggactcccccagagaagatactagagcagaacagaatgcagtgcttgatactgcatttaggtcaatgaactcggaatttccatggttaacttctctgcttaaccagttgaatgtaccaatttttgatccctccttcccagagtgtggcgcaatgtgcaatttatttcctccaaatggtcgtactcttggacagacaattgtttataagttggttgcagccaaaaatgctgcacatttaccttcgctaattagcctatcaagtgaagattgcgataaactatttgggttatttgtttcggagttcatattaactaacaaccacttgtatcagagagaagaattggatgtcttgagaacacttccaatgtataagacagttacaggaacatacaccagtctgttaggttccgatcattgcattctttctcctacagcattctttcacccgagcgatgcccggtgcctttcttgctcatcaaatgcacatttgtttcttcaagctttgggggttgaacaattaaatgatcatgaaatactagtgaagtttgcgttgcctggatttggaaataaaacagctcaagagcaggaagacattttgacctacttgtatgctagctggaaagatcttcaactgaactctgctgtagtagaaaccttgaaggagacaaactttgtggcaaatgcaaatgaattttgtaaagagtttttcaaacctgaggaattacttgacccttcagatgctctgttgacttctgtgttttctggggagagaaataagttccctgctgaaaggttcatgtcagatggttggcttgttatactcagaaaagcaggccttaggacatccacagaagctgatatgataatacagtgcgcaagaaaaatagaaaccatgggacatgatattatgtcgtctttagaagatgctgatgactttgaggcagatttcacagacagcaaaaatgaaatcccttttgagatatgctctctggcagaatctgtagtaaatgtgctttttgcaaattttgctactttgtatgatagtgctttttgtgaaaagattggaaaaattgcatttgtgcctgctgaaaaaggttttccaagtattggtggtaagaggggtggtcgaagggtacttgcctcatacaatggagctatcttattaaaagactggccattagcatggagttctgctccaattcttaccaaacaaacaattgttcctcctgagtattcttggggagcatttcggcttaggagtccacctgccttcagtacagtttttaggcacttacagattgttggtagaggcaatggtgcggacacactagcacactggccaacctcagcagagataatgacggtggaagatgcctttctacaggtcttgcaatacttggataaaatatggggaacaatatcttcttcagaaaaaaaagaactggagaaactggcatttataccagttgcaaatggtactcgattggtcccagtgaagtcactttttgctcgtctgacaattaacatgtcaccttttgcttttgagcttccaagtcggtatcttccatttgtttcccttcttagagagattgggatgcaggaaagccttacaaattcatatgcaagagaacttcttttggatatccaaaaggcatgtggttaccagcgcttgaacccaaatgaactccgtgcagttatggaaatcttggaattcatgtgcaatggaatcaaccaaagtatcacagatggatcagatgggccttttgattcagtaataccagatgacggctgtaggctggtcactgctgcatcatgtgtgtatgttgacccatatggttctcgtttactgagtaacataattacatcaagactaagattcacccatccagaccttcctcagaatatctgcaaggccttgagcataaaaaagctctctgatgtcattgtggaggaacttgatggaaaagaagaaattaaagttgtcaatagcattcactcagttactctagacagaataaaagagaagctgcgaagtaaatctttgcaagatgcattaaggattgtgatgatcagcgtaaccaatcatttcccttcatttgaagcccttgctttggttcagatagaacggacactagaggatatatcacagaaactgcaactggttcaacgtctccatactcgctttctcttacttcccaatctccaagatgttacaagaaccatccagcgtccttctattcatgaatggtcaagcaacggaatgcaccgaagcatttgtttcgtcaacaaagctacgggttatattctaatcgcagagcccccaagttttttgacgatatatgatgttatcgcaattattgttagtcacaggttaggggcaccaatgatcttgccgattgcctcagtgtttgcatgcccagatggttcagagaaagaagtccttcaaattcttcacctgggttcagactttggagtttcaaaacgtgaagggagatacgacgcttcccttggagcagaattgttatctcaggatgctcggcaggtgcaattccttccattaagaccgttctatagtggtgaaattgtggcatggaagacaggcaaagagggggaaaagctcaggtatggtagggtccctgaagatgatgctggacttgaatatggaaaagtatcttccactgaactggtacaagcggtccatgatatgctttcagctgcaggagtaaggatggatgctgagaaggaaacactctttgaggctactctttccttgcaagatcagcttaaagaatctcaagttgctctcttggtagagcaggagaaggcggaggcggctgtaaaagaggctgatgtcgccaaagcagcatgggcatgccgtatctgcctgaatgctgaggtcaacatgaccatcataccatgcggtcatgtcctatgtaaccgatgctcaagttcggtttcgcggtgcccattttgccggacgcaggtggccagaatgatgaaaatattcaggccataa

SEQ ID NO: 9411 - DNA, 8571 bp, Zea mays
  Peptide Sequence Number=SeqID_51190
atggcatccttatctgaaagggtggaggatactgttctcagacagggtcaagctttctgttttcttcctttgccagtaaggacaggactatctgtgcacgtcaatggttattttgaagtttcatccaaccggcgtgacatttggtatggtgctgacatggacaggggtggtaagcttcgctctgattggaacaggctactgttggaagatgttgtcgctccgttgttcagagaactgctgatgaaattgcggacgctttctgactccacaatatcatattattcactgtggccaactggtttatatgaggatccctggagtatccttgtggagcaaatttacaaggttatttacacctcgccagtcttgcactcagagattgaaggcgggacctggatatcaccggctgatgccttgcttcacgatgagggattctcaggaagcaataatcttaatgaagccctcgtgttggtaggcatgccaattgttcgtgtatctaatgcaataggcgatatgttttcaaaattttatatgcagtctatgctcaaaatagtaagtcctgctatagtgaggcatttcctcaaggattatgctaaacttgctacgctaggaaagtctcataagttaatattattggaatattgtcttactgatgtttacaatactgatatcggtaaatgcatgaatggccttccactgattccactagcaaatatgcggtatgggactttttctgctagttcgcaagaggactattattatgtctgtgataacatcgaatatgagcttctagctgaagttggtgatagaatagttgacagaagcatccctcctgtactactagacaagctgtatcagatagccagtgattcccaggcgaacattaggttcattgatggcccaatcttctgccagctcttacccaggttatttcctcctggatggaagcttaaagatcaagttccctggaacccaggcttgggtgggtcatctcctacagcagcatggtttaaacttttttggcagtatatagggggacgctcgtatgaccttcatttgtttagtgattggcctatactgccatctacctttggccaccttcacagggcatgcacaagctcaaaattaatcaaaacagaatcactgtctagtttgatgaatgaactcctggcaaagtttggttgcaagatactggatgctgaatatttgagtgatcacaaacaattgtcattttatgtatatgatggtgatgcaactggagttcttcagtcaatctttgaggttatctcattggagggtgttgatttgcaatctctgtttcaacgcattactcctggtgaaaaaaatgagctgtaccagtttcttctggatccaaaatggtatttaggagcctgcctttctgtcgtaagtataaaccaatgtaaaaagcttccaatcttcagggtatttgatggaggttctcccagcacttatggtttctcggatttgtttagttcaagaaagtatctgccacctcttggtgttcctgaccatttactcaatgacgactttattttctctatttgcccaagcgatgaagatatcataatgagatattatggcattgaacgcatgccgaaatcgaacttctaccagaggtatgttctgaatagattagacaagctgcaaacggagttgcgtgattcagttcttttaacaatcttacaagatctgcctcagctgtccttggaggatccaatgttcaaggaaaccttgaaaattcttagatttgttcccactatcaatggaactttgaaaagcccacaatctctttatgatccccgggtggaagaactttatgttcttctccaggaatcgggttgctttccccatggtttatttcaaaatccagatgttcttgatatgctgctttgcttggggcttagaacttcagtttctaccgataccatattagaaagtgctcgtcagattgattcacttgtgaacatagatcagcagaaggcccattcaagggctaaggtccttctttcatatcttgaagttcatgctcacaaatggtatgtgaataagctatttgatggtcgtaagaaggtaaacatgctagctaaagttaccactgcgctcagacctcgtgacaaatcttgggaatttgatcttgagaagttctggagtgatctgagattgatttgctggtgtcctgtgttggctactgcaccaagtccagctttgccatggccttcagtatcatcaatgatagctccacctaagcaagtaaggatgcaggaagatatgtggattgtttctgctagctcacgcattctcgatggtgaatgcacctcctcggccttgtcgtacagtttaggttggttgtcgcctccatcagggagcgtgattgcagctcaactgcttgaattgggcaagaacaatgaaattgtgactgatcaagtccttcggcaagaattagctttggtgatgcctaagatttattctttgctgacaaacttgattggttctgatgaaatggatatagtgaaagtggttctagaaggatgcagatggatttgggtgggtgatggatttgcgaaaacagatgaagttgttttaagtggccaccttcatctagcaccatacattcgtgttgttccaattgatttagcagtgttcaaagacttgttcttggaactcggcataaaggagcacctgtaccctgttgattatgctagtattcttggcagaatggccataaggaaagcttcagcttcacttgaagctgaagaactaagaacagctatcctggttgtgcagcatttatctgagttccggtttcaggatcagcaaacacaaatatatttacctgattcttcgtctaggctttgtctatcttctgaacttgtattcaatgacgctccttggttgcttgattttggtcatgacatcagtgggagtgcatcaagcattgctttaagctcaaaaaagtatgttcacaattttgttcatggtaacatttctaatgatgtggcagaaaggcttggtgttcgatctcttcgccgcctattgcttgctgagagttctgattcaatgaatttgagtttatcaggggttgctgaggcgtttggacagcatgaagacttgactacacggctcaagcacattgttgagatgtatgcagatggccctggaattctctttgagttggtacagaatgcagaagatgctaaggcttctgaggttgtgtttttgctggataagactcagtatggaacttcatccattctttcgcctgaaatggctgaatggcaaggacctgctctctactgctttaatgattcagtttttagtccacaggacctatatgccatctcacgaataggtcaagacagtaaacttgagaaaccttttgcaattggaaggtttggtcttggcttcaattgtgtgtatcacttcacagatattcctggatttgtttccggtgagaatattgtcatgttcgatccacatgcctgttatttgccaggaatatctccgtctcatcctggtttaaggatacagtttgtaggaagaaggatcttagatcagtttcctgatcagttcgccccattcttacattttggttgcaatttgcaacagccatttccaggtacactcttccggtttccccttaggaatgcggctgctgcttcgagaagtcaaataaaacgagaacagtatgcaccacaagatgtggaaatgcttttctcttcattctccgaagttgtatctgaggctctactttttctccgcaatgttaaaaaggtaactctatatgtcaaggaaaacaacagtaaggagatgcgacttgttcatcgtgtctccaggcataatagctctcagataggtaaagaacctcatgcacttggtgcaatgcttgcgtttatacatggaagccaaccatcaggaatggatagaaatcagtttttcagtaagttgaataagactaaagacagtgacttgccctggagttgtcagaaggttactattcttgaggaaaacccttcttcacacttgttgcactcatggattttagctgaatgtataggtgggggtcatgctagaaagttgtcaactgcctctgttagtaaatctcacttctttgttccgtgggcatctgttgctgcatatctgcattcagtgagtgtagatgatacaaaaggactatcagctgaagctgaagtcaaccatgataactcagttttcacaaacccagatcttggatcttctaagttcaggaaaaattttgaggctcgggccttttgctttcttcctctaccaatcaatactagcataccagtgcatgtaaatgcttattttgaactctcttcaaatcgaagggatatctggatcggaaatgacatggctgggggaggaagagtacggtcagaatggaatttagcgctgcttgaagatgtcgttgctcctgcttatgggcacctgcttgcagctgttgctgaagagcttggtccctctgacttgtttctttcattttggcctagtgctgcaggtgtggaaccatggtcttccatggtgaggaaactctatgtttctattgcagaacttggaattcacgttttatatacaaaagctcgaggtggtcactggctgtcaacaaggcaggctatttttccagatttcagtttctcaaaggcaatggagctggcagaagttctctctcaagctggtttgcctgtggtatctgtaaccaagccaataattgacagtttcattaatgcatatccatcagttcatctactaaatcctcatttgctgagaaatttgttgatccgacggaagcgtggcttcagaagcagagaagaggctatacttgttcttgagtattgcttgagtgatatgggagatccttccttttgcgataaattgcaaggtttggctctccttcctgtggcaaatggatcattcacaacattcaacaagcgaggggagggtgagagagtattccttacttcacaaatagaatttgaacttcttaaggattccataccacatcttgttattgacaactctttaccagatggtgtttcgaagaagttatatgacatagcttattctgcgtgcatgaacatatatatattcacaagtaatcttctcattgagctgttgcctaggatcttgccacctgaatggcaacatgctaagcagttgtcttggtttcctgagcagcaaggtcagccaagtatggaatggatggtatcactctggaattttttgaggcattcctgtgacgatatttcagtttttgcaaagtggcctataatacctcttgtagatggcaaggttgtgcaacttgggaatgctgcaaatgtaataagagattatggatggagtgaaaatatgcattccttgcttcaaaaactgggatgtttatttctgcgatctgatctgcagatagaacatccccagttagcgaattttgttcaggaatccactgctgctggtgttttgaatgctgtgcagtctgtagcttctaatctccaggatatcaaggaattgtttatgagcacttcattggcagaagcacacgaactccgaagtttcattttccagtcaaagtggttttctggaaatcagatcagctcctcccatatgaatacaatcaggaacctcccaatatttgaatcttataaatctagggaacttgttagcttgacgaatcctagaaaatggcttaaaccagaaggggtgcatgaggatttattggatgcaagctttataagaactgaatctgtgaaggagaggtcaattttggtatcatactttgatatcaaggaacctcaaaaggttgaattttacaaggaccatgtccttcctcgaatgtcagagtttctattgcagccagctattatttcagcagttattcgtgatgtgaaactgttgatagataatgatgattcagcaagagctgcattatgtgagaccccttttgtcttagcagccaatggagcatgggtccagcccttcaggctctatgatcctcgtgtgcccgagttactgaagttgctgcaccaagatactttctttccttcagaaaagttcatgatgactgaagtaattgaattgttgggtagttttggattgaaaagaaatttcgggtttagtactttgcttgacatggcaaggtcagtttcactggtgcagaattcaggacaaggtgatgcgtttgattatgggcaaaagctacttgcctatctaaacattcttgagtccaaaacttcaaagatggagggcggagaaacttttcttgaggatgggaatctggaagcatctgaaattagtgaaactttggaacctaacaatcacggggatgtgtgtgatccaagcgaccaaactagtgtatctttgttctcaaatttcgattatgatatgccagaagatttattttggtcagagctgaaaaatatttcttggtgtccggtgcatgttgcaccattgctcaaaggacttccatggttcatatccgaagatatcatagcacctccagtcatcacaaggccgaaatcacagatgtggcttgtttcatcaaaaatgcgaattcttagtgcagattcctgttccatgtatctgcaaagaaaactaggctggtgtgatccaccaaatgtgagcacattgtcttcccagttagtcgagctctccaagtctcatgatgaactcaaaatgttttctgcagacacagacattgatgctattctgcaaaaggaggtccaagtaatgtactcaaaattgcaagacataattggcactcccagtggcaacgctctaaaaaagtatctggatggatttcaatgggtttatgtaggagataggttcgtggcaccacaggcacttgcttttgattcacctgtaaaatatcatccctatctttacacagttccatccgaactgtcagaatttaaaaagttactctccgagttgggtgtaaggcagacatttgatggaatggattatctgaatgcgcttcgccgtttagaaggagatgtcaaaggagagccgttgtccacagatcaactcagttttgttcactgtgtattggaagcatttgttgactgttaccctgacagtcaagcacctgatgtgttactgaactcattggcgattccggattcacttggggttctgacacctgctagaaaccttgtctataatgatgcaccctggatgaatgctaatcccacttcaaagaattttattcatctcagcattggcaatgaactggctaataggcttggtgtacgatctctccgtggatcatcattgttggatgatgagttaatgaggaatttgccctgcatggaatatgctaaaataagtgagttgttggctttgtatggtgagagtgactttcttttgtttgatcttatagagctagcagactattgcaatgcaaagaaagtgcatctgatttatgacaaaagagaacatccgaaacagtccttactgcagcagagtctaggtgacctccagggttcttcgttgacagtggtctttgaaggaaccataatgaaccgcgaagaagtttgcagcttccaacttcctcctccctggaaactgagagggaacatccttaattatggcttgggacttcttagtagttactttgtttgtgatgcattgactattctttctggaggttacttttacatttttgatcccttgggcttgactggtgtgttgagcttcgttgacaggagtggtgtggtctcggggaattttactgatttgcagtctacagtgaacgtgaaggagcgagcacatcacgatcaccctgtttttctcttctgcgttgagattgtagttatgggacagtgggcccagatacaaggagattgtgctaaggttatagagattcctcaagtgcatgctgtgcaggttgtaccaaggaaagaagaggtgaaggggcagttagcaacactactcacagaatttcaggatttattctctcagcctacaaccctacctcctaaaagagtgtttgaccactatatacctttgctgccagggtcagttccagtgaatgccagaccatatagatattctccactacacaaagatgagatagagagacaagtggcagagttgctcaaaataggcttgattgttccaagtgtaagctcttttgcttctccggtattactggtacagaagaaagatggaacatggaggttttgcatagattacagaaaactcaatgatatgacagtgaagaataggtttccaatgcctttggtggatgagattttagatgaattagcaggcacacaatatttttccagtttggatatgacagctgggtaccatcagattaggatgggagaggaagatgagcacaagacatcttttaaaacctatcatgggcattatcaattcagagtaatgccatttgggttgacaaatgctcctgccacctttcagtgtgccatgaactctattttggaacccttccttaggaagtttgtgctgatttttattgatgacattctcatttacaaccctacactgcaagatcatgttcaacatttgtag

SEQ ID NO: 9412 - DNA, 654 bp, Zea mays
  Peptide Sequence Number=SeqID_51191
atggctagatggcaaatcttgctctctgagtttgacatcgtatatgtaagtcagaaggccgtcaaggggagtgcgatagcagattttttggctagtagggctctggaagattatgagcctctggattttgatttcccgaatgaagatttgatgtatgtggcgaatgctgaagaggattcccaaaaaaatcattcttggaggttgaactttgacggagcatcgaatgcactaggcaatgggattggggcagtcctggtgtctctgaatggagattatcatccttttactagtaaactagactttgattgcactaataatatggctgagtatgaagcctgcatcatgggtatacgggcagccatagagcggaaaatcaagacattagaggtgtacggagactcagcattggtgatataccagctaagaggagaatgggagacaagagatcctaaattgatccgttaccggagattggttttgggattgatcgaagagtttgacgacattacattctgttatctcccacgggaagaaaatcagatggctgatgctcttgctactctagcttccatgattaaagtgaatcagttagaggatatgaagcccattcaaattagtatttatgagatcccagctcactgttacagcatttaa

SEQ ID NO: 9413 - DNA, 837 bp, Zea mays
  Peptide Sequence Number=SeqID_51192
atggggattttcaacaagttttccttcatttttctcgtcattttccttgcattgtctgcaaatgctgaagttcaacgacatcgatttgttattcaagcaacaaaagtgaagaggctgtgcaagactcacaacatcatcaccgttaatggcatgtttcctggacctaccttggagatcaagaatggcgacacccttgaagttcaagttgtcaacaaagcccgatataatgtcaccatccactgggaagcaacaagaacaggggcagctccaaatgtctctgatgcatataccatcaatgctcaatctggtgatctctacaaatgctcctccaaagagacgacagtagttcccatcgactccggggagacgaatctcctcagagtgatcaatgccgccttgaaccagccgcttttcttcaaagtagccaaccataagctcactgttgttggagctgatgcgtcctataccaaacccttcaccacttccgtcctcatgttaggccccggccaaaccactgatgttcttatccaaggtgatcagccaccatctcgacattatatggcagctcgagactaccaaagagcacaaaacgcaccatttgacaacacggccactactgccattctcgaatacaagtttgcctcttgcgctgccaaaaaatgcaatggacccactccaatcatgccttctttaccagcctacaacgacaccaacactgtcaccgccttcagccaaagctttagaagtcgagaaaaggccgaagtcccaaccgatatagatgaaagcctgttcttcacaatcggcctggaactcaacaactgcccacccaatttatag

SEQ ID NO: 9414 - DNA, 3942 bp, Zea mays
  Peptide Sequence Number=SeqID_51193
attcaagcaacaaaagtgaagaggctgtgcaagactcacaacaccatcactgttaatggcatgtttcctggacctaccttggagatcaagaatggcgacacccttgaagttcaagttgtcaacaaagcccgatataatgtcaccatccactgggaagcaaaaagaacaggggcagctccaaatgtctctgatgcatataccatcaatgctcaacctggtgctctctataaatgctcctccaaagagactacaatagttcccatcgactccggggagacgaatctcctcagagtgatcaatgccgccttgaaccagccgcttttcttcaaagtagccaaccataagctcactgttgttggagctgatgcttcctataccaaacccttcaccacttccgtcctcatgttaggccccggccaaaccactgatgttcttatccgaggtgatcagccaccatctcgatattacatggcagctcgagcctaccaaagtgcacaaaacgcaccatttgacaacacgaccaccaccgccattctcgaatacaagtctgcgtcttgcgctgccaaaaaatgcaatgcacccactccaatcatgccttctttaccagcctacaatgacaccaacactgtcacggccatcagccaaagctttagaagtcgagaaaaggccgaagtcccaaccgatatagatgaaagcctgttcttcacaatcggcctcggactcaacaactgcccacccaatttccggaaacgtcgttgccaaggacccaacggtacacgtttcacagcgagcatgaacaacgtctcattcgtgctcccgcgcaacttctctctgttgcaagctcaccaacaaggaattccaggcgttttcaccacagatttcccagcaaaccctccattgaaatttgactacaccggaaacgtgagccgatcgctctttcaacctgttccgggaaccaagttgtacaaattgaagtatggttcaagggtacaaattgtgctccaagacacaagcatagtgacacctgagaatcatccaattcatcttcatggatacgatttctatatcattgcagaaggtttcgggaacttcgatcctaaaaaggatacttctaaattcaaccttgttgatccacctatgaggaacactgttggagtgcctgtgaatggatgggcagtcattagattcgtcgctgataatccagctttcgaggtcttcgtccaagactcatggcaagctgtggaactcataagaattaagaatggattcatgactttgcatctgatagatggtcaatatctgattgagaagaaacccttctctgatttacgtgttaagtctcggaaggcaactttgcccgattgcacttgctttttgaggcctggtattgatatatgcatcctttctcgccctcaggagacagaaagtctagatgaagagactccggaacctgtgtgggttgatgctaaaataagttccattgagaggaagcctcatgactctgaatgctcgtgccagttttacataaacttgtatgataaccgtgctcctctcggttctgagaaaggaactcttagcaaagagactgaagtaataggaatcaatgatatttgtatcctccaaaagcttgaaaagaatgcatgcgaggatcagcactataggtggaatttctcggaggactgctcgacattgaaacgaactaagatatttttggggaaattctcatctgatatatcatggctgcttgttacatctgttttgaagcagattgcatttgatgtgagatcggtgcagaacaagattgtctatcaaattctggatcaagatgatgatagtcccttaaaatataataattatttccatgctgtaaatatcaaatcggataatggtatttcggtatccaatgtggtccaatttgacccccttggaaataatgaagctgacgcagtttatagtgttgatgaaaccaatcaatggccagtttatgatgctatgaacttgcgacgctctaaacgcaggtttgtacaacctgagcgttttgttggttgtgatcatcctggagggacagatactagttggcatcttacagctgcttgtagaactagcaactggagagaagagggagaggtacaagaagctgatatgaacatgccgctatcacacttgttatgcatcaatgcaagtccaacggaagagcttaccctgtctgaaaaaagagataccatgtccaaaagtaagaatgtatcaaaggaggtaaaatcagatgtgacgactccgaggaaaccaagtgtgggaaatccgagcagatcaggtgtgaaatatcccaggagaccaagagtgaaaaatccaaggaaagatgaaaatactcttgctattgttcctgtgtcttcggaaacaggtgatccagcctttggaaactgtcatatgcagagaactccaacgaatttatcagaagagattgaacaactctctttgcattattataacatgaaacgctacactgcaaacaagaagaagaaaattcctgctttagagtatctagattatggaactgggtggaagggaagacctcaaccaacgaaagcacagagtaaaagttataggtcttctcaaacacgaatggaagattttgatgaactgaaaacttacaaaaagacaactctgagtgcaggtgcatacaataaacttataaattcgtatatgaagaacatcgattctacatccgtaaaagatgagtcgcacatcattgaccggtggaatcagtttaaggaagcaacgtccgcggaaatgaataagaaaacagaaccagaagaaccaccagttgaggaggaggaagaaatgtctgaaactgaaatgctgtggagagaaatggaaatatgtatggcatcatcatactttgatgacgatgagaacaacttctgtgaatattttaacaccctgtgcctcgcaagaccgaaattcgtgtttgaagttttgcggcgattagaccctaaatacaagagaaagaagcggttcgacaaagctcgcaatttgttagaaaaccgagcaagaaaactcttcctagacaaaattgccaggaagatcgatgctagcgtcggagaagagaggatggaaggtcttaacatgttgaggaaaatcaccaacgggtttattgacgtgtacgaaggtgggaattttgactgcctccctggtttacaaatttacaccttaatgatgaactcaacagacatacaacatgagattttggtaaaactccacaaaataatgtctacatatactggctatccattggaattggagcttttgataacgctagcatcgatacatcctagtttggtccggacttcaaactgtagtgctaaatttttcagtacagaagagttgctggaacttgagaagatcaaattcgattttagaaaaggttccaaggtgatgtttgttttgaaccttgtttatcgaatcatcaagaatgaaaaggttctcattttctgccacaatattgcccccatttatttgcttgcggaaatgtttgagagaatcttccgatggcgaaagggtagagaaatattggtccttacaggagacttggagctattcgagagaggaagagtgatggacaagtttgaggaaccaggtggtgcttcaagggtacttctcgcttcaattaccgcatgtgctgaaggcattagtttgacagctgcatctcgggtgattttattggattcggaatggaatccttccaagacaaagcaggctattgcacgggctttccggcctggtcagcaaaaggttgtttatgtgtatcagctgttggcaactggcacgctcgaagaggacaagtatcgtaggaccacatggaaagaatgggtatccagtatgatttttagcgaagcattcgtggaagatccgtctcagtggcaagcagaaaagatcgaagatgat

SEQ ID NO: 9415 - DNA, 525 bp, Zea mays
  Peptide Sequence Number=SeqID_51194
atgaatcccacaggcggccacttcgtcaactgtggcacatgtcagagaaggctcaaccatcgcctcagaaagatttccgccttgcccgagcagggctctgacctcgataatcgcagaaaaggaatcaacaactatggtatgggcttttacccataccgcagcgcagttacaacaactacggtatgggttacaacaactacggtatgggcgacccctcccctgggggctcggactacgaccaacccctcgacctcggccttggctcttagcaggaaatcagcaagcgcaagtcaacaatgcagtacaccgtcatatcactcgcaggacaccaagacatctcccttcggaacacgacaggcccgggcttcatggcatacattgcctaggtgtataaatagggcagtagtagttcttccaaaggcaaggcgaaaacttagtagttttcctccaagtcgttcggtattggcacttgtcttagtcagttctagggacttggggactacccctctcccgttgtgcttataa

SEQ ID NO: 9416 - DNA, 1938 bp, Zea mays
  Peptide Sequence Number=SeqID_51195
atgggagcgaggcgtagtagcacttggccgcaccacctcccgctgctgttcttcctcgtcctcgtcaataccagccatactaccaccatcaacatcaccaaccgatgcccctacacagtgtggccggccgccacaccagtgggcggcggcatgcaactggagccagggaagtcttgggtgcttcaagtgcctggtaacacccaaagtggcctcgtgtgggcgcgcacgggctgttcattcgacggccacggcaacatgtcctgtgagacgggtgactgcggcggcgtgctggcatgcgcgagcagcggccagccgcccttcacgcgtgcagaattcagcctgggtggcctaaacaacacggatttcttcgacatgaacctcatcggtggcttcaatgtgcccatggacttcctgccggtgccatccaatggatcgtcagggtgcagcagggggcctcgctgcccagccgacatcacgtcgcagtgccccggtgagctcaaggtgccagggggttgccgcggcgcctgccagcactgcaacggcagcacggtaaacagtaacacggtgttctatgtgcggatgtgccccgatgcctacagctactcgctggatcaagggcccatcatgtatgtgtgtccgtcaggaacagactaccagatcattttctgccccccagtcgaccttgtgtcattgtctccccctccaattacaccattgtctccccctccaacaccaacttcacctactgcgaatggaacaagcagcatcacatcctcatcaaaatccaagaaccgaagcttatttggttttgttctaggtggttctttagctggcttcatttttatcgcatcattggcccttttctttatcttgcatagacgacgattgcagcgacgccaagagatgcaggaagaggaggaagcagagtttgggaggctaccagggatgcccagaaggttcacatttgagcagctacaagatgcaactgatcagttcagagagaagctcggggaaggaggattcgggtccgttttcaaaggacgttttggtgaggaagcaatcgccgtgaaacgcttggatagatctggtcagggaaagagggaatttttggcggaggtccagaccatcggcagcattcaccacatcaatctggtgagggtaatcggtttctgcgcagagaaaacgcacaggctcctggtttatgagtacatgcccaaaggatcactggaccagtggacctttcaccggcagggtgatgacgaaactcctcgcctgcactggcaaacgcgacgcaagattattgctcatatagcaaagggcctctcctatcttcacgaggagtgcatgaagagagttgctcacttggatgtgaaaccacaaaacatcctcttagatgacaacttcgatgctaaactctctgattttggactctgcaagctcatagaccgggaaaagagccaagtggtcactagaatgagaggcacgcctggatatctagctcccgaatggttgacatcgcacatcacagaaaaggctgatgtatatagctttggtgtggtggtaatggagatcgtcagtggaaggaagaacctggacacttctcggtctgaaaagagcattcatcttattaccttgctggaggagaacttgaagaatgatcggttggtagatttgattgatatgtgcagtagtagtgacagtcaggcacaggagcaagaagcaattcagatgataaagcttgcaatgtggtgtttgcagattgattgcaaacgaaggcctaaaatgtctgaggtcgtaaaagtcttggagggcaccatcagtgccgaaactgatatagatcataactttgttgtgacacatcgaccaagctttgacgctcctggaattgcgggcatgtcagctgcacctctggcctcagaagtgtcaggcccaaggtga

SEQ ID NO: 9417 - DNA, 1011 bp, Zea mays
  Peptide Sequence Number=SeqID_51196
atggattatccgaaccttgagctcggactatccgcaatgacgaaggaccatcttgtggattgcctagcatataataatttaaagggtaaggttgtggccccgctagtgaggaaaaagaaggttgaagcaaaggcgaaggcgaaaggcccgacgagggtggctagggtggcagagccctcggacaagtttgctaaggagctggccgataccttggatgctggaagatcaccaggagtcttcgaaaaagaagaggaagactctactgtagctggtggaccctcatcgcgagatgaaggctcttcgcactggcacgactggggggtcaaagtcaagagctacaaagactacggggatgagacgggtgcagctggcgaggtggtcctcaatctttctgtcgaagactacctgcttgaaggtgtcagcgagttggacacccacactaggttggcggtcggtggcaaggtctgggctgggggcaccggtggacccgtgggcatagttcaacgttgccatcgatggaggcaggggataaccgaggcgtttgctccaatggaatcgtgcgctcttgtggacctcgcaacccacaactatgctctaagaaaaagcgactggaagctaaggtcgaacgccttcagaccaagaatattgaggctatttgggacaagtctgctgccaaaaattaaagctggtgactcttggaggagacatgaagagacgaggaggtcgaagatcttggaggactcgttgactacttttgatggcggcgacgttgaggaggagtcatcggatagcgaagagggtttgaacttcttcgtgaggatggacgaggagtcctgtgaagaggacttagacttttttattgcactagacattgcgtccgtagcagaggctagcgtggtcgaggggcctttgaatggggccctgttagcctcgataaaggggaaaaggaggcgcattggtgtctcaaagcgaagggtggatagcgccaacacattcatacgtggtcgctaa

SEQ ID NO: 9418 - DNA, 171 bp, Zea mays
  Peptide Sequence Number=SeqID_51197
atgggaaggagcttcggcgatgaaacaccttcgatacagagcgtggagaaggatgaagaagctagcttcgtcataacaacacaaagagatgataacttgaaggccggttgtgaagaatatttcgaagtccaccagcttgctcttttactctgggacctcttcagcccctag

SEQ ID NO: 9419 - DNA, 447 bp, Zea mays
  Peptide Sequence Number=SeqID_51198
atggcgccccgagcagaacacggcggcattcaccgccggcgcacgttgaccccgggcaaccttgccccattcgataccccgaacgaccctaggcatagaggacgggacagtggatgtgttaggaggaggcgagaacgagaccggtgtacaggggcagtagcgagctgtgaggaaggagctagcgcgcgacggaaggagagcaggactggcaagggcgagaagcgttcgctgcatcgtttgggggaaggagatgaagccgtccgcgtggaggggatggagcttccatgtaggtcccgcttgtcggtggattgcagagcagaaacgcgcgcccatgtggtggctgacctacggcgagtggcggctaaccgcttggtcccatcctccagaacgtgcttgcgcgtggagacggggataccgccaagtgggccatgcggagagaaagcgtga

SEQ ID NO: 9420 - DNA, 1185 bp, Zea mays
  Peptide Sequence Number=SeqID_51199
atggcgctagcgctgcgctgccctcccgccgccacctcgtcccggagccccttcctaccgtcgacctccccagcccctgcggggaaggtcccgaggaggccgcccgccagctggaggtgcctcgcctactacggcgacggcggattccgcaagaactacgaccacatccccaagcagttccgcgaggagaacctcaaggatggactattacgtcctctggcagtgatggataattacaagcatgttcctcaattcctttatggattaagtgatgctcagatggaaatgtttatgaatgacgataacccttataatcggcagtcccagaaagttacagaggaaagcgtttctgctgcgaggagctacgatgagtttggtatgtacaccttgtcaggcatgcatgagggccctgcaagttacagcatgggtatgggcatggggggcagcatgagcatgagcatgggcagaggagggagaggatatagaagaatgagaagctctgctccagatcttccgtcattgctactggactctcgaattatatttcttggaatgcctattgttccagcagtaactgagcttattgctgctcaatttctatggctagactatgacgaccgcacaaaacccatttatctgtatataaactccactggaactatggacgaaaataacgagcttgttgcatctgaaactgatgcttatgcaattgctgattttatcaatcgaagtaaatccaaggtttacacaatcaatcttagcatggcatatggtcaggctgcgatgcttctttcccttggtgtcaagggcaaaagaggagtgctgccgaattcaatcactaaattgcacctgcctaaggtgcacaaatctggtggagctgccattgatatgtggattaaggcaaaagagttagatacaaacacagattactacctcgaactcttgtctaaaggagttggtaaaccaaaggaagagcttgctgaattccttaggggcccgaggtacttccgagcacaagaggctcttgattatggacttgccgatacgatattacactcgctggatggttctttcaaaccaaaggacctgaccgcgcagctagccaaggcacaggcgatgcgccagtcaggcaagcgtgcagctgctggagctgggagatggtcaactccaaccgcacccaggtag

SEQ ID NO: 9421 - DNA, 447 bp, Zea mays
  Peptide Sequence Number=SeqID_51200
atggacatgtctcgaatggagacgttgtatcatgctgacaaggagaagaccgaagcacttatcctggagctagctggtcgtgtggcttcatcattcagctcaccaacacaaaagggtgctgcaatcacaccgttgttgtgcaaaacaaacaatttgccactgattctcacccaagaggaccaggatatgctaaggggtgttaagtacaggaaatttgttccaggaataagcaaaagccaagagtttgacacaaagtcaagtcacagcaaacagagcagtttgagcaagagcagcggccactctcgggccagcggcagcagaaaagacttgttcccagcactaaacttcactaaagggagaccaaaacgaaaaaaattcttctctttcaggcgtaaagagtattttaacgaggcccctgacacccagctaacagatctacttctgtga

SEQ ID NO: 9422 - DNA, 903 bp, Zea mays
  Peptide Sequence Number=SeqID_51201
atgggggtaaacaaacaggcccttagtcgattgcaattttctttgttagcggtcggaggcagcaaggtggcggacccgaggccggccagggtggtggacctatcgcccgtaggcgacaggtcccgcgcctcctccaagaagaaccgccgccgccacaagaaggccgacgccgcctcttccatctcgcccatgcagaggctcttcgacaccagcagggaggtcttcgccaactcctacccgggcttcgtcccgccgccggacgccgtcgcccgcctctcgggcctcctcaatgagctgaagcctcgtgacgtcagggttgccccaagcatgtccgtcttcaagcatgccgatcctacaagcccccctccagttacctatttgcacttctacggttcctccgagttttcgtttggtatcttctgtttaccgaaatcggcaattattcccctccacaaccatcctgggatgacagtgtttagcaagatactgtttggttccatgcacctcaagtcctatgattgggctaaaagtctgccggcggtcaaagtcgtcaaccactgtagtgaaaaatgctttgtttcttatcccatccaacaacaacccacaggagcaggagctcgtctggccaaggtgaacacagatgccgtttttgacgcttcatctgagaccgtagttctgtaccctgaaaatggagggaacttgcactgctttacggcgctgaccccttgtgccgtgctggatgtgatgggccctccctacaaccgtgctcaaggaagggattgcgcgtattacagcgaatcgccctactcgtgtgctggagatgcacaatattcttggctcaaagaggttcacagcacatttgagatggaaggcataaagatggagcccaacttcatcgtctaa

SEQ ID NO: 9423 - DNA, 216 bp, Zea mays
  Peptide Sequence Number=SeqID_51202
atggcgggactgcgggagaggcctgatcagtgtcgtcggcggcggcagcggccacaaggacggctgcggcagtggcaccgatgcactcggcagccagccaccagctcccagccccaggcccgtcctccgcccgctagtagcagcgatagtgtgcagccttacaggctcactatggctcatctgagtatattgtataatttagcaaaaaatgtgtag

SEQ ID NO: 9424 - DNA, 324 bp, Zea mays
  Peptide Sequence Number=SeqID_51203
atggacgcgagctccaagattctgctcgtccaggccccttcccaggtgctcccgctgagcccttggccgagtttctttccatggccgccgcagcacctgtttcctgcacgctggtcgcccctgccccagccatggtgccgtcaggccgcccgtctcctacctcccaatgccagccctactcctatggccgcgccctccctcttctgcggcaggtcggcgatcccatctccttgcccctcccatggcggtttccgcctggatccctccctgcgcgcactcctctccccatggctgtcgtcgcccccaagcctggggtcttgctga

SEQ ID NO: 9425 - DNA, 417 bp, Zea mays
  Peptide Sequence Number=SeqID_51204
atgagtccgcacgccctgctacccatcggatcaaggatccacggcccacagtatgatcgcatgcggatcccatcagagccccaggatgttgatctaacggttactaacttcgaatcccgcccaaaacacccgaccgttcgatcttatatcaacggtccaaatctaccagcccccagatctaatcttaaccgcacctttaccatccaagggccaagcgccctcttccccctcctccagccattgccagcggcaatgtccaggaccgcggcggagcttggccggagctggcccaatccgacccccaggcgcgctaactctaaaattaactggcgcatcatacttctcaccctctcgctgcactccactcctctatctatgctagggctatacgatggcggcgccgaggaggttgattga

SEQ ID NO: 9426 - DNA, 168 bp, Zea mays
  Peptide Sequence Number=SeqID_51205
atggtggacgtggtggtatccttcttggtgcttggactcctagtggtggcgctcatcgtgaggtcggcactagcgctgctcgtgcgggctcgttggtgctgctggttcgaggagaagacaccatatttagaggattttctaaagatgtcaaggaagctgcaaaattaa

SEQ ID NO: 9427 - DNA, 138 bp, Zea mays
  Peptide Sequence Number=SeqID_51206
atgccgagcagcaaggttcccctcctcctggtgatcttgtgcctcgttgtgtcctcttcatcttcctccgtcgccacacacaacgccggtgaggaccaccgtcttcctcttcctcttcctctccctgtgaaaatttag

SEQ ID NO: 9428 - DNA, 180 bp, Zea mays
  Peptide Sequence Number=SeqID_51207
atggagcggttattccagagccgctacgtgttgagcaaactcggttggcacgtggggttcgtcagccgacggcagaagggcaaaacctcatcggcgacgacggaccatggctacgaactacgtagtcaagggtcggctaccctaggtcccgacgtccttgacatgatgaaggatagttaa

SEQ ID NO: 9429 - DNA, 501 bp, Zea mays
  Peptide Sequence Number=SeqID_51208
atggctgagggcgtagggaactcggactggagctggacgatgtcaacttcccagccatggggcgctggagcatcgggcatcatccttagagcaggggagggcgctgcttgggcgccatggctgctggccgagcagaggcgtcggggcctgggcgttccctggccacgggaagggaagagtagggggaggcggtcgctgtgcagggcgccggatggggaggaagagaagagctcctgccatggggacgacgcctgctcacacaaccgagatccgagggaaagcagggaaccggcctccttgcttgaggaagaagaagggggaggagggaaggacgccatgggaggagagggagctccctgcgcgctgccgtgtgggaggaatgggagagatgctgcgcgagggagaagaagacagggaggagaggttgtggcggctgaaaaaaaatggatgggtgggaatgaaaaatttccaagtgcaaggaaggagcacccctatttatag

SEQ ID NO: 9430 - DNA, 234 bp, Zea mays
  Peptide Sequence Number=SeqID_51209
atggccatccaactccccttcaccacgttcccggttgataacaggataattcgattccgtagatgctacacagagaaaataccaaggcaaattctagggggttgtcttcttaccttgggctgcccgacgtccgtgcagtactgcgacgcggtggagtggattcacgctggtgagcaattcctcgaggcccaaccatgcacgctcccacaagcctcctcgcacaccctctactaa

SEQ ID NO: 9431 - DNA, 264 bp, Zea mays
  Peptide Sequence Number=SeqID_51210
atgccaccgtcgtgccgtacctcgcgcccgcgccgcgaccgccgccgtgtccgctcactcgcgccgcggccgtgcgcacgtgcgagctccctcgccacagtcgcgcgcccgtgcgcgctcacgtgccgacgcgcgcccgagaccgcgccgcctccgcgcgccctcgcccgagagcgctcccgtgcccgcagccgccgcgcgcacacgctcgccatcgcgctcgccgaagccgcgcccgccgtgcccgcgctcgccgtgccgtag

SEQ ID NO: 9432 - DNA, 438 bp, Zea mays
  Peptide Sequence Number=SeqID_51211
atggcgcagggtcctcttccttcttacgaggctctgagtcagcatgccacccaaagcgccctagacgacgtagagtcgtttaaagatcttgcccccgtgaggggtaagattatagggttgctgtcacacccggattttaggggtccaaagcccgggcgcgaacataatcaccaggggctaacgcgcaaatctccccaagactcgagattcccgcataaggatggcgggttgatttcgataaagtttaagggctcttttgtaaagttgtcggctgaagagatggccgaggagttcgccaggggtcagagttttatagcccagaggcggagtccgatacagaagcccaacttcgtacctaaccgcccgaaacgcgcgcacatcaatcacagcggagaccgcgaccttcgcttcagcttgttatggagtctgatcgggtga

SEQ ID NO: 9433 - DNA, 1272 bp, Zea mays
  Peptide Sequence Number=SeqID_51212
atggctcctataaccaccagggccagctcatccttggacaaggctagaaaggtagccctcaagtacaagaaaggcaaagcagccctcacagacaacacctatcctctcgatcggattcgccgtctctggccatggttctcgccggcctccgccggcacgtcggcccagttcttgaccagcagtaatgagcttatggcggcgtcgctctcggccgtgagctgcgcggacgaggtgcagaaggcggagggggcggggtgccgtgacgacgccgcggcgctgcggctcaagaaggtggccatggcggcgatactggtggccggggtgctcggggtggtcctgccgctcgcggggcggaagcggcgcgcgctgcgcacggacagcgccgcgttcctggcggccaaggcgttcgccgccggggtcatcctggccacggggttcgtccacatgcttcacgacgccgagcacgcgctgtccagcccgtgcctccccgccgcgccgtggcgacggttcccagtgcccgggttcgtcgccatggccgctgcgctagccacgctggtgctcgacttccttgccaccaggttctacgaggccaagcatcgcgacgaggccgcgcgcgtcaaggcggcggcggccgccgcactggttgcgacctcctctgggagcgacgaggacatcacggtggtcaccgtcgatgaggacgagcgcaaggccccgctgttgcaaacgcactgccatggacacggtcacagccacagccacagccatgtgcatgagccggtgcaggtagagggtagcgaggcggaggtgtcggcacatatactggagatggggattgtgtcacactctgtgatcatcggattgtcactgggagtgtcgcggagcccatgcacaatcaggccacttgtcgcagcacttgcattccaccagttcttcgaggggtttgcactaggtgggtgcattgctcaggcacaattcaagaacctttcagcagttctaatggcatctttcttcgccatcacaacaccggcaggaatagctgctggggcaggcatgaccacattctacaatcccaatagcccaagggcccttgtggtcgagggcattcttgactcggtatctgctggcattctcatatacatgtcactagtggatctcattgctgtagatttcttgggtggaaagatgacagggaccctgcgacagcaagtgatggcatacatcgcattgttcctcggtgcgctctctatgtcatcacttgcaatatgggcttga

SEQ ID NO: 9434 - DNA, 549 bp, Zea mays
  Peptide Sequence Number=SeqID_51213
atggccgacgctctcctccttccgtgccgcttcctcgcgccgttgtcagtcacatccggcgcctcttcatcagcctcttcgtccccgccgtgtcgttgggtgctctcgtcgcccggctcgccgtggcggccgcgcttggctgccgggcaacggcaaccccgacctcgccggttcactcggcacaaggtgcgcgttctcggcttgtcggctgaagcatttgcaaccggctttgttgtttgtcaaacgcgtgtgaacgatgtggaggggggggcgcttcttttacgatttttcggtggactgcgagttgttcctaagatttgtgcagcagagcgtggtgagcaaccgaaatggtgggagaaaaatgctgggccaaacatgattgacatccactccacagtggagttcttggatgcactaagagatgctggagacaggcttgttattgttgagttctacggaacctggtgtggttcatgcagggctctctttccaagggtaatgccattaatcgtgaatataactactggatgtttgattggttctgtctga

SEQ ID NO: 9435 - DNA, 396 bp, Zea mays
  Peptide Sequence Number=SeqID_51214
atggaggcggcggaggtggcggcgctggtcgggatggtggcggagtgcttggacgcggaggactacgacgagtacgagggcataacagaggagtccgtccgcgaggtcatgagctggtttgaggtcgagatcatgctcgccgccggggccaacgctctgccgctgccgccctcgctggacgcgagagtgagcgagagaaaggagagctgcaagtcgtcgctgtcggttccggcgtccgtggacgggcgtgcgggtgtgccaccaccacccctggcggagccatggtcagttcccgagcctgcggcggcggcggaggaggaggatgtggatgatgaatgggtattgcagctcctgacggatgggccgccactcgatgggcagcattgtggccagtag

SEQ ID NO: 9436 - DNA, 471 bp, Zea mays
  Peptide Sequence Number=SeqID_51215
atggactccgactctccgcttgtcgtggactctctagtcgccatggactccgactctctgatcgccgtggactctctggtcgacatggactccgactctccgctcgccgtggccaaggatgacgtctcatcctcgctggactccgacatggcgctggactgcgtcgcgcctgactcagaatccatacggtttgtgcctgactcggagcccttcgagctcgtgccggactcagaagcagaggaggtcgcgccggaggccaagtccggcgagctggagctcggcccatttttatgtggtagctgcggcgtcgtccatgagaaccgtgcatcgtggaaccgtgtgcactcggcatttcgtccatgctctcgctgcggtgtcatcaacaaggagaacctaatcgacgcccttcttcacggtgcacaagagtgggtctgcaagcccgagtgcgacgccaaagcatcgcaagtgtag

SEQ ID NO: 9437 - DNA, 411 bp, Zea mays
  Peptide Sequence Number=SeqID_51216
atgcccccagtttcgttgccagcgcacaggtcgcatcgcatctcacaggttggactgtctgaccaagatcatgcgctgcctgctccgctcagcccatcattcatcgttcccacgtctttaccgacacttaggggtgtaaacggtacggatattatccgaccatccgaccgtccgaagaggctaattattcggttgaataggttttttcggatatccgcagaattttcggatttcggattcgaattcggatactacagttcggatatcggatacggatatggtatgactgatatccttcggatttcggatatccggatatcttctcggataactatccggatttcatatttcggatatccggacatctacccagatatcttaccagattttagatttcagatattcggatag

SEQ ID NO: 9438 - DNA, 522 bp, Zea mays
  Peptide Sequence Number=SeqID_51217
atgcggagtccggcaccagtgcattcaggcagtacgtccggcacctccgcccccaagaagaagctaaagcagggcggctgcgggcagagggcgatcaagacggccatgtcggtcttggcgagaatgcacagctctaggctttcccagtggcagaggcagatctcctcgacggagatggcggcggcagtgccgtccgacgagagcaaaaacatccagcttctgcacgtccggtcggagcgcaagcgccgtgagaagattaacgacagcttcgaggctctcaagaatgcgttgcccccttcctgctgcaagcgagataaaacatccatactgatgagggcaagggactacataaactctctcaagtccagggtgtctgagcttgaggagaacggcaagagtaaattagacatacatgtgccatttaaatttaaagcatgtgatgacaacaatttcgtgaagcagtctgtgtctgtgatacagactgtcaaatgcacgatgcagtcagagatagagacaccctaa

SEQ ID NO: 9439 - DNA, 801 bp, Zea mays
  Peptide Sequence Number=SeqID_51218
atggggtggtcgcgctttcgtcgccgccatcaacggtgtcgctatctcctccctatccggcgtccgcgatgctcgccacccctgctcccccacgcgtcggacgctcgccatgctcgcctccctcccctccggtccgcctcgctccccttcagcccttccgtcgcgcgcgcttggaaaaaggtccagcagccccaaactccccagcgggggcgagcctggcatgaagagccatctcgcccacctctccctgcacgtcggatccccgccgtccccaccatcgcctgtgttgggtccgacccagtccgctcatgcctcgccgcgcagttctcgcacaccgtccgcggcggcgtccgcctcgcgccggtctcgcacaccgtcccgcagcggatccaatcacgcctcctcaccctccgctgcctcctcccatcccctctcccatcgaatccgcgattccgcgtccacagtggataccgtgagctcgcccccgcctccatggctccatcctccgctcgcgattcccccgtgcccgttggaagggggtcacagatcttcacacggttcctgctgcactacctccgcgctgccacgcgcaggccgctgacgcttgagcgggagggcaccgcgctcgctggcctcgcagacacggccgtccacggcatggcgctcgtcgagggcacgacgttctcgtgtcggggcctcttctgggtgctccggatcgtgtcggcggtggggctgagcagggagtgccgtcacaagctggagcggctcatggggctgatgctggtccaggcatatgaataa

SEQ ID NO: 9440 - DNA, 372 bp, Zea mays
  Peptide Sequence Number=SeqID_51219
atgggcggcgtctggacacttgaacagcgccagttcgccatagcggcgtggtcggctggtcgcgttcgtcaggggcggacagcgggagaggggacaggcggacagcgccacagcggcgcgtactcgagtggacgcaggactgcggttggtcagccagtcacgggtcacacgggcggtgggcacgcgactcaggcgctcggcggctggcagctagagcggagcgcctggcggctggagcctggatggaggagaagactacgtgatggacgagcggcggctggatacagactatgtgttgggctggatctattcgctgtcactgcatttactgggccgcgaccggggctgcagcccaggcagccccggtcctag

SEQ ID NO: 9441 - DNA, 318 bp, Zea mays
  Peptide Sequence Number=SeqID_51220
atggcagcacagacgacaggtgctgcatgggaggacgagaggtggtgggcaggagttgataatctcatatatgctgtcttggccacaaccataccaccgctggcagaggaggtgaaaggcgctgcgggaggaacagctcggtacagtcgccggccggatagtctccaacgacggccgcagccacactccgttgcagaggtgaatgggaggctccagcaagcaaatgacttcgcattgaggggggtgcggggagcacgtaccgtgtggactgagaggctcagcagccggttcatattcaacgttgacaataacccctga

SEQ ID NO: 9442 - DNA, 444 bp, Zea mays
  Peptide Sequence Number=SeqID_51221
atgaggatagagattgctcgctatgtgacaaagtgtgacacttgtcagccagtaaaagatgtgcgcatgatgactgttggtccctatagtcgttacccgtccaacctagaagtgggacgcattagtatggattttattgttgggttagcaaagacatccgagaggtatgattctatttgggttatagtggttcggcttacaaagacatctcattttcttccagttaaaacttattacccagttcttacctatgctcaactatatgtttctcgtattttaagtttgcatggggtgccaagaacaatagtgtcagaccgaggaccgcaatttatatccaagttttgggaagagctgcacaagtctttgggtactaagttgctctatagttcggcctatcatccccaaacaagcagacaaacaaaaagagtgattcaaatcctataa

SEQ ID NO: 9443 - DNA, 327 bp, Zea mays
  Peptide Sequence Number=SeqID_51222
atggaggaggctagaacggggtacagaagggatgtaacctaccctagtcgacctggccacggagacgctcaccacggcggcgccgagaatggcgatggagaagatgttgctctcggagttgctaacgcaattcggctgggttttagttctcataacaccaagggtgttacatcctctccccctaaaaagaatctcgtctcgagatttaaagatcttggggtttacaagaagctaaaaactaaggaaaatatttttctaaaaaatcttgagattcccaagtggcctcttcttttgtatgttgcttccattacacattataaaacttga

SEQ ID NO: 9444 - DNA, 246 bp, Zea mays
  Peptide Sequence Number=SeqID_51223
atgactaggcttgctcggtactgcgatatgtgttgtaggaaggaaggtgaatcgtcgggaatttttacaccaggtatgcttcaggatatggttgatgttggacttggcctaccaccctgccaccgggttggacggtcgagtgggatgctgctccggcaggagaggagcaggaggagtagtgggctaggccttgccctattcctcgctttcgacgatatcgattatccgctgcaacttattttgtga

SEQ ID NO: 9445 - DNA, 375 bp, Zea mays
  Peptide Sequence Number=SeqID_51224
atggcgcaccggacagtccggtggtgcatcggacagggcactgttcactgtctgtcgaccgttggcgcatcagatcgttgctcctttggctcactggacactatccggtgcacaacgaagccttcatgcccacacaactgccttcctcgtaaccgcattcctcataacctccttcctcgttatgcttctggttacgcccgactgatgtcctctaaaggctatgcccctgtcccattggggcctctctggtggtccacagaacgtatccaagtcatgtctgtaaccctgctttatgggaacattccggggataacctgggcgcctgagggcacatgtgtccttaacccaagacgccgggcactcaggcacctataa

SEQ ID NO: 9446 - DNA, 426 bp, Zea mays
  Peptide Sequence Number=SeqID_51225
atgtctggacatcatgccaagagagagatagttaccaacaacaaggctaaaggctcggaaaggactccgtcaagggagtccggcaacaaatacaaggaggaatctgcttcctccatcaagtcacataggaagggtgacaagaagaaaaagaaaatgaagaaggtggtctactatgagaccgactcttcatcaccttccacatccgacgccgagtctacaacttcaaggcgccatgagtgtaagaagtatagcaaaccaccatatttttatggtgaagattattgtatgtggagtgataaaatgaggggctctaaaatgaggcaccatctaacctcactccacgaaagcatatgggatattgttgagtttgaagcgcaggcaccacaggtgggcgacgaggactacgactcggatgaggccgtctaa

SEQ ID NO: 9447 - DNA, 129 bp, Zea mays
  Peptide Sequence Number=SeqID_51226
atgcaaactgagaatacggatggagtcaaagccttgtgcggttatgggcaatcccacaatgaagtccacgctgatgtcttcccatttccatgttgggatcggcaaaggggtcccaagcttccaggatag

SEQ ID NO: 9448 - DNA, 306 bp, Zea mays
  Peptide Sequence Number=SeqID_51227
atggatgcaaagcggcagtcaaacaaagaggagccgtcgcctattgtaatcgcacgggcagccaagtcggtggtttcaggtgttgaagaggagcatagggaggtggtggaggacctcaagcaagaggcgatcatggatcatgagctgacaggcatggtgttagtggaagaggagcagagagcccctatcccacgtgactattgtgtaaaggccaaagtaagatcgaccaagccttttaggatggacaccatctatgatgaggaaaaggaggattcaaagcccatgcaggagcaagatgagtcataa

SEQ ID NO: 9449 - DNA, 1539 bp, Zea mays
  Peptide Sequence Number=SeqID_51228
atgtctctcgccaccctgctgctcccctccccaggctctatggccaccaaggctggcacggccggcgaccaccacaccgacagcaggaggcacgaccacgaccaccacggcagcaagtgcaagaagaagccaccggcatcaccgcaaccgtcgtcgctcgcgtcggcgccgagaaccccgccatcaggggcacgaagccagcgcgtgatggtcatggctgcgtcctcgtcatctcccaggaagaaaagccccaaggcccccgcggcgggcaagaacagccgcgctcagtaccagcagcaccgaggccaggcgacgaagaagaaggccactgcggcggcgtcctgggactgggagcaggtgaagagcctgctgagctgccggagcgtgacggcggcggcgcgcgtgcacgacccagcggctccgtcggcgctggcgcggctccgcggcagcggcgcggggacgtgcggcgcctcgctctgcgccatgcgcgacgtggtcgacgccgcctcctccgcggcgtcgtccgccgccgcgtccgcgtccgcgtcgggcgaccgcgacacggcaccgctgaaccgccggcgcgcgcaccgcggcgcctcgtcgtcgtctgccggcgccggcagcagccaccactcctccctgcggggcctctccggctgctacgagtgccgcgccatcaacgtggagcccatgtcgaggcggtacccgaggccgagggagctgtgcgcgtgcccgcagtgcggcgaggtgttcaccaaggccgacaccttggagcaccaccaggccattcgccatgcagtgtccgagctgggtcccgaggactcggggcgcaacatcgtggagatcatcttcagtcgagctggcacaagcgggaccgcccccatctgccacatcgaccgcatcctcaaggtgcacaacgccccgcgcaccgtcgcccgcttcgaggcctaccgcgacgccgtgcgctcccgctgccgcgccgtcgtcgccgcccgggcggcggccgacggcaacgagctgctcaggttccactccgcgccgctcgcgtgcgcgctcggcctcggcggcgcgaccgccctctgctgcgccgccgccgacgccgacgccgacgcgcccgcgccgccctgcggcgtgtgcacggccatccggcacggcttcgcgccgtggctgggcgcgcacccgctcggcgtgcgtaccacggccagcagcggccgcgcgcacgactgcgcctcggataataataatccgtcgccgccgccgccccaccagacgcagtcggcggcgagcgacgttagcaacgctgccgcctgccgcgccatgctggtgtgccgcgtcatcgccggccgcgtccgccgcgacggcgacggcgacacgtccgccgctgccggcgaggatcaggaaggcccgttcgactcggtggcgggtgaggacgccgccagcagcagcgtgtacgggaacctcgaggagctcttcgtggccaaccccagggccatcctgccctgcttcgtcgtcatctaccgcgtccttgattcttga

SEQ ID NO: 9450 - DNA, 225 bp, Zea mays
  Peptide Sequence Number=SeqID_51229
atgctcagccttaacggctggagcaaatacaaggagaggttgcagaaggaagtggcaatgggcttgaataccagtgggggaaaagcagcccacactcccttcaacgcgtctacacaaggtggtaacgctaaatctctgattcttcctgggatgcatgagggggagggtggtcgtcgtttattttgccaaaaatatggtgataaggaccaccatgctagagaataa

SEQ ID NO: 9451 - DNA, 519 bp, Zea mays
  Peptide Sequence Number=SeqID_51230
atgggtttgctcagtagctacaacttggggtcggaccctcgtggggtggtcccgagcccctacatgtgccattcggacctccgaccaggggaggtccggtgccgccacatgtttgggccattacgaatggagcctggacctccacaagtgccatccaaacccctagccaggggaggaggtgcacctgttcaaccagtggcagacgacgtgtgcagttcgcaaggcctaggtcgtgcaagtaacccacacgttatcgaggcggagaccattgacccactgcgccacacgtgggcaactcccatcatgacttctactattcttgctcagaggcaagagatggagataggcggaagggactggacgacaccacatgtctactctcctacgcaagtcgacaagccaatctacgttgcagcctacaccaaatctttcacccacacgataacaagattgagcgaagacgaatctggccagaagaggccacacggtgacaaagggaagatacctgtaatgccctga

SEQ ID NO: 9452 - DNA, 660 bp, Zea mays
  Peptide Sequence Number=SeqID_51231
atggcgttcatgcggtaccgcgcgctgccgcggggggagctaacagcggaggagttccgggcgtggctggcgcagttcgacgcggacagcgacgggcggatcagcagggaggagctgcggcacgcgctgcggagcctcaacgtgcggttcgcgtggtggaaggcgaggggcggcgtgcgcgccgccgacgccgaccgcgacggcggcgtgcagctgggggaggacgaggtggcccgcctcttcgccttcgcgcagagccacctccgcgtcaagatcgcccagctcggagtgtatgctgcgtataactcgatcgtattaaacttcaatttgccaccatggtcgcggacccacgggtcggccgccgacgtcagggatcgcggcccaggcttcgtcgtagcaggcggggatgaggaggactatggggaaccgcccgcctgcttaggggcgtcggccgcggatccgaccaccaggctcctcggtggggatcgtggtgctgagtttggggtgcgtatgtatgacacgatcttgggatatgattggttatctgctcataatcccatggggaaccatcaagcatcattcatcggcaacaggaaggagttgatacaggtgggagcgagaagtgtgcaggagactggctatgcgtatttgggctattaa

SEQ ID NO: 9453 - DNA, 696 bp, Zea mays
  Peptide Sequence Number=SeqID_51232
atgtggcccggctgcggtggccggttttactgggcgccggaatcggcgccgccggggcaggccaggggcgtcgcggtcctgttcgcgtgggtgtggagcgacgagacgcagttgcggccgttcgttgagctgtactcctcgctcgggtggcgctgcctcgtctgccaccccgatctcgtcgcactatatctctctgagaaagcaatatcgctggcaactggtgttataaatgagctggttaagttactagatggaatatgtgaaggagatgcaatcatgaaggactatcggttagtgaggaactgtatctgcgggcaaatttatgactctagccctgtagattttgtcagtgatgtgggcgcccagtttgtccaaaagcctgctgatggaaattcatctcagccaactatattgcattcatggatggcaaaggctctagcttctgtcatggatactctcttcccaagcaggattgaagctcagcgtgcagagtactggcacacactgtactcggcagcaggattgggcccagttcttctattttgctcagaagctgataaccttgctccatgctatattatctgtggttttgcacggcgtttgattgaactaggcacagaggttaaacttatgaaatggaacagctcccaacatgtcggtatggttcttagaccgtttccagcagtttacccatag

SEQ ID NO: 9454 - DNA, 1701 bp, Zea mays
  Peptide Sequence Number=SeqID_51233
atggccttggtgggcgtggtcggcattggcataaccaagcgaccgtcgcagcaatgcctggacgccgtcgagagcgcggcccgacgcgccgaggcagaagagggtacggtggagcagaacacaccgccatggatggcgacaaagaaggtcacagcgctcgccgccatctgcctcgttgcgttgcccatcctgatggtgaccacggttagccggcgggacgtgccgcggacgcccgcgtccttctggcccttggcgaccctcgcgaggcaagagaagcttgtcggcggcctgctcgtgccggggttcgacgagcggtcgtgcctcagccgctaccagtccgcgttctaccgcaagaacctggcgcggtcgccgtccgcgcacctcatcaggcggctgcgccagcacgaggcgctgcagcgccggtgcggcccgggcaccgaggcgtacagggccgcggcggcgcggctcagatcgtcgtcgcaccgcaatggcagcaacgacgacaacgacacccgcggcgcctgcaggtacctggtgctggtgccgtaccgggggctcgggaacaggatcctggccgtggcgtcggcgttcctctacgccgtgctcgccgaccgcgtcctgctcctcggcggcgagacgtcgctgggcgacgtcttctgcgagccgttcccggggacgtcgtggctgctgccgccgcggttcccgatcggcgacctccagaacctgacgggcgacgtgcgggagagctacgggaacctggtgcagcagaacgacagcgcggcggcggcggcggcgtccgggctccggtacgtgttcgtggacctcgaccactcgtgcacgtaccacgacaagctcttcttctgcgacgacggcgagcggcagttcctccggcgcgcggcgtggctggtgatgaggacggacgggtacttcgtgccggcgctgttcctgaacccggcgtaccaggacgagctcgacgggatgttccctcggaaggactcggtgttctacctcctggcgcactacctgttccacccgacgaacgaggtttgggggctggtgacgaggttccacaggtcgtacctgaggggctcggacgaaaggctgggcatccaggtgagggtgttcgacggagacgccccgttccagcacatcctggaccagatcctcgcctgcacttcgcaggaacacctgctccccgacgtggcggtgacgcaagagccgtcggcgggccgcggcgcgcggtccaaggccgtcctgatgaccggcctcagctcgtggtactacgagaagatacggtggaagtactggcagtcggcgacggccaccggagaggtcgtgagcgtgtaccagccgagccacgaggagcaccagctctccggctacacgacgcacgacatgaaggcggtggcggagatgtacctgctgggcatgaccgacaagatcgtcaccagcggctggtcgacgttcggctacgtcgggcacggcctcggcgggctcacgccgtggatcatgttcaggcctgagaaccacaccacgccttacccgccgtgccgccgggccaagtccatggagccgtgcatgcacgggccgccgttctacgactgcagggccaagcacggcgccgacacggggaagctggtgccgcacgtccagcactgcgaagacatgagctgggggctcaaacttgttcatcccgagtga

SEQ ID NO: 9455 - DNA, 432 bp, Zea mays
  Peptide Sequence Number=SeqID_51234
atggaacaagatggacacaaggttgataggcatgttgttcatgaaagaaaatcaaaagctatgcctgaaggctatgaacagaagcaggaaatgaacgcgaaaaacagaaagaactaccctgataaacctagtgagagaaggcacatgaataatcctttgcctcctttggacatgaaagaaaagaatggtcagaaagaaatgaagaaatatggcaaaaaggatagtgaccgtcggagggaactaatggatgtggaggtgttagacatcaatgtccaaaggaggaaaagaaaccctgtctccgtgagaagtaggattctaaggccacctgcacatgctgatgaatatgctggaatggaggaaaagatggcaaaccaagcacctgatggccgaagaagacactcaagcaagaggaacaacagattcagaccataa

SEQ ID NO: 9456 - DNA, 726 bp, Zea mays
  Peptide Sequence Number=SeqID_51235
atggtcagttcgagttccgggttatgtctttggattgaccagagcaccaactacatttcagagtgctatgaaccactgcccccgcctgcgaatcccacccaccgctccgcctcccccgccgcggaacccgcctacacccgcaccccgcctgcggagccgctcctcaatctcccgggaatcgcctgccgctcctccagccaaatcctcgcacgcgcccctcgccctaccttgagtcccaactgctccatccgcataggcaatccacatgtcgcatatggtggtcgcacctccccctccacgccggagcacgtgcccaccggcgctcccctcacccaactttcatccccaaccatcccatccgtcgattccgccccatccgtgcaggccagtcgcgtgccgaacaaccaccccgccaagcgcaagcccccccccccccccccgcctggaagaaggaggacaagccccaccgtcgcctggaagaaggaggacaagccccgccgccgcctggaaggaggaggacaagccccgccgccgccaccctcgcattgccagcccctgcccaccgcgcccacccccgcactgcaactcccgccgcgccgaatgctccccaacgccctgtacaatccgggggagaggtcaaggaaggcgagcgacgctcggcaggaagggcatcccgcgaggccgcgacagtggcggcactccgctcccaccaacccacaacactga

SEQ ID NO: 9457 - DNA, 411 bp, Zea mays
  Peptide Sequence Number=SeqID_51236
atgaagggcatgtaccgggagaacgcgacagcgaacggcgaggtggttggtggtcgtgagcctgcagccgagccacgagcccacgaggagtaccagcactacggcgtcaagtcgcacgagtacaaggcctgggcggagatctacctgctgagcctgacggacatgttggtcaccaccggcaagtcgacgttcgatcggctacgtggcccagggactcgccgggcggaggccgtgggtcctgctcaaacgggccaacggcacagctggtgcagccgggacatgtccctggagccctgtttccgcatcgcgccgccgtacgactgcaagcggcggcatgacgattccggcgagatcgtgccgcatgtccggcactgcgaggacgtacgtgcccacggggctgaagcttgttga

SEQ ID NO: 9458 - DNA, 585 bp, Zea mays
  Peptide Sequence Number=SeqID_51237
atgactctggaggatttcctggtacgcgccggcgtggttcgtgaggacatggggcagcagaccctcgtgctgcagccgctcgcgcagggtctcttctcccaggggaatgcggtcgcgctcgcgccgcagaccatgcagctggggaacggggtgttgaccggggtcgtcgggcaggggctcggaggagggatgacggtggcggtgccgacgacgccggtcgtgttcaacgtgatgaggaaactggaggcgggggatctttataggccgctgcagctgacgatgcccatcggcactacactgagggtgaggacaagtcgagccgaaaggaaggtggtggagaggatgaagaggaggatgatcaagaacatggagtcggcaaccaataatagtctgaataagcacgcatacataattgagctggaagctgaggtggcaaaactcaaggacctgaatgacgagttgcagaaaaagcaggttgaaatgctgaagaagcaaaaggatgaggtcctggagcgaatcaacaaccaacatggaccgaaggcaaagaaactttgtcttcaccgcaccctgactggcccatggtag

SEQ ID NO: 9459 - DNA, 264 bp, Zea mays
  Peptide Sequence Number=SeqID_51238
atggcgagatccagcgttaccgtgcgagtgcgagagtccaagactgagagggacgaggaggacacgtccacggaggcgccggagcggagacagagaggccgagagcggagaccggagatggaggagatggacgagaggcgagacggcggtcgcagtcgcagcggagaggagaggagcggccgagcggttgagtggtttaaaaatgaattaacggacgataaatattcgaggatagatgttatattaaaatatactcaaagttaa

SEQ ID NO: 9460 - DNA, 411 bp, Zea mays
  Peptide Sequence Number=SeqID_51239
atgacctgcgaatttgagggtcgcaagagtgttaatgagtgtgcatggagcccagaggcgacgcgaggcgcaagcgtccgtgcacggccgaggaggaaacgtcaacaaggaagcgccaaggagtgtgacgccgtgttcgacaacctgtgcggcatcctacacgacgccgacattgacaaacgcatccagttcatgatcgaggatctatttgccaatcgtaaagcgcggtttcggggtcatcctcccgtgcggtcagagctggatctcattgaggcaggcgatcagatgacccatcaggtggagctcttcgcttccggtggtgagctgaacagggaggtccatcttgacgtatttgaagttttgaacccagccccttcttcgcgcgagatgaggccgtcaagagagccatag

SEQ ID NO: 9461 - DNA, 1347 bp, Zea mays
  Peptide Sequence Number=SeqID_51240
atgggcaactcgcaggcttcgccggcgtccgcctccagctcccgcttcgtcatggcctcgagggccttcccgaagcaggagctggacggcctccgcgagctattcgcctccctcgcagcgcagtcgcggaccggcggccgcgccatctcacgccccgtcttcctcgaatactaccaggtccgggggcgattaggcgacaggctgttccagctggtggcgaaggagagtggcgggagcgatggggtcacgttcgaggatttgatcatctccaaagttagtgctcgactcaattcgatccactctgttgttcgtttagttgtcgcgagcaaggcaacatatggaaggggaactcgtgatgaggtcgatgaattcatttatcaactatgtgatgtcacaggagatggcgccttaacaaggtctgatttggaatcagtcttggcgtctgttcatgaaactgtatttgcaataaagaaggaagctgtcgaagtttccaacaatagaccattcgaagaattcctcaactctgcagtgttttcaaaggatgttgaaggggtctcagggaagtctatgtcattatcagactttaggaactggtgcactctcttgccatcattgaggaaattccttggaaatttgttgatgcctcctgattcagattccacaacaggtagaccaggatttgaagtaccactgcttcattatcctgaaaacatctgtactgatacgctgcttctaaataaagagtatgcctggcatattggaggaggtttctcccaacatgaggtgcaagagtggaagcttttatatcatagttctcttcatggacaaagcttcaacactttcttgggcaaagtaacgaatggggatgctcagactgttctgattgttaaagatacagaaggatcaatttatggtggatatgcttcacagccttgggaaaggcacagtgatttttatggtgacatgaagacattccttttcaaatgctatcctcaagcatccattttccgccctactggagcaaacaagaatttgcaatggtgtgctgtaaacttcagctctgagaacataccaaatggtattggatttggagggcagccacatcatttcggactctttttatcagcaaattttgaccaagggcactcatttacgtgtagcacatttaccagccctcccctttccaagacaaataggttcaggccagaagttattgaatgttggggtatacaaatgagaggagcacaagatgaaaaactggagttagtcaaggggacagtcctcgagagattcaaggaggaccggaacatgctgaagatggttggtttggcaaatgcaagtgattaa

SEQ ID NO: 9462 - DNA, 786 bp, Zea mays
  Peptide Sequence Number=SeqID_51241
atgtcggggaccataattaggggtaccctcaagacgcctaattctcagctggtaacccccatcagcataaagctgcaaaggcctgatggtgccactcgacagagtgagtctgacaggcagtcaggccttgccaaaggcgccacggcgaactccgctccgcccgaccccagggctcggactcgggctaagacccggaagacggcgaactccgctccgcccgaccccagggctcggactcgggctaagacccggaagacggtgaactccgctccgcccgaccccagggctcggactcgggctaagacccggaagacggcgaactccgctccgcccgaccccagggctcggactcgggctaagacccggaagacggcgaactccgctccgcccgaccccagggctcggactcgggctaagacccggaagacggcgaactccgctccgcccgaccccagggctcggactcgggttaacacccggaagacgacgaaactccgcttcgcccgaccccagggctcggactccgccctggcctcggccgaacgacttccgcctcgcccgaccccttggctcgggctcggccacgcaacggaagacagactcaacctcggcttcggaggaacccccacgtcgccctgcctagggcacagaccgccacgtcaacaggaagcgccatcatcatcctacccggaatcgactcgggtcacggagaacaaagaccggcgtcccatccgggccaagctccgccggaaggggcaaatgatggcgctccacaaagctctatga

SEQ ID NO: 9463 - DNA, 462 bp, Zea mays
  Peptide Sequence Number=SeqID_51242
atgggcaagagcaagaaaggtggtggctcttcgcatcactctggcgacaagcgcaagcgcgagccgactcctccctcggaggacttcagtgactcggagtactcggaggaggagttctcctctgagtccgagggctctccggctcctgcctctcccccggcgtcgtctgatgattcagacgactcccaggagatcgccgcggaggtatggacttacatccgggccgtcgagcgcgccgagctcgagggcttggatgagtcggagtactcctcggacgaggagaattcctccgactcatccgaggagggcagtggcggcgacggcggtgacggcgacgacgacggaggcgacggtgacggcgacaacggcaagggcggtgatggcagcgacaagggtggcagcggcgacggcggcggcggcagcaagggcagcaggaagggtagcaacaaggccagtggctag

SEQ ID NO: 9464 - DNA, 261 bp, Zea mays
  Peptide Sequence Number=SeqID_51243
atggctacaaaaatacaatcaattgatagagaggcctacctaggagttgatgtgtcgtggtgtggttattttgcatgtctctccatttttaatgagtcatatgatgctttaagagtgaagcctgacagttgcgagaaaatgctcaatcgccatagtcttgagcaagtaaaccctagggcaacacttattgatgagctgcagccgcttctgtcgcaggaataccgaatacgtgagcagaggactcagcggtgtgatggttag

SEQ ID NO: 9465 - DNA, 429 bp, Zea mays
  Peptide Sequence Number=SeqID_51244
atggacggcgtctatatcttcagaaggcgaggaattgaagggagggacagacgtgtgcgcatccaacccaaacgccgtgatcccgtgacgagcctgtcgtcgacctttgtggtacggccagtcggtcgcttgcaacaaccgaccaagaaggtggccatcagcccaccacccccggtactactggggtgtaccttgtttctcgtcgccaagatacgctaccatggtttttttctcagcagaggctgctgggtgggtcaaccgtctagagcacgcgaggcagtcacacagtcgcaggcggagcgcggcgtgacttgcggccctgcgtgcggtggcttcggactcgggcgatgcatgcaaagggcgcctccgcggtacacgcaacgtaagcgtggtcaaggtatcacagcatcaccatggacacacttgtga

SEQ ID NO: 9466 - DNA, 561 bp, Zea mays
  Peptide Sequence Number=SeqID_51245
atggctattcgtcctagcgtctgggccgaaaacgaggggttcgccatgggcaaagtggaacggagggaaaacgacaccgaggcacacgacgaactgaggctcgggcacggaggcgcgcggcgacgggcggcagggctgttcgtccttgcgtttgggctgaaaacgaggggttcgccatggcgcgcgctccgaaaacaacggtttggccacgaccgcgaaaaggggctaagtcccggcgtgtggaaagacaacgaagctaaagtgcatgtctggagtgaaggtcaaggtggaacggagggaaaacgggaggaggtgcgcggccgacgcgcggcatggctgttcggccttgcgtttgggctgaaaacgagggtttcgccatggcgcgcgggtccaaaacggcggctggggcacggcctcggaaataagccaagtgcaagcgtgtggaaacacaccgaagctaatgtgtatgtcttgggtgaagggcacggtggaacggacggacaacgacacggaggcacgcgcgacgtgcggcagggccgttcggccatgcgtgtgggctga

SEQ ID NO: 9467 - DNA, 159 bp, Zea mays
  Peptide Sequence Number=SeqID_51246
atggcgctgcccctagcgcaggagcttcctccctgccccataccgcataggctcctgctgcttgatttttttgcgtccaggaagcccaaggaagaagatgacccccactgtccgcccagggccaattggaaaagtttttctgtagaaattcgtatttaa

SEQ ID NO: 9468 - DNA, 144 bp, Zea mays
  Peptide Sequence Number=SeqID_51247
atgactacaccagaattccttctttctatttctctatttaagcaactagcaaccaccaaagaactcgggtttttgtttgatgttcaaggttgttcttggcatggcaagagcagcaacaacatgagccggtgtaactatcgctaa

SEQ ID NO: 9469 - DNA, 747 bp, Zea mays
  Peptide Sequence Number=SeqID_51248
atgcaaccgagaaaggctggtccccttgcaaaaaagtgcgacgaaagcctccaagcgagtgctaacactcccttcgaggctcgggggctactgtcggggaccataattaggggtaccctcaagacgcctaattctcagctgagtgagtctgacaggcaattaggccttgccaaaggcgccacggcgaactccgctccgcccgaccccagggctcggactcgggctaagacccggaagacggcgaactccgctccgcccgaccccagggctcggactcgggctaagacccggaagacggcgaactccgctccgcccgaccccagggctcggactcgggctaagacccggaagacggcgaactccgctccgcccgaccccagggctcggactcgggctaagacccggaagacggcgaactccgctccgcccgaccccagggctcggactcgggctaagacccggaagacggcgaactccgctccgcccgaccccagggctcggactcgggctaagacccggaagacggcgaactccgctccgcccgaccccagggctcggactcgggctaagacccggaagacggcgaactccgctccgcccgaccccagggctcggactcaggctaagacccggaagacgacgaaactccgcctcgcccgaccccagggctcggactccgccctggcctcggccggacgacttccgcctcgcccgaccccctggctcgggctcggccacggcaactga

SEQ ID NO: 9470 - DNA, 1248 bp, Zea mays
  Peptide Sequence Number=SeqID_51249
atgcggaaacagatccctcccgtctcctgcctcgtactcctcgcggcggctttcgcgctgctcgccaaggcgtctgcagcgtcaccggcgcaggccgccgtcgcggtcaacgtcacgggcgtcctctcggcgttcccggacctcagcgacttcacgcggctgctggcgtccagccccgtgctggcggagctcgcagggcggtcgccgtcggcgttcgcggccgcgtcgggcgccgacctcgccgacgtcctccgctaccacgtcctcctcgagtacctctcccacgccgacctacgccgtctgcccgcctccgggaagctggtgaccacgctgttccagacgaccggccgcgccaccgcggacctaggcgccgtcaacgtcaccacagcgggcgcctcccgcctcaccgtcatccggtcgccggcaccgttcccgggctcgaacgccaccgtcctcggcgccatcaccgcggtgccgtacaacctgagcgtgctggcggtgagcggcctcatcgcgccctccgggttcgacctcgcggcgtccgagtcccagccgcccgcggccgtgaacatcacccgcgtcctcgccgacgcgcgcgccttcaacgtggcggcgtccatgctggaggcgtcgggcgtggcggccgagttcgaggacgacgagcgcggggccgggatcacggtgttcgcgccgaccgacgacgccttcgcgggcctcccggcgggggaccggctccagtcgctccccgccgaccgcaaggccgtggtgctccgcttccacgtgctccactcctactacccgctggggtcgctggagtcgatcgtgaaccccgtccagcccacgctggccaccgagttcagcaacgccggccgcttcaccctcaacatcacccgcgccaacggctccgtggccatcgacaccggcgtcgtgcaggccaccatcacgcggaccgtgttcgaccagaaccctgtcgccgtcttcgccgtatccaaggttctcctccccaaggagatgttcacccgcacagccgccgcctccatcgtggccaccaccgcctccgcgtcctcccccccaccagccgcgacagccccggaggcctccgagagcgcgcggacgccgccgacaaagctgtcctccccacccgcgctccgcggcggcgggcaggactacgccacggcgccggcgccggcgcgagggatcgagtggtggtgtatagcattggtgtatctactcccacatctggtatga

SEQ ID NO: 9471 - DNA, 1515 bp, Zea mays
  Peptide Sequence Number=SeqID_51250
atggctgcgggctgcgggctgcgggctgtgggaatggggcgggcgcggctcgctcgcgagattggcggccgaatccgaggtgacgggctgacggccctgcctatccacctcataccgcctgcccgcctgccgtgttcaaaattcgaacgtcctccgccgccccaacgataccatcttccccagttccccacgccggcacacccaagctcggccactcgtcttgttgcgaccaaacccaaaatccgaacaccctctcgttccccatccccggcgtccggcgctgaccgcgtgatcctcgccccgatggcggccgcctccacacccgcccgttcttccgcgcacctttcgcagccggtgcgcgtcgtgctgcgtgtgcgcccgttcctgtcgtcggaggccgcctcagcgacagcgccttgcgtctccctcctcggctgccaccccggcggtggggtcaccgtccagctcaaggaccagcacacaagtcggagtgaacagtacaaactggatgcgttcttccgtcaagaggacagcgtcagccagatatttgaccaggaggttcgtgcagtgatcccaagcatcttcgaggggatcaacgcgacggtctttgcctatggggcaaccggcagcggcaagacctacacaatgcagggcacagaggattttccagggctaatccccttggcagcttcgaccatcctagcactctgcactggcacatggtgctctgttgagatctcgtactatgaggtgtacatggagcggtgctatgacctgctggagcctaaagcgaaggagatcatggccttggatgacaaagatggtaacatgcagctgaaaggcttaagctggaggagaaaagttgcccacactggactgaacgatgtttctagtcggagccacgctgtgctctcactcagggtcagcagcactgatgtggtgaaagggaagcttaatctcattgatttagctggtagcgaggacaacaaaaggactttgaatgagggcatacgccttcaagaaagctccaagatcaaccagtcattgtttgcgttgtccaataatcctgcagaataccaggagtcggccaacacagtaagtctggcggctcgttcatgccatattgagaatttcaccagttcaagcaaacaagaaactcccaaacttaagatcgacatggaagccaaattacgagcatggttggaatcaaaggggaaaacaaagagcatccaaagaatggatggtcttttctccccaattgccagcaagactccattgtctgtgagccatatgaagcaaccaacatcttcaagaattccttgtagagttaaggcaatggatcaggatggtggtaaaatcaagaagatactttttgatccagtagtccatgttcccactgaaaatataccacgagagcacaggcagacagaacttgaagatttgggaaacatcggcctctcgtcaaagcagatccgagacatccttaagaagacggccactgggatcttcaaatga

SEQ ID NO: 9472 - DNA, 2616 bp, Zea mays
  Peptide Sequence Number=SeqID_51251
atgtccagccccaaccctccaccttctccccaccacccgcagccgccaccatctccggggctgtcccagccgccgggtgcccagctacaggcaccggcatcccaggggacgaccgcccccatgctcggcgatcacacggcggccgcactggtgcccactgcgccgccagccgacgtcctggcaggctcttcccgcctccaggcattcacgcctcatgagatgacggcggccatcttggagctgggccaggcggtggccgggatccgcgccttcctggcaggaccctatacgccgccaccgcagctacctccgccgcagcaaccgcccgcgtcggcgccctcgtaccaatacgggatgccgccggactgggcaggttctgcttcatcttcttcaccacaggcgtcccagggcctccccatccatatggttcgatttccgccctcgccctcaccactgccggcgtgggcgaccgtgacatcggcgcccgtcttcggatcggccgccatacaaccacacgtaccgtttcagccagccgctgggggagttccctctcacgggggctcatcggcggccggtgtcctctacggcggggtggatgggtcgccgttccacggcagcagcgttccgcccccggggtccaggggccagtgctcgtccccgccagcagcagcaccgacggcacccgcggcatccgatcccctgcctccacgattctacaaactggagttcgcaacatacgatggcgctgctgaccccgtcaattggctcaatcaatgtgagcagttttttcggggccaacgcacgctcgcttccgaccgcacatggctggcctcataccacttgaggggcacggcccagacgtggtactacgccctcgagcaggacgagggcatgccgacgtgggaacggttccgagaactctgccacctgtgtttcggaccgccaatacagggcagccgacttgcggagttgggtcggcttccctttcagtccacggtgcaggagtttgccgagcgcttccaagcgcttgcgtgtcacgtcgacagtgtatcctcggttcagcgggcggaactattcgtcggcggccttcccgaccacatacgggtgcaagtgcagatgcaccatccacgggatcttcagaccgccatgtactatgctcgcgcatttgagctatgcacggcgaccgcacagccggctccgacatcccgccccacgcgacacgcccctcgcccgccccagcagccaccggcgcgtgcgcaagtgggggggcaacctcctgcagcggcgcatacacttccaggggggcacccctttcgtcggctcacaccggcggagatgcaagagcgacgccgtcaagggctgtgctacaactgtgacgagccatatgttccgggtcacgtatgccagcgcctcttctatttggagtgcggggactacatcgtcgacgagggcgcgcccgcggctaccgatgacgcaggactgcaggctgcgtccgtacaggaccctgaggccgctattgcttttgtggtctccctccaggcactcgcaggcattcgcacagagagctccatggtgcttccggtgatggtcaagggggagcgacttatggctctgctggacaccggctcaacgcataacttcctccagagtgccaccatgcgtcgtttggggctggtacccgccgcaggggagcacctcagggtcactgtcgcaaatggtgacaaccttcgctgcgccggggtggcccgcgatgtgcccatctccatcgagaacgagcacttctccatcacgtgcgtcggcctcgacttgggttgcttcgacttcatcctcggcgtcgactacctgcggaccttagggcccatcacttgggacctcgaggccatgacgatggccttccagcgcgacgaccaccgtgtattgtggcggggcatcgggggtgccgaccctcctgaccctcgagcctccgtagcagcggtggtagccgcaagtgaccagcaacccatgctggaccggcttcttcttcagcatgcctccacattcgaggagccccgaggcctgccgccgacccgaccatacgaccaccgcatccatctgctcccaggaacagcaccggtcgccgtgcgaccataccgatacccccagctgcagaaggatgagctggagcgccagtgcgacgccatgctcacccaggggattatccgccctagcacttcgccattctcggcgccggtactccttgttcgcaaggcggataagtcctggcgtttctacatcgactaccgcgccctcaacgccaagactgccaaggacaagtttcccatacccgtcgtggacgagcttctcgacgagctccatggggctcgcttcttcaccaagctcgatttgcgctcgggctatcatcaggtgcggatgtgcgtcaacgacatcgccaagacggcgttccgcactcatcatggccactatgagttcctagtgatgtcgtttgggctttccaatgccccggcgacattccagaccttgatgaacgacgtcctacggccgtacctaaggaggtttgtgctcgtcttcttcgacgacattcttatctacagctcgtcatgggcagagcatctgtag

SEQ ID NO: 9473 - DNA, 117 bp, Zea mays
  Peptide Sequence Number=SeqID_51252
atggcgaggtcgtgcgcggacgacaacggcgagcacgctggacgcgaccgggcacggccggaggtggccggcggctgcaagggcctggtggatgttacttctgatatcatgctttaa

SEQ ID NO: 9474 - DNA, 426 bp, Zea mays
  Peptide Sequence Number=SeqID_51253
atgtcagaagtaatgcgcgagcagtctcaagaagatgacgatgttacgcttagcaacaccattctgagcatgagcgccagtacaagaataccgaggaagggtgccttgctcagcgagaaacagacttttgttagagtggtgatagtacatgttattgaacaattgaaagctgaagttgctgcagccagtgctattgctgatagaaccatgcctagagatatcccacttccagttgagggcaatgagaagaggaagaggaggggtgttttagcatttaattttatttataatatattgcgtatcgctgtatcaatattttttgagaaatggcgtatctgggtatcggcgtatcgcgtatccgtatccccgtatcagggcaacatagacgacgaggcacctgacggttgccctggcgggggcacatga

SEQ ID NO: 9475 - DNA, 204 bp, Zea mays
  Peptide Sequence Number=SeqID_51254
atggacaactgtggcggcgcggcagcaggaggccgcacacaaatcgcagtggcaacggccgacggcgcgagagctggaggtcgcggcctagtcgtggtggcgagggcaccggagcaggacgaagcaccagaacagaattgtctactaggacgggagggagatggcaagccgtacaccctcggcaaagatgctaggccggggtga

SEQ ID NO: 9476 - DNA, 729 bp, Zea mays
  Peptide Sequence Number=SeqID_51255
atggcgcctctgagggggacagagtctacccatgaggtccaattctataagattatactgagcaatgatatcattgaaaaggaaactccatctattatttcctcccggcatggattattcttaacctctgagacatacattgaggtagcaactatccttgtgctggtattgaacaaatcgactaatcagggtgaaactccaaatgtaaaagttcggctagctggttttattctggatgatggatcatccctgtgctgtggctgggctgatgatgctagggcagaattattgcttaggctgcaggaaattgtgcatctggatgcttctgttaatttaaagctttcaaaaggaggagagaatagcacaaaattaaaatatactattggatgctgtcttgaaaaaatgttgaagcagcacacaagtgttaccgtaaagaactgtggaattcctcctgatttctattgccgagatttggatgcatcttctgtttcggacaaagccttaagtcgcttggaagacaaacttctgaaatttattgtccttaatgcttgttgcaagggatctctgaatgttatggcatcagctctgagcccagatgatataaatgggttcaatgtggagctccctgttccagtgcagaacatgcggatgctttggatagaagaagttttcccagtagatcccttggaagaagctcgcagactacatgatattttggaaaacagctag

SEQ ID NO: 9477 - DNA, 855 bp, Zea mays
  Peptide Sequence Number=SeqID_51256
atgccagggtctagcctgtatgctgaagctgtaatacttccatatgttttgaagtttattgggcaaggcgaatttcttgagcatgctgagggctttataatgtcacactctactttactaggtaattctgaagcctctgtggcaaaatcatgcaatattccatgttcgctaagctttggcagcaccaacctttgtggtactctggtgtctacctatgcctctggatcagaaggtactgttctaaatgaacctattgtactaagaaaagaatactcaaggatcttgttggagttcgaggcaggaatttttaagaaatatcagttaccgcgaatcaatggttcctatattctccaatgtcccagtcgaagttttacttgcaccatgggaaactgtggatgtttgcaaggtggtaaagtctcgattgatgctcaagatagactttggagcttcgccattaccattggtggtaatataaacatcaaggggtcaattggggatcaatctattggagttacttcaatgaagatggatgagatattttccagaaatatggtcgatgatgagctaagattagttcagccttggaatgacttctaccgtaattcttattttcatttggatttttcttatgaggcaataagcaaaaagatggaagattataacaccgtatatatccgtggatactcaaacaaacattttactgttggcattggaccaggggcaacagtgacattccaccgcatccgtttcaaacagtttgctccttcccttctggatcgttgcagcataaaacccctatttacccatctgcagcattttagcttttaccttgatctgactagaaacctgatgtga

SEQ ID NO: 9478 - DNA, 303 bp, Zea mays
  Peptide Sequence Number=SeqID_51257
atgtcggcgaactgcagcgtagtgggaacgctgagaacctcgaacatcaccggcggcgacacgctcgcgaacgaagtgcaggtcgatctccacgtgcttcgtgcgctgatgttgcgggtcgtggttaggggcactagagcttggaagggccagcaaccagccgtgctgcggcctatgggacttggaaggaaccacgaggcacagcgcaggaagctagcaaggctagaaggggcggccaacagtggggaattgagagcgttaggcgtggggtacatgatgttagcatggtttttaaagaggtaa

SEQ ID NO: 9479 - DNA, 396 bp, Zea mays
  Peptide Sequence Number=SeqID_51258
atggagaagactcacaatgatagtgaccaagacggcgtagtgcaccagcatgagtacgaagacgacgtcgagcaagcacggcaacgagggctcggtgtagcgaaagtcgacgacggggcagaggaggctccgaggaggatttcgacgagctgcttcgccggcggcgggactgaaatcggcacggaggcggctgtgatggatttagggtgttacagggcgcgcctcctgccaccgcgtatacaggcgacaagccctctcgacattaaatgcgccctgtccaatctgttggcagatggcgtcaaggtcacccagcagacggtgtgcctgaccagtctgttggagaacaatgcgcgcgttccgagcagcacactgtactcatcatcccttctacaataa

SEQ ID NO: 9480 - DNA, 2052 bp, Zea mays
  Peptide Sequence Number=SeqID_51259
atggggattgatctcaacgccgtgggggaggacgacccggcgggcgcggcggatgcggccacggacgaggtgtacgcgcggcttgcgctggtggcgatggatacgatgtttggccgaaacatcaatgatggtgaaactgaagagaagaatggcgaggaagaggatggcgacggagaaaagaagcacgcatcacacatgttctgcaagacactcacagcttctgataccagcacacatgggggattctctgttccacggcgagctgcagaggactgctttccaccattggactatgagcagcttaggccttcccaagagcttattgccaaggatttgcatggcatgaaatggagtgtatgcttcttcatggttcacatgggaagtgaatgtgcactattttcccccaaggaacgtaatgttatgcttggtaaatgctatgtgcaagaactagtggatgaaactgggtcagcaacagtaattcaggatgaatttctaaagcaagagttcatttactgtggtcaacctcgaaggcatcttctgacaactggatggagttcatttatcaataagaagaaactagtctcaggggatgcagtcttgtttcttagaggtaatgatggtgagctaagattgggtgtgaggagagcagttcaactgaaaaatgaagctctacttgaagctgtcaactgtactgattcgaagctacttatgctgtctgctgtggccaattcttttggacaacagaaggttggtgcatcagaatttattgtgccgtattgcaagttcttgaagagcttgaactatcacttttcagttggaaccagatttaaagttggctgcgagaatgaagatgctaacgagaggtcctttggattgatcataggtattagtgaagttgatcccatacactggcctggatcaaaatggaaatctctcctgcttgcaatgtacctcaacaagttggtaatggtcttccactttgctgttttttttttgggtggaagtaggatcaccattaagataaagtgggatggtgctactaagtacagccaccagaatagagtatctccatgggacatcgagggagttggcagctcagtttcagttactcaccgactttcctcttctgtttcgaagcgaacaaaactgtgcttccctccaagcgatttggacacgccaattctagatggaaacggtcgtccagactcagtggaaactgaacgtttccacagggtcttgcaaggtcaagaattggtgcactctagtattcatggtactgcatgctctcattcatcagatagccccagatgtcaaggctcttatggcaggagattctctgctgatgcgtggaactgcaagatgaatgatgtaatgagtgggcctcgacacctaaatgccactgggtttgcttaccagcccctaggcttcagtgaatctgtcaaattctcagaggtcttgcaaggtcaagaaatgtctcaggcggttccttccttcatgagatctgctttcaactctggcacgcagaatggcagggttcgaccatttgattatgtgcagagatcagatgcaactcaaggatacgctctccagcagtttaatctgccagcaacagaagtgcattcgccctcttctgttcttatgtttaaccaaaccatggtaccacatgctgagctagatggtgcgaccaaccgtgaagaagtacatggcagcaggtacttgtcatccaatgcaatagggagagaagctgaaccatggccatccatgcagcagcaaagagcgagtgtaaatggaagcgagcctctcgacacaactgaagcctcagctcctgcaaggaacgctgaatctggatcggtcggcaggggcgcggggcgaagcaactgtaagctttttggtttctccctgactgagaagatccttggaacggatggtggtggtgtgaaagaagggaactacgaagtggaccgtcaaactccccgggtgctagacttgtttgggcacggttctacgcctggagctctgcatgctctctgtgctgctcccttgggaatatga

SEQ ID NO: 9481 - DNA, 993 bp, Zea mays
  Peptide Sequence Number=SeqID_51260
atggcgcccgccaaagcgcagcacacaagcactaaccagcagacattgctggatgcgcagctccagctctggcatcacgccttcggctacgtcaagtccatggcgctcaaggccgccctagacctcggcatccccgacgccatccaccagcacggcggctcagccaccctcccacagatagtcaccgagctggccgcactccacccgtccaagacaccgtgtctgcgacgcctcatgcgcgtgctcactctcaccggcgtcttcggcgtcgtcgttcagcactcgacgaccgacggcggcagcgatcttgtctacgagctcacgccggcgtctcgcctcctggtcggctcggcgccgtccaacggcccgaacgtgagtccgtttctgaacatgatcctcggcaccgccttcgtgtcctccttcctcgacctcggcgagtggttccagcacgagctgccggacccgtccccgttcaagctggcgcacgggcagcacgtgtgggacatggcccgccacgacgcgagcttcgccaagctctgcgacagcggcatggtcgcggacagcgggttcatcatggacgtcatggtcgaggagtgcgccgacggtgttttccgagggatcagctccctggtcgacgtcgccggcgggctcggcggcgctgcccaggccatcgcgaaggcgttcccgcacatcgactgcagcgtgctggacctcccgaacgtcgtcgccgctgcgcccactagcaccgacgtgaagtacatcgccggcgacatgtttcagagcatcccagccgcagacgttgtcttcctcaagtgggttctgcatgactggggcgatgccgaatgcgtcaagatattgcagaactgcaagaaggccataccatccgaaggagggaagccgaacgagatgaggaagagtggaagaagatcattttcgaagccggatttagctcttacaatatcatacccgttctgggtgttcgatccatcatag

SEQ ID NO: 9482 - DNA, 240 bp, Zea mays
  Peptide Sequence Number=SeqID_51261
atggcaccgaagcgggaggacagcgtctgctcgacatggtctatccgcttggtggatcagagactgctggaggttggagaagtcgccgttgattcccttgagctcgtcgatgaccaactggatgttggcatccatggcccccagggttgtgcggaatcgggtgggatggctgtgatgaatttgaatttggacccgaagctccgcaccatagcctactgcgctgagcagtggcggacctag

SEQ ID NO: 9483 - DNA, 1290 bp, Zea mays
  Peptide Sequence Number=SeqID_51262
atggcgccccgcacgctctatgacgatggcggctctcagcccccttacggaagcaagaggacgtcagcaaggactcgacagccccgacagggaccccccgggttcgaaacgccgacaccactacacgagtcggtgtcggggccggtgtcggaagaatactgggaagagacttatatcaccccctaccaatcaatccagcacaacagcatcatggcgctcaccacgagcactaacaaccaagccttgcttgacgctcagctagagctctggcacacgtcctttgctttcatcaagtccatggctctcaagtctgcagtggaccttggcatcgccgacgccatccacagccacggtggcaacgccaccctgccccagatagtttccagggccgcgctccacccgtccaagatcccctgcctgcgtcgcctcatgcgggtgctcacagccgccggcatcttcagcgccgcccaccgctcgccggacgacggcggcggcgagctcgtctatggactcacaccggcgtctcagctcttggttggcggctcttcaagcctggctcccttcatgtccctggtgttacaccaggtctacgtgtcgcctttccttggcctcggcacatggttacagcacgagcgctcagacccgaccctgtttgagatgacgcatgggctcactgcctgggacctgaatgaccacaagccagctttcggcgagctcttcaaccaaggtatggtctgcgacagcagcttcgtcatggacatcgtcgtcaaggagtgcggcgacgtcttccggggtctaagctcccttgtcgacgtcgccggagggcttggcgcggcggcactggctatctcgaccgcgttcccgcatgtccagtgcagtgtcctggatctcccgcatgtcgccgccaatgctcccgctaacaccagtgtcaagtatattgctggcgacatgtttgagagcattccaccggcagacgccgtcttccttaagtgggttttgcatgactggggcgatgctgattgtatcaagatactcaagaactgtaagaaagctataccttccagggatgcaggaggaaaggtgataatcgttgatatggttgttggaggccagtcgtcaaacattaagcacaaagagactcaggtcttgtttgatctcttcatcatgacgatcaatggcgccgagcgagacgaacatgagtggaaaaagataatttccgaagctggatttagcgactacaaaatcatacccgttctaggtgttcgatccatcatcgaggtctacccatga

SEQ ID NO: 9484 - DNA, 867 bp, Zea mays
  Peptide Sequence Number=SeqID_51263
atggcgcccgccaacgtgcaacacacaagcactaaccagcagaccatgctggatgctcagctccagctctggcaccacaccatcggctacgtcaagtccatggcgctcaaggccgccgtagacctccgcatagcggacgccatccaccagcatggcggctcagccaccctaccacagatagtcaccaaggtcacactccacccgtccaagataccttgcctgcggcgcctcatgcgtgttctcactcttaccggcgtcttcagcgtccacgccggcggtgatgagcccgtttacgggctcacgccggcgtcccgccttatggtcagcccggggccgaacctgactccgttcctgaccttgttgcttagcactttcttcgtgtcctccttcctcgacctcaacgagtggttccagcacgagacgggcccgtccccgttcgagctggcgaatggccgggacatatgggccctgtccggccacgacgcgagcttcggcaagctcttcgacgacgggatggtcgcggacagcggtttcatcatggaagtcgtggtcaaggagtgcggcgacgtgttccgaggggtcggctccctcgtcgacgtcgccggcgggctcggtggcgccacccagaccatcgcgaaggctttcccggacatggagtgcagcgtgctggacctctcacacgtcgtcgccaatgctcccaccgacaccaccgtgaagtacatcgccggcgacatgttcgagagcattccttcggcaaacgttgtcttcctcaagtggattctgcatgactggggtgatgccgaatgcgtgaagatactgaagaactgcaagaaggctatagcgtctcaagaagaagggaaggtgtga

SEQ ID NO: 9485 - DNA, 705 bp, Zea mays
  Peptide Sequence Number=SeqID_51264
atgggggcgggattgttcggaggcagcagcaagcagagcggccacgcggtgtcgttcctcctcggcgcggcgctgcccactgccctactcttcttcctcgcgtccgaccgcctcggcgagggcttgtccaccatctccagcagctggcggggcaacgggtcgatatcgaccgcgcagcagcctgccgcggcaaagccggcgacgaccgatgctcatgctctgtccgccgccgccgccgacgcctccgatgcccgtgccgcgcctacgcaagatcacgaggtagagttcgcgggccttgccgagctgctggcgagagtggcgacggaggacaggacggtgatcatgacgtcggtgaacgagatatggacgcggcccaactcgctgctcgacatcttcctcggcggcttgaggggcggcgaggacacagcgcacctcgtcgaccacgtcctcatcgtcaccgtcgacgccggctccttcagcggctgcaaggccgtgcacccgcactgctacctcctcgaggtcaagtccatggacatgaacagggccaagacgttcgggaccccggagtacgtggagatgatctggctcaagctctccatccagcagcgcgtcctggagctcggctacaacttcctcttcacggcaagacgatcgaccgacatgctgccagcaccagcagcactctcgtcaattgctttgagctag

SEQ ID NO: 9486 - DNA, 375 bp, Zea mays
  Peptide Sequence Number=SeqID_51265
atggagctgggagcgccatcattgccctatctgcgagctggtcagatgggacaccggccgagtccgaagccccctgggtcgggcgagggcggaaagtcgttcgggcagaggcctagggcggagtccgagccctggggtcggggcggagggcgggagtttcgtcgttctttccaaggggccgagcccgaagttccgagccctggggtcggggcggaagcggagtttcgccgttctttccgggttcttagcccgagtccgagcccctgggggtcggggcggaagcggaagtttcgtcgtcttccgggggccgagcccgagtccgagcccctgggggttcggggcggaagcggaagttcgtcgtcttccgggtcttag

SEQ ID NO: 9487 - DNA, 1560 bp, Zea mays
  Peptide Sequence Number=SeqID_51266
atgcaggcggtgcggacgcgggcggagcagcgtggtgccgaggcggaggcgaccccgcacgggagcgcgcggtcgtggagccccgaggcggagatcggcatgcgcgtggaggacatctgggacagcctggacgtgcagcagcggcagctgagccacggcgacaagctcaacagttgcttcgacagcatccccgtcgcgtccttcccgcacgccttcgacggcgcccagctggtggagatcccctcggacgccacgctcgccgaggccgtcgacatcctgtcccgcaaccggatcatcagcgcgcccgtcaggaacgtcgacgcgcccgaggacgccagctggatcgaccgctacatcggcattgtcgagttccccggcatcgcctctgaagccgcggcgacggccgaagtaggcgccgacgagctggcagcgaagctaggcaccgtcacgctggagggcgccgccgcagccgcggcggcggcggccgtcacgtccaaagcggcggcggagcctgagggagccatcgcggaagtcttcggagccctgccgtcttcggacctgttcaacaaaacgaaggtgaaggatatctccgggtcgttccggtgggcgccgttcctggcgctgcagagctccgacaccttcctcaccatgctgctgctgctgtccaagtaccggatgaagagcctgccggtggtggacatcggcgagggcaccatcagcaacatcatcacgcaggccgccgtcgtgcacatgctctccgagtgcgtcggcctccactggttcgaggagtggggcaccaagacgctctccgagatcggcctgcccatcatgaggctcagcaagatcgtcaaggtgcgcgaggacgagccggcactcaaggccttccggctgatgaggagaaaaggggttggaggcataccggtggtggacgatagcggcagggcggtaggcagcataatgatcaaggatgtcaagcatctccttactgcatcggagacaaacagagactacaggtcagagaccgctgcttgcaggaccctaacagccaaagaattcatcgcgaatgcgagacagagctccggcgaaaggcaaatgagcatcataacgtgcaaaaggggggacagcgtcaaggacataatactgaagctggatgcagagaagaggcagaggatctacgtgatcaacgaggaagggaacctggacgggttgatcaccctcagagatataatcgccaagctggtgtatgaaccgcctggctactttggggacttcttcaatggtgttatccctctaccatccaacagcagggaggctgcaacgcactatacgaaaggttgcaacaagcttatggcagatgcagttgtcataatcccatgtgcaagcctcaatgatgtgaccacacaccatgacaggatcaaggatgacaggctaaagtattcagttcaggttgctttgaagttcacacagtttttgtcagttgtcttcagacattcaaaagatgttggaaggtcaagttctctgtacagacctttaagttccaaccaagttagggtaggctag

SEQ ID NO: 9488 - DNA, 378 bp, Zea mays
  Peptide Sequence Number=SeqID_51267
atgacctacgagcccctcgggctacggcgcactcatgacatattaggacttggcctgagtgtgcaggccatctatagagcttgcaacgcgacgagccacgtcgagacccaggctacgaaggccaagggttggcgtggcgtggaggtagtaatgatggcgtcagggccctgcgccgcccacgctgtctgttataatgagcacgagaagagacgactaagacgcgtacaaccaacacagcctcaccaagttagagcgcaggtatggggtttgcacgttctcgatgaactctccaggctctggatggccagcaacgatagtgacatagtttactctagtggcgacaaggcgaagagaggatgcaattttattgtcacgtaa

SEQ ID NO: 9489 - DNA, 507 bp, Zea mays
  Peptide Sequence Number=SeqID_51268
atggtatggttccgcaacccgttccagcacttccccgtgtacgccgacatgagctgctcgtcggacgacttcaagccgtcgcgcgcgccgctggacaacccgctcaacacaggcctctactacatcaagtcgacgcaccggagcgtcgagatgatcaagtactggcgggcggccagggagaggttcccggggcagcacgaccaggccgtgttcgtcaacatcaggcacgagctcgtcaccaagctgcaggtcaggatccagccgctggacacggtgtactatggagggatctgcgagtaccacgacgaccccgagaaggtctgcaccatccacgccgactgctgcgttgggctggacaccaaggtgcacgacctcaaggcctttgccgcggactggaagaactacaccagccaggcgccggaggagaggcagaaggctgctttcaagtggacctacccgactcggtgccgggattccataggttggcatcgaagaagttatttttga

SEQ ID NO: 9490 - DNA, 393 bp, Zea mays
  Peptide Sequence Number=SeqID_51269
atgctgccaccggccgcgtgccttgctgcccgccgcctcctcggcatcgcctccgcatctgcgtcggaagccgccggccgctgggtagcttcctctccgatcgcttctgcagtcaacttcgccgccgcgtccaggggctccgtctccagcaccaggcccttctccacggctcttaactacgtgagcgcggcggagtatgcggcggtcgcgctccgcccgaccgattgcgacgggtgctcaggattgttggggacgcggcgcgattcgcggaaggattgggagggggcgagcgtggtcgggcgagcgggggcgaaaatcccggaggtcgggcgagcggaggcgggggcggtctacgctctgctcttaatagttagtagagattcgcagtgttag

SEQ ID NO: 9491 - DNA, 1860 bp, Zea mays
  Peptide Sequence Number=SeqID_51270
atggggcgaagccaggagggagtcgggcaagctaggagtcacgagagcagccggcgaggcaaagcttatgtatgggcgggggtgaagccatgggaacgggcgaggagggtacgacacggtgccccaggcgaggggacatggtgcgacgagaaaagggagggccgcgacggctgcttagcacagcggcccgcgacgggggcggggctgctccaggggaagtgcccgcacgtcgggcgggggaaggccaagcaggggcttgtggggcccgacagggatgaagcgaggggacctcgcgcccagcggcgggcgggccaggcaatgggggcgaagcccggcgggcgtgaccgggggggcgcggtcgggaaggcggcctggcgagtgcgaaggtcgcgctggcgaagacgggggcatggtctcggaagtgcggggcggcccggggggtgcaagactggcagcgcgaggtcgtgccggcgaagtgcatgccgccggaagagcaccaggcggaggttgccggcggaaggggctgacggctgggagaaggtagccgtcggccaggcagtgggtcgggagggtggggaagagaaactggctctggatggagtggattcacaggtttctgagaaaactcaaaaatcacgcccgatattgggtagaagtggtgtaaatggagtagttactgaccacatccagggggtacggcctgctgctgaggcagagagaccaggatcttctggtagtggaagcacatctttctggaatcaaatatttacttccaatgaggatcgaacacatgctcctgcaagagataacacagcaaacaaatcttatgctatgcctgcccctaatctggatcattcattctccactatacagttaagagaggtgagatgcagtgagtgtttgacagagatccttttcgaacagccaccagtcgtcctgaagccttcagaacaccagtctgagcaggaggcacttgaaatagcaattacaaagttgctattgaagtcatattacaatattgtcaggaaaaatgtggaggacttcataccaaaagcaattatgcatttcctggttaatcacacaaaaagggcactgcataattacctcataacaaaactttatagagatgatcttttggaagacttgctcaaagaacctgatgagctaaccataaagaggaagcagatacgtgaaaatcttaaggtccttcaacaagcttacaaaactttggatgagataccacttgacgcagaggcagtagagaggggtggtggatactccctcgattctgatgcgattggtctaccaagggctcatgggctttcttcatccctccacggattcaatgatggaagctcatcatattcaaccccgaagcagtcaagcgttgcgctgatgaagcctggcatgatctccactcttatcatattacttaaaaagtatatttccattattcagatgagggatgcctatagtggcagtcagactggtgaagatggggtattcaagagcgccaatgagactcctataagcagtggggtcactaacagaggcgccatcgtcagaggagaccttggaaggtgtatccactcaggtggagcaaggcttgcaattagcgatgctagcccgctcaaggttatccagagtgtacattcacggaggaacatgttgcgagacaggcaaaaacttggtctagctgagaaagtttctgtaattaccctgtgtcatattggtcacttgattggttcggacgatgcaaaattcctcataacagacatgagcactcattctgaagttctggatcaatgcctaagattcacaaaaatacaaaatccgcaaggtggatcagccttttgttaa

SEQ ID NO: 9492 - DNA, 1236 bp, Zea mays
  Peptide Sequence Number=SeqID_51271
atggcgtggtgccgtggtgctggagtgcgttctgtcagtgtcacctcatgtcatggctcatgttgggagccggcaactcgaagactcaggattgctgggctgtatctcgccgaagaagaccggtgctcagggtgcacgcacgaggtggacctcgacaagccgccggtgctgcaggaggtggcgaatttcttcaagggacacggggtcggagatttcaccttcagcaggggcaggctgtcccaatggcggtgccgagcaaagctagctgttcgtggaacaccagagaacccgttgattggtttataccaggaagggacgcatgctgttatagatattccagagtgcagagggattgatctatctattaatggagatccttgcctaacagagatcgacctatctattctagtgagcgaaccggccaagagtggaagagggccagttcgcaaactgcacctaggagatgccgacgtcgataagggcactgtggaggtccccggtggcgagggtggggtcgaagtcagggccgctggggctactagtggcccgacggagcacacgcgatctgatacagggcggcagggcaggtcgaaggaggtctggatgaacaggggcgacgcgggggtaccattggcgggtgcagcgcgggtgaacccgctggaccatactcatcacccaagcattaatgctgctgttaagttgttaaggcaaggtataactgagctaagtattcagccatttgatgaagatgctggagctggtgaactcagatatgttcagatggccgtgacaacatataacacatctattccggttgataaaagatacgagcaagggaaagttcaagtttcattggtttggaattcaagagacgagcgctcccagaacgcagagaagctgacttcaataatagaatacttgtggacaaatggtgggccaaaaagtagtgtccatctcattcattctatatgggccaattttcagacatcaaccagcaacataatttttgggcataaatggagacatcttaagggggagagggacatgtgggagcgttatgggggagttgatatttctctggatccttgtagctttggccaggctaatactctgtcatttaactctttgttgcataagctgaacaagtatgtaccacgtagttcaacagttgttgatttgtactctggggctggtgttattggcctatcagttgctgcttcaaggaaatgtaggtga

SEQ ID NO: 9493 - DNA, 285 bp, Zea mays
  Peptide Sequence Number=SeqID_51272
atgcggtggggcgacggtttcaggagggcgtcgattaatcgtcccccgacgccgagcgcggaggaggatcgggacaagcagccttctctcggagagatcattaacatcaagttggtagagactggggagaaggagaagctaatggagctactccgcgagcgactcgctgagtgcggctggagggatgagatgaaggcactctgcaggagcctatctcgaaagaacctctggattaagtgtgcttggcccactaactggaaagtcttctcgggtgtgcgtgagtga

SEQ ID NO: 9494 - DNA, 282 bp, Zea mays
  Peptide Sequence Number=SeqID_51273
atgcaccggcgcgccgccaccgccgtgcccagggagttggaggagggtggattaaatgttcaagcatctgctcgcctccacgagctgggcgaggcagggagctcgagggcgcagggttggtacgggcggggcggggagctaggggcggagggttggtgcgagcagggcagggagttgttggcggagggttggtgcgggcggcagaagaaggggccggccccgtacgagggatgggtcgcggcctcccgagcgagggcgagagaagcatcgagaaggttctag

SEQ ID NO: 9495 - DNA, 387 bp, Zea mays
  Peptide Sequence Number=SeqID_51274
atggcgcggcgcctctgccccagcgtgctcccctgccttttgcagccagcggccctcgcccagcgcgacgtgcgtgtgtgcgcgctccccaccgcattgcacgcaggttgcctttggtgcaatctatgctcagataaagaagaaggcgtcgaggaggagttccaggacttcgacgagttcgaggatttggctagcgacctcccccagtcagctgcttgtgatgatgatgatggttctattaatgatgtttctaaccatggattctggtatttcctcaatgaggaggttgtctttggtgcaacctatgctcaggttaagaataagagaaagcgtcgaggcggatcttcaggagttccaggacttcgacgagttcgaggattaggctag

SEQ ID NO: 9496 - DNA, 480 bp, Zea mays
  Peptide Sequence Number=SeqID_51275
atgttgttggcctatgtcctcgtcttcctcctccgcctgtccgcctcgacctgccatgccaccagccggaaccaacacctcctcttcgctggtcgcgccggcgactccaccgcccccgtgcaccaccgtcacaccaccaaggttctgtccgactacaacgacgtgcattaccaccctgcgatgatgccgtcgcccgccagcgtggagttggctggcggcatcgggggctcgccgccgccctcgttgtccgccgtggagccgagcggcgtcgaaggcgccccgccgccgccgccggggaagcgcgataccagcgcgccggcgatggagccgtcaccgtcgccacacagcgagggcggcgcctcgtcgtcgggcgacgatgatgcctctgcgacggagcaggaggacagcgccggctacgacctggacgacgcgaacgtggactacgtggggcccaagacgcaccctccctcgcataactag

SEQ ID NO: 9497 - DNA, 1218 bp, Zea mays
  Peptide Sequence Number=SeqID_51276
atgacggtggcaggcaggcgggagccgcagtcacgtcgtcagccaggctcacgtcccgtccggggacagcaagggtgcctcctcccaaggcgtgatgacggcggcgattctggcaggagaagcggacgacgcttcgccttcgccgtaataaccgcgtcaaaaaaggccagccccccaaagggttccatggccgcctcaggctactcgggctccgcgcccattactgatcaggggttcacagtcgcctcagacaccgagcgagggatgaccaaggaaggacagcgccgcctgcgccactccgactgcagtgccactcgacagagtgagtctgacaggcagtcaggccctgccgaaggcgccatgggaaactccgctccgcccgaccccagggctcggactcgggctaagacccggaagacggcgaactccgctccgcccgaccccagggctcggactcgggctaagacccggaagacggcgaactccgctccgcccgaccccagggctcggactcgggctaagacccagaagacggcgaactccgctccgcccgaccccagggctcggactcgggctcagccccagaagacggcgaactccgctccgcccgacccagggctcagacttgggctcagaagacgacgaaactccgcctcgcccgaccccagggctcggactccgccctggcctcggccgaacgatctccgcctcgcccgacccgggggctcgggctcggcctcggccacggaagacagactcgacctcggcttcggaggagctcccacgtcgcccgacctaaggcacaggcccgtcacgctccgtcgctcctccgacagccacgacatcacgccagcaaggtgccaagacctctctggctgccatattggcatggccttcttagagaaggttggccgcgagggaccgaggacgggacaggcgctctcttggggccgctcgcttccctcacccgcgtggacgcttgtaacccccctactgcaagcgcacccgacctgggcgcgggacgaacacgaaggccgcgggacttccacctctctcacgcccgtctccggccacctcgcctctccccccttcgcgctcgcccacgcgctcgacccatctgggctggggcacgcagcatactcactcgtcggcttagggacccccctgtctcgaaacgccgacagaaataaactgcaacaatttacatattccatttag

SEQ ID NO: 9498 - DNA, 579 bp, Zea mays
  Peptide Sequence Number=SeqID_51277
atgcaggtggcatgcaaccacaccgcgggggcgcaccccttcggcttcatcgcatccagcatggaggcccaggcccacacgtcatggaccgggaaaggggatatttcgaaagggatccttctccgtgaaggaagcgggccccgagccctcctactgatcaggggttcgaaggctggcccctcggaagggttcgacagccgccccagagcacgcagagcgagggatgactctgggtacgtccgatacatggccgagcctcgggctacgctctcgagggtgaggttgacaacagctaagttcagcctcaggcgcaacaggaagctccgcctcgcccgaccttgggcctcggcctcaggaggaggtctccgcctcgcccgaccccagggctcggcccccgcttcggcctcggatggtggtctccgcctcgctcgaccccagggctcggcctcaacctcgacctcaggaggaatcgcgtcctcgcccgaccccggcctcggcctcatgaggagtctccgcctcacccgaccttgggctcggaccaaccgcgccacggaggaagcatcattaccctacccctag

SEQ ID NO: 9499 - DNA, 375 bp, Zea mays
  Peptide Sequence Number=SeqID_51278
atggcgcggttaatacggtccacaccgaggctgtcctcggtgcccgaccgcgacggcgcgaccgtgttctactcaacgtatggcggcagggaaaagatcaaggggggttggattctggaacttgcagcaaggataactgtgagcatgggatgcagtcgtggcttactcaagaagatccacgcagattcacagaatacagccatgcagggtgacgattatccatggaaaaaggagggggtaagggtggagcgcactgtagcagatttttccactgatgatatttctgctatgcacgagtctggatatttctgctccttcttatcccaaccaccgctctatttcacagtgggacacgacaggggaagaaaatattag

SEQ ID NO: 9500 - DNA, 375 bp, Zea mays
  Peptide Sequence Number=SeqID_51279
atggcgcggttaatacggtccacaccgaggctgtcctcggtgcccgaccgcgacggcgcgaccgtgttctactcaacgtatggcggcagggaaaagatcaaggggggttggattctggaacttgcagcaaggataactgtgagcatgggatgcagtcgtggcttactcaagaagatccacgcagattcacagaatacagccatgcagggtgacgattatccatggaaaaaggagggggtaagggtggagcgcactgtagcagatttttccactgatgatatttcagctatgcacgagtctggatatttctgctccttcttatcccaaccaccgctctatttcacagtgggacacgacaggggaagaaaatattag

SEQ ID NO: 9501 - DNA, 621 bp, Zea mays
  Peptide Sequence Number=SeqID_51280
atggacccgcacggcgtcacggaccacataagcagcgtcatccgacgacgaggcgatgacgaccgcgcatgggaggtaggccaatgccagcgtcaatcaacggaaggcaagccagcgtacaccatggagcagcggccgatgcggggcccgcccggcacccagaggcggtcgcatctgtggtggagcagtggccgatgcggggcccgcctggcacccagaggcgttcgtgtctgctcgcacccccgcggcctgtctgggtacgcgcgagtcgcagctcgtgtaccgcgcgaccgtaacagagggcgccggtgtatggcgtccccaacggcgcgcctcgacgcagacgcgacggcggatctagggccactgatgcaccgatggatgagagacgagcgcgtggaggtcccggtagatggggagctgatggtagacctcgatggcgtggagatccaggatgagagaccgtgggtctgggaccaaagcgtggtgggccaggggaaggcggtggcagagcgagaggaggaaggaggttctgcgcacctaaaatcggagaggaaacgcccgttgggtggagcgaacgcagattccatcggttcaggtagacaacgccaatctctgtaa

SEQ ID NO: 9502 - DNA, 1476 bp, Zea mays
  Peptide Sequence Number=SeqID_51281
atggcggcgccagatgcccggccctcgtcagccggtccaccgccggcccgctccctcctcctgcctctcctgctcgtgctcctcctcgcggcctactcgctcccagccgactcagcagcgcgcccgtcctccaactccaacccacggcctgccttcacgccgccgctgctgaagcgccaccagctgcggcgcccgagcagcagcagcgccgagctcgtcgccgggcccgccaacgcgtcgaccaagcccttcacggcgcactacttcccgcagctgctcgaccacttcgccttcacgcccaacgcgtccacggtcttccgccacaagtacctcctcaacgacaccttctggcgccggcccggcgccggcgccggcgacgacggccccggcccgctgttcgtgtacacgggcaacgagggcgacatcgagtggttcgccaccaacaccgggttcatgttcgacatcgcgcccacgttcggcgccctcctcgtcttcatcgagcaccggttctacggggagtcgaagccgttcgggaacgactcgtacaggtcggccgagacgctgggctacctcacgtccacgcaggcgctggccgacttcgccgtcgtcatcaggggcctgaagcgggacctcggcgccgaggccgctcccgtcgtcgtcttcggcggctcctacggcggaatgctggcttcctggttcaggctcaagtacccccacgtcgccattggtgccctagcttcctccgcgccgatcctgcagttcgaccacataacgccgtggagcagcttctacgacgccgtctcgcaggacttcaagtccgagagctccaactgcttcggtgtcatcagggcagcctgggacgtcctggatgagaggggggccacagacaaagggctcctggacctcagcaaactcttcagagcctgcaagactgtgaagtacgcttattcaatccggaactggctgtggacagcattcacctacactgccatggtggactacccgaccccagccaacttcctggagaacctgcctgcctacccagtcaaggagatgtgcaagaccatcgacgcgttccccgcgggcgcagacgtcctggagaaggcgttcgcggcggcgagcctgtactacaactacacgggagaccaggcctgcaacaagatagaggacggagacgacccgcacggcctcgatggctggcaatggcaggcctgcacagagatgatcatgcccatgacgatctccaacgagagcatgttcccgccgtccgccttcagctacgacgacagggtgctcaagaacatctcgtccagcatcatcgcccttgttacagagaaaggtgcccatcatttagacttgaggtcttcaacgaagggtgatccagactggctcatagaacagaggaggcaagaggttgagatcattcagggatggattgatcagtatcatcaggacatggcggaaacatcttcctga

SEQ ID NO: 9503 - DNA, 1386 bp, Zea mays
  Peptide Sequence Number=SeqID_51282
atggcctcgtcatcacattcactgatccaccccagctcttttgatatgttctgtccccggtcgtcccatgatgcttcgtctcgtctcccaagtcccacccaggtcccggaactagccgtcgctctccgcccagccagccactcatcagtccagcctccttcctccactgcctatatatttgcctgccctgctggagccacggcccctctcatccatccatgcacaagcgcgactcctcagcttcctcctctccttccttccttagctgtcccccttcccgccacctctgacccgtttcctgctcctgatcctgacgcacgtacgtctgggctgctgtactacgcgattctcgcggcggcgcccatggacccgtggatcgggcagccttccctgagcctggacctcaacgtcggccttccgacggcggcgaggccgcctgcgaccaccaccaccgccgaggtcttggtcgaggaggacttcctggccgtcaagaaagaccgagaggtgcaggtgcaggcgctcgaggcggagctccggcgagccggcgaggagaacaggcgcctcagcgacatgctccgggcggtggtggccaagtacgcggagctgcagggccaggtcaacggcatggcggcgccggtggtgtccacggcgggcaacagcgccgccgccgccgccgccaaccgccagtcctccgcgtcgtccgacgacggcggctccgcggccggctcgccgtccaggaagcggccggtccggagcgacagcctcgacaccgcgccccagcatcacaaccgcaagccgccgtcgccgtacgcggccgcccccgcccccggccccgaccagatggagtgcacgtcggccgccgtcaccatcgtcgcagccgccgccgcctaccaccacgagccggccaggcgcatccgggaggcggagcgcaagcccaaggtgtcccggcgattcgtccacgccgacccctctgacctcagcctcgtggtgaaggacgggtaccagtggcgcaagtacgggcagaaggtgaccaaggacaacccgtgcccgcgcgcctacttccggtgctcgctcgcgccgtcgtgcccggtgaagaagaaggtgcagcgcagcgcggacgacagcgccgtcctggtggccacgtacgagggcgagcacaaccacgccccgcccgccgcagcacgacggcggcgccaagaggtcgtccgcgccgccggcgggcgaggccgcgcgaccgccggcgccactgccgctgcagaagcaagaggccgggccgtcgtcggaggtcgcgaggaagaacctcgcggagcacatggcggtcacgctcacgcgggatcccgggttcaaggcggcgctagtcagcgcgctctccggccggatccttga

SEQ ID NO: 9504 - DNA, 309 bp, Zea mays
  Peptide Sequence Number=SeqID_51283
atggggcggcgtcagggccccggatcggctggcggcgcggcggcctgggcgggtcgcgggcgcctggcttcgcgcggggtgctgggcgctgctcggtcgcgggccgcatgggcgtcggggaggcgagtcgggcgcggggcggcgcgaccaggtcgggcggctcgacagggcgcctgggtgcgcgaccggatgagcaggggcggggtgcttggggtcgcggcgtcggcctgggctggagggagtgcccggcggcgggaggccggcggctgggggccgacggctgggagggagaagggtgggaaaaactaa

SEQ ID NO: 9505 - DNA, 267 bp, Zea mays
  Peptide Sequence Number=SeqID_51284
atggcggcaatagaggacgaggagatggagaagaaggtgcagcagtacctgcaccgcaaggggttccgcctcaccgagctcgcgctccacgaggagcgcagtcgcctctccacctccgacgtcgcgcttacccgagcattttttatactatctggcacagctcggtcatttttccatacatttcgggaagctcataaggtgatgcattcaagggatcttcagaagctggaaggcatcctctctccttcacacttggaggttatttag

SEQ ID NO: 9506 - DNA, 990 bp, Zea mays
  Peptide Sequence Number=SeqID_51285
atgaagttcaaggccttctttaccgacgatggcatctccctcctcgacaagcgattcctaccggccatggacaaggtggggcgcgtctgccacgttttcttcacgcccacgcacgccatgctcctccacaacctgctcggcgccacggccgctgggcccgacggcggcggcccgcagtgcgtcgctcagttcgccaaggacctcctcttccgtgagtacaacctgtcctcgcgaaacgggaaccaaatcgccttctccgtcgaagtcgcgctgcttcaccgcgcgctccgcagcgtgctcgccgtccacgcgcagccgccggccgccggggacgccgctggtgcccccgctatacaggtgaggctcgtcaacaagctgcccgcagggtcacgaaccgccacgccattcctcactttcgaaaccaagggcgcccacgcggccgtcgtgcaggatgtgcccatctcgcgccctctctcacgctccgacgtcgagcggttgcacgccgcccttgacgctgccaaggatctccctaagactctagtccaggttcctgatctgccacaactgcaaagcttagtggatcgtttgaaaaatgttggtgatctgctaactgtggctgtcacccaatatggtgatctccatctacaagtttcaacttctcttgttacggttggctctgaatttaggaagcttagggttattggggatcgtgcaaatgcacctgttggtgatcaaaatttgacttcttcgactcgtatggatatggcggttgagagaagggaagcactttcagtgcaagtgaatatgaagcaccttgttaagagtctacactgtcatttggccaagccagactgtaccttctatggcattgctcctgatggtgcttgtttaacagtcgtgttccagtatttcatcccaggaactagactggcagacaagtccattagcttctactgcaggcttccagtcctcgaccctggatccagttaa

SEQ ID NO: 9507 - DNA, 978 bp, Zea mays
  Peptide Sequence Number=SeqID_51286
atgccgcaatggacccttctatactatacctaccctgtttccacctcatccccggcgtcaattgaggttccccagcttataaaggacaccctcatcttcccatttggagcacggagctcgagcagccagcgacgacaacccacgcgcacaccaaccaacaagccacaccggcccacaggccacagctcaccagctaggctagcaaccacctcgatcgcagaggcagaggccgccggaagctcagccgtgaattcggcaggaaggaaaggaaaaagtcttgggtggtttcaacaagagatagaagatggagaaggcagggcagcacgagcatgtgatcggcatccccgtgaacaacagggcgttcggtatcgaggagccagatttccccagcaatggccccgccaagaacgcagccgccggcgccgggggacggcgccgggtgaccggggacagggtcgcccaaggcctgaaagagcacgtgacgctgggcccgaagctgtacgagaccgtgaagggcaagctgtcgctggggggcgaggatcctgcgggcggggcggcgtggggaaggtgttccggcgctggttctcctcccccgtcggcgggggcggcgagcggctgctcagggcgtcgcagtgctacctgtcgaccacggccggcccgatcgccggcatgctgttcgtgtccaccgagagggtcgcgttccggagcgaccgctcgctggcgctgccgctgacgtctccggccggcggcggcagcggcagcggcacgacgacggtgctgcgggtgccgtacaaggtgtccatcccgctgcgcagggtcgcggcggccaggccgggccagaacagggaccggccggagcacaagtacgtgcaggtcgtcacgcgcgacggcttcgacttctggttcatgggcttcgtcaggtaccaggcgtccctgcaggagctggagaaggccgtcgcgcagtcgcagtcgcaatga

SEQ ID NO: 9508 - DNA, 1929 bp, Zea mays
  Peptide Sequence Number=SeqID_51287
atggagaaagcttacaggggaactgctatgggaataccatctttctacaaatgggtcgtcagcaagtacccaagcatcatctcccctgtgaaggacgaaccagaggagtgccctgatggcatcatctacgacaacctctacctcgacatgaattgcatcatccattgctgcttccacccacaggaccagctaacgcatgcagacatagatgtgcgccctccgacgacggccaatgaggtgttcgagtccatgttcgagtacatggaccgcttgttccgcatcgtcaggccaacaagtctgctgtacttggcagaggaaccaccgcgagagatttccgaagtttctgaccccaatgtcatcagcccaggtactgagttcatggagaaggtatcagaagccctcgagtactacatccgtgccagatttaacagtgacccctggtggagagacatcatggtggatgttgctgacaagtttaacatatctgttctgaagctatctgtactggggattaactgtgaagaatcattgcaggatgcggatctgataatgcttgctttggcatctcacgaagtctacttctctattctgcgtgagtttttgaacatgtgggttctgagagagtacttggagattgaattcaagatactggacccagtctgcgagactgatattgagaggctaatagatgacttcatctttatttgtttccttatgggaaacgatttcatcccacatattccgtcacttaagacgcaagagggtgcggttgatcttctcatcgaagtgtacaaaacaaccttcaacaaaatgggagggtatattaccaacacagacaaagtcaaagataagtatggtgcatatctggaagtctcaaggctggaaacattttttcatgaactctccatgtatgaagataaaattttcctcaaaagatatgatctgaaacaggattcgttgctggagacatatcatgaaatgttgcgtgaagctccagaaagcgaaagaccagaactgagacaaaaattagatgatctcctttttaatgaagaaaacccatatgacagtataagactaggcttaccaggatggaagtctcggttcttcagggagcatttcggtgccaaaacttctagtgaaattgggaagctgcagaacgacatggcgcaaaagtacttagaaggactttgttgggtgcttcaatgctatttcgcagacgttccatcatggagctggtactacccgttctatgttgctcctttcgtatctgatctcaaaggtctatctaggatcgagatatctttcactgtggacaaaccattacgaccattcgatcagcttatggcagttttaccgatgcaaaggcacggcatctctgaggaactgcggctttcggccagcgaaatggtagatagaaagctcacgacccttgaatcgagacggaataccactaggaaagagaaggtgtttctgcacaggagctcgaactctgtgccacacaatggaggctcaagctctctgccacacaacgaggttactgaacaagcatcgcactgttcgatgcagaagcttccgatagattcagctacgaggtggtctcaatcaattttttttaacagtggaattggagggtggatagcgcctgcttacaatgatggcttctgcgacggtttcttcccctcacccacaccaaacctgcaggacataacgagtgatcagacaatatcaggtatgttcttcaaccctgaggcggcgaacccagttccaagactgcttggcaatgtcagagttcctgacaaggtggattcacgaacacctacagtgcatattaagctgcttattgttccagtttattcacagaccgatcatggtctttgggacactctcacggattactatgattgccatgcagactgttacgggagctga

SEQ ID NO: 9509 - DNA, 687 bp, Zea mays
  Peptide Sequence Number=SeqID_51288
atgccaaaatcagaccctgagaaagcaacagcacagcaacacaaggagaagaaatgtgtgagtgcgctcgcctggaggagtgtcttgaccgtatcgagggggtacacggcgacggcggaggcgctgatcgccgccgcaccggcgaccgcgtggaccgcgaatacgctttcccccagcggcttgctgcctcccaccatctcggcggcctgcaaggctggaacacaccctccccaaaaatggcgaaatgcggcgagcgacgtcgagagccaggctacccgtccgtcggaggagccttctccacccgtcgtggagccgtcgccgccgtcttctgccccgcctccgtcctcccttgaggcgcttgccgcagaggccatgtcatttgacgaggatgacactgaggagtcaatcgaaatgaaggtacagaaagctctggactgtccatgtgtcgctgatttgaaaaatggtccttgtggaggtcaattcgtcgatgcattttcctgcttcctcaggagcacagaagaagagaaggattgcattaaagcaaatccagaggcattctctaaggagattttggaggaagaggagaatgagaaggaggcagataagtccaacctgaaagttagagctccatcatggtccagagaatccaaccctaagtttaaagaattcagagtggacttgaactga

SEQ ID NO: 9510 - DNA, 1419 bp, Zea mays
  Peptide Sequence Number=SeqID_51289
atgtttttcgacgggtcgctgatgaagacgggggccggcgcgggcctgctcttcatctcgcccctcggaaagcacttgcgctacgtgctgcgcctccatttcccggcgtccaacaatgtggccgagtacgaagctctggtcaacggattgcggatcgccatcgagctaggggtcagacgcctcgacgcccgtggtgattcgcagctcgtcatcgaccaagtcatgaagaactcccactgccgcgacccgaagatggaggcctactgcgacgaggttcggcgcctggaagacaagttcttcgggctcgagctcaaccacatcgctcggcgctacaacgaaaccgcagacgagctggctaagatagcctcggggcgaacgacagtccccccggacgtcttctcccgggatctgcatcaaccctccgtcaagctcgacgacgcgcccgagcccgaggtaccctcggctcagcccgaggtaccctcggcacagcccgaggtaccctcggcccccgagggcgaggcgctgaacgtcgaggaagggcagagcggggccacgccagatcaagattggcaggccccgtacctgcaatatctccgtcgaggagagctacccctcggccaagtcgaggctcggcggaaggcgcccgggggctacacgcacctgctggtcgccatcgacaaattctccaagtggatcgaggcggtggcgttcttcaccaacatcatccatcgcttcggggtcccgaactccatcatcaccgacaacggcacccagttcaccggcaaaaaattcttggatttttgcgaggatcaccatatccgggtggactgggccgccgtggctcatcccatgtcgaatgggcaagtagagcgtgccaacggcatgattctacaagggctcaagcctcggatctacaacgacctcaacaagttcggcaagcgatggatgaaggaactcccctcggtggtctggagcctaaggacgacgccgagtcgtgccacaggcttcacgccgtttttcctggtctacggggctgaagctatcttgcccaccgacctggaatacggctccccgagggcgagggcctacaccgaacaaagcaaccaagctagccgagaggaatcgctggaccagctggaggaagctcgggacagggccttactacactcggcgcggtaccaacagtccctgcgacgctaccacgcccgaggggtccggtcccgagaactccaggtgggcgatctggtgcttcggccgcggcaagacgcccgagggaggcacaagctcacgcccccctgggaagggccattcgtcatcgccaaagttctgaagcccggaacatacaagctggccaacaatcaaggcgagatctacggcaacgcttggaacatcaaacagctacgtcgcttctacccttaa

SEQ ID NO: 9511 - DNA, 318 bp, Zea mays
  Peptide Sequence Number=SeqID_51290
atggctccacggccagccgccaaccaccaggccacggccgagcggggcgccgagcacctaggccggccgagcggtgcgccgagcgcccgagcacccaggccaccgcccgccgcaccagagcggtcaacggggcaccgagccgagcagagagtggagcgccatcaacgcgccaggaaccgcgcccaagatgctaccgcacgcgaagccgcgtgcccctgctcccccaactccgagccagcgccaaccgaaggccaaccgacgaaccccgctgtccgttcttcatcgcgtgtaatggagctttactgcgaccgtttctaa

SEQ ID NO: 9512 - DNA, 1059 bp, Zea mays
  Peptide Sequence Number=SeqID_51291
atggtgtcggtcccggccagggagaaggggcgcgcgccgtcgcccgtgaaggctgcttcgtctggcaagaggtacccatcaccaaggtcaaactcgcccgcgagggcagcggcctcgggtaatgagaatgccggggtgcagtcgacgcacggtccctcgctgagccgcagcacctctaggaaggccgagcagtcgccgttccgtcgcaaccccatggcggaactcgacgagaacacgctcggcaaccaccaccaccataacagcaacggcaggcctctaaagaaatccgttgatggtgccgttgtattgccacaaaagaccgcggagcggacaaaggatcagatctccagctgccgaactgcgaaggagattgcggatgaggccgtggcttcggacaccaaagcagcgcctgcaaggatgaacgcgacccactcggtgagcattgtggccgagaacgtcaccaatccgaggccggggagccggtcgtcgaggcgctcctcacgcgacttcgagcacaatggcaacacctacgcatccctgttactggaggacatccagaaccagcagcagcagagcaccagcgctgccactgtcgctgcagcgccgaccttcgcgcttccggcgtgtgtgtcgaaggcctgctctatccttgaagcggtcgccgacctcaactcctcgtcgtccgagaacaagaacttcgagctggagaggtcggtcaacgataaggaatccgtcaacggcaggtacggcggaaagggtgcggtcaccctcgtgatggagtcggaggtcggcgtgaaggacgatctcatggagccgagcatgcacaagtacgtctcggtgcgtgacattcgtggggagaccgagccgcaggagtcagcagggagcaacagctttgccggcaacgcctggacgtgctcgtgggagcccaattccgtcgactccgcagaccggacctggacggcctcgcagtcgtacaaacggcgacgaggtggagcagtcatggcagagcaagcagaagccgtcgtcatccaaggagcccagccacgttggttctactag

SEQ ID NO: 9513 - DNA, 657 bp, Zea mays
  Peptide Sequence Number=SeqID_51292
atgggtctctgtttcagcaagaagcagcaagagaagcgccgagacgtgcagccatccagtgacgccaagaagagcggatgccggaaatccggcagggacaccgtgcttgtcgccgatgccaagaaggctcctcaggcaaaggcgccagcacttcccaagaaggctgtagccaggccggaggaggcaacagctgacaagaggaccgtgttcgtcgtcaaggccgcggcagcggcggcggccgccgaggttgcggccgccgcgaagggaagacccgaggatgcgcaggcgaagagggcggcgccggaggaggagctgaggcccggcgctgtgggccgggcgccagtgcggacgtcgagctgcaccaaggaggagttggacgcgatcctgatccagtgcggccgcctcagccgtagctcgtcgtcgtccgggaaggcgccgtcgggcgagcaccggaggtacgccggatccaagcggagctacgacttcgaccacgagaggagggggcggtggcggcgacgtcgacgaatgcgattggggcagggagggggccgcggtggccaggccctcaccgcgccggaggtcgccagaacggaagcgctcgtcgagccacgatggccgtgctggcagcgggagcgggagccagagccggaggattag

SEQ ID NO: 9514 - DNA, 215 bp, Zea mays
  Peptide Sequence Number=SeqID_51293
atgccggacagccggacatgcactgcgggcgcctggcagcgcgctgcgcgcggcgaggcggtggcgtctggggctctgggcgctggtcgactacgcgcgatgggcggtggcggctgggcgattggtcgactgcgcgcgatggccgccgccaccgtcgacccgggtccccgtcgcgtccccgtcgccgccgaggagtccccggagcccgccttgag

SEQ ID NO: 9515 - DNA, 378 bp, Zea mays
  Peptide Sequence Number=SeqID_51294
atggggtcgggcgagacggagaccgtcttccgaagacgaggtggactccgagccccgggtcgggcgaggcggagaccgtcttccgaggacgaggtggagtccgagccctggggtcaggcgaggcggagaccgtcttctgaggacgaggtggagtccgagccctggggtcgggcgaggcggagaccatcttctggagtcgaggctgagtccgagccctggggtcgggcgaggtggagaccgtctttcgaggtcaaggtggagtccgagccctggccaaggttggcgtggcgatctggccaaggttgcttctccgcgaagcctgcccgagctgggcctcgggcgagtagaagctttgtgctgatgggggttaccagctga

SEQ ID NO: 9516 - DNA, 564 bp, Zea mays
  Peptide Sequence Number=SeqID_51295
atgagtgaaggatctgcgatcggggcccgcgtcgcagtgtcagtgaccaaccgcgcgcggactgtggagcggatgaacggccgcgcggatgtcaaggctccgtccactcaagggacacgatcccgcctcgcccgagcccagcctcgggcaaaggcagccgacccagaaggattcacgtctcgcctgaggctaagtctagcctcgggcgccataggaagctccgcctcgcccgaccccagggctcggactcaacctcgacgccggacgatggactccgcctcgcccgaccccagggctcggactcaacctcgacctcagacgatggactccgcctcgcccgaccccagggctcggactcaacctcgacctcggaagacggactccgcctcgcacgaccccagggttcggactcagcctcgactccggaagacggtctccgcctcgcccgacccccgggcccacactcgacctcgacctcggaggagcctccgccttgcccgacctcgggctcggaccgaccacgtcacaggggggccatcattaccctactctaagctagcttag

SEQ ID NO: 9517 - DNA, 564 bp, Zea mays
  Peptide Sequence Number=SeqID_51296
atggtggccgcggcgagggtggtgtcgggggtgaaggcggagggtctgctgcggggcgcgtgcgcggcgctggccgcggcggccgcgctgctggtggggctcagcacgcagacggagacggtgctgctcgtccggaagaaggccaccgtcaaggacgtccaggcgctctgggtgctggcgatggcggccgcgtcggcggcgggctaccacctgctgcagctgctcaagtgcctctacctcggccgccgccgcagcggcagggctctggcctggacgtgcctcctgctcgacaaggcgtgcgcgtacgcgacgttcgcgacgacggtggcggcggcgcaggcgtgcgtggtggcgctggacggcgcgcacgcgctgcagtggaccaagctctgcaacatctacacccgcttctgcgagcaggtcgccggcagcctcgcgctcgggatgctggccgccgtcggcaccgccgtcctctccgccgcctccgcgcgcaacgtcttccgcctctactactgctcgtcgcacgcctcgccgccgccgcgggagacctgcgccgcgcactag

SEQ ID NO: 9518 - DNA, 1485 bp, Zea mays
  Peptide Sequence Number=SeqID_51297
atgctcctggggttcatcgtctccgagcggagcatcaaggccaacccggagaaaatcgcggccatcaccaacatggggcctatcaaagatttgaaaggagtacaaagggtcatgggatgccttacggctctgagccgcttcatctcgcgcctcggcgaaaaaggcctacccttgtaccgcctcttaaggaaggccgagcgcttcacttggacccccgaggccgaggaagccctcagaaacttaaaggcgctccttacaaacgcgcccatattggtgccccccactgtgggagaagccctcttgatctacgtagccgcaaccactcaggtggtcagcgcagcgatcatagtcgagagacgagaagaagggcatgcactgctcgtccagaggccggtttacttcatcagtgaggtgctatccaagaccaagatccgctacccacaaatccagaagctactgtacgcagtaattctgacgcggcaaaaattgcgacactacttcgagtctcatctggtgactgtggtgtcatccttccccctgggggagatcaaccagtgccgagaggcctcgggagcaggtgcgggcctgctcttcatctcacccctcgagaaacatgtgcgctacgtgctacgcctccatttttcggcatcaaacaacatggccgagtacgaggctttggttaacgggctgcgcatcaccgtcgagctaggggttcggcgcctcgacgctcgtggcgactcgcagcttgtcatcgaccaagtcatgaagaactcccactgccgcgacccgaagatgaaggcctactgcgacgaagttcggtgcctggaagacaagttctacgggctggagctcaaccacatcgctcgacggtacaacgagattgcggacgagctggcgaaaatagcctcggcgcggacaatggttccctcgaacatcttcaccagggacatatatcaaccatctgttaaattcgacgatgcgcccgagcccgacgagacctcggccgtcgagggtgaggccttccgcatcgagggggagcggaatgggaaggcacctaggggcttcccgcacctgctggtcgccatcgacaaattctccaagtggatcgaggttcgacccttaaccagcatcaggtccgagcaggcagtggcgttcttcacgatcatcatccatcgctttggggtctcgaactccatcatcaccgacaatggcacgcaattcactgggaagaagttcctggacttctgcgaggaccaccacatccgtgtggactgggccgccgtagctcaccccatgacgaatgggcaggtggagcgtgccaacgaacgactttcgtgccgttttgactgcttcgatagcggaaccctaaaaacgacgagagtacacgtaagcggcaaggccgaccgagccgagggactcctacgcctccgggatacggatatctcactcgtcaccttccgcgcaaagcagctcacgctcggttaa

SEQ ID NO: 9519 - DNA, 105 bp, Zea mays
  Peptide Sequence Number=SeqID_51298
atgaacgggtgggctaaggtgactcactgcgacgtggttaaagcaccaaagcatgtggcgcaaggtcgcgaggtggctaactcaggttgcatcctatgcctataa

SEQ ID NO: 9520 - DNA, 543 bp, Zea mays
  Peptide Sequence Number=SeqID_51299
atgcctgagacaaccgttcatgtctcgccccagcatctgcttctgccccatgtattggcgccaaacctgcaagatggtacctcaaaatccctcggagttcatgttcgcatcagtgctataatcagtgttattcctgcagaaggcatgttgaatgatgggtcagggggtatcttacctgtggaagaagacaccctacaatctaattcaactcctgcagctgaacctatgacaaggaaagaggagttcttcaacaaaatcagcatagccgctgatgaaattctaccagcaccaggggaccgtctgaatgcatttgttccaccacaaccttccactactgctgccccaaggagaagtaggtgcattgctggtgtgggtgtggaatttaacatgcatgactgggggcgcacgatgacacgtgggcaatgtacaccggcgatggggtacagtccgacgtgggcgcaatcgaaggaagaagggagatgggagcatacctatggcgcggagacgacgacatgggcggtggagaagacaaaacgcgggtga

SEQ ID NO: 9521 - DNA, 189 bp, Zea mays
  Peptide Sequence Number=SeqID_51300
atggccggggatgagcttcctggggatgaccgcgatactgatggcgaggaccccttcctcgacgagcaggtgcaggacaagattgcgctgtcaggcaagcactggggacgcatgtggcgagaggatcatggttgcttcctgtggatgcgactgtttgctgggaaaactaccgactaccagtctaattag

SEQ ID NO: 9522 - DNA, 429 bp, Zea mays
  Peptide Sequence Number=SeqID_51301
atgggcaagagtaacaaacgcaagcgcgagccgactcctccatcggaggacttcggcgactcggaatactcggaggaggagttctcctctgagtccgaggggtctccgactcccgtctcttccccggcgtcatctgatgattcagacgactcccaggggattgccgcggaggtctggacttatatccagaccgtcgagcgctccgggctcgagggctcggatgagtctgagtactcctcggacgaggaggactcttcggactcgtccgaggagggcggcggcggtgatggcggagacgacgacgacgacgacggaggcgacggtgacgacggcgacagcagcaggggcggtgacggcggcaacagcggcggcagcaggggcggcaacggcggcggcagcagcaagggcagcaacaaggccagtggctag

SEQ ID NO: 9523 - DNA, 717 bp, Zea mays
  Peptide Sequence Number=SeqID_51302
atggaggactttgaggagtttcaggactacgatgagttcttgtttatcttagtggcaaacccccaatcagctgcctgtgaaggccttgtcttctacgtctcatatttccgcactttaatcaaacctagtcatattgaatttgggagatcaactgtgaaacctaacgatttggagttgatgaaaaagcttgagtacattgggaagaatggtgaggacttaattaggtttgctggtattcaaaagactcgtgttgattacgaaaagtttgaagaagaaggtggcggagtaaaaaggaaaagaattgtgagtataatgaaaagacaagctatgagacaaaaatcatcgaagattggttgtgctgataagagaacatctgtacctccgaagcaggcccctgagaccccttcgacatcctcaattggtgttacagaaattctggagacaaagaataagaatgctaaagaggaaatagggaggggttcttcaggaactgccatggaagagacgataaatacaagtgaagatcaggttcttcgtaagaagcggtatataaagactgttatgaaggctatgtgcaaggctcctccatcggaggcaaagaagaaggttccagtttctgaggctgataaacctaccgatgcggcggaaggaaccaaagatagtggggtccacttgggactaccctatctaaaattgataggcttattgcggatgtag

SEQ ID NO: 9524 - DNA, 477 bp, Zea mays
  Peptide Sequence Number=SeqID_51303
atggcggaggcgcagggacgcctcgaggcgacggtggcggagctccggctgcacaggaagaacaccgggcgagagagagggcgagagtgctcggctgagggcataaatgagcagggggaagtgggcgagcggggcgcgggctctaaaggggcgagggcgtgtggaggtggtcggggattgcgtggacgtgggcgcgtccacggcgggggcgtgggcgggaggttagggacggggtctgatgggtggggggctgagaacgcgtgggcgcgcgcggggctgggcctgctaggccgacttgggctgaaatgggaatttgagttggcttctcaatataagtcagaacttcttgaaattcaaggtcctctattggcaactactcttctgctcctcaagacgaagcttagtagcttttgcgacagtgcaagatgccgaaggtcaatagctttggcccagaccaagcaaaggagaaaggactag

SEQ ID NO: 9525 - DNA, 213 bp, Zea mays
  Peptide Sequence Number=SeqID_51304
atgccatactcccaggaaaagctcgaacgaccttcaacaaaaggatacctgtacccgaaaccgacacagcttaggtggaaggcgaagaaggcccccttccgggggggccgagccatcagtgagataccactctggaagagctcggattctaaccttgtgtcagatccgtgggccaagggacagtctcaggtagacagtttctatggggcgtag

SEQ ID NO: 9526 - DNA, 1074 bp, Zea mays
  Peptide Sequence Number=SeqID_51305
atggccagtgagagcagaatatcacaggtggctacaacgatccccgtcaggaacgtgcaggatcttgctgcttacgacgccggcgagctaacggcagatgcactggagcggtacattaggccggacatcgacaaggacgcagtcctttacgagcactccggtgagcttccggtggttgaccttggaagactcaacccacagcactgggaagaggaggcggcggccaagctcagatatgcttgcgaggagtggggattctttcaagtattgagtcatggagttccagaagaggttatggtgaacataaagcgcgatattcaggagttctttgagctgccgctggacgtgaagaatgcttacgcgcaaaccccaggagaccttcaaggatatggtcaagcatacgttgtttccaacgatcaaaagcttgactgggcagacatgttttgcatcatcagtcagcctcctccggcccgtgacatgaaacattggccgactcaacctcttactttcaggaaatcccttgaagattattctgttgaattggagaaagttgctcactccattgtaacagccataggaaaaattctgaatattgacccagaactgatgagtgataaatatgccgtgcaagttctaaggatgaattactaccctccgtgcacgtcgatgcccgaaaaggttttggggttttcgcctcattcagatgcatcttttcttacaatcctttcgcaagttaattcagtggaaggcctccaaataagaaggcatggtgcatgggtcccagtgaaaccacaccctgaagcattattggtgaatgttggagatctccttgagattatgacgaacggaaaattcaagagtattgagcacagggtcatgattaatgctcgcaaggaacgattgtcggtgtctgcattccacaatccaaagtttgatggggtggttgccccggttacggtgactccaacagaaaagcttttgtacaggactgtgaaagtggaagattatattaagcatcacttgtcaaacaaactagatggaaaacgagcattggatcatgtgaagacgttctag

SEQ ID NO: 9527 - DNA, 1584 bp, Zea mays
  Peptide Sequence Number=SeqID_51306
atgtacaccaatagctccccaacttccttacttctaggcatactcagcatactcttatcaacgcatcgccatgtcatcgcgtcgcagtctccgcgcgacaatggcgtgcgcgccaggtccttgtcgacctgcctactggcctccggcgtccgtaacttctccatggccgggtctccgggctacgccaccatcttcgacttctccatccagaacctccgcttcgcagccccggggttccgcaagccggaggctgtagtgctgcccacttccagacgcggcctccagcgcgcggttctctgcgcgcgtagtgcgtcgctggccatccgcgtgcgcagcggcgggcacagctacgagggccagtcctacaccgtctccggcggcgtgctggacggtaaagccccctttgttgtgatcgacctcatgaacctgaacaaggtccgtgtccacgccgcgtcagccacggcgtgggcggagtccggcgcgacgctaggcgaggtctatcacgcggtggcgcactcgtcgccgtcgaaccggtcgtccctggcgctcaccgccgcgtcgtgctccacgatcggtttgggcggacacatctccggcggcggcttcggaccggtgtcccggaagttcatgctcgcggccgacaacgtgctagacgcgctgctcgtcgacgcggtgggcagagtcctggaccgcagagccatgggcgaggacgtgttctgggccatccgcggcggcggaggcggcagctggggagtcgtctacgcctggaagctccggctcgtccctgttcccgacaccgtgacggtgttcacgccgagaagggaaggttcggtggacgccatggcgggcctcgtgtacaggtggcagttcgtggggcctgctctgccggacgagttttacctctcggcctcgctcacgatcggtagctcgtcgtcgtcatcacaggaagaccgagatcttcgcaacgtggcattcacggggctggtgcttgggccaaaggagatggccatgtcggtgctgaacgagaggttcccagagctgggcctcgccgaggcggaggtgtcggagatgagctgggtcgagtcggcagcacggctcgccgggctgagctcggtggacgagctcaccagcagggtatccaagaccaagtactacggcaagaacaagtccgactacgtgcagcggcccatctcgagggattccctagccgccatcctacggtacctctccgacgggccgccggcggggtacgtgaccatggacccctacggtggcgccatggcacgcttgagcgccacggcgacgccgttcccgcaccgcgcgggcaacctgtacgcccttcagtacggcgtcacgtgggactcggacgccggcgaggccagcgtaaactacattgacatcgacctcatgggctttgacgagagcctcggcccggtcagattggcatcgtcggtgagccatgcgcgggcgacctggggcgcggcgtacttcaccgtggagaacttcgaccggctcgtccgggccaagacactgccaatgtcttttacaatgcccaaagcataccattgcattagcggaagatag

SEQ ID NO: 9528 - DNA, 492 bp, Zea mays
  Peptide Sequence Number=SeqID_51307
atggctcgccctcctcccgccggtgccatatcgtcgcgttggcgccccatcatcctatctggcctgtggcgttccagacaggtgcttccccctctccctccgggctccgggtcttcttcttcgccgatcttgctctccttctctcctcttgttcctttggcgttcatgctcgtcgctcttttggccgccgtgttcttcctaggcgcgagaggaattttcggggagggtttgtgggcgtcgtgttcttgcctcgcgaactgcggttggcgtcgtccggctgttcttgtccttgccctgcttgctcgcggaattaaagagaaagagggagggattggcgcgaacgaactgctgtctgttcgtattgttttggccgtcgtgttcttgaccaaactgctgctggctttggcttctggtgttgttgttcttgccattctgtttggccccggcctcgtgttgctgttggttcttggtgttgttcttgcccctgctcgg

SEQ ID NO: 9529 - DNA, 1452 bp, Zea mays
  Peptide Sequence Number=SeqID_51308
atggggatgtccctgcccccgtcattcgcccccttcccccagagccagacgccccgctcactcgagatccgccaggacagatggcgtctcccccatgcgcttacccatccccgcgtggaccccgttgagttgctgcgcaagctggacgagctgagggaccagatcattccgtgcaagatcgtcgggcagccgcggagcaccgacactaccgccagtaccttgggagacagtgggagaatggtgggatggggcctgggagctttcatcccacttgcatacaaggtcggagacaaaactaagtggaattaccacaagtgcccaccgcgcgtccgcgcctccgccgccgcaaaccgcgcccgcagtccccttcctccgagcagcgcccgtccatcctcgcctcgctccccgccccggccagccccgcgcgtggaaatccattgtaccccgccagccaaaccagtccgccccagcttcttccaaccccacgccatcaccgccgggaaatccgcatctgccctccaaccccacaccacatttgggagccgccagccccgcgacgccgccgcctgcgccccgcgacgcccctaccaaccccgcgccgtcaccttgcccatgccctcgtcgcgcccccgcttgcgcccacactctcgcccgacccatccccgcaccctcgcctacgcccggacacgcgcccacacccgcggatttcgcctgccccagctcccttgctcgcgattgccccctggcccgcgagatgccgccgcccaccgtgcctgcgattgcgcccgctgcgcgcatcgtcctcctcctattccggcccaatcacctctggttctcaagtatggggaggaagggaaggtggtggagcgagtgaacctcgccactcggcagctgcgcctactgccgaagcccgttgtccagatctacggtctcctcgcactcgacgtctcccgcgaccagctcaaggttagatactccatcccgcgcaggcaacaccggcaagatccgcggactacggtccctgtggcgtcggcaccgagtccgacgcggaagacgccgccgaagggggaggaggcagagggaagcccgcggaacaaagctccctgcatggacgacgctgctcagactacggttcctgtggcgtcggcaccgagtccgacgcagaagacgacgctgaagggggggaggagacagagggaagcctgcggaagaaatctccacggcccgcggaggctctgcctgtggctacgtgatccagaaagaggatactgcttcaagtgtaacgctgaggtgctaatgttgggcaaatgtggagaagacagcaacgagggtagtcttgaactgatctgcgatattgtcagtcagttgctggatcaaccatctgttggtaagctttcctctgacattgctctttgtggtcccatggctttgcttcttgaatccccggtgtaa

SEQ ID NO: 9530 - DNA, 168 bp, Zea mays
  Peptide Sequence Number=SeqID_51309
atggccggggcggccgcgaaggatctagctgccgtcgtgacctgcctcccctccactcgctggttgtcgtcgactggctggtcgtgcctggcgtggaggtcgacgacacgcatgacgtgctcggcggcggcgctgccctggcaggggtggggtctgaagctgcgctag

SEQ ID NO: 9531 - DNA, 399 bp, Zea mays
  Peptide Sequence Number=SeqID_51310
atggttggtgttcctacttcgagccttccactgggtgatgggcgacccggcacctccgacgaccccgccacgcgccaccacctcacccaccgtccacccatcacctttcctgcaaacctcggcgacctccttttcaatctcacgacgatgtcctgcaagtctctcccgagccctctcctcaagccctaccacgcccagccaggccacggcggcgccaagatccaggccctatctccaactcagcaacttattgtagcgcaacttgagctctggatggtctgcatcgttgccatcgtggcgcgcgccgagcaggaggacgaggtgcgagccctggccgaccaggcggccaacatagacgtcgaagtgtgggccgtcgccgcgcacgcgaaggtccactag

SEQ ID NO: 9532 - DNA, 1155 bp, Zea mays
  Peptide Sequence Number=SeqID_51311
atggcgaccgtcatgcagaagatcaaggacatcgaggacgagatggcaaggacacagaagaataaagccactgctcaccatcttggtcttcttaaggctaaacttgcaaaattgcggcgggagttgctcactccaacatccaaaggtggtggtggtgcaggtgaaggatttgatgtgacgaagagtggagatgcacgtgttggtttagttggctttccttcggttgggaaatcaacattgttgaacaagctaacagggacattttcagagatctcccagggatcatcgaaggtgctaaagatggaaagggcagaggaagacaggagtctccagaacctgaaccagtgggtacctctgaaaatgacctgcacaattgatgatgttggttttttattaaaagccacctcatttcgagtaagccaaatagaccaaaataaagctgatattcgagttatcagcacagctaggacatgcaatgttattttgattgttcttgatgccataaaaccaataactcacaagcgtcttattgagaaggagcttgaaggatttggcattaggttgaacaaaacaccacccaatttgactttcagaagaaaggacaagggtggaatcaacttcacatcaacagtgacgaacacacatttggaccttgatacagtaaaagcaatctgtagcgagtacaggatacataatgctgatgtctccctgagatatgatgctacagcagatgatctcatagatgttattgaaggaagccggatttacactccttgcgtatatgttgtcaacaagattgatcagataacactcgaggagctggaaatcttggacaaacttccccattactgcccggttagtgctcatcttgaatggaatcttgatggacttctggagaaggtatgggaatacttggatttggttaggatatacacaaaacctaaagggctgaacccagattatgaggatcctgttatcgtatcatctaagaagaaaaccgtggaagatttctgcgacagaatccacaaggacatggtcaaacaatttaaatacgctctggtatggggttccagtgtgaaacataagcctcagagagttggcaaggagcatgagcttgacgatgaggacgtcgttcagatcatcaagaaaatatag

SEQ ID NO: 9533 - DNA, 714 bp, Zea mays
  Peptide Sequence Number=SeqID_51312
atgccgcaccgccaccatgacgccgccgccggcgacgaagccccgtccccgcgcccctcggcggccggctgctacgcgttcctgacgcgctcccaccgcagcgcgggcgcgtaccgccgcctggactccgcgcgggcgctcgaggccgaggccgacgccgccgtggcggcggtgagggtggaggtcgggacggcggcgaaggggagggcgaggagcgtgttccacgtcgaccccgccgtgctggaggccgggccggtgcgccggctgctggcggccgcggggaggcgggcccccggcggaggcgtcgccgtcgacgtcgacgccctgctgttcgagcacctgatgtggctggcaaccaaggcccgcgacggtggcggggtgggcggcgacggcgacggcgacgaagacgaaggctccgcccccgccgctgatgacgacctttccgagatcgtcgagttctactcgcaggacgacgaggatgacgaggaggagggccgcgaccacgggttgagcagcttaagcttctacaacgggtaccgcggcgcgtgcggggaggggacacatgcatatgccacccacggtgcggccggtgtcccgtcgcctctacgcagatctagggaacaggaaccggtcctgttcttgttttgtcaagccagaggccactcggggagaatggggattccggattcgagtcgttggggaaacagcacatag

SEQ ID NO: 9534 - DNA, 741 bp, Zea mays
  Peptide Sequence Number=SeqID_51313
atgaaggaaggcaacgccggttacgcttacgtgcaagccttgaagggggacggagacggcaggagtaaacaaccattcaccgccgccggtcgccaggtcaggcctcatcgtcccgatgggactggccgccacgaatcacctgcacttgccgtcgcggcctgctgcgtcgcgcactctgaaagcccggcgacgacgttccagccgcgcgacgcgacgcgacgcctctcgatcgccaccagcttgcagcagcccgcggcaatgagcggcaacaggaacggcaggggcaagggtggcgccgcgcggcccgtggcgacatgcatggccgccatcatcgtctgcgtcgtcgtgctgctcgtcgcggcgtcggctctgctgttcctgctgtcgtcgtcgccgccgccggcgacgggggtaccggggaacgggccgcctcgagagccggtggagctggcgatcggcctcgccgggcacgagcgctggctggacgcgctccgcgcgtgggccaagctcgcgtgcttcaacctccgccggccgccggccgagccgcggtaccatctgccgcggagcccggcggcgtcggtgacgaaggcggccaagagcaccctggagatgggcaaggagatggtggagaagttggcggagtcggcggccagggccaccgaggaggcgctcgagaggaccaccgagaaggtcaggaggaaggtctcgccgtcggcgcggcgccctgatggagacctctga

SEQ ID NO: 9535 - DNA, 2229 bp, Zea mays
  Peptide Sequence Number=SeqID_51314
atggcagaaggaagcagtagccataggaggagtgcattctcccctgggctggctgtgttattatctggcgatgaagctaagattagctcccagaagtcgcacctggtgtcctatcatgacgaaattgggcaccaggctgttgagaggacgatagagcacatctttgatctccctcacaagtcagtggtccggcctcctggaccagttgacacaggcttcgtgcactcagtggtgaggaatcaagctagaaaatttgatcttgactgggaaaactgcattcggggataccatcgcagcgtcttcattgtggacaaaggtgctgggcagaggaaggtggttcttgatgattcgagcatttgtggtagcttcaggaatgtccggggaccttcacttgttgagagttccgcccctttcagcagtgccagggctaatgcttgtgtgtggaaaggcaaatggatgtatgaggtgacccttgagacgtctggagttcagcagcttggatgggctactctctcttgtcctttcactgatcagaaaggtgttggtgatgctgatgattcatattcctttgatggccggagggtgactaagtggaacaatgacccaaagccatatggccagccatgggcagtaggtgatgtcatcggttgctgcatcaacttggatgcaggagaaatttccttttacaggaacgggacttctcttggtgttgcatttgatggaattcgcagcgtggaacctaagaagggatattatgctgcagtatccctctcggaaggagagcgttgtcatcttaatttcggctcacatccattcaggtatcctgttgatgggtttgatccattagaggcgccaccacgctcttggtcgtttgtcacataccttcttagatgcctgttccggttgctagaagttcacaacctggagaaatctgaatcagcatacttcgagaaactgaggagggtgaaaaaatttgcaccactacaagaactctttggacccatttcagaagggatctgtgcagaaattttcagtgctattgaagcaagccaggggtgccttgagtatattgcctggggctcgttgatcactctactcttagatgttttcagaactcgtgagccgcatgatttctcatgccttgatcaggttcttgaccttttcctccggttcccaggttgcacttcattatttcaggagctcattgtggccctttcttgcatgtgcaaagttgcaccacttgtgttgacagaatgcccatattctgggtcatatccatttttagcgctggtttgccaccttcttaggcataaggatgtaatgtgtttatggtggaaagcagaagatttcgttttctcgtttgaaggcttccttacaaggaagattccaaataagcaggatctacagtgccttgtgccatctgtttggtggcctggttcttctgaggatgaagttagcatgacactgacgatgacaacactctcagatgcaataaaaaagattgaggagatgcatcgtgaactttgcagcttggtaatatgctttattccaccaatgtctacgcctcagcctccaggctctgtatttaggtcctttgtacaaagtttggtgctcaaagctagaggtggagatcataggatggttgtcaatgggactttcaacaacactgtgcttgtttcattgtacacagtaatcctgcatttgttgtctgaaggattttctatggattctgctggatctgcatcatcctctaaagcgaactttgggaatggtgttggatttcttcacaaaggtggaaaacgcaagtttccgacacaattatttttcaggaatgatgcctatcacagtgtaattcctagaatcggtggaccaccaagtattttgatgcatcaccaatttgatgctgtggaaaatgaagtgcagtgggatgaaggctgcatgaatgatgaagagacacgtgttacacacactacagcacagaagccttgttgctgctcagtgacagatgttgctgttggcctaagatacaaagaaactgctaagtatgtgccatcaacttcaaaaggctcatatcttgtacgagactgctgcctggcacacaccatcctcaagagctacggcgtgcgccttgatgagcgtgatgtgtccatgcaccgtggtttctgggatcctgacatggatgttgcagctgtcttaggcggcggccatgctctttgtctcctgctctaa

SEQ ID NO: 9536 - DNA, 1056 bp, Zea mays
  Peptide Sequence Number=SeqID_51315
atgaggaagagaaggaaatgggctgaccggttgagcgtgtacttctgctttggatcacagaagaatggccggcgcatgcgtgtcaaccatgccgcacttgtcccagaacctgcacctcaaaggacagatgcgcctgcagcagaaattccaaaccacccaccgcctcctgtgttcccctttgtggcaccgccatcctctcctgcttctttccttcaatcagaacccacatcaatcgtacaatcaccaagggctggagctccagctttttcgcccctctcaccaaattcccaatccccgacggggccaccatccatctttgctattgggccgtatgcacatgagacacaactcgtctcgcctccagtgttctcggccttcacaactgaaccatcaactgcccctttcactcctcctccggagtctgtccatctgacaaccccttcctctccagaggtcccatatgcaaagcttctgacatcgatcaacaatagcaagaatggtgaagcagggggtgatctccagtcgtatccaaactacccagacagcccaattgggcgcctgatatctccaagctcgggctgttctggcacatcctccccattccctgaccctgagatgcaggcttcttcacgcagcgctttacgcttgttcccagttcgtgagccccctaagatattggatggcgagggcgttgcgacacagaagttgatacctcgccatatgcgcaacgtgagcacgcaatgcatcaccgggggtcattcgagtgggccggagaagatgtcgcgctctgccttgagaagaagactgcaatctccggggattgaagcacggcatcattccaccttgtccacgccggcagcggcggcctgcacagagaatccagggaggcaagggcagaagtccacgtcgacgaatcataccaagcttgcccgagaaagggaggcggtcccggtccctgcgccttccaaagagttcaatttccacaacgtggacgtcggtagcaggagccgagcgtgggatcggtcgggtgggcgaacgagaaagtcgccgcgatga

SEQ ID NO: 9537 - DNA, 515 bp, Zea mays
  Peptide Sequence Number=SeqID_51316
ggccggatggtctggtctacgctgttgagttctctcacaggagtggaagagaccttgtcaacatggcaaagaagaggaccaatgtgatccccattattgaggatgccaggcatccggcaaggtaccggatgttggttggcatggttgatgttatcttctctgatgttgcacagccagaccaggctaggatcttagcacttaatgcttcatacttcttgaagaacggtggccactttgtcatttcaatcaaggctaactgcatcgactccaccctgcctgctgaggccgtgtttgcagcggaagtggagaagctcaaggcggatcagttcaagcccgcggagcagggtgcccaagaagcagaaggccacctcttaggatcggaatccgtgctcgtcttgcctaccaaagatgcttcgttgtattgtggtttattaagaaactttgaaggattagtcaaagtatgtgaaccttctgcagtgaaggctggtttagcagcgacagctgttagggtctga

SEQ ID NO: 9538 - DNA, 354 bp, Zea mays
  Peptide Sequence Number=SeqID_51317
atgaaggggctgtgcaagttgggtgaatgggtgttgattccatgggcgacggacacggacaacagaagcggcaacaacgacgaagacgacatattcgacgacaggatggtcggcaataggtcgtcaattgttgtgtatcacagtgcctcacccataaggaaacaacatgtgttttgcttgcgcgccactattcctgcctatacagctattcttgatgatggatttagggatgaagatagctcacagaaggctcctcgagtggaacaagtttccgatgctgagatttgtgaggcacaaattctagtcgataataatgtagattgtgaaaccaacattgtggttgacaaagtgtaa

SEQ ID NO: 9539 - DNA, 243 bp, Zea mays
  Peptide Sequence Number=SeqID_51318
atggccgttggaaggctgctgtcgcatggcgcacaggacagttcggacctccagctcctcctcgacgaggatctggaggaagctgaggatggccaattctcctgggatggacaagactcctcctcggagttccccgatgacgacgatgacgaagaaggcaacgaggacatcgaggaagaagccgacgacaacagtgacttcatcgatagagacagcgaagcagtagtgacgatgacgacgtag

SEQ ID NO: 9540 - DNA, 306 bp, Zea mays
  Peptide Sequence Number=SeqID_51319
atggcttcctctagtgtcatcgcccatggagatggtgatggctgcattgacgaccgtgccacaagcgcaacgaccgcccatgtgaatatcgaccgtgttggatacgatgacttgacgaaattggcaacagagacggctatggctttcaacagcaaggctgctgatgcagaggaccgagcagcaaggacaccaagccgctactgtcgcttgaaggaggatggtatggaattcttcaatgggactaggattttatacagcactttctccttagaccatatcattcttagaaatatgccaaggacttga

SEQ ID NO: 9541 - DNA, 879 bp, Zea mays
  Peptide Sequence Number=SeqID_51320
atggctccacggccagccgccaaccaccaggccacggccgagcggggcgctgagcacctaggccggccgagcgcccgaccacccaggccaccgcctgccgcagcagagcggccaacggggcgccgagccgagcagagagtggagcgccgagcggccagcggggcgccgttgcagcgacacgaatgcagtcgcgtgaccacgtcgttgctgtctccgcgcgacgcagcagcaaggcaacttgaactgcctacaactgcaatatggtacaaatctttcaggcatggatttgtcttcatttatccttttgaaacatacaggcaggaggtggctagcatttttgttccaattgtcatcacattgtctatagtaacattttctgcgtggtttttgtgtggatggttgggtgcatatccaaagtcatgggttgctgaaaatagcaattgctttgtcttctctctcatgtttgccatatctgttgttgttattgcttgcccttgtgcccttggtttggcaacaccaactgttgtgatggtagcgactggaattggggctaatcatggagtacttgtaaaaggcggagatgctttggagagagctcaaaatgtaaattatgtggtttttgataaaacagggaaactaacacaaggaaaggctattgtaacagctgcaaaggtttttccgggaatggacctaggagatttcctcacgctagttgcatcagcagaggcaagcagtgagcatcctcttgccaaagctattttggactatgcattgcatttccatttctttggcaagcttccttcatcaaaagatggcattgagcaacgaaaagacaagtacaattgttatctgatgttgatgataattggaaactactag

SEQ ID NO: 9542 - DNA, 276 bp, Zea mays
  Peptide Sequence Number=SeqID_51321
atggcggaccgtctgcagaaaagaaatgctctcagtgctcttgggttttcttgtcttcaaaaggtgaccgcaacttttagacatcttgcttatggtgttccagcagattacgttgatgagtatttatggattggagaaagcacgaccatcgagagcctacgaaaatttgtcacgatagcttgtgaggtttttggaccaaagtgtctaagacctccaaacgaaagtgatacagctaggttgttactattggtgaacaacatggattttctggaatga

SEQ ID NO: 9543 - DNA, 1566 bp, Zea mays
  Peptide Sequence Number=SeqID_51322
atggcgttggcgtcccctgtcctgctactgctcctgagggcggcatgggtcgccctgtcctgctacatcctgacgccgctgagaatccgccggatcatggcccggcagggcgtgcacgggcccccgccgcgcccgctcatcggcaacctccgcgacgtgtcggcgctcatggcgcaggccaccgccgacgacatgccggccctgagccacgacatcgtcggccgcctcatgccgcactacgtgctctggtccaggacgtacgggaagctgttcgtgtactggtacgggagcgagccgcgcctgtgcctgacggacgcggcgcagatcaaggagttcctctcgtccaagtacgcggcgaacgccacgggcaagtcgtggctgcagcgccagggcaccaggcacttcatcggccggggagtcctcatggccaacggcgcgcactggtcgcaccagcgccacgtcgtcgcgccggcgttcatgcccgacaagctgaagggacgcgtgggtcacatggtggagtgcacgaagcagacgatccgggcgcttcaggatgcagcgtcggcgccgtcgtctggcggcgggcggcgtcgcgaggtggagatctgcgggtacatgactcggctcacgggcgacatcatctcgcgcaccgagttcgacacgagctatgataccggaaagctcatcttccatctcctcgaggacctgcagcgcctcaccgcgagctccagccgccacctctggatccccggcagccagtacttcccgagcaagtacagaagagagatcaggcggctgaacggtgagctggaggccgtgctgacggagtccatcgggcggcgccgggagatcgccgacgagggccgcacgacgtcggcctacggccggggcctgctggccatgctgctggccgagatggaaaagaagaaggacgtggcggcggcggagcggttcagctacgacctgcagctggttatcgacgagtgcaagacgttcttcttcgcggggcacgacacgtcggcgctgctgctcacctgggcgctgatgctgctcgccacgcacccggagtggcaggacagggcccgggccgaggtcgcccgagtctgcggcgaagacccgccgtcgtacgacgacctctccaagctcaccgtgctgcagatgatcatccacgagacgctgcggctgtacccgccggcgacgctgctgccccggatggtgttcgaggacatccacctaaccggcggcctccacctgccgcgcgggctgtcggtgtggatcccggtgctggccatccaccacgacgtgtccatctggggccccgacgcgcacgagttcaagccggagcggttcgctgcgggccggcgcccggcgttccttccgttcgcggcgggcccgcgcaactgtgtcgggcaggcgtacgcgctcgtcgaggctaaggtcgtgctcgccatgctgctgtcccacttccgcatcgccatctccgatgactaccgccacgcgccggtgaacgtgctcaccctccgccccaagcacggcgtgcccgtccacctccggccgctgcggccgtga

SEQ ID NO: 9544 - DNA, 207 bp, Zea mays
  Peptide Sequence Number=SeqID_51323
atgggcgaagcacttctccaagaagccacggtagaagctgagcgtttggacctagagatagcaatgggtacccgctacccgaaacccgcgggcgtattttttcttcgcgggtatgagtttgggcaagtaatacctagcgggtttttacccattgccatctctattggaccccaaaagcagcttctggccactggaatcggtaaataa

SEQ ID NO: 9545 - DNA, 333 bp, Zea mays
  Peptide Sequence Number=SeqID_51324
atgtctggagatcacgccaagagggagattgtcaccggcgacaaagccataggctcgggaaggactctatcaacggagtccgacgacaaatacaaggaggaatcctcctcctccatcaagtcacataggaagggtgataagaagaaaaagaaaatgaagaaggtggtctactacgagaccgactcttcatcactttctacatccggcaccgagtctactacttcaaaacgccaagagcgtaagaagtatacgagtctggcgaaggcatcgagcgaagggtggcgtcttcgccttcgccccaacatttgccctccgagggaccagttcgactaa

SEQ ID NO: 9546 - DNA, 180 bp, Zea mays
  Peptide Sequence Number=SeqID_51325
atgccgcaagctacaataaagatacaacaggatgacaagaaagtcattgctaattctgcctatgaagaatgccttgacgaggagttcaactccattgtgacggccctaaagaccaagttagagtcgcatgtgagcaaaggaatggacttcttcatgatggtgacttggttttatctatga

SEQ ID NO: 9547 - DNA, 705 bp, Zea mays
  Peptide Sequence Number=SeqID_51326
atgacgcaaacctacctcggttggccggacgccccacctgtcattcacgggaaaagaggacttggcctcgccttcccttgcgtgtttaccgacgccaccggccgcctgagatttccaccaccaccgccgaaccgccccgaccctcctcccctctcgcgctatggcccagccaagcagacaactagacaagcagacgtgcggccaagcaggaagcagcggcaggcggcagccgtgcggccatgcgggtcggcgcctcggcgggaccaagcggcaagcagcccgcagccggccgccggcgggacaagacaaccggtcaaccggacaagcagatcagcggagcaccggagctggcggctggagcgtgacgagtccgaggctccgagcggctggaggcctggaggctggagcaccggcaggagcggcctgcggccgagcaggcagctgtgcgggacgctggcaactgttgtgctcaaggttggcatgtcctgtgagggctgtgttggagctgtcaagcgggtcctcggcaagatggaaggcgtcgagtcctacgacgtagacatcatggaacagaaggtcaccgtgaagggcaatgtgacacctgacgccgtcctgcaaactgtttccaagactggcaagaagacttcgttctgggaggctgaggccgtgacaagtgaatccgccacacctgccggtgccaccgcctga

SEQ ID NO: 9548 - DNA, 1854 bp, Zea mays
  Peptide Sequence Number=SeqID_51327
atggctacaagtcttgcaatggacgagtacgcagaaccggatgtttctacgacggaccccgtcgacaagaagccgcctgccttcagagggctgaagcagtacgtgagagacctagacgcgaacacactccctccgttcctcgcccgtctgtgcgctcccgacaggccatcctcctcatactccgaggaggagatcctgtgcatcttcgagaccgcagcagaagctcacgggcgcagcatcgtaccgcacatcgggcagatcgtctcggccgtcgtcaggatcatggcgtcaggttcaagcaccccctcgcattgcgccggttgctccaaggtggtctgcacgttgtctcgctactgcatcgaccctctgggcagggaagaagagaagtccgagaccatgagctccctctgccgccccctgtcagactgcctgatgcacgccaacaagagcgtctcttccggttcagctctctgcatcgctgccctcgtccagtccaacaactggcagtttgcgtctaacgagttggttaacgatgtctgcctgaaagtgtcgggcgctctggaggaggagcctcgctgccagactgctgctgtgcatgttagattggtgcttgctctggtaaagcacagtcctctgacgctggagccttacggacggacgctgataaagtcgggcttgcaggtactggatcgtagcagcactgaggcgagcagttctcagatgatcatgtcgtcgattcagatgatccattcgatcatgagaagcgtgaacgtgaggaccatatcttctgagatcagtagcatcatccatgctctggagcactgccaggaggacggcttcgctccagatatctgcgccgcagcttctcaggcagccgagactgctaagctactactaatgaggcaggaggaacgtggggcacacagaaacgttagccctctgggaaactgcagcggtgggaacagcaggaaggggtcgaattcccctgttgatcgtgcgggtatcagagacagtgggtctagcggatctcctcgtgagacgcgatctgtccgtgggtttgacggcttcaactctccgctgcaaggtggacaacagtgcactggtgttcttggagctacgcgcgcgaggcgccggctttggagctgcggatctgagttttcgcaagggatgtccgacgatgagcgtttcttccgtacctgggcaccgtctgattcttctgatctcgtcaagtcgagcaggaggcgctctgatgtgctggcaagaatcggtgatccgtgtcctgcctgtttaacgccccaggcagctaatcaggtgtgcagcagacggcaagcgttgtcgactccaaggaagcagctgcagtctctggcctactgcagcgattccgaaagagacggacaccgccgcctgcctccaagatcagctctaacgttgtttacgcagcgcccggaccatccttcgtttcaaaagaactctggatgcgagggaaggaaaggctgttgcagctcgacgcagcagaggaggaacctccagtggagcacacggaccggggactcgctggccgaagacctgaagttcgccacaagcagcagcagcagcagcagccggcgttgttgttctgacagcgcacgagctcctcctccgccgccgtgcgaagaacgccgatgcgacgacgctgctgaacatcgtccgaaggtgactgggatcgccaagagaagagagacgaaccgtcgtcggagcacggctcggttttttatctgcgctatggtggtggtgttcgcggcggcgctgttgctggcttgctgggagcaggaccaccaccccagtaacgagctgtacttcgtagtacctacttag

SEQ ID NO: 9549 - DNA, 2394 bp, Zea mays
  Peptide Sequence Number=SeqID_51328
atgggatgtgctgcttccaggttagaagatgaggaagccatcaagatgtgccgggacagaagggacttcatcaagcaggcactggagcagcgcaaccgatttgcatcttctcacattgcttacatcgagtccctgaagcgtgtttcaatggctctccaacggtttgttgctggagatgaccaccatgagctcatcttcgatacattcatctcccctgtcaagcaacagaagccagagacgctcagcctgccttatggttcatatgagaagagaaccattcatgtctcgagatacttgaggtcagggcctaacccatcagtgtcagttgaggagcacccacgaccggtggaaacagtccgtgttgagtcacattaccctatggacaatcacagtggcatggataggttcttacaatcgcactcctcaccggtggtatcgtcttcatactacccaccaccttataccaggccaagctacccatctccatcgtcccaggaaccagttatgaatacttctacctattacatgccttatgacaggccaagatatgcacctccatcaccccaggaggcaatgaggacttcttattatgcatcttatgacaggccaagctaccgaccaccatcatcccaggagccaccgaggaattcttatcatgtgccatatgacaggccaagcttcccacctccatcaccccaggagcaggaatcatcaccatgggactccttctggaacccattctcatcgctggacagctttggatatccccgccctcggagtagctatgacaacgtgaccaatgacgatgaactcgcgaggttacagcgggtacgagaggaggaaggaatcccagaacttgaagaggaagacgatgagtgtcaagagcatgtacaaatgcatagaaaagaagaacaagaagatcatgataatgcggatgatgatgatgaagacgatgaggaagatgacgatgacgaatgtgagcattcagatgagtatatggtttctgacgagggcacttgctctgtcaattttgatgctaatatgaagcaagaaacaaagggatttgaatccaaaggtattcagtgtactgaagcaccagaacctcgcaagacagtagaacttgagttaaaggcacacaagaaagaactgatgagaaacagagtagcaaatgcagaagaaactcctggtttcacagtatatctgaatcgaagaccagcaagcttggttgaggccatgaaggatatcgactgtcagttctcgggaatatgtgacgctgctcgggaaatctcagtaatgttggaggcaagtagagctcagtactcagcctcaaacgatctttctgcgaagatgctgaatccggttgcacttttgcgctctgtgtcgtcgcgttcatcgtcttctcgtttccttcttgctccctctagctcaatagatgatctctttgacaatgagactagcagctgttactctgaagaatcttgtagtaccatgtctggaagtcaccactctaccttagatagactctatacatgggagaagaaactgtacaaggaagtaaaggctggtgagcggttaagaatcgagtacgagaagaggttgacacatttgaggaaccaagatgtcaaaggcgaagaaccttcctctgttgataagacttgtgcagcattaagaagcttgcatactcggctgaaggtgtcaatacagacagttcagtcaatatcaacgaggattgaaattctaagggatgaggagctgcatcatcagcttatggagctgattcaagggctatcacggatgtggcgggccatggctgaacgccacaaagcccagaagcgcaccatcgaggacgccaagcttctcttcctccagcaccacccctcggccgccaccgccatctcccttggcccgctagaggctgcaggtcccccaccggctgccttggaattggagtccgagatccaggcgtggcgaggagcgctggaggcctggctgttcgcgcagcgcgcctacgcgcgcgcgctggccgcgtgggcgcgacggtgcctcggcatcagcaccgcggcgcggccaagtagccacgcgctgccgccggcgttcctggcgtgcatggagtgggggcgcgcggtcgacgcggccactgaggcgcgggtgatggacggtctggacttcttcgtcgccggcgtcgggtcggtgtgctcgggcgcggctgccgggatggagggcatggctgggcgcgtgctgtgtgctggcatggcagcggtcaccggcgccttggcggagttcgcggcggcgtctggcgacagctatgacgccgctgtcgcagctgtcgtcgccgcggcgcgtgcgccggagcgcgggaaagaggacggcgtgggacaagtgccggaacgctag

SEQ ID NO: 9550 - DNA, 315 bp, Zea mays
  Peptide Sequence Number=SeqID_51329
atgccgaggcgaaggatcagtgaagacgcacattggcggtggcgctcgatctctcacttctgtgtgcttcttgttcaagcggacgctcgaggtatgccaacggtggtggtcgcgagaggtggagaggggaaggcagtaacggcgcacgacttttattcacggagctgggggaggttcgtgccgaagatcccgaccgagaatcatgggagtcgggcgagtcaaccacggacttcggaggtggtggcgccgcattatcattgttattattttaatgcacaagcaaacagaactccaaaggatgcacaagttatttga

SEQ ID NO: 9551 - DNA, 1329 bp, Zea mays
  Peptide Sequence Number=SeqID_51330
atggatttcttcaagattaagaagttcaggaaggggaataagagcgcccggggcgggggagaggtaatagaatccgacgacgacgccagcgctgggaatgtgacccctcggggcctggtggagcagaagcctggcatcggggaggggaacaatgccgaggtggcggtggatggtggaggcgcgggcaatggggtggttgaagaagaggaggacgacgacgatgatttcatcacgaatgaggtgaagcggaggctcaaggagctcaggaagaacagcttcatggtgctcatccccgaggacgagtgcgccgaggtcgaggaggatggcgacgaggaggaagggggcagccccacggagtggctggagtcgggtgtcggtgacggcttcccgctgtgtgggttggattcactgtatgataagtactgcgagagtatgctggtgtttcataagatgatcgcacagctcatgaaggatccagagtcactgaacatgtccaaaaagtctccaagatcagcatcaaaattggcgtctaccctgcgcaacctctcattcaaaagaaaagatgagctcccggaggattgtgaacaacttcaacaacagcaaagcggatatgatccttaccagacacttgagactgcatatgttgctcatattgcattaagctgggaggctctgcattgcacctatgtgcacctgagccttatcgttgcagcacaacctgataatcctacaacctataattctgctgctcaagcattccagcaattccaggtcctgctgcagagattcattgaaaatgagccatttgagcatggtacccgtgttgagatatatgcacggtctcggagcttgttgtcaaagttgcttcaggtccccacttttcaagtcgtagataggaaagacaacaccgacgatcagatggagccagcgatttcggcgcacgacctcatcaaactgttagaggaatctatcctaactttccgccttttcctgaagaaggacaagagaaagggtggtgtccttatgagtgctcatggccacactggaagctcgatccaacaggtgcagtcttcgctcgataagaaagaggcgaaggtgaaggagctgctgaagaagaggaaagggtggaagagcaagacctggccaggcacagtggaggaggtgcagctgctgctcgccctgatcgatgtcaaggtcgtgtcgcgggtgctccgggtggggaagctgagcagggagcagctgctgtggtgcgaggagaagctgagcaaggtgggcctcacggagaaccggctgcgccgcgacgggtccccgatcctcttcccctgttga

SEQ ID NO: 9552 - DNA, 210 bp, Zea mays
  Peptide Sequence Number=SeqID_51331
atgaacagtgttgcggtagaagtcagaaccgccaagtcagagggcatcggactgtccagtgtggcgccggactgtccggtgccgcaaggagacaaagctccaacggtcgacttcgctccgaaccctaacgattgggtgacgtggcggcacaccggactgtctggtgcgcccatcgccagcagcctcaccaatgactactttggtggttga

SEQ ID NO: 9553 - DNA, 285 bp, Zea mays
  Peptide Sequence Number=SeqID_51332
atgaccgtcatctccttcctccggtacccggccacggcggcgctgccggccgtccacgacagtacgcatgcccgtgactggtggcccgattccccggcgaccgaaacaccgattgagttggcgctacgggttgctacgctcctattgagactgttgaagggtgactcaccagcgacaaggttgagacgagatcggtccacgtcggggttgcggcaccgcggtgagacccgcaccggcaagggaacaccatggccgaggccatccatccctacatctcgcgcttga

SEQ ID NO: 9554 - DNA, 225 bp, Zea mays
  Peptide Sequence Number=SeqID_51333
atggcgaagttgaggaacggcgtcggcggtttcaccctgaccccattggcgctgctggtttggtattacaatgcaggaagagacgagactgggaaaagaggagaaccgtttgttctgctccgtctgcattggggtccgcccgcatcggacctgcttcccgcgcgcacaggtcacacggggtggccaaggatccagagagcagagatggccttgcgaggagattaa

SEQ ID NO: 9555 - DNA, 282 bp, Zea mays
  Peptide Sequence Number=SeqID_51334
atgacgaaggtttcgcctattcacccctctctaggcgactttcacacccggtctgccgcggcacctgcctcgcctagcctagctggtgtcgcgtgtccctcgttcgtgcacgcccagcccacctccacctcacatgccggagcgccgccgcatcgcaggagatccgccgtgccggtgatccctggagcaggagcagacgcgatggaccacctcctactctcccgcccacacctccccgcgatgggtgccgacggcgacctcctcgagctcgacatgctctag

SEQ ID NO: 9556 - DNA, 1944 bp, Zea mays
  Peptide Sequence Number=SeqID_51335
atgcgccgcctcccgcccctcccccggcccgcggccgccgtcgcctcgacatccaccccggacatcgtcgcggagctcggccgcgtcctctccacgcgccgctggaacaagggcagcgcctacaagcggctgtccccctccgtgacggccgcgcacgtggccgacctcttccgcgccccggtgtcccctctcgacccggccaccgctctggccttcttcgagtgtgtcgcgcgccgccccgggttccgccacaccgccgcctcccacgccgcgctgctccagctcctcgcccgccgccgcgcgcccgccaactacgacaagctcgtcctctccatgattagctgctccggcaccgcagaggacgtgcgcgaggccgtcgacgcaattcaggcaatccgtcgagtgggtggtaagcgactcgtgctgtccccaaagtgctacaacttggcgctcaggtcgctgctgcgattcgacatgacggagtatatggggaagctgtactcgcacctcgtgcaggagggattgttgccagacacggtgacttacaacactatgatcatggcatactgcaagaagggcagtctcgccatagcacaccggtatttctgcttgttgagggagtctgggatgcagatggatacatacacatgtaatgcactgttgctggggtactgccgaacaagtgacttgagaaaggcttgctggctactcatgatgatgccgctgatgggttgcaggaggaacgagtactcctacaccattttgattcaggggctctgtgaagcacggtgtgtaagggaggcacttgtgcttgtgttcatgatggtacacgatgggtgctccctgaatctgcacacgtatacactcttgataaaaggtctttgtaaggagggcaggattcatgatgccagggggttgcttgatgaaatgcctttgagaggggtggtaccaagtgtttggacttataatgcaatgattgatgggtattgtaagtcaggaaggatgaaggatgcattggggattaaagcactgatggaacaaaatgggtgtaatccagatgactggacatacaacagtctgatttatggcctatgtggtgggaagctagacgaagccgaagaattgctgaatggcgctattgcaaggggcttcacacctacagttatcacattcactaacctgattaatgggtattgcaaggctgaaaggattgatgatgcactcagggtaaagagtaatatgatatcaagcaattgcaagcttgatttacaggcatatggagtgttgattaatgtcctcatcaagaagtgtagattaaaagaggctaaagagacgctgaatgagatgtttgcaaatggtttagctcctaatgttgtcacttacacttctataattgatgggtattgcaaggttgggatggttggtgctgcactagaggtcttcaaattgatggaacatgaaggctgccatccaaatgcctggacttatggttctttgatatatgggttaattcaggataaaaagcttcataaggcaatggctttaataactaaaatgcaagaggatgggataactcctggtgttatcacttatactactctgattcaaggccagtgcaaaaaacatgaatttgataatgctttcaggttatttgaaatgatggaacagaatggcttgacacctgatgagcaagcgtacaatgtcctaactgatgcactatgcaagtctggaagagctgaagaagcttattcatttcttgtcaggaagggagtcgtcctcacaaagatgactgtaagtggagtcaagtgtaacattgttgcttatacaataattatcagtgaaatgatcaaagaagggaagcatgaccatgctaaaagcttgttcaatgaaatgatttcatcaggacataagcctagtgcaaccacatatactggtattcattag

SEQ ID NO: 9557 - DNA, 1086 bp, Zea mays
  Peptide Sequence Number=SeqID_51336
atggtggacaagaatgatgggtcagagggtattaaattcaacacatcaaacctcattcaaacaaccgaagaggttgcaagagcgtttatcgctgcggcctcggctgccactgcacagtctgcacggacatctgtagtgtattcatccaaagatgagagtggcagcccaatgcagaagcttcagcagcatttttcgaaaatcatgaaagggttttcgtccgcaccagacctgtcaggaacttacaatccggaagtccttacaacgcaaaagcggcagtggtcgaggtaccagatgaagtcattggttacaacctttagaagattggaattcatagcaggcatggggattagatcaggatcagagatacatcgggaacaagcttctggtagaaggaaaaaaggtgataggtgcatcagagaaccatcacatctgttcgagagcatagtgattgttgggcttccacctcacgcagatatccaggagctggaaaacattgcattagggagaaatgatgaagatggaaaaagatcaaaaaatttatttggcaatagtcaccaccaagttcacgcaataacaaatttggaaccacaggttctttttgcataccctccagagaagcctcttccactcaagtacaaggataccctctctttctgccttcccggaggtgtacagctggctgttcgatggggagagcttgtccccaccccagtgacctggaaggtgtcagtggcatggtgggccacatcctcgctgcggaagggtggatccattgtgctggcgtccggttccatccgtttcttcggccgcagtgtcagcgggtgtattgacatgggggcgcagtctagtgtgctgaggcggttttatggctgcggttgtgggggtcactgtggtggctggagcgatgtgaagagtgtgccggtgaaggtgtctgcttgtggtggcatgacggtggcagagagagccgtgcgtgaggctgtcgtggcgttgagttgcagtggtgtagtggcgacagcgtgctgggttgtttgtttggtggcggtggattccatagttggagttgtttctgtggcagcaaggcagtga

SEQ ID NO: 9558 - DNA, 1081 bp, Zea mays
  Peptide Sequence Number=SeqID_51337
ttcacagggttctccttctgaaggcagaaattttgacacccaagaatcggattcagaggagccatcttccattggtgatggagacttagttaaacacaacaacatactgcagtgggctaaggcaaaaaaatatggttctttgcaagttgtctgtcaatactaccagttacagtgtcctgctaggggttcaacacttgcttttcatcccttggagcatttgcattctttgagttttcaccggcctggtgaaacagttcttcacattgctggttctactattgagcttaggtcacgtgatacaagcttagaggttgctgagatgcgcaatgcactctttgctgaggaggaatcgactgctttgtccacatgggcagtggcatccatttgtggatgcctcaggttggaacatactcactcactgaaccttctcaaatactccttttgcactgagaacacaattaagaaccctctttatcacaagaaggcaaacattgttttgcctaatgacatgatggattttctggatgccccagttccatacatagtgggcgtacaaaacaagacatctgatgtgctcaaccggctaacaaatgccgtagtcattgatgccaacaggaatcaggttttagttactgtaaatggtgaagaaataggtctaactctggactttgtactgattaagtcctcttcagtcccacaactaccacagcacagagagttgctttctgccttgcgcccgtatcattcaatacttgttggcgaaagttatcttgcaagaaaacgccctgtttatgaatgcacagatgcccaggtggaaggggctaaaggtttcttggcagtgcttagagactaccttgacacactatgctcgaacttgagatctcatacaattaccaatgtgcaatctaacaatgacaaggtttccttacttttaaaagagagctttattggttctttcccaagccgggataggccttttatgaagcctttagatgttgagctaaactgtacatatcggcagctcagtgtttgtgcaaagagctcgaaggagaagccatataccgtcagaaaaaagtggtag

SEQ ID NO: 9559 - DNA, 225 bp, Zea mays
  Peptide Sequence Number=SeqID_51338
atgaatgctgtggtaacttcacacctactcgtctgtttatatagtactgcagcatttgagaacaagtccccaacatcattaaaaccaaccaagggcctagatgtattcatggccaagacaaagaaagcttgtgacctcgtctccgatctcgagatagccttcgcatgcctgcaggccaaaagcgtcaggctcaaccctgagaagtgtgtcttcggtgtcccttaa

SEQ ID NO: 9560 - DNA, 1365 bp, Zea mays
  Peptide Sequence Number=SeqID_51339
atgcctcctggtcgtgggtcccaaggaattcgaacgcccctcggcacctcggttcttggcttttgctcgccatggcgccatgccatatgccacgccaagccggagaggctttggcggcgccatgccaatgccaatgccatgaccgtgctgttgcggcctccattgaatgggcatccatcgtcttggcctcggtccccatgcattgaacagggaaaccagggaagcaagagaaaaattctacagcggcagttgttagaggaatgggaagcccaggatcaggagactctcacggcgccggaatacacacatcttataagcttggaaccaaactgcaggcctaataactctctgagaccatcagacagacgatcaatctacatctactccgtgttccgcgatctcacctcgccaaacttcgtgaagagctcggcgtcggacgcactggacgagttggcgcaggagagcgcgcagccgcctcgtagtctgtgggcgtccaccacacaccttgcccccgccccgacgcgccccctcccttacctcgtctccccgcgcccgcgcggaaccaacccagtcggccagccctcgcccgcaaatctcgctccctccaccacgcaggacccagcccccatccctgcgccccttccaacctcgacgcttctttcattgacggcacccacggcccaccatgcctcgccacccgtcttcggcgccctcgcctcgcccactttctccccacgccgtcgctactggctacccccgcccacaacaccgccatcttcttcctcgctcgtgcccaccgctggtagcaccgccccctcccttatcctcgccttcatggccgcgcggagatggcctgctaccgccgtatttgtccacgtgacgccaccaccggctctgcacctctccctgcttggttccacagcgttgtggaagccgacctggccggatgtcctcgccgtgccacggatgccgcatcccacttcttgctcggcgaccgtcgagcgtcaacacccactccctctaggcgagacagagtccctggagagagcaaaggagacgggagtgatggaggccaccgaccataggagattacgacatgaggtaccggtggatcgaagatatggcttgatttcagtgccagaggtcaccgtggagccgcgggtgccccagagttggctctcgctggacgcggcggccctgcccggcgcgtggacagccgtggaggtgcggtcgccacaaaggagaagtctgcgcgcgtccgccgggctcggcgagagaagagccgagagaacgcagagaaaccaggagacagagacgaacgaagaaacccaggaagagacaggggcaattttgactcttagatga

SEQ ID NO: 9561 - DNA, 1101 bp, Zea mays
  Peptide Sequence Number=SeqID_51340
atggcgacacgaaagcaaatggataagacgagtcaagcagcactcctctcctcctctagtgttggcgcggatctcgtcggtgatgaacatacgacaggatactataccagcctcctaagtgaaggcacaaatctacaagactatgacgatttagttgacttgtatcctgaggaacaaccacaaagggtcgaagtaaacacttatgcaccctctgctagaccgaaccataagaggtcaaagaatttcagtgacgtggaagacgagcttttggtgtctgcatggcttaacataagtttggatccaattattggttataatcaaactcgcagttcatattggactagaatttatgactactttcatgccaataagacattctcctcaacccgtagccagaactctattatgcaccgttgggccagcatacaagaaggtgtaaacaggtttactggatgccttgctcaggttgagagaagaaggcaaagttgtgctacaatgcaagacaagcttacacaggcgtgtgctttatataagtctgaagataagcaacacaaagcttttccatatatgcattgttggaataagttgcggacacatcgtaaatgggagatgaaacttgaagaattggctgttggcaagtcatctaataagaagcaaaagatgaactcaaatgaaacctcacctccacatttaccaagtgtcaccgaaacaagcgggcctacaactccaaatgagactgtcacaacaagaccacctgtaaagaagaaggccaaagcagcagcatttcaagctgaaaagaaaggctacacagaaactttaaacaaattatttgaaaagaagaaagaaacagatgaatttaaagaaatgaaaaaggacgagaggtttagattagcattagcagttgaacaagagagggctgtgaatgagaaattaaatatggagttaaggagtaaagagctagaattgaggcagcaagaagttgaacaacataagaagagggaagaagagagaattatgaccctagaccttagtgtcatgcctgctgatcagaagcaatattacatgagactacgatctaagatattgtctgaaaatgcctaa

SEQ ID NO: 9562 - DNA, 174 bp, Zea mays
  Peptide Sequence Number=SeqID_51341
atggggtcgaaggacataatacgctacctgtgtgagaggtttttacatggtggcattttctttgcagttctgggaggggtgatgttcatcccagggttctactacacaagaatagcgtattatgcttacaaagggtacaagggtttcaccttctccaacatacctcctatctga

SEQ ID NO: 9563 - DNA, 172 bp, Zea mays
  Peptide Sequence Number=SeqID_51342
atggctacagctgggcagcgttattataatagtgaaggtggacgtgctgctacttccctcattcccaacatgaatcaaatacctgcattgagtaatgcaagaggtgttacattctacccccctgaaaaagaattcgtcctcgaattcgaccactccaagcaaaacatccaag

SEQ ID NO: 9564 - DNA, 1044 bp, Zea mays
  Peptide Sequence Number=SeqID_51343
atgtggttaggagaacaatcacaattcttctcccaaatttcagctatgcagctttcaacgcaatcattcatgtcttccgggcataggcaaatatccctcctgcctcagttacattggcagaattacttcaccaaattgtgcataaagatcacataccactttttccattggaagaaagggacaccttttgctgatgaccagggaatgtacaacgcattgacttggtgggaacaaatggataatggcaaacagcttactcgtaataggaagttcctcattgttgttcatgttgtcctctatgtggtggatgggcgagaagcaggacatggctggcgtggagcatcccggggagcggcgattagcatagggcggcgcagaggcgtcgacgtaggcgcggcgggtggcgcgctcgccatccatgtcgaggaggctgggatgcacgtagaggtcggggccttggataacgaggaaggcggcggggacaccaggacgttcaggtatctggcgaaagacgcgatgaggttcggggattcggcggaaaacacggggaagacggcggggacgcgaggaggttcaaggatcagatggcatggacgcgaggaggctcggatcggcggtgtgcggttccttcaatggacggaggagggcagaagcgcacacctggtggtgttcgtcgccggcaaccgaccagatgaagatccagcgaagggcccaacgaaggcacttggcatagggcagcgcacgcctaattgcgatttggtgaacgggtgtctcggtcgcagaggtcaccgcttccgccctcgtcggcaacacagatcgtggcatcaccgccgtgggcgtcccctcgcctctgggcatgggcggcggcggttggacgagggtcgagcgggggaggagggggttgcgatggacgattgggcgatggacgagtgttggcggattcagcctcgggagggggacggtcgagcggacggtggacctcgaatcgagcggcggggatttgtgatgaacgatggtggaggagggacggacggtgtagattag

SEQ ID NO: 9565 - DNA, 174 bp, Zea mays
  Peptide Sequence Number=SeqID_51344
atgaagttggtggcgggagaagtcaagggaaccaaaacctctctgctaccgatggccccggcgctcaggctactggaaggttcatcggcagtgatatgtgatgaggagaatcgagattgggagggggagctggcgtgggcccggcccgagccgacccggttgacgagaaggtga

SEQ ID NO: 9566 - DNA, 1143 bp, Zea mays
  Peptide Sequence Number=SeqID_51345
atgaatccaaatactcagatcatattggatgagatttctcgacgttgcgttgaccatgacgccaaatgggaccgtcatgtgtccaagcaggaatctcgttgggatactgccttttcaaagttcacatcgggtcaggaagggcttgtcaatgccttagagaaggcaactgtcatcgatggcgggagttctcgcttcctctctcctacggctgtcgagcgcccacctgttggatctccaacaaattcgccccatgggcgctgtgtcgacttgtgcatcaggaggatggatttaggtcagtcaccacccttcttcatccttcggtcaagggttctgcacttgaaaggtgacaggcaggacttcgaattcgtgaagacaagcttggctgccaatggatacgatgtggtttacgacatcaatggacgtgaggctgtgcaagttgagcccataattgaggccttgcctaacctgcaacagtacatctattgctcatcggcaggagtgtacctgaaatctgacattcttccgcactgtgaggtggttgacgcggtggaccccaagagccgtcacaagggcaagctggagacggagagcctgctgacctcgcgcggcgtgaactggacgtccatcaggcccgtgtacatctacggcccgctcaactacaaccccgtcgaggagtggtttttccaccgcctcaaggccggccgccccatccccatccccggcgccggcaaccagatcacgcagctcggccatgtcaaggatctggcaagagccttcaacctggtgctcgggaaccccaaggcgagcaagcagatcttcaacatctccggggccaagtatgtcaccttcgacggccttgcgcgggcatgcgcaaaggctggagggttccctgagccggagctcgtccactacaaccccaaggaattcgacttcggaaagaagaaggccttcccattcagagaccagcacttctttgcgtctgtggagaaggcgacgagcgaactcgggtggacgccggagtttgacctcgtccaggggctcaccaactcgtacaacctcgacttcggccgcggcacgttccggaaggaggcggacttcaccacagacgacatgatcctcgacaagaagcttgccaccgtttga

SEQ ID NO: 9567 - DNA, 399 bp, Zea mays
  Peptide Sequence Number=SeqID_51346
atgtcccgatgccctagcctcccccgtgcccagtcgctgccacgcttgtcgcagaaccggagattttctgacacaatgatgcttcctgttcttgcgaaaattggagtagatccctcaggatgtgtcgaactagcaaagcatgtcagattgaacaaccctaaccttgtgttgtctggtttgatgataattgggatgcttgattactcctcaactccgaagaatttcaaggcactagccaactgtcaggaagatgtgtgcaaggagcttggaataccggaagagcagctcgaactatttgtggacatgtcatctgactttgaacaaacaattgaaatgggaagcacaaatgtaagagttgggtcaaccatatttggtgcaagagaatacccaaagaactag

SEQ ID NO: 9568 - DNA, 699 bp, Zea mays
  Peptide Sequence Number=SeqID_51347
atgctccctccctgcaggttcatcgacaagtctgggactcatgtcatcgacggggtcaagatgggaggcaaggacgtgtaccagaagtacttcggaaaaggaacttgtaagggagcaggcatatttgtccccaacatcgattgtttcaatgaagagagcgagcatggccttactgtcgccaatacatctagcatccttgcctttgccctgttgaatcagatatgcgatatggttgccatcgcaagatctttgaatgtgacttcaattgtgcctgagttggataagacatcgttttggaatgatccaagtgaatttcaagacatatttgacgttgaacattttataatctctctaagagatgaggttcgcatactaagagaattgccaccaagagtaaaacagagagtggagttaggaaatatccactcagtgcctcctgttagttggttggatatctcctattaccataagaaggttagagatgtccgatgtcatgaactcttgtgtccatatccaatccatagaatctttaccatttggccaaaagctgatcatttcatcctgtacagattctacatgcaattcggaaataaaaggtcctctgaaccagagatacgcttgatggactggatgagagatgcattccctttgaatactgaggctatctctgacagattacgcttttcaggagtgacataa

SEQ ID NO: 9569 - DNA, 846 bp, Zea mays
  Peptide Sequence Number=SeqID_51348
atggcgcctcccaagctccatgacggcggcggctctcagctctcttacggaagcagccacgacatcacgccagcagggtgccaagatctctccggctgccacattggcatggccttcttagagaaggttggccgcgcgggaccgaggacgggacaggcgctctcttggggccgctcgcttccctcacccgcgtggacgcttgtaacccccctactgcaagcgcacccgacctgggcgcgggacgaacacgaaggctgcgggacttccacctctctcacgcccgtctccgtccacctcgcctctccccccttcgcgctcgcccacgcgctcgacccatctgggctggggcacgcagcacactcactcgtcggcttagggaccccccggtctcgaaacgccgacaacgatgaagaggatgggttagttgggaaagatcttcgcacccgcctcgcccccgctcgctgcggccgcctctgccagcgcacccgccccgcccccacccgccgcggccgccctcgcccgttgctctcgccgacgcggccacctccggccccgcccgccgtggccgccctgctgtacggctacaagaacaacaacctcaagtggctggagcgcttcgcctacatcaacaccaccatctaccccttcgccttgctcccactgctcgcctactgtaccctgccagccgtctgcctcctcaccggcaagaagcagaagcaagagctcatggattatgtcactcaaccagcagcgacacagacgtcacgtgattcgccagcaactcattcacccgcaactcctgagagtaatctgtttggagccaagctctccaacaagtggcggtaa

SEQ ID NO: 9570 - DNA, 171 bp, Zea mays
  Peptide Sequence Number=SeqID_51349
atgaccatctcaggggccaggatatcacaggtccgcgcctacctcgtcagagcgacaaaggcaacgctaatggtatcgagccggtgtcctagatcctacaccaccgacctggtaggaggtgcgctcaaggaagaggccaaagagaaagggaggccgagggtggccagctag

SEQ ID NO: 9571 - DNA, 357 bp, Zea mays
  Peptide Sequence Number=SeqID_51350
atgtccaggctgcaagcaaggagctttcggaggaaatcacctcacagccacaacaacaaggcgccgcggaggtggccgtccaggctggtggacggcttcacgaggatgctcgtggggctcttctccttcccgccacggccgcccaaggtgaccttcaccgtcgacgaccaccgtcccggtgcacgcgtagtacgaccaggagccgacggcggtgccggcgacgcgtccaagctgtcgttgtcgagcagctccaacctggacccgctgaacgcgcactatgacgaggccattgccgactgcgtcgagttcttcaacaagtccgccagggtcgacctctgctcaaggccacacttttga

SEQ ID NO: 9572 - DNA, 450 bp, Zea mays
  Peptide Sequence Number=SeqID_51351
atgcaggcggcatgcaactacaccaagggggcacaccctttcgacttcgacgcgtccagcatggaggcccacacatcatgtaaccggcacgccggttactacgtgcgagaaactgcaccgccacttgcgtcagtaccacgccttctcgactgcggaaccggtgccgcgactcgaggcaaccctgcgcatggcccaacagtgtcaaccgagcacatcgatcacggggaccgggaaaggggatactccgaaagggatccttctccgcgaaggaagcgggccccgagccctcctactgatcagaggttcgaaggctggcccctcagaagggttcgacagccgcctcagagcactcgggctccgcacccactactggtcagaggttcgaaggctggcccctcggaagggttcgacagccgcctcaggccactcgggctccgcgcccactactga

SEQ ID NO: 9573 - DNA, 297 bp, Zea mays
  Peptide Sequence Number=SeqID_51352
atggggatccgtgggtttgggcgtgaggccaacttccgtcgagaaattgcggccccacccatcaccaacgtgcaattagctaggttgttcaggtgcggtgcacacccgcgacaacccagggcgaggaatcggtgtctggcgatggcgtacgagcatgctcatggtggcggccggacagcacacgacgacgagcaagttctcgacgcaccgattagagcaggcgagaaggggggaaagagcacggttctatttatacaccggcggcaaagtccgagcggatcgagacgcgatttctaa

SEQ ID NO: 9574 - DNA, 289 bp, Zea mays
  Peptide Sequence Number=SeqID_51353
atggggatccgtgggtttgggcgtgaggcgaacttccgtcgagaaattgcggccccacccatcaccaacgtgcaattagctaggctgttcaggtgcgatgcacacccacgacaacccagggcgaggaatcggtgtctggagatggcgtacgagcatgctcatggtggcggccggacagcacacgacgacgagcaagttctcgacgcaccgattagagcaggcgagaaggggggaaagagcacggttctatttatacaccggcggcgaagtccgagcggatcgagacgcg

SEQ ID NO: 9575 - DNA, 1227 bp, Zea mays
  Peptide Sequence Number=SeqID_51354
atggagaacactgcgccatgcggtgacttcgggaagatcgtggccgatcttgagtctgagaacttggtggctaacgtctctgccgtgaatcaagcctcggcgttgattgctggaggtaaaatccctgaaccccagcttctgtgccgcctgatcgctggtcttgcttccaatctggagaagcctgaccatgactctgccatcaagaggtgtgtttcctttactctaaaggcaatcagggtggccgtcatcaagaaccgcatgaacatggattcctcagctcgtgatgccctgctctctttgccccctgttgttccaggattttcatttgccattgcaagagcctattgccatatgcttgcaacagtgtcaccacaatcaccacttgaggggtttagtgaccttgctgtggatgtcctagcagctttatcaaattgcaatcttgctgttcgaaagaatcttctgaacctgatggtgaggctcctcactccaaggaacatcagtgctgtgctattgctccttgataatgagctgaatagggctgctaacatccatatcgagtaccacaagatgctagaggaggcgatcagagaatgccatgctgcttttccggggtgtattgtagaattcacactagatcccaagtacagtgtgttcattgatagtattctgtacatcatagacatcatgaatcccgaccagtcgttgcgaggcccacttctgaaaggtctactaagggcgctccggcatgtgaagtcaccactggtatgcgccgctgctgtttgggccatctcaatgttctctggatcactggaagaggtcagtgatgccattgttgcactttcatgcttcttcaaggacctgcttgatcgacgtaagattgagaagctgatacttggaggagaagcggagaatcaatacaagctttctactgactattatggtgtcactgccggagatgcaacacagggaaagcaccagcagccatggctgatggagatggaggaactgctgtttgtgcgcatagggctcacacggcaagcaggtgggagctatgccattccttcgagttccaagagcagtgctagttcttcaaacgcgtatcttcctgagccattgggtaatacagacaatctgatcttcctcgtgcattctggagatgccctcttggcagatttcgtggaaatcatgctgtctaacctcaagaagaaggtcaaagagctggagtga

SEQ ID NO: 9576 - DNA, 309 bp, Zea mays
  Peptide Sequence Number=SeqID_51355
atgatgaggcacgctagctggagggtggccacgaagcctggacggctcgagagcaggacggtggcctggaagtctttgcagcaggggatacggagcccgccgaccggttttgttggagttgcttttagacctgctgctacatacattttagcgggtgtcagtctgtcaactatgcatattaaaagaacaagcataaagcagttcagaaggactatcactttttatttaggcagtacacggatgcctaatgctggtggttattgttggagcgaggacgaagctagccctcgatcaccatccttttactaa

SEQ ID NO: 9577 - DNA, 1983 bp, Zea mays
  Peptide Sequence Number=SeqID_51356
atggcacctgtatttcggcttgcctcagtgcgcgatttcggctgtgttgggccgtggttacggggttcaaatgtaaatctgcttcggaggagtgacacggcgaagatcttcaaaaactcaacgcatcggtcatacaagcacaaagttcgaccaaagttgtatttgaaattttcatgcgccgacaaagcccgcctcgtagggcgccagcgtgctcgcaaacacaacctcctcgccgtcctcgtccacgcctcgccttgcgcacttgctgatgaatcatcccacctggacaccgtcgagcctgtcgccatacgcgctactgttggcctcaccgatcacctgcagcggaccgaccttggccttcctttcaccgcccacgagcacgacctccttggtcgcgccccgctccgcggtggcaaacaggcacgtcgccgctcccgcgcaacagagggaggtggaggccacgagcagcagaaggtcgcagctcgcagaaggctgcaggggtgggggcgcagttgttttgagttatacttcataataacaatgcaaacacgaaaaaagggtgctgcaaaaaatgcagtggggtatcatgccaatcctaagacaagtaggccatccagaagggcaactcaatctacagttgctgaaaagaaagtatctgatctcatcacgtcttcttccaagaagcagagacctgttggtgtcacttccaagaagcattctaaaggaggaaggaagctgctagtttcatgtgatacaactgatgctggaaatgatgcacctcaggtaccccctagcgtcttccctgatctgcaggcccagcattctgatggtgttgcagatgatcgtcccaacgattccatattctctccaacataccatcatcacaaggaaggtggtgtgaataacctatccaaaggcttagaagaacaaacaacacatgttcatggtagtaaggaagctagcctaaaatctggttcaaaccttgcatgcaacactcatgatgggataaatgaccactctggcacactaaagttgcaatcagctgggcaaagcacattgcttgaagtggatgagtacagtgaactgggaaacctttcctcagaagtatcagcaatatatcttgctatgcagcagtctaagttggagtgcattgatgaacagagtcaagattctacctcaacagaaggttatggtgaagctgaggagactgaagagtatgatgattttgacccctactcctttatcaaagatttacctgatttatctatggtggtccccaagtttcgtcctgttctccttccaaagcagacccggagttgtcctacgatgactcttgtacttgatcttgatgagacacttgtacattcaactcttgaacactgtgaggatgctgatttcacatttccagttcattttaacttcagagagcacacaatatatgttcgatgccgcccctatctcaaggaattcttggatagggttgccagcgtgtttgagacaattattttcactgctagtcaaagcatttatgcggagcaacttctcaatgttcttgatcccaaaagaaagttgttccgtcatcgtgtttatcgtgaatcttgtgtctatgtggagggaaactacatgaaggatctgacagtacttggacgtgacttaactcgcgtaatgattgttgacaattctccgcagttggaacacgctatgaataaagatgtattggtgtggaattcctgcatgtcgtggttcatggatttaaatgtaaagccgctttcctcgttgcaggcctttgggttccagttggacaatggcattcctatagaaagctggtttgatgatcccaatgacatggagctgctgaaattgctcccgttcttagaaagcttggtcggcgttgaagatgtcaggccttatatagcaaggaagttcaacctaagggagaaggtagccaccgcatcttctcttacaatagacatgcagatgtga

SEQ ID NO: 9578 - DNA, 306 bp, Zea mays
  Peptide Sequence Number=SeqID_51357
atggccattgaaccatgccatgccattgtgtacaacagcccgcattgttcgtgccggccctggctcgacgagcgaggtcaagcccaggcgcccagccgtagccgacacatggtgttcacttcacaccatcgctacaccatgttttcgcctctgctcgctgggctcactgttgcgacgccgctgcttgtcattgtcgtgtctgggctcgctgctgtgccgccaccgccacagatcccatcacaggatgtgcgcctagccgtcgtcaccttcctctatgaggcaggtcaacgaggcctccgcgtgtag

SEQ ID NO: 9579 - DNA, 141 bp, Zea mays
  Peptide Sequence Number=SeqID_51358
atggccaccctcaccaaggttcgtgatcctgttacaaccataggtcgaacctacttcctctgtagaatagcccaccgtgaaaggcaatgcccagaagtcatcccaaacatatattctacattatgcggtggattgaagccg

SEQ ID NO: 9580 - DNA, 423 bp, Zea mays
  Peptide Sequence Number=SeqID_51359
atggtcgtcgagtcctacgtggtggacgtgccgccggggaacaccgtcgaggagacgcgcatcttcgtggacaccatcgttcggtgcaacctccagtccctcgagggcacgagaagactgcgtgggaattcgctggttctgataaatccagggactactctgggcccattttttttacaccaccagtctgaatattctgctgcagctcctgagagaatcaaggaagacaaaacaaggctggttcatgagagcaaaggaggcctccaagaagttgacctatttgggcgttggtttcgttcatttcgatgcgacgatcatcaggaaggccgtcgattgcttcagaagcaaagggctcatctaggccatgtgaatatgttcagctgtatgtctgtgattctgagaacagctacaagcaatacttag

SEQ ID NO: 9581 - DNA, 1422 bp, Zea mays
  Peptide Sequence Number=SeqID_51360
atggccgcggcggaagcagcctcctccgcgccggcgcccgagcatctcctggaggtggaggacgacgaggtgatgatcgacttcaagcccaacgccaagtgccgcgccgacctccgcctccgctccctgcacccgtccctccccgtcgccttcaaggtccagacctcctccccgctcaagttcctcgtcagcccgccgcgcggcgccgtgccgccgctctcctcggcgtccctgcgcgtcgtgctccgcccgcagccgcacgcgccgccgtccttcccgcgctcccgcgccgaccgcttcctcgtcctgtcctcgctctccgcggcgcgcctcgactccgtgggaagcagcaacgacggcggcggcggcgggggcggagtcagggccgtccgcctccgcgtgttcttcggcgggccgtaccttctccgcctcgccgcggacgccggagacgccgcggccgtgcgcctcatcctgcgccggcagccgcacctgctgccgttcctggagcaccagcaggccgccgcggcgcccgacgccggcgagcagcagtgggcgccgctgcacgcggcggccgccaggggggactgcggggagctgaggcggctggggcccgaggcgctggccgcgcgtgaccgcgaggggaggacggtcctgcacgcggtcgccgcggccggcgaggccgaggcggtggcggtgctggtggacatgggcgccgacacgtcggcggtcgacgcgcgcgggaggactccgctggacgtcgcgcgcgacaagggataccaagaagtggtggacgtcctggaacggtgggagctggtgatgacggcggcgaggcgaggcgacctcgggagcctcgagtccctgctcagcaagcgcgccggcgtccgcgggcgcgaccagtacggcctcacggcgctgcacctggccgcgatcaagggacacggcgacgcgatcgcgctgctcgccgggccgggatgcatggacgtcgagtgcgaggacgtggaagggcacaggccgctccacctcgccgtcgagggaggccacgcggaggccgtggagctgctgctcgacatgggcgccgacgccaacgcccggaccaggcgcggcgccacgccgctccagatggcggaggccatggggtacgaggccatcgctcagctcctgtgcgcgagaggtgcggaggtggccgccgcgtcggcgttgtgcgccgcgtcgtcgtcttcatcgtccatatctgatgctggggctggaactgaactggatggacctttcagcatggagatgagagtatgggagatagaaggaaatggaggacgaactccaacgcgaaccatgctctcaaccttatgggccacagccacatggccgtacaaattgggctggaaatgcgtcgtttgctcgcttctggagaggatcaagccatag

SEQ ID NO: 9582 - DNA, 462 bp, Zea mays
  Peptide Sequence Number=SeqID_51361
atgtggctgccctgggtgaagacgcgcccttcgtccgccacctccacctctcccacatccaccgcgctcgtagccgccgccgccgccgcctccccgcgcctgtccttctcctcgccctccctcaaggacctccaggcgctgctgctgtctgacgcagccacgccctccccgccgcccgccgcgccctgctccccctcctcccgcgtccgcgtcttccaccgggtccgcgtcgccgcctcggcccttcgggggggtccggacccttcaaggggcccgccgcccgcgggggcccccttcctcccaaggcccccaaaaaccccgtcctggtttaatttaccttcgtctccaggggggtttccgggaacaaccaaaggaatgggcggggccggggccccccctcctgccgggggctcccagtccccctccaaaaagggggaaccttcgcatgagaaccccccctaa

SEQ ID NO: 9583 - DNA, 1242 bp, Zea mays
  Peptide Sequence Number=SeqID_51362
atggcttcccgaccgcctcttcatcgtcgacgtcgtcttcccctcgtcccactcctcgttctgctctgcctctctccgggatgcgctgccgggagagtcccggtttcggtctactacgaaacgctgtgcccgttctgctccgcgtttgtcgtgaacgacctctccaggatcttccgcgacgggatcttctccatcgctgacctgcggctcgtccctttcggcaatgggcgtgtctcggccgacggaaccgtcacttgccaggtcagttcagtgcctgataccgtatcgttctcgttgtttctcgaactgggtatgtggctatgtgcgttcctcaagaagtccaactgcaagtttgagaggcatcagctagatcactctaatggtcagttgcttgttttgcagcatggagaggacgagtgccaactcaacgctatagaagcttgcgtgatcagaatatggcctgacgcggagcagcattttcctttcattcaatgcgttgagcatttagcactgactcggaaatgggacgcctggcagtcttgctttcatgaaactggtctcgcttatcaacctgctattgactgctacaactcagggtatggaaggcagctcgtactccagtatgctgctgagacaaatgctctgcagcctcctcatcggtttgtaccttgggtggtcgtcaacggcaaaccgctcggtgataaatctagtctgattcagcgtctacaggattacatgaactttgaggcatacatctgcagcgcttatgacggcaagcttccaaaggcatgcaaggggaagcacctagcaattgctcaggagacgaaagccagccgaggagacaagacttctctaaagagcatcagaccaaaacgtaacagagattggcacacatcgaagtacaggcctaccgtctgcagctatttttttaaaacaaaccgggcagcagaactgccgaatatattgataaagaggaaggtgcataaggttcaacataagccaagaaagaaatcaagttatggacacaatttaattggagcaaaaggccttgaatgtgctaaaaatggtgcactggacactgtccggtgcacaagggccgtacaacttcaaaccagccactttcgagaaaatggaggcatgctccgctataattcaccggactgtccgtgtaaatttgagttgactcccatacgtcattcgcaatctgaaagggaattaggcttacacctagtccctaattaa

SEQ ID NO: 9584 - DNA, 699 bp, Zea mays
  Peptide Sequence Number=SeqID_51363
atggggattaagaccgagcagagaaaattcgcgcgtgcggctgaaaggaactgggaagccacgacgctggaaaaacttcacgaaggatccaggggacgcgagcaaaacaaggagcaggaacccgggcgcgcgagcagggagacgggcaccacggcgagcaggttgagactctgcgcgcgcgacgctaaggacccgcgctcacaccccagcaagtgtgcggcgagcgttggcttgacgctgtatgccagggcgcggaacgcggcgaacaggggaaggaacgtggtccgaacaccggcgaactccaaggagcagcgcacaacgagcagagagggagaaaagagggatagctgggcgctcggccatgggacggacgccggggaaatgtcgagcagagggcagggagatggaaactcggccatggaagatgagcagtcggcgcgggagctgggcacgagcgccagggagacggagcacgcgcagcaagcactggtgagcagcaggggcgcgacagataactccgtgacgcacagggaaatggaggagggaccgctggggcatccatggctgggatgtgcaggaacccaccagggccaaggcgcgggcgagagggttcagggcgtggcaggcggaaccgagcagggagctccagccaggggcgcgcgcaacacagagatgaagcgcgcacaggggaaaggatga

SEQ ID NO: 9585 - DNA, 501 bp, Zea mays
  Peptide Sequence Number=SeqID_51364
atggcgaggacgctcggcttcccaacagctggtgccgatttggaggaacacgggtgcggcgcacggctttataaccccctagctaggagagaacgattagctgagatcgtgggcggatttgttttaacctccagcgatctcggtggtctgttatcaacgccagcacggattctagggaagcggaggacgcacggcgaggaacacgtgattcagttcgagggagatggatctgaccagaccgggcccacctggcaaggactaggcaagaccaccctcgctcagctcatctacaacgaccctcaggtcaaggagcacttccatctactaaagtgggtatgtgtgtcagatgatttcagtgtccgtattcttgccaacaagatatgtaatacatcagaggcagtccttgaggatgcactaaagaagcttcaggaacatcttaagggaaagagtacaagtatgaaccataaaattaaagtagcacaaaattttgatgaattttga

SEQ ID NO: 9586 - DNA, 300 bp, Zea mays
  Peptide Sequence Number=SeqID_51365
atggggaagagattggcgacgacggcggagtggtttgaacggcggcggtcgacggtggcagctcggggctttgaacggcggtcgacggtggcagcttggggcggcggcggcgggcgggcgggcgcgcgtcccgtgcaggggcgctgcgcgaagcgggggagggcgcggagcagcggcacggggccagccaggaggagcggcacgggggagggcggggagcagcggcgcggcgggcagacaggcggcggcgtggcacggtcgggagacagagaaagaaaaaagagaagaagggtcgtctga

SEQ ID NO: 9587 - DNA, 1404 bp, Zea mays
  Peptide Sequence Number=SeqID_51366
atgacgctcctcaagacgtacaaccacaacgacaagcagcaccagttctcgcttcccaagaggaacttcgtcacctacgccgtctacgcgctcatcgccgtcgcgctcctctacctgttcgtcgacccggcagctccgcctgctgcgggttcgggtgcgactgcggcatcatctacgaccaccaccaagccatcatcatcactacctccttctccttattacgaagcatcatcgccgatcatcagcacttcatcagcagccgcaccgctgtgcgactactccgacggcgagtgggtgccggacgcccggccgccgctctacgacggcacgacctgcggcgccatcaaggacgacgggcggagctgcacggcgaacgggcgcgcggacacgggctacgtgcactggcggtggcagccgcgggcgtgcgacctcccggacttctctgcggacgccttcctgcgctggctccgcaaccgccacgtggccttcgtcggcgactcgctggcgcgcaaccaggcggagtcgctcgtgtgcctgctctcgtcgcggtccccgtccccgccggacctcgcgcaccgcagcgccgacggcaggttcaggcgctgggtgttccgcgacgacagcggcggcaacgccaccgtctccgtcttctggtcgccgttcctgctcaaaggcgtcgagaagtccgagcgcgacggcgtgcgctacaaccaggtcttcctcgacgcgttcgacgagcgctggatgtcggagctccacggcatcgacgccgccgtgctgtccgcgggacactggttccggatccccagcgtgtaccaccggggcggcagggtcgtcggatgccacggctgcgacgactacgcggccgagttcaaccgcaccgtcgccgagagtaccagcagcttcttctccgtgttcagggacgccgtcagacggacgctcgccgaggccgcccgacggcatcgtcaccagagtagtagtggcgccggagggaagaagccgcagctagtggcgttcaccacgttctcaccgtcgcacttcgaggggcactggaacgagggcgcgccgtgcaagaagaaggccgacagggagctaggatacaccgagacggagatgaggaagatcgtcgtggaggcggtggaggaagccgcctcgacgatgtcctcgtccaatgatagtgcccagccgctgcggttcgcggcgctggacgtcacggcgctggccaacatgcggccggacggccacccgggcccgtacatgcgcaagaacccgttcgccgccgccggcaataacacgggagaccaccgcccggtgcagcacgactgcttgcactggtgcatgccagggccggtcgacacgttcaatcagatactgctccagaccatcctcctccgcgcgcgctag

SEQ ID NO: 9588 - DNA, 1683 bp, Zea mays
  Peptide Sequence Number=SeqID_51367
atgaagaggagagttgggccggccttaggttctcttctgctgcatatcatagcccaagacccaactctgaaataccttttgggcttagagctcaccgctgacgctgagggaagggagcccgtcgtctctcgtctcggctggccgccgccggagcagactctcctccgccggctgccaccgctgagggtggtggcgcaggctccggcatcctggccggcctgccggctgggacgcttctgcgggtctgtgccggagaagaggaagggaaaggcggcgcctttgcaggtctcctacttccatatccgtttccccgagtctatttccccctccgactgtttactgatgggtttggtgcaggcgcggggcatggtggacaggttccggatgcgcgccaagggtggcgacggcggcaatggatgcgtcagcctcaggcgctctaggtccaaccgccagggcatgcctgacggtggtagtggagggaagggcggtgatgtaattcttgagtgttcaaggtctatctgggatttcagtggcttgcagcatcacatgagaggaggccgaggtggcaatggagtttctaagaatcagataggaacaagaggtcctgacaagattgttaatatagtggcagaaggttttgatggtggcttgtcccatcggcatattgcccctaagcataacactgatggaaatgacactgtaaagggaagcagcagtcactcagaggatccaaaatactttcatacatgctccaagcttcagttctcaaactctaatcgtgatgtaagaatctattcatgtcaggaggggacagatgaaaaagatcaaactgaaagtgaggatgaagaattttgggaggatgaagacgagtttgacatggatgaggaggaagaagaggatgagaaggaagaacaagatgtgcaatattgtgttgctgagatgacgaaacctgggcagcggttaatcatagcacgaggaggcaaaggtggactggggaatgcttttgtcatgaaggagatgcggccatccaaagcaaacagacaagagaagatagcccgtttgagtactgggcagccaggaactgagagcatccttatcctggaactgaagagcattgcagatgttggtctggttggattgcccaatgctgggaagagcacattgctcagtgctctatctagggcgcaaccagagatagctgactacgaattcaccacgctgaggcccaacattggcagcctgacctacgaggactacttctcagttaaagtggctgatatacctggcctgatcaaaggagcacatgagaaccgtggcctgggccatgctttcctgaggcacatagagcgcaccaaagttattgcctatgtgcttgaccttgcagccacacttaatggcaggaagggtatcccgccttgggagcagctgcacgatttggtcacagagctggagcattaccaaaaaggaatgactcggcggccatcactgattgtggcaaacaagatagatgaagagggagctgaagagatgtacgaggagctgaagaggagagtgcagggtgttccaatatttccagtttgcgccatcttgcaggagggggtgccagatctgagagtgggtctaaggaaccttatggatgactcagatccgcagggcgttgattttgaggaaaacgactgttaa

SEQ ID NO: 9589 - DNA, 504 bp, Zea mays
  Peptide Sequence Number=SeqID_51368
atggctgaactagcggccagcctggtggtcaccccactggtgtccctgttgaaggataaggtgtccagctctctcctcgaccagtacaaggtgatggagggcatggagaagcaccacaagaccctcatgcgctggctgcctgccatcctcgaagtcatcggtgacgccgagaggcagacgcctcgccgcggcgtggagaaatggcttgaacagctcaagacggcagcgtacgaggcgaacgaggtcttcgatgacttcgagtatgaggcgctccaccgtcgagccaagaagaatgggcacatcaccaagcttggcattatggccagggtaaaactcttccctacccacaaccgtgctgcattccatattaggatgggcaacaggcttcgcgggattgttgacaccttcaaggaccttgtggaagaaatgaacacctttggattcaacaagcttcagcccaaggcaacaacggcatggaaggagtggcttactaagtataagtaa

SEQ ID NO: 9590 - DNA, 1857 bp, Zea mays
  Peptide Sequence Number=SeqID_51369
atggtctcaaggtcatttttccagtatgaggagcaaagaaggatcgggtacaattccacaacatttttgaaggttcatgacctcatgcatgatgttgcactgtctgtttcgaaaaaggagtgtgtctgtataacagatgaattcatcacaaatatggagttgcttccaagtgctgcccgccacatacttattgaaacatcgatagagaaagaggtacatggttatttgtatggttctatgagggaaatgtctcgacccatccaaacattgatgtttgacaggtcttgtgatgatgtcgttgtgcaacatttatcaagaattagttctttgcgagtactttctatgccattatggtgtcatttgccaataaaactaaagcatcagtgccaccttaggttccttcatattacaaatagtagcatcaaagaacttccagatgacataaccatcctttataatcttcagacacttaaactttctggatgtttcaatcttattagacttcctaagagaatgaagcacatgagtgcccttcgtcatctgtacacagatgggtgcacgaggttggagtgcatgcctccagagcttggacaaatcacttcgcttcgaacaattacatggttcgtagtgggaagtggcttgagttgtagtagtcttgcggagctaaaggatttaaatattggtggttcgttaaagctaaagcaactcgaaaatgtgccagcggggagaagaaatgcagaagcagccaaccttgtgaataagaaggaactgagacaactgacactagagtggacaagtggtaaggcggaggaaaagcagtgtcatgaggtgctagagagccttgaagctcatgatggactgctggctcttgaaatatattcctaccaaggcaccagctttccatcttggatgggattttgtgagacggtggatggaggtgcagtagcatttcctaagcttgagatattgcacattgagcgctgtggaaatctagcagctctaccaaaagcatcggtgctgggagaagcatattgcggtagagattatacagtggcccgctcagcatttccagaactgaagtggctcacattggaagatttgtgtagctttgagagatgggaggctgcccttgaaattgaagaaggacatgcgttattccctgtggttgaggttgttgttatcaggaaatgtccaaagttaacaactctacttagggcgccaaagctgcaagatctgtcagttacaggatgcaaagagcttgtctactggccagagaaagtattccaaagcttgatttcattgcggatgctatgcattaggtattgcaacaatctaattggatacgcagtggcaaatggtcctgaccaggcaacttcaggaaggaaccagcttttgccccatctagagtctctagagatagacacgtgtgaaagtctggtagaggtattcaacctctcccctgctctcaagaggatggaagttgaaggatgttgtaagcttgagtccctatatggaaagcaagagttggatgaagaggctagtagaagcgatgacatgacggcatctgcacctgttgaggagaagttgtcaccttcggtggccccagataagccccttccatcatctctagaatatctatcaatatgggattgccacgggttgtcagaggttgtcaatcttccttcgtctctgagggtaataaatattaaacgttgctccagactacgagccatgtcagggcagctgggtgcactcaagagcttactaattgtcaactgcccggagttgcgatcactagaaacatgcatcgtagatctcccatcactggaaatcctctttctgtctgtatggttgtga

SEQ ID NO: 9591 - DNA, 1926 bp, Zea mays
  Peptide Sequence Number=SeqID_51370
atgggtagcacgcacaaggaagaagtaggtgtcctggaggaaatacttgacgggagaaaagagccgaggaagctatctttatcagttctaaaacacatcacaaatgacttctcgcacgagcgaataatcggttatggtgggtgcggagaggtttacaagggcatcctgcaaaacggaagcgtcgctgtgaagaaaatcttcagcaacctaaatgttgaagataaggaatttgatcgagagattcagagcatgatgcaggtgaagcatccaaacgtagtgcggtttattggctactgttctaacacagagcatgaactgatgagaaaagaaggcaagtatattaaggtcgaggtgcgagaaaggctgctctgtttcgagcatatcagcaacggaagcctccgcagccacattacagatggactaagagggcttgaatggcacgcacggtataaaataattaagggaatttgtgagggcctacatcatcttcacatggaaaaaaacatcattcacatggatcttaaacctgccaacatactagtacatgatcaaatggtaccaaagattgcagactttggtctatcaaggctggctgaagtatcacgtactatgagcaatgaacggcttttatccctaggatactgcgctccagaataccaataccatggcaaaatgtcccttaagtctgacatctatagtttaggtgtcataatgctggagctggtgaccgggagcaaggaggagccggacattactaatgaagtcacttatctggaggacatgctaggaatcgagcctcttgatctgcatttcctagtcgaacctaccaagcagatatcctgctcagtccatctgaccaacgctacgaatgactgtttcgccttcattgttcagacgacgaacccgaagcagtactgcatacagccggacagaggcgtcgttccaccacgatctgagtgtagtgttgccatcgtattatcgcaagaaccgacgcataataagcgatgcagcatggaggacgagctaagcgtgcagagcaccagagtggatgagggtgtgacagctgcggatgtgagtgaagcgttgttcactggaaaggaagatagaacggtcgatcacgtgagcctgatggtcggtttcgacatgtcgccatcgccacctgaggaacaaacggaggacttcacgtttgcaccactggcgtcgttgtacgacgaggagccacagttaagcgcggcgaaggtatcagtatggacatccaatcagttggggcgttctggtcgcttctctaagaagaagctagtgtctattctgaaatcctggcgagcaagattaaaggtatcatcccataagaaactcgagactccaaagcatgactgtgagattcctgaagctgtagagcatgaagaagttgccgcgcccaggtgtcccaaaggaccactgccacagcgcgatctttctccactgggcgaagcatgttctaggatgaacatgacggcgatccatgagatcctagtgaacagacattacagagatgatgacctagacccaaacgtgccgtcgctcgaggaatggacacagcagagcagggatatgttggatgataggaaacgtggggacttcacttttcgtgataaagatttccgagcagccatagactggtataccaagtgtatggatgtggggccaaagaaggcgtcaccaacagttctcgttcgacgcagttgctgccacctcatgtgcggcaacctggacgccgccctccgcgatgcaatgcaagcgcagcgtcagtatcccgactgcccaacctcactgtacatgcaagcagtggcactttcaaagctagggatgcatagtcaagccatgggcatgctgattgaggcgtcggagatggaagcgaatcagaaaaagacccgaaaagcagcttaa

SEQ ID NO: 9592 - DNA, 168 bp, Zea mays
  Peptide Sequence Number=SeqID_51371
atggcgagggtgttgttccgcgtagggaggcgctttccgctctacatcacgccccatcattccatggtagttaaggctggaaaggtctcaattggtagctataggtggagtgctggcggtactaatgcgaaacagagcttgggagtcagattggtgcatatggggtga

SEQ ID NO: 9593 - DNA, 351 bp, Zea mays
  Peptide Sequence Number=SeqID_51372
atggacgtaatattccaggcaagaataattcttcgatcaggagacaagtggggcattggaccggttcttgcaagcaagagcctatggcgtgagatcgagcttcttttgcaccacaaggtcgaggatgtcttgcaactgcggatcaagctgcggctgcggctcaagctgcaagtgcggaagtaccctgacctggaggagacgagcaccgccgcgcaggccaccgtcgtcctcggcgtggccccggagaagaaggccgcgcccgagttcgtcgaggccgcggcggagtccggcgaggccgcccacggctgcagctgcggtggcaactgcaagtgcgacccctgcaactgctga

SEQ ID NO: 9594 - DNA, 435 bp, Zea mays
  Peptide Sequence Number=SeqID_51373
atggaactcggcgtcgagacgaagtgtgcgagcttcgcgattgccgaggaattgctcctcgatggcaagccaggcgcggcgcagtgccaccagaggtgcgaggaggctccatcaactcgggggagagtgtgcctagcatccaggacaaaacgacgacattcatgcaccatccagatggcgtggcgggcagttgcaggggtcgcacttgcagttgccaccgcagctgcagccgtgggcggcctcgccggactccgccgcggcctcgacgaactcgggcgcggccttcttctccggggccacgccgaggacgacggtggcctgcgcggcggtgctcgtctcctccagcttgagccgcagccgcagcttgatccgcagttgcaagacatcctcgaccttgtggtgcaaaagaagctcgatctcttcaagaatcaatga

SEQ ID NO: 9595 - DNA, 402 bp, Zea mays
  Peptide Sequence Number=SeqID_51374
atgctgggcctcatagccctggcgcttttcatcctagcggcggcgccgccgggcggggaggcgaggacggctccggcgcccggcgccggcgccggcggcggaacgaagccggcggcgggcctgccgccgccggtatgggaggagaagatactggtgatcatggccggggacgcgaagccgacgtacctcgccacgcccatgtcgagcagggcgtcctccttcggcggcgaccgtagcagcagcaagggcgtcgacgacgaggaggaggagagcaacaaggaggtgcaggcagacgaagccgccgtggccagcgtcatggacgccggcggacagaatggtggcgagcacagtgagcgccggagagaaggaggagatcaggagcgccgcattcctgaggtgtga

SEQ ID NO: 9596 - DNA, 312 bp, Zea mays
  Peptide Sequence Number=SeqID_51375
atggcggtggcgacgactgatcggtggctcctgctcctggccgtcgtctcggcggccgcgacgtccgggaagcacgagaggtggaggcatcagccatcaggcgtggagataataatgcgggaaacggagagcgacgcgtgcgtggggccgggcggcgtccttcaggcctgtgcctggggcagggcaagcgggccaaccgacctggaccccagatcccaggggccccaccccatatacagctgtaggctggcgccaaactcaggaacatggaggcacataaacaacacacgcgagacggcggacggacacagt

SEQ ID NO: 9597 - DNA, 828 bp, Zea mays
  Peptide Sequence Number=SeqID_51376
atggcacccaagactaagaagaagggagcctcgacagccgccatcccccaattgaccctaacagccaacttttgttttgtgccttccttgggattagcctacattttggattatggaggcatctgtatcattgcgaggactttgctggccgagattgctagtttgaaggatagaggtttgactactaatgctgtggtgatcgacttcatgttcaaaaacattcagcctctaaaggataggctgtatgatgactccgagattgaagccattcttggcatgctggctggagagtcctctaagtctgcagagcttgaacaggggagcggagcccccgagcaaccgggcgccatcaaggagaaagtggagggtggtggtgctggtaagtcggctagatatgtcgtggaagaggcagaggaggatgaggaagtggatcttccgctgggcctagcaatatcagtcatggaatgtcaccttgaagaggctgtctcagaggccttgttatatgagctgcctgaggtccatgttgtggacatttgtgttgatcgcttagatgaggtccctgatgttagtttattggcagagccagaggatgatgataccgtagtggcaagtgtcaatctgtttgtcgagctagcacaagatgatctagccactttggggattagtgatgtggatgcagctgaagtcatgccgactagaacatttgtagttgaagatgctactccagtcaagactcctatgggtgctattcttgttgcagaaccttcagttgatgtaaaaatcccaatgggtgttgctcttcagttgggaactttggaatcgtcgtag

SEQ ID NO: 9598 - DNA, 477 bp, Zea mays
  Peptide Sequence Number=SeqID_51377
atgaccatcaccttcagcaccgcgatcatcttcaacgccggggaggttttccactttggaaccctctcctacatcaccgatcggaggggagtcctacaccgcatcgcggatgcgggaagggaggccccgagagcccgtgccagcaactcaaccgagaaagggccctcgttgatatcgaagactgcctcggccacgacagtggttgagacccaacgagcgttgagccctagaggcaccgactcgtctgcacgccgcaacgatcaaccattgcaccacccacggccaaaaccacgctcatacctactccccggccgtctaatacggtcaacccaacccgatggactccgttgtccattttgccgacccaagagtggacctggattacttggaagaagggcactgaggtccctaacgctcacatggtcatcgaggaacatccgacgactactatggttgtgccgcccgcgagggcagtag

SEQ ID NO: 9599 - DNA, 555 bp, Zea mays
  Peptide Sequence Number=SeqID_51378
atgggacaaggtcaaaagaagggtcgatcagggtctggttcagtcttcgtcccaacattagccttccgaggggtgaaggagttggaggagctgggctgcttccccgcaggagcttgcagggctgcgaggtctaagaccgtgccacagttagaggggagatattaccacctatggagggactccgtccgtggaggttttcgcaaagcattattgcttgcattggcagaaaaggtcgtggacgatcgtgttagtcagtttgggagttgcacgttcatgcctaagactaggaagacgaagggcaagaggggggccaagatgacaagatttttggtcacacctatcgctagtagtgatcaagaccttgtcgaagagtacatggcatgtagagtgtggccgttggggcacatctggtcagttggcctggtggagcacaacagttttcctgggtttgcaaggcagctacttagtccacccttcgcggttgatttgtgtggccggtcaggtggggttattatgaaggagatcgaggaggctgaaaattggttgggcctgtga

SEQ ID NO: 9600 - DNA, 360 bp, Zea mays
  Peptide Sequence Number=SeqID_51379
atgaaggcccgggcccgcagatcatgcaaccggcgcaacggttactgcgtgcaaggaaaccgcaccgccacccgcgccaatgccgcgtcttctcgattgtggaaccagtaccgtgactcgaggcagccctgcgcggaccgggaaaggggatatttcgaaagggatccttctccgcgaaggaagcgggccctgagccctcctactgatcaggggttcgaaggctggcccctcggaagggttcgacagccgccccagagcactcgggctccaagcccattactgatcaggggtttgaaggctggcccctcggaagggttcgacagccgcccaagggcgctcgggctccgcgcccactattga

SEQ ID NO: 9601 - DNA, 369 bp, Zea mays
  Peptide Sequence Number=SeqID_51380
atggaggcccaggcccacgcgtcatgcaaccggcgcgccggatgcttcgtgcaaacaactgtgccgccgcccacgccactaccacgactcctcgactgcggaaccaataccgtgactcgaggcggcgcctctggcaggggaagcgagcgacgtttcgccttcgccataatgaccgcgtcgaaaaaggcagtcaggcccgacctcaggcgtcataggaagctccgcttcgcccgacccagggctcggactcgggctaagccccggaagacggcgaactccgctccgcccgacccagggctcggactcgggctaagccccggaacatggcgaactccgctccgcccgacccagggctcggactcgggctaa

SEQ ID NO: 9602 - DNA, 177 bp, Zea mays
  Peptide Sequence Number=SeqID_51381
atgtgggctgctactaaaagccttactgttgacaagttcaacttcttcatggggaagatagatgagaaggatcctaaggtccttacatggttggttgaggatcatccatggcctaaggaggcccatggaggggctgtggcagcagcaaccatgggccctccaagggggattagataa

SEQ ID NO: 9603 - DNA, 510 bp, Zea mays
  Peptide Sequence Number=SeqID_51382
atggaggacagacaagctatggttcgcctgcgacctgatcaggggcgcgtcctcgtcctcatcttctccatccccaactacgaacaactcttcgctggggtcacatacccagcgccgccgtcctcgtgggaggtgcagtgcaagaagtctaccgtgttcgtcatcgccgacatgttcatctccgtcagccccatggagttgtactcgaaggcgctcaagtccatgtcttctcctgtggtgctcattgtcgttgggctacatcatgagcaccatatcatcgtgaaggccgtcaacacggccactaaggggttcgcagcgagcggcgaatggctcgccgatgacaacatcaaccgcaaccacctcgacctcttctggttctggctgcttgctgtgcctagcatatttattctgggcaagttgatacaagtgcaggcctcctcgggccttcaggagaagacgctcagtaacagcaagtgtgatcctgatcattcgtgtggttatcttatctag

SEQ ID NO: 9604 - DNA, 1044 bp, Zea mays
  Peptide Sequence Number=SeqID_51383
atggagcttttcccctcccagccggacctctcactgcagatcggcctccccgctcgcgctacgtcccaccaccacggcgctgccctgagcgccaggctcctcgcggcagccgcaggtggcagtgtcggtggcggcaacggggtccctggcaacccggcggcggctatggcgccgtccctgcaggtgcccattcccataccgctgcagctgccgctgccgatgccccccaacgccgccgccatgctacgacccatacgcggggtaccgctgtaccagcacccgcacacgcacgcggtgccgccgacgttcccgccgcacgcggcgggcgcgggcccgtgcttctgcgagccttgccacgtcgccgcgggcgcctggcgccgcgccgggtgcggcttcggggctcgcgtcgccgggttgttccccccggcgaagcgcgccgccagggcgccgcgcatgcgctggacgtccacgctccacgcgcgcttcgtccacgccgtcgagctgctcggcggccacgaaagggcaactcccaagtcagttcttgagctcatggacgtgaaggatctcaccctggctcatgtcaagtctcacttgcagatgtacaggaccgtgaagaacaccgaaaggccggcagcttcgtcagatcaagctgatgggttcgagagcgggtcgtcatcggctggcgagatctgcgacgacgacaactcctcgctggatctgcacggcactgacggcaggcggccggagtcgtcgtcggcagttcggcatggaaggttaactgcctgtaacgatcatgggagcagcaccggtgctcatggtggtgccctctggaacagctcctcaagggaagactgggccggctttcccagcgactccaacaccggcagcatgagcatgcattctcgatctctcaaggatcagacgatgcagtccaagagcctggagatcctgtcggacatgaactcctcctgcgtgtcggagacgacgtcgtgtgccagcgagttgaacctggagttcaccctagggccacgcatcaggcactag

SEQ ID NO: 9605 - DNA, 2464 bp, Zea mays
  Peptide Sequence Number=SeqID_51384
ggtgctcatcttcgtgcgcctgatcgcgttcacgctgttcgtgatctggcgcatctcgcaccgcaacccggacgcgctgtggctgtgggtgacgtcgatcgcgggcgagttctggttcggcttctcgtggctgctggaccagctgccgaagctgaacccgatcaaccgcgtgccggacctgggggcgctgcggcagcggttcgaccgcgccgacgggacgtcgcggctgccggggctggacatcttcgtgaccacggcggacccgttcaaggagccgatcctgagcacggccaactccatcctctccatcctggccgccgactaccccgtggagcgcaacacgtgctacctctccgacgactcgggcatgctgctcacgtacgaggccatggcggaggccgccaagttcgccaccgtctgggtgcccttctgccgcaagcacggcatcgagccgcgcggccccgagagctacttcgagctcaagtcccacccctacatgggccgctcccaggaggacttcgtcaacgaccgccgccgcgtgcgcagggactacgacgagttcaaggcgcgcatcaacgggctggagaacgacatcaggcagcgctccgacgcctacaacgccgccagggggctcaaggacggcgagcccagggctacgtggatggccgacggcacacagtgggagggcacctgggttgagccgtccgagaaccaccgcaagggcgaccatgccggcatcgtcctggtgcttctgaaccacccgagccacagccgtcagctcgggccgccggcgagcgcggacaacccgctggacttgagcatggtggacgtgcggctccccatgctggtgtacgtctcccgcgagaagcggcccgggcacaaccaccagaagaaggccggcgccatgaacgcgctgacccggtgctccgccgtgctctccaactcgcccttcatcctgaacctggactgcgaccactacatcaacaactcgcaggcgctgcgcgcgggcatctgcttcatgctcgggcgggacagcgacacggtggcgttcgtccagttcccgcagcgcttcgagggcgtggaccccacggacctgtacgccaaccacaaccgcatcttcttcgacggcacgctccgggcgctggacggcatgcagggccccatctacgtcggcacgggctgcctgttccgccgcatcacgctctacggcttcgacccgccgcggatcaacgtgggcgggccgtgcttcccgtcgctgggcggcatgttcgccaagaccaagtacgagaagcctgggctggagctcaccaccaaggccgccgtggccaagggcaagcacggcttcctgcccatgcccaagaagtcgtacggcaagtcggacgcgttcgcggacaccatcccgatggcgtcgcacccgtcgccgttcgcggccgcggccgccgtcgtggcggaagaggcgaccatcgccgaggcagtggcggtgtgcgcggcggcgtacgagaagaagaccgggtggggcagcgacatcgggtgggtgtacggcacggtgacggaggacgtggtgacggggtaccggatgcacatcaaggggtggcgctcccgctactgctccatctacccgcacgccttcatcggcaccgcccccatcaacctgacggagcggctgttccaggtgctccgctggtccacgggctccctggagatcttcttctcccggaacaacccgctgttcgggagcacgttcctgcacccgctgcagcgcgtggcgtacatcaacatcaccacgtacccgttcacggcgatcttcctcatcttctacaccacgcggcccaccaccatgttctacgtgtacctggccatcgtgctgggcacgctgctgatcctggccgtcctggaggtgaagtgggcgggcgtgaccgtgttcgagtggttccggaacgggcagttctggatgacggccagctgctccgcgtacctggccgccgtgtgccaggtgctggtgaaggtggtgttccggcgggacatctcgttcaagctgacgtcgaagcagcccgcgggggacgagaagaaggacccctacgccgacctgtacgtggtgcgctggacctggctcatggtgacgcccatcatcatcatcctcgtcaacatcatcggctccgccgtggccttcgccaaggtgctggacggcgagtggacgcactggctaaaggtggccggcggcgtcttcttcaacttctgggtgctgttccacctctaccccttcgccaagggcatcctggggaggcacggcaagacccccgtggtggtgctcgtctggtgggccttcaccttcgtcatcaccgccgtgctgtacatcaacataccccacatccacggccccggcggcaagcacggcggcgcgatcggaaagcacggcgccgcccaccatggcaagaagttcgacggctactacctctggccgtga

SEQ ID NO: 9606 - DNA, 489 bp, Zea mays
  Peptide Sequence Number=SeqID_51385
atggcgcaccggacagtgtccggttgcaccgaaaagtgtctggtgcaccaggtcgagcaacactcgaacaactcactctcgggtttctctagggcgcgctccgctataattcaccggactgttcagtgtgcaccggacatgtccggtagccctgctgcagctcaccaaagcccaccatccgttctgcgaccgccgttgagcccatgccacgtctgttgcctggctagcccaggccttagcgcgcctgagacctcctctcctcggccggaattcctcgccggaattgtccgacctgcccggagcaccttcccttcgtcgtccttccttcactggccccgttcttgcggccggaagtctgctagtgtgttcgcaaggccctctggacctgttctagccctccccagcgaccccagcccgcctggtgatcgcgtctgcctcgtctccggtgatctcgccgccgcgaaggagacaacgccggccaccaagtag

SEQ ID NO: 9607 - DNA, 462 bp, Zea mays
  Peptide Sequence Number=SeqID_51386
atggcgccgggcggccggcgcagcaacggcgagacgccgacaggacagcagcagcagcagcagcaggctgacggcaggcgcgggtgcgcatgcggcgggttccccgtgtgcgcgtgcgccggcgcggcggcggtggcgtccgccgcctcctccgccgacatggaccgcgtggcggtggccgccaccgagggccagatcggcgccgtcaacgacgagagctgggtggcggtcgacctcagcgacgacggcctctcctccgccgccgacccgggggccgtcgcgctcgaggaacgccccgtcttccgcaccgagaagatcaagggtgtcctcctccacccctacagttcaacggcctcgccggcgcgccgcgcgcctgcattcaccggccgttacactccgaacaacaacactatatcagccagtagtctcccactccaagcaagcactctactactagactga

SEQ ID NO: 9608 - DNA, 579 bp, Zea mays
  Peptide Sequence Number=SeqID_51387
atggtggtgatgatgaagcaaggaacgaaggatgaagctgacctgatgtcaaggagaagaagcaggataactaaggctggacgcacctgtctccgcgtgccagctacttcctcttgcattggcggctacagcctacaggggagcccccacgcccacagggctgccttctgcgcgtcgggctctttctatctgtcctctccctcttcccgctgggccctggggctccggtccgtccgtgacgccgacgaatggaacctgcgagggaggcggctcgcactacgtccgtccgtcgtcgtgctgtcgtacatggcggtggccggtggcgcagagctgggcagcgcaggctcccatcatgagctgggggacgccgtggcgtcgatggcgctccctgaactaacgcccctgtcgctgcccgcatatatggccgtcgccacccacaacccactagagctcactcgcacacagtacgcatcgtcattggacttgctctggctcttcacctacaacgccctatatgactacaagagtaagatcgtggcatgcgcctttgcaattcttacaatgtttagatctttgtag

SEQ ID NO: 9609 - DNA, 339 bp, Zea mays
  Peptide Sequence Number=SeqID_51388
atggtcgtggtgggtccgatctgcggcgtgcggaagaacaggaggctcggttggtgctgcatatcatcaagatacagtggcctaatagttggtttcaacatgcatacgtggagtaggaaatatgaagctcatttatgggacaattcttgcagagtagatggacgtagaaggaaagggacaagaagtttttgtagagctgctattaatgttttgcttgtcaagtttttaatcaatcttgaatcatttacggtgaacatctttggttctattttcatcgtcgggtggcaagaaactaatcaaagggagattccttgcaatggactgtttagctacagctga

SEQ ID NO: 9610 - DNA, 696 bp, Zea mays
  Peptide Sequence Number=SeqID_51389
atggactacaccaacgccatccacatcatcccacccatggcctccgacgcacggaccaacgcggcggcgtccccgggcgaggaccccgacatctgggccaccgagaaagactaccgccagtggacagcgatggtggcggcgggagcagcacaagcaagtcagcgccatcgcaagatgttcttcaagaccaagctctgttgcaagttctgggccaggacctgcccctacgtcaccaattgcaacttcgcccatggcatggaggagctctgcaagccgccgcccaactggcaggagattgtggccacccacgaggatgccaccacgaagcagggagaggagcaccagatccccattatgacatccagaagtgtcatcgctggagacgatggcggcggcggcagggcatacaagggtcgccactgcaagaagttctacactgaagagggctgcccctatggcgacacatgcaccttcctgcacgatgagcagtccaaggcacgggagagcgtcgccatcagtctcttgccgacgattggtggtggcggatacaatgctgcctctgccagcggatcgatggcgcaaaattcttccaattggaagacaaggatctgtaacaagtgggagatgactggatactgtccgtttgggagcaaatgccactttgctcatggatctactgtaatacccaatttgtaa

SEQ ID NO: 9611 - DNA, 504 bp, Zea mays
  Peptide Sequence Number=SeqID_51390
atgcgcctactacggcgtggaggtgcagcagaagaattattgttcgcagaacttcacaggtatggagggggccttgtggacatagatggcaggaacatcgcatccctcctgattcgaagcaagccggtgcttccgctaaagctcctgccgattctcctgctgcatccgctgcgaagccccctcatgcggaagcgcaccatctcggcatcctgtcgcagcgctccgccatcaccaaccagaggtctggacaactgcgaaggcccgttcagaaatggaagggcactgacaagatcagcaggatttattggtgactggatagggtgtttgtcttgtgttcctgcatgtcctgcacttgtccctggtgtaaagcatgcttataacagctttaagtcaagatcaactttgcaagagctgggaagggaaactgctgactgctggaacatgtggtcactttcttacgttgaactccgtctcgttgctatgataggcatggtgcgtccgtga

SEQ ID NO: 9612 - DNA, 495 bp, Zea mays
  Peptide Sequence Number=SeqID_51391
atggcggtggacaagtgcgtcaagggcgtcctcggcggcgggcatgggcgaagctcccggaacatggcggtggagcactacgacgggcaggccaagtccttcaccgctggcctgctggacttccgggccaaggacgtggtgtggtcctggtctgacgccggcgcggccgcgtcgctggacgacaagcgcgtgctccacgccatcgccatggaggacgagcgctccgtctgcgtcatcaaccagtacgacgacctcggcttcctcgacctccggagcggtgccggcggcgtcaggtggagctcccggagcaagctgaggaaccggaaggtgcccggcgaggagagctgctacccgaagctcgccacgcacggcggccagctcttctcgtccatgaacgacagcatctccgtgttcagcaacctggggtgtgtttggagctcgtacccaagctatgcactccacatgttcgatgaaatgtttgagagactagactag

SEQ ID NO: 9613 - DNA, 576 bp, Zea mays
  Peptide Sequence Number=SeqID_51392
atggcgcctcccgttgacgtggctggtctgcgccctaggttgggcgaggtggaagctcctccgaagccgaggtcgagtctgtcttccgtggccgaggtcgagtccgagcccctgcccgagtccgagccctgggtcgggcggagcggagttcgccgtcttccgggacttagcccgagtccgagccctgggtcgggcggagcggagttcgccgtcttccgggacttagcccgagtccgagccctgggtcgggcggagcggagttcgccgtcttccggagctgagcccgagtccgagccctgggtcgggcggagcggagttcaccgtcttccgggacttagcccgagtccgagccctgggtcgggcggagcggagtttcctgtggtgccttctgcaggacctgactgcctgtcagcctcactctgtcaagtggcactgcagtcggcgcggcgcaggcggcgctgtccttctgtcaggccgctttatgctgatgggggttaccagctgagaattaggagtcttgaggctgtgctcaacaggattatccgccatgcggatagcactctcattatcacatag

SEQ ID NO: 9614 - DNA, 1035 bp, Zea mays
  Peptide Sequence Number=SeqID_51393
atggacaccggaaagctagatgtggcccggtccccggttcgacggagcggatcccgcgcgcgcgcccgcccgctcgcgcccgctcgcgcctgcttccagtcgaccggggtccggcccaggccgcactggatcaccactgaatacggcggatatagaatcgacaaggtgctcaagaggttcaggagcaacatcatcttctccaacggaatgcgagacccgtggagccgaggcggggtgctcaagaacatctcgtccagcatcgttgcccttgtcatggagaaaggggcgcatcatctggacctcagattcgcgaccgatgaggatccggactgggttacagaacagaggaggcaagaagttgagatcatagagggatggatagaccagtatcatcgagacatggcgcaacgccgcatcctccgacgcatggcaatctgccccccccgacccaccgagacaaccgctcgcgatgtcctccctaccgagacagccgccgggacgtacacccagccgcctcccccacagcccacctacaccatcgagattgtcgtcgtcctcgcgtccgcctacccatcccgttgtgcccttgggcctggatctgggccgacgaacaacagatcccgatcgcgcgcgcagcgccgcagtcgtcgatcgcagcggcagccacctagccggaggattgagccccgccgctgctgccgtccgtggaatggactggctgccgacgagctgagccgcccgtggaatggaactgtcgccgtaaggccgcctgaggaggaagctcggtcagtgccagtgactccacatcttagccagaagtccagtcctggcagcagcctcgccgagaggatgcaggcaagagctggattcatggtgccgaagctcaacatgcccttcagcacagcagctggagctgacaattcagtacccgaagttccatcgccctacctcaccatcccgcctggcctgagcccagctacgctgctggagtcaccagtcttcatttctaattccatggcatgtgctcttctctag

SEQ ID NO: 9615 - DNA, 444 bp, Zea mays
  Peptide Sequence Number=SeqID_51394
atgcccagataccctcgcccgctctcgcgtcgcgtactcgcgtataaaagcaagccggcaccgtccccggccaaggccacggccacggccaccacagggagcagtcgagcaccctatagcaaccatatgccctccgcgccgtgctctggcccttcccccgacaccgccagaatcccgagacctgccggcgccgccaacaagaaaatggcgtgcctctgctcgccgacgagccacccggggtcgttccgctgcagtcggcaccgaaccgcgccggacggcgccgaggcggtgcccggcgccaccagggcgcggtccgtgcgcgcgctgctgctccagaggatcggcggcatccggcgcgagcccggccgccaccaccgccgccgcggtgtcggggtcggcgacttccagccgcgcccctccaggctgcgcctcatgaacctgtga

SEQ ID NO: 9616 - DNA, 348 bp, Zea mays
  Peptide Sequence Number=SeqID_51395
atgtcaaaaggaaaaatcgagttggagaagagatggctaagttcagccgaggttagcgcagtctgggtgaaccggactgtccggtggtgcaccggacagggtccggtgcaccaggctgactctggcgaacttgctgctctcgggagttcgacggcggtgtacggctataattcaccggactgtccggtgagccaacggtcggccgggccaatggtcggccgcgcgatccgcgcgagacacgtggccaagccaacggtcgggagggggcaccggactgtccggtgtgcaccggacagtgtctggtgcgccaacggctcccaggcgccaacgatcggcttcgccaaataa

SEQ ID NO: 9617 - DNA, 198 bp, Zea mays
  Peptide Sequence Number=SeqID_51396
atggaagatggtcctcaaagcaagcttgccacgagggatgacaactgcggcgccatgaatgacactgacgatgacatcgttgtcatcatcgtcgatgacgtagatgtcgaggctaaggaggaagacaaggatgatgaggaggagaacgacgataatgaggagcctcccgacatgcggtggatgaaggatgattcttag

SEQ ID NO: 9618 - DNA, 198 bp, Zea mays
  Peptide Sequence Number=SeqID_51397
atggaagatggtccccaaagcaagcttgccacgagggacgacacctgcggcgccatgaacgacactgacaatgacgccgttgtcatcatcgtcaatgacatagatgtcgaggctaaggaggaagacaaggatgacgaggaggagaacaacaataatgaggagcctcccaacatgcggcggatgaaggatgattcttag

SEQ ID NO: 9619 - DNA, 390 bp, Zea mays
  Peptide Sequence Number=SeqID_51398
atggttctttggaggctaagaactatgaagctgggggtccagaacaagctaccttatggaggcaagtccgaagccgaggctctgcaacaggccttcggagcccaaaagaggcgtcgactgaatcgtgtctttgatgccatcaggttcttttatcctaactaccctaccatggttcaggtttcaaagaagagaaagaagaaagtgactacgaggcgaagcaagatgccgaaggctacacccgaagctaagatagatgttgagattgaagagctccctcccatgagggccgatgaacttaaatttgaagaggctatctatttgatagcgcaaaaggttaagcctttggagatgcttctagagagtgatgaagaagaagatgacggggagtga

SEQ ID NO: 9620 - DNA, 324 bp, Zea mays
  Peptide Sequence Number=SeqID_51399
atggccgccgccgacgaggaagacgcgacgtgggagcgcgccatctccgccgccaccaaggccacctccgcacccaagatcctcactctcgacagcgccgtcaagtcctccatgggccgcctcccctccgccgcactcatcgggcgcttcgccgcttccctcgaggagttctccgtcacgggggctgccctctcctctctcacgggcctgcccgtctcccggcgctttggcgcctctccttccccgacaaccgtctctcggggctcgctgcgctcgctgctgtcgcggaggcctgcggtgccacgctgcgccacctcgatctag

SEQ ID NO: 9621 - DNA, 714 bp, Zea mays
  Peptide Sequence Number=SeqID_51400
atggagattattgcagaaacaagaagctcacaaagagattcttgtgttatgtcaagccttaaagatggtggaagtttccaggatcagcgtgaagaaggttacaagagcaagaccaagactctgaatgtgtcaatcaccatcatcttgctgttcacacagccatgcggcatcaacctcttcctcaaattcctcacctggtccgtctcagtgttccagattctcctcccctgctcatgcaaaccctgcaactgcaactgcagctgcagctgcaaccaaggctctgccgagaaggtgatacagacaccggttattaccacggcagacaaagaagtaacagagacaaggaacaaagatcaagatgatgagacggcgctggcacaagaagatatcaaaacggtaatgagaaacatagggtttaatttggaccaaccagagaacggcatggccattggcgatgattctgtagctcgggttttcgacgaggacgagccgagcctgcaggaggtatggcaggcattctcggtgttcgatcacaacaatgatgggtacttcgacgcatcagatttgcagcgggtgctcgggagtctaggattaagagaaggtctagggatggatgagtgcgagcagatgatcgccaagtatgacacgaacaaggacgggaggatagatgttgcggagttcaccagggttttggagtctgctggcatttgctaa

SEQ ID NO: 9622 - DNA, 882 bp, Zea mays
  Peptide Sequence Number=SeqID_51401
atgccggagcagaggaagggtcggtcgcggctcgccgccgtccgggtggggcggtcgccggcggcggcgtcgccgtcccgccgccgccgcaagagcgggagcggctcgacggcggcgcgcccggtgccgacgccgggcccgtcgcggtcgcggacgcggacgcggcgggaggggaagaggcgggcgctcgcgcgctccgcgtccgagccgctgctctggttcggcgacgcgcgggtccacgacgtgccgccgcacgggcccgggctcgggctcgggctcgattgcccgccgtcccctccgccgccgccgctcgagcgtccgcacacttgcttcgacgtctttgccccggagttcggccgctccccctcctacgcctccctcaccagtccctgcccccgggaggaggcgaaggtggtggtgagcgtgacggttgagggcagcgtcggcccggtgaaggccatggtcaggctgggcgccagcgtcggggaggccattgctgccgtggtcgagaggtacgccagggaggggagaagcccgcgcctggacccggccgcagccgagagcttccaacttcaccactcccacttcagccttgagagtctgaacaagaaggacagaatcggagacgtgggaggtaggaacttctacctgcacaagaacgattcaagcaacgacgggctctacctccagggccaggaggagcccggtgcagatccaagtggtggtgacatcagccggcactcctcctcaggagtaggacaagcatctggtggcgctacaagtcagcaccaggtcctcaccatcgtcatcagcaagctggataagattgggcggcggacgaggcggatctggaggttcatcacctgcaacaactgcgcatga

SEQ ID NO: 9623 - DNA, 354 bp, Zea mays
  Peptide Sequence Number=SeqID_51402
atgaaaggcgtgatctgggagaacgatggatcaattccaaagctacagatgaagaagctttggcttagcagaagggcggtgatggagaatggaaccgacctaaaggggaatatactgccaagtcctcaactgattactccttatcttgatagtagcttagcatataaagctagaaatagatggtccaaaagggtgccaaagcttgccacgagggacgacacctgtggagccacgaatgacactgccaatgacactattgtcatagtcattgatgacatagatgttgaggctaaggaggaagacaaggatgacgaggagaacgacgataacgaggagcctccccacatgcggtga

SEQ ID NO: 9624 - DNA, 222 bp, Zea mays
  Peptide Sequence Number=SeqID_51403
atgggcaggatgaccatgttggatgaagagaagactgggctgacgcagctcgaggggaagcacaccaggttcatcatcaatagtgacgacgagatcggacgagaggaggtggcagatgcgactgagacgagggcggagcttggcgcactgatgcctagggggctgctgctgccggaggggaggcacctgcgcttccacaacgacgaggatgacgaggaataa

SEQ ID NO: 9625 - DNA, 1125 bp, Zea mays
  Peptide Sequence Number=SeqID_51404
atgtcctccccctcctcctacagccgcacaggctacccccgccctcgccgcggctactcgggaaggccctcgccgccgccgccgccgccgcccccggacgcggcctccgagatcgtcagcagggattaccatctcagtgccgtgcacgccgccaacgaatccctgcgtcgtggcggcggcggcgacatccgctggcctccaccgccatacaggcaggggcctcaccctcaccaaccgcactatggctatggctatggctacggatacggatacggccaaacgtggcagccgggtccatcctatgggtttgtgccgtacaactacggccacccgcagcagcagccgccggggcctcagtacggctacggggctccgaacccgtacgttcacgggcacctgcagccgcagccgcatgtgcgtggggcagcgagtccagggttccgtcctggcgcgccccagctgactccgaggctggcagattacctccgacggtggcgctttgcaaagcagaggccgccacatcaagctgggaggtttattattctatcatacaatatacttgcggactatctggcccaggagcaccgctttctttatgaaaaaatatcaccttttattttggattggaactggcgcaaggataagttactgtttgagttcggtctgtggtctccagacattctatgtcttcaggaggttgacaaatttacagaccttgaacaagaaatggcaagccaaggatataacggtacatggaagatacggactggagatgcagctgatggatgtgctattttttggagaacaacaaggttccagttgcgttatgaagaagacattgagttcaccaagcttggacttcgtgataatgttgcccagctctgtgttttagagtcggtgggccttcagtatgtgcaaactgactctgttagtttatctacaagggatgattattttgccaaccttatttgctcccctagaagaagagaggataaacaagtatgcttggacttcaagaatgttggcctacaaaaagacatcatgttcaacaacatatgttgcattggatttgtggttatacaagaagggttcgagtctggaacaatgatatacatgataggctaa

SEQ ID NO: 9626 - DNA, 105 bp, Zea mays
  Peptide Sequence Number=SeqID_51405
atggaggattcggggattgctccgcagtccgcaccaattgcgcgaggcgactcaggtgaggggatagccggatatttcgtttatgtcgctgaatggaaaggttaa

SEQ ID NO: 9627 - DNA, 297 bp, Zea mays
  Peptide Sequence Number=SeqID_51406
atggccaatccatcaactctctgtctctctgtgcctgcagttgtggggcagcactccggcggttccgggccccgcgaggatggagatggagcatgcagctgtcccggtgctgggctgctggcctcctctcattgcagacgtcggttccgctggcagacggggccgatcgggcccgggcccgggagcgacacggccatggacccctttcccctgtcaccctctccgccccgcatggaccgcgcaaaccgtggtcgaatgccaaattgccaaggccatgtacaccacactgtacactag

SEQ ID NO: 9628 - DNA, 1065 bp, Zea mays
  Peptide Sequence Number=SeqID_51407
atgcgccgcgtcgcgctgttgctcgtcgccgccgtgtgcgcgctggcggcgccggctgccgcggtcgtcactgacggtcttctcccgaacggcaacttcgaggatggcccgcccaagtcggcgctggtgaacggcacggtggtgtcgggcgcccacgccatcccgcggtgggagacgtccggcttcgtggagtacatcgagtcggggcacaagcagggggacatgctgctggtggtgccgcagggcgcgcacgcggtgcggctgggcaacgaggcgtcgatccggcagcgcctggccgtggcgcgcggcgcctactacgccatcacgttcagcgcggcgcggacgtgcgcgcaggcggagcggcagcggctgaacgtgtcggcgaagatggacgcggtgacgctggtcatccacaacccgggcgtggaggaggacccggcctgcggcccgctcatcgacggcgtcgccatccgtgcgctgtacccgcccgcgctcgccaggcgggcggggggaaacaacctgctcaagaacggcgggttcgaggagggcccctacttcctgcccggcgcgtcctggggcgtgctcgtcccgcccaacatcgaggacgaccactcgccgctccccgcctggatgatcgtctcgtccaaggccgtcaagtacgtggacgccgcgcacttcgccgtgccccagggcgcgcgcgccgtcgagctggtgggcggccgggagagcgcgctcgtgcaggaggtccgcaccgtgcctgggtggacctaccgcctcgccttcgccgtgggagactcgggcgacggctgcgcgggctccatggccgccgaggcctacgcggcgcgcgccacggtcaaggtgccctaccagtccaggggcaccggaggatacaagcgcgccgtgctggacttcacggccatcgccaaccgcacccgcgtcgtcttccagagcaccttctaccacatgaagcccgacggcacgctctgcggcccgctcgtcgacgacgcctcgctcgtcggcctgcgcaagaagaagcccgcgcgccgcctcatgcagctcctgtaa

SEQ ID NO: 9629 - DNA, 552 bp, Zea mays
  Peptide Sequence Number=SeqID_51408
atgtctcctaatagattatttatagaggcaaacatatttgaaaacggcgacgctacaatagcttatgagaagaaggtattcatgcggttgttgatggagatcaacagtcaaattttaaaggaatggatgaagaggccacgactaaagcccacgtgtcacttacctcagtgctgcggccctgcgggggttgacagtggacgtcaagagcgtcgattggagatgggagaccgtaggctggtggccgaatgccgagctctcgatctcaaccgtggcccccgtacccacagtcgacctccaaatcctctgccatcgattcgtggccgccaacgcgccgagggggcggggagggtgggcatggacaaaaactggctcaacggcggtgagttgctcggcgcgtctaggagctcccggcggcgggcctctaggatggtggccatgatgcatgggctcaggaggatgttcgtggcgcacaacggcaagagccaggcacacagggatgagcagagcactacctttgcctctacatctacatctgttagcccaaacatatga

SEQ ID NO: 9630 - DNA, 330 bp, Zea mays
  Peptide Sequence Number=SeqID_51409
atggacgtggaccaactgccgacatatgacccacggtcggacgtggccaagaaggaggccctggatgcctcgcgcgccgacctcgctcgcgccctcgtccacctcatccccgtcggcgtgctcctctgcggccttctcctctggtccttctccgacactgacttcccagctggttggtggctacgctgccgggacatcgtctcagttgccagcgtcatggattcgactctttgctcctattcgttttctcgtgcatttggaaggaatggagaaccaaggtgtcttcgtgctagggccacgctcggttgccaaccgcggtctgctgcgtag

SEQ ID NO: 9631 - DNA, 465 bp, Zea mays
  Peptide Sequence Number=SeqID_51410
atgtgcgatgttagagtgactgacagcccagtgtcttctcagctttctccaatcgtatgccaagttgtgggtgcaccattatcagaggaactgaatacatgcagtgcagtggaaggaagtgatccgagcaaggagaagaacagtcttgctggacagaaggatggcggcggcctcttggaagtttacataaaatgggagtctggcaacctgatcaaagggttgaagctattgtgcaactcgtgcctttcagatctgaggaagcttatagaggctcatttcaaagaagtgggcagcaaacagcagcagcagcagttcatcttccttctccttggggtatgtcattcggctctatccatgtcatgctttcacccaagtgctctgtgctacgtgcttctcatcacaatggcgctcatctatgaccatgtactatcttggggaaatggaacccatgtaacaatagactaa

SEQ ID NO: 9632 - DNA, 327 bp, Zea mays
  Peptide Sequence Number=SeqID_51411
atggcgctcaaccaattgctccccgtatgttgcccggagaaaaaacacacaaaaataaactcttatctcggtgttattattattgccgtcgaagttacacgtctctgcaccaatttagatgacgctgatgtctctgttgagcgcgctgagtttggtcggagctcggcggtaatagtcatgtcgccgacgttccgcgtttccgtcaaagctgaccggtccaatgcgcgtcatgggctgctcctgattggccgcaccgcatgggtcccggccgtccagtgcggagtaacgaaacccacacacttcgcctctcgtgatgcgaggcaatga

SEQ ID NO: 9633 - DNA, 588 bp, Zea mays
  Peptide Sequence Number=SeqID_51412
atgaaagcgagggaggcgcgtccgagtcggcacggggctcgggatccgcctcgtgggcctgggggcccgcccgccgtgtccgggcggccacacgatccgtggcccgatcggtgtggtgatgttgatcaacccgttaataacattcttatgttgcataacatagctgaaaaccaacgtctcaacccctgtttcttaaagcacgggacgcagcccagacccggtcttcattttgtgtgccttcgtcatgaggaagaggcttgcattctgaagacgaagcttcctgtgatgacttatgctgaaaaacaaatggttaattatgtttttgaggaccttttagatttggctggtgtagagaagcaaggccttgatactgaaataccccattctcagtggcttatgaaggtgttgagggtcttcttcttcactgaaggtcttcaagacaaaaacaccttcggcaagatgatacaaatgctcgccgaagctatcatcaacctcgtctttgcttctcaagacgaagactttgtgtacaagcaacgttgcagaatgccgaagctcaatagcttcggctcggaccaagcaaagaaataa

SEQ ID NO: 9634 - DNA, 1086 bp, Zea mays
  Peptide Sequence Number=SeqID_51413
atgactgtcatgatgcctcagcgccaccgggctacagccaagaagcccatgtggataatcgtgctcttgtgcatggtttgcatcgtgctgattggggcttacgtcttcccaccgcggcgcttctctaactgctacctctctgcttcaagtgtatgcgcacctttcaaggattggctcccttctatgggccgtcgggagagaactgacgaggagattatttcatctgtagttattagggatatcctttcaatgcccatgcctatgccaaaaaatccaaagattgcccttatgttcttgacaccaggttcattgccctttgagaaattgtgggagaagtttttacagatagtgggacatgagggaagatactccatctatgtgcacgcatcacgtgaaaagcctgttcatactagttctttgtttgctggccgggatattcacagtgatgcggtagtatggggattgatttcaatggttgatgctgagaaaagattgttagcgaatgcactggaagatgttgataatcaagtttttatcttgctttctgacagttgtgttccactgcattcatttgattatgtgtataattacctcatgggaacgaatgttagcttcattgattgtttcaaggatccaggtccacatggcagtggaaggtactctattgagatgtatcctgaaatagacgagagggattttagaaagggtgcccagtggtttgcagttacaaggagacatgctttaatgattctggctgacagcttgtactacaagaagttcaagctatactgcaagatggtagatcctggtgggatctctaattggtctgttacacatgtggattggtctgagggaaaatggcatccaaggtcatatagcgctgatgatgtcacctatgatctcttgaagaacattacagcagttgatgagaacttccatgtaacaagtgatgacaagaaacttgtgatgcagaagccgtgtttgtggaatggatcaaagagaccgtgctatcttttcgctaggaagtttaatcctgaagcacttgacaacctactgaagcaatttaccagttacacatctgtttga

SEQ ID NO: 9635 - DNA, 1983 bp, Zea mays
  Peptide Sequence Number=SeqID_51414
atggccgccgccacggcggccgggcggctgctcctggccgcggcggcgctcatcctcgcggcggcgtccagcggcgtcaccctggcggcggctcaggccaagtcggaggccgatgtcctgagcgagttccgggcgacgctgcgggggccggacccggacggcggcccgccggcggagctgaaccagtgggcgacggggggcgcgccctgcgacggcaacgcgaccagctggcctcgagtgaggaggtgcgtcgatggccgagtggtggtcctgcagctggagggcctccggctgcagggcgccgcgccggacctggccctgctcgcgccgctccggagcctgcgctcgctcagcctgagcaacaacagcctcgcgggcgcgttcccggacgtgtcgccgctccccgcgctcaggttcctcttcctctggcagaacaggctcgccggggagatccccgacggcgcgttcgcggccctcagggggctccagagggtcgacctctccgggaacgagttctccggcccgatacccagctccatcgcgtcctccgccaggctgctgtccgtcaacctcgccaacaacaacttctccgggcccgtcccggaagggctccggaggttaggcgccaatgtccagctccaagggaacaaatttctctgcggggacatggtcggcaccccgtgccctccggcccctccctcgtcctcctcggcttcgtcatccggcggcatgaaggtactgataaccatcgccatcgtggtgatcgcggtcggcgcagtcttggccgttgccggcgtgatcgcggcggtccgggcccgctgcaacgagccatgctattccggcggcatcgaaacactaggcgatagccccgacgccgccaaggtcaaggtcacctcggctccggccgttaagatcgagaagggtggcacggatcagcatggcggcgcgacgcccgcggccgggaagcgcggcgggcggcgcgacgaccacgggaagctggtgttcatccaggaggggcgagcgcggttcgggctggaggacctgctccgcgcctccgccgaggtgctgggcagcggcaacttcggcgcgtcgtacaaggcgaccctgctggacggcccggccctggtggtgaagcggttcaaggacatgaacggcgccgggcgcgaggacttctcggagcacatgcgtcggctggggctgctcgtccaccccaacctcctccccgtcatcgcctacctctacaagaaggaagagaagctgctcgtcacggactacatggcgaacggcagcctggctcacgcgctccacggcgggacgaggtcgagcctaccgccgctggactggccgaagcgtctgaagatcatcaagggcgtggcgcgcgggctggcgcacctgtacgaggagctgccgatgctgatggtgccgcacgggcacctcaagtcctccaacgtcctgctggacgcgacatgcgagccgctgctgagcgactacgcgctggcccccgtggtgacgccgcagcacgcggcgcaggtgatggtggcgtacaagtcccccgagtgcgcggcgcagggcgggcggccggggcggaagagcgacgtgtggagcctgggcatcctcatcctggaggtgctgacgggcaagttccccgccaactatctccggcggggccacgcggacaccgacctcgccggctgggtcaactcggtggtgcgggaggagtggaccggcgaggtgttcgacaaggacatgcgtgggacgcggagcggcgagggggagatggtgaagctgctccaggtcgggctcgggtgctgcgagcccgacgtgcaccggcgctggggcctcgaggaagcgctcgcgcgcatcgaggagctccgggagcgcgacactggcgctgacgacagcagcaccgcctcgtcgttcttgagcgacggggaggcggcggcgtcgcggccagcaggcgagcagcagtcgcactccgcatag

SEQ ID NO: 9636 - DNA, 1410 bp, Zea mays
  Peptide Sequence Number=SeqID_51415
atggtggtcgtggatcaattgccactgttgggtccatatcagattgtactggcgatggcagctgaagccatggaagcactgtccaatgcatcaactgtcaattatgtagtcagggagaatgcacatcctgaaagctcagttcttagaacaaacatgggaaaagaaagcaaagccaataagatatgttttgagttgtcacttcaaaagcgaattggtggaagttcaagctctgtgaaaaagcatcccagcaagttaaaagacaagaagagtcgaaaacagatgacaaggaaagcaaaaggaagcatagacagtaccactatagaaggagatacaaatcatgaggtgtctgaaggagttaagggatctggtgcaagtgattcaaatgttgtaggttctaatgctgtaatgtgccctaaaaggaagaggacctatatgtttatctcaagaagttcaaaagttcaattcaataaagctgggagctcaactacaccaagatccaaaagtaaagaagtagttgatgtatcaacaacaaaaccagttagtgtatctggccctgatttaaaccagcttgccagagtagaaaaacaattcacatctgcacaggaagatcataactccagcttgacaaacagaggaccactgggagagctaaacagtaaatgctcccattttaggacacaagtatcaaagaagccactgaagagaggacttgtgaaatcaccaggttccagagaacttgtcagtctgttaagaaatgaagcatctctagttttgcagacaagcaggcaaagaagaaacatgtccaaagtccatgtcctgttgagccatagcatggataaggaaaccatcaaaatgcaaacaaagatattgatatattttggactacaagtggcggcaactatttcagaagctacacactttgttgccgaaaagtttgcccgtacaaggaacatgcttcaagcaatagctatgggaatacctatagtcacgccatcatggcttgaatgctgtagagaagcaaggtgcttcgttgatgagaaggcatacattatgagagatatgaagaaggaaaaggagctaggttttagcatgcctgtctcacttagcagagcccgcaaaaaaccattgcttcagggtagaagagtattaatcacaccaaacgccaagcctagcaaggagcttctgaagagtttagtagttgcagctcacggtcagccattggagagaatcacagcctctacaatgaagaagaaaatttttgagggggcctttgtactctcttgtgaacaagatcacagtgtttgcatgccattaattgagagtggtctggaagtgtttgactcggagcttctactgaacggtattgtcactcagaagctagagttcgccaggtatcgtctttttccatga

SEQ ID NO: 9637 - DNA, 3165 bp, Zea mays
  Peptide Sequence Number=SeqID_51416
atggcgtaccttcggaacaagtcgatggagttcctcaagcggttcgaggtgccggccaagaacccgtccgaggacgcgcagcgccggtggcgggaggccgtcggcacgctcgtcaagaaccgccgccgccgcttccgcatggtccccgacctcgacaagcgctcccaggtccaggcgcagcgccgcaacattcaggagaagcttcgtgttgcactctacgtgcagaaggctgcgctgcagttcatcgatgccgcccgcaagaccgagcacccgttgccggagatggcgcggcaacgcggcttctccgtgagcgcggaggagctggccgccgtggcgcgcaaccacgacgccaagagcctgaggcaccacaggggcgtcgacggcatcgcggcgaagctgaacgtctccctcgccgacggcgtcaggtcggacgaggcgggcgtccgggccgaggtctacggcgccaaccagtacaccgagaagccgccgaggacgttctggatgttcctctgggacgccagccaggacatgacgctcctgctgctcgccttctgcgcgttcatctccgtcgccatcgggctcgccaccgaggggtggcccagcggcatgtacgacggcctcggcatcgtgctcaccatcttcctcgtcgtcatgatcaccgcggctagcgactacaagcaatcgctgcagttccgggacctggacagggagaagaagaagattgacatacaggtcacccgtgacggctaccggcagaaggtgtccatttacgacatcgtcgtcggcgacattgtgcatctatctatcggcgaccaggtgccggcggacggcctgtacatcgacggctattcgctcgtggttgacgagtcaagcatgtccggcgagagcgagccggtgcacccgtctaccgcgaagccgttcctgctcggcgggaccaaagtgcaggatggatcggcgcggatgctggtcaccgcggtcgggatgcgcacggagtggggtaacctgatggagactctgagccagggcggcgaggacgagacgccgctgcaggtcaaacttaacggcgtggccaccatcatcggcaagatcggactggtgttcgcggtgctcacgttcaccgtgctcatggcgcggttcctagtggacaaggcacacgcgcccggcggcctgctgcagtggaggggagcggatgcgctctcgatactcaacttcttcgctgtcgcggtcaccatcattgtcgtcgccgtgcccgaggggctgccgctcgccgtcactctcagcctggcgttcgccatgaagaagctcatgcaggagcgcgcgctcgtgaggcacctgtcggcgtgcgagaccatggggtcggcgagctgtatctgcacggacaagaccggtacgctcaccacgaaccacatggtcgtcgagaaggtctgggcgtccggggcggcgcagacggtgagcaccgccaagggtttcgacgagctccggtcgtcggtgtcggagaacttcacgagggtgctcctggagggcgtcttccactgctccggctctgaggtcgtcacgggcaaggacggaaggactagcgtcatgggcacgcccaccgagacggccatcctggagttcggtctcgaggtggagaagtacatgggggtggagcacgccggcgccaagaagctcaaggtggagcccttcaactcggtgaagaagaccatggccgtggtcatcgcgtccccgaacagcgccggccacccgcgcgcgttcctcaagggtgcgtccgaggtggtcctgagccggtgcagctccgtcatcgacggcaccgggagcgtggagaagctcacggaggcgaaggcgaagcgcgtgggcagcgccatcgacgcgttcgcgtgcgaggcgctgcgcacgctctgcctggcgtaccaggacgtcggcggcgctggcgacgtccccggcgacgggtacacgctcatcgcggtgttcggcatcaaggacccgctccggccgggcgtgagggaggccgtgaggacgtgccacgatgcgggcatcaacgtccgcatggtcaccggcgacaacatcaacacggcgaaggcgatcgcgagggagtgtggcatcctgaccgatgacggcgtcgccatcgagggccccgagttccgggcgaagagacccaacgagatgagagagctcatacccaaaatccaggcacgtagctggagtaatgtgatggctcggtcgttgccactggacaagcacacgctggtgacgaacctgaggggcatgttcaacgaagtggtggcggtgaccggcgacggcaccaacgacgcgccggcgttgcacgaggccgacatcggcctcgccatgggcattgcaggaacagaggttgccaaggagaacgccgacgtgatcatcatggatgacaacttctccaccatcatcaacgtcgccaaatggggccggtccgtatacatcaacatccagaagttcgtgcagttccagctcacggtgaacgtcgttgccctgatggtcaacttcgtctctgcatccttcacaggaagcgcccccctgaccatcgtgcagctgctgtgggtgaacctgatcatggacaccctgggcgccctggcgctggcgacggagccccccaacgacgccatgatgcggaggccgccggtcgggccgaggcgacaacttcatcaccaaggtgatgtggcggaacatcgtcggccagagcatctaccagctcgtcgttctcggcgtcctcatcttcaagggcaagagccttctccggctgaacggcggcggggatctgtccgacgcccagctcaacacgttcctattcaacacattcgtgttctgccaggtcttcaacgaggtcaacagccgggagatggagaagatcaacgtgttcagcggcatcttcagcagctggatcttctcgggcggtcgccggcgccaccgcccgcgttccaggtcatcatcgtggagctcctggggactttcgcgagcacggtgcacctgagcgggaggctctggctcgccagcgtgctcatcggctcggtcagcctgttgatcggtgccgtcctgaagctcatccccgtgggttccggcagcgacgactcgtcgtctgccgatcgccacgatgggtaccagcccatccccaccggccccaacgccgtgtga

SEQ ID NO: 9638 - DNA, 336 bp, Zea mays
  Peptide Sequence Number=SeqID_51417
atggctggctggaactggaagctggatcttgtaagcgaaaccaacaacggatcactgcgcttgcgatcacgtctgcatctctctggtttgcttggcgctgccataggtggatggaggggcaggcaatggtcgcggatgggaggagagcagatcgagcccgcggagtccgggttgcaggggaagttgagacccgagcccgagctgagcatcacaacgcaatggttgcccgaatcaagcatttcgtcgaccaggttggaagccaaagccaaagagcccaagccgaagctgaagctgaaagtgagtgaactcgattggaagtttggaagacaggactga

SEQ ID NO: 9639 - DNA, 354 bp, Zea mays
  Peptide Sequence Number=SeqID_51418
atgccggcgtcgacggtgacctgcagccgcctcccaggcctgctcccactctttcccgtgcagttgccgaccggcggcctattgaatttgatcgtgatgatgaactatttgctaccgctggagtctcgaaatgtattaaagtcttcgaattttctactatctaaacttagttgcctgagctggaacaagtactcaaaaaatattattgcaagcagtgactatgagggtatagtaactgtgtgggatattcagacccgtcagagtgtgatggaatatgaagagcatgagaagagagcatggagtgttgatttttctcgcacagactcttcaatgcatctaatggttaggtcatag

SEQ ID NO: 9640 - DNA, 123 bp, Zea mays
  Peptide Sequence Number=SeqID_51419
atgtcagaaagtgctgacatctcccttgatgagcctgaatcgcaagttgtgtcttttggtttggatgatctacggcttgatgttatggatgagaataaaacaaatgaaacaatggagaaatag

SEQ ID NO: 9641 - DNA, 327 bp, Zea mays
  Peptide Sequence Number=SeqID_51420
atggcggtggcccctcctacggcggcggcgctggagcagctaagcagcagcaagatgttcgacggcttcaatctccgcttccgccaccagagcgccacccttggctgcgccatgactttctccatctacctgcccccgtccccggcgtccaaccttcccgtgctgtactggctctcgggtctcacctgcaccgacgagaatttcatcataaagtccggcgcccagcgcgccgccgctgcccacggcatcgccctcgtggcacctgacacctccccacgtatgtcgaaattgagccaactcctccctctgactgtacagggtttctag

SEQ ID NO: 9642 - DNA, 309 bp, Zea mays
  Peptide Sequence Number=SeqID_51421
atggccctccgccacgctttccagcgcctgctccgcccaaaggagacaggcgcactaacgacaagcgcatccgacgccctgggcccccaccgccgcacgccgcgcgggcaacgcaccaccgccacgccgcgccgcagcaaaagcgaagccagcgggaatgcacgatcgccgccgccgcggcgcctacttccctgccccgcgtcgctgcggccgtcgccgactcggcttgaggaagcggttgcttgccaatgccagccaggcgcgcttatgggacttcgatggggcagtgatttgtgtggaacacgttaa

SEQ ID NO: 9643 - DNA, 420 bp, Zea mays
  Peptide Sequence Number=SeqID_51422
atggcccccaagagagcgacatcgaaggctgtcacttccatcgacgatggagtgaaggcggccctcctagctgaaaagaaaggcaagggtcccctcgcggatgacatctctcaggaagccttcgacgacgaggccgtcaaaagcaaaagacaacgccaagacaatccccatgcacaagagggcactgcgcgcacatgcagctctgaaggagcacctcaggcacccccgccaggtttcactctaccagaggcagaggacataatcgaagatggcgaaatcttaggcatttcagccgaagaccaactcaaactgcgacccttgcatcaagaacaatcatttacagaagcagaaagaaatacttgcagccaagcgccagcggatcaccatgcaagccaaggtccgccatatgatattagatga

SEQ ID NO: 9644 - DNA, 357 bp, Zea mays
  Peptide Sequence Number=SeqID_51423
atgtacgtgcgccgcgtactccagctgcgccacggccgcgtactccagctgctggcagctacaccgggagctttatttgaggataaaccccaatctgcaaatgatacatggagaaaactccactctgatcctctactcctaataaggcagcgggagcaggatgcgatttcaaggattaaaaacaatccaatcaatcaagatggccgagataaagaaatctgttttgtgaatgattttgttgtggtgcttgttgatggtttatgtgatgtggatctatcattgtgcgatacagaattaaatttgtatatctatgtgattatgtgtataaaaattggtgattgtgatacgaatctctag

SEQ ID NO: 9645 - DNA, 258 bp, Zea mays
  Peptide Sequence Number=SeqID_51424
atggcgagaagcaagagcgacaagggcaagcgtgagaagaaagcgagcggggatccagggcttggaggaggaggactccaagaggagggctccgaggaggacgactccgagaaggaggacaacgatagagcggacgagggtggctacgacggcgacgacgagggaggcaaggatgacaacagtaatggcggtagcggcaaggacgacagtggcggaggcgagggcggcaacaccgatggcaaggcaccaccggcttag

SEQ ID NO: 9646 - DNA, 165 bp, Zea mays
  Peptide Sequence Number=SeqID_51425
atgaacgcgcccgagtctttccctaagcccctagagccccgtcgtggctgtcccccttatctcctagtgttagaaactggtatatcagccatgctcacggttaagagcggtcttggaatcctctttgattacaagaactttgaatacttttatgaggatgattaa

SEQ ID NO: 9647 - DNA, 123 bp, Zea mays
  Peptide Sequence Number=SeqID_51426
atggcggtggcgcagatttgggcagcaggaggacggtggcacgagctcatgttcgggggagggaggggcgcctcgcgagcggggcggttgcgcgacggcttcggggctgatataaatatctaa

SEQ ID NO: 9648 - DNA, 258 bp, Zea mays
  Peptide Sequence Number=SeqID_51427
atggaggaagctattggatctcagttagagaacgatgaagaggttcgatgtgaagaagatgccaatgataaaggtatggcttgggctatacctagccataatggctcctccgcccctgggtgctccaccaccgtcggccaggggttgtcacagcgttctagagtgctggccgactttgtgacgccgacgtgtggctccactttttcaatggtagggcatggcacgaaccttgacgtgctccctctcatgttgtcctag

SEQ ID NO: 9649 - DNA, 402 bp, Zea mays
  Peptide Sequence Number=SeqID_51428
atggccggagccggcgactctgcgcgggcgaagaaggcacggggcggttgcggttggccggggggtctcagttcaacgacacggtaccggtactggcgatcactggcgactaatcgacgggacagagaaaatgggggagagagaaaagaaggtccagcagggaaattcacctcgggtggggcaggaacggtggcgaggttgtgcctgacgatggcggagcacggtcgcggacgacagccgagctctaccggcggcggattcgggctcaggaggcctggcgacggggaggctctgacgagcttgaaaagtgggtgcacacagctcgggttttcaattcaaaaccaaaccaagtttcaaattcaagctaattcaaacatgtgcaacaattcaaagaatatttaa

SEQ ID NO: 9650 - DNA, 1104 bp, Zea mays
  Peptide Sequence Number=SeqID_51429
atggtgctcattcctgggaagaggaatgaaaatgggttgatgtttgtggacatcaacattgcgggtcagaagcgtagtgctcttattgatacgggagcatcggacttgttcatgtcggaaaaggctgcgaagaagcttggtctgtcgattaggaaatcgaataagaagatcaaggtagcaacttctgagaaagccccaactgtaggagtagttcgtgatgtggaactacaaatcggcgaatggaagagcaaggaagaattcgaggcaactctgcaactaggggccgatcaaatccatattgccaccggttcatcaacaaagaatattgtgccggtgcatcgggatgtgaaagttgggactaaggtgttatcgtcaatccaactagtcgaagatgtttcgtatgggagaaacattaaatcatcgaaacggaatgctacgaaagccccttcggaagtgttagtggcgcaagggacagatatgaagcctgcgggaccgactgtggagccaacacctttgggaaaggtgggtggtgcatcgggctccaagggaaaaggagcaatgcaaggacagtcgagacgagtaaatgctacgagtaaggtacattgtaaacactctgatagtgttttgaattctgacttgttggcttggcaaggtcgtaggggccctttcaaagttcataagcaaggaggccaaggaactgtgggcagtacgaagccaaggtatgagaatcgaagggattccaacagaaacaagtcaaaattggggcaagttatagcggagacttcttgccagcaaaatgtaccaacgagtggaacggttcaagataagaggcgacggaagtcgaggcataagttccgaaggaagggacaacctgatcgcaagacgagtcgggaagaagccgaggcaacgagaaagtttcacagtgaatcaagtcagtgtcatccagaaaacgcaacgagggcgttgcgagattgggtgggggagaatgtcacgggccaaagtgcaaagcccgtgaccatgccgcaagaagtgcccatggaggtctatcgattagatgggggacatttagcccacaagaattggcccgattcagagagctactaa

SEQ ID NO: 9651 - DNA, 396 bp, Zea mays
  Peptide Sequence Number=SeqID_51430
atggaggaggcaaaagatctagaaagtttacctatacatgaacttattggatcattacagacctttgagaagaatcctgatgaggcaaaaccaatttatataaatgtgaatttggtgatttttggcatcaattggaataaattgcatagtaagaaatatatggtatttatgaataggtacaaggaatcaaaatggaaatggaatgtttataagatttgtagtgtcacgggccaaagtgcaaagcccgtgaccatgccgcaagaagtgccccatggaggtctatcgattagatgggggacatttagcccacaagaactggcccgattcagagagctactaaagaagcctatcagattgaagcctagttggcccaatgatgaagacatggcagcttag

SEQ ID NO: 9652 - DNA, 177 bp, Zea mays
  Peptide Sequence Number=SeqID_51431
atgaacaatcctctgaaggcgaagaaaagatatacctttgatgctaaggctgcaaagaagtatgcaccaagagggacgatgccaaggctacacaaacagaagtggcttgacagactgttatgcatacagaggaagttaagtggcgtgcttaagtctgagcataattttattaggtag

SEQ ID NO: 9653 - DNA, 2271 bp, Zea mays
  Peptide Sequence Number=SeqID_51432
atgggggctgagaatggaaagggaaatgacgtttctgctgaatcaccgacttcggttctcgaagatgaggagaagtgcaaagaggaaatcactaagttggaggaggaaacagttctagatgccaaaaatggagatacttctcttttatcagaggctatggtcgaggaagaagagaagctaagggaagctcggttgaaagaggagataaaacaaggggagcctgaagagtcagtgcacttgaatgatactcagtttactagattggacgagcttttgacccaaacccagatgtactcagagtttttgcttgaaaagatggaggacataacatttgtattccgctctcacctttcttttgcgtgcacttttaccattttaattggtctgagtgtacctaagcctgaagctgctcagacaaagagaggtcgaggttcaaaaagaagagctgctaaccagtacaacaataggaaggtcaagagggcagttgcagcaatgcttacaagatctaaagagggagagactgagaacgctgaagatgaaaacttgactgaggaggaaaaaaatgagaaggagcagggagaacttgtaccattgttgactggtggaaaattgaagtcttatcagcttaaaggtgtgaaatggttgatctccttatggcaaaatgggctaaatgggatccttgcagatcagatgggtcttggaaagacaattcaaacgattgcttttcttgcacatttgaaaggaaatgggatgaatgggccttatttgattattgctcctttgtcgactctttctaattggatgaatgagattgcaaggtttacgccctcaattaatgccattatttatcatggaactcagaaagaaagggatgagattcgtaggaagcacatgcctaaagtaattggccccagttttccagtagttgttacttcttatgagatggcaatgaatgatgcaaagaaatttttgaggcattatgagtggaaatatgttgtggttgacgaggggcacagattgaaaaacttccaatgcaaattagtgaaagaattgaaacacttgcgtgctggcaataagctcctcttaactggaactcctctgcagaacaatttggcagagctatggtcattgttaaatttcattttgcctgatatttttcaatctcatgaagaatttgagtcatggtttgatttttcgggaaaaagtaatggtgaggtgtcaaaggaagaaatggaagagaaacgaagggctcaagtggtagctaaactccatgctatattgcgcccctttctccttcgaagaatgaaatctgatgtggagcagatgctccctcgtaaaaaagagatcatattatatgcttcgctgactgagtaccaaaggaatttccaagatcatttgcttaataaaactttggaatcacatctacgagataggggtgactcggggcgtggtatgaaagggaagcttaacaatttgatgattcagcttcggaagaattgtaaccatccagatctcctagaagctgcctttgatggatcatgtaccttccttgttctcatctttagccagtggacgaaggttctggatataatggattactattttagtgaaaagggatttaatgtttgtaggattgatggtagtgtgaaattagaagaaaggagaagacagatccaggagttcaatgatgtgaacagtgactataggatatttattctcagcacaagggcaggaggtctgggtatcaacctgactgcagctgatacgtgtatactttatgatagtgattggaacccacaaatggatttgcaagccatggatagatgtcatcgcattggacaaaccaaacctgttcatgtttacagacttgcaacagcacaatctgttgaggtattcactgtttctcttttctatatgtggacctttttgtgtcgcattttgaaaagagcttatagtaagttgaagctagaacatgtggtgattggaaaagggcagttccaccaagaacggaagcagagtaatgatcttgttgaggaagaagatctacttgcactactccgggatgaagaaactgccgaggacaagatgattcagacagatatcagtgatgaggatcttgagaggattcttgatcgcagcgaccttattgctgatactagtgataaagagaaggcccaggctagtgctgatgcagttcccctcaaaggccctggttgggaggttgtgctacctactggtactggaggcatgctctcaacgctcaacagttaa

SEQ ID NO: 9654 - DNA, 1851 bp, Zea mays
  Peptide Sequence Number=SeqID_51433
atgtggcgctgcgtttctcgtagccttagagctccatattccaacagatcagttgccgctaactctcttagatctaacatttccagtttcttctccactcatgctgggtccccttatacaatagtggatcatacgtatgatgcagttgtggttggtgctggtggtgcggggctgagagcagccattggtctttcagagcatggatttaatactgcttgcataactaagcttttcccaactcgttcacatactgttgcggctcagggtggcataaatgctgctttgggaaatatgactgaagatgactggcgatggcacatgtatgacacagttaaaggaagtgattggttaggtgatcaggatgcaattcaatatatgtgcagggaggcaccaaaagctgtgattgaacttgagaattatgggctgcctttttctcgaacagaagatgggaaaatatatcagagagcatttggtggtcaaagcctagactttggaaaaggtggacaggcttatcgttgtgcatgtgctgctgatcgaacggggcatgctctactgcacactctctatggccaagctatgaaacataatacccaattctttgtggaatattttgctctggatctattgatgaacagtgatggaagctgccagggagtgatagctttaaacatggaggacggaacactacatcgcttccaggcttcttcaacaattctggccacagggggatatggtagaacctacttttctgcaacttcagctcacacatgcactggtgatggcaatgctatggttgcacgtgctgggcttcccctccaggatttggagtttgtgcagttccatccaactggaatctatggggctgggtgcctcattactgaagggtctcgtggtgaaggtggcatccttagaaatagtgaaggtgaacgcttcatggaacggtatgctcctacagccaaggatcttgcttcaagggacgttgtttcgagatctatgaccatggaaatcagggaaggtcgtggtgtaggacctttgaaggatcatatctatctccacttgaatcacttgcctccagaggtgcttaaggagaggcttccaggtatctctgagactgctgccatttttgctggtgtggatgttacgaaggagcccatcccagtcttgcctactgtacattataacatgggtggaattccaacaaatcatcatggagaggtagttactatcaaaggcagtgatccagattctgtggttcctggactgatggctgctggagaggcagcctgtgcatcagttcatggtgctaatcggttgggtgcaaattcccttcttgacattgtcgtctttgggcagaagcagaaacctttggaaaaggatgctggtgcgagaacaatttcatggttggacaaaataagaaattctaatggttctcttccaacttcaaacattcgattaaatatgcaacgagtaatgcaaaataatgctgctgttttccgcacacaggaaacacttgaggaaggttgtcagttaattgataagacatgggaaagcttccatgatgttaagttgaaggatcgcagtttaatatggaactctgatttgatagaatctatcgagttggaaaatcttttgataaatgcctgtatcaccatgcactccgctgaagctaggaaagagagcagaggagcacatgctcgtgaagattttacgaaaagagatgatgagaactggatgaaacacacattgggttattgggagaatgagaaagtgagactggattatcggccagttcacatgaacacattagatgatgaagtcgagtcattcccacctaaagctcgtgtctattaa

SEQ ID NO: 9655 - DNA, 885 bp, Zea mays
  Peptide Sequence Number=SeqID_51434
atggaaagcgggtttcttgataaagtggaggacaatgcggctgttcgaacttggtttgagacaacgcagcaagaaaagggtgatagtttggctgatgggcatgtagacaagcgtttgtttcaagccctcgcccaattctggaatcctgcctacagttgctttacattcgggaaggtcgatttagtgcctacgatagatgagtatatgactttactccgttgttcaaagtttcaagtggacagggtctattcgagagcggtaaatgtgccaaccttttccaaaaagctgatgagtgtaacaggaatcagcgagcagtgggttgtcgcacgaattaagcaaaagggagacagtaagtgcattccttggaggggcttgaaagatgcaatcctcacacacccagatgtcaggaaaatgttagatgtttttgctttaagtatatatggcttggttgtcttccctaaaacattgggatatgtagatgaaacagtcactgatttattcgaccggctcgataagaaagttacaccgattccagcaatcttggcagagactttcaggtcattgagtgcatgccggaagacgggtgaaggggtttggggagttactggatacgccccattattggtgctaaggcaatatatatcaaggcaatttatacctgcgacccaagggttagctgattgtgaattttcgtacaaggatgatggttacagaaagaagattcaagagatggttagtgcgtggaaacaaactcgccgaatgaagaggttaactgtcggtccaatgacaactcctgggtatcatcaatggtgggctagaaggataaatgataatacacctaagttaaatcaggaagaaagccagtcaatagaagagcatttgtga

SEQ ID NO: 9656 - DNA, 810 bp, Zea mays
  Peptide Sequence Number=SeqID_51435
atgtcgaattcagattggtttgatcaagaagatataagcagaaacccatattggactaaagaagaaaacaaaagatttgagagtgctttagcaatatatggtgaagatgttcctgatagatggatgaaagtagcagcaatgattccaggaaaaaccgtttcagatgtgattaaacagtacagagaactggaagaagatgttttcgatattgaatctggaagaatcccaattccgggttatcttacttcatctttcacatttgaaatggttgataatcatgattttgaaccttacaggaaaaggtctaatggggctaaagggcctgatcatgagaggaagaaaggggttccatggactgaggaagaacacaggcggtttttgatgggactaatgaagtatggtaaaggggactggagaaatatatcgaggaatcttgtggtttcgaagactccaacacaggttgctagccatgctcaaaaatactttcagaggcagctttcaggagggaaagataagaagagaccaagcattcatgatattactacactcagtatcaccacccccaacactggtttttcagacaatcaatccgatcatgttcttgcattgcaccaaaaactgtcctccacccttcaaaaagtagaccaaaacaatgatgcttcagctatggctttgaattcaagtcaagagggctggtttacatcatcccagcagtatctcactgcttctaatggcctcagatttcagggccaaaatctttatggcaatggatttcatggagctcagcctccccaaagctctgtgttttaa

SEQ ID NO: 9657 - DNA, 1031 bp, Zea mays
  Peptide Sequence Number=SeqID_51436
aactctcaagaaaagaaaagaaaagaaaagaagagaaaatctttgagaaaaaggcagaaagaaaaacaatgttggagttaaggctaacacgagctggtttgctgaagaaagtgttggaatcaatcagagacctggtaactgatgccaacttcgactgcgcagcaactggatgttctctccaagccatggattccagccgcgttgccatgctctctcttcttcttcgccccgacggctttgagcattaccgctgtgaccgcaacatttccatggggatgaacctcgctaacatggctaggatgctacgttctcaagacaagatttctgattatgagatgaagctgatgcacattactagtgagaaccttgagatcccagaagctggatacgaagctattgtcaagatgccagcatctttgtttgctcgaatttgcaaggatttaggcacgattggagatactgtcatgatatctgtgacaaaagaagggatccagttcttcactagaggtgatattcggactgcaaatatcttttgcaggaaaaccacaccagtagctaaggagaaagaagctatttctatagagatggagaagccagtttcgctgaccttggcattgaggtacctgatttccttcacgaaggcaaccccattagccaagcaagtgacgattagcatgtcgtatgggcggccaatcgtagtagagtacaagatggaaatcatggatcacattaggttttacttggttcccaaggttgaagaagaagtgactggacctctggagaatgtggctgaagcggacaccaaaagtaaaccagatgtcaagcctgaagtggaggaaaagcctaaggaggtgatcgaaatcgaagagggaagtgaactaaaggcagagacaaaactgaagccggaaaagaatgatattgatgatcaaagtgaaccgaagttggggaccaagcctaaagagggtagaattaatggaactatgcttcaagtggaagataagacagaggttgaacttatggatgttgagtag

SEQ ID NO: 9658 - DNA, 1530 bp, Zea mays
  Peptide Sequence Number=SeqID_51437
atggagctctgttcctgtttgggttttgaaaaaaaaaaagaaaaactttttaaggcgattaaagatgattctcgcgagttcgaattgtcatcattaaccgcattgtcacctttggatggtcgttattggggtaaagtgaaagacttggctccctatatgagtgaatatgggcttatttactttagggttcttgttgagattaaatggttgctgatgctttcacaaattcctgaagtcattgaggttccaagctttagtgcagaggctcagtcttatttgctaggactcattgatggatttagcatggatgatgccttggaagttaaaaaaatagagagagtaactaaccatgatgtaaaagcagtcgagtacttcttgaaacagaaatgccaatcacagccagaaattgccaaggtccttgaatttttccattttgcttgcacatccgaggacataaacaaccttgcccatgcattgatgttgaaagaagcaatgaccaaagtcatgtttccaaccatggataaattggttgaggcaatatgtaagctggctaaggctaatgcaagtgtttctatgctttctcgcacgcacggccagccagcttcacctacaaccttgggaaaggagatggccatttttgctgttaggctaagcagagaaaggcaagaaatttctcaagtcgagatgatgggaaaatttgctggtgcagttggaaactacaatgcccatattgttgcatatcctactgttatttggcctcaaatcgcagaacagtttgtgacttctcttggattaaagtttaacccctatgttactcagattgagacccacgattatatggcaaaactttattatgcaattatccggtttaataatatattgattgactttgacagagatatatggggatacatatctttaggatactttaagcagctaatgtcttttcgtggtcaaaatttggagcagataaccaaggcaggtgagattggttcatcaacaatgcctcataaagtaaaccctattgattttgaaaacagtgaaggtaatcttggtaaggctaatgaagacctaacttacctgagcatgaagttgcctatttctcgttggcagcgagatttgactgattcgacagtcttgaggaacatggggggaggacttggtcattcccttcttgcttacaaaagtgcgctgcaaggaataggaaagctccaggtcaatgaagctcggttaagtgaagacttgaaccaggcatgggaggtacttgcggagccaattcagactgtcatgcgtagatatggtgttccagagccttacgagaagctgaaggagctaactagggggagagcagttaccaaagaaagtataagggaatttattgaaggcttggaattacccgaagaagctaagactcatcttttgaagttaacgccacattcctacgtgggtgcagccgttgaattagccaagactgtagattcagctgtgaacgtgataaacggttctgaggtcttggaaacatgtcgttga

SEQ ID NO: 9659 - DNA, 804 bp, Zea mays
  Peptide Sequence Number=SeqID_51438
atgtcagcttatggccatcaaatggagcgggagttctcctctcagagtctcttgagtagggaagatactgtaatgttgcaatcctgtgaaagtaggagcaagggagtagtggagattgagaaagcaagtgatagctaccattattgcaaggcttttgctttacatggggagctcaacagcttggaagaacccgagattcctccagtctgctggaatctagccattcattatatcgaagggggagaatatgaacgagacttaaatttcacgatttcaatgattgagagcttcttcgatactatttcaccatcggacaatcatttggatgctgtgttaatggacatagatgacatccttgcttcaaatcatacatactcccatcaatcaatgcaccagcaacagttcaaccaatatggctctaacaaaccaagtggttccatcgaagatgcggccaatctgaagcactggcgaatactggaattgtatgtgaaacttaagtcaagaggatggtctttgattctattatcaaggaagcctgagagacagcgaaatgttactgctgaacagctcaaggctgtgggatttaatggttggtcttctttgattatgagggcagatagcgaaatggaaatggaaacatgggaatactttcgtacacgaagaacagcaatgaaagaagaaggcactcaaataatcagtgtcattagcagccaattggatgctttaacgggctcatctttgggaaaacgtgtttttaagcttccaaaacctctgcattacaattctcaaaccccaacactttga

SEQ ID NO: 9660 - DNA, 252 bp, Zea mays
  Peptide Sequence Number=SeqID_51439
atggcccagccccacgcacgctcggtgtcgcgttatccctctcttgtgttggtccttcctgcgaaagggcttgttggaaccgtagagtttcttattgggatcgagtggcgccgtgtagctacatatggcgtggatagcgccaccgacgcctcaaccaccggtcggagtgggtcactagagcattggggagcatacaccgacaaggggcgtcaccgtggtggatgggtgtcgttgcctgatgcatcgggctag

SEQ ID NO: 9661 - DNA, 1086 bp, Zea mays
  Peptide Sequence Number=SeqID_51440
atgggaggaggtgaggttgaggactacgggtttgccgttgtggcttccattgacggcgcggcaggaggaggagatggcggacgcaacggcgcggggcaggaacgtgctgcccatgccgtcgtcctgatgctgttgctcggatttgaccgcagacgcctccaagtccaaggtgacactgtacagtacggctgtagtgtcgagggtgctgttctcggctcctttgataatgatctgttaccttctatagaattggttacaaaaatgatagaggatgttgagcttctagaagaaaaggctaaagtggccaaacatgaattgtccgttgctgggacaggcattctggcaaaagttgaggagctcagagaaatgataacttatgcgaaggaagcaaatgatatggtcttcccctctaacccacatgctggtaaggttttaggcgagaaagctattttaaccacagaggcacgtgagcttctatcacgacatcagaggctttcggatgagaggaataaatatctggtgataattgaagagatacaccaaattcttgctgaaagattggttgctgcacaacaagaaattgcagcagctgagaaagaaaatgctgaaaaggaggctgctgctcaggcagtactcgatgaacaggaaaaaatgatgaattctatcgtagaagaatcaagaaagctgcagaaagaagctgaggagaacctgaagctgaaggaattcttggttgagcgcggtcaaattgttgatatgctgcaaggtgagatggctgtgacatgtgaggacgtttcgttgctcaagcgagtggtagatgagcgcctaccgttgagcaagttgcagcgctcagctatgtcgagcctctcttcttcactgcattcttctcatcacaagagctggacttcctcggataaagccattagatctccagataagcacacccttgctgaacctgcaagcccagtggggaaagatctggatggcaacgagtgcaccgtggaagtgtcagatggcaacgacagtggtgaaggcattttgaagcgcgtggattccaaggaggatgtcgatggatgggagctttgctga

SEQ ID NO: 9662 - DNA, 522 bp, Zea mays
  Peptide Sequence Number=SeqID_51441
atgcagttgatggacgacccaaggaaggatggacatgaccagtggatgctcgccaagcaagtaccctctagcagacactatctagtatggattccagggcagcaggctttgcaagcagccgaatttgcaagcagcaaaagaaagcaggcggagcagtggagcacgggctgcacatccgaagcaggcggagcaaagcaaagcaggcaagcagccgtggagcagtggaggtggagcacggccgtgcggccgccggccagccaacgcccaacgggtcaaccggacaagcacgcgcgcacagcaggaaggcagaggcagccaccagccaggcaagaccgcagcccgcaggaagcagaagccagagacggaggtgggcaggcggccgcggacggacaggcggtcggccggccgggcgagtcgcgagcggacgtcttgtgttgcagcggctgtgttgcggcggctgtgctgtacctccttgttttggttgatggtgtgacttggcctccatccctgccaccgggatag

SEQ ID NO: 9663 - DNA, 330 bp, Zea mays
  Peptide Sequence Number=SeqID_51442
atggctgacgggggtatcggcgatcgcgagccgttggattacaaagcaagcgctcggattagactatcgccacatcgaatcggtacacattcacccccatcggatctgaatccaaaggctcatattttaaagaaccctgaccccattggggcggtccagatcggaatgaacggcacggatgacagcccacggccgcgcacagcggaggttggccggaatttggccgagtcggcgccctgcgcagtgagccccaacgacggagaggggttattccgcggcagagttggtgcgacggcgagaaatcgtcaacgatctggtgcccccgcctaa

SEQ ID NO: 9664 - DNA, 174 bp, Zea mays
  Peptide Sequence Number=SeqID_51443
atgaaggcgataataaatacggaagttgcggtcaataagggtgattcggaaattgcggaagattggtttgatcaagctgctgagtattggaaacaagctatagcgcttactccaggaaattatattgaagcacagaactggttaaagattacgaagcgttttgaatttgaataa

SEQ ID NO: 9665 - DNA, 339 bp, Zea mays
  Peptide Sequence Number=SeqID_51444
atgccatactcccaggaaaagctcgaacaaccttcaacaaaagggtacctgtacccgaaaccgactcaggtctccacaaagttgtatgaccatgtatgggggctgacgcctgcccagtgccaaaaggtcaaggaagttggtgaactgatgacagggaagccagcgaccgaagcctcggtgaaaattccttgtcggcttaggtggaaggcgaagaaggccccctttcggggggcccgagccatcagtgagataccactctggaagagctcggattctaaccttgtgtcagacccgtgggccaagggacagtctcaggtagacagtttctatggggcgtag

SEQ ID NO: 9666 - DNA, 177 bp, Zea mays
  Peptide Sequence Number=SeqID_51445
atgggcgaaagcctgatggagcaatgccgtgtggaggtggaaggcctacgggtcgtcaacttcttttctcggacaagaaacaatgacgggctcaaccctggacaggcggtggaaactaccaagctggagtatggtaggggcagacggaatttccagtggagcggtgaaatgcattga

SEQ ID NO: 9667 - DNA, 2364 bp, Zea mays
  Peptide Sequence Number=SeqID_51446
atgtgtttgtactccatgtatatttcttctcggaaaagtactactgcatgcatcctgtgggccctcatactgcagcatcttgcattgcagattgacatgatatatttggtgctaaaagtactccctgaagattcaagggaatctcaaacagctcgtgttttgctctataaactgttttatgatcagacagaacatggtctcactcaatttctgctgaacttgttcagatcgtttgatagtcacaagcaacccaaaagtgatctagtggatttattagaaacaattcatatcatgctacagctcatggaaaagcttcaagcacgtggtgcattaagggttgcaaaaaagacaaaaaaggtcagaagaaagaagtccacaaatgataaaaaggagaattcagaacccaaagtggataatgcagaaccaaacgatgctaatcctacagatggaacgaaatgctcacctgaaacacttccagatttgagaagcgagggtcctgctttagaatcttctccctcagaacctggaaaagtagacactagtggcgcacatgtactggatacacttgtggacactgtagttaacattgagagtaccgcacatgctgaaggtgacccatcttgcacagacagtggcgtaatgaagagaaatctcattgaagaagagggtgagacttcagattcttcagttgatcaccaacctgctacaagtgaagttgattttaatgtttctcggttaatatctagtcttgcaaacaattctgttgtgcaaaatatttgctggctgttgaagcattacaaaagtaactcctaccgtacaaaccattacataatatgcatgctacggagattctgtgaagacctagagctgtcaccgatgctgtatcagctatcacttttaacaactttctatgatatattagcggaacaaaagttgtctagttcaaaggagtacacaaacattgtaaattttctttctaaagttgtgaggaaaatgttgagaacaataaaaaaacagccactgctatttgtcgacatactattttggaagacgcgaaaggagtgtcattgcattgatgctgatgcactactgaatgagcttaagaatgatgttggaagcaaagacagtgaaattggttcaagtaaggggtggagagatcgaataaatatagcagattctcttggtgacgatgaagttgacgtagttataccgcaggcaccttatgatgctgataaggatggagatctatcagctggtgaacatactgatgactttaggaagagtagtactaaatataaacggagcagattgtcactttcagatagtgaggctgatgaaatcgagaggttcttgaaccatgtatcaagagattcggtgcccaaagttccaaaacgacgaggtcgttctctttttacggaagagcaagagaggctcataagagacctttatgaaaaatataaggatggtcctaaatgcagtcatataatagctgagtctttagaccccagcgggaagatatcttctgctcaagtttctcgtaagcttacacagttaggtctcaggaatgtcacaaggagaaaaaaggttgcaggcccagaaggaaaaaattacacacggcaagtgatgaccatgatgacacaagtcagagaaaatcatctgatgaagacacattacaaatcaaaaagtaagaaagttccattggtggatagttcactgagtggatcacagcatcaagaagctcagcatgacccagactctgatgatgcgaccataggatccatgattagaagtagaaaaaagaagaggttatccacgtcagattttgaagggaatgtacgaaaccatcaagaatcttcagacaacaccaaagccaaggactgttcaccgattatatcccaacatgagaaagcattgcaagacatttatcctgatgatgagaccattggatccatcattagaagtgtgaaaaagaagagatcagtgacatcaaatttctcagcgaatatagaagcccaagagtctttgagaaatattaacctacaagatgaaactgttgtttctaatatcatggatgcttctgtaaatcatgggtctgatccagtcaataacagtgacaatactgttgaagatgaacttttggatgattttgaaactgagctagtcaataacggtggcaatactgttgaagctgaacttttggatgattttgaagttgagctagatgatcatgagcatactgaccaaaggatcactgatgatgaaattatgactgaatcagggaaagcaacaaactccgatgctaagggaagggctggtttgaaaagaagacacagaatggttattgacgatgaggatgatgattag

SEQ ID NO: 9668 - DNA, 213 bp, Zea mays
  Peptide Sequence Number=SeqID_51447
atggggaaaatgtctttactagaaaaggcagacaggatagctgtgtctcattatattaagatagaagaaaagtacgagacaaaaccgtctaaaacattgccagttatgataacagtggttgagcagcttggaggagccctcggggagtccggacttctagttatcccttgtgtttttgcacacattaaccaggttctcattgcaaagacataa

SEQ ID NO: 9669 - DNA, 723 bp, Zea mays
  Peptide Sequence Number=SeqID_51448
atgcccgacaccgaaggcggccaccaccgcggcgacgctgccgttgcccgccagctggatctcgtggcacctcccgctgcaccggccaccaccagcagcagccgtgccactaccactgccactgccactgccaccgcccgtcacgacgatgaggaggaggacggattcaccttcgccgccgtcgccgtgccgtgccccgtgtacgccgtctttggccgcccacggtggtcgccgcagaagcagcgtcaacaggaggaggaggaggaggaggaggggcccgctggcacgggcgcggccaccgcgcggcgggtgccgctcgggcggctcctcctggaggagcggtggtgcgacgacggcgcaccgtcggtgtcggggaaacagcccgcggacgccgccgaggccgagctcgacggcgtgccggcggagacctactgcctgtggtctcccgcgtcgccagcagcaggatcttctcggcgggcgtcccccgcgcgctgccggacgagaggatcagccggtttgtcggtcctccggtggcagcggcagcggcgggtcgccgccggcaaggacaagttcgtgttcctggccggcgccggcgaaggacacgggagcgccgccaggggtggcggcaaatcgacgacgacgacgttcctcccgtggaagcaagatcttgtcgggctggttgcgagcgccatcaccttccgcccgagctgccagccgttctga

SEQ ID NO: 9670 - DNA, 628 bp, Zea mays
  Peptide Sequence Number=SeqID_51449
gcgcagccgcgcgcaggcaggagtttcggttcaattcccgagccgagccgagctcaccctgcgtgcgatgggccgcagggggagtggtggggaagaccatcggccgcagcaggagcaggaggagcagcgcgcggcggtgccgaggcgcggccgctggttggacgaggagcggccgcacccgcaccagcccgcggcggcggggtggaggtgccggtcctgcgcggcggcggcgatcgcggactgcgtcgcgctggggtgctgcccgtgcgcggtcgtcgcgctgctggccctggcgctcgtcagggcgccgctcgcagtgggccgccggctccggatgcggaggcggtccgcgctgcgcaggaagcgggtgcgcgacgtcgcggccaaggttgcgccgagggccgcgcccggcgcgggcagcgggacgacgccgctggacccggcggccgccgccacgccggtgcggcagcagcagcagcagacacagacgcaggccgaggtggaggagctggcgtggctggacgagatgtaccgggtcggccactggggcttcggccgcgtctccttctcggggggtagatcgctcgtgccgggaacttgtcgggtgcacggcacgtttggcgcctag

SEQ ID NO: 9671 - DNA, 657 bp, Zea mays
  Peptide Sequence Number=SeqID_51450
atggaaccttccatcaacgccctcctctgctccgccatcaacgctcgtctcccaatagcggaaggtggccgaggatccgcgccatcaacgctcgccatcggacccgtacgcgatatcagcaccgccatcatggaaggttgccgaggccgccatcaacgccatcctccccacgccgtcgatggcgcgcgcaggcaaaaccgtgcacctcctccccacgccgaatctccttccgccatcaacgcgctcctccatcaacgcgcgttaacggagcctcggccactttcccacaccgaatctccttccgccatcaacgcgctcctccatccccttccattcttgcatcgacctcggcaacctctgtccacttacgactacaaatggggaggcctacagttgatccccacatctctcccccaagacacagattcaatcattgatccccaggccgcagattcaaccaagattgttgcaataagggatatcatacctcctgcgcagagggctgcattcaatgatgtgtatattgcatacggattgatggatactgatctgcatcaaattattcgttcaaatcaagctttgtcagaggagcactgtgaggacactctaaaagattctgtcctctatatcttctgtgtctccagcaacgtcccctaa

SEQ ID NO: 9672 - DNA, 483 bp, Zea mays
  Peptide Sequence Number=SeqID_51451
atggtggttgtttggagcaagacaaagaccactaggttctatgcagttgtgtggcatgtgtggcatgatcggcggtcgcgtcttcacaaccaagaagacgagttcggtagaacaacaacgaatgccataaataatcaagcaagtaccaactacaacgcttgtctgctcgggtctgatggaacagataggctagtgaatctggtacaggaagttcggcataggaagaaggcctcgcgagccggaggccctagcctattcggcgcaaagaccaacaatagccctagatccagaagcgtatggtggcaatggttgaatacctcatgtcctaggggcagcgtagcagccagcgacagattagacgatagtggagcagccagcggcggagcagtcgacggcggagcgaaggtggcgatggaggggatggtggcagcgcggatggtggagctcgcgtcacctatccctcgcacacgacgcgaacagtag

SEQ ID NO: 9673 - DNA, 342 bp, Zea mays
  Peptide Sequence Number=SeqID_51452
atggagaaggaaaatggacagcaaatacgtctacaaatgaaactatttattctttgccctacggaacagtcgaaagagtttcttataactgctggtgtcactccttcgaaatttcgaataaccaaattgttcctttcactaccggaatctgtggctttgccgagtgctcggcgctttgccgagtgccgcactcggcaaagtctagctctcggtaacgaacgcgtttaccgagagcaggactctaagcaaagaattacactcggcaaaggtatcttgccgagtgccaaacactcggcgaaggcggcgctcgtcaaagggccgtcagcagccggttacaactga

SEQ ID NO: 9674 - DNA, 270 bp, Zea mays
  Peptide Sequence Number=SeqID_51453
atggagtgcagaggacatcagagcgagagagagaagaaaatttgtcgctgcggggtgggagctgtgaaggaccgccgcgcacgctggccatctgcgacctcactgcggctgtattggcttgccggtgaatcaccaaagctcgtgtacctgggctctgcgtgggtggtcacgattgggtatccaggcagggtggctaccttgtcagactccatctttgccgacgtggttcgacctccaccgcgattagggcatagcgccaccggattcacg

SEQ ID NO: 9675 - DNA, 303 bp, Zea mays
  Peptide Sequence Number=SeqID_51454
atgacaactgactttgacacagcgttagcttatgcgactggtggagacaccatagatgatgccacagatgactccgtagatgccgcctcagataccaacgtcaatgacgcctcaaatgacaccatcgatgtcgctgccacatatgctgtggggatatcctcctatggggcattcacaaatgccgtggcgatatgctccatggctgacacaaccacctccacacctggagtggccgaaggggtattcttggtttacgaccgcaggatcccaagtgtgtggctaggattagatctgtggccatag

SEQ ID NO: 9676 - DNA, 876 bp, Zea mays
  Peptide Sequence Number=SeqID_51455
atggcgcggtggcgagcaggggcggtggccgagaagcggcgacggtggccgagaaagcatggcgacattggtacgacgcgggcaatgtgccccctgctcagcatggggcggtggcacagggcgaatggtggcatggcggtggcgctgtccagaacaatggtggaggtgaagaccaaggataatgaacgagaggtggtggtggtggtgggggcactgggacatcacggcgggatgcttctgctgcacgagataagcctaaagcaaggaactaccttcatcgtcttcacagaagcagagctcgtcgaggcgaccgacaacttggctgacaagaacatcctcggccacggtggcttcggcaccgtctacaggggcctgctcaaggacggcggtgttgtcgcggttaaacggttcatctcgtcgatggccagcgagcagcagaaggagttcggcaagcagatgctcatcctctcccagatcaaccacaagaacatcgtcaagctcctgggctgctgcctcgaagtggagagaagccagttgtacatgcgcctagtagtattcccgaggcacgagaaggtggtgaggcaagaactgacctttgcgttatcgatctctggagtgaccggcgggctgtcagagagagagccgccgccattgagtgggctgctgctgtgcgagaacacggcgagcgggcgggcggtgctggggtcgggcacgccggcgggcgcgacgggcgggggcgtggtcgggagcggcgggcgggggcgggagcgtgcgcgccggcggaggcgtgcggcggcggcttcgatcctgttggaagacacgggagaaagaaagaagagcgagaagaggataagactgggtagcggtttaagataa

SEQ ID NO: 9677 - DNA, 2088 bp, Zea mays
  Peptide Sequence Number=SeqID_51456
atgaaagatctgctttacttgtttgctttgtttatgcctgagctcttgctatctctcactgtttcgtacgatctcaaagaagaagtggccacgtgcgagaggccaacgtcggtagtcaagctcatcaccggaagactcaaagacgccgacgtcgtcttcatcgacgctctgagagccgcaacctgcggcttcgacttccgcagaatcgtggagtcccatctgtgcatcccagtcgtctacttcctctctcgggattatggggtcaccggcgacgtgtctgaggctctgcagcgcactgtttgggctgccacctacgtcgtcaggaagcccctcgacgctggagaactcagcaggctgtggaaggtcatcaagtggtccaagtttttgctgcggcgcgcatggccggaatggcctcgcggcagccgagtgcgtcccgccgtcgtcggagcacttctgcccggctcctctaccgttgatggccgatgggaagacgacgacgacgacggccgcgaacatttcagggcggtgagggcaggaagaggccggaggaggaagctgggtgatcgccaataccacggcggacgatcctccggccgcggtggcggcggcggcgttgcaggtccatttggaattggaattggaataggacgacgccagccaactgagagactggagcaaatgaacttgacaggatggcagcaggagaacgatgacgacgacggcgtgtttcctatccaccaacagcctgcacaacagaaccgaccaggagtccagaccatggacgatgtccagaaccagcagcatggtcggtccctgttcatgcagcccggcccccagacgctcaatgtgccgcacaacaaccccatgatctcccccgacgctggctggccgagcagcagcaatgtcgcagccttcgctggcgccagcaacaccaccggcccaacactgctgcagggagtgtaccaagcaccggcggcacgaggagcaagagcagcatcgccggcaccgcatgcggtgtacgcaccaccagcgccaggactgcgccctccggtgtatcagcagcagcagcaacccatggcgcccctctacgacttcggcgacatggtcgcaccgcccgcggcagtaccactaccaataccaaccatggccgccaccagcggacaccagccgcagttcaccctcaaccatcaccaccagcagcagcaggaggaggaaatcagccacaggccgctgatcctttcacccctatggctggcagtggccctttcacgcctatggcggctgggcaggctggcagtggcacgggcctttggagcttcatcacctacaggtgctacagatgcaggagcgtacggggccgctgccgtggcacaggcacagcttcagtccccgaacgctggtgctcaaccagctgacagcagctttgatgatgtgctccgagccatgatggagatggactactatgccaacaactgcagcgccgaagcactcatggccccggctacagacgagttagcaggtatgcaagcagcagcagcacttggcagcagcggcaactacaacgctggaccattcatggtgacggatgcgaatggcggcaatggtacaccattcatggcgctggcgctagcgccacaggatcccgccgcgccaactgggaaccaaaaccaagtccaggtggagttgggagcaccggacatctacggcggatcactgctggtggggtctcatcaaggcggcgggactagtgcaatgttcaatggggatggtgacatggcaccaatgtttccttctaacgagtacggtgcgactgcgaacgccatgttctctctggatgcccttctggatttcgacgacggcgtcccaacgtaccctgaaggccaccaggtcgctgcagctgatagcaccaccgccagcaacgctacaggaatcatgtcaaatggcggggaaagtggtggctcgggaccgagctggaacatgggagctgcagctgctgatgaaggtctggatatgttggaagagttcttaatggaggacaatgagtctggttttcttctcccgcaagacatgaacaatggcctccagtag

SEQ ID NO: 9678 - DNA, 2580 bp, Zea mays
  Peptide Sequence Number=SeqID_51457
atgccccgcccccgttcacgcgacaaggcggcatccccgccgtcgccggccggtgcccggcaacgcacccccgcgccgtccccgtccacctctctccacctcggtatcggccccgcgtcccccgacaacgacctcggcgtcggatccctcgacctcaagcaacccgccgctgcgcctccccgacacagcctgctcctcgcgggcgccgccctccgcctcggcctcggccccgcctcccccgatgacgaccgcggcgccagatcccccaacctcagcccacccgccgccgcgcctccccgacgcagcctgcgcctcgcgggtagtcgaaacactctctccgtgtcgggcaggggcgagaagggggcgaggagggcccatgctcgagtctccgcctcctcccttgctaccaccgtctcgcctagggccgggaactctagtagcgatgacagcgggtcgggggcggatacggctttggcgagcggcgagcgttatggcagtgcggtgccgttcacgacccggtctcgtatcgtgaagcggcgggcggaggcgagccctcaggcgggcggggaggtggggatcgggtcggctggtcgaggccaggtgcctgacgaaatgctgcaccgggacgtggggacgccgtcgaagcggtgcaggaccgtattggtcggaggagtggagacagtgtatatgtctgatacagagagtgattctgatgaggattgcatgatgctgggtccaagtgggaccgaactgaatcctattgctgtggatatgactgaaaatgggagtctggatgatcctgccaatgcaagcgacgtggagtctttgcagacgcataatctgctagggacgacaaatgttggggtggttgagcaatcagtatatccttcaggaagtgcttcaagttttgaagcaagaatctctgcagatatgtatgtctcgagccattacagttctagaaagggaagcaaagtgaacgggaagcttgttttggagaataacagttctcgtgctgatgctaatgtgggctctgcagttggtaccagtccccgcaaattcaatccatacagcaaaggaaagggaaagatggttgcagaagatactttatcatctctggtctccagtgaggacgagccagatttggatccagtgcattccaaagagactcaggttaatccaggatcagtttctgcttctatggtgtcatatcgcagacaaaaagcaaaagagagagctatcaggttggctcctgaatttgctttctttaaagcagataaagatgagcatagtgaagatgatgatgaagaactagagcctggtcctgactctcaggactggccaggctcattcgtaactgctgcaaggatgtatgaagaaagagaagctaagttgagagctcgagagttgaattcttcaaagctgaacaaatctgcaaatagggtcattgtttggtcgccttcaaaggatgagaagaatccagcacgagctcaagctgccccatcacttacaagcttatgcttaaatacacttgcgaaacattctgaatgtattggaacacttgaaggtattccagaggagctaaagaataggctgttcaagattctgtgtcattctaggaagatgaatacttatcttctcaatgaactattatgtgacagtcctacagaactgcatctcagtgagtgttcatggctgagtgaggatgactttgagaaaacttttgggaaatgcagcattgaaagcttgcaggatctacagcttgatatatctgggagatgcatgcctgattacatattgccaactaccttagctaaggttcctaactgtatgccattgttgagaaaaatatctctgaagggaaattatcggctttctgataatggtttagtcacaatcatctcggctgcaccttctttatgttccataaatctgtgtgagtgttctcttctcacttcatctggaatcaatattcttgcaaacaagttacattcagttcttagagaactgtatatagatgattgcacaaacgtggatgctatggcaattcttcctgctctacagaagattaatcatctagaggttttgtcaatgtctggaatacaatctgtgtgtgacaagtttgtgaaggggctcattcctgtgcatggttcaaatctgaaggagttagcatttgctggttgcttggaacttacctcagcttccatcaagactgttggggaatattgtcaagaattaacttcattggatctccgcaacttgaataggctgcgtgactcagcactgtggcatcttcgtggttgtaggctactaaggaaactaaggcttcaaagaaacgcattcagtgatgaagctgtgtctcaatatttggaggaatctggaggaggcctgaccgagttaatgctaaacaatgttaagaagtccctcaatgatattgttatggtcgctagatcggtgagtgattggagaggggtatcgataggcaggaacgtcggccgggggcctctgcccacggccgagcaagaggagggtttctcccttctaattcttacctactttatttctcatccatggattacataa

SEQ ID NO: 9679 - DNA, 396 bp, Zea mays
  Peptide Sequence Number=SeqID_51458
atgtctgggacatggcgttggcaccgagatgagaggtcccccgtaagaccatgtctgggacatggcatgggcaccgatatgagaacatcccattattgcaaagctacttcaaggatcctaaagaagtcggagatcgtccacactatcaaccacaactgctcggtattttatatcgaatcacgtttgagttatggcatgtatagggatttacttattttgtatgtttgtgattatgattttgctaaagaatggtgtggttatctatgggtagtaaaggaactcactaagttcatttgtacttacaagagtttgtctgatgtttcaaggacttatgaggatgatcaaggacttcaaggaggtaccaagccagatggagtggagatcaaggaatcgtaa

SEQ ID NO: 9680 - DNA, 342 bp, Zea mays
  Peptide Sequence Number=SeqID_51459
atggcactatacaaggcgttatattgtcgtaggtgtcgtactcccacttgttgtactgagctgggtgagcggcaagctctggggccagagttagtttctgatactgaagagaagattgagtattctgtgggggacttcgtttttctcaaggtttcctcatggaaaatgatacagaggtttggtcagaaaggagtgtttgagaagcctgagttcaagtcatgggttttgcaaggaagtaatggtgttggactgaaacatagttgcggagagtttgaatgggttttgaatggagtggttgggggagttgaggaggaagtggtggagaaaatcaaggagggataa

SEQ ID NO: 9681 - DNA, 951 bp, Zea mays
  Peptide Sequence Number=SeqID_51460
atggacgctcttctcaaatcaagctttccaatattctccgcgaatccaaaattcctatccacaaagcatgtcaaacccctcaaggtctccatcaaaccgccaccaccagacttcgatttcagagcagatattttagcagaatccactgccaaaatcggacaaacttatcctcagctagtggacttggcggagaatgggacgttggtgttggtcgagaagcggcagttcggccctgttcctgcctggaggaccgagttcgttgaaccagaggcgatatggctgttggagttcattttcagagctgggatcatgtacatatccagtggtgttgaaaatggggaacaattacgatcaaatatgttttctttgagtgggactgggttttttggtgctgttggtcgtagcataaacttggggggtcaaactgctctggcattgcgtctacttttggcacttttctcttcaaaactatcatctgatctcaaccgtcctttcggagatgagttccgagctgctcgcaaagcatctgaggaagttggtgcacaaatagttttgggggatcgcccgattgagattacggaacaaaactacgaaaatgatacctttcagctttatgagcgtttaagcttctcatatccgtcacttcttcagcctcttgtacatgagcgagacacttatcttgcgtggtctcttaaacggagtaaagcagtgaacaagtgtaaaacagtggtgggggtgatcggaaaggggcacatgaatggtgttatatatgcgttagtgtcggaccaagggaacctacggttcagagaccttgcagggaagactccatctgaagctgaatctaatggctgggttcaacgtcttctcaaaagcttggctagagacactttgattggcatcctattatgggcattatatgaacagattaaatcagctggtatattattatag

SEQ ID NO: 9682 - DNA, 360 bp, Zea mays
  Peptide Sequence Number=SeqID_51461
atgaaggaagttgtcaagaaagaaattatcaagggccttgatgctggcattatttatccaatttttgacagctcgtgggctttcgagcaactcaagaagcgactagtagcagcaccgtttatggttgctccagaatggacattgtcatttgaactcatgtgcgacaccaatgattatgttgtgggagtagttttgggtcaaaagagaaataagggtaaatttgtgctattcgatgaaaaccatattaatgcccagttcggcatcgaagaggctagagatgagcattttgaatttttcgagaatattacatcgaaggggttggcaaaagtattagaggatttatgcgttgaaggaacataa

SEQ ID NO: 9683 - DNA, 444 bp, Zea mays
  Peptide Sequence Number=SeqID_51462
atgagcaaggcctacgactgcgttgagtggaattttctcgaaaaatttatgaaaaagttgagctttgaggatgtttgggttgataagttcatgcagtgtgttcagtctgtcagagatgtgaacgaggaaggggatggtcaatgcttgcttgggacagagtttgccttcccaaggtacttccctagtggagacatctttcaccctacagttgttgacaagccgtcttacatttggaccagtatcgctactgttgctaaagccctcgagaatggaacaataatcacacatgttggaacaaagagaagcaacaacttcctctcctgcaacaacttcttcttctacagcatcaacttccttctcagcaataagacctacacaatgggtgaggatgccactggtctatctagatcttctaagttgtcatctgaggaagagaggtcataa

SEQ ID NO: 9684 - DNA, 1446 bp, Zea mays
  Peptide Sequence Number=SeqID_51463
atggatccttctgtttccgtttgccgcctccacccgggcgtcgccgtcaccggcttctgccccgcctgcctccgtgaccgcctctccggcctccaccctccctccgccgctgacctacgccgctgcaagtccttctcctacgcgcgctctgcagccgcggtggagccgcagcgccgctcatgcgacctcttccgccacggtcagcccatcgcagcggcggtaccggaggaggaggaggaccagcaggagcacggccgctcacacagtcaccagtccaaaaagtcgtcgtctttgggtggcctcctgggcaacaagctgcagcaatggcgccgcaagaacaagaaggagccggagatggaggtgccctccagctgggacgcccggttgggacccgtgccggcgctcggccgcctgccggccacgatgctgtccctgcccgtggaagaggacgacgacagcatggcagcgccggcggtcccgcgctccgatgggcaaatccccgtggaggaagactactgctactactacgacaacgctaacaatatcaatgctgcggcggcggtgcccggcggctccgagcagacgagggactactacctggactcgtccagctccagcaggaggcgccgaagcgtggaccgctccaccacctccgggcgcaactccttctctgacgccaacagcagcgaggcggcgtgcaggatgatgatgatgatgaatgccgccgccaatggcaatgccagggtgtcaccggcgggcatcgccgccgcagagagtctgcaccactaccacgagtcccatcatcatcaccatcaccagagcgtgcttgtccatcatcagtgctacagagaagaagatgagcagcagcaggaggcctataatctccgcgccggcgacttctccggtagcaatggcgtgccggcgagcaagcctaataagaaggggattaaggggtggagcatctggggcctcataagcaagaagagcagcagcagcaggaagcactctgcagctgggggaggagcagtagcaggaggaggaggaggaggaggagagtacgagtacccatggccggagctccgggcaagggggtacaacgggcagatgctccggtgcaacagcagcataagcgcgagaagctccttcagcggcacaggcactgggagcgggaggaggagcgtctctggtgtggacatgcgcgataagtataacagtaacaatggcggcttgaggacgaggagggacgaggtccttctggagaggcacctcagcacgaggtcgtcttcttactcgagatcaggacatcatgacctggatccagcagctatggcaccgccgcagatgggaatgcagttgagcagccggccgcccaacatcccgaggcgctcctcttccaactccaagcatgaattgggcaagacaaggaggagcacacttggactctag

SEQ ID NO: 9685 - DNA, 363 bp, Zea mays
  Peptide Sequence Number=SeqID_51464
atgccaggggaccacggctccaagggcgacatctccttcgccggacgcttcacggccagcgccatcgcagcatgcttcgcagagatatgtaccatcccgctcgacacggccaaggtcaggctccagctgcagaagaacgtcgtcgccgccgccgcctccggggacgccgcgccagcgcttcccaagtaccgcggcctgctcggaactgccgccaccatcgctagggaggaaggggccgcagcgctctggaagggcatcgtcccgggcctccaccgacagtgcatctacggggggctccgcattggcctctacgagcctgtacggtcctcaccgcagtcaactatttactctgcatatcattaa

SEQ ID NO: 9686 - DNA, 226 bp, Zea mays
  Peptide Sequence Number=SeqID_51465
gcgtcccgagaatgtgaagagaggtagaggtcgaccaaccttgacgtggacagaggcagtgaagagggacctgaaggagtggaatattgataaagagctcgccgtggataggaaggggtggaaggtttcatctctagcctaccccaacgtgcttgggacaaaaggctttgttgttgttgttgttgttgttgttgttgttgattttggaacggaactgaggatgtga

SEQ ID NO: 9687 - DNA, 354 bp, Zea mays
  Peptide Sequence Number=SeqID_51466
atgacgacaacatgctcctctatgaccacggccaccacaccttcttcctcctcccccaaatcaccactgaggtccacatctggtcgcctccccagccgaccacaccaccatgatgccaacggaagctactccaccgtctcctttaggggctctaacttcagcaccaggcccttctccatagctcttaagtacgtgagcactcctcagatccgctacacttgtgtttgcctgatcttgcagcaccttgatttgccggagaacaagtcgaccatgaaatgggagttctcgagggcgaatatgaagaagatgttattcgcaccagtccttggatcttcagtgtctcagatatggtag

SEQ ID NO: 9688 - DNA, 687 bp, Zea mays
  Peptide Sequence Number=SeqID_51467
atggcggcgcccatgtcagccatcgactcagcgtggcagctcctgatcgccaacttcaccgagttccagctcgccaccgtcgtcaccttcctgctccacgagaccgtcttcttcctctccggcctcccctccctcctcttcgagcgcttcggactcttcgccaagtacaagatccagaagaagagcaacacctctgcttaccaaaacagatgtgtcttgcgcctcattctctaccatgtatgtgtgaacctgcctgtcatgattttctcgtatcctgccttcaaattcatgggtctcaggagctctcttcctttgccacattggtacgccacaccctttggtttaacatcggaatatgcccacccagctgaaattttgttcctgggattcgccacagttgttggtcctgctcttactggccctcatctcttcaccctgtggctgtggatggtgttgagggttttggagacagttgaagctcacagcggctatcacttcccatggagcccatcaaatttcctgccgctgtatggcggctcggacttccatgactaccatcaccgtgtgctgtacacaaagtcagggaactatgcctcaacatttgtttacatggactggttgttcggcacggacaaggattatcgcaaggcaaagaccattgaggagaaagaagggaaaaatctgtag

SEQ ID NO: 9689 - DNA, 852 bp, Zea mays
  Peptide Sequence Number=SeqID_51468
atggcggcgactggatcaggcagcggcggcggcagacagaatgaggaggcgaggcagcggtggagcctggcaggaaagacggcactagtcaccggaggaaccaaagggatcgggcttgcgatcgtggaggagctggcgagccttggcgccagggtgcacacctgctcccgcactgccggagacctggacgcatgccggcgccgctgggccgacaagggcctagtccaagccggcgacgtgatcaccacctccgtctgtgatgtgtcctcggagcgcgacagggagagcctggtggccaccgtgcgcgacatcttccacggcagcctccacatcctcgtcaacaacgccggcgggtccctgtacaggccggcggcggccaccacgcccgacgactacgcccacctcatggccaccaacctggactcgtgcttccacctcagccgcctcgcccacccgctcctccggcgggcgggcggcgccgtggtggtgcacatgtcctccgtggcggccttcgtcgcgtacccggcgctgtccgcctactcggtcagcaagggcgctctgcagccgctcaccaggagcctcgctgccgagtgggcgccgcacggcgtccgcgtcaactgcgtcgcgccaggggtcatcgacagtacaggcatctctggcacgacgctgggcgacgccagcagggcacggaggctggcggagatggagatgtcgcgggtgcccatgcgccgctttggcacgccacaggaggtggccgcgctcgtcgccttcctctgcatgcccgccgcctcctacattactggccaggtcatctgcatcgatggcggacgaaccgttgccgccaaactgtga

SEQ ID NO: 9690 - DNA, 180 bp, Zea mays
  Peptide Sequence Number=SeqID_51469
atggcgaaacgacggcggctgggggcggtgcggaccgcgcgtgcaagcgaacagaaagagaaggggctgtttgatttgctcaccgtcgaactcgacgagcccaggcagggctcccagacgttcgatttcaagcgtctgagatcggctgcttggcagggcatgaaccaaacatgtctttag

SEQ ID NO: 9691 - DNA, 1515 bp, Zea mays
  Peptide Sequence Number=SeqID_51470
atgaaaactgttcccatcaagattccctccaaatctctgctccctcctagtcaggatttgcatgaggattctcagtcccctgtgcctgctgaagccgacaacagaaagaagcgtccaatcttggttggcactgaagttaggagtgccaggctcagagagaaggctagaggttttaagtcttgctatggaataaggaagaattgctcgtgctgtgctaggccatcgcctccctctatcccctacaagattattaagaagttggggactgagttttgcaaagttgatccatccaagttatgccctgatgcattaaacagatccagatcctccagttctgctattcagaggccacattcctcgtctagtaacagggctgagctgcgagcaacatctgaagacctgagggatgaatcagaagatgaagatgatgtggggtctcgtccctcggttgggatgcctggtcctccaacttccctgccacttctgcccataccttggttaggggtgcctcagaccacgttccctgggtggtcaatgtccaaatcaacgttcccaaaccgcccatcttcagatttgaaaattattggctccaattggaagactttcattcaattttccaaggctcttggtcccaagggttgtttcagcctgatccagcgaaacgacttatggctaaatttaaaagggcaagaaagcctgttagcaacttgtcctcattggagatgcccttctcccacaccggtgattgcttcagatttttatgagctttgtgataaattttttgatggatcaatctgcctggacagtattaatggatcttatgtgactctcatccctaagcacagctctcctgtatcggtgggagattatagaccgatatctctccttaacacaagtatgaaagcgccgactaaacttctgaccaatcgtctgcagttggtgattaccaaattagtacaccaaaatcaatacggcttcctgaaggcttggacaattcaggactatttagcatgggcctttgagtacatctctatctgtcataagtcaggttcgttctggtggaaagatattctcaaactccaagacgtattcaaggaaatagcccgggtggagattggagatggaaaaactactttcctgtggtatgatcgttgggatggtctgcgcaaatttgaaaaattcttggagctttggtcttttgcatccctcagagacatcaacattaatcaagcaaggctggcttcacccaatgaaatgttccacacccccctctctacagaagcgtttgagcagctgcttacacttcgggacatcctggcaaatattcagttgcatgatcacaatgataaatggcgctgcaatggctcttccaagttgttttccttgcggaaggtctattctcacttgattggcaaccaacagtctcatcccctcttctcttggttatggaaatctaaatgtcaacctaaacacaaggcggcgttcaatgcctttggattcttttacttgcgataa

SEQ ID NO: 9692 - DNA, 279 bp, Zea mays
  Peptide Sequence Number=SeqID_51471
aatgtagagatgtttgatgagttagttgagaaagccaaagtagttgaggagactttggctgagctgcctcgttttgtgacttacagttcagcacatgcttctgtgcttgctggaggtcgtggtcacggtagaggtaatgggagactagttgggcagcgaagtgttgctcatactgttgctacactggttgagtctggaggtccagctcaagtttatgctattagggaaccacaagatcaagattcaaacgtcaagattgagagtatttttgccttgtaa

SEQ ID NO: 9693 - DNA, 858 bp, Zea mays
  Peptide Sequence Number=SeqID_51472
atggagattgtgggcgctactgtggccaatgtggaggttctttttttaagaaaggtggaggaagagaatacggtacaactggtttttaaccagaacataaatttgacagaacttcgtaaaagaattaggcgtaaaatttttggaacgacgccaatgaaagttctgtctattacgtatcgattttgttcttctgttgatccggtgacatatgactcgttcgacataaaagctgctcatagcttggaggcaatggtgcagactcatcttgctagtggaacaccttatattgagttatatgtacaatttacatcgccaaattatgtaattgcgaccggtgttcgagatgtatacacgacccctgaccgacactcggttagcgggttacaaaacatgaaacagcccatgtttggtagcggtgtggaatgcacatcccctgcaagacactctatcgatggatgggacatgtacgttggtggctcgatgtttgatgttggaaatacgtactggggaacgacatcaagttctagtggttggcaatctacatccaattgggaacgctatgaaatgcccagaagaagggatgatgtactccctacgacgtccaccggtgaggggacctcgtacgctgcagatgatggtgggttagaagatgactccgatgtggatccacctctagagccagggcccgatggtgtagaagttggcttattttctgaaccgaagcctattctaacagaacctgaagatgctgaaaggagttcagatgaagaagaaaagccacgtaccaaaaacccgtttcccgcagacccaggttaccatgttcaaggtgctagtcctgaatgtccaatcaatggctga

SEQ ID NO: 9694 - DNA, 114 bp, Zea mays
  Peptide Sequence Number=SeqID_51473
atgaccttgacccgatacttaggaaagtatgaaccaaaggtatcaaagaggcatcatgattctaatgaaatgacacctgtgctatttggaagaatatatagaatattcacgtga

SEQ ID NO: 9695 - DNA, 495 bp, Zea mays
  Peptide Sequence Number=SeqID_51474
atgaaggaagttgttaagaaagaaattataaaatggcttgatgctggaattgtttaccctatttctgatagcaattgggtttctcaaggactgtgtaatgagcttcgacttcaatacctttccaaggagaaaaggattgctttgatcgaaaaagttaaaatcgatcttcaatttcctatttctaaaggtggacaagaaaaatatggcaagaacaagaaggacaaggaaaatgatgctgagaaagaatctgatcagaacattgtcactgcaccccagtttgtgggtgcaagtactgataatttggagggagatggagctagaccggcgaaagctacagaagaagcaaccgataatgccggggcagagctggaacctgaggagcaatctgaggaccatttgaagcccaatgaaaagaagagaaagtgctccaaagataaaaactatggcggcttaagtctcctatgggtgaaccgacatgaaagggaagcagattaa

SEQ ID NO: 9696 - DNA, 447 bp, Zea mays
  Peptide Sequence Number=SeqID_51475
atggcactcgtcaaagaagcaaacctgggaaccggtaaagccgtctttgccgagtgctgtggtcaaggcactcgacaaagggactggcaaaggggcccactggaggactctttgccgagtgccagacatcagacactcggcaaagaagcctcctttgccgagtgcctacgagagctctcggcactgggactcgcggtggggcccactggagccgtctttgccgacggccgcgggctacaggcgagagaaatggggcaggggaagggggcgggtgtgcacggggctcaaaaggagtcggggcagcgacagttgcgtgaggagggcgcgacgtgggccgccttccttggcgtgcttgaggtcatccttgctctattgctgatggtgttcatccatctcagtatgaaggtttctctcatgaggagtatgggtctaattggacgaagttga

SEQ ID NO: 9697 - DNA, 825 bp, Zea mays
  Peptide Sequence Number=SeqID_51476
atgccgtcgaccctgacttcggcggggcagcagaagctgaaggagcccatatcccctggtggcggctccgcgtcggtcgctgggtccgctgcggagaggaacaacggcggcaggggcaagggcaagactgagatcaagcgcatcgagaacacgaccaacaggcaggtcaccttctgcaagcgccgcaacggcctcctcaagaaggcgtacgagctctccgtgctctgcgacgccgaggtcgcgctcatcgtcttctccagccgcggccgcctctacgagtacgccaacaacagtaactcggtaactggatgcaaacttgtgaatgtgagtgaggggagattccaaaagaatcaaaatttcatctatattgttgcaatattgaaactaaaaagtagctcggatgcattagtcaacatgagttgtatcgggggactacaaggggaagaaagctggcaatgcaagctggtgttggtcagaagggttatggcacccaacggcaatcatgttgtgggtaatgcatggctactgccaagcatgctcgaggatgctaagttaggatttgattatgctggcaatgcgatagtatacaatattagactattagtgaagagtgaagcagtaatcgtgaagggcaccattgagaggtacaagaaggcaaccagtgacaactccagcgcagctggtacgattgcagaggtcaccattcagcattacaagcaggaatctgctaggctgaggcagcagatcgttaacttgcagaactccaacaggttcagttcttatagaaaattatcatgtgcgcgagaatacagaaaggtcatttga

SEQ ID NO: 9698 - DNA, 1203 bp, Zea mays
  Peptide Sequence Number=SeqID_51477
atgcagattaaagctgtgggtagcgaatcctatctctttggctttatagtggaacagattaaagctaaagtggaacagattaaagcaaaagatagtgaatcttgttttcctagcgttacagcggagaagattaaagctgatgtggagcagattaaagctatgagcagcgaatcctatatctttggctttatagtggaacaaattaatgctaaaggtatcgaatcctatatctttggctttatagtggaacagattaatgctaaagtgggacagattaaagcaaaagatagtgaatcttgttttgctagtgttacagcggagaagattaaagctgatgtggagcggattaaagctatgagcagcgaatcctatatctttggctttatagtggaacagattaatgctaaaggtatcgaatcctatatctttggctttatagtggaacagattaatgctaaagtgttgcagcagtgcagattaaaggtgagggcagcgaatcttgtctccctggcgttaagacttgaaatagctgaagcgaagcggattaaagctgtgggcagcgaatcctatctctttggccttatagtggaacacattaaagctaaagccttgcagcggagcagattaaagctgagggcagtgaatcttatctccctggcgttaagacttgaaatagctgaagtgatgcagattaaagctgtgggtagcgaatcctatctctttggctttatagtggaacagattaaagctaaagccttgcagcggagcagattaaagctgagggcagtgaatcttatctccctggcgttaagacttgaaatagctgaagtgatgcagattaaagctgtgggtagcgaatcctatctctttggctttatagtggaacagattaaagctaaagtggaacagattaaagcaaaagatagtgaatcttgttttcctagcgttacagcggagaagattaaagctgatgtggagcagattaaagctatgagcagcgaatcctatatctttggctttatagtggaacaaattaatgctaaaggtatcgaatcctatatctttggctttatagtggaacagattaatgctaaagtggaacagattaaagctaaaggtagcgaatcttgtttccctagcattgcagcggagcagattaaagcagaaggcagcgaatgttatctccctggtgttaagacttga

SEQ ID NO: 9699 - DNA, 807 bp, Zea mays
  Peptide Sequence Number=SeqID_51478
atgggcagcgaatcgtatccctttggcattatagtggatcagattaaagctaaagcattgcagcggagcagattaaagcagcgggtagcgaatctagtctccctggcgttaagacttgaaatagctgacgtggagcggattgaagctttgggtagtgactcatatctctttggcattatagtggaacagattaaagctcaaggtagggaagttggtttccctagcattgcatcgaagcagattaaagctgagggtagcgaatcttttctccctgactgcaatagattaaagctaaaggtagcaaatcttgtttcccaagcattgaagctgagcagattaaagctgagcgcagcaaatgttatctccctggcgttaagacgtgaagtagctgaagtggagcggattaaagctgtgggcagtgaatcctatctttttggcattataatggaacatattaaagctaaagtggaacagattaaagcgaaagatagtgaatcttgttttcctagcgttacagcggagaagattaaagctgatgtggagcagattaaagctattagcagcgaatcctatatctttggctttatagtggaacagattaatgctaaagtgttgcagcagtgcagattaaaggtgagggcagcgaatcttctctccctggcgttaagacttgaaatagctgaagcgaagcagattaaagctgtgggcaacgaatcctatctctttggcattatagtggaacacattaaagctaaaggtagcgaatgttgtttccctaccatcacagcagagcagattaaagcttag

SEQ ID NO: 9700 - DNA, 345 bp, Zea mays
  Peptide Sequence Number=SeqID_51479
atggattccaaccgagcagactacgttgatgtggaatgtaacgcgcaagcctctgttcacggagcagcgtcgtttggatcgaggcccatatttgggagtcgagtaggagagggtaaagaagcattcttccaaatgatgaatgactggttcacagagtttgtcagaactaatcaagctactcaacgacctctacccccatctattccccaatcagttcccatagttcctcaaggcttggaacttttacgcgtgagtaagtcgcctgttgataaaatccaaaaatatggggccgaagaattcagggctacatttgatgatgatcctgagagaattgagtttggttag

SEQ ID NO: 9701 - DNA, 255 bp, Zea mays
  Peptide Sequence Number=SeqID_51480
atggcgttaagacttgaaatagctgatgtggagcggcaagttgtgggtagtgacttctatctctttggcattatagtgaaacagattaaagctaaaggtagcgaatctggtttccctagcattgcatcgaagcggattaaagctgaggtggagcagattaaacctaaaggtattgaatcttgtttccctagtgttgcagccgagcagatgaaagctgagggtagcgaatcttatgtctctggcattaacacttga

SEQ ID NO: 9702 - DNA, 111 bp, Zea mays
  Peptide Sequence Number=SeqID_51481
atgcaggagctcgaccagaatggtaaccctagtgacatgtcactcctgaatcgaagagaattcaatgtggaagctacttgttccaagaatgccaagagttttgatctttaa

SEQ ID NO: 9703 - DNA, 180 bp, Zea mays
  Peptide Sequence Number=SeqID_51482
atgaaatttcccgatccgatagaggagtgttcaattatgaaagagatagaaaccctggtttctatggaaagtaattttgaagaatatccattgaagaaagccttagatcttgaccctttggaggatgaagaagatgctatctttgggacatggacgaaagatactgaagatgcaaactga

SEQ ID NO: 9704 - DNA, 489 bp, Zea mays
  Peptide Sequence Number=SeqID_51483
atgcagattaaaactgtgggtagcgaatcctatctctttggctttatagtggaacagattaaagctaaagtggaacagattaaagcaaaagatagtgaatcttgttttcctagcgttacagcggagaagattaaagctgatgtggagcagattaaagctatgagcagcgaatcctatatctttggctttatagtggaacaaattaatgctaaagtgggacagattaaagcaaaagatagtgaatcttgttttgctagtgttacagcggagaagattaaagctgatgtggagcggattaaagctatgagcagcgaatcctatatctttggctttatagtggaacagattaatgctaaaggtatcgaatcctatatctttggctttatagtggaacagattaatgctaaagcggagcagattaaatctgtgggcggcgaatctttctccctggcgttaagacttgaaatagttgaaggtgaagcggattaa

SEQ ID NO: 9705 - DNA, 1146 bp, Zea mays
  Peptide Sequence Number=SeqID_51484
atgcagattaaagctgtgggtagcgaatcctatctctttggctttatagtggaacagattaaagctaaagtggaacagattaaagcaaaagatagtgaatcttgttttcctagcgttacagcggagaagattaaagctgatgtggagcagattaaagctatgagcagcgaatcctatatctttggctttatagtggaacaaattaatgctaaaggtatcgaatcctatatctttggctttatagtggaacagattaatgctaaagtgggacagattaaagcaaaagatagtgaatcttgttttgctagtgttacagcggagaagattaaagctgatgtggagcggattaaagctatgagcagcgaatcctatatctttggctttatagtggaacagattaatgctaaaggtatcgaatcctatatctttggctttatagtggaacagattaatgctaaagtgttgcagcagtgcagattaaaggtgagggcagcgaatcttgtctccctggcgttaagacttgaaatagctgaagcgaagcggattaaagctgtgggcagcgaatcctatctctttggccttatagtggaacacattaaagctaaagccttgcagcggagcagattaaagctgagggcagtgaatcttatctccctggcgttaagacttgaaatagctgaagtgatgcagattaaagctgtgggtagcgaatcctatctctttggctttatagtggaacagattaaagctaaagtggaacagagtaaagcaaaagatagtgaatcttgttttcctagcgttacagcggagaagattaaagctgatgtggagcagattaaagctatgagcagcgaatcctatatctttggctttatagtggaacaaattaatgctaaaggtatcgaatcctatatctttggctttatagtggaacagattaatgctaaagtgttgcagcagtgcagattaaaggtgagggcagcgaatcttgtctccctggcgttaagacatgaaatagctgaagcgaagcggattaaagctgtgggcagcgaatcctatctctttggcattatagtggaacacattaaagctaaaggtagcgaatgttgtttccctagcatcacagcggagcagattaaagcttag

SEQ ID NO: 9706 - DNA, 954 bp, Zea mays
  Peptide Sequence Number=SeqID_51485
atgaagtggagcggattaaagctgtgggtatggaatagattaaagataaaggtagcgaatcttgtttccctagtgttgcagcagtgcagattaaaggtgagggcagcgaatcttgtctccctggcgttaagacttgaaatagctgaagcgaagcggattaaagctgtgggcagcgaatcctatctctttggccttatagtggaacacattaaagctaaagccttgcagcggagcagattaaagctgagggcagtgaatcttatctccctggcgttaagacttgaaatagctgaagtgatgcagattaaagctgtgggtagcgaatcctatctctttggctttatagtggaacagattaaagctaaagtggaacagattaaagcaaaagatagtgaatcttgttttcctagcgttacagcggagaagattaaagctgatgtggagcagattaaagctatgagcagcgaatcctatatctttggctttatagtggaacaaattaatgctaaaggtatcgaatcctatatctttggctttatagtggaacagattaatgctaaagtgggacagattaaagcaaaagatagtgaatcttgttttgctagtgttacagcggagaagattaaagctgatgtggagcggattaaagctatgagcagcgaatcctatatctttggctttatagtggaacagattaatgctaaaggtatcgaatcctatatctttggctttatagtggaacagattaatgctaaagtgttgcagcagtgcagattaaaggtgagggcagcgaatcttgtctccctggcgttaagacttgaaatagctgaagcgaagcggattaaagctgtgggcagcgaatcctatctctttggccttatagtggaacacattaaagctaaaggtagcgaatgttgtttccctagcatcacagcggagcagattaaagcttag

SEQ ID NO: 9707 - DNA, 765 bp, Zea mays
  Peptide Sequence Number=SeqID_51486
cagagcagattaaagctgagggcagagaatcttatctccctggtgttaagacttgaaatagctgaagtggaggggattaaagctgtatgtagaaaatcctatctctttggcattatagtgggacagattaaagcaaaagatagtgaatcttgttttgctagtgttacagcggagaagattaaagctgatgtggagcggattaaagctatgagcagcgaatcctatatctttggctttatagtggaacagattaatgctaaagtgttgcagcagtgcagattaaaggtgagggcagcgaatcttgtctccctggcgttaagacttgaaatagctgaagcgaagcggattaaagctgtgggcagtgaatcctatctctttggcattatagtggaacatattaaagctaaaggtagcaaatcttgtttccctaccattgccgcggagcagattaaatgcaatagattaaagctaaaggtagcaaatcttgtttcccaagcattgaagctgagcagattaaagctgagcgcagcaaatgttatctccctggcgttaagacgtgaagtagctgaagtggagcggattaaagctgtgggcagtgaatcctatctttttggcattataatggaacatattaaagctaaagtggaacagattaaagcgaaagatagtgaatcttgttttcctagcgttacagcggagaagattaaagctgatgtggagcagattaagctattagcagcgaatcctatatctttggctttatag

SEQ ID NO: 9708 - DNA, 297 bp, Zea mays
  Peptide Sequence Number=SeqID_51487
atggcgaggtactccgtccccacacacatctaccgtccccatcgattcccccgtcaacagagaggggctcaccgccttggcgtacaatgcctcactgaccccgactgccgtcgtgtagtgaccgcacttgtacccaccataactggaatgggagaccacgtcttcagtcgcgtgaggaaggcaatctgctgccaggttcactcagacaacgcatccccatggatctatgtcaatagaccatcattattctgttatcaaaatggatacaaccaagtcctgacctcgcgcgagtgctag

SEQ ID NO: 9709 - DNA, 315 bp, Zea mays
  Peptide Sequence Number=SeqID_51488
atggccgccaggggtgcggttgcggctacaggaggacgtcagcgcctatatagctggagaaggagtccacaactactcccgacccggtcgcaccacgcgcatgcgaggatcgcggaggatcccaacctcacgcgcgaggttgagcttggtttcgcgaagaagacgcaacagaacggaaaggataagaccgacgtcatggccccagacgacagcgacccgtcccgatcagatgtggcgcggttatcctccacaaattaccagttgggcattacaaatcctaccccccttaaaaggaatctcgtcctcgagatttag

SEQ ID NO: 9710 - DNA, 510 bp, Zea mays
  Peptide Sequence Number=SeqID_51489
atgaggtcaatcaagcccgctactatgctattcctcaattaccaggttctacgcgctcgcaaggagaaaacagcagcccacgcaccgggtgattttgtgcccaaacgcggacaacggcgagcaatcaccgacggttcgatgacccccagaccctccagtagacaccacggcgagcgtgatcccacgacgaagctcttgagcccaaagccgacgccaagacgctgcccaggccgagaatggttgagcagtattccctccctcaactcacacaccgatgccagccgaattctggttagtggccaggttagggtggacacaggatgccacgaccgggttgttcctcttatacgcgcggaaatagccaacgcacaacgaaattcgcctgacatccccggcgaggtcgacacggcgcgcgcggggtctgttacgccggtgcggagctggattggtccaactgtcactgctacggcggccccatcattcgatgataaaggaaacatgcatgcgtag

SEQ ID NO: 9711 - DNA, 432 bp, Zea mays
  Peptide Sequence Number=SeqID_51490
atgggcaagggtaacaaacgcaagcgcgagccgactcctccatccgatgactttggcgactcgaaatactcagaggaggagttctcctctgagtccgaggggtctccggctcccgtctctcccccggcgtcgtccgacgactcagacgactctcaggggattgccgcggaggtctggacttacatccgggccatcgagcgctctgggctcgagggctcggatgagtcggagtactcctcggacgaggaggactcgcccgaggaggacggcgaaggtgacgacgacgacgacgacggaggcgacggcggcggcaggggcggcaacggcagcagcacgggcggcaacggcgacggcaagggtggcgacggcggcagcagcaggggcagcaacggtggcggcagcagcaagggcagcaacaaggccagtggctag

SEQ ID NO: 9712 - DNA, 339 bp, Zea mays
  Peptide Sequence Number=SeqID_51491
atgaagaaggtggtctactatgagaccgactcttccacgccctcaacctccggcactgagtcaacatcttcaaagggccaagagcgtaagaagtataataaaatgaggcaccatctaacctcactccacgaaagtatttgggatattattgagtttggagcacaggtaccacaagtgggcaacgaggactacgaccccaatgaggccgcccaagtgaggcacttcaactcccaagccacctccatactcctcgcttccttgtgtagagaggagtacaacaaggtgcaagggttgaagagtgccaaagaaatctgggacgtcctcaagatggcgcattaa

SEQ ID NO: 9713 - DNA, 1215 bp, Zea mays
  Peptide Sequence Number=SeqID_51492
atgtgcgcccctgatcaggcaagtacatgtgtctccgagttgctggagcaggtgcagtcgctgggtgtttctacagtgccatcatcccagctgcatcgaataaccagtatacccaaaggctttggcgaaacaaacactcatcatatacgctcccctgggtcgacctctgagagtagcaagctactggacgtatacccactggagctccggttcccattggagccaaacaagtgcactgaatgcccagtgaccctgacaaacaggacagactgttacgttggtgtctggattacaccggcgaaacctcacacttgccatggcttttatttttcgtacctgtggtggcagtttccaagctcatcctttttccagatcatggacccgcattccacattggtcgtaaccttggtaatggacccgctgcagctgggactgggactgcaagacactgaggacaaatttcaggtgttgatgattgtcatggaatcacagaaggatctcgaaaatttgaacccgtcgattagtagcagcacggacaatgatatgttgaggcgagtcgaggagttggggggcgaggtccaccgggcaatcctgagggctgtcagctgtgatccagcaagctgcaagccagaagtggtccacagtgttccaatggtcatttcagcaaaaactttagagaatgtcttatccatcgacgtggacctcgatatgtgttggatcctggctagtcatcgcgcaggttatgtttccatttggaactacaacacacagggaagggtgactgcattgaaggtcaccaaggaagcaggcatgctacactcgctcacacgtactcgtagtgccaccacatcgtgtgtttattcggccaaatttatcactagaaagaaattgttcgcaacaggggacggctatgggtatatctgcatctatgcatacacaatggacaaagtgaagaaatttgaagcttatcatggcaaacctgtcagcttgttggctgttcactcaacctacccgttcttgctttcgtcgtcgtcttgtgaccgctcaatcaagctttgggcctgggaccagcaatgggcgtgcactcgaacattcgacgctcacacgagcggagtgcagcatgtcaggttcaacccagctgatgtcaacacttttgttagtgtttcctgtggtggcgcctgtgtaaagtttctatccagtgttgataatcactag

SEQ ID NO: 9714 - DNA, 1146 bp, Zea mays
  Peptide Sequence Number=SeqID_51493
atgccactggtttcgcaacatacaacttccgttctctctggcgacaacccactaatcatcaaggctagcgggaggccattcgcagttggagcttcttccatagatctggttggtcactgctccaagaaggtctcggccagccggcggaaggcccctcttccagaaatggacgatcaggagaatgaagatcaagcccttgagcacatattaactgatgctaatgcagagccagtcatgctatcatatgcattcttaaaaagtattacaaatgatttctcatgtgtaatcggtaggggtgggtttggagtggtttataagggttatcttcataatgggaaaactgtagctgtgaagcagctttccaaaacagatgacttttcagaaaagcagtttcatgatgagcttatgtgtttgataagggttaaacacaggaatataatttcaatggaagatttgttttggcagatatccgacgaaggttcctctgctttgagtttgtacctaacaaaagccttctccattatctcaaagggtttgtggtatcttcatcatgaagaacacattaatcatttggatctgaaacctgaaaatattttactggatgatgacatggtcccaaaaatatcagactttgggttatcaagacggttcagtggagaactgaatgttatcatcactgaaaatatctgcgggacattgggatatattgccccggaatatttgagcaaaggggaaatatcattcaaggccgacatttttagtctgggaatcataatcaaaaaaatattaatgggaagtaatgatttatctgattttgaaaaggatgatcaggagaagctactgttcttgcaggagctgagagccattagagaggcttgcactgggccttggttactagttggggatttcaatctcattttacaagcatcagataagaataactctaatcttaaccgggctatgatgcatcgctttagatgcctaattgaggatgtagctctcaaggagatccccctgcatggacgccgtttcacttggtccaatcagcaaactgatccagtgttggttaaattggacagatttttttgctcagttagttgggaactgctttttcctaatgtcctgctgcagagctcggcctcctag

SEQ ID NO: 9715 - DNA, 279 bp, Zea mays
  Peptide Sequence Number=SeqID_51494
atggcccaagctcctaaaatgataagggagttcagccccttgcgcagcttcttatcggaggggctaataagggtcatgcttacattctcccaccaatcatcaaaagaagaagaatcgagactgggagagaggttcaactcccaggagactagtatcaccaaggagttaaatccctttaacacctccttaggcaaagatgcagttggctatgttgatgttgactcggcgaagaggcttagtttggaagagtgggtggtgactggtgaagttgttgcttga

SEQ ID NO: 9716 - DNA, 195 bp, Zea mays
  Peptide Sequence Number=SeqID_51495
atgacgaaggtgacgctcgccgaaggtattcaaagctcaagaaatggaagcttcgtcctgaccgcacttcatgttcgtaattctgagtccgaaggtacctgttcacataatccacttggaaaacattgtcaaatcatgtttttgaggaccttcggaggacgaaggcccccaacagtatgtgaccgaggtgtatga

SEQ ID NO: 9717 - DNA, 282 bp, Zea mays
  Peptide Sequence Number=SeqID_51496
atgaatgaccccatatctgcagagcagaatcagaagggggggaaaaccaagagcgctcaccatctaccgcgcggcggcccgcatgctccgagtggatctcctttcctccgatggcgcgagcgagagcgcgagtccgtgttcgtcctcaccggccgcccaagaactaggaaggcggagtcgtgggtgaagaagaaggaatatcctagtcccactgggtcagagtcctcagtggagaggagaggagatctggcagtggcatggttggtattcctacatccgtag

SEQ ID NO: 9718 - DNA, 609 bp, Zea mays
  Peptide Sequence Number=SeqID_51497
atgtcgcgcgcgttcgatgactactatatcaaggattgtggcgtcatctcggcgccggaggctcagcgcctcagtgagctcaccgccgctagaaatctcacgccggagtgggaatcatctcccacggatagggggtcatcacatctggtatcaaagccatcagagctggcgatcgttgaagagaagacgcaacggctccccctgcaaaaccattcgtgcagacccggtttctactggaagccatggatgagagagatcgagcagtgcaagggaattgggacctcagagctggcggcagtggtggctgaacaagctgctgttgataggaatgatctgtaccggaagttggaggaaacaggacaagaagtgtctcagttgaggttggaacatatgggaagagagctgggcgaaacatcaactactactcaggaacaaggcggagatgtccgaaggaatcaacaacagtctcatggtgatcagaatcgtggaaaccaacagcgaggcatgagaggtgatcctcgccagtttactgattcaggtaatcaagcaatccccaaactaccttttccaaaattctcgaagggcgatcctgtggtatggttggactag

SEQ ID NO: 9719 - DNA, 309 bp, Zea mays
  Peptide Sequence Number=SeqID_51498
atggttgtgcgtccgcgggggcgtgcagggatgtcggaaatggggcgcgaggggcagcagacgatgcataggggaaaaaggagaggagaaagggggtgttcacctcgacgcagagctttgacgacgacgagcattgcgcacggcggcgttgcagcggctccgaaggacgtgaccggtgtggcgagggcggcgaagcttgacagcgccggcggcttcgatgcgtacaacagccgacacgacgacgagatgagcgagaggactgctgggcgagcagtttatttttgcgagatcgtgggcgctgccgcgtag

SEQ ID NO: 9720 - DNA, 231 bp, Zea mays
  Peptide Sequence Number=SeqID_51499
atggagatgtgtataaccttccttgatgatcgttggtgtgttgtcagccttgcaccggatagactgatggttcaccgggcagtccggtggctctcctccatagtgccacctagaactagtcgttgggctcctattccctggtgcaccggacagtctgtcgggtggcaccggactgtccgttgcacactggttgacggtccgggtgtgactccacttttctttatgtcttga

SEQ ID NO: 9721 - DNA, 1521 bp, Zea mays
  Peptide Sequence Number=SeqID_51500
atgcctccttcccctccggctgttccgctgatcgggcacctccacctcgtcgccggcgggctcccgcatgtccgcctgcgggacctcgctgcgaggcagcaggacggcgaggggctcatgctcctgcgcctcggaacggtcccgacgctggtagtctcgtcgccgcacgctgcgcagcaggtcctgcgcgcccacgacaagtcgttcgcgtcccggccacggaccgtcgtcggtgacatactctcgtacgggccgtcggacgtcgggctcgcgccgtacggcgattggtggcggcaggctaagaagctggtgaccacgcaccttctcagcgccagaaaggtgcagtgctaccgcgccgcccgcgaggaggaggtgggcgcagtgatcgccaagatccacggtgctgccggggcacatgcggctgtggacatgagcgagctcctgagctccttcaccaacgacatcctgtgccgtgcagtggctgggcggtcgttccgggcggacgacggccggaacaaggtgttccggtatgccggcacggccgttgtagggggcttcaacccggagaacttgtaccctcggctggcaaaagtagccggcggcgtgctcacgtggccggcacgccggagggcggagaggctgaggtcccagtgggacaaggtcttcgacgccctgatcgacgagcacgcgagagagatggccggcggcgctggtggtggagatctagaggagactgacttcatacatgtgctcctgtccgtacaggaagagtatgggctcaccagaaacagcatcaagggtatcctggctgacatgtttacagcgggcactgatacttcatatgcggccctagagttcgccatggccgagctcatgcggcatccacatgctttggccaaactacaggctgaggtgaggaaaacaacggcggcggcggcggcgtcgggcgaaaaacaagtgaaggagacaaacctcgacggaatgacgtatctaaaggcggtcatcaaagagacgctccgtctccacccgccagcgccgctccttctcccgcatctctcgctagaggactgcgacttggacagctacaccgttccagccggcacgaccgtgctcatcaacgcctgggccattgggcgtgacccgagggtgtggaacgccccagatgagttcatgcctgagaggttcatcgtagacgacgacgacgacatgggaggcatagataataatggttctgtagacttgagaggaaacgacttccagtttctgccgttcgggtcgggacggaggatttgccctgggttaaactttgcattggtttccattgagctcatgttggcaaacctagtctaccacttcgactgggagctagcggaaggggaggatagcaatagcaatattgatatgactgaggtgttcggattgacagcgcgtcgaaagcacaagctccttctcgtcccaagatcagcatcaagtgcacctgtcgctgtagaccagagcacagggagaggagctcatatgtaa

SEQ ID NO: 9722 - DNA, 906 bp, Zea mays
  Peptide Sequence Number=SeqID_51501
atggccgttcttagccgttgctccagagctgttacggctgcgacaacgccgaatgcggccgctgcaaaattctcttacttaattcgagctctctctcctttttcttcttcttcttcttcgactttcgatgccgataatggcctcaacagtcgtattaaaccagccgttttaggaactttgaagagggaaccgaaggatagaaatgtccagtgggtatttttagggtgtcctggcgttggtaaagggacgtatgcttcacggttgtcggatcttctcggtattcctcacatcgccaccggtgatcttgtccgggatgagctcacttcctctggtcccctttcttctcagctaaaggagattgttaaccagggaaaattagtttcagatgaaattataatagatttactttccaaacgtcttgaagcaggagaagctaagggtgaatcggggttcattcttgatggttttcctcggacagtaagacaggcggaaatattagagggggtgacagacattgacttagtgattaacctgaagcttcgggaagaagcattgcttgcaaaatgtcttggaagaaggatctgtagtgagtgtggagggaactataatgtggcttgtatcgatatcaaggcagagaatgggaagcctgggatgtatatggctccacttcctccccctcctcaatgtgcatccaagcttattactcgagcagatgatactgaagaagttgttaagcaacggctccgcatataccaggcgatgactctacctgtagaggatttctaccgcagtcgtgggaagctgttagaatttgatcttcctggaggagtccgggaatcatggccaaagttactccatgctttgaatcttgaagatgaagaggacaaacagtctgcagctgcatga

SEQ ID NO: 9723 - DNA, 642 bp, Zea mays
  Peptide Sequence Number=SeqID_51502
atggagttgagaaatactgatataggatggccattctcaactgctttctttgccggttgttgtcgaatttggaagatttttaccgtttattttattggggttttgttgattcacacagcgcctgaagatttgttggatggagaagacggtggtcagggttcttattattcattgcatacgatgcttggttctggcggtggaagtggtagctgttccaaggacatggcggtggagttaggagatgaaccccatgttttagttgtggatgatagcctcattgataggaaactggttgagagactgctcaagaactcctcttgcaaagtgactacagcagagaatgcactgagggctgtggaatatttgagactgggaaatgatacattggaaggcactgtttctgaggtcaatatgataataacagattactgcatgcctggaatgaccggctatgaactgctcaagaaaatcaaggaatcatccgttctcaaggaagtccctgttataatcatgtcatccgaaaacatacccactcgtatcagtcaatgcttggaggaaggtgcaaagatgttcatgctgaagccactgaagcggtctgatgtgaagcaactcaaatggcacttgatgaaatgcaggaactga

SEQ ID NO: 9724 - DNA, 411 bp, Zea mays
  Peptide Sequence Number=SeqID_51503
atggcggtggagttaggagatgaaccccatgttttagttgtggatgatagcctcattgataggaaactggttgagagactgctcaagaactcctcttgcaaagcagagaatgcactgagggctgtgaattatttgagactgggaaatgatacattggaaggcactgtttctgaggttaatatgataataacagattactgcatgcctggaatgaccggctatgaactgctcaagaaaatcaaggaatcatccgttctcaaggaagtccctgttgtaatcatgtcatccgaaaacatacccactcgtatcaatcagtgcttggaggaaggtgcaaagatgttcatgctaaagccactgaagcggtctgatgtgaagcaactcaaatggcacttgatgaaatgcaggagctga

SEQ ID NO: 9725 - DNA, 1041 bp, Zea mays
  Peptide Sequence Number=SeqID_51504
atggcagaagcaaagaaagcagtgatatcaaaagtaaggtcaatggttgaagaatccgttactgatatgttcagcaaaactgttccaacatgtatgaaggtggcagacttaggttgctcttcaggtcctaacaccttcatgactatatggcacattattgacactatccatggcatatgccaacaagaagatatgaagttacccgagtttgaagtgcttctaaatgatctcccagagaatgacttcaactatgtgtttaagtcggttcctagtttcatcgagagactgaagaaagagatcggagatatggtgcaggaacggtgttttataagaggagttgccggttctttttatcatagactctttccagctaaaagcctgcacttcgtatattcttcctatgcgcttcattggctctcaaaggttcctgttggagtggagaacaacaaagggaacatatgcatggcaggatcaagtcctcccaatgttgtcgaagcttatgctcagcaatttcagaaagacttcataaattttctaagcttacgttccaaagaaatactaccccaagggcgtatggtactaacctttacggctaggaaaaacccaaatccctctaatgaagattacggtttggagcttgttgctgaatcccttcttgaattggtcgctgagggagttgtaaaagaggcagatgtggattcattcaacattcctttatatgcaccttgcaaagaagaagtggctgagattgttgagaaggaaggatcgtttggaattaaggagctacaagttttcgtagtggacaccgatcctcgaaatagagatgataaaaaacacttggatttcaacatttatacgcaaatggggaaaaactatgcaaatactatgagagctgttttggagtctattctgtgcagtcattttggagatgccatacttgacgagttattcaaaaggtttgcaacaaatgcagcggatcctctaaggaactcaatgctccaaaagaaggttaacgttgtggtttcattggcaaagaagtag

SEQ ID NO: 9726 - DNA, 129 bp, Zea mays
  Peptide Sequence Number=SeqID_51505
atgaggccacagatacaaatgcccatacaggagtctagtgtcgatgcctgggacaatgctgatgtggccggtaccttcaaccttccttattattcgaaggccggcaccatcgtggatgcaagaggatag

SEQ ID NO: 9727 - DNA, 297 bp, Zea mays
  Peptide Sequence Number=SeqID_51506
atggcaattctagttcaatccagtttgaaaaaggttgttaccgggaaaaagcctgagaatctaaataaaacagaatgggaagagcttgatgaaaaggccttgtctgcaatccagttgtgcctagcgaattcggtattgcaggaggcttttggccttttggggctgcccctcacctcaccattttactgctgcaccacgctgcttctcttgctgccatcgatcagctaccatttcaagctgcagccaccaccttcacaatcaaatcaaaaagcagtgaagcagaaagttaaaagatga

SEQ ID NO: 9728 - DNA, 435 bp, Zea mays
  Peptide Sequence Number=SeqID_51507
atggcctccctctgtcacacccatctcggagcgtgggtaggggcttcgacggacctggccagcgatggcgtcataaacttgaatgacctagaacaaagggatcagaggctccaagggggagacgccatcgatccaggcccgttgctcactaagaagtgcgacgtcttcatcccaccagcgcttgggggagtcataaacaaggataatgctaacgacgtaaaggaaagtacatcatcgaggctgccaatcaccccatggacccagaggcaggcgaggcaagttcatacgtcaacggtttcaaagggactagcgatcctgtcaaagaaaggtgtcctcatcctccccgacatactggccaactctggcggcgtcacggtgagctacttcgagtgtgttcaggcttacctacagaaattgatatcgttggagaagtaa

SEQ ID NO: 9729 - DNA, 516 bp, Zea mays
  Peptide Sequence Number=SeqID_51508
atgtacatgttagggaggcattggaaccgaggtagagggaaggttcgacgcgtctgcccgcgcggtggtcatggcgaacagggtcgcagcgccaggggtcggggcatgcgcgactgtgccagacaaggccacaggaaccccgaggaggccagtcacgtcgatggatgggacagcagcacaatgaccaaagagaaggagtgcgccaccgaggaaggaagctacactgaacgatgtgagggctacagtggcattagcggtgctagctttgggaggaagaggcgtgcggacactgagaacaacggtcgcgccgccagaggccaaggactctggcagcatgccgtgcagaatagaggtggactgggagttgcgcacagtgaccagagggcccattgcgggtggcggggagcagcaaggcacgtgcgggtcgcagagcacgccctcgaccagctcgaagaagccatcgttgtgctactacgaggcagggaagagagcgacgaatgcattgggggtcggtga

SEQ ID NO: 9730 - DNA, 477 bp, Zea mays
  Peptide Sequence Number=SeqID_51509
atggagttcaggatagagaagcaaagcatgtggccaatgaagactagtcaaaaatatgcatcaggccgcgctccactaatcaagcaagcaccattggctatggattcactgctgcgccactcgcgtgtgctcctcctggagtatggcggccagttcacggacgcgctggcggacgcgtccctgctatcccccgcgagcgattcgtctccgaggacgacgtcgtcaacacgcgctcgcgtgctcggcggcgagagctgcctcaacgccggcttctgcacccgcgcgagcagcagctacgtgcgcgccgccggatggaccaccgcgatgtttgaaagcattaacgagagcttactagtgagaaggcagcggagagggtggccgtcgtcgctgcttcgcgccgccacgctgtcacctggcagtgtcgtctcttcgcctcctccgccgccagcattacagattggatatggagggcactag

SEQ ID NO: 9731 - DNA, 153 bp, Zea mays
  Peptide Sequence Number=SeqID_51510
atggccgataaaggcaagggcaaaagcatcgttattggtgatcatcacacgtcaaacatatcgcaaggagggattgctcggaaggctccggacaagaagactaacaagtccagaggcaccgagggaaaagctggtgacttgcatcaggcttag

SEQ ID NO: 9732 - DNA, 1995 bp, Zea mays
  Peptide Sequence Number=SeqID_51511
atgaagcatacgtccttccttccgtacctgctcctcctcacaaccttggcatcctgcgatgatcaatttctgttatctggcttcacccaatccagcttaaaccttgatggttctgccatcgtcacaaatgatggcctccttgatctgaccaatagcactgcaattaccaacggtcacgcattctaccccagccctttgcacttccgcaaatcacctgatggtaaagttgaatccttctcagtcaatgttgttttcagcatcttcatcacatacccagacttgagtgctgacggcatggccttcttcatcgcacctaccaagaatttctctgatgcacgggcaggcaagtactttggcttgctcaacgaaaacaacaatggaaacacaagaaaccacatcttcatggtcgagcttgatacctacaaaaatgctgaggtacaagatatcaacgacaaccacgttggaatcaacatcaacggtgtattctccttcaaatccaatacatctggcttctatgaagatagtggtgccttccgggagctgacactgaatggaaacaagggaacacaactgtggatcgactatgacaagagtactatgcagatcaatgtgaccctggctccgatcaacgtgcacaaaccatccaggccactgctgtctacaacctatgatctctcaactgtaatctccacctcaacttcatacattggattcgcatccggagcttctcccgtgaactcccgtcattatgtgatgggctggagctttggcatgaataaaccagccccaccccttgacgtctccaagcttcccaagttgcctttccatggccccaaggcccagtccaagctcttggcaattgtcctgccgatagccactgcaacgttgatcctctccataggcactattgtcactctggttgtccgaaggcggctgaagtatgctgaggtgcgtgaggattgggagggtgagtttggtccacatcggttttcatacaaggatttgtaccatgctacaggggggtttaagaataagcacctgcttggagaaggagggtttgggaaagtatacaaaggagtccttccattatctaatgtagaggttgctgtgaagaggatgtctcatgagtcaagacaaggaatgaaagagtttgtcactgaggttgttagcatcggtcgactccgccatcgcaaccttgtccagctacttggctactgcaggagaaaaggtgagctgtttttggtttataactacatgcccaatggtagccttgataaatatctatactgtgaagagcacggtgctattttgaactgggaacagaggtttcgagtcatcagaaacatcgctaccgtcttgctgtatctccatgagaagtgggagaagatagtgatccacagagacatcaaggcaagcaacgtactcctagatggtgaaatgaacggccgcctcggcgacttcggccttgcaaggttgtatgatcacggcactgacccacaaacaacacatatggttggaacaaagggatacctagcacccgagcttctgcgcacagggaaggcgtcccctcatacagatgtctttgccttcggcatgttccttcttgaggttgcgtgtgggcaaagacctgtcaagaaaaatgcagaggggactgaatttttcttggtcgattgggtgctcgagcactggaataatggtgttattacaaagacactggattcaaggcttcagggtgactacaacattgatgaggcccatcttgtgttgaagctaggactcttgtgctcgcacccacttcctagttcaaggcctaggatgcgacaagttatgcaatacctcgatggcgatacgccactacccgagctaaggccaacgcaactgagctcgaacatggttgccttgatgaaaaacagtggactcaactcatctgtcgtgtcatatccgcaaatatcgacgagcttctgcacaatatctagcctctcgggaggaagatga

SEQ ID NO: 9733 - DNA, 2034 bp, Zea mays
  Peptide Sequence Number=SeqID_51512
atggccgtgttcgacatgaagtccgctcccttgatgatcctagaactcctcttagttagccttggccttaccattgcgcccttcagcgccgaagaaaacaacgaccactggttcgtctactctggcttcgccaatgctagcctcaccctagacaacacagcctcgatcacaccaagcgggttgctggagctgaccaatggcacggtcatgagcatgggccatgccttctacccgactccactgcgcctccgtgactcgcccaacagcacggtgcagtccttctctgcctccttcgtgttcggcatcatctccatctacgacgacttgagcagccacggcctcgctatgttgattgcaccgagcaggacactttccgcgcttccagtgcaatacctgggcctcctaagtggctccaacgatggcaacaagagcaaccatatcttcgccgttgagcttgacacctaccagaacagtgagtttaaggacatcaacaacaaccacatcggcatcgacatcaacagcatgacctccgtgcagtccaacccggctggtttcttccatgatcaagatggaaccttcgaaaacctgacactcagtagcaaagaggcgatgcgggtgtgggtggagtacgatcgagagaatacacagattgacgtcaccatggctcctctggccatagtcaaacctaagagaccaacagtgtccactatccaaaacctctcagacgtgctcaccgacgtggcatacgtcggtttctcatcgtcaacgggcaagatccatacgcaacactatgttctcggctggagcttcgccatgaacggccctgctccgtccatcgacctgagcatgcttccaaagcttccacggcatcatcacaagagtcgacgatcctgggtgttagagacagttctgcccatagcaactgcagcattgctcttgtctcttggtgtcgttgctttcttgcttgtgcggaggcatgtcaggtacgcggagatacgggaagactgggaattggagttcggcccgcaccgattctcatacaaggacctgttccatgcgacgggtggatttgagaacaagaatcttcttggcattggaggatttgggagagtgtacaaaggggagctcccgagatcgagattgaagatagccgtgaagagggtatcgcatgactccaagcaagggatgaaggagtttatcgcggagatcgtcagcataggacgtcttcagaaccgcaatctcgtccagttgcttggctactgtcgtcgcaaaggtgagctcctactggtatatgagtacatgcccaatggaagcttggataaatacctgcataatgcaaaagagggcaactctgcgttgagttgggctcaaaggtttcggatcatcaagggaatcgcatccggcctactgtatctccatgaggagtgggagaaggtagttgttcacagagacatcaagggaagcaatgtgctcctcgacagcgagatgaatggacggttaggcgatttcggccttgcaaggttgtatgatcacggtgtcgacccacagaccacacatgtggttggcaccataggttaccttgctccgaagctcgcacgcggcggaaatgccactccccttacagatgttttctcctttggtatgtttgtccttgaggtcacctgtggacagaggcctgtcagacacgaaaatgtgcaagatagccaactcatgctggttgattgggtgctcgacaaggtgcgagaaggatcattcggtgctaccatggatgctaggcttgaagggaagtatgatatcggtgaggcatacttggcgttgaaaatagggctgttgtgttcacacccattcgccagtgaaaggcctaccatgcggcaagtcatacaatacttggatggggagattgaggctccagatttaagcttcgaggtgctagcctctatgcaaagtgaagggatcgatccatacctcatttcatatcccttgtcaacagaatgcttcagcacaacgtcaaacgtcgtctctggaggaagatga

SEQ ID NO: 9734 - DNA, 360 bp, Zea mays
  Peptide Sequence Number=SeqID_51513
atgccctctgtcaaacctttggcgcggtccaggctggtattggaagcaatgacgatagaagctaaacaaggagaaacaaggtgggagaagatgatggcgacgctggagaggttaacggggaaggttgaggctatggagaaggtgcatcaccagctattgggacagtcagaattgactaccgacttggtgaaacaggatgtcgaagagaggacaaccctatctaggcgtgtggcggagaacaagaaggcgttaacaaggatgaggttggaggctatggcgagagagatggaggatgttggagcgggacctgagtcatcggatacaggaggtagaagaggggcctcgccgatcatgaattaa

SEQ ID NO: 9735 - DNA, 189 bp, Zea mays
  Peptide Sequence Number=SeqID_51514
atggcgctccccccagcctggtgccggcgatgggagtgctgcgacggtgggcacagtggcgctggtgcaacggtcggcgatggtggtgcggtggttacgatggcggtggtggtagcggaggagggggagcatgcccgacggccgattgagggtgttaggcgtggagagcggggcacgcctgaatgctga

SEQ ID NO: 9736 - DNA, 213 bp, Zea mays
  Peptide Sequence Number=SeqID_51515
atggaagagattttgaggtttttaacagaagagaaagagatacctaaggatgacctaaggcattgtttggtatacacccagagccaaaaagttcctatgtggagaaataaggaaggtgagcgaaggagaaataaggcgggagcagagtacaagaactctgagactagctttggtgtcgcaacacatccaagggatgttacgacacacccttga

SEQ ID NO: 9737 - DNA, 468 bp, Zea mays
  Peptide Sequence Number=SeqID_51516
atgtccaagggcgaaggttggcataagcctggaaaagtaaaggctgcattgaaacctaaatgtggggtggctaaggaaggaaactactttcattgtggtgtgactggagatttgaagcgcaactgccctatctatattaaggaagtcaagaaggctaaaataagcggaaagtctgcttcagatactggttgtggttctcacatttgtacttctgtacagggactccaaaggagtaggactttggctagaggagatgtggaccttagatatgggtatgtctatctcatatgccataagtttgagtcccttgaaaagttcaaggaattcaaaaatgaagtacaaaatcaaccaggcaaaaatcaagataagcctagaacttatcaagaagcggtgatgagcccagagtctgagaaatggcttgaggccatgagatctgagatggattccatgtatgaaaaccaagtatga

SEQ ID NO: 9738 - DNA, 1866 bp, Zea mays
  Peptide Sequence Number=SeqID_51517
atgaacaagagactgaacagtgaaaagtccggtagcttcccgagatttggaagacgaaggagcaaacgtgaattggagaccggtagtttcaaattaaagggtctgaatcccaaagtatgcggtaagaatcaaaatccagttgagttattctggaaatccaatttgaaccatgatcaaatcctggaaaaggttgttcaattcatcgaaaagttagcttccggtcaagataaatcgaaagccccagaaattcctaatttcgtggagtcatttttgaagatggtggagtccaggattgcaacatatgaacagagcgaagcgtcagcaaagcttggcttcaacgaggagtacacctcattttttgaggctgtaagctgcctttcgaagatcgtaaacactcttgatgaattcccgtttgattcagcgacaacttcttgttttaatcgagcgggatcggttcaccaccgtgcaatgttgttatcggaatatcagttccttgctcttctggacatttctaaacgcaactgcaatgtaactgtagattccaaaactccgaagactccaaaacaatcgttcttcaactccaatcaagagacggatcgatgcgttaaacctgaatacgactccggaacagggattgtgtttccatattttccaccccaatcagttgccaatatgaaccaagtagccttagcaatgatctctgcagggtacgaggaagaatgtttcattgtttacagtggtctaaggctgaaagcattggactttgagttcagcaatcaagggtacgaaaatgtcaatatggaggactttcaatcgatggattgggaatcactggaaggagagatcgataattggattcacatcgtcaaatattgcacgaccaatctcttttctgtggaacgcaagctttgcaattcagtatttccagaacattctttaatcgctcagaaactgttctgcgatttggcaacatccttgaccataaggcttcttaattttccaaatgctattgttttgatcaaacaatactctgcagagaaactattcaagtttttagatatatacgagacattacgtgatttgacttcaagtcttggtagtgagttgtcggcgatggatttgatatccgagacatccgagacacaacgcagggttggtgaagccgcagtgaccattttctgtcagcttgagaattcaatcaagagtgataatgggagaatacccgtggcaagtggtgcggttcaccccttgactcgctatactatgaattatctaaaatatgcttgtgagtacaaggacacattagagctagtatttcagcaacactacgagacggagggatctaccaggcggaaagttcagaagcaggagtctaagaatgcaattgaggacaatgatcggatccccaaaacgtcccatttttcagtaaagttgatgatggtcatggacttgttagatgccaaaattgaaatgaaatccaagttctatagggacccagcattgcgttacattttcttgatgaataatgggaggtatattctgcagaagatcaagggttctacggatatcgatgaaattatgggtccttcttggtcgggaaaacgaacttcggatttaaggcagtatcataagaactatcaaagagagacatggagaaaggttttgcagtgcctaaaccatgagggtttgcaaacaaatgggaaggtgtcaaaggcaatattgaaaggaaggttcaagaacttcaacaccttgttcgatgaaatccataagacgcagagcatttggatggtaatgtattttgctcccccaaataaccatacttcaggtgttctggtaattgctttaactctaactcaagaggtttga

SEQ ID NO: 9739 - DNA, 276 bp, Zea mays
  Peptide Sequence Number=SeqID_51518
atgaccccaaccacttcatcatcagttgccctaagaagggcaagtcggagactggcccacgcgaccaccattcttgtcggcgtaagggcaagcgacagcacacctctagcaagcacaagtctagggggaggtggcgacagtaaatacattggcgacgactctgcttttgaggtatctcattccgccaatgatctcgctgctgaggtagaagagctgaacgctgctttggcaaatcaggataagtttcttaggcttgctactcgtgagaggaaatag

SEQ ID NO: 9740 - DNA, 447 bp, Zea mays
  Peptide Sequence Number=SeqID_51519
atggcgcctcctattgacgtggcaggtctgcgccctaggttgggcgatgtggaagctcctccgaagccgaggtcgagtccgtcttccgtggccaaggtcgagtccgaggcctgggtcgggcgaggcggagaccgttggctgaggccagggcggagtctgagccctggggtcgggcgaagcggagttcgtcgtcttctagggctgagcccaagtccgagccctgggtcgagcgaagcggacccgagtccgagccctgggtcgggcggagcggtgttcgccgtcttccggcacttagcccgagtccgagccctgggtcgggcggagcggagttcgtcgtcttctggggctcagcccaagtccgagcttggggtcgggcgaagtggagcttcctatggccagtcagtggagcggcgaagtgacggcggtcactttggctctgttggctga

SEQ ID NO: 9741 - DNA, 288 bp, Zea mays
  Peptide Sequence Number=SeqID_51520
atgaagctaaccatagtaacccaaaaggtaatcaaggacaagaaggggaggataggggccagcctgggcggggtggctggcatcgtgggcgagatgagtggggagaggcagtttggagaggatgatcaggagatggggcggtctggtgggtgggacccacccacaggcggcggtggcgctagggtttgggggaaggtgcgctgcgccaggtgggtcgcggaggcgcgcgggctgggccgcgcaaagggggggagcggggtgggcctcggccgcgggatgggccgctag

SEQ ID NO: 9742 - DNA, 1110 bp, Zea mays
  Peptide Sequence Number=SeqID_51521
atgaccgaggagcgatatgagaaggctatgtctctcgttactggtgtccttgattatgaacgtttcaaagatgtagacctcgttatagaggcaagtctttactctttgcccttcctcattatgcaccaaatggcagttattgagaatgtgaagttgaagcagcaaatattttctgacttagagaagtactgtccttcacattgcatccttgctactaacacatctacaattgatcttaatctgattggggagaaaacaaaggctcaagatcgtattgctggtgcacacttctttagtcctgcgcatgtgatgccacttctggaaatagttcgtactcagcacacttcaccacaagttgttgttgacttgctggatgttgggaagaagattaaaaagacaccaatagtcgtcgggaactgtactggctttgcagttaataggatgttctttccatacactcaatcagcactcttttatgttgatcttggtatggatgtttataagattgatcgtgcttgtaccaaatttggaatgcctatgggtcctttcagactggcagatctggttggttttggtgtggctgtggccactggtatgcaataccttgaaaatttcccagagagggtctacaaatcaatgctacttcctctgatgatggagggcaatagggcaggtgaagccacccaaaaaggattttacaagtatgagggcaagaggaaagcgactcctgatcctgaaattatgaaatatattgaaaaatctaggagcatggcaggagttacaccagatcctgagctgatgaagctaagtgagaaagacatagtcgagatggtgtttttcccggtgataaatgaagcctgccgagtccttgatgagggtatcgccgtcaaggcttctgacctagacatcgcttcaatctttggcatggggttcccaccttataggggaggtgtcatgcactgggcagattccatcggcgcaaagtacatccatggaaagttggaggagtggacaaagcggtatgggggcttcttcaagccctgctcttacctcgctgaaagagctgcaaaagggattcctctggagaaccaaacacttcctaagtcctaa

SEQ ID NO: 9743 - DNA, 879 bp, Zea mays
  Peptide Sequence Number=SeqID_51522
atgggggtgatggatgcggcggcggtggacgaggtggtgcgtcgcctcgtcgagggcggccgcgggggccggcaggtgcagatgtccgaggccgagatccgccagctctgcgtcgaggccaaacaggtgctgctttcgcagcccaacctcctccgcatccacgcgcccgtcaagatctgcggttgtttggaatggatgataaaaaatgatcgagtgcattcttcaggtgatatccatggacaatttgttgatctcttgaggctctttgatttgggtggttatcctccaacttcaacttatattttccttggagactatgtggatagaggcaaacaaagcttagaaaccatatgtctgcttctggcatacaagttgaagtaccctgataatatataccttttaaggggaaaccatgaagatgcaaaaattaacagagtttatggttctatgatgaatgtggtagaagatggctacgagttctttgcagagagaagactagtgaccatcttttcagctccaaactactgtggcgaatttgataatgcaggtgctctattgagcatagatgaaagcttgatgtgttcttttcagatcttgaaaccaaatgaaacaggtgcaccacattcaaggaaacctcttccaagcaagtttatactgatgagcctggcatacgtcctgaaatcagtttgcttcttatttccatgcttctttttacgcttgtcatgctggactgacataaaattcatggtcctgatacgacaagggattcaaatctgcattcgtgatgaggttttcctttttcctacatctcagacagttgttggtcccctcaaaacttttctctcgaatacgcaggagagttgcgcatcatttcattaa

SEQ ID NO: 9744 - DNA, 1605 bp, Zea mays
  Peptide Sequence Number=SeqID_51523
atggcgccgcataaatccgagggttcgatgagctcagggtcagggccctccagcagcagcaggtccgctggctcgtccatgagcagcatcgccacgacgaccggtcgaagcggcggcagcaccagcaccagcagcggatcgaggcccctccgcgccgccgccgccgcctcgtaccgggaggaagaagaggaggaggaggaagagaaggaggggaggatcctggaggcgcccaacctccgcatcttcaccttcgcggagctgagggccgcgacgcgcaacttcaggcccgacacggtgctcggcgagggaggcttcgggcgggtgtacaagggctgggtcgacgagaggaccatgaacccgacgcgctccggcatcggcatggtcgtcgccgtcaagaagctcaaccaagagagcgtgcagggccttcaggagtggcagtccgaggtcaactttctggggaggctgtcgcatccgaacctggtgaggctgctgggctactgcgtggaggacagggagctcctgctcgtgtacgagtacatgcccaaaggcagcctggagaatcatctcttcagaaagggcggctccttcgaaccaatctcctggaaccttcggctgcgcatcgccattggcgcggcgcgtggcctggccttcctccactcgtccgaaaagcaggtcatctaccgagacttcaaggcctcgaacatcctcctcgacacgaattacaacgccaagctgtccgacttcggtctcgccaagaatggcccgaccggcggcgacagccacgtcaccacccgtgtgatgggcacgtacggctacgctgcgccggagtacgtcgccacagggcacctgtacgtgaagagcgacgtgtacggcttcggcgtggtgctgctggagatgctcacgggcctgcgggcgctggacacggcccgccccgcgcagcagcacaacctggtggagtgggccaagccgtacctggcggaccggcggaagctgccgcgcctcgtggacccgcggctcgaggggcagtacccgtccaaggcggcgctgcaggcggcccagctcacgctgcgctgcctcgagggggaccccaggagccgcccctccatggcggaggtcgtgctggccatcgaggcgatggagcagctcaggctactcactgtccaggaagaaattacatggactatttctgctggatcaggtcgattgtcagactggtcgattgtcagactgtcaagcccttgcgtcatgcgatctgaggaggatccaggcatcatcaggcgactcggctttgcctcttgctcgcttgcttccgtggacacgacgggtttcagtacatgtgcgcccccaaactcatcgcgacaacaatgcatcacgtcaccaagttcactcatcattggtgtggcggtgggtgcccagggcagttacacgtgcacggtgttcggagccgccgcggtgcgcagcgcagcacagtgcgcagccgcgccgcgccacgccggaagaggtccaggacaagggcaccgaaaaggcccacctgcctggcatagttcagtcctacagctcaccggtagctggcgccgcctggcaggggcggagccaggattatga

SEQ ID NO: 9745 - DNA, 1791 bp, Zea mays
  Peptide Sequence Number=SeqID_51524
atgaaaggggcagcggatatctcgccggtcgcccgtcagctcgcagggggcttgaatgcggatagcgacccatcacgtcggcgcgtcctggccagcggttgcgcgccggatcatgatgaccatcctcccatcagtcggcgcaaggctgtttctcaacgtgcggaagacgatggctggactgaagtcaagccaaagtactggtggcgtaaaatccaaggaaatctcgggaaatctctgcagcagatcgatgcaatgggagccagactgttcaaatcgaagcttcagggagacccgagggggaggcctgctcatgctcactgcgctgttgcagcaaccggctcaatcaagcgtcgtagggatgagatgatcaacaaggcagtggtttgctccttcgacgacaacagccatgaagtggacagtcttcaggcagatcaaagcagtgggctcttgaccgtaatacggtctcgtatcgtggtcgggtctttcattttggggattggtccgaagatagttatgctagaaagactttcttcgagtttagagttaaggttcgagttgaagcaggggggacctccaaaccgtaagcctcgcagagagtttgaatggacctacggtgtccctgattccattggtgagaaaagagaatatccgggtgttcgtcgtggaagggatgtggttcgccgggactgggaccaagatgatgatgatgagtatcagcatggtagaaggcgcggccctcgtcgacatcgcagcctttctggctgggttcgttcgtcgcgctgtcggggtgggactgctgactgcatcagctcgaatggaaaattcagagcttccacccccttcaggcgccatgagatggggatgccacactcaaagcgttgggttcctaaattaaaagctaaagctgtttctttcgctgttccgctgatttctgctgtgtggcctttcgagggcgaagagggggcgactggtgttgacaggctcttgctgaatggtggcactgaagctggcatgcaggaggcgcttggcttccatgccggagggggatcaccaacaaagctgattgcacccaagaacgacctcgccatggaaactgctacatctcccaaggtaatatcgaagctctcttcagatactgcaacagccccacttcctagtaagcctgtccccagtcctatctcaaacctccataattctctgaatcctaagatctcaaatgtggacgtgcatcagcagtcgcagcaggggtttcaagttgtcgagccccaagtagaatcaaatgatatctatgccgagcaagtctgtaatgtgactgctgctcaagacgaatgtccagtaccctcaacagttacggcagtaacccagcatagtcaggaggcttgtagtttaccaccggattctcagccaaacagcactaacagcttgcagttacaaaacttcatcgcaaatataactatgccaccagtactctctctgattcaaacacttccacacaacaagtcacccaacatagcaaacgctctaggggttttgtcccagcaacatactaagatgcctgaccaggtccccacctccggcaagcgctatagtgtcagattggatgcaaagaaaaaattatcgttggggcgttctagagatgcaatagccaaagctcaagatattctgattgctaaactatataactcaacaacgaaaaataatcagggctctctggcttcttgctcaactaatgaagtcaatcattttgaacagattgcaaggctttttgcaaggcctcttaccaaggtttag

SEQ ID NO: 9746 - DNA, 1011 bp, Zea mays
  Peptide Sequence Number=SeqID_51525
atgtgcatcgcggcatgggcgtggcactgccacccgacgcaccgcctgcttctgctgttcaatcgcgacgagtatcactccaggccgacgcagccggcgcagtggtgggcggcgggggaggaagccaaggaaatccttggaggcagggacgagctcggcgggggaacgtggatggggtgcacgagggatggtaagctcgccttcctgaccaacgtgcgggaacccagctctctgatcggggccaagaccagaggacagctcccggtcaggtttctacagggcagcctttgtccattggagtatgccacagaaattgcaaaggaagcagatcagtacaacggctttaaccttatattggctgatgtgaactcaggaaccatggtttacatctctaatagacccggaggcgatcctgtgattcaaacagttgctcctgggcttcatgtgctttcgaatgctgcaattaattccccttggccaaaggcaatgcgcttaggacagagtttcaaaaggtatttgacaatacacgatgatgcagaagcctctttaaaacaaatggtagaagagttgatgatggatactgccagacctgatagatctatggtgcctgacaccggcgacgaccctgagtgggagtacaagctaagctcaatattcattgacactgcaaaggaacaggcaaaaaccatggcacgatatggaacacgaagcatggtggcactagcagcgaaattggaaggtgaggtaacattctatgaaagatgtacagtaatgtttatccaaataccacaagaagaattggttgcatgtgctattccccccttgccgctgtataattttggaggacatcaattctttgctggcacaaaattgctgaaactacaatgtcaccctatgattctttatatgctttgtgcctgtattggagagtacaccaagagtgtttcaactgaggtcacatctgtatccaatccaaagtcagatgggcataaattaggatattacatctga

SEQ ID NO: 9747 - DNA, 309 bp, Zea mays
  Peptide Sequence Number=SeqID_51526
atgacgaaggccctctccgaggtcaccaagcaggtggccaacctccacacacaacaggtcgtcatcctcttgcggctggccacctggagagtcattgggcatccacatcagcgacgcagagaaagggggagtgagcaccgaaggggaaggcagcgaggcggcggcagtgttgtgttacttcatcagcttcgacaggtgcttcacaagatgaccaacagccccgtggtcagttgccactcgcaccacagcgccgggtgcctagtggaagggttcttcgtgccaactgccatgtgggtgagtgctgggtag

SEQ ID NO: 9748 - DNA, 1059 bp, Zea mays
  Peptide Sequence Number=SeqID_51527
atggcgagggttcgggacaggacggaggacttcaaagaggctgtccgagtcgccgcactctcccatggatacacggaggcccaattggccgcgctcatgtcttctttcatcatccggaagccgtcgcccaagtcaccgttcactaatgccgcaatcaagacgcttcagagcatcagggaactcgagaggttcatagtgaagcataggagggattatgtggatctgcatcgctctaccgagcaagagagggataacattgagcatgaagttggtgtttttgtaaaagcatgcaaggaacagattgatatcttaaagaacaggatccacaaagaagagaagaatggaagtggaaagacatggcttggcactagggatgagagttcacgggtggacttgatagctcatcagcatggtgtggtatggttattctccctgccattgcttggcagtcagtcatcagttctaaagtctgaactacgttgttttgcagtagttttaggggtttccttgtgcccagctccagttctaattttgagtgagcgtctacactcggtaactgcacaatttgatcatcttcggtccattcgttttcaagatgctattaacagagcaatgccaaggaagaagattcagaagagaccagaaatcaaacctgctgaaccatccaagtccaatcttgttctaaaatctgatgtatcaaaggttgtagaccatgaagtatctacaacacctatgagagttcaagaacagctattggacgatgaaacaaaagccctccaggtggagttgacaagtcttcttgatgctgtccaagaaacagagacaaagatgatagaaatgtcagcacttaatcatcttatgtcaacacatgttctacaacaagcgcaacaaattcagtatttatatgatcaggctgttgaagctacgaataatgtggagcgtgggaacaaggagctatcccaggcaatccagcgcaacagcagcagtagaacctttctcctactcttcttctttgttcttactttctcgattctttttcttgactggtacaacaactga

SEQ ID NO: 9749 - DNA, 723 bp, Zea mays
  Peptide Sequence Number=SeqID_51528
atgaaggcagcggtggccgcggtcgtcgtcggcggcggaggaggcgacgaatggaggtgccggaagcaccctgccgcgagatccggcggcggggtgtgcccccactgcctccgggaccgcctcctccggctctgccccaactgcgcgcacgtgcggccctgcgcctgcgccgcggcgtgcgcctcgccgtcctcctcctcctcggcctccggcgacgcggtcggccgcgtccacagcctcatcgagcgggagcaccggatcgcgcgctccaggtccgtggccacgggctcctccgccgcgctcgccgccccctcggcggcgaccgcgtccgggggcggcaggcggaaggcgcgggtctgggggtggccgccgttctggaagcccgcggcgcgggaggggggcgcggagccaggggaggaggaggacgacgacgaggggatggggctgccgcgctcgagctccgtgtccgccacagcggtggaggccaagagcgcggccgcggcggcgcggggcgcggtgggggtggcacttcccgagcccgctgaaggcgttccggcaccgcaggttgtcggcgagcgtggcggggcgggcgtgagcgaggtgcctcacctccagatgcccggaaagtgttgttggactattagcttcgaagggcgagatgttagggttcgactggcactcgtattgattggtagtaatgtagcggaattacagcagaattaa

SEQ ID NO: 9750 - DNA, 417 bp, Zea mays
  Peptide Sequence Number=SeqID_51529
atggccccgagaattccaacgcacaagaaggggaacaagggaaccaggcatcgcgaagagagcccgggttcaaccgtctttacagtattcggaaattgcttaaaattcagtgttgatcatagaggcgacacaaatgtttcctattcagagctggactactacaaagttctggaggttgactatgacgcatctgatgacaccatcaaattgagttatagaagattagctttgatgtggcatccggacaagcataagggcaatagcaatgccacaactaaatttcaggagattaatgaagcatacaaagttttgagtgacccagctaagcgactagaatacgatgtttccggttgctacgagatcgaccaatatactttgcgtgagtaccttacaaaatttaaggggcccgacatttga

SEQ ID NO: 9751 - DNA, 138 bp, Zea mays
  Peptide Sequence Number=SeqID_51530
atggattctgggtatgccatctcagctttgtcagctgcgggggtgctcaaccgtgtagactcactgttccatggcatcgaaacggacgtgcggtatgatgagacggcgccgtgggctcgcgccgtacggcaggtttga

SEQ ID NO: 9752 - DNA, 435 bp, Zea mays
  Peptide Sequence Number=SeqID_51531
atgccgggactagggagcaggggcaacggtgaccacgacggtgggtcaggggacgacatcgtcttcacgctcccgctcgccttcctactcgtgctccagctcaccaaggacgatcgccacctcaccaccacgacatccgccgagtcaagttcgacggcatccccgcgacagcgacgaaggcaccaaggaggcatcccaactcgtcctccctctaggtgttcgccccccgctcaaccgcacccatccccactcatggttgtcatgcggcacgtccctgtcatcctcaccacagaaaaagcccctaccgccgttggggccatcgtcgtgccgatagatgtggacatccaggtgatgcttcatagaccctctagtagaggaggaggaggagaccatggtggccagcgagaatggggccatcgacatgtaagacattga

SEQ ID NO: 9753 - DNA, 1386 bp, Zea mays
  Peptide Sequence Number=SeqID_51532
atggcagcgcagcagcaggccgccgcctccgtgcttcagagcttcccgatcagggcggccgtgctcgcgctctgcgtcgcgctgctgccgctgctgctccccgcgcaggcgcctgacgtcgcggccgggggagccggccaggctttcctcgccaaggcgtgggagctgctgcacctgctgttcgttggcatcgccgtctcgtacggcctcttcagccgcaggaacagcgccgacgatgggcgcgccggggctgcagcagcagagaaggacgatgccgcggggcccgaacctgccaaggcggacgcgaggtacgcgtggcggatgttcagggactcgatcgcgccgttcgatgacgacgacgccgacgtgctggtgccggacagccctcccggtggcggcggaggcggcatggcgcgctcgtggagcgcgctgcaccggcccgtggagcccgtcgtcgtcgtgtccactggaggcggcgggagctcggcggtcgactgcgcccacgacgacgagaccgtgctcccttcgccgataccgtggcggtcgcggtccgggaggctcgacgcgcgccgacccgcgtcgtcgccgagcccctcgccgtcccccaagagggtgtccccggcgtcgtccttgtccagggagacgctggccaaggcaagcgaggaggagtactacgccaaggccaagaggaggagcccgtacaggtgctcttccatctcctcctcgccgccggcgccgcccccgcctccgcctccgttcctcgtccacggttaccacccgacgaccgagcgccggtcggcagcgccgaaaagctttaaggaggagctgcagcaccacagcatgagaggccgaggagaagaccactacttgccgaagacgagcagcaactctttctccttgccagcgaatccaagaagctctttctcttctaacggtggctcgtcctcgtcggtttcggttggcaagtcggtgagaacgttcaggacaagggagccagcagttttccaagaccaaagccaagaactgcccgacgactccggtgatgatcgtgacgcgctggacgtgcacggatcagaggagccgtacggctacagagcttatcagtccatttccaggttccagtacgagaggtcagggagcgactctatcctgggcggtgtggcagtctcgtcggatgagagcgagagcagcgacgacgacggcggggatgacgtcggcggtggcgggtactcgacgagggagtcgacgccggaggtggacgagaacgaggtggacaagaaggcggaggagttcatcgcccggttcagggagcagatcaggcggcagaggatcgagtccataaagaagtccgcggggacgcgcggcgtcaagcgccacggcaagtag

SEQ ID NO: 9754 - DNA, 555 bp, Zea mays
  Peptide Sequence Number=SeqID_51533
atgaaccgcgcccctgccgggaaggcgccgggtggcagctgcagcgaggacgaggaacccggcgcgtcgtcgccaaacagcacgctcatctccagcctcagcgagaagcgcgcagcgccggcgaggagcggcgaggaagtgggcccagaggccgaccacacccgtagggccggaggcagcggcagcggcagcgacgatgaggactgtgtcgccggcgccaggtcgcgcaagaagctccgcctgtccaaggaccacaggccgccgtcctcgaagagagcgagcacagcaccctcaaccccgacgaagctgaagcagacggatcggaggtggactgcgagtgctgagcgctgctgcgtgacgctggcggaggagatccggcggctgcagcgggaggtggtggagctgcgcgcgctcaagctcgtcgcgccgcaccatgcacgcgcgcattccgccgcccaccgcgctcaccacgcacccctcctgcgggaggtgcgctttccccgtgtccttcccttcgacggcccggaggttatgacgattgacgacatggcatga

SEQ ID NO: 9755 - DNA, 255 bp, Zea mays
  Peptide Sequence Number=SeqID_51534
atgataagcttgcacatagcaaacacgtacaaatggaacacattttccattgatatcgtgtttatgcaagtggataagggcgttagatgggctagaaaccactatctgtcatcaacagctcttccttctatcaagggagacaagttaatcattccccatgagagtctggatatatcaattgagaggctgaaggaacagaaaattgaggcttgtcacatgagcatcagtcagaggtgcttcatgttaagcatctag

SEQ ID NO: 9756 - DNA, 153 bp, Zea mays
  Peptide Sequence Number=SeqID_51535
atggcgatcggggcgttcgtggagggcgctccggcggacggcggagaaggttacagcggccgcgtgacgcccttcgtggtgctgtcctgcgtcgtcgccggcagcggcggcgtcctcttcggatacgacctcggcatctccggaagtaaataa

SEQ ID NO: 9757 - DNA, 294 bp, Zea mays
  Peptide Sequence Number=SeqID_51536
atgtcgtcgctcgccgctgcgagagcggataacttctactatccgccggaatggagccccaagaagggtgggctgaacaagttccatggccagcatgcgctcagggagcgagcgaggaagctcgaccagggcatcctgattataaggtttgagatgccttttaacatttggtgtggtggatgcaattccatgatagcgaagggagtaagatttaatgctgagaagaaacaagttggaaattattactctaccaaggtaaaccatattatccttgttataggcttcactgtatag

SEQ ID NO: 9758 - DNA, 594 bp, Zea mays
  Peptide Sequence Number=SeqID_51537
atgaagaggctacgcgatgtttcgtcgacgaaaagaaccgtaccttcttggggctccattccggcggatagtagaagttatccgctctcgcagcggcgagcgacgactgcagagagccaaaagaatcaatccgtcaaacaatcgagctaccggcgaataacaaagcatcatggccccgacggatatggtttttccaccagatttagggcaggtgtggataaatattccaaagagaggcccccgagtttgggaaggtggaagaatggaatagagcgaagtcctagggttagatctccaacataccatgttgcctcctgggtggaagaaggggagaaagaggtcgacaacgatgccaactttccggcggcggcggcggcagcagtgatgtcgaccgtggcgagcacggtgtcgaaccgctctggaagatcggcggccgaggaccgtgaaggcgtgcggcgtcgggaagaggggcgtcgagccggcgattgttcgactctctaccgtctgtctggtgacggaagaaggatgattcgcgttggggacgcggtgacgcggttgcgactcgggcccggaacccttttctttccgcggctg

SEQ ID NO: 9759 - DNA, 381 bp, Zea mays
  Peptide Sequence Number=SeqID_51538
atggcgcaaccatgcatatattatgcatattgtttcagtaagcagtgcagagttcaacggcggcaggcagcagcatgcacggccgcatgggcatggcagccggagtcggatcaaacagggacgcgcgcatggcatgcgcggtgtgtacggagggagggaaggggaaggggaagggccgaggccatggagaggacgaggacgcccccaagtcaagatcgtgcacgcggtggggttggggatcgggagggcggcaacggcatgcagctggccaggaactggaactgggcggctgctgctgcagcgtgctttgccggggcggggggcggcgggcccggagttggactaaccgaccaattaaccacgcttttcgatctggactag

SEQ ID NO: 9760 - DNA, 762 bp, Zea mays
  Peptide Sequence Number=SeqID_51539
atggtgaagggcgcccagctccaggacgcggcggccgacgccgcccgcaatgcggcggcggcggcggcgaggcagcagggctgtggtggcggcggcccggcgggctgcggcaagaggcagtacaagggcgtgcggatgcggagctggggctcctgggtgtcggagatcagggcgcccaaccagaagacccggatatggctcggctcctactccaccgccgaggccgccgcgcgcgcctacgacgccgcccctgctctgcctcaagggctccgccgccgaccctcaactttcccctcccatcccagcgcgtcgccgcccgccgccgcggcccaatgcccaccctgcgggcaagcccgctgcaggccgggcgccgggcgccgcccgcccgccgcaccccactactactcctactcctcctccgccgcctccacgatggccgccgacggcgccacccctccgtgcagctacggcgacgcgtcgtcgggcgtgagctcccccggagacggccgggaaacactgatgacctgtgctacggcgtggcgcacgacgacgacgtggaacatggtggcgggcgacgcggacctcgccgcgctcgcggacatcgagtccttcttccggtcgcccaagtgcatggagtacgctatgatggacccatgcagcacgttcttcgcgccagcgcccatggcgacggacgcggccagcgagtgggagtgggaggaggaaggcgagatcgacctctggagcttctcgtccctcaactga

SEQ ID NO: 9761 - DNA, 2346 bp, Zea mays
  Peptide Sequence Number=SeqID_51540
atggcggttctcaacctcctcgccttgatcattgccacgctactgctacttttcagaagaacctccggcgccggcatttcgccggcggacacgctcaacagcgggggcaacgtcaccgatggcgagacgctggtctcggccggtggcacattcaccctgggcttcttctccccgtcgaccacggtgctgaccaagaggtacctcgggatctggttcacggcgtctggtacggacgccgtcttgtgggtggccaaccgcgaaaccccgctaaacaacacctccggcgtcctggtgatgagcagccgggtgggccttcgccttctcgacggctctggccggaccgcctggtcctcaaacacgaccggcgcctccacctcttcggtggcacagctgctcgggtccggcaacctcgtcgtgcgcgagaagagcagcaacgccgtcttccagtggcagtcgttcgaccatccgcagaacaccttgctcgccggcatgaggttcggcaagaacctaaagaccggcatggagtggtccctgacgtcgtggcgggcgcaggacgaccccgcgacgggggactaccgtcgtgtcatggacacgaagggccttccggacatcgttacttggcacggcaacgccaagaagtaccgcgcggggtccgtggaacgggcgctggttcagcggcgtgccggagatggactcagggtcacctacgtgctcaacaccacggccggcatccccttcacccgcgtggtgctggacgaggttggcaaggtgcgggtcctgatgtggctgccgaccagccgggtgtggaaggaatacccatggctgccgcgcgacgcctgcgacgagtacacgtcctgcggcgcgttcggcctgtgcaacgtcgacgccgcgccgacgccgtcctgcagctgcgccgtggggttcagccccgtgaacgcgtcggagtggtccaggagggaagcctccggcgggtgccagagggacgtgccgctggagtgcgccgccggcaacgggacggcggtgacggaccggttcgcgcccgtgcacggcgtgaagctccctgacacggacaacgcgacggtggacatgggcgcgacgctggagcagtgcaaggcgaggtgcctcgccaactgctcgtgcgtggcctatgcccccgccgacatccgaggcggcggcgatggcagcggctgcgtcatgtggaaggataacatcgttgatgtccggtacatagaaaatgggcaggatctgtttctgaggttggccaagtctgaatcagctacaggggagagggtccgtctggcaaagattttggttccagtgatggcgtttgtgcttgcactcacggccgccggcatgtaccttgcttggaactgcaagcttagagccaagcgtcggaacagggataatttgaggaaagcgatcctaggatactcgactgcgccaaacgaactcggtgatgaaaacgtagagctcccatttgtcagccttggagagattgctgcagcaacaaataatttttccgaggacaacatgcttgggcaaggtggctttgggaaggtctataagggtacgctgggacagaacgtgcaggttgcaatcaaaaggctcggccaatgttcaggacagggcgtggaggagttcaggaacgaagccgtcctgatcgcgaagctgcagcacaggaacctggtcaggcttcttggatgctgcatcgacggagacgagaagctgctagtctacgaatacttaccgaacagaagcctggactccattatttttgatgctgcaagtaaacacctccttgattggccaacacgtttcaagataatcagaggagtatgtcgagggctcctttatctccaccaggactcaaggctgactataatccacagagacctgaagacgagcaacatactgctggacgcagatatgagccccaagatatcggatttcggcatggcaagaatctttggtggaaaccagcatgaagcgaacaccaatcgagttgttgggacgtacggttacatgtctcctgaatatgcaatggacggcgtgttttctgtcaagtcagacacgtacagtttcggcgtcatagtcttggagatcataagtggcctgaagatcagtttaacccattgcaatggcttccctaacctgctagcttatgcatggagcttgtggatagacgacagagccatggatctcgtggactcgtccctggagaagagcagttcctgcagtgaagctttacgctgtatccagatcggactgctgtgtgtgcaggacaacccgaatagtaggccgctcatgtcgtcggtggtgaccatgctcgagaacgaaaatgtgtaa

SEQ ID NO: 9762 - DNA, 2466 bp, Zea mays
  Peptide Sequence Number=SeqID_51541
atgaagtgccgggcacgcatgcaagctcaacaacgccatctgcagacggcagtcagaactcaggagtcgactcatccaggccacgttgctggctctggctccggatacacacgaagtcaatctatctgtggggccacgctgacacatacaaagccgctcttccccaaagagacgctcatctcggccggcggggacttcgctcttggcttcttttctcctaccagttcaagcaacaagctgtacatcgggatttggtacaacaatgtcccagagcgggagcgcacggtggtgtggatcgccaaccgtgacagcccagtcaccaccccagctacatcagtgaagctcgccgtcacaaacgattcagaactggtgctgtcagactcccaaggccacatcttttggatggcaacgagtagcacaagtggaggcgctggagcttttgcagtgctgctcaactcagggaactttgtccttcgatcgccaaacggcacggacgtatggcaaagcttcgatcacccgactgatacagtgcttccaaccatgaggagtatgataagatacaggtcacaaccggctacgggcctctttgcctggaagagccctgacgatccatcaaccggggacatctcttctggcatggatccggcctcctcaaacgttcaggtgttcatttggaatgggacattgccgtactatcgttcttctttttttaatgatgtcccagcatccggcggcacgtaccaggccaacaatacctcagtcacataccaatggatgatggtcgacacaggggatgagatctactatacgttcacagtcttagccggttctccctacatgcacttctcacttcaccacacaggcaagatgaggctcctggtctgggaaaatagcacatcatcctgggtgctgatttctgaggaacctagtgttggatgtgatctctacgcctcttgtggcccgttcggctactgcgatctcactaaggcaatgccgacatgccagtgccctgatcattttgagctggtcgacagtctcaacttctctagaggatgccagagaaaggaagagctgaaatgcggaacagagagctatttcatgaccatgcctaacatgaagattcctgacaagttcttgcacattagaaatagaaccttcgaccagtgtgcagctgagtgcgccagaaactgcacctgtatggcatacacctatgccactctaagcactgctagcactacgggcgatgcatcgaggtgtttggtctggactcaggatctcattgacatggagaaagcaagtgtttttttagagaacttgtacatccggcttggcgaatctcctgatcagaagaagagaaattttcagaaaattttactctcagctatagcatgtctgctgctacttacaattggtgctcttggttgggcatgtaaaatcagaggcaaatggcacaagaagaaaatccagacgagaatgatgctagaatacttgagttctacggatgaagctgggggaaagaatatagagttcccatttattacctttgaaaacattgtcacagcaacagacaatttctctgactgtaatatacttgggaaagggggttttggcaaagtatacaagggaatgttggaaggaaccaaagaagtagccatcaagagactgagcaagagttctgggcaaggtgccgaagagttcaggaatgaagtaatcttgattgcaaagttgcagcacaagaacctagttaagcttcttggttgctgtgttcatgaagatgagaagctgttagtttatgagtacttgccgaacaaaagcttagattacttcctctttgattctgcaagaaagtcaacgcttcagtggccaacaaggttcaagataatccacggggtagctagaggaattatgtatcttcatcaagactcgagattaacaataatccatagggatctcaaagcaagcaacatcttgttagataaggacatgagcccaaaaatatcagattttggcatggctagaatattcagtagcgaccagctccatgcaaatactaaccgagttgtaggcacatatggttacatgtctcctgaatatgcaatggaaggtgccttttcagtcaagtctgacacttacagctttggtgttttaatgctggagattgcatggaacatgtggaaagaagggaaaatagaagatttggtggactcatcagtcatggagaattgctcccttgatgaagtttcacaatgtgtacatataggactcttgtgtgttcaagacagtccgagcttcaggccactcatgtcggcggttgtgtccatgctggagaacaaaacgacgacacttccaactccaagtcaacctgtatattttgcagttagggacccctaccaacctggaaaggcagttggcaacaaggagttgtctatatatgatatgagtctcactgtgccagaaggtcgttaa

SEQ ID NO: 9763 - DNA, 279 bp, Zea mays
  Peptide Sequence Number=SeqID_51542
atgacccaccccaaaaggagcaaaaagatggtaccagaactgttgggtgaagacacaaaacacagaaactcttgtgtctttgatggggctactccggacatctctaagattactcaagacattagggacgatgccaagatgtggtgtctagcaggggctgcagggctgaaagatatgccggccggctgtccctttcgtcagactctggaactggttgtggctcatagagaagatataaaggcgcagttcaaggccgcacaacagattgaaaacccctaa

SEQ ID NO: 9764 - DNA, 444 bp, Zea mays
  Peptide Sequence Number=SeqID_51543
atggtgtggaatgaggcgccggagtcggcaacccagtcgatgggaggaggggacagcgaagacatgggtggtggagaccacaaggtctcgatcgtcatggaggcgatcgcgacgctggggaacacaagcaacccagtagagtggcggccctcctatgggtggacctcgatgcagtcacggagaacagagatcatgacccgatcaacaccgcgagtgtgcctcagagaagctggccatcgtaaagggagacacgggagacacggtggagtgaaggaggggcatcgagggagcaagtgcaagaaggctcgcatcgtccttgagggtcgtgctactagggaaagcggccatggcaaaggcagggcccccgacagcaaaaggaatgccatgaatagtcagggccgcgtgcgggcgggggaaatcgggagctactggggttgcagatga

SEQ ID NO: 9765 - DNA, 552 bp, Zea mays
  Peptide Sequence Number=SeqID_51544
atggatggcaatgaggaggcgcgggcgatggtgtgggagcgacagaaggcggaggggagcagaggcggcgagcagagtggtggcatggcggtggcgaaggggagccatggcaagggcatggcggtggcggaggaggtggtggtgccctacggaggcaaaggggagaggggccacgagactagagatggcaatgggtacccgaatacccaatgggttttacccgatatgaaggcaggtatggaatggtattacccgacggtcgcagtctatcttcctcccggcggctaccctctgttccaggccgtgcccgtgctcacgccagccctccctggcgccgccgcacctgggcccaacgcccccacgatacgcgacactcttctccgtcgtgcgagcgccttctcctacatcccgacaacgccctgcacctcccttgtcacgcagacgctcccctccactaccctacgcaacatcgccatcaccttcaacctggacattggtgccctaagtgcagcccctggccctccggcgggcacctccttccactatgactag

SEQ ID NO: 9766 - DNA, 375 bp, Zea mays
  Peptide Sequence Number=SeqID_51545
atggcgtcggacccggccgaccggagcaaggcgacggccgcgctggacgaggcggcccgcctcggcgccacgctcgtgcggacgtgggcgttcagcgacggcggctaccgcgcgctgcaggtgtcgcccggggtgtacgacgaggaggtgttcaggggtctagactatgtgatatccgaagcaaagaagcgcgggatccatttgatcctgagcctggtgaacaactgggacgggtacggcgggaagaagcagtacgtgcagtgggcaagaacccaggggcacagcctgaattctgatgacgacttcttcaccgacagcgtgaccaaagggttctacaagagccatgtcagggcccgtcgaccacgcactccatag

SEQ ID NO: 9767 - DNA, 375 bp, Zea mays
  Peptide Sequence Number=SeqID_51546
atggagaaccaaacgattgttcgtttattagagcgcccacctgagcttgaaccctggtgtattggtttcagcaaatttcctggccagccagggtgcaaaagggaggaggcaaagatcactgcttgggaaaatctacagaaagcaaaagcagaggctgccattcgaaagctggagatgaaacttgaaaagaaaagatcatcgtcaatggacagaattctaggcaaactccgctctgctcagaagaaagcacatgacatgcgaagtgtagtttcttatagtgaagatcattgtggtgcgaggacaaccaagaagacatctttccttgtcaaaactggcaagcctttcagctgctgctttacctaccgtgcttgctag

SEQ ID NO: 9768 - DNA, 318 bp, Zea mays
  Peptide Sequence Number=SeqID_51547
atgcgcagggagatgaacaccgagagaggagaggtccgcagaaaatccggccaggaacacgcgagcaggatcccaagccggccatgggagatggacgccggcagaggagcgcggctgggggaaagagagaggagtgtgcaggggcgagctcggctgggcgaggcaaagaggaagacacgctggaagagaggaggagcggtcgagctgggagcagggaggagcagaggcgctcgcaggaagatgggcacggctggagaggagagcgcagggagagagagcggcgttgggatatttgaagaaggaagcggtgacggctga

SEQ ID NO: 9769 - DNA, 204 bp, Zea mays
  Peptide Sequence Number=SeqID_51548
atgacggaagccggggagctgccgacggtcggcccgagaacgacgatggagcagcggacggacgagcaggaaaacattagagaaagggatcacgccgaatacagcgacgcggcatatcagatggaagagagaaagcggtggagagataaggcgagggaagggagatgtacgtatgggatttttgaagaagagcctgcgcgctag

SEQ ID NO: 9770 - DNA, 204 bp, Zea mays
  Peptide Sequence Number=SeqID_51549
atgacggaagccggggagctgccgacggtcggcccgagaacgacgacggagcagcggacggacgagcaggaaaacattagagaaagggatcacgccgaatacagcgacgcggcatatcagatggaagagagaaagcggtggagagataaggcgagggaagggagatgtacgcatgggatttttgaagaagagcctgcacgctag

SEQ ID NO: 9771 - DNA, 321 bp, Zea mays
  Peptide Sequence Number=SeqID_51550
atggggttgaagccggatagaggtctgatggcgctggggcaagcactgcggcagatgacgcggacgagctggagtcgggcactggggatgggcaccgagctagaacagggaggagggagaaacgccggcgagccgcagcagggaccaagcagagggagccgctcggttggtgtccacgccatggccaagggagaagcagatcacgacaagctggagccaggtccagggcgcggaagccatggcaagcagacagagagtgtcgcgagttggagctgggggatggagaggacgcagggaatccgtcgtcgggagcacgactag

SEQ ID NO: 9772 - DNA, 255 bp, Zea mays
  Peptide Sequence Number=SeqID_51551
atggccggcgctcggactgtgttatttcttccaggctgccgcgccctgccctctgttctgctcgccgtactcggtccaagacttcaatcgaagattgtcgtcattccgtgcgtcatcgaggaatcccaaggattggatgaagacgaaactagcagcgcggtattccccaagcgctcgacaaattgcctgaatcggaaaaatcgctaccgatctcatggattcatgtcagctgtggaaacggttcgagaagcgtaa

SEQ ID NO: 9773 - DNA, 393 bp, Zea mays
  Peptide Sequence Number=SeqID_51552
atggtggaggagcgggacagtggacggcgacggcgaggaacggagcaggaggcggggagctgttgtggatcgacggcggcggctaccgtggcagcgaggaacatagcaggaggcggggagctactacggtggaggagaaggacaatggagagccgcgacggcgaagaatggagtaggaggcggggagctgctgtggatcgacgtcgactactgccacagcggcgaggaacggagcaagagctgaggagctgctgtggattggcgcctgctgctgccgcggcggcgtggagcggaggacgtgtggaatcggcggcggcgtggatcaacgagcagagcgctggaagactggatcgagatagtaaatgggaaaggggacatatctggtgcacatag

SEQ ID NO: 9774 - DNA, 912 bp, Zea mays
  Peptide Sequence Number=SeqID_51553
atgccaggactgccatccgagaaggagtcgatacccaacctcatcttgcgaggctttggcaccatcgaccgtgtgaaggcgaagctggagcaggcctgccctgaagtggtgtcatgtgccgatatcttggctctggtagcaagggacgtcgttgtactgaccaaagggcctcacggggatgttccaatctggcggagagatggtagaagatcggtgaagcaagatgcactggacaacctccacgcgcccttcttcgatgttggtcggaacatgtgccagttcttcatgcccaagggcctcaacgccaaggaccagattgttctgctaggcgtgggcgtctgccgtgtgccgactactgtctggtggctggtgtccagcggggtggaatccggtgggggcgtcaggtcggactccggtggacggagggacgcagtccggtggccgacgggctggcaggtggagctcgacgcgtcgcgcgggacagggacggggcgaacgacggaacaggcagatgacactcgacgccgacagaagcttggcggccgtggctcgggggtcgggactcggggctcgggcagaccgcagatggcctcacggcccagccgaccaggcacagcggcgtcgcggcttaacgtgggtgagcaggtgaggcttcaggcggcgactgtgttctggagacctgagggagtgagggttagcgatggattggctgggacttggagccgcttaggctgggccggcggacctgctaattttttttgcacgctgatgtggcctagctcgggcgccacagatcgtggcgtcgagctaagagatggcttccgccgtgtaagcataactggcattggcagggagctcggcgccatgatctacggcgccgagctcggacatgtaggcgccagcaaagcataa

SEQ ID NO: 9775 - DNA, 192 bp, Zea mays
  Peptide Sequence Number=SeqID_51554
atgggggtaacagtagggcaaccaaagtttgatgaagtggagatggatggtcgggtggtggagcagaaagggcggatgacggcggtggcggtggagatccggaagaaggaatctggcgagctggtggccatcgggaggcagtggatgacggcctccaggcccaaaggcgctactgctcatagcaagatctga

SEQ ID NO: 9776 - DNA, 570 bp, Zea mays
  Peptide Sequence Number=SeqID_51555
atggagcttggccggtgtgaagtaggagatgtcgtagtggacggagaccttgacgatgccctccacggacatgatggccgcggcgcacacgtcgtccgccgccgccgcgatggcgcccgcgtcccagttcccctccgcgtcttgaccaggggcaggggagggagagagccaagtcaagaacctgtcacacgacctggtctccgcgagagctgggatgggaggaaggagggacggagaggcacgcaccgtgaggtggagcggcacgcagagcgagtagagcgcgcggcctcgctccgcgagggacacgcgcgcgcgccggagagcggcagcgcgttgaaggcccggcccggggcgtcctgggggtacactggggatgtgatcgatcgagttcatttactagatactttggtgtatgcgcatgcagagtacgcggatgaaaggaggaggacaggaccggacgcggcggtggcggtagcggccctcgaagacgccaagagcaagcgcaacgagccgctccgcgtggccatggggagcaacccaaacgcgaccgattctgatggtattctgtag

SEQ ID NO: 9777 - DNA, 381 bp, Zea mays
  Peptide Sequence Number=SeqID_51556
atgaaagatcagttgagtgttcagagaatccggagctctatgaatgttgtttcattggagcgaaagatggtcacaaaagatattctcttatctatgagagtcagaactaactcaatcaaaagtgaggtgctgccccaaaagtcaacacttacccagaggccattaagggtccttcctcaaccaaatttagtacccctccttggagaacatagggcttttgctgatggtgatgctgtattctgggataaggaatatgctcatgcattgaaatgttacactctagtaacgttcatcctgaatcagcgattgtctaagcctgcagaagtgttagtaggaaccgtgctggggctgtatgaggacatcagatacaagtctgagtaa

SEQ ID NO: 9778 - DNA, 777 bp, Zea mays
  Peptide Sequence Number=SeqID_51557
atggttctggatggtaacatcggttgccacagtctacatatcagttcgccgacccttcggagccttggtgtgtcggatggtgttaaagtcttggagggaaagctgcaagagctcattgttgaggacgcccttctcctagaaatgcttatcccacagcctccaagttatggtctggtgatctgggttattcatgcacccaaactgaaaacattggggtatcttcatgatgacatcccaacatttcagcttggaaccatgttttttgagaaaatggtgcctattattagcctgcccaatgtgatgcgtactgtaaggactttagccctcctcaccactcctgatctggatcttgtcattggcttcttaaaatgctttccatgcgtggagaagctatacattgtgtcatatactcggatgcttattaagaacgaacaaggctatgttccacttgaatgccttgatcggcatctcaagaacatgcagataataaattatgaggacaatagtgcagatgtaaatttcgtcaagttcttcatcttgaacgccagagtgcttgaatctatgaagtttgtggttcgtcaaggccagtgtgatacaaaatggattgccagacaacacaagaagctagagatccatttgatgaatcattatgtgggtgccctggtgattatttcttttgaagatgtctatcagtcagacagtttgattgttatttttcgaggtcatattacacaggagttgcatattcgattcacccccttaagaaaacatctttga

SEQ ID NO: 9779 - DNA, 132 bp, Zea mays
  Peptide Sequence Number=SeqID_51558
atgaccctcaacggtgttgggagctacagtctgattgaggccaaagattttatgtttgttgaatcgaccatcaggacaaaaatatggccacaacattcttcatcgctgagtagaagggatagatttttctga

SEQ ID NO: 9780 - DNA, 861 bp, Zea mays
  Peptide Sequence Number=SeqID_51559
atggtaaggaggctgaaatgcaaattgggttcccgacggattgtaaaacacgtggcacatattggttgggatggtcctggctccacgaacaacaacaacaataacaacagcaacaacaatagtggcggagcacctagctggatgaaggattaccactcggcaccgcttgactcgtcctcttttaggagtgagagtgggggcacggctgctgcaaatccctgggcttctcaaggttgtcttcgccactcacaaatatatacagctcttgctggtcttcgatcttcatcctcctcttgttgcaaacctattaatcaatgtggaagttacatttatgctagcaatgatgtcgccttgaataaaaatactatgagatcattaatgcttttattgtgtgcacaaacacatggacaccctcgtctatgcctgatgacagagatagtcatggatggagcaagcgtcggagaaacctccttcagggacacgaaaagcgaggcaggcgtcgacgtcggcgggggcgactccccaccgtcccccgccacccgccggtcgagacggcaccgctctcggggctccggcacctcatccatggacgccaccggcggcgagggcgaggagaagactaaggagaagagcaagaagggcacccgaaagaaccgcaagaagcaggacaagtcggccggcgacgacgcctcgggcacatgccaggacctccccgccgttcccaagaagtccaaccgccggaaaaacaagggaagctccgaggggagcggtagcgccgcggccaaggacaccaccgcggccgcgccggaggaggtggcggcgtcggcgtcggcgaccgcacccgccgtggacgacgactag

SEQ ID NO: 9781 - DNA, 369 bp, Zea mays
  Peptide Sequence Number=SeqID_51560
atggcgcccttcctccctctctctgctgtccatggcgagcagcaagcacctcccctggtgccctcctccatggcctcccttgcgcaggggcagaagcagccatgcaaccgtcgatgtcgcgcttcacgctggtccgttcggcgaaatgtcgagccatgtggacagcccatgcgactagtcccattttgctcagattggagttttcatgagagaagaatgtatgagaaaaaggtggcatggttgcgtaggaaaaattggagggcagtggagttgtgcttgtctgatgtggcaacgagaattaaaaatgtctatctcatttatgcggagggcgaatcggtggatgattgtgtgtgccgaaatgcgttgtag

SEQ ID NO: 9782 - DNA, 1734 bp, Zea mays
  Peptide Sequence Number=SeqID_51561
atggaggtgtacgcagtcggagtgttgaggctactaccatggctggcactggcagctgcgcttctgccactggcacgtgcggcgtcgcagcagccgccggtgcggggatgcaggcggcagtgcggcaacgttaccgtcccctacccattcggcatcggtgcgggctgccaccgcggcgcgaccacggggggcttccggctccagtgcgacgacgccggcggccgcggacgcccgccgcggctcactgtggccggctacggccacgaggtcgccgccatctcgctgccgacggccgaggccaccgtgctcctcaaagccagccgcgcgtgctacgaccgcccgggcgacgccgacggccgcgtcgtcagcctgcaggagcaccccatggcgctcaacgggtcgtgccgcggcgacgacggctgctgccagagtaccatcccgctcgggctaaactcctaccgcccctacctcggcagctttggccgccggcggaggcgggaccaggaggcgacgttcctggccaactccaccgcctgctcctacgctttcatggtggacgcgtggtggttctggttcgccggatcgcacttcaaccgcaccggcgacttcgccgtgcccgtcgtcctggactgggccatcagggacgccccgagctgcgccgccgcggagcgggacagcgagacgtacgcgtgccgcagcgcgcacagcgtctgcctcgagtccagcaacggccccgggtacgtctgcaactgcaccggcgggtaccagggcaacccatacgtgaccgacggctgcacggacgtcgacgagtgccggcacagggacgagtttccgtgctacggcgtgtgcgtcaacacgccgggaagcttcctctgcacatgtcccaatgggtccagtgggaacgccactgtacaggatggctgccgccgagacgacgacaacaaattcggtttgccactgaagatcgtcacgggcaagcggcggctgctccaggcgaagcggcggttcttcgagcagaacggcggcgtcctcctgcagcagcagctgggctcgctggccagctccggcgtggcgttcagcatcttctcaggtgaagagatcggcagggccaccgacggcttcgcggaggcgcgggtcctcggccgcggaggccacggcgtcgtgtacaagggcgtcctcgccgacggctccgccgtggcggtgaagaagtcgagagtggtcgacgcgaggcaggtgaaggagttcgccagggagatgctgatcctctcccagatcaaccaccgcaacgtggtcaagctgcttggctgttgcctcgaggtcgaggtgcccatgctggtctacgagtacgtcccgaacggcagcctccacgcgtacatccacggcgatggcgacggcggcggcggcggtggcgaggccaagctgaatctgccacccggcgcgcgcctccgcatcgcggccgagtccgcggacgcgctcgcgtacatgcactcgtcggcgtcgccgccgatcctccaccgcgacgtcaagtccgcaaacatcctcctcgacggcgacctcgcggccaaggtgtccgacttcggcgcgtcgaggctggccccggcgggcgaggaggcggtggccacgctggtccagggcaccctcgggtacctggacccggagtacctgctgacgagccagctcaccagcaagagcgaccaggggcgggcctggctcaattcaatggtattcaattga

SEQ ID NO: 9783 - DNA, 1224 bp, Zea mays
  Peptide Sequence Number=SeqID_51562
atgttcttcgacgggtcgctgatgaagacaggagccggcgcaggcctactcttcatctcgcccctcgggaagcacctacgctacgtgctacgcctccatttcccggcgtccaacaatgtggccgagtatgaggctctgctcgtcatcgaccaagtcatgaagaactcccactacagcaacctgaagatggaggcctactgcgatgaggttcggcgcctggaagacaagttctacgggctcgagctcaaccacatcgcctggcgctacaacgagactgcggacgagctggctaaaatagcctcgaggcgaacaacggttcccccggacgtcttctcccgagacctgtatcaaccctccgtcaagatcgacgacacgcccgagcccgaggcaccctcagcccagcccgagaaggcacccgggggctacacgcacatgttggtcgccatcgacaaattctccaagtggatcgaggtccgacccctaaacaacatcgggttcgagcaggcggtggcgttcttcaccaacatcatccaccgttttggggtcccgaactccatcatcaccgacaacagcacccagttcaccggcagaaagttcctggacttctgcgaggatcaccacatccgagtggactgggccgccgtggctcaccccatgacgaatgggcaagtagagcgtgccaacggcatgattctacaaggactcaagcctcggatctacaacaacctcaacaagatcggcaagcgatggataaaggaactcccctcggtggtctggagtctgaggacaacaccgagccgagccacgggcttcacgccattctttctagtctatggggtcgaggccatcttgcccacagacttagaatacggttccccgaggacgaaggcctacgccgaccaaagcaaccaagctagtcgagaagactcgctggaccagctggaagaggctcgggacaaggccttactacactcggcaaggtaccagcagtccctgcgacgctaccacgcccgaggggtccggtcccgagacctccaggtgggcgacctggtgctttggctgcgacaggacacccgagggcggcacaagctcacgcctccctgggaagggccgttcgtcattgccaaagttctgaagcccggaatgtacaagctggccaacagccaaggcgaggtctacagcaacgcttggaacatccaacagctacgtcgcttctacccttaa

SEQ ID NO: 9784 - DNA, 528 bp, Zea mays
  Peptide Sequence Number=SeqID_51563
atggccgggccgcgagctgggcggggcagggggccacggccgcgcctgggggctgccacgccgaggaggggtcagggcggctgcgccgggcagggaggggccaggaccggggcgccatggtcacgccgggccagcgtgtcggggcagggctgccacggccgggggggagcacgaggggaagccgcaccgggcgggcgccatggttgggccgcgcgcaccgggtcgagctgccgcgcggaaggggcagggctgggcgggccgcgccgcgggcaggggcaacgccagaccgccacgccgagccgggcagggggccacgccgaacgggcgcgccgggggccgacggggcggggctgcgtcggggtgggcgctccgccccgaacgggcaccgtggccggggaagaagggaagaagaggggggcgagggagaggagggagaagggactcaccgcgtgggggcgagggtggcacctgggtcggcggttccgagcggcgggcgcggtggaggagggagtcgagctgcgcgagggg

SEQ ID NO: 9785 - DNA, 594 bp, Zea mays
  Peptide Sequence Number=SeqID_51564
atgtgggccgccgccgccccgtccggcgggttctggatgctgcccgtgtccgcgagctcggccgccgcggcgcggccggccgaacagcccatgtggtccttcagcggcggcggcggcacgggcaccgtgcaggccccgctccagttcatgtccagggccagctaccccggtggcgctgcaggcggcggaggcggagccatgtccgacaccaaccttggcatgctcgccgcgctgaacgcgtacaaccgtggcggtagcgaggagcagcagcagaccgagggggagcagcagcacggcggcgacggcggggttaacgatgacggagacgaagatggtgacgacagcgctgaagagaacaatggcaacaacagctcacatgggtccaagctagggagggccaaggacatgagtttgagagggttcttcatcggtgcttatgctatcaccaacattgataaccaaactcgtagtatggattacatgcagtcgagaaagagaggctctcagatctcttatcgaggtggaagtggagctaagaagttgttaggtggagtcctagctaagtcttggtttggcggggccccgacctcctga

SEQ ID NO: 9786 - DNA, 168 bp, Zea mays
  Peptide Sequence Number=SeqID_51565
atggcgttcactggttcacggtctacgacggtcactgccgagtcttcatggcttgagacgagtggtgtgacatatgaacaggttgacgttgctccgaagctacgcgcaggggagcttcagctaagtggcggaaaaaggaaccgacttaaaggggaaaaggctatctag

SEQ ID NO: 9787 - DNA, 327 bp, Zea mays
  Peptide Sequence Number=SeqID_51566
atggcggcagtgggcgttggtgcagcggacgagcggtgggcttcgttgtgcaactgcgtggtgaacttcttgctggaggagcggtatcacctcacggcgctagagctattgcaggagctccaggaggacggccgctccgcgcacgccctccgcctccgcgctttcttctccgacccagcgcttttcccgcccgatctcgtcgcccgctcatcctctgcgccgcccgcgccaaatactcaagaagaaccggcggcggtgctctctggtcaggcgcgggacggtccgcggcctggagccggacggtccgcgacctggcgcaggggctag

SEQ ID NO: 9788 - DNA, 1686 bp, Zea mays
  Peptide Sequence Number=SeqID_51567
atggttaataaaagtgaagagaatgactttgaaaagaaaggcacttctgatcctgtggtttatcagctagttcgggttgaaggtgatggaacacttgttcctgctacagaggatgatgttttgcagtttgaacatttccttcacaacgagaaggttgatcttcctcctattgaagatgcagaccatgtggaagagtttttcaacaatgactgcatgttactgaagaagcctgacttggaagatggatcttccaaattggagactgtggaagcacacacacaaaaattgggtgccaacttagaggaaaacatattacagtcattggatgattcccttagtcctccctcagactttagaattcatagtcagcattcagataaattgcttacagaacaaggggcaaacgtcactcgacaggacaatgcttcaactgagactacaaaatcgacagtgttaaatgactcttgctgtgctgaaaaatataaggctgatgcctgctcaagatctgtatgcgacacatctacagatccatctgtttcgggagttaatagttccatgcctgatttttccatattaagaggagaagtctgtttggatgatcttactattagagaacttcaggaggcgtttagagccacgtttggccggcagactaatgtcaaagacaagatatggctcaaaagacggattacaatgggcttgactaattcctacgatgttccaagttcaggttgtgtagttaaagactacaaaattgttggcaaggatgccaaaaatgatatgtcagacatggatgaaagagctaagactgggcttagagctacttctgtggttatatatccaggaaacgaaggggactctccatctagctcttactatcagagcgaggaccaggaagattcttccaagagggtgccgatccataatgatgaaccacaaggaaatctgctaggcgagcaatgcactgacaagcgaactagaaagccaacaaaaagatacatagaggagctatcagacattgagactcatgactcaactgtaaaaaattcttcaccagcaaaaaggcctgcacatgatgaactgttaatgaacccgcgagtagcacctttcaatgagactggttctctgggcacaatctatcctactagaaaggatacctttggaggatttagtgtacacgttccttacgtttcaaggatgagaagggggcgccctaggaaggacttcatttcatttgcggataagggaccctcggttgaacctaaagggattcagccatcagttgagatgatattagtgaaggatggtgacaagggaaaccacctgaggaaagtacctgaggttccactaaaggaagcaaggaacaagctttgccccaccaagcacataaacgactcaaagaattgggtaccggaatcacctccaaaaaaactcggctggggaaggaaagaccgccctcctggtattatattaagaagggaccgaaacatggtcccggccgagaaaagccccgaacactggctcctagccaacctatcaggagtccaacaacagttattagtggccaaccacataaagaacttgcaattagaaggtgcccagctcttccaaatccgcttccagggagagaatttgatggtcccaaagaacatagtcgtatgccgacttgcagctataggtacctga

SEQ ID NO: 9789 - DNA, 657 bp, Zea mays
  Peptide Sequence Number=SeqID_51568
atgcacgcagcattggcccgaccggcagagctgagggatcgatcaggccacgcggcggggacgcggtccgcttcgctccgggcagcaggagtggggagtccgcctcgtcgcgatctagagaagaggggaggaaaaggtcggggtcgagcctcgagggcgacaccgtgtttctcaccgcaaggaggagccgaggaacggaggaagggtggtttcgaaaagggaaaggggatccagccggggaggggtggcagagccggcgggcggctgggatggatccgggatgcggatcgtacggctgggtgtcgaggggcgggcggggatgacgacgacgatattactatcctagtgttgctactttatccaattatctttgatgttattgaatggatggtacggggtgacccgaaggggacccatactcacatgggtgggaggcggcatggtagcaggacggtagtgagggcgcgggcgctagaagccgcagccaagtcgcgacagcgacgattctggagcgggaggaagcgcgggaacggaagctgtcccctggggtgggagggagcgagggcgcaacagagggagattgcgagccaaactacctcggcaaagatgcctagccagggagagaaggtaccgatccagataaagaaggggaggtag

SEQ ID NO: 9790 - DNA, 327 bp, Zea mays
  Peptide Sequence Number=SeqID_51569
atgccgcgccccggcgcgccggcacagttccggcggctgttcccgccgacgcggtgggcctgcgagttcaacacggcgctgaccgtgcccttcttccgatggctcgtgggcccctcggaggtggaggtcggcggcctccggcagcgcagcgaggtgcgcatcgagaagtgccggtacctggagagcagcggctgcgtggggatgtgcgtcaacatgtgcaaggtccccacacaggacttcttcaccaacgagttcgggctccccctcaccatggacccaagttccatgttgacgctgtgtgccccggcctgtcccaagcttcaatag

SEQ ID NO: 9791 - DNA, 183 bp, Zea mays
  Peptide Sequence Number=SeqID_51570
atgcatatttgtgaagaagagtggaggtcggatgagatgaagaagagcggatgcgcaggcgagatggtaaggatgacggcggcgcctcaccggccatcgtcggtcgtgcgggtgcatgagcgcggcggcgtggcttcggtgtcgtccgcgcatttcttcacagcagaaccttacaaagcatag

SEQ ID NO: 9792 - DNA, 1092 bp, Zea mays
  Peptide Sequence Number=SeqID_51571
atgggagcgttgtcgcctcgctacctgatacctatagcacataccgatctctgtctcgtagacacacactatcagaggctacgaggccgccgcaccgcagccgcagccgcgctctctcctcccggcaagtctacgtccacacgcccgacgtcgtcgccagttccaccatgcctccgcacgacggcgcccgagccccgccgccccgggcccagccggggccaccagccgtccttctccgccgcgctcctcgacgccatctaccactccctcgaggccgacgccgaggcgcgcacgtccacagaggcgcgccgggacgcgcacgccggcgtcgtccccggcgcagcttccgagccgacgtcgcccgacgcccgagctgtcgccgtcgccgtccccgtcccgctcctcggtccggtcaccgcggctgcagagggcgccgcggccgtgccgcgtccggccggacccgcagcccaactccagcggctccctcctcctgcctccgccccttccgccgcacccacacgaacacgagccgtcgtcgaccgggcaccgccgcgtcgcggacgcggagaggaagaggggccgcgggaggaagagcaagaggacggcgccgttcgcgtgcctcctcaacgccctgctctgcaacaggaggccggcgaggccggtcgaccgcacgccgcgtgcaacggcaacgccaacgccaacgcccgccaccgcggcgccggagccggcgtcggcgaggtcgatcctctcgtcgcgcgcctcgcggagccggagggagtccgcggcggcgggagggtgggcgacgggcacgggcacggcgctggatcggtcgggacggcgacgacggggctgcgggccaaggagtccgcggcggaggcggagaggagggtggaggagctgctgcgcgcgctcggcgtcgcggatgagcgggagagggctaaggagagcaccgagtccagctccgacctgttcgagctcgacagcctgcccgcattccaagacagaggcaccgacctgccgcgttccagaaccgtcgccgacggcgacgatggcgccgggctgctggcacggccgcggccccgcgtgcagtga

SEQ ID NO: 9793 - DNA, 849 bp, Zea mays
  Peptide Sequence Number=SeqID_51572
atgcagccgagggggccagaccagaggaagggacggcggggaggtggcaaggcgcagagagcaggtaactcctttgggaaaaccgttaacgatcatctgaggtcaactttgagttttgataacaagcaacctccatttgcgagtcaaaactttgactacggtcaaacaatagcttgcatttcatacccgtacaatcgttctagatcaggagatgtttgggcagcctatgagtcacgcaccagcactgccactgtgttgcatttaaagcagttccgttcccaaattgctggtgggggttcatccacaagaattcccttgcctttggaattagcagagaatgaacccatatatgtgaatcccaaacaatatcacgggatacttcgcagaagacagttacgtgccaagctagaggctcagaacaagctagtcagagcccgaaagccttaccttcatgagtctaggcatcttcatgcaatgaagagggcacgaggttccggtggacgattcctcaacactaagcagctccagcagtctcacacagccctcaccaggtccaccaccacaagtggcacaagctcctcaggctcaactcatctgcggcttggtggtggcgcagccgcagctggagatcgatctgtgctggcacccaaaacaatggcctcacaagacagtagcaagaaggccgtttcttcagccctcgccttcactgcgactccaatgctgcgcagagatgacggcttcttgcagcacccaagccatcttttcagtttttctggtcattttgggcaggcaagcgcgcaagctggcgtccataatggaagtcagcatagggttccagttatgagatga

SEQ ID NO: 9794 - DNA, 366 bp, Zea mays
  Peptide Sequence Number=SeqID_51573
atggcttccacggtagcaaggggattggtgatatcattagcccaaagtttagacattggtgatcccgccaggatgaccattgttaagagagatcttcaggtttggagattagctcgccatgggcttgttcggttctatcccaatccatatggattgagggggattgaggaggtttcaatccctaataagtcaaaatcccctccgatccgtatcattcccctccgatccatatggattgaaaataaccgaacaagccctaaggaggggcacactcctgaagaggcacgtggtgaagcaaggcctatgcaaatagcaccatatgtctacactggagcatgtcctcccgtcggaggtggcgatgggtaa

SEQ ID NO: 9795 - DNA, 258 bp, Zea mays
  Peptide Sequence Number=SeqID_51574
atggacgagtctggtgtggtatggccattagtgttttgtttcaaaaaagaaaaaggagatcgggtgatgataggtcctaatcccacccgcggttgcgtagatggagttagaccggtgctcaacacgcatgcgatctactgttccactacgactgcagcgctgttcgatagataccagtccgacaggcagtcagtgtatcgcctggagagccaaagagaactcagctccggccgaccccatggtgcgaactcggggtaa

SEQ ID NO: 9796 - DNA, 570 bp, Zea mays
  Peptide Sequence Number=SeqID_51575
atggcgacacttcgctccccgagcccccgcggagacgttctcctcgactcggcgccgctcctcggtggtgtcgggcggcgccgcgcgggcgcgctgcgccggccgtctctccggggcgcggcgcggctgctgcggcgtggcgggcgccgagcgatgcgggagccgtcactgctggtgcgggaggccgcggcggagcagctggaggaacggcaggcggattgggcctactcccgccccgtggtggcgctcgacttcctttggaacctcgccttcatcctcgtctccgccgtcgtgctcgtgctcagccaccacgagagcccctccatgccgcttcgtttctggatcgctgggtacaccgcccagtgcgtcgtccacatggtctgcgttgccatcgagtatcgtttgcgatacggccagctcggcgggtcgccaattcctgtcgacgaggagagcggaagtggtagtgcatcatcgtcctccagcgacgacgacagagagcacggctcccatagtcgaagtggtgactgcctcaggcggaaccacatatctgggggcgactgtgactgttga

SEQ ID NO: 9797 - DNA, 636 bp, Zea mays
  Peptide Sequence Number=SeqID_51576
atggctcgagcgaagtggccgctctcggggaattcaccggcgacgtacgactataattcaccggactgtccgcctgttagcaacctgtcaacactggaaatgcccttctcccgcagtgagattgatcagatcataaagaatttaccttcaaataagtcgccaggtccagatggtttcaacacggattttgtgcgcaaatgctggccggtgattgctacaaatttttatgagctttgtgataaattttatgatggatcaatctgcatggatagcattaatggttcttatgtgactctcatccctaaacacagctctccggcctcggtgggagagtacagaccgatatcccttctcaacacaagtatgaaagtgctgactaaacttcttgctaatcgtttgcagttggtgatgaccaaactagttcaccagaatcaatacggcttcctgaaggcaaggacaattcatgactatttagcttgggcctttgagtatatatctatctgtcacaagtcgggtaaagaaatggtcattttaaaactggattttgaaaaaacttttgacaaattagagcatgcggctatcattgatattctgaggcataagggctttggggacaaatggatccactggatttga

SEQ ID NO: 9798 - DNA, 387 bp, Zea mays
  Peptide Sequence Number=SeqID_51577
atggacgatctggcggcgctggcgcgcggcgaggggtggacggaggagcggcacgcgacgttcctcgaccgcctggagctctccttcgtccagcaggtgctcggcggcaccgacgtgcgccaggcgtcccgtaggctcggtgtccggccggcgccgcgggaagaaggctggcgcggccaggtcctgtcctcgctcccgctcgaccgacacactacccgacagcgccgtggagtccaaccggtcgggcctggtcgcagctcggcgacgcgaggcaaacgacgcgcgccgtccagccccgtggacccagctgcaggtttggtgaaggaagcgtttccgtctcgcgccaatgttgttcttgtaataatcagtatgacgctgactgtctag

SEQ ID NO: 9799 - DNA, 126 bp, Zea mays
  Peptide Sequence Number=SeqID_51578
atgagcagcatgtggttcctgagcgtgttgccgaagatcttcctgagcaacaacctagtgaaggcaagaggagatgctggcaacatgaaggactttgaggagtttcaggactacgacgagttctag

SEQ ID NO: 9800 - DNA, 522 bp, Zea mays
  Peptide Sequence Number=SeqID_51579
atggtgctccgggcggcttggcgcaacttctggtggcctggacggtcggcgtcgtggccaacgaactccggcgagtgcgagcggcgagagcaaagcgcgagagagggtgagcttgcgcgaaatgaggaaggggagcgagtgcgggtgcgggcggtgctcaaaagggatctagggtgcgtgggcaggcgacgtggctggggatctcgatgtgcgtgcgtgctggtccatggcggttcgtggggaaggcaaagctggcagggcggccccacggcgcaactagggaaaacgggcgtgtggaggaaacgattcatcgcgttaatgaaatgggcccgcaaggcagagacggaagaggggcgtgcgggcgagcaggcgactggcgccgacaacccggcaccactaggcagagggagggcgaggaaagcacgcggggaaaggaaaccaccactgacaggtggagccaactgtcaagtgatgtctgacaacaggcgcagaggtggaagacgtgctcaacaggagcagtag

SEQ ID NO: 9801 - DNA, 462 bp, Zea mays
  Peptide Sequence Number=SeqID_51580
atggacaagagtaacaaacgcaagcgcgagccgactcctccgtctgaggacttcggcgactcggaatacttggaggaggagttctcctccgagtccgaggggtctccggctcctgtctcttccccggcgtcgtctgatgattcagacgactcccaggggcttgccgcggaggtctggacttacatccgggccgtcgagcgctccgggctcgagggctcggatgagtcggagtactcctcggacgaggaggactcctcggactcgtccgaggagggcggtggcggcgatggcggagacgacgatgacgacgacgacggaggtgatggtgacgacggcgacgatgacggtgacagcggcagtaggggcggcaacagcgacagcaagggcggcaacggcggcggcaaaagcaagggcagcaacggcggcggcagcaacaagggcagcaacaaggccagtggctag

SEQ ID NO: 9802 - DNA, 273 bp, Zea mays
  Peptide Sequence Number=SeqID_51581
atgaagctcagggaggggcagccgccatggggacgaaggccgagtagggggagctcgcggctggggaaaaactcgaccaaccatggcgagcagggagaggaagaagccccgagcggaagagaggaagctgggcgcggctaccaggaagcaaaggcgcgcgccgaggaccgggatcggaggcacggcgagagagaactcagggggagagacgaacaggagatagaggaagaagactgcgcacgtgaagatataggagcagagcgaaggagatag

SEQ ID NO: 9803 - DNA, 336 bp, Zea mays
  Peptide Sequence Number=SeqID_51582
atggcgcaccggacagtccagtgcacaccagacatgtccggtgcccctgccacgtcatcaatgccgttggattctgaccgttggagttctgacttgtgggcccgcctcgatgtccggtggcgcaccggacatgcactgttcactgtccggtgcgccagtatgggcacgcctgacttctgcgcgcgctgcgcgcgcattaaatgctctgcagtgaccgcacttgtacccaccataaccggaatgggagaccacgtctcaggtcgcgtgaggggtaaagtctactgccaggttcaatcaggatttaataacattgtgcaaagaagaaaactaagttaa

SEQ ID NO: 9804 - DNA, 213 bp, Zea mays
  Peptide Sequence Number=SeqID_51583
atggcgcggtgtccggcgaggtcgcctagctacagcgatgccccgaatccactatggtcaagcactactcaacatgaacgacaagatgaacaaggctgcgacgactgttttagcactcgcgtgagggatgacagggaagaggggaaggccgcagaggcgccagctttatctcctagctcccgtaatggacaaccccaattcccctggtcataa

SEQ ID NO: 9805 - DNA, 3069 bp, Zea mays
  Peptide Sequence Number=SeqID_51584
atggccgccaccacgggcacctcgtcctcgccgccgcagctcccggtccacggcggcctcctgctcctgctccctctcctgaccattacctccgccgcgtcgtcggcgccgctgcccctcctcgcgctgctctccctgaagtcgtccctgcacgacccggccggcgcactgcgcgcttggacgtacgccgctgcggcgtccgcgggcgccacgcggtcgctggcgccgccgtggtgcgcgtggccgggcgtgtcctgcgacccggccacgggggacgtcgccgggctcgacctctcccgccgcaacctctccggcaccgtctccgccaccgcggccaggctgctggcccgcacgctgacgtcgctcaacctcagcgcgaacgcgttcgcgggggagttcccgccgtcggtgttcctgctccggcggctccagtcgctcgacgtcagccacaacttcttcaacggcacgttccccgacggcgtcgccgggctcggcggctcgctcgccgcgctcgacgcctacagcaactgcttcgtcggctcactgccgcgcggcctcggcgagctccgccggctgcagagtctcaacctcggcggcagcttcttcaacgggaccatcccagccgagatcggccagctccgttcgctgcggttcctgcacctcgccgggaacgcgttaaccggtcggctcccttcggagctcggcggcctcgcgtcgctcgagcagctcgagatcggatacaatgcatacgacggccgcattcccacggagctcggcaacctgacgcagctccagtacctcgacatcgcggtcgccaacatgtccggcccgctgccaccggagctcggcaagctcgcgcggctcgagaagctcttcctgttcaagaaccggctcgccggtgccataccgccgcagtggtcccgcctccgcgcgctgcaggccctcgacctgtctgacaacctgctcgccggcaccatcccggcaggactcggggatcttggcaatctcacaatgctgaacctcatgagcaacttcctttccggtacaatcccgaaggcgatcggcgcgctgccgagcctcgaggtgctgcagctctggaacaactcgctcaccggacggctgccggagtcgctcggcgcgagcgggcggctcgtccgggtggacgtgtcgaccaactccctgtccggcccgattccttccgggatgtgcatcggcaaccgtctcgcccgcctcatcctcttcgacaaccagttcgactggaccatcccagcgagcctggccaactgctcgtcgctctgccgagtccggctggaatctaaccgcctgtctggcgagatcccggtcgggttcggcgcgatccgtaatctgacatacctggacctgagctccaactcactcaccggcggcattcctgctgatctcgtggcttctccgagcctcgagtacatcaacatctccggcaaccccgtcggcggcgcgctcccgaacgtgtcgtggcaggcgccgaacctgcaagtgttcgcagcgagcaagtgcgccctgggcggcgaggtcccggcgttccgcgccgcggggtgttcgaacctgtaccggctggagctggcagggaaccatctcactggtgccatccctagtgacatcagcacctgcaagcggctggtgagcttgaggctgcagcacaatcagctcagcggcgagatcccagcagagctcgccgccttgccgtcgatcactgagatcgacctgtcctggaacgagctcagcggcgtcgtcccgccgggcttcgctaactgcaccacgttggagaccttcgacgtgtccttcaaccatttggtgaccgctggctcgccgtcagcgtcgtcaccaggcgcccgtgaggggaccgttcggcgcaccgcggcaatgtgggtttctgccgtggcagtgtccttggcggggatggtggcgctcgtcgtcaccgctcgctggctgcagtggcgcgaggacggcactggcgcgcggggggttggtagcaggggcggcgcaggtgcacgccccaacgtggtcgtcggaccgtggcggatgaccgcgttccagaggctcgacttcaccgccgacgacgtggcgcggtgcgttgaggggagcgacggcatcattggcgccgggtcatcggggacggtgtaccgcgcgaagatgccgaacggggaggtcatcgcggtgaagaagctgtggcaaccgtcggcgcagaaggagggaggagctcaggcgccggaggagccaccaaagcggaaggacgaggcagacgcggacgacggcaacaggagcatgctcgccgaggtggaggtgctgggtcacctccggcaccgcaacatcgtccggctgctggggtggtgcaccgacggcgaggcgacgctgctgctctacgagtacatgccgaacggcagcctggacgagctcctgcacggcgccgtgtgcaggggcaagcaggcggggctggactgggacgcgcgccaccggatcgccgtgggcgtcgcgcagggcatgagctaccttcaccacgactgcgtgccggccgtggcgcaccgcgacctcaagcctagcaacatcctgctcgacgcagacatggaggcgcgcgtggcggacttcggcgtcgccaaggcgctccagggcgccgcgcccatgtccgtcgtcgccggctcctacggctacatcgcaccagagtacacgtacactctccaagtagacgagaaaagcgacgtgtacagcttcggcgtggtgctgctggagatcctgatcggccggaggtccgtggaggcggagtacggcgagggaagcaacatcgtggactggacgaggcgtaaggtcgccgccggcaacgtgatggacgcggcggagtgggcggaccagcagacccgcgaggcggtgcgggacgagatggcgctggcgctgcgggtggctctgctctgcaccagccggtgcccgcaggagcggccgtcgatgagggacgtcgtgtccatgctgcaggaggtcaggcgcggccggaagatactagctcctgggatggccaagaagcagccaaagattaattaa

SEQ ID NO: 9806 - DNA, 216 bp, Zea mays
  Peptide Sequence Number=SeqID_51585
atgcgtgggggccacgcgccggtcgaccgcgaaaaccggcacgacggttctggccccacctacaggctcgcaccctcccctgaggtgggcccaggggccactgtcggtacctcaagacaggggtaccccttctgcagtatgaagacgctgcaccagtacgacacccccaggtcacatggagagcagcacccgaccccaccacatgggcagggctag

SEQ ID NO: 9807 - DNA, 207 bp, Zea mays
  Peptide Sequence Number=SeqID_51586
atggcgcgggggacaatcactggtgagccaggcgcgcaggatgctagcccgcgtgaggcactcaaccaatcagccgcaatatcttcgaagctcatccgcattccaagaccttggtatgtcattgccatccatgtctttcaacctgttttgaaaccggtttccaccaaagtggttctcggttcagggactgtctcaactggtgagtga

SEQ ID NO: 9808 - DNA, 603 bp, Zea mays
  Peptide Sequence Number=SeqID_51587
atggaaaaagaactagctgacttaagtctaggtgaggaagaggaggaaggagtgcaatttgagttagaaggcaccgttgggatgtcgagagaagagttcgaacaaaggtgggcgaggaagtctttaagggagatgttgtcggctgttgaggaacgcgtaggtaaacttgaggagtccatggaggacgtaaaaaagtcgggcaatgcgcttggggaaagcattgatgacttgagagagcagtcgagggactttgttaccacgtgtctcacttcccaaagggataacgtgcgagagttgctagattcccaaaagaagaagctgacagagaggaacgatgctctcgaggccacgatgatggctttgaaggaggaaacaatggccacggtaagggctttgagcacaagaatagaagagctcgagggagagttagccttgtgccgagcagccgtggggaagggagtgtcaagtgcagtactcagtaatgaggatgtcccgaagccgaaagagtttgtggggacaaggtctgcatacgatgtggacaatttcttatggaggatggaaaactacttccgtgccaaaggcatcgtggatgatgcggttaag

SEQ ID NO: 9809 - DNA, 1659 bp, Zea mays
  Peptide Sequence Number=SeqID_51588
atggaaaatgaaggttctgacgtctcacgagctgaagaaatcaaaaaccaagctaatgaagcatttaaagcacacagatatggtcaggctattgacttgtacacgcaggcgatagagctaaatagtcagaatgcagtgtactgggccaatcgctcacttgctcacaccaaattggaagagtatggtagtgccatacaggatgctactaaggcaattgaaggttattacagacgaggtgcagcttatcttgccatggggaagtttaaggaagcactaaaggattttcaacaggtcaaaaggatttgtcccaatgatcctgatgctaccaagaaattaaaggagtgtgagaaagcggtaatgaaattaaaatttgaagaagcgatttctgtacccgagtcggagaggcgttctgtagctgactccatagattaccgcaccatcagtattttcttcttcccattatttctaccatttatttccgaactttatgtttttttttgtcttctagaaatggtcttccacattaatatgatattcattagggctgctatttcttgtttgtatctatgggtgattgaaaattttaataggatgtcaaaatatctacgggcaggaggcatatatctggaacatgtcatcatcttggtgattgattcactatgttatatacatctggtggagccacaatatttagggtcaaaaatagagggagatgttgttactttggactttgttaagaaaatgatggatgacttcaagaaccaaaagtgtttgcataaaagatatgcattccagattgtcttgcaaatgagagaaatgttgcaggctctgccctctcttgtagatattaatgttcctgatggcagtcttttaactgtgtgcggtgacgtgcatggtcagttctacgatctgataaatatttttgagcttaatggtctcccttctgaagagaatccatatctctttaatggtgactttgttgatagaggatctttctctgtggaggtcatcctcacactatttgcattcaagtgcatgtgtccatcagctatttaccttgctagagggaatcatgagagtaagagcatgaacaaaatctacggctttgagggcgaggtcaggtccaagctgagtgagacatttgtggaactctttgcggaagtattctgttatttgcctttggctcatgtaataaatcagaaggtctttgtcgttcatggaggccttttcagtgttgatggggtgaaactctctgacattagagcaatagatcgattttgtgagcctcctgaggaagggttgatgtgtgaattgctttggagtgatccacaaccttacccaggacgagggcctagcaagaggggagtgggtctttcttttggtgcagatgtgacaaggagatttttgcaggataacaatctagatttagtagtgcgatctcatgaagtaaaagatgaaggttatgagattgagcatgatggtaaacttattactgttttctctgcaccaaattactgtgatcagatgggtaacaagggtgcatttattcggttcgaagcccctgatttaaagccaaatattgttacattctcagctgtgcctcaccctgatgtcaaaccgatggcttatgccaataactttctccgaatgttccaatag

SEQ ID NO: 9810 - DNA, 1035 bp, Zea mays
  Peptide Sequence Number=SeqID_51589
atggacccagcatccagtggacgcggtgttcgccagctcaagacatatttgtcaactaaaatagaagaggaaaaagatgaaataaagtgtcaacttgcaagaacagatgaaagggaaacccaattgtattatcagatattctatgagaaaaatattaaagaggggcaagatacaaagcaaccggaggagatggctaagttttatcagattgcaatggttttgcgtgatgtgttgaaaacagtgttaccttcttcacaagttgattataagactgtcaaatatgttaaagaactggagagcagaaaggaacaatatgaacattacaacattcttccgctctatgctgttgggataaaaccgccaattatgaaactccctgagatcactgttccatttcaagccatacgtaatgtggagaatctgccaatgcccatagctcattcgggttcagatgtcaatttatatgttaatgacatatttgattggctattgtctctttatggttttcagatggctgatcattgggatgatgaaatatacaaggcccagataaccaaagctctgcagggtatcatggatactgttacacatgatgttatgattaacggccagaatgttttgactccatattactcggaacatattctttttactgatgatgagcttaataaagaaaatgaggatgggatatcaactttgttctacctacagaagatatatccagcttcaagggaagaggactctgctcgagcgcaagctctgcctgatttaaaattcacctatgttgtatcttgtcagatctatggaactctgaaaaattctgatgattctcatgatcaaagtcgtcaaagaagcattctggatctcatgcttatgcatccatctttgcgtgttgcctatattgatgaaagagaggagactgttaatggagaatctgaaaaatcattttactctgttcttgtcaagggaggtgataaatttgatggctatgaaaggcttccactagcttttctgctttctttggttggttcttaa

SEQ ID NO: 9811 - DNA, 363 bp, Zea mays
  Peptide Sequence Number=SeqID_51590
atgaccgaattacccttacagggtaaaatgaccgaaatacccctgaaaggtaaaataactaaaatacccccgaagggcaaaatgattgaaatacccccgaatggtaaaatgaccaaaatgcccctgaagggtaaaatgatcgaaatacctttgatgggtaaaatgactaaaataccctcgaagggtaaaatgatcgaaatacccccgaagggtaaaatgattgaaatacccctaaaggctttactgcgtcattattactggcagtttttctgcgatattggtgtgttggctaggtgggtaatcctcagccatagacgattcgatgctgcgagggactcggaggttttggtaattgatatttag

SEQ ID NO: 9812 - DNA, 318 bp, Zea mays
  Peptide Sequence Number=SeqID_51591
atggattataagaaagtatggaagccattcttgtcgaagaaaatacttgaaaccagtaccaaagaaaaatccattaatgttgggaaaatcatcctcaaggaaattcatgattatgctaaaaagaaggcaggaagtgcttatttcccatcattaatcacttcactttgcttaagggctcgtgttaaaacacaagcaaaatctaaaggagtaacactgaagaagaagaatctgataaggaaccaaatagtcctcaaccagctgaaggagttgaaaaccctgaacccagggttgagccagaagaagaaccagtcaagctaa

SEQ ID NO: 9813 - DNA, 135 bp, Zea mays
  Peptide Sequence Number=SeqID_51592
atggggtcgcaaacatacaagggtcacaataaaactggctcgtgtgaaggaattaaccttacccaagtcatctacctcgccactgccatccgcaacctacttacctgcaaagtaagagaggagtgggtgacttaa

SEQ ID NO: 9814 - DNA, 162 bp, Zea mays
  Peptide Sequence Number=SeqID_51593
atgaagcagaacattgttgagtcacttcaaagagttcaaagatgtcttcgtatggtcatatcaggatatgcttgggagtggatggagaaaaagccatatatttctaccctggggttgcagtgggagaatgatggtacaaatttttgtatcctagtggattga

SEQ ID NO: 9815 - DNA, 1422 bp, Zea mays
  Peptide Sequence Number=SeqID_51594
atgcatccagagatatgtcgatttccttctttgcacttttatgacaagaagttgctgaatggtgatacagtcttgagcaaatcagcgtcatttcatggaactgaaggccttggcccatatgtgttttatgatgttgttgatggtctggagcttcatggaaagaattctggtgcattatctctttataatgaatgtgaggctgatgcagcagtcgagctgcttaaatttttcaggaaaaggtatccgtcggagtttgttgtttgcaagattggtataataactccatacaagtgtcagctttcacttttgcgatctcgcttttctagtgtgtttggttcttctgttattaatgatatagagttcaacacagtggatggttttcaaggccgggaggtggatatattagtgttttccactgttagagcatcaagttcttctcaaggcgtaagttcaagcagtagtattgggtttgtcgctgatgtgagacggatgaatgttgctttgacaagagctaagctttctctttggattttgggcaacacaaggactttgcagacagaccgtaattggtctgctcttgtgaaggatgctaagcagagaaatttggtactatcaattaaaaggccttacagtatctcttttagaacaaacactgggaagactcttgttccagaaggttctgataatcatctgagtcagatgaagcatgttgaaaaggtcagaggtgatggccaacttgccaaacagaatgagtgccgggaaaagctgaagtttgaagggaagagaaagcatatcgacagtgtggctgactgtaactggtcttctgctggaggtgacattgactctgtgaaaagtaaagataaacatcgtagcaaaagaaaagcaaaagatgattgtgagcctccccctggaaggactattttgtctgcatctgcaaatgatgatagaagacgaccgcagaaagtgaagtccagggttccagagaaacttcttatctctagtggaagccaagaaaaagagggtagtgaagtaaaagtcaaaatgggggaaaaccagagaagcaataatgacaatggtggacaagaagtgggtcgtagtggcaaaaataagatgtcaaaagagagtaagaaatcttctgtgcaggagcaaagttcaaatgtttctactccccgacctgatggcaacaatgaagagagagaatcaaataaaggtggtagagatcctaaggaggttgccacttctcagaatttatttctgaaacggaaacagcaacgggaagctgttgatgctattcttttctctggtctaattccttcaaaaaagtccgaacaatcatccaaaaagttgcaccaagaaaggtcaattgtcccaccttcagttgcaagcggcagcttcaaaccaccaaagaaaaggaaaggttaa

SEQ ID NO: 9816 - DNA, 1212 bp, Zea mays
  Peptide Sequence Number=SeqID_51595
atggagattccaaaaggtgctcacaaccagtttgacatactggaaggtagtcttgctgatatatttgactttggtgatgaagaaaacgtccttcatgaagctggaccaacaaagtttgcgatgcatgtagaagagaaagattatgaaatgttagaaccgatctatgatgaatatcctgaagaaagtgaagaaaatgaagcgtatccaattaaaggaaaatctttgtttgtttatataatgacagccacaaccataaaagaaggggaggattggaggcgaattggaaatctcctagacatgtcctatgatgattttggagtaaaaacaattaaccctgtttccgtatgcaaatcagattcagccaagaaaaaattaaacatcaagtgcatctacacggatcatgagtgcggtgggcagacgactctagacattgcaaaacagcatgcagctgttgtaacagctactttaaatgctgtaattttctctggaacctgctcaagagaaactaaagatggcaaacatgctgcgtgtgagagcaaggatattgctcacatgtcaaacaagacattgattgagaatgctggtgacaaaaaagatgtttctcaaggaactcttacttatgatggtgatcaaacaggtatggtggagacttttattaatgattctgaaatcaaagaagaaagtcttggtatgactgatatagattctggaattgaagcgaagccttcttcgaaagggtatcttagagcttgtaatggaaatagtagaagtgttgctcttaaagatattgctgcaggcacattggtttttgatatatttgctgcttgtttgagtagagtatcctttgacaagtatgacttgatttctatagttaagaggtatttcatagcagctgttgtttctaaaggtttcaaagctttagaaaacacaatcttggagggttttgatgggaatgctgctgaaatttcagaccaagtgcagcaacttcctacgactaagctggaggttatcgaagatgtgttggatcttaaaaaggtgaggtctagaaggggtaacaaatataggaggtttctggtgaaatggttaggcaacccagctagtaaaattacttggattgcagaagaaaagctgcaaagagttaatccagagatttatgctgaagttgtgaaggttttttcaccggagttgagttttccaagccaaggagaatga

SEQ ID NO: 9817 - DNA, 1335 bp, Zea mays
  Peptide Sequence Number=SeqID_51596
atggcaaacaattttcttgataaagtggaggacaatgccattgtctgtatatggtcagagaaagtacaattggaaaaaggagacagtctagctaaggattataggtcagagctttgggactacactcgtattagtatgacgcaaaatagccttcaggagttgagtgagatttgggattggtgggatgatgaaaccaagcagttgttctactctaattatggggacttgccgtacttacttaacattaaggtggatgaacgaccgtttcacgctctcgctcaatattggaatcctgcatatagctgttttacttttgggaatgtagatttggtgcctacagtagaggagtatacggctttactgcactgccctaggcttcaggttgataaagcatattccgaagccgcatatgtcccagcattttggaagaaattaatgagtattacgggaatgagcgaacaatggatcacggccaggattaaacagaagggtgagtgtaaatgtatcccatggaggaatttgcgagacttgatcctagcacatcctgatggaaaaaagaaggttgatgtgtttgctttgagtatctacgagttagtgattttccctagggcactagggcatgttgacgaagctgttttagatctttttgatcagttgggtaaaggggttacacctgttcctgcgattttggctgaaacgtttagatctttgaacgcgtgtaggcgagctggtgaaggcagatttataggttgtgtgcaactgttgatagcttggttccatagtcatttctggaaggttgaaaaattatcgtattcggttttctctgagcattactccccgttaaaggagatagtggctacccccagaagggacgatatatcagaagaaaattggatagcaattttgcaaaatcttcaagaggatgatgtggaatggagagctccttggttgattcctgatggaattctctaccattgtagaagctttgattgggttccgttgcttgggatttggggagccgtcagatatgcacctttgctggtcctaaggcaatacaattcaagacagtttgtgtcggcaacgattaatgataacatcctggagttaaacttggagagtgttcgaccaatggaagagtatctacaagtgatcccatcagagttggagattataaaacaagattttgaaaagaggaatttagaacttgaaaagaaaatagagcggttggaagaagagaagatgcatttgaggctagacgtcgacgtccaaaaattagaagctgaaaaattaaagaaggggaagaataaagtagaggaggatcttgataacttatag

SEQ ID NO: 9818 - DNA, 225 bp, Zea mays
  Peptide Sequence Number=SeqID_51597
atggctaggactagaggaagtggtcgcattattcagaacatcccttcgcgatgccatgaagtaccgaacttcatttatgacttctcaatccctgaaggattaaatcggttgagcgacaccaatgacgccaaagaagataccggggatgtcaatgaaattattacatcaagctctatagtaccaacagctctcttgaccgtcctggctcttgggattgaatattga

SEQ ID NO: 9819 - DNA, 249 bp, Zea mays
  Peptide Sequence Number=SeqID_51598
atgactctccagtctcctattcctctacttgcgttcgcccgcccacacattcgactcaaacgtggccaggagcctagggccatcgagcaggcacccgagctgctccccaccctggcgtcggactacaacaacgaggacctcgaggagtgtgggtatgaggcatgcaagaagatcatcgtgtccatctcagatggaccggacccggaggacggagatggcgacgacgagaaatggtcacgactcgcctga

SEQ ID NO: 9820 - DNA, 597 bp, Zea mays
  Peptide Sequence Number=SeqID_51599
atgcaggcagcatgcaaccgcaccaagggggcgcgccctttcgactttgacacgtccagcatggaggcccaggcccacacgtcatgtaaccggcgcgccggttactacgtgcaagaaactgcaccgccactcaggccagtaccgcaccttctcgactgcggaaccggtgccgcgactcgaggcaaccctgcgcgtgacccgactgtgccaaccgagcacatcggtcacgggtcagtcaatcacgggagaaggcgcgacggtcgatatggccagaaatgggccgacagtaatggcggcggcaggacaggcagcacctttggcaggcgaagcaggcaacgcttcacctccgccatgatgacctcgtcaaaaaagggaccgggaaaggggatactccgaaagggatccttctccgtgaaggaagcgggccccgagccccctactgatcagaggttcgaaggatggcccctcggaagggttcaacagccgcctcagagcactcgggctccgcgcccactactggtcagaggttcgaaggctggcccctcggaagggttcaacggccgcctcaggccactcgggctccacgcccactactga

SEQ ID NO: 9821 - DNA, 345 bp, Zea mays
  Peptide Sequence Number=SeqID_51600
atggccgccccgcgagccactcgtcccgtcgcattaactctgcggcaggacaggcggcacctttggcaggcgaagcacgcgacgcatcacttccgccatgatgaccgcgtcaaaaaagggaccgggaaaggggatactccgaaagggatccttcttcacgaaggaagcgggccccgagccccccctactgatcagaggttcgaaggctggtccctcggaagggttcaacagccgcctcagagcactcgggctccgcgcccactactggttagaggttcgaaggctggcccctcggaagggttcaatggccgcctcaggccactcgggctccgcgcccactactga

SEQ ID NO: 9822 - DNA, 2034 bp, Zea mays
  Peptide Sequence Number=SeqID_51601
atggggttgaggaacacgacggcgaccatcgtcgagagcctgaggactgtggaagggcagctggtgcgcgtggaggtactcgtcctcctcagcaaccttctcctagccctcctcgttgtgctgagcccctaccgtcaccgggcgtggcggacaagtccttccgcttcctcatgtgggcgatctacacgctctccaccgtcctcgtcccctacaccattggtttttggtttgctggaggccggcccgttccacgaccagaccttcgtcctgtggggcgccgccctcctggttcaggcgggcgccgactccctctccgcctacaacctgcgcgacggccggaacaggtgctacagcgccacgatctggatcttctggatcctgagcatcgccaaggcccacgccaagttccaggcgctgagggaggcgagcaggacggacggcctcatgaagcacaccaaggtggtcgccgactacatgatgacggagcacgagtcgggccacgtcttcgacgccaccaacatgcaaggatacaggtacatattccacggggaagacctcaccctcccttacctgtccaagccggactacaggacggccctcgccgcgtgcgcgttcaccacggtcgacaccgtctggcagtggatcgacagccagagcgtgagcgtcttcagcagggagcacggcggcatcctcaaggacatcgctctgtccttcactctgttcaagctgctcaagcggaggttcgggaagtacgatcacggggaggccggccgtcccaagacgcggacgctcatcgtgtctgggctcctccgggaagaggctggctacagccgcgccttccgggtgatcgagatggagctcacgttcctgtacgatttcttctacacgaggcaccaatcgcacacccagtacgtaggaatgacggtggtgttcgtgctccccgtgattgtttggaacgccatctctggagccttcagcagacactaccaccgtaccagcctggagcagaccgtcaacgggacagacgtcattcactgcattaccatcgtgttgatggtggtcgttgtcgtcgtgctggtcgtggaatcgcgcatcaacgaccagaagtggagggtggtcgacgatctgcatacattgactggcgcgagcaagatcacctggaagggagaagccgttccgttcgacgacggcagcaggaagcaggcgacgaaagggatcaagaagaggaagcaccggaagctgacgggcaggaactgggacaggaagctggggcagtactcactgctccacagcttcgactaccacccgaggaatgtagcctccattctgtcactcggcctgatcgagccaaccagggacgggcagaaggcttccaagaaggtcgagctgcccgaggaagtcgtgatgcacgtcctgtcgcggttcaaggcgaacgacggccgcctagcagatgggcgcgcagctctcgccgtcgccgggaacgacgcgagccggctcacctgggcgtgcgagttgcccacgagtgtccacacggtcctcgtgtggcacatcgcgacgaccatctgcgacacgacgacgccgcggcagcagaccggcgaccgcctcgtggccaagtgcacgtcggagtactgcgcctacctggtggcgttcgttccggacatgctgccggggcacgcctacgacacgaggcgtatcttcaacgccgtggtcatggaggctcgggactacctcgccgggtgtgacaccatgagagacaggtgcgtcaagcttctagagctgcagtgcaatgagctgactatattggggatgggagcaaagcttgggagtgagctcaggtacagagttcacgacaggtcgcggcggtggaaggtgcttgcagacttctgggcggagctcgtcctcttcctcgcgccgtcaagcaacgccgacatccacgcagagaagctcgcggccggcggggagttcatgacccatttgtggaccctgctcattcacgccggcattctggagcgcccctcttcttcctctccctag

SEQ ID NO: 9823 - DNA, 498 bp, Zea mays
  Peptide Sequence Number=SeqID_51602
atggatcccacgccacgggcagtgctgagccacagcagcagtggcggggcgaagggaggaggaggaggaggaagccacgcgcactacaggggcgtgaggaagcggccgtggggcaggtacgcgtccgagatccgcgacccgtggaagaagacgcgggtgtggctgggcacgttcgacacccccctggaggccgccctcgcgtacgaccgcgccgcgcgcacgctccgcggcgccaaggccaggaccaacttccctgacgaccacgccgggcaggggcagctgcagcagcagcacctccgtcggcgccaacacccgccgccgcagcacgtctcgttcggaggcgtcggcgtcgactgcgcttctccgtggcatttcgtctgcttccagacaccgacgacggccccggcaaccgagacaccgtcaacggcactggagctgggcacgggccgaaggtgcggcggtctccccttcgacctcaatgaggcgccgtcgtgctga

SEQ ID NO: 9824 - DNA, 1350 bp, Zea mays
  Peptide Sequence Number=SeqID_51603
atggtgggctccggcgcggctgggggcggagcggatcacgcgcggagcaaagaggccgcggggatgatggcgctccacgaggccctccgcaacgtctgcctcagctcggactggacgtactccgtcttctggaccatccgtcctcgcccgcggtgccgcggcgggaacgggtgcaaggtcggcgacgacaacggcagcctgatgctgatgtgggaggacggcttctgccggccgcgggtggcggagtgcctggaggacatggacggcgaggacccggtgcgcaaggccttcatcaagatgtccatccagctctacaactacggagaagggctgatgggaaaggtggcctctgataaatgtcacaaatgggtcttcaaggaaccttctgaatgcgagcccaacatctccaactactggcagagctctttcgacgcaaccatagctgtgatccaagccgggcatggcctcctgcagctgggctcctgcaagattatacccgaggacctgcacttcgtgctgcggatgcgacacatgttcgagtcactcggctaccagtcgggcttcttcctctcccagctcttctcgtcctcgcggggcgcctcgccgacgccgacgccgccattcccgctcaagcagccgccagcagctccggccgcgcgcgccccgccgcagctcttcagctggccgggccaccaccagccgcagcagctcccgtcgcccgcgggagcgtcgccgctcttcccgcccggcccgggcgcgttccacccgtcctccgcgcgcccaatgccgccgttcccaggcggcaaggacgagggccacatgttccacctcccgccagcggcgcaccacggcaccaacaagcagccgccgcagcacatggacgagcaccaccaccaccagcagcagccgatggtgggggccggcggcgacgcgcccgacggcgacctccgctggcccaacgggctgtccttcttcaccgcgctcaccgggcgcgcggacgacgcgaagctgcttttcggcggccccggcgctggcgctggcgctgcggacgacgacgacaaggcggcgccggacgcgcacggcggggccgagaacgtggaggagtacctcagcctggagagccactccaacaaggccaggaaggtggagagccccgcggcccagagcaccaacaagttcaagaggagcttcacgttgcccgcgcggatgagctcgtcctcgtccacgtcagcgttcccgtccgtgtcggcctccacggcgccgccgcagcagcagcaagcagggatggagtatcgagggccgcacgagggcggcgtctactcggacctcatggagacgttcttggagtag

SEQ ID NO: 9825 - DNA, 159 bp, Zea mays
  Peptide Sequence Number=SeqID_51604
atgagagatagcaatagggacccgatctctgatttcccgcggggaattcccctattagggcttattcggttctaccccaatccgtatggattgagggggattgaaggggtttcaatccctatggggacagattcctcgcggggtttcccgtggggataa

SEQ ID NO: 9826 - DNA, 246 bp, Zea mays
  Peptide Sequence Number=SeqID_51605
atgggttccgcggcggagctaggactttcgatgagaaattccgcgtgcacagagatcccaacggagaaattagcgaccaccaaggtgtctgggggttacaatgcaactccagagtgccccacgggtaacccagagcctgtggtttacatgttcgacggcggcgacctcgctctctccttctcacttggcggcgcgcttgctaaaggttggagtttgctcagctgggaaacggatggacagaggtag

SEQ ID NO: 9827 - DNA, 222 bp, Zea mays
  Peptide Sequence Number=SeqID_51606
atggaatgggactccgacgagagctccacagactcctccttcgacgaggacgccgccaacatcgctgtcaacaaaggctttctcttctccaacgtctgctacaaatatcttatggctaaggatagcaaaaagaaggtatcttcggaatctggttacgggtatacaagagcatggtcaaaacaaagcttgactgaaatggaagacgatcatgatgaaggatga

SEQ ID NO: 9828 - DNA, 378 bp, Zea mays
  Peptide Sequence Number=SeqID_51607
atggcggcgccgtcggccaaccacggcggcaacctcaccggcgcacaccaactaggcaaactagtgaccaaatcgatagtccgaccggtgcaatacatagatcacgcggtgaagaaggcgggtcacggcatgatgggttccgtggcggagctaggacttccgacgagaaattccgcgtgcgcagagatcccaacggagaaattagcaaccgtcaaggtgtctaggggttacggcgcaactccagagtgccccatgggtaacccagagcccgtggtttacgtgttcgacggcggcgacctcgtgctctccttctcacccgatgacgcgcttgctaaaggttggagttcgcttagttgggaaacggatggaccgaggtag

SEQ ID NO: 9829 - DNA, 447 bp, Zea mays
  Peptide Sequence Number=SeqID_51608
atggcaagaaagggtgccaccccaccgatgggaagcacaagcgcccccccgagtcctccctcaaaggactttggggactcggagtactcagaggaagtctcctccgagtatgaccgctcccccgcttcggcgtcccccatggcgtcgtctgatgattcagacgactccatggggcagtccactgcggagcgggtgtacatccggtccgtcgagcgcgcggggctcggtgggtcagatgactcagaggaggtggaggaatccttggactccaaggagggcagtgacagcgacagcgacgagggtgaagacagcctcaggggtggtgacgacagcggcgacggcaagggcaacagcgacggtgacggcggcgaaggcaacaacaggggcggcgatggcaagggcggcggcggcgccggtgacgccggtggcagagtgccaccagcttaa

SEQ ID NO: 9830 - DNA, 219 bp, Zea mays
  Peptide Sequence Number=SeqID_51609
atggagagtcatcagatgaaggaaaagcagaagaagatgaaggaccctaaagataggcaggagttggaggaggaggaggatgctaaggcatgggtggtccatggaagccgcgaagcttcacatgtcatcatgaagcgcctgagtctggcaccagtgcacatgctcctcaacagcacgactgtggcacatggaaaagacctcggcgatccccttagctag

SEQ ID NO: 9831 - DNA, 372 bp, Zea mays
  Peptide Sequence Number=SeqID_51610
atgaggtctttagaggttggttcatcgacgtcagaggtggctacggggcttgctcgtggggatccgtgctttagttcttgcggcatcattgcttctgatctgtacattaagcggaaagtattcgacagcgacgaaggtgaatttgaggttgccctgggctgtgggcagtggtctgacaatatcgagcccccacctctgaagttgctagagctggccgttgatgattgcgaagtctctgcttcagtgtttaagccttttagcttcattatgattggatggatgaccttcagggtttctgtcggctggtgtaccaactacgtgataaaatacgtcggagggcaggacttcacccttcgctgctgctttggctaa

SEQ ID NO: 9832 - DNA, 342 bp, Zea mays
  Peptide Sequence Number=SeqID_51611
atggagacccatgcactcttgttttgcttaggaaccgaaagggaaaaggatttgaacatgatggattcggactgcagaagaacaccaacttgtgatgccgccgccagcatccagggttcgtccgacaccctcacgctcccgcctcccagctccgcgatcgccgccaggcagccagccaccgcctatcaggtccaccaaccaacgctcccaacttctgcccctgggcaggacgagtgccctagtggccggggtgtcacgctccacaagatcgtgacagccataggaggtgctatatcagttgctaaggcgcagcgtctttggaaggctgtagtcgggccgtga

SEQ ID NO: 9833 - DNA, 321 bp, Zea mays
  Peptide Sequence Number=SeqID_51612
atggcgaggtctcaaggcacggtgttcttggttgatttgggggaaatcccaaattggagctctctggtggaggatctgaggtacgggtggccggagatagggaagaacacgggtggttgtgactgtggcgttcaccggtgcaacggctcaaggcttatactcctaagggtgacacgattactaccgcacagtaacaagctacggcgtggcgcaaccgaggtcaccggaggttccacggcgacgctggcggtccggccacgtcgcaatggctacaagcacggtgataaacttcaatccgcgatcaaatccattcccccgtga

SEQ ID NO: 9834 - DNA, 615 bp, Zea mays
  Peptide Sequence Number=SeqID_51613
atgcagtacaatggatcaagcagtctcattagctgcgagaagcagacgattcgaatcgagttttatccttgcaagatccgggctcaccgccttggcgtacaatgcctcattgaccccgactgccgtcgtgcagtgaccgcacttgtacccaccataaccggaatgggagaccacgtctcaggtcgcgcagatcctctggtgcaggctctggtgctggatccggggctacctcctgagcagctccttgctctgggaggctctggcggtcacaacgatgtacagttcgacggcggggatggccggaatcgctcggtctacgtgcgcaggcggatgtcctcgtcggcggaggaggctatctgtgccttgaatcgaaaaatggcacagtggcttacccggtctacgctcgccggcagtcggagggagtccgacgaccgtggactggcttctccggcgaagcaaccttcgattcctcgctcggggagcttcaccgaggcgcgggcgcacacgggggacactggcgcagctcggcgcggcgcagggtcgggcgcgggcgtgctctggcgtgcgcagagcgcgtcgaacacgtggaggttttcttctgcccgtgttccatag

SEQ ID NO: 9835 - DNA, 426 bp, Zea mays
  Peptide Sequence Number=SeqID_51614
atggctttgttcagccaaagacaactcagtctgggtgcaccggacagtgtccggtggtgcaccggacagtgtccggtgcgccaggccagcgactgtcaactggctgctctcgggaagcaattaacggcgtacggctgtaaatcaccggactgtccggtggtgcaccagacttccattgagccaacagtcggctgggccaacggtcggccgtggaatccgtgcgtgacgcgtggcagagccaacggtcagaagggggcaccggacagtgtccggtgcgccaacggctctgaaccgccaacggtcggcttcgccaaagaaggaaagaaatccgcaccggacagtgtccggtggtgcaccggactgtccggtgcgccaggcgacagaaggcaagaattgccttcctggaatgctctcaatggctcctag

SEQ ID NO: 9836 - DNA, 375 bp, Zea mays
  Peptide Sequence Number=SeqID_51615
atggggcgccatggccaaaattccaagccacgccaaggtgatctagcccataaactaaatggatcaacgcgcagaggaggatgtggttctttaccggagatgagggggccgaataggctgtccacacaaacaggacgcttcacatggagctcccgcgctggtgatctggccaccggtccaatcccgccaggcgaggcccgaccacaaaaatcacagaagggatctcaacggactaggaacgaagagcttgagcatgcaatttttacggaggtggttgcaatggaatacgatcgcgtgggagataagctatgcgcatgggagaggctggaccacgggtccgatcgaagagtaaggggctgtatatctgttgcatga

SEQ ID NO: 9837 - DNA, 243 bp, Zea mays
  Peptide Sequence Number=SeqID_51616
atggggatggctgggtccaccaagaggtctgtcatggcctcgcctggcgggattggaccggtggccggatcaccagcgcgggagctccatgtgaagcgtcctgttcgcgtggacagcctattcggccccctcatctccggccacctatcggtgatcgagcggctcgggctcgatctcggtgtggttgaatctgggccgacaaccttcaatcagacagtccttattagcttaccgattcaatga

SEQ ID NO: 9838 - DNA, 411 bp, Zea mays
  Peptide Sequence Number=SeqID_51617
atgcatgtgctgacgaccttcttcggatttcgtcctctggagatggtgacccaccccatcggatcattcctcgctgagaaggaagatgacctaatgtgtaaggatcggggttaccacgctaaggatgatgcaaaggtcaccatcggcgacaaagaagatcttgtgaagggtcttcagacggagcagatgggcacccaaatccacgagcttgaagagcaagtggaggaatggaaccacaccattgaagtcttagagaaccagctccagactagccaacaacatcttgaggaggtgaacaagcacctggacatgcatcatcaagagatgcatcaggacatggaagtagatgaggacgtggacatcgacgatgaggattccgagcggcttctagcttggacactgctagcatag

SEQ ID NO: 9839 - DNA, 567 bp, Zea mays
  Peptide Sequence Number=SeqID_51618
atgtcggagcccctccgcgccctgctcgtcctcggccgcgccctgctcttccccggccgagccccctcccgttctttgagttcgtccgtgcgcaaggaccacttctctctcgctcgtttcgctattttgaatcgccgcgccgccgcacgccgcgccgccccgcactcccctcgccgcgcctcccgcacgaccgcgccgcgctgcccgcccgcacgcacgtcatgccgcgccgcccgcactcccctcgcgtgcctgactcctcgtcatgccccatcgccgcgccgcccctcggcgcgcccggccctcgccgtgcctacctcctcaccgtgccccatcgccgcgccgcccctcggcacgcccgggccctcgccgtgcccgcctcctcgccgtgccccatcgccgcgccgcccctcgccgcgcccgggccctcgctgtgcctgcctcctcgccgtgccccatcgccgagaacttgccgcaggattccacgagaaacaacctcaagaagatcttcggcgtcatcggcaggtcacacacgagaacacaacctctgaccgacggcccatgtag

SEQ ID NO: 9840 - DNA, 217 bp, Zea mays
  Peptide Sequence Number=SeqID_51619
atggcggttcctggaaagacttcgtggcccgaactgattggatctgaaattgaacaggcagttgacactatctgtacagagcggcctgatgtaaatgtcatatgtgaattacaagatggccaaccagccagtacagaagtatgtacaacagtatctccagttacaggcgaagacccgcctgtaactgtttatatcacctacgtcgtcgacgatcaag

SEQ ID NO: 9841 - DNA, 306 bp, Zea mays
  Peptide Sequence Number=SeqID_51620
atggtggacgagagggactcgctgagggtgggttgggttcataacagaagggggagcgaggggagcacccaatttaaaggaaccgagtgtgcctttcacgaatttggagcgaaagtgttcacggcagcgtttgatcgggtactcagaggcacttcttcagttgtgatacgtggaacacatcgtgtacagcagataacgactctggtagttgaagtctgtctaaagaaccatggctctcctggtcctgaccagttaaaagtgttcgacatcgtcgaccatatagagcttcaaatggtgccattttga

SEQ ID NO: 9842 - DNA, 492 bp, Zea mays
  Peptide Sequence Number=SeqID_51621
atggcggttcctggaaagacttcgtggcccgaactgattggatctgaaattgaacaggcagttgacactatctgtacagagcggcctgatgtaaatgtcatatgtgaattacaagatggccaaccagccagtacagaagtatgtacaacagtatctccagttacaggcgaagacccgcctgtaactgtttatatcacctacgtcgtcgacgatcaagttctttcaggagcaattatgtcattagaaattggcaagcaatacttgacagatttatggatgcgctccaactcaccctcatacgccgccaggtatcagtactgcgatacgtgcaccggctaccaccaaggtgatgtggtcatgggtgcgacgaggcgggaggccacatggcttggtgaagatggtggaggactcaaaatgagcaaggcctctaggaggttgaggttatcgctggtgcaagtttgtaaagccaggctaggtggatgtaacacctaa

SEQ ID NO: 9843 - DNA, 225 bp, Zea mays
  Peptide Sequence Number=SeqID_51622
atgaatgcgctagagttggttgaacctctggatgtaggacccgtgcaattggcatactttggccaaaggtgggacacacaaacctactcgtggatggacttcggcgtcgaggtgtcttctaggccacacagcagaaatggccatgatgttggtgtcattgagtggccccttgaagaggttgacgtagcgcaagagacagtcattgtcatcgccttcatcttttag

SEQ ID NO: 9844 - DNA, 510 bp, Zea mays
  Peptide Sequence Number=SeqID_51623
atggaagaggtgctgcagcggctgaccgcatactcgtacgagacttggtgtagggagaaagacgacgttgggccggaggtggttgcccgggctctctgtacgagacttggtgttctggagggggacatcaaggtgtcacatcgccggcctgaggacttcctcatcaccttcgtgcaccagcaccatcacaggggtcaggctggcagcgggttcgacagttgtgctggctttgagggagcatgggcgcagactcccatcgacccggctcctacactacgccgcgactctaggtgcctccgagccagcatccttggtggcgtgaaccgctccccgagcccgccaaccgcgccttgtctcagcattcttcagagcgccgccttccctgacccaccaactctgtgcaggagcgctccgccgaccggaatggacgcgacgtcgttgggctcccctgtcaccgcgtctaccagcgctgggctacgcgtggggggcgtttcaaactgggcgtcgtaa

SEQ ID NO: 9845 - DNA, 426 bp, Zea mays
  Peptide Sequence Number=SeqID_51624
atggctctcggtgccctagcccgcctcctccgccttgcgcccacccctcgcctcgcgcgccccttcgctgcaaaggtccgtgcgtctcggccgcaggaaccggagcttccgtcggaggacgacaacgacttcgccggcggcgagctcaccgcccccaccgagggcatcggcaagccgctcgccgaggtgctcaaagagctcgggaagagggttccggactcccttgtcaagacccgcgtcgagaataatggcttcgctatcaagtacatcccatgtgctatccaactatttctgataatcggtaagacctaccgggagaggttcaaatatcctcttttagatgcgtggccatggaattacaacctctatgattggcgcaagatgttgctcctgcagcacaattttatgggagttgtcgcgaactga

SEQ ID NO: 9846 - DNA, 339 bp, Zea mays
  Peptide Sequence Number=SeqID_51625
atggcccgtacaaaattacccgacgggcgacgcgatattccattttgcaccacgcgattggcgcagcgcacccgcacgcatcgagatcgtccgtttcagaaaattataaccgggctcgggcccaccgtgggcgtacggtccgtatggacagcagatccaccggcggacgcggaccagtcaaaagaacccatgccctcggcctccttggattcttcttccgagcacgcccgtgtgactgaggaggtcgccactcgccactcgccaggtagcacgcagaaggccgaggcagctgctgtcgctggtcgcggatggcccatctggccatctcgtcgcagatga

SEQ ID NO: 9847 - DNA, 189 bp, Zea mays
  Peptide Sequence Number=SeqID_51626
atggtgcagacactgatatctgatagcacagtggttgagcacgccagtgcggagctccccatcagggttcaatccatggtgctgcatggttatgtgcccacctccgtggttgaaacagggcagatggttccgcggctgccaaagaagcgtgaacgtgtaagggtcctgcctgtttgccaggaaaggtag

SEQ ID NO: 9848 - DNA, 510 bp, Zea mays
  Peptide Sequence Number=SeqID_51627
atggggcagtttggggacacgacctacaccaaggtttttgttgggggactcgcgtgggaaacccagaaggagactatgaggaagtatttcgagcagtttggagagatcctggaggctgttgtcatcactgacaagaacactggcagatccaagggctacggatttgttaccttccgggactcggatgcggcaatgagagcttgcgttgatcctgcaccggtgattgatgggaggagggctaactgtaatcttgcttcccttggggttcaaagatctaggcctcctactccccagcatggaggggctaggaactttaaagtgatgaaatctttcagccagcaggcaggaatccaaggtggactgggcgcagcttttccttctcatgccaccttccctcattatgccatcccacaaggcctcccctaccatatctatgggtacccctccctccctccctctctacctatacgcgcacacatctggtcagaatcggggccccgtgaaacttga

SEQ ID NO: 9849 - DNA, 1146 bp, Zea mays
  Peptide Sequence Number=SeqID_51628
atgatctctggaccatctggcagctgtgttggccctagtgcaggccatgtagtagacctgcatgtacccagtgacaaggagagtaacagtctcaaaggttacgcttttgttgagtatgaaaccgaggaaatcgcacaatacgctgttaagcttttctcaggacttgttcggatcagtggtaaaacgcttaagttcatgattgctggttatgacaaaccgtcttcaaatgtcaatacctcagtaatgctcaatcctctttatcaggtggacaagtacacggccatggccaggcttgaagctgtcgtccttacagtctcatcgaccgatgccacagcgacacatgcacgaacaagagcacctgcccgactgagcgtgcacgacctcgcgccgatcagggccaagaactcacccccgtcgtgtgtgccgatggaggtggaggccgacgggatccaggaagccaccgcaggcgcaggagacggcggcggcgtggacgatgtcttcttctgcgtcgccgcgacgtccaggggcaacaagaacagcatctcctacttccacaccaacgcggtcggcgaggacgccgagtcggcgctcgcgctcgccgcgctctgcctcgaccacgcccccgaccaccaccggtggcaccaccacaccgtcgccggggcgaagacgttcgcgttcctctcggccgacgacggccgcacgtacttcgccgcggccgacccgagccccggcgccgccgaggtggtccggttcctggagcgcgtccgcgacgcgtgcgacgccgcgcccaggaagcgcctgcgcgacgaggcggtggcccccgtcgctcgccagttcgccaggacgctgcgggcggcggcggcgggcccgagctcaggcgcggagctaccggaggcctcgctgcaggcgaaggagccgtccacgccgctggcgccggtctgcgagaaagacgaggaggagcgccagagggccggagagcgacgtcgcgccttcttgcagccggaggaaagcgcaagcgcgcttccggggtggcgcccgtggtggcgccacgcgtcggtcgtgatcgtcgtggatgtggtgctgtgcctcgtgctgttcgccgtgtggatgggggtttgcaaaggcttcgggtgtctgacgcgatga

SEQ ID NO: 9850 - DNA, 306 bp, Zea mays
  Peptide Sequence Number=SeqID_51629
atggcagcacatcgctgcacactcgtcaccagcaagcaagctcaccggtccggggcagcagcaggaggaacggacggacatgcagagcgtcagcagtacaccactcggcaccaaagaggcaaagacttccagctgcggacgtcgatcagcattcaggaggcggccgtcatcctgtcctgcctgcctgcctaccatgtggccaaggaggaggagcaccatgagtcgatccccatgacttcgctgccggcgccggcattgaagggggaggcagccgcgcgctgcccgctggatcatgagtgcatgtga

SEQ ID NO: 9851 - DNA, 822 bp, Zea mays
  Peptide Sequence Number=SeqID_51630
atggaggcctactgcgacgaggttcggcgcctggaagacaagttctacgggctcgagctcaaccacatcgctcggcggtacaatgagactgcggatgagctggctaaaatagcctcggggcggacaacggttccctcggacgtcttctccagagacatacatcaaccctccgtcaagaccgacgcctcgcccgagcccgaggaggcctcggcccaacccgaggcatcctcggccgccgaggaaggcgcccggggcttctcgcacctgctggtcaccatcgacaaattctccaagtggatcgaggtccgacccctaaccagcatcaggtctgagcaggcggtggcgttcttcaccaacatcatccatcgctttggggtcccgaactccatcatcactaacaatgacacccagttcactgggaagaagttcctggacttctgcgaggaccaccacatccgtgtggactgggccgtcgtagctcaccccatgacgaatgggcaggtagagcgtgccaacggcatgcttctgcaggggcttaaaccgaggatctacaacgacctcaacaagttcggcaagcggtggatgaaggagctaccctcggtagtctggagtctaaggacgacgccgagccgggccacgggtttctcgccgttctttctagtctatggggccgaggctatcttgcccacagacttagaatacggttccccgaggacaaaggcgtacgacaaccgaagaaaccagaccagccgagaagactcactggaccagctcgaagaggctcgggacgtggccttactacacttggcacggtatcagtag

SEQ ID NO: 9852 - DNA, 432 bp, Zea mays
  Peptide Sequence Number=SeqID_51631
atggccgaggctcgggctacgctcccgaggtaccctaggacattttcgagaccagcaggagtgattttgttacggaatcccatcagagggaggcatcgagccctcggaccctatcaaacgggatcgggtccagcaaatcacctgcaggaggaggtcttcgcctcgcccgaccgcagggctcggcctcaacctcagcctcggaaggtggtctctgcctcgcccgacccccagggctcggcctcaacctcggcctcggaaggaggactccgcctcgcccgaccccagggctcggcctcaacctcggcctcagaaggtggtctccgtctcgcccgacccgtgggctcggcctcaacctctacctcgggaggaatcgcgtcctcgcccgaccccggcctcggcctcaggaggagtctccgcctcgcccaaccttag

SEQ ID NO: 9853 - DNA, 1206 bp, Zea mays
  Peptide Sequence Number=SeqID_51632
atggttgagctgggagtgggctggcgtcaagagggctctctgatggggagtgtcaaccgggcttacatctttgcctcagttctcacgattgatccgactagtgcatgtagagttgaggtcactgtcaattcttacttcagtgtacgagatggtagaaaggagtataaccggggtaggccagtaagctatgttgttgattcagaaacatattctatcattgatctagagaaagatattgcttcagaatttaaatgggccagtgaacagcaggcaaatttctgggttctaacaggagagggtagtctgacatgcaagttggcttcagatgcacaactacttgacttgttaaggacatccagagtagtgaagttgttcatggtagtcggtagccgtgagcaaaatgtaagagaggaggagatggctgctgctgcagtgaatataggagacgaggagatgcctactgcagtaaatataggagaggaggagatgcttactatagtgaacatggaagaggaggcgatgcctattgcaatggaccataatttggaggtacatgatagaggatttacatgggcagaagtacctgaatatggggaaacaattggagggccaccaatacttgaggaggaggaggaggagcatttcagaactattgggtgtgatcctgatggagacgagcctgtaggagtagatgaagagtggagaatggaagggcgtatcctagcaagtgtgttgcatgagttgaacatgaagagccgagggctgcagtatggaatcatgaggactggtgcaatgtctgctgagatatctggaataacaaaagaagaaagacctgctggtagaccaagaaagaagagaatcaaggctagtggtgaggctgggaaaagaggaccatatcagtgcaaaaggtgctttcagtttggacacatagagaagggttgtgcagctactcaagctgaattagaacaagagcttccccaaccacgtccaaaaaaatcaaaaagacaaaggaaatatgtatctgaaggtgttgaagcctctgctattgatgctaagccatcccatgcagatccaaatctgacctctagtccaggtgtaaaaacaagaagcatgtcttctctttctccaactagcccaggtcctacaacaaggaggatggcatcaatctcacctgggggaattaatcgaaggctcattattagctag

SEQ ID NO: 9854 - DNA, 504 bp, Zea mays
  Peptide Sequence Number=SeqID_51633
atgctggggttctcgaccggacagctgctggtcgtcctcggggcctgctccgtcatgatgaagcccagtgatatggtgaagattgcgaggacggccgggcggatgactggaagagcggttgggcggctcatagtggctcgccggcagctggacgagattctgggccagtctgcagccacccagttctatgtcaagtctgaaaagacgtttcaacgtttaaatgttaaaaaggttcataaggagcttaaagacgctatgacacaattagactcgatccgttatgaagtccagaacttatcaagattatctcctgggcagtttatgttgaagcaacataacgctgttttagtccaagtacttgaagggcctggtgcaatgcaggtcgcgggttcgaagcagtctcctcatttgcggagaaggcttgtcttggttgattcgttccccaaaccccactcatatgggagcctccgtctgtccgccactgggtctgcccttttaatatga

SEQ ID NO: 9855 - DNA, 291 bp, Zea mays
  Peptide Sequence Number=SeqID_51634
atgacggtggattcggttgaagacgcgctgacagccctggcccacaacccagccagccaggaaacggtgggtctggctgctcagcgacagcgtcgacgcgcgagcggcacggaccggcgcgcggacacccccgtgggccgagcggagcgtagggtgttcacatgcgatgacattacagattggatcaaatcatttctcaagaaggatacccctagcgaccattttagcggggctctaagaaaatgccgcctccggaaatcatttacggacgatcgacttcaagaattataa

SEQ ID NO: 9856 - DNA, 240 bp, Zea mays
  Peptide Sequence Number=SeqID_51635
atggcgagctatgcacggcgcgagcagggcttgatggcggaggggaagagggaagatgagagggtgccggggagggaagaacgggcggccataagcaccaataatggcgccgagaagagaaacggcggggtggaaggaatggagggcgctgcgcggtcggcgttgcgcggggtcgcgtcgggcttctgggcgccggggcggctcgcacggggaggttgccggggcaccgtcgggtcctag

SEQ ID NO: 9857 - DNA, 1353 bp, Zea mays
  Peptide Sequence Number=SeqID_51636
atggagttcatctccgacgaagcattggccatctttgtgcccatcctggtgtactgggtctactcgggcatgtacatggcgcttgggcagtccatggacaggtacaggctgcacccgaggaaggaggaggacagcaagaacctggtgtccaagcgggaagtcatcaagggcgttctcttgcagcagcttgtgcaggcgggagtggcggccgtcgtcttcacggtcacgggagatagcagcagggtttcatcatcatacgataataaagaagcagcacatcaggcatcctactacctgctgctgacggtggcacggcagttcggggtggccatggtcgtgctagacgggtggcagtacgcgtggcataggtacatgcacctgaaccgcttcctctaccggcacatccactcgtggcaccaccgcctcgtcgtgccctacgcgttcggctcgcagtacaaccaccccgtcgagggcctgctgctcgacacgctcggcggggcgctggccttcgtcgtctccggcatgtcgccgcgcgcctccatcttcttcttctcgctctgcaccgtcaagggcgtcgacgaccactgcggcctctggctgccggggaacctgttccatctcttcttctggaacaacacggcgtaccacgacgtgcaccaccagctgcgcggcagcaggttcaacttttcgcagcccttctttgtcacctgggacaagctcttcggcacgcatatgccgtacgtgctggaggagaggccgggcgggacgacaacgcctggccggtttcaggagacgccgccgccgttcacctttgacgacggcctcgacgtcgaggagccaatctctggtgagcagcacatggagcggcttgcgcagaagcaggcatcgacgcagttctcctcgtggccacgctcggacgaccagcaggccggcaagaaaaggcggatgccgtccccgccgtggccgtcttgcatagcagatgacgacgacgagcatcccccacctcctaccaagaaggcaagaacgaaaccgaagagcagaagcaggcgcaaacgtgttgctgcctgctgcccgtgcggcccggctccggcaccggcaccgtctaaggaggtggcacaacacgattgcgacgcgcatggcctgacgcgccagccgggggaccgggcatggatgtactcggctgagggccatgccccgcctcgtctggccaaacgggccgtccggtccggcgacaccagggagatggtgcggctgtacgcgcggtggcgacgcagcgtctccatgccgagccgcttctacgtgcagcgtgccgtggagaaggggcggacgatgcctgaatacgcgccgaaatag

SEQ ID NO: 9858 - DNA, 333 bp, Zea mays
  Peptide Sequence Number=SeqID_51637
atgcgctccctgctgccgcagacgctcgtggatgctgctcctttttccccggctccagccatcccccgaccccgcctcttctccccggattcggccaccacagtcccccgccccttcgtccccgatatagcccccgaagagaagtcacatctaggccgcaagaacctatgcagttctatgaaggtggatccgaaggaaaccaaggcgaaggtggtggaagccttcgacatcaatgacatcgccaataacgtctatgaacacaacttcaatcaccacccctacccggtgctctccactctgaccccaaaatcttacactctttcgcagtcctaa

SEQ ID NO: 9859 - DNA, 252 bp, Zea mays
  Peptide Sequence Number=SeqID_51638
atgaccgaaagctctagatggttcttcagcctcgaccccgtgatctgtaatgaatacatcacttttagggataagtcgagagtcacaaaggtgatgaccaagcaacacgacaagctgcttcacatggacattgttgatcctgctcaggcgaaggatgaggctttctcttatgctcgttatttgattcttaggttgcaaaatgagtttcccaagaatgccatgagaacgatttgcagtgataatgacacataa

SEQ ID NO: 9860 - DNA, 225 bp, Zea mays
  Peptide Sequence Number=SeqID_51639
atgacgatgagattccgagggcttacaaagcggtacacgatatcagcctcaggatcacgaatcaacggtgacgattttaaacaacagaggtccttctggatccgtctgatcctgaaccaagggcccagatacacccggccaaatcgacacgcggtatctaatcctggccgctccggccagatccaacggcgtggatcaagcgaagcgaaggtggaaagggtatag

SEQ ID NO: 9861 - DNA, 2040 bp, Zea mays
  Peptide Sequence Number=SeqID_51640
atggcgaggactatgcttggagaattcaagacccccgagtgtttttggtcggaagccgtgaacacggcctgccacgccatcaacagggtctaccttcaccgcctcctcaagaagacgtcgtatgagcttctaaccggtaacaaacccaatgtatcttactttcgtgtatttgggagcaagtgctacattctagtgaagaagggtagaaattctaaatttgctcccaaagctgtagaagggtttttgttaggttatgactcaaatacaaaggcgtatagagtcttcaacaaatcatcgggtttggttgaagtttctagcgacgttgtatttgatgagactaatggctctccaagagagcaagttgttgattgtgatgatgtagatgaagaagatgttccgacagccgctatacgaactatggcgattggagaagtgcggccacaggaacaagatgaacgagatcaaccatcttcctcaactatggtgctacccccaactcaagaagatgaacaggttcatcaacaggaggcgtgtgatcaagggggagcacaagatgatcatgtgatggaggaagatgcacaacctgcacctccaacccaagttcgagcgatgattcaaagggatcaccccgtcgaccaaattctgggtgacattagcaagggagtaactactcgttctcgattagttaatttttgtgagcattactcctttgtctcttctattgagcctttcagggtagaggaggccttgctagatccggactgggtgttggccatgcaggaggagctcaacaacttcaagagaaatgaagtttggacgctggtgcctcgtccgaagcaaaatgttgtgggaaccaagtgggtgttccgcaacaaacaggacgagcacggggtggtgacgagaaacaaggctcgacttgtggcaaaaggttatgcccaagtcgcaggtttggatttcgaggagacttttgctcctgtggctaggctagagtcaattcgaatcttgctagcatatgccgctcaccattctttcaggttgtaccaaatggatgtgaagagcgccttcctcaacgggccaatcaaggaggaggtgtacgtggagcaaccccctggcttcaaggatgaacggtatcccgaccacgtgtgtaagctctgtaaggcgctctatggacttaagcaagccccaagagcatggtatgaatgccttagagactttttacttgctaatgccttcaaggttgggaaagccgatccaactctattcacaaagacatgtgatggtgatttgtttgtgtgccaaatttatgtcgatgacataatatttggttctactaaccaaaagtcttgtgaagagtttagcagggtgatgaagcagaaattcgagatgtcgatgatgggcgagttgaactacttccttgggttccaagtgaagcaactcaaggatggcaccttcatctcccaaacaaagtacacgcaagatctgctaaagcggtttgggatgaaggacgccaagcccgcaaagactccgatggggaccgacggacacaccgacctcaacaaaggagactccgactatgctggatgtaaggtcgataggaagagtacatcggggacgtgccaattcttaggaaggtccctggtgtcatggaactctaagaaacaaacctccgttgccctatccaccgctgaggccgagtacgttgccgcaggacagtgttgcgcgcaactactttggatgaggcaaaccctccaggactttggctacaatctgagcaaagtcccactcctatgtgataatgagagtgctatccgcatggcggagaatcctgttgagcacagccgcacaaagcacatagacatccggcatcactttttgagagaccaccagcaaaagggagatatcgaagtgtttcattctcggaggaggattgaaagggaaaaggtggacttggaccatgaacgacttccactgcactccgatgagagggctgcctcggccgaagaggccgctctcgggaatttgctgacggcgtacggctaa

SEQ ID NO: 9862 - DNA, 1428 bp, Zea mays
  Peptide Sequence Number=SeqID_51641
atggcaataaatttgatattgcttgatgagataataacttcagcacaaaaggagaaagttgataagatgatgagagaattgcaagattacagaatgaaaccagaagaagacatcattcaacaccttattaccgtaaatcaaaagatgcagaaattaccaagagaatttctaaatttaatacccgttataaagattgaagaggaagaagatcctgaggaatttccaaattggattgtagaagatgaatttgaagagaattcagaatttaatatagagaatttcccagagaaagatacaggatcggagatggaagaaaacgaaaggattggcacaaaaattgttagacgttgtgggagaaagatctcaaaacttttctacaagtttccagtttcgacagatcccatcaaattcactgaaatggaacttgtagacgatgaagacgtggagacaatgatggctctttattgtgggaatcggagtgaccaaaatgtaccgattcagttatttgctaagttagctagtgtggagccaattgaagatctaactgcattaggtgaagaacatggaactcaagaattgtgtttggtggcttcaaaatcgtacgttgatagtcagtcaactatacacaggatcaatatcgatcttaatgttgcacccgatattgatgtggttggtgataatggatacgatagtagtgatccttgtgatcacaaggtcgatagtgatagtgatcccgatgtggacgaggtccccgatgagattgacgacgaagatgtgaatgacgacggaaacattaacgcgtcttcagtcaggaaccaaattcgatgtattatgatacacaataatcttgggacacacatgtcactcataaaccccgacgcagtgcatgtagccgagttcccggagtaccctaaaatactacctgctcaccagttggctgtagatttcgatcgtgaggagttgttcgtaggccaaatattcaaaaataaagaagagtgcatattttctattcagcgatataacatgaatatatcagtggactacaaagtcggagcgtctaaattgacattatatattgagtgttggaagccaacagaaggctacaattggccgttatggagaccatcgatcatcaaccccatatcacctaggtcttatggagttgatctccgaaacagacgatgtgattgcaggaggttccaaacacttcattatccacatgcgcatgtcgtggcagcgtgtgctatagtcttactcaatgttgaacaatttatcgatgatgtgtacaccctccagtgcacattacgtgtctgggagaatgagttccccgtcctgcctaacctgtctacgagggaggtgcctccaacgactttcaaacttatcccagacaaagggttacgtaggaatctgaaaggtcatccgcaataa

SEQ ID NO: 9863 - DNA, 375 bp, Zea mays
  Peptide Sequence Number=SeqID_51642
atgaccgtaatagcatccgttatgtccgcaaccgcgataagcgcaatgcgaccgaaaatgcggccgcgaccgcaatttaaatccctgcccatagccgctgctcgtgcttacgacaccgccgtcttctacttgcgtggaccttccgctaggctcaacttccctgaccttatattacaagaggacgatgaacttaaagacatctcacctgcttccatacgcaagaaggccaccgaggtcggtgctaaagtcgacgctctacacaccacctcccttcatcatcatcatgcttctaattcatcggaatcatcaaaccctcctcaagttttctccaaacccgatttgaacaagtaccctgaaacttttgatgaagattga

SEQ ID NO: 9864 - DNA, 159 bp, Zea mays
  Peptide Sequence Number=SeqID_51643
atggagtctatggactccaactcagtatgggaacttatgccctcatgcaaaattgctaagctgtccaaacctaaattgttatcaaacattctgaacatggtggcacaaatgaggaaaatacttcaagaaaaatctgaggcgttacctccaagggaatag

SEQ ID NO: 9865 - DNA, 378 bp, Zea mays
  Peptide Sequence Number=SeqID_51644
atggagagtgatggatggaaatggcttcagcagtggcttatggatatcaaaccatggtaccctgaattcaaggttgaggaaagagtgcaatggtcaagagtatttgaagggcataaacaagtggttgtggttgaaagggagagatggattccaggtcttgagatgatggatgattgtgttaatggaagtatgaagaacgtgttggaaaaagagtttcaacacgacgcgcctcatagcattaatggggacgataaagctgtcgactggggtaataactcagatggaataatggagggaggattaaagaataggcagacggtagatttggttagtgaaggagcagatgaaatgggcttaattgagaaaatgagcccataa

SEQ ID NO: 9866 - DNA, 144 bp, Zea mays
  Peptide Sequence Number=SeqID_51645
atggcactgaggaaaccacgtgggaacctaaggactcgatgcatcagtagtatactcatctgttcggaccaggcacctgaacctcttctggggtttataaaaaattatgccttgggtatcttcatgagtagccacctcctttag

SEQ ID NO: 9867 - DNA, 396 bp, Zea mays
  Peptide Sequence Number=SeqID_51646
atggagaaaaccaactacgagctggagctgaagctgaagaacgagcgaaggcgtgtttgcagtctcttatacaagattgattgtagaaagcaacagtggttcgaaatggaacgtaaatataacaagacgactgcgactcttcaaggactcgttgatggcctcatagtgaaaattaactccaaggacagttgtttgtgggattgggagcttcgatataacgaaaccgtgagacagttgaagggcgagaacgcggcgttgcgccgtgtgtttgccgaaggtggtacaatgaaagacatcttgtcttttgatgttacacgatttgcatctagagctttgattgatcttagggtcgttctttcgaaaatcgaaaggaaaaggctgaaaactttaagctga

SEQ ID NO: 9868 - DNA, 315 bp, Zea mays
  Peptide Sequence Number=SeqID_51647
atggagaggtctttggaatatattcgagtatcacggcatggttatggaggccttcataaaaaggagaaagatttggttttggcgacgcttcgtctgaacggttccatttatttggacatagaatatgggtcaactttgcacgcttcaaaggctctggaggtatcaaaggattctctagatacgagcggaaccctcggaggtgaaaaagctataaacaagaattgtttcatggaggaggtggctagctacagagatttatgtactcttgagaaccttgctatgcggttagaagagggtggcctccaaagttgctaa

SEQ ID NO: 9869 - DNA, 3522 bp, Zea mays
  Peptide Sequence Number=SeqID_51648
atggtctcgttgaggacttgttatcatgataagcgctttgatatccatgatgttgtttgggatgctgctatatctattgcattgaagaactaccgtatgcttgttttgagagatcatgctccaaaggagtggtctgataaggagaaaatgaagacgtggagtgtgatcagcttacgttgtcctcagatcatagctaaccttcctaaggagatggagtgttcaggactttcctttttccatatggcccatgatggcgcggttaaaattcctctcaatttcttcaaacaaaccgaaggcctcaaagccttagatttggtcggaatgcagtttccatccctccctgaatcaattattcaccttgcagaccttcgcatgttgtgtctaaaaagatgtgcagttgataacataactatccttggagagctcaagaatttagaaatccttgaccttgctgcgtcaggtatcaaagaactacctaaggagatggcacaattgactcaattaaggttgttagatttgagttggtgtagagaactcaaaatcatcccaccgaatgtcttatcaggtggtcttccaaacctcatcttcttcaactcaggaaaccacaatattgagttcccattgttgaaagtgctaaagattcagcgttgccccaagttaatagaattcattaatcagaatagtaatcagtccggcatgcacgctctcttcagcgagaaggttgcagttcctagcttggaagacatgaatatctctaacttgagtaatgtgaagatgatattttataatgacctagcaccaggttcctttaaaaatctacgaaaaataagtattggggaatgtgggagtttgaaaaatgtatttccagtatcaatagccaaagatcttccacaacttgaaaatttaatcatcattaattgtggagttgaggagattgtatcgaaaggggatggagtggaggagcagcctgtgaggtttgagtttccgcaagtgtcttaccttgaggtttcattggtagaaaagctcaaatgtttctatgaagggcaacatacaatagtctggccgatgttaaaaattttgagaacagatggtcctgctgtgcaaaagatagtggcatcggaacatcttagattaatccaaggaaatgagcggccagttttgttgggtgaagagagcctcacaagcttttgtccatggtattacaacttcgagtttccttgtttggaagaattagttgtggaagattgtcctaggttaaagatcttttctgagggagttttaagcaccccacaattacagagaataaaacagtcgagttaccgtgagaaatggagttggacaagtgaccttaataccaccatacaacagctgtacacagaaaaggatggactctatgatttcaacatctctgacacatttccggagtcgatagaaatatggactagaaaccctcaagaaatttttggcttcaaaaaccttagcagcctgcagttttataaatgtagcagcttgaagtacatatttactccgtctatgcttttgagcctcaatcgactccgaaggatagaagtggaagattgcagttcaatggaacaagtagttagggaggaggaggaagcaatgacacataaatttacatttctttcgctagagttcgtaacaattgagtcgtgttccaacttgacaaatttccattggggaagtcaagctcttgaatttccagagctgagtaagatcaggatagctgagtgtccaaaaatgactgcattttcttcctcagtttcaagagagagtggtgatgcaagtgaaaacgtggttggcaaagggggcatctatgataacactgcaacttttttcagcaataaggttgtcattcctagattgaagagtctggatttgtcctccatcaacattcataagatatggcaccactcatcctccccatatatcggatacctaaatttcttgcgggtgaagaggtgtcacaatttgaaatacctgttcccgtctttcttagcaaaagatcttgtgcaactccaactccttcgaatttcggactgtaatatgatggaacaagcaatattcacggatggattggttgaggaacatcaagggaggaatcagatgtttttctctaacctacattcgctctggctaaaagaccttcccaaactcacaagtttgtgctttgaaaattactttgaatatcactgtttggcagatttagcactaagaaattgtccattgctaaaaacattcatctctaaatgtgtacccggagatgaacctcaaattggccaacatgtacaggcaagtaacttggaggttcataactcatctctcctcaatgaaaaggttgttttccctagtttgaagaagctgcagattcaaaattgtgattcgttagaagaaattattgagctgcaaggactcattcctgatgagtcacagtcaacaacagctgctcaatctattgtggctgaaacagtgacgaccaagtttgtatttcccaagctaatataccttagattgtgtaaggtgccaagattgaaaagtttctactctaggatgcataccacccagtggccttcattgaaacaaatggacattattgaatgccccaaagtacagatatttactcgacaatgtcctgtgagtcaggttggaatctcaaaccaacaacccttgttttgcgtcaatgaggacactttccctgtattggaagaactaacactgaagacgaatgatttcgtaaaggggatatgtgatgaacaactctcattgcagtgtttccaaaaccttaaacttcttaaccttcattgctttcttaagaggtcaactacacttccatattgcttcattcggtcgctaccaacgcttcagaagcttattataaagaatgcttccatttctgaaatagtccggtctgaaggacttagtgacgaggaaaggcatacatcagcattctatcagctaaaggaattaagtttgactcaacttccagagttaacgttaaagactttcaaaccatcgttgctgtctttcaaaaatctaacaacactggaagtttcaagatgccatgggttcatcactttaatcgcatgctcaacagctaagtgcctgacgctactggaaagattgagcatagatgattgtgagatgatagaggaaatcatagcttgtgaggctgaagaaatacaaggtggcattgtatttcccaaactgaagtatttgcaactaagttgtctgccatgtctagcaaccttttccttggcccatcactcgttggaattcccagtcttgctaatggtgacggtgacaaagtgcccccaaatgaggaatttctgccaaggagatttaagcacaccaaggctggaacaaatgcgcttaacaagagatgaggaaggtgaactgcagtgggaaggcgaccttaacactaccataaaacatatgttcgatgaaatgaatgtgcaaaattctgaggtgacggaggttactgatcagttgcccaagctggaataa

SEQ ID NO: 9870 - DNA, 405 bp, Zea mays
  Peptide Sequence Number=SeqID_51649
gttgttttccctagtttggagaagttgcgaattcagaattgtgattcgttagaacaaattattgagctgcaaggagtcattgctgatgagtcacagtcaacatcagctgctcaatctattatggctgaaacagagacgaccaagtttgtatttcccaaactagtaaacctcggattggataaggtgccgagattgaaaagtttctactctaggatgcatgccacccggtggccttcattgaaacgaatggccattattgaatgccccaaagtacagatatttactccacaatgtcctgagtgtcaggttggaatctcaagccaacaacccttgttttccgtcaatgagaatgtgcaaaattctgaggtgacggaggttaccgatcggtcgcccaagctggaataa

SEQ ID NO: 9871 - DNA, 1152 bp, Zea mays
  Peptide Sequence Number=SeqID_51650
atggatattgttattgccaccgttggctctattgtctctaaagctgtagagtatacgatctctcctatcaaaaaccatgtcaaatacctttccaatcatcagcaatatgttgagaccctcaaggaccgagctgagaggctgaaacatgcaagggacagagtgcagcattctgttgatgcggctaaacgaaacggtgaagagatcgaaggtgatgttggcaaatggctgtctgcagtcgataaaaagatccctgaacaagtagagaaagtgatgcaagatgaagaaaaagcaaagaaaaagtgtttcattggtttgtgtcctaatttcaggactcgttacaagcttagcctgaaagctgaagaggaggcaaaggctgttgccgagctacttgaacatgacaagtttgaaagggtttcctatcgtgcagctccgcaaggtatcatggttgcaccagttaaaggttatgaggaattcgagtcaagaacgtcgattttgaacggaataatggaggcactaaaagatgatagcgtcagcgttgttggggtgcatggtataggtgggattggaaaaacaacactggtcaaagaaattgctagaaaggtcaaggacaagttgtttgattcggttgtcatagcaaccgtaactcaagccattgatattgagaagattcagaaccaaattgcagacttcttgggcttgaaatttgaggaacagagtatggttggaaaggcatttcgactaagagaaagattgaagaaagaggagaggattctggttgtcctggatgacatttgggaaaaggttgatattgaggaagtagggattcctttgggagatgaacacaagggctgcaaattactattaacttctagagagctcaatgttttatcaaatgagatggatgctcagaaaaattttcccattgggtttttaaatgaaaaggaagcctgggacctgttcaagaagatggctggcaactgtgatgaaagttgcgatttgaagcctatagctatggaggtagccaaaaaatgtgcaggactgccgatagccattgcgacagttgcaagggctttgagaaacaaaaaattgtttgaatggaagatgcttcacgagaactggagatgccttcgtcaagcaacttcacggggataa

SEQ ID NO: 9872 - DNA, 1788 bp, Zea mays
  Peptide Sequence Number=SeqID_51651
atggagaacaccaattacgacgaggagctgaagaatgattgcaggcttgtttgcagtctcatatacgatattaattgcagaaaagaacggttgtcccaaatggaacgtgaatataacgagatgaccgcaactcttcgaggactcatcaatggcctcatagcaaaaattaactccaaggacagtaatctgtggggttgggagcttcaatataatgtaaccgtgagacagttgaagggcaagaatgctgcgttgcgcctttcgtttgctgaagtttacagcaagaagaagaagaaaaagaagacaaacggcaacgttaagccattttcatcccagccgaaagagaatgtgccttgtcgagatcttgttgaactcgagaaaactacgagcgatcagattgctgctctaaaggaacaattggaggaaacatcagaggcgttgaaagatatggaaagccgatacagttgtcttacggtgcaagaaatacctcttcggaatcagggtctaaatgatgtattgacaagccgaacaactcttgtagtaaaaagaatgggagagatcgatcaaaaagcttttgaagttgctagctctgggaagttcccgaacaaagattggcaagaaacatgtgctaaattatgttcattatggcaacaaaacgaaatagtagaccaagacgatgagaagctgaaggagttgagaaatgaatacggtgatgtcgtgtacgaggctgttagcaccgcattgatggaaatgaacgaatataatgcgagcggaagtcggttaagcctcacaatccaacgtaactgtaaatctttcttggcagccatgaaatcagttctaaaatcccttgcaaactcaatcttccttgttcttttcatcatcttttcatcttctattccacttgtattggctcaatgtgaagcagagaccaagactaatggatgccataactacagagaatccatgaagctaaaaatcatcgccattgtcgcaattttactatccagcatgattggcgtgtgtctaccattgttttctggtcaggttccgttacttaaacccgacagggacttgttcaccattgtcaaggcattttcctccggtgttattctagcgactgggtacatgcacgttctaccggattctttcaacgaccttatgtccgggtgtttgcctgaaaacccatggaggaagttccctttcacaaccttcgtcgcaatgctgtcggctgtgttgacccttatggtggattcatttgcaatgagtgtatacaagaaacgttgcggtaaagctttaatggcggatgctaacaatggtggtggattggaaaatacgaacattgtaccgatcgataattttgaacacggccatagccattcacttgagatgaatgacgacgtatcatcacaattgttaaggcatcgagttattgctcaggtattagagttgggaattgtagttcattcagtggtgattggtcttgcaatgggagcctctggcaatcaatgcaccattcgatcactcattgctgccctttgcttccatcaaatgtttgaggggatgggacttggtggatgcatactgcaggctgaatatgagataaaaatgaaagcaatcatggtattcttcttttcagccacaacgccacttggaatagttctgggaattggtttgtccaatgctgattttctgggccctaagcttcaaacaaatatgaagctccaggcttggtcatatgttgcagttttacttggtgctggatttatgtctttgatggcaaaatggccttag

SEQ ID NO: 9873 - DNA, 201 bp, Zea mays
  Peptide Sequence Number=SeqID_51652
atgtctagcaagcttttccttggcccatcactcgttggaattccaagtcttgctaatggtgatggtgacgaagtgcccccaaatgaggaatttctgccaaggagatttaagcacaccaaggctggaacaaatgcacttaacaagagatggggaaggctggcatggtcaggacgtggtagcatacttcagggccctggttag

SEQ ID NO: 9874 - DNA, 2871 bp, Zea mays
  Peptide Sequence Number=SeqID_51653
atgtcattgggttacgaatttgaggagcttgatcatcaaaggatgcgaagtctggtgcagctccaatgctttgtgatagaggattgcaagtgcttaagggacataatacttacagaggaaattgaagatgaaaggaaagatgtgatttgtttccctcgattaaactccctgcatatagatggtcttccaaacctcatcttcttcaactcaggaaaccacaatattgagttcccattgttgaaagtgctaaagattgagcgttgccccaagttaatagaattcattagtcagaatagtaatcagtccggcatgcacgctctcttcagtgagaaggttgtagttcctagcttggaagacatgactatctcgaacttgagtaatgtgaatatgatattttataatgacctagcaccaggttcctttaaaaatctacgaacaataagtgttcggggatgtgggagtttgaaaattttatttccagtatcaatagccaaagatcttccacaacttgaacatttaagcatcactgattgtggagttgaggagattgtatggaaaggggatggagtggaggagcagcctgtgaggtttgagtttccacaagtatcttatcttgaggttagatgggtagaaaagctcaaatgtttctatgaagggcaacatacaatagtctggccgatgttgaaaaaattggaaacagatagttctgctttgctaaagatagtggcatgggaacatcttagattaatccaaggaaatgaggagccagttttgttgggtgaagagagcctcacaagcttttgtccacgtaattacagcttcgagtttccttgtttggaagaattagttgtggaaggttgtccttggttaaagatcttttctgtgggagttttaagcaccccacaattacagagaataaaacagtcgcgttacggtgagaaatggagttggacaagtgaccttaataccaccatacaacagctgtacacagaaaaggatgaagatttcaacatctctgacacatttccggagtcgatagaaatatggactagaaaccctcaagaaattttgggcatcaaaaaccttagcagcctgcagttttataaatgtagcaacttgaagtacatatttactccgtctatgcttttgggcctcaatctacttcgaaggataaaagtgagagaatgcagttcaatggaacaagtagttagggaggaggaggaagcagtgacacataaatttacatttctttcgctactctccgtaacaatcgagtcgtgttccagcttgacaaatttccatttgggaagtcaagctcttgaatttccacagctgaggaatatcaggatagctgagtgtccaaaaatgactgcattttcttcctcagtttcaagagagagtgctgatgcaagtgaaaacgtggttggcaaagggggcatctatgataacactgcaacttttttcagcaacaagtctggtgtcgtcaatttattaggcaaaaccactacaatcttttttaaaaagcaatcattggctgatgatgaggccaatgcagtgaagaggtgtcacaatttgaaatacctgttcccgtctttcttagcaaaagatcttgtgcaactccgataccttcgaattttggactgtaatatgatggaacaagcaagtaacttggaggttcataactcatctctcctcaatgaaaaggttgttttccctagtttggcgaagctgcagattcaaaattgtgattcgttagaagaaattattgagctgcaaggactcattgctgatgagtcacagtcaacatcagctgctcaatctattgtggctgaaacagtgacgaccaagtttgtatttcccaaactagaaaaccttggattggataaggtgccaagattgaaaagtttctactctaggatgcataccaccctgtggccttcattgaaacaaatgagcattattgaatgccccaaagtacagatatttactcgacaatgtcctgtgagtcaggttggaatctcaaaccaacaacccttgttttgcgtcaacgaggacactttccctgtattagaagaactaacactgaagacgaatgatatggtgaaggggatatgtgatggacagctctcattgcagtgtttccaaaaccttaagcatcttaacctccgattctttcctgagacatccactactcttccatattccttcattcggtcgctaccaaagcttcagaagcttgttataaacaatgcttccatttctgaaatagtccggtctgaaggacttagcgaagaggaaaggcacacattggtattctatcagttaaaggacttaaggttgtctcaacttccacagttgacgttgaagacttttgaaccatctttgctgtctttcaaaaatctaacaacactgaaagtttcaagatgccatggattcatcaatttaatcgcatgctcaacagctaagtgcctgaggctactggaaagattgagcatagatgattgtgagatgatagaggaaatcatagcgtgtaaggctgaagaaatacaaggcggtattgtgtttcccaaactgaagtatttgcaactaagctgtctgccacgtctagcaagcttttccttggccgatcactcgttggaattcccagtcttgctaatggtgaaggtgacaaagtgtcccaaaatgaggaatttctgccaaggagatttaagcacaccaaggctggaacaaatgcacttaacaagagatgaggaaggtgaactgcagtgggaaggcgaccttaacactaccataaaacatatgttcgatgaaatgaatgtgcaaaattctgaggtgacggaggttactgatcagttgcccaagctggaataa

SEQ ID NO: 9875 - DNA, 507 bp, Zea mays
  Peptide Sequence Number=SeqID_51654
atgccgcagagctttcagttctttgcttcttgttgctctgctctgctctgctttgaggggctcgcggtcgcggctgggaacagccggacaggagcggggcggcgccggagaaagatgggcgatgccacgacggagctggtggaggcattcttgcgagcagagtcttggcggttcggcggaggcgtttcgcttgtggctggagcaggaagaggcctgcgagcaggaagcgttagggacttgatcgctatcaaggatgtcaaagggaaccctatggactttttcaggcgtgttggtcatggatcttcatatggtgttggtatcaagcttgggttggtaaggggagagtacattgttgaccacaatgctggtactggaactattttcttcagatttggtgagattttgagtatgcaacatttcgccattgtggaaggcacttttgaggcactctgtttagcgatgcttgtggagtgtcataggactcaatcggcaatggagctccgctga

SEQ ID NO: 9876 - DNA, 258 bp, Zea mays
  Peptide Sequence Number=SeqID_51655
atggtgatgctgcccatgccgagtgtgtggctcctcggcgcacaagcagctccgggtggctccatggaacgagaggggggcgtctgggctatatactccgagctgtgcgcccccgtcctcaaccgaattctgttggcgagcggggccgacggttacgagggctcgcgtgagctaatctctgagaagaactcgacgaggaagaagctgacaagtgggacccacccgtcggtcatacagtgggtgaacggcagcgcatga

SEQ ID NO: 9877 - DNA, 342 bp, Zea mays
  Peptide Sequence Number=SeqID_51656
atgacacagattatcatgggccgatcggtctttgcatctttaagtcgatacaacccttcgtctcagggcgtgttactatgccgaagctctctggatggaccttcggcgacaaagcagacccccaacaagcgacttctcggtcttgtcgctcacctcattcagctcgcggcaaagttcctaaagatcgacaacctcagcgagagcgtccaaaatgaatcgggcgccccatctactattaaggcgcagcgactctcctcggggcccccactacaggggatggaggctggttcccctagaatgatgattgtcgcaaaagcgggacccccactccctttggtgtaa

SEQ ID NO: 9878 - DNA, 706 bp, Zea mays
  Peptide Sequence Number=SeqID_51657
atggacttcttcgtgcaggcttccttggtgtcggccgaccccaatccgacgacagcaaggccacatggcgaagtatgcaacggcggtgacgatcgcagacaacaagcccacgcgcagctgctagacgtggacgagagctggcgcatcgaggcggtgccgacgcggtggggaaggtgcttggcgtggggcttcgtcgtgcaggggtcgtggctggggagcccagccgtcatggtcgctcggtcagcgctttgcgcatccgcggggcggtttcggctctgggcgccaagggcacacacgtcgcaggggaggaagttttggaaggtgcacaggaacgcctcgaagcggcctcgcgatggcctagcgcctgggcctgctggccagtgggcgacgcgcgacctggcgtcccaaccacgctcgcatgcgcgcggcggcggcaggagcagggcgagcgatcggctgggccgcgtaaggaaggagtgggcggagcactgctccgggatgggccaggggacgcagggaactggagctaggccacaagggtgttataggagaggagagggaggttgcgacaggatctcttatgagcgcgcggggacggtcttgagttcaacgccaccagtcgccaagaccgcaacggcacccgtggagtacgacgaggttgttgatgaacgccctgatgcactggcccactccacaacggcaaagg

SEQ ID NO: 9879 - DNA, 693 bp, Zea mays
  Peptide Sequence Number=SeqID_51658
atggcgcaggagctcaagaacctgcggccgcagctctacaccgcctccgagtactgcgagaagtcctacctccacagcgagcagaagcagaaggtgctggacaacctgaaagactatgccttacgagccgtcgtcaacgcggttgatcatctgggtactgttgcgtacaaactgaccgatcttttcgagcagcaagcttccgaggtgtcgacatatgaactgaaagtcgcacgcctgaaccagcaaatcttcacatgccaagtctacacagacaaagaaggcctcaggcagcagcagatgatgggagcaaacatcaagcaccacaagcactacatcttacccccaaaaaccctttcctggcatctgtcttcggagaacagcaccaaagcaaacgcacataagcctacatttgccctagtggacacggcaccatcaaaaccttcatcaggtaaggagcggtctgcttctcctatgcgcaggccgctgcagttcaacaggagcaccagttctgatactacgcagaaggttggcgctaagaacatatctggtgtaaaggaactttcaacattccattccttcgacaaccccaaaggtcgtgcgatccaaaaggcccctgttggcactaaaagcatgctggcggctctcttcatcagacacaaatcgtccaaggcgaaaaggatcgcagttcgctga

SEQ ID NO: 9880 - DNA, 315 bp, Zea mays
  Peptide Sequence Number=SeqID_51659
atggctgaaaggtaccaactcccacggagttgcgttcctccaacgatgaggcaaaaagacggcgggtatcccccatccggggcttggaagggaccgggaaagggggataccccgaaaaggatccttccccgtgaaggaaccgggctccgagcccccctattgatcagaggttcgaaggctggccccccgaggggttcaacagccgcctcagatcgcgtgggccctacacccactactggtcagaggttcgaaggccggccccccgaagggttccacggccgcctcaggctactcgggctccgcgcccattactga

SEQ ID NO: 9881 - DNA, 1560 bp, Zea mays
  Peptide Sequence Number=SeqID_51660
atggcagcacctgacggcgatcgccttcgctcgacggtggcggagccgccgtactccatttcgatcaggagcgaggagccgccgcggcagcagcagcagggcacgctggcgcgcagcgacagcggcagcacgggggagcgggaccggcggttcgaccagttcaaaaccttcggcgggcgcctggagcggcagctgtccagcatccgcgggggcgcgcagacgcacccgcaccctgcagccgccgacgtcggcggcggcgaggctagggactccgaggcagacaccgacgacgacggcgagctccccacggccgaccggtacttcgcggccctggaaggccccgagcttgagacgctccggccgacggaggtgcccgtgctccccgaggacgaggcgtggccgttcctgctgcggttcccgatcagcgcgttcgggatgtgcatgggcgtgagcagccaggcgatgatgtggaagacgctggagcaggagccgtccacggcgttcctccgagtgagccccggcgtgaacgacgcgctctggtggctctccgtcgcgctcatggtggtcgtctccgccacctacgtcctcaaggccgtcttctacctggaggcggtgcggcgcgagttccaccacccgatccgcgtcaacttcttcttcgcgccgtggatcgcctgcctctttctcgccaagggcctgccggagccggtcacggcggtccaccacgttgtgtggtacgccctcatggcgcccatcctgttcctggacatcaagatatacggccagtggatgtccggcggcgagtggcggctgtcccgcgtggccagccccacgagccacctggccgtggtgggcaacttcgtcggcgcgctgctcggcgcacggatgggcctccgcgagccggctctgttcttcttcgccgtcggggcggtgcactacgtggtgctgttcgtgacgctgtaccagcggctccccaccaacgtgccgctgcctcgggagctccacccggtgttcttccttttcgtggcgacgccgagcgtggcctccgtggcgtgggccaggatcagcggcgagttcggcctcggcgccagggtcgcctactacgtctcgctcttcctctacgcgtcgctggtggcgcgcgtcagcttcttcttccggggcgtccgcttctcgctcgcgtggtgggcgtacactttccctgtgacgagcgcggccatcgccaccacggtgtacgcgtcggcggtcaccaacgcgctcacccaggctctggcagtcgggctgtcggcggtcgcgtccgtcaccgtcgcaggcgtgctggccaccaccgtgtaccacgcgttcgtgcgctgggacctgttcccgaacgacgtgtccatcgccatccgccggcggcccagggccaagttcggaaagatactcgcgcgcctccgcacctccagcgccgacctcaaggagctcgtcatctccaggcacggcggctcggcgtcggagaccagcagcgtcgtcagcgagccgcccaccccgatggtggacggccgcggccgcagcagagcagagccgtag

SEQ ID NO: 9882 - DNA, 309 bp, Zea mays
  Peptide Sequence Number=SeqID_51661
atgaccctgaatccttgcactgtccaaaatctgctctacgatgtgagtacggagggaggaaagagatgggacgcattggaagcgacagacaacgaggccagggagacagggacaaagtcctccagcagtttgcatggagacacaccaacagcggagggcacagggtttcaaccgacgctggcggctacgaaacggcaaggggaacgaaggaaggcagggacagggagtcgccggtggataccccggtccgcgaccatcccgaaagccaaggcccctcacccgtttccatggctccagcaacagatttaa

SEQ ID NO: 9883 - DNA, 468 bp, Zea mays
  Peptide Sequence Number=SeqID_51662
atggcccttggtgatgatgcggtgggcgacgatgtcaaggatctcggtaataactccacttctaaggtatcacattccaccgatgatctcactgttgcggtagaggagctaaaggctactttagatagtcaagataagttgcttaggcttgcttctcatgagaggaaagatttcaagaacaagtacgagagcacgcttagggagcttgagtctactaaagcttctatcgtggtgtccgatgagactaaatgtgatggatgcgccctatacatgtcgaacatcaccacattgcagaccaagtatgccaccatgctagatgagcacgacgagttgaggtctatgtctagcttgttcggtgatggagacctggagaacacgtggctcatggattctagttgttcgtgccacatggttggaagcctcaattgcttctccagcctcaagcccatgattggtaaggagtactga

SEQ ID NO: 9884 - DNA, 2781 bp, Zea mays
  Peptide Sequence Number=SeqID_51663
atgtccggcataccgagggatgtcgccgagcactcgctggatattcgggccggagcccgacccgtcaggcagcctctgcgccgattcgacgaggagaagcgcagagtgataggcgaggagatccacaagctaatggcagcagggttcatcaaagaggtattccatcccgaatggcttgccaaccctgtgcttgtgaggaagaaaggggggaaatggcggatgtgtgtggactacactggcctcaacaaagcatgtccaaaggttccctaccctctgcctcacatcgatcaaatcgtggattccactgctgggtgcgaaaccctatccttcctcgatgcctactcagggtatcaccaaatccggatgaaagagtctgaccagctcgcgacttctttcatcacgcccttcggcatgtactgctatgtcaccatgccgttcggtttgaggaatgcgggcgcgacgtaccagcggtgcatgaatcatgtgttcggcgaacacatcggtcgcacagtcgaggcctacgtcgacgacatcgtagtcaagataaggaaggcttccgacctcctctccaaccttgaagtgacattccgatgtctcaaggtgaaaggagtcaagctcaatcctgagaagtgtgtattcggggtgccccggggcatgctcctggggttcatcgtctccgagcgaggcatcgatgccaacccggagaagatcgcagctatcaccagcatgggacccatcaaggacttaaaaggcgtacagagggtcatgggatgtcttgcggccctgagccgcttcatttcacgcctcggcgaaagaggtctgcctctgtaccgcctcttaaggaagaccgagtgtttcgcttggacccctaaggccgaggaagccctcgggaacctgaaggcgctccttacaaaggcacctatcttggtgcccctagctgatggaaaagccctcttggtctacgtcgccgcgaccactcaggtggttagcgccgcgattgtggtcgagaggcaagaggaagggcatgcatttcccgttcagaggccagtctacttcgtcagcgaggtattgtccgagaccaagattcgctacccacaggttcagaagctgctgtacgcagtgatcctgacgaggcgaaagttacgacattacttcgagtctcatccggtaactgtggtgtcatccttccccctgggggagatcatccagtgccgagaggcctcgggcaggatcgcaaagtgggcggtggaaatcatgggcgaaacaatctcgttcgcccctcggaaggccatcaagtcccaggtgttggcggacttcgtagccgaatgggtcgacacccagctgccgacggctccgatccaaccggagctctggaccatgtttttcgacgggtcgctgatgaaggcgggagccggcgcgggcctgctcttcatctcgcccctcgggaagcacctacgctacgtgctacgcctccatttcccggcgtccaacaatgtggctgagtacgaggctctggtcaacgggttgcggatcgccatcgagctaggggtcagacgcctcgacgcccgcggtgactcacagctcgtcatcgaccaagtcatgaagaactcccactgccgcgacccgaagatggaggcctactgcgatgaggttcggcgcctggaagacaagttctacgggctcgagctcaaccacatcgctcggcgctacaacgagactgcggacgagctggctaaaatagcctcggggcgaacaacagttcccccggacgtcttctcccgggatctgcatcaaccctccgtcaagatcgacgacacgcccgagcccgaggcaccctcggcacagcccgaggcaccctcggcccagcccgaggcaccctcggcccggcccgaggcgccctcggttcggcccgaggtaccctcagcccccgagggcgaggcactgcacgtcgaggaggagcagagcgggtccacgcctgatcgaaattggcagaccctgtacctgcaatatctccgccgaggagagctacccctcgaccaggccgaggctcggcgggtagcgcgacgcgccaagtcattcgtcttgctgggcgatgaggaggagctctaccaccgcagcccctcgggcatcctccagcgatgcatctccatcgccgaaggacaggaactcctgcaagaaatacactcgggggcttgcggccatcatgcagcgcctcgagcccttgtcgggaatgctttccggcaaggcttctactggccaacggcggtggctgacgccactagaattgtccgcacctgtgaagggtgccaattctatgcgaagcagacccacttgcccgctcaggctctgcagacgatacccatcacctggcccttcgctgtatggggtctggacctcgtcggtcccttgcagaaggcgcccgggggctacacgcacctgctggtcgccatcgacaaattctccaagtggatcgaggtccgacccctgaacagcatcgggtccgagcaggcggtggcgttcttcaccaacatcatccatcgcttcggggtcccaaactccatcatcaccgacaacggtacccagttcaccggcagaaaattcttggatttttgcgaggatcaccacatccgggtggactgggccgccgtggctcatcccatgtcgaatgggcaagtagagcgtgccaacggcatgattctacaagggctcaagccccggatttacaacgacctcaacaagttcggcaagcgatggatgaaggaactcccctcggtggtctag

SEQ ID NO: 9885 - DNA, 1974 bp, Zea mays
  Peptide Sequence Number=SeqID_51664
atgaagtcgtcgctgcggaagctgcggggcttcgcgctgcagcgccaggagcagcgggtggaccgggaccgcggccggggccacgccaccgccgccgccaccgcggcggacgagctcctcgcggctgcccaggatatggcagatatgagaagctgttacgataacttgctttctgttgctgcagcaattgcaaatagtgcatatgagttctctgaagcacttcaagaaatgggaacttgtttgcttaaaagagttacgccaaataaggatggaataaatgctaggctattcaatgaggatgaaaataaagttttgctgttgcttgggaaatcacaatttgaacttcggaaacttttagatagttatcgtgtgcatgttcttaacaccatcaccactccatcgctgtcgcttcttaatgaacttcaaactgtggaggaaatgaagcaccaatgcgatgaaaaaaaagaattgtatgaattcatggtaaacacgcagaaagaaaagggaaggtctaagaatgctaaaggtgataatggagcatcagagcaattgaaacaagctcaggaagattatcaagaggaagcaactctttttctattccggttgaagtcattgaagcaaggacagttccgaagtctttttacacaagctgctcggcatcatgctgcacaggtgcacatctggtcacttagaaattatctcctttcttttatggcaacctatctggaaactaatttggtaaaacataattatcatgtgaaccagctaaatttgttccgaaagggagtcaagtcccttgaggctgtagagccacatgttaggctcgctgctgagcagcaacacattgatcatcagttcagcgcacttgaggaagaggattaccttgttgaggatgaaaatgatgacgattacaatggcagtcatgatggagagttatcttttgattatggagaaaataaggaagttgaggaatctggtaatgcttctaggaatcatacagagggtttttttaacagaagcaaagaagagtattcttctgttccacatgaaagacaaagaatcgtaagtcagtcagcaccactttttcctgagaaaaagctcaatacagaagagagaataaaagatttgcggcgttctgcaacaaggaagttgaatacttatgttttgcctactccaaatgacgttggagctacttctcagagagcatcaggaaatcctacttctgaacctctcgagagtaaaggtgccttccattcatctccactccactcatctgcagacataagagatttgggagacagtaatctacctagtcctacaagattgtctaacgtacagtctgtgctgaaagatagcaataccaataaaacagaaacaaggaaagtactcccagtgggtgatctggctttacctagctatcatgacctgaagacttctgataacaaaaaagtgaaaagagggtcattttctggcccaatagcttccagaccacggtcaacagagaacattgatgttatttctgcagcgcctaggcatagctcagcacatcagccagtgcacatgagagtatcccccggcaactcgccgccacccatttcctcaccgaagatcaaggaacttcatgagcttcctcgaccacctgttaatacatcaaaaaatatagcattccccagtttagttgcccactccgccccattggcaccaaatcctgcatctttgactcccaaagttcaagatcattttaggacaaaacaaacgctccaaagaactgcttcacctttaccaactccaccacctggatctatagcccgcagtttttctataccttctaggggtatttcagacagtaaagagacagaagatcaacacaagggagctgccagaatgagtctttcttctcttccttcagcacaaacattcttggaagatcgtcagccattgtcatcagctgctggatcggtcagcaaaacatag

SEQ ID NO: 9886 - DNA, 657 bp, Zea mays
  Peptide Sequence Number=SeqID_51665
atggcggacggcccgagcaccagatgcgcggcaacgagggaaccagaggttgaagacgcaggaaccaactggtggcggcgcgggcaccagtggccagtgctcgtgggcaacgaagacaagcccccgccactcctctcggcacagtgcagacacaccgccgtcgccacctgccatgtctgcgcgtcgccggggtccatgcgtccatgttcgtccagctccagcggcagggtggtggtggtggtggagtggactgtggactggcatgcagttggatcccccgcctccatggccatccctcgctgccgcatggcacccgtgtgcgcccgcgtgctgtcagctggagctggtgcatgcatcccatcggccgcggctgcgcgcctcagctacgacggggagcgcactgttgcgggcatggcatggctatatggccgagatggacgtcccgacgggacgccgatcggtcatcgatcgttgcagcctgcaggcgcaagaagattgacccagagcccaggcacgaggcatctcgcgctgaccggcggcaggacggaatgggagtcgggtggccggaggaggatcggtccgccgaccgccggtctatggacagctatcgaggcctcgcctcaccgcctggcatttcgcttgagcttgacagcctaa

SEQ ID NO: 9887 - DNA, 534 bp, Zea mays
  Peptide Sequence Number=SeqID_51666
atggtggatcaaaattgtggagttattcataaaactttgtataatcaagtgatctgtgacagtcacatcattctatatccagctacaaatcagactggcgacaaatcgaaatgcaaagcaaggcgcgacagggctaatcagatcccggtcactaaactctccatcccggatcaggggacctcccgtggggtgagaggggcgcacctcgtactcgctgacgagcgcctggcggtcccagaaggcaaaggtggccgcaacgaagatgaagaagaggagcgtgaggcgcttgctcgagcacgggtggatcacgcggcctggcgatcggcacgggaccccaatgcaacgcgggggctgcacaaccctgaccgcggcaaaggggaggggcagcaaaggagaaagctgctggatgaggaggtggtggtgggtggtgaggcgaagcggagacgccgcgggcctctcagggacaggttgcaagtggagaggaagggtaactgggccatgctttttgggccgaaaaaacataactataagtag

SEQ ID NO: 9888 - DNA, 135 bp, Zea mays
  Peptide Sequence Number=SeqID_51667
atgggttatggggcgattgttagggactctgattgtttcgtgctgggtaggagcaagagttttaaggaaactgctatagatgttgagtgggctgagttgatttcctttgaagaaaacgtgaaggtctttttgtga

SEQ ID NO: 9889 - DNA, 129 bp, Zea mays
  Peptide Sequence Number=SeqID_51668
atggacaaatccagtctcacctcaatctcttcaattggaacaatattagaagggtcggtccgatatcgtctcaacatggagacttggaatacatcatgggtacgatatagcttacaagatataaggtag

SEQ ID NO: 9890 - DNA, 672 bp, Zea mays
  Peptide Sequence Number=SeqID_51669
atggcgcgtcttatgcgcttcgtgccacaagcagtgatgacaggctttgtgaatgcgctgggtattttgattttcttcgcccaggtgccccatttctggagccgcgaaccgctgatcctcgcgctcttcgtcctgacagtgctgattgtcctgtggtggccacgctgggtgaaaagcgtgcccgcaccgctggtggccatcgtggtgctgacgttatttaccgtcctcaccggacaaacgctacctaccgtgggcgacgagggtcccatgcaaggcggcctgcctggcttcaccgaatggcgggtaccttttaacctcgccaccctcggcattatctggccctgcgcgctcagtatcgcctttgttggcctgttggaatcattgttgaccgcacgtctggtggatgatttaacccatacgccatccagcaaaagccgggaaagcgccgggctggggatcgccaatatcctcgcgggtttttacggcggtatcgcaggttgcgcaatgattgggcaagaccatcgtcaatgtggaaatgggcaaaggacgcagccgcgtatccaccatcgtggcggggctggtgctcttattgctggtgacggcactgagcgaggtaatggcggaaattccgatggtggtcctggcgggcattatgaccattgtcgcctgtaa

SEQ ID NO: 9891 - DNA, 5358 bp, Zea mays
  Peptide Sequence Number=SeqID_51670
atggcgacgacatttctgcgtgcaggcctgctgcttgcgctcgcattattaaacggatgcgataaccccgcctcccaggtggaaccccccacggtgcttgaaggcaaaacgatgggcaccttctggcgcgtgagcgccatcgcgttaagcccggagaaagcgaaaagcctgacgcagaaaattcaggcgcagcttgatgccgacgatcaagcgctatcaacgtggaaacccgattcggcgctaatgcgctttaaccattctgccagtctggcgccgtggccggtgagcgccgatatggctgatattgtcaccgccgcattgcgcgttggagcccacacgcagggggcaatggatatcacggttggaccgctggtaaatttatggggctttgggccggacaagcagcccaacaaagtgccggatcaggcgcaaatcgatgcggccaaagcgcgtaccgggttacaacatcttaaggtcattaacgaggcgcaacagcagtatctgcaaaaagatctgccggatcttttcgtcgatctctcgaccgttggcgaagggtatgccgccgatcatcttgcgcgcctgatggagcgtgaagggatctcgcgctatctggtgtcggtggggggagcgctggtcagtcggggtatgaacgggcaggggcaaccctggcgtgtagcgatacaaaagccgaccgaccaggaaaatgcggtgcaggcggtggtggatattaatggccacggcatcagcacctccggcagctatcgcaactactatgagctggacggtaaacgcatttcccacgtgattgacccgcagaccggccgccccattgagcataatctggtctcggtgacggtgattgcccccaccgcactggaagctgatgcctgggataccggcctgatggtgcttggcacggcgaaagcgcaggatatcgtgcgcaaagaggggctggcggtctatatgatcatgcgggaagtgaagctatgcttgaaagaggagcctgagatgaaaacatccacgacgttatatcaacaaccgttgaccgatgaacaatgctggcaggctgtctgcgcgcgtgatgccagccacgacgggcaatttgtcttcgcggtacgaaccaccggcattttttgccgcccctcctgccgttcacgccggcccctgcgcgagaatgtcggtttttaccccgatgccgataccgcgcaggctgccgggtttcgcccctgcaaacgctgtcagcctgaaagagcggacccgcagcagcaacggattgcaaaagtggaaaaggcctgtcgcttgctggaacaggaggggagtgtgaccctggaaaccctggcggatgccgtcgccatgagcccctggcatttccaccggctgtttaagtccgtaaccggcatgacgccgaaagcctggcagcttgcttttcgtgcgcagcgtctgcgcaacgcgcttaatgaaagcgccacgatcaccgatgcggtactggcggcagggtttcccgataacagcagctactatcggcaggctgacgccgcgctgggaatgacggcgcgccagtatcggcgcggcggtgacgatacggatgtctgctatgccctgagtcattgttctttagggcattgcctggtggcgcaaagtgaacgcgggatctgcgccattttgctggctgataacgaggacgcactgctggaggaactgcgaagtatcttccccggcgcccgacgcgagcaggcagatgaaaggtttgttgaacaggttgaggaggtcgtgaggcgcattgataatccggcgtcaccttttacgctgcctctggacttgcgcggtacggcatttcagctccaggtctggaacgcgctgcgcgccatcccggtgggagaaaccgtcagttatcagtcgctggcaaacacccttggtaagccgggcgcggtgcgtgccgtcgcccgcgcctgtgcggcgaacaagcttgccattgtggtgccttgtcatcgggtggttcgctcagatggcgggctgtccgaaccctggcaagaacctctcgcccctggcgcggtggtcctgcggcgttttgcgctggcaaatgcacaggctttactggcgggcattgaggcggtaacgcaggtatcgccgctgcgtcatatggtaacgcccggcggctacaccatgtcggtggcgatgaccaactgcggcgaagtgggctggacgaccgacgccagagggtatctctattccgggattgatccacaaacgggcaatccctggcctgctatccctgatgcttttgcgacgctttgccatgatgcggcggtggcggcagactatgcggatttcagaccggatgcctgcctgatcaaccgttatgtacccggtgcgaaactctcgttgcatcaggataaagacgaaccggatttacgtgcgcctatcgtctctgtctcgcttggcctgccggcggtgttccagtttggtggccttaaacgcaatgaccccatacaacgtttaatgcttgagcacggtgacgtggtgtaccgctggccttttatcgccgttatcgcgctaacgctgcttagcgccgcgctgggcatcgggcttattgcctttatcaatctccgcctgattgaaacggtggatatgtcgctggccgtgttgccggagttcctgggcttacttctgttgctgatggcggtgacgctggggtctcaactggcattaaccaccctcggccaccattttgtctatcgcctgcgcggtgagtttatcaagcgcatactcgacacccctgttgagcgtattgaaaagcttggcagtgccacgctgctggccgggctgaccagcgacgtgcgtagtattaccattgcgtttgtgcgtctgccggaactggtgcaggggattattctgacgattggctcttcggcgtatctggcctggttgtccggtaaaatgctggtcatcaccgcgctgtggatggcactgactatctggggtggatttattctggtctcccgtgtctataaacatatggcgacgctgcgtgaaaccgaagacaaactgtacaacgactttcagaccgtactggaagggcgcaaagagctgacccttaatcgcgagcgtgccgggcatgtctataacaatctgtatctgccggatgcccgagaatatcgccaccacattatccgtgctgacactttccacctgagcgcggtgaactggtcgaatatcatgatgttgggggcgattggcctggtgttctggatggcaaacagtctgggctgggcagataccaatgtcgcggcgacctactcattgacacttttgttcctgcgcacccctctgctctcagccattggcgcgctgccgacactattgagcgcgcaggtggcgttcaataaacttaagcagttctcgctggcgccgtatcagcctgacttcccgcgaccgcagctttacccgaactgggaaacgctggaactgcgcgatgtcacttttacctatcaggacaaaacgttttccgtggggccgattaacctgacgctcaggcgcggcgaactggtcttcctgattggcggcaatggcagcggtaaatcgacgctggcgatgttgttaactggattgtatgaaccggtttctggcgaaattctgctggacggtaagccacttgcgaaggaaaagccggaggattatcgcaagctgttttccgccgtgtttaccgatgtctggctgtttgatcaactgctgggcgcggagggtcaacaggcggatccggcgctggtggaccactggctgcaaaagctgaaaatggcgcacaagctggagctcaaggatggcaaaatcctcgatctgaaactgtcgaaagggcagaaaaagcgagttgcgctactgctggcactggcggaagagcgcgatattttgctgcttgatgagtgggctgccgaccaggatccacacttccgtcgcgagttttaccaggaacgtgcgcgtttaatctggcttctcaccaccgaaaaatcactcaccgcaacgttgcttggcgagttaactctggcggaacagtttgacgccgataagctcagcagtgacatggctgaggtcaacgcattggtggcgcatttaccggcgccggatttagccgataccctcgaagggttgccgatagacgggcgtcttgccctgtggcgactggtagaagatgacaaacgtggcaaagtcttgctggaggcgtcggaaaacgtctgggaagacctgattgatggaatgagtgataaagcgttgctggatgcattgcaaacgctggatatcgacgaccaaatctggctggtgcagcatctgccgcgtaatctgaccgggcgtctgctggcaacactgccggcaaccgatcgcgcccgagtacgccaggtgatgcgctacggcaaagactgcgttgcggcgatcatggaatttgaagtgatcaccgtgcgtccgaatttgacgctggccaccgtacagcgctatttacgcaggctgggcaagatgccggaaaacaccgacaaactctttgtcaccggacgtgacggcatactgcttggcgagctggcgctgcaaaccatcttactgaaaggcagtgcctgccgggtaggtgaggtgatgaatgacgatccggtcaccttttcgcctgatgagcaggcgcaagacgcggcgcatacctttgaacgcgatgacttaattagcgcggctgttaccgataccgacggcaaattaattggccgccttaccatcgacgacatcgtggatgtggtctacgaagagactgacaacgatttgcgtcagatgggcggtctgagtgccgaagaggatgtctttgcgccggtgacccgtgcggtgaaaaaccgctgggcatggctggcgattaatctgtgcacggcatttattgcttcacgggtgattgacggttttgaacacaccatttcacagttggtagcgctggccgcgttgatgcctattgttgccggtatcggcggaaacaccggtaatcagaccatcacaatgattgttcgcgccctggcgttgcagaccattcagccgggcaattttcgctttttagtcttgcgtgaaatgggtgtggcgttggtgaatggtctggtgtggggagggatcatgggggccgttacctggctactctatgatgatgctgcgctgggtggcgtgatgacgctggcgatggtgctcaacttgctgatggcggcattgatgggcgtgcttatcccaatgacaatggtgcgtttcgggcgtgacccggcggtcggctcgagcgtgatgatcacggcgattaccgataccgggggcttttttatttttcttgggctggcgacgatttttctgctgtag

SEQ ID NO: 9892 - DNA, 5151 bp, Zea mays
  Peptide Sequence Number=SeqID_51671
atgtcggtcattgttggccgtgcgctgccagatgtccgcgatggtctaaagccggttcaccgtcgcgtactttacgccatgaacgtcttgggcaatgactggaacaaagcctacaaaaaatctgcccgtgtcgttggtgacgtaatcggtaaataccatccccatggtgattccgcagtgtatgacaccattgtgcgtatggcacagccattttcactgcgctacatgctggttgatggtcagggtaacttcggttcgattgacggcgactccgcggcggcaatgcgttatacggaaatccgtctggcgaaaattgcccatgagctgatggccgatctggaaaaagagaccgttgattacgtcgacaactacgacggtacggaaaaaatccctgatgttatgcctaccaagatcccgaacctgctggtgaacgggtcttccggtattgcagtcgggatggcgaccaacattcctccgcataacctgacggaagtgattaacggttgcctggcgtacattgataatgaagacatcagcgttgaagggctgatggaacatatccctgggccagacttcccgaccgccgccattattaatggtcgtcgcggtattgaagaagcgtaccgtaccgggcgtggcaaaatttatattcgcgcccgcgcagaagtggaagctgacgcgaaaaccggtcgtgaaaccattatcgtgcatgaaattccgtatcaggtgaacaaagcacgcctgatcgagaaaattgccgagctggttaaagataaacgcgttgaaggtatcagcgcgctgcgtgacgagtctgataaagacggaatgcgcatcgtgattgaaatcaaacgtgacgcagtgggtgaggtggtactgaataacctgtactcccagacccagctccaggtttccttcggtatcaacatggtggcactgcaccatggtcagccgaagatcatgaacctgaaagacattctgtccgcgtttgtccgtcaccgccgcgaagttgtgacgcgtcgtacgattttcgaactgcgcaaagcgcgcgaccgtgcgcatatccttgaagcgctggccgttgcgctggccaatatcgatccgattatcgaactgattcgccgtgcgccgaccccggcagaagcgaaagccggtcttatcgcacagccgtgggatttgggcaacgtttccgccatgctggaacgtgcgggcgataacgccgcgcgccctgaatggctggagccagagttcggtattcgtgacggcaaatactacctgaccgaacagcaggcacaggcgattctggatctgcgtctgcagaaactgacaggccttgagcatgaaaaactgctcgacgagtataaagaactgctggaacagattgccgagctgctgcatatcctcggcagcgccgatcgtctgatggaagttatccgcgaagagctagaactggttcgtgagcagttcggtgacgagcgtcgtactgagatcaccgccaacaccgccgacatcaacatcgaagatctgatcaacgaagaagatgttgtggttacgctgtcgcatcagggctatgtgaagtaccagccgcttaccgactacgaagcgcaacgtcgtggcggtaaaggcaagtctgcggcgcgtattaaagaagaagactttatcgaccgtctgctggtggccaacacccacgacacgatcctctgcttctccagccgtggtcgtctgtactggatgaaagtttaccagttgccggaagcgagccgtggcgcgcgtggtcgtccgatcgtcaaccttctgccgctggagccgaatgaacgtattactgccattctgccggtacgcgaatatgaagagggcgtaagcgtctttatggcgaccgccagcggtaccgtgaagaaaaccgcgttgaccgagttcagccgtccgcgctctgccgggatcattgcggttaacctcaatgaaggcgacgaactgatcggcgtcgatctgacctctggtcaggacgaagtcatgctgttctctgctgccggtaaagtggtgcgcttcaaagaagatgctgttcgtgcgatgggacgtaccgcaacaggtgttcgcggtatcaagctggcaggcgaggacaaagtcgtttcgctgatcattccacgtggcgaaggggcaatcctcaccgtgacgcagaatggctacggtaaacgtacggctgaaaccgagtacccgaccaaatctcgtggtacgcagggcgttatctctatcaaggtgaccgaacgtaacggttccgtggtgggtgcggtacaggttactgataccgaccagatcatgatgatcaccgatgccggtacgctggtgcgtacgcgtgtgtcggaaatcagcgtggtagggcgtaatacccagggtgttatccttattcgtaccgcggaagacgaaaacgtggtcggtctgcagcgtgtagccgaaccggtggacgacgaagaacttgactccatcgatggcagcgtcgcggaaggggatgatgaaatcgccccggaagttgacgatggcgcggctgacgacgacgccgacgacactttgaaagtctcgcgctatcttttccgcgcgctggctctggtgctttggctgctgattgctctcttttcggtgttctacatcgtcaacgcgttgcgtgataaagagtcggaaatacgccaggaatttaacctcagtgccgatcaggcacagcggtatattcagcgcacctccgacgtcatgaaagagctgaaatacatcgctgaaaaccgtctgacggcagaaaacggtattcttgcctctcgtgggctggatgcgaaaactgatgtacctgattttcagccgctgttccccgattctgactgctcgaaaatgggtacggcctggcgtggttctctggagtcactggcctggtttatgcgctactggcgggataacttctcggcggcttacgacctgaatcgcgtattcctgattgggagtgagaatctctgcgtggcggattttggcctgcgtgatgtgccggtcgaacgcgatgagacattgaaaagtctgcatgagcgtattctgaaataccgtaatgcgccgcaggatgaacgtggcaacaacctgtactggatgagccagggggcgcgtccgggagtcggctatttttatgcgctgacgccggtttatctgggcaatcgtctgcaggcgttgctgggaacggaacaatccattcggatggagaacttcttcacccccggcagtttgccaatgggtgtgaccatctttgatgaaagcggacgtgcgttgatttccctgaccggtgcggaaaatcgtatcgaggcggatccgcgctggctgcaggtacgatcctggtttggttacacctccggctttcatgaccttatcctcaaaaagagcctgccgccatcgccgctgagtatcgtctactcggtgcctgtggacttggtgcttgagcgtattcgcatgctgatcctcaatgcggtgctgcttaatatccttgtgggggttgcactgtttaccctcgcacgtatgtatgaacggcgaatttttattccggcggaaacggacgcccagcgtctggaagaacacgagcagttcaaccgtaaaatcgtcgcctcggcgccggtggggatctgtattttacgtacccaggatgggaccaacattctgagtaatgaactggcgcataactacctgaatatgctcacccacgaagatcggcaacgtctgacgcaaattatctgcgggcagcaggtgaactttgtggatgtactgaccagcaacaataccaatttgcagataagctttgtccattcccgttatcgcaacgaaaacgtggcgatttgtgtactggtggatgtgtctgcgcgcgtcaaaatggaagaatcgctgcaggagatggcgcaggcggcagagcaggcgagccagtcaaaatcgatgttcctggcaaccgtcagtcacgaactgcgtacgccgctgtacggcattattggtaacctcgatctgctgcagactaaagacctgccgaaaggcgtcgaccgtctggtgacggcgatgaataactcgtcgagtctgctgctaaaaattatcagcgacattctcgatttctcgaaaatcgaatctgagcaactcaaaattgagccgcgtgagttctccccgcgcgaggtgatgagtcatatcaccgccaactatgcgccgctggtggtccgtaaacagctcggcctttactgttttatcgagccggacgtgcctgccacgctgaatggcgatccgatgcgtctgcagcaggttatctccaacctgctcagcaacgccattaagtttaccgatattggctgcattattcttcatgtccgccgggatgaacattatctgagtatccgcgtacgcgataccggcgtcgggatcccaggtaaagaagtggtgcggttgttcgatcccttcttccaggtgggcactggcgtgcagcgtaacttccaggggaccgggctggggctggcgatttgcgaaaaactgatcagcatgatggatggcgatattagcgtcgataccgaaccgggtatgggcagccagtttaccatccgtattccgttgcccagcactatgatggtcgccccactgggagcaaacgacacttttattacggatgatgaactgccagcgtcctggagcgggcgggccgccgtcatgttctgccgtcgccatattggtatcccattggagcgtacgccaaatgaatggctggttagcgtggcgtcgccgcatgatctgattgcgatccttgggcgaattcaccgtgttgaggtggtggtgccggaagtcactaccgcgctgccgccaccgggcgcggccgaggcgcgaaatgacgacatgatgattctggtggtcgacgatcacccgatcaaccgccgtctgctggcggatcagcttggttcgctggggtatcagtgcaaaacggcgaacgatggtgtagatgccctgaatgtcctgagtaaaaaccccatcgatattgtgctcagcgacgttaacatgccgaacatggacggttatcgcctgacgcaacgtatccgtgaatttggggttgaccttgccggttatcggcgtgacggcaaatgcgctggccgaagagaaacagcgttgtcttga

SEQ ID NO: 9893 - DNA, 2022 bp, Zea mays
  Peptide Sequence Number=SeqID_51672
atgcacaagcgcattgatacctggcgctacgctacctggcaaatctacgacaacatcgcggcagcgacctctggcagttcaagtgatggcttacaggaaacccgccttaagcaggacgtttactatctggagaagccacggcgtaaaacagaagcgctgatcttcggctcccatgacagttcgacgctggaaatgacgcagcgaatctccacctatctggataccctgtggggcgcggagaccgttccctggtcgatgtactacctcaatggtcaggacaacagcatgatcctgatctctaccctgccgttgaaagatctctcctccgggtttaaagagtccacaattggcagcatcgtcgattcacgccgcgcggagatgttgcaacaagctaacgcgctggacgaacgcgagagcttctctgccctgcgtcgcctttcctggcagaatggccactatttcaccctgcgcaccacgtttaaccagcccggtcatctggcgacggttgtggcatttgacctgccgattaacgacctaatcccaccggatatgtcgttggacagcttccgtctcgatacggataacgcgcaaaataatctgcgttccaccgataaagagagcaccgacagcgtcaccatcaatttcaatagttcgaaaatcgagattgcctcttcgctcaactccaccggcctgcgcctggtctggcaggtgccgtttggtacgctgctgctggagaccttgcaaaatattctgttgccgctgttattgaacattggtctactggcgctggcgctgtttggctataccacgttccgccatcagccgggccgtcagagcgatgggctggcccctgcgggaaacagtaacgagctgcgcgttatgcgcgcctttaatgaagagattgtctctctgttgccgttagggttgctggtacatgaccaggaagccaaccgcaccgtgttgagcaataaaatcgccgatcatttgctgccgcatctcaacttgcaaaacatcacctctatggccgatcagcatcagggggtgattcaggccacgatcaataacgaattgtatgaaattcgccagttccgcagccaggtggcgtcgcgcacgcagattttcatcatccgcgatcaggacagagaagtactggtgaataaaaagctcaaacaggcgcagcgcctgtatgagaaaaatcagcaaggtcgcgcagcgttcatgcaaaacattgccgaagcgctcaagcagcctgtcaaagccctggctggcgaagccgctgcgttgagcgataaagagggcaaccagcttgctgatcatgccgaagcgctggcgagactggtggatgagatccaactggccaatatgctggaaaacgacacatggaaaggacaatccacgctgttttccattcaggatttaattgatgaagtggtgccgcaggcggaagatcgtctgaccttccgtatcctggacaccggcaacggggtaagtaatagcgagatcgacaacctgcacttcccgttcctcaataccactcagggcgatcagtatggcgataaatacggtgacggcatcacgctgattaaatacatcaaacgccatttcccgaacctgtccatcattgttctgacaatgaacaacaacccggccattctgagcgccgtgctggatctggatattgaagggatcgtgctgaaacagggcgcaccaaccgacctgcctaaggcgctggctgcattacagaaaggcaagaaatttaccccggaaagcgtttcccgcctgctggaaaaaatcagcgccggtggttatggcgataaacgtctgtcaccgaaagagagtgaagtattgcgtctgtttgccgaaggtttcctggtcaccgaaatcgccaagaaactgaaccgcagtatcaagaccatcagtagccagaagaaatctgccatgatgaaactgggtgttgataatgatatcgccctgctgaattacctctcctcggtcacactgacccagaccgagaaagagtaa

SEQ ID NO: 9894 - DNA, 4888 bp, Zea mays
  Peptide Sequence Number=SeqID_51673
tgctgatgaaaccccggtttgctgctgtatggatgttggtaccatcatggacaactccgattgcaccgcctcgtatagccgtgtgttcacaaaccgcaccgatgcagaagagacgctggctgcgctgacggcgcgcgcgcgtggcgtggagtcagatccttgccagatcacctcaacgttcactgaggttgatggcggcgggagtgttatgagtcaggcattaccgcttgtcacccgtcagggcgaccgcatcgccattgtcagtggattacgtacgccatttgcccgtcaggcaacggtattccacggtgtcccggctatcgatctcggcaaaatggtggtgggcgaactccttgcccgtagcgaaatcccgccggaaatcattgagcaactggtctttggccaggtggtgcaaatgccggaagcgccgaatatcgcgcgagaaatcgtgctgggaacgggcatgagtgtgcacaccgatgcctacagcgtcagccgcgcctgtgccaccagttttcaggcggtggcaaacgttgccgaaagcctgatggcggggacgatccgtgcaggtatcgcgggtggtgctgactcctcatcagtgttgcccatcggcgtgagcaaaaaattggctcgcgtgctggttgatgccaacaaagcgcgcagcacggggcaaaaattaaagcttttctcccgtttacggctgcgtgatttactgccggtgccgcctgcggtagctgaatattctaccggtttacgcatgggcgataccgcagagcagatggcgaaaacctatggcatcacgcgtcaagaacaggatgcgctggcccaccgttctcaccagtttgcggcgcaggcatgggctgaaggaaagctggcggatgaagtgatgaccgcctatgcgccaccttttcgcgatccgataacccaggacaataatgtacggcaaaattccagcctcgcggattacgccaaactgcgtccggcctttgatcgtcgacacggcaccgtgaccgcggcgaacagtactccccttaccgatggcgcggcagcggtgatcctgatgaccgaatcgcgggcgaaagagctgggtttgcagcctctgggatacctgcgaagctatgctttcaccgccattgacgtgcagcaggacatgctgctggggcccgcctgggcgacgccgctggcgctcgacagagcagggctgacgatggcggatttaaccttactggatatgcacgaagcctttgcgtcgcaaaccctgaccaacctgaaactgatggccagcgagcgttttgcccgcgatgtattgggccggtcgcaggcaacgggtgaggtggatgacagcaaattcaacgtgctggggggatcaattgcttacgggcatccgtttgcggcaaccggccgaataatggacatgacctcagcatttacccttgttgtacgcccggacaatgttgccgttgtcagtattgatgttcccggcgaaaagatgaacacactaaaggcggagtttggcagccaggtacgcgccatccttaaacaaattcgtgaaaacaaacagattcgcggcgtggtgttcatttccgcaaaaccggataattttatcgccggggcggatatcaacatgatcgatcgctgcaaaacggccaaagaggccgaagatctggcgcggcaggggcagcagatcatggccgagatccacgcgctgtcgatcccggtgatcgccgccatccatggcccatgtcttggcggcggtctggaactggcattagcctgccatcgccgaatttgtacggatgatgtgaagacggtcctggggctgcccgaagtgcagcttggtctgctgcctggttctggtggcacccagcggctgccgcgtctggtcggagtaagcactgcactggatatgatcctgaccggtaaacaactgcgcgcgcgccaggcgttaaaagccgggctggttgatgatgtcgtgccggtgtccattttgctggatgctgccacagagcttgccgcgcagggccgtcctgccagccgcagcctgccggcgctgcggcatattttctttgccagcactgaggtgaaaaaagaccccggcagcccggttgccgccggtccgctgcgctctgttggtgttctcggcggtgggttaatgggcggcgggatcgcctacgtgacggcagtgaagggtaatctcccggttcgcataaaagatattaatccgaaaggcattaaccacgcgctgaaatatagttgggaacagcttgataaaaaggtgcgtcgccgccatctcaaatctgctgagcgtgatgcgcaaatggcgcgcatttccggtactacggactacagcggtttttcccatcgggatgtggtgatagaggccgtattcgaagatttgactcttaagcaacagatggtggcggagattgaagcgcagtgtgcgccgcagaccatttttgcctccaatacgtcgtcattgccgatcggtgatattgcggccagggctgcacgccctggcaatattatcggattacatttttttagcccggttgagatgatgccattggtggaagtcattccccatgccggtaccgacgaacaaaccatttcaacagtggtgaaactggctaagaagcagggcaaaacgccgatcgtcgtggcggacaaagccggtttttacgtgaaccgcattctggcgccttatatgagcgaagcgatgcggctcctgagcgaaggggaacgtatcgagaatatcgataaggcgctggtaaaatttggctttcctgtcggcccaatccaacttttggatgaagtgggcatcgacaccgggactaaaattatccctgtactggaggctgcttatggtgatcgttttagtgcccctgcaagcgtcgtttctgcaatattgaatgacgatcgcaaaggcagaaaaaatgagcgcggtttctatctttacggtaagaaagggcgtaaaagcaacaaacagcctgacccggcaatttacccgcttgtgggggcatctggcacaggcaaattatcggcagaacagattgccgaacgatgcgtcatgatgatgcttaacgaggccgcacgctgtttcgccgagaaggtgattcgcagcccgcgagatggtgatattggcgcggtgtttggcatcggttttccgcctttcctgggcggcccgttccgctatatggatacccttggcgcgggtgatattgtcgcaactctgcagcgcctggcttcgctttatggggaacgttttgcaccttgtcagcttttgttacaaatggctgagcagggcgaaaagttttgggacaagcaggaaactgattttgcacaatgcccggccattgatatttcctgtcgtaatggaactgttcacgcggggagtgttaatgcttctgccagcgactcagttcgtcctctaaccccttgtggttgtgatgaatctcgtcagatggcaacctggctgaaaggtcaaaaagtggatgtcgaacgtgttctggtcagcccgtttcttcgtgctgaacagacgctaaacgaggtgggtgaatgcatgaacctgcccgacaacgtggatgtcctgcccgaactgaccccttgtggtgatgttggtctggtcagcgcctatctccaggcgttggcaaatgaaggtacttcctctgtgctggtgatttctcatctgccgttggtggggtatctggtgtccgagctttgcccgggtgaaacaccgccaatgttcactacctccgcgattgccagcgtgacgctggatgagagcgggaagctcaggcggctgccactcttcaacttcaatcaacaccagtattgccgcatcgccaccgtactctttgggggcctggccgcgacgcgaagcgacaatgctgatttatcgccgtcttcatggcaaactagccgccgaatttcttgcgagcgtgtcctggaggataagatggataaaattttcgttgatgaggcagtaagtgaactgcataccattcaggacatgttgcgctggtcggtaagccgatttagcgcggcaaacatctggtacggccacggcaccgataacccgtgggatgaagccgtacaactggtattgcctaccctttacctgccgctggatatcccggaagagatgcgcaatgcgcggctgacctccagcgagcgtcaccgtatcgttgagcgagtcattcgtcgcgtcaatgaacgtattccggttgcctacctcaccaataaagcctggttctgcggacacgagttttacgttgatgaacgcgtgctggtgccgcgttcaccgattggcgagttgatcaataaccacttcgccgggcttatcgacgcacagccgcagcacattctggatatgtgtaccggtagcggctgtatcgccatagcctgcgcttacgccttcccggaagcggaagtggacgcggtagacatctccccggatgcgctggcggtaacagaacacaacattgaagaccacggcctgattcatcacgtcacgccgattcgttccgacctcttccgcgacctgccaaaagtgcagtacgacctgattgtgaccaacccgccgtacgttgatgaagaggatatgtctgatctgccatcagagtatcgccatgagccggagcttgggctggcgtctggtagcgatggcctgaaactgacgcgtcgcattctggcctgcgccccagattacctcaccgacaatggtgtgctgatttgtgaagtgggcaacagcatggtacatctgatggaacaatatccggatgtaccgttcacctggcttgaatttgataatggcggtgacggtgtcttcatgctgaccaaagcgcagttgctggccgcgcaggaacatttcagcatctataaagattaa

SEQ ID NO: 9895 - DNA, 2622 bp, Zea mays
  Peptide Sequence Number=SeqID_51674
atgtctgaaggctggaatattgccgtactgggcgcgacaggcgctgtcggagaagccttactcgaaacgcttgcggagcgtgagttcccggtgggcgatttgtatgcgctggcgcgtaatgaaagcgccggtgagacgctgcgttttggcggaaaaaccgtacgcgttcaggatgttgcggaatttgactggacgcaggtgcaactggcgttctttgtcgccggcgctcaggcgacggctgagaatattgaagaagccaccaacgccggttgtctggtgattgacaccagcggtctgttcgcgctggagccggatgtgccgctggttgtgccagaggtgaacccgtttgtcctggccgattaccgcaatcgtaatctcattgccgtgccggatagcctgaccagccagttgctgatcgcgctgaaaccgctgatcgacgaaggtggcctgtcacgtattggcgtgaccagtctgctctccgtgtcggcgcagggcaaaccggcggtggatgcccttgccgggcaaagtgcgaagttgctcaacggcattccgatcgatgaggacgacttctttggacggcaactggcgttcaacatgctgcctattctgccggaccgtgaaggtgcggttctggaagagcgtcgtctggtggaccaggtgcgtaaaattctgcaggacgacgggctgatgatatccgcgaactgcgtccgcgcgccggtcttttatggccacgcgcagatggtcagcttcgaagcgctgcgtccactggcggcagaagaggcccgtgatgcgtttgcccgcggtgaagatattgtgctgtccgaagagaatgaattcccgacccaggttggcgatgcttccggagtacctgtactaatgtcagacgttgttgaacaaccgctgttgaaaattgcgctcggtatcgagtacgacggcagtaagtattacggctggcagcgtcagcaagaagtacgcagcgtgcaggaaaaactggaaaaagcgttgtcgcaggtcgccaatgagccggtgacggttttttgtgccgggcgtaccgatgccggtgtgcatgccacagggcaggtggtccattttgagactcgcgcggtacgtaaagacgcggcctggaccctgggcgtaaatgcgaatttacctggagacatcgcggtacgttgggtgaaagatgtgcccgatgatttccacgcgcggtttagcgcgacagcgcgtcgttatcgctacgttatctacaatcatcgtttacgcccggcggtactgaaccagggggtgacgcattatcacctgccccttgatgcggagcgcatgcagcgtgcggcgcaatgtctgctgggtgaaaatgattttacctcgtttcgcgcggtacagtgccagtcacgcacgccgtggcgcaacatgatgcacattaacgttcatcgttatggtgcgtatgtggtggtggatatcaaagcgaatgcctttgtacatcatatggtgagaaacattgtcggtagcctgatggaagtgggtgccaacaaccagccggagagctggatagcagagctactggcggctaaggacagaacgctggcggcagcaacggcgagagcagaagggttgtatctggtgtcggtcgattacccggaccgtttcaacttaccccgcccgccaatggcgttcaacgtgatcggggcgctgttatgggtgctactgtttacttatgctggctacttcttcggtacgctgccgatggtgcaggaaaatcttaagttactgattgtcgcgatcatcgtggtgtctatacttcctggggtactgtatcgtgccgagctggagcgtaaccttgaggtctgcccgaagtgtgaccaccatatgcgcatgactgcgcgtaaccgcctgcatacattgctggacgaaggttcactggtggaactgggtagcgaactcgagccgaaagatgtgctcaagttccgtgactccaaaaaatacaaagaccgtctggcgacggcacagaaagagaccggcgaaaaagatgcgctggtggtaatgaaaggcacgctgcatggtatgccggttgtcgcggcagcgtttgaattcgcctttatgggcggctcaatgggctctgtcgtgggcgcgcgttttgttcgcgccgttgagcaggcgctggaagataactgcccgttgatctgtttctccgcctcgggtggcgcacgtatgcaggaagcgctgatgtcgctgatgcagatggcgaaaacctccgcagcgctggcgaagatgcaagagcgcggcctgccgtatatctctgtactgactgacccaaccatgggcggcgtttccgcgagtttcgcgatgctgggcgacctgaatattgccgagccgaaagcgctcattggttttgccggcccgcgcgttattgagcagaccgtacgtgaaaaactgccgccgggattccagcgcagtgaattcctgattgaaaaaggggcgatcgacatgatcgttcgtcgtccggaaatgcgcctgaaactggccagcatcctggcgaagctgaccaatcagccagcaccgagcccggatgcgccgcgtgaaagcgtggtggtgcccccggtgcccgatcaggaagccgaggcctga

SEQ ID NO: 9896 - DNA, 618 bp, Zea mays
  Peptide Sequence Number=SeqID_51675
atgcaacccattcagggcacccccgcgcgccctccggggcaagaccctacgccccctactttggccgccggagagcagccgttatcgacaatccagcgcactgtgctggagcggctgattattcgcctggtggcgctcacgcaacagcagagcgccgaagtctgggccggggttaaacatgatttgggtttgaagaatgacgcgccgctgctgtcacgccatttcccggcggcagagcagaatctcaaccagcgcctggataccgccacgcagaatcacaccacccgccaggttatctcgcaactgacggaattgctcggtcagggtaacaaccgccaggcggttagcgacttcattcgccagcagtttggtcagacggcgctgagccagcttacgccagagcagcttaaaacggtgctgacgctgctgcagaacaaccagatttcggtacctcagcccttgcaacgcccggcgacagaccgcccgctgttgcccgctgagcacaattcgctcaaccaggcggtgaccaaactggccgctgcgacgggtgaatccggcgcgtcagacattaagcacccagacttccccgacactgcaaagcgtgcaaaccgcgcttaa

SEQ ID NO: 9897 - DNA, 2148 bp, Zea mays
  Peptide Sequence Number=SeqID_51676
atgcaagaagccattgcggatgctggcctgagcgcagaggtttatcagaacaacccgcgtgttggcctgattgccggttccggcggctcttcaaaagcgcaggtcttcggtgcggacgcaatgcgtagcccgcgcggcctgaaagcagtgggaccgtatgtcgtgaccaaagcaatgggctctgcggtttccgcgtgcctcgcaacgccgtttaaaattcacggtgtgaactactccatcagctccgcctgtgccacttccgcacactgcatcggtaacgcggttgagcagatccaactgggcaaacaggacatcgtttttgctggcggcggcgaagagctgggctgggaaatggcctgtgagttcgacgccatgggcgcgttgtcgaccaaatacaacgaaaccccggaaaaagcgtctcgtacctatgacgcccaccgtgatggcttcatcatcgcaggcggcggcggtatggttgtggttgaagaactggaacatgcgctggcacgtggcgcgcacatctacgctgaaatcgtgggctatggcgcaacgtctgatggcgctgacatggttgcgccgtcaggtgaaggcgcggtgcgctgcatgaagatggcaatgcacggtgttgataccccgatcgactacctgaactcccacggtacgtctacaccggtcggtgatgtgaaagaactgggtgcgattcgcgaagtgttcggcgacaacagcccggctatctctgcgaccaaagccatgaccggccactctctgggtgcggctggcgtacaggaagcaatctactcactgctgatgctggagcacggctttatcgccccgagcatcaatatcgacgagatggatgagcaggctgctggcctgaacatcgtcaccaaaccgactgacgcgacgctgaataccgtcatgtccaacagcttcggtttcggcggtactaacgccacgctggtgatgcagactcaaacactttcttcctcatccggcacgggcacgaatgcgttgctgcggctggtgattgccgtttttttgacctatatgaccatcgggttaccgttgcccgtcatcccgctctttgtgcacaacgaactcggttacggcaataccatggtgggcatcgccgtcggtatccagtttctggcgaccgtcctgacgcgaggctatgccgggcgtctggccgatcagtttggcgcaaagcgctcggcgctgcaggggatgttggcctgcgggctggctggcgtcgcctggttgctggcggcctggctaccggtaagcgcactggcaaaattcggcttgctgattgtcgggcgtttaattctgggctttggtgaaagccagttgctcacaggaacactcgcctgggggatggggctgtcgttttggtttgccgccctggcggcgatcacgatggttttaccgctgctggagtgggcatttaatggcggcgcgccgaacgcctgggtggcgatggccggtgcggcattgaccggctgtggctgttcgttgattttcccggcgttgggcgttgaagtggtgaaacgcgttgccccgcaggttcgcggtactgcactgggcgggtatgcggcatttcaggacatcgcgaacggtatcagcggtccacttaccggcctgctggcgacctcgctgggttacccgtcggtattcctggccgcagcaattgcggcgagaaaggagagacgtatgcctgggtttaaagcagattttctgtggggtggcgcggtggcggcgcatcagcttgaaggcggctggcaggaaggcggtaaaggcgtcagtgtcgctgatgtgatgaccgccggggcgcacggcgttccgcgcgaaattaccgatggcgtcttgccgggaaaaaactacccaaaccatgatgccatcgacttttatcaccgctataaagatgacatcaaactctttgcggaaatggggtttaaatgtttccgtacgtcaattgcctggacacgtattttcccgaaaggtgatgaattagaaccaaatgaagctggcctgcagttttatgacgatcttttcgatgaatgtctgaaatacaatattgaaccggtcattaccctctcgcatttcgaaatgccttattatctggtcactgaatacggtggctgggcgtaa

SEQ ID NO: 9898 - DNA, 1732 bp, Zea mays
  Peptide Sequence Number=SeqID_51677
gaagtggcactcacagctaaaaggtcaaagattcatgtcctccatcgaaaaatccagcaaattagataacgtctgttatgacatacgcggcccggttctcaaagaggcgaaacgcctggaagaagaaggcaacaaagttcttaaactaaacatcggcaacccggcgcctttcggctttgaggcgccagatgaaattctggtcgacgtcattcgaaacctgccaaccgcgcaaggttattgtgactcaaaagggctgtactcagcgcgtaaagccattatgcagcactatcaggcacgcggcatgcgcgatgttaccgttgaagatatctatatcggtaatggcgtttcagaactgatcgtccaatcgatgcaggccctgttgaacagcggggacgaaatgctggtcccggcaccggactatcctttatggacagcggcagtgtcgctttcgagcggtaaagctgtgcactatctgtgtgatgaatcctctgactggttcccggatcttgatgatatccgcgcgaaaataacgccgcgcacccgtgggatcgtcatcattaacccgaataaccccactggggcggtttattcgaaagagttgttgatggaaattgtcgagattgcacgacagcataacctcattattttcgccgacgagatctacgacaaaatcctctatgacgatgccgagcatcactctattgctgcgatggcgccggacgtgtttaccattacctttaatggtctttccaagacctaccgcgttgccgggttccgtcagggttggatggtactgagcggaccgcaaaaacacgccaaaggttacattgaagggctggaaatgctggcctctatgcgtctttgcgcgaacgtccccgcacagcatgcgattcagaccgcgcttggcggctaccagagcatcagtgaatttatcgtgcctggcgggcgtctttacgaacaacgcaatcgcgcgtgggaactgattaacgaaatcccgggcgtgtcctgcgtgaaaccgaagggggcactctatatgttcccgaaaattgacgctaagcgcttcaatattcatgacgatcagaaaatggtgcttgatttcctgttgcaggaaaaagtgctgcttgttcagggaacggccttcaactggccctggccggatcatgtgcgcatcgtcacactgccgcgcatggacgacctggaaatgtccatcacccgttttggccgcttcttatccgacaaggttgccatggtggcacatgcactggcggcgattaaaaatcgcaaattcggcggccaggttaatgcggagcgaatcgcgctgttagcgatgtatcatgatgcctcggaagtattgaccggtgatttacccaccccggttaaatacttcaactcgcaaatcgcccaggaatataaagccatcgaaaaaattgcccagcagaagctggtcgagatggtgccggaagagctacgcgatatattctctgagctgatcgatgagcattattacagcgctgatgaaaaattgatcgttaaacaggcagatgcgctctgtgcatatctgaagtgtcttgaagaattgtctgccggaaataacgaatttatgctggcaaaatcgcgtctggagaaaaccctggatgcccgacgcagtccggaaatggattacttcatgcaagtttttgtaccaagcttccatttatcgcttgatgaaataagccaggactcaccgctttaa

SEQ ID NO: 9899 - DNA, 3651 bp, Zea mays
  Peptide Sequence Number=SeqID_51678
gttcaattcccataccgggggccacatagtcaatggaagccgatgaaggcgggggagaacccggtggcaagtaagtttcagaaccgtttgatgggaaccattgttctggttgcgctcggggtgattattctgcccgggctgctggacgggcaaaaaaagcattatcaggatgagttcgccgccattcctctggtacccaaacccggcgatcgtgatgagccggatatgatgccagcggccacgcaggcgctcccggctcagccgccggaaggggcagcggaagaggtccaggctggcgaggcggcagcgccgtcgctggatgcctcccggcgggctgtcagtggggcgacgacgccggatgtcacaacgcaacccgtcgcgccgaagcaggttgaacagccaaaaccgattgagaaacccaagccacagccacagaaacccgcagaacaggtggcggcaaccccgcctgcggatcagccgcccgcggcggataagtctgcgccagtgggtaaagcctgggtggtacaactgggtgcgcttaagaacgctgacaaagttaatgaaattgtcggtaaactgcgcggtgcaggttatcgcgtttatactgcgcccactacgccagtacagggtaaaatcacccgcatcctggtcggtccggatgcatcaaaagataaactcaaggggtcgcttgaggagcttaagcaactgtcaggcttgagcggtgtgggcgtaaatcgtgggacatatatggtctggattgattacgccatcatcgcggtgattggtttttcctgtctggttagcctcatccgcggctttgttcgtgaagcgttatcactggtgacatggggttgtgctttctttgttgccagtcattactacacttacctgtcagtctggtttacgggctttgaagacgaactggtgcgcaatgggatatccatcgccatcctgttcatcgcgacgctgattgttggcgctatcgtcaattacgtgataggtcaacttgtggagaaaaccggcctgtcgggtacagacaggagcgtaatcgctctgagatgtggcttaacgaggaaaagacgtatgtgcggtattgtcggtatcgccggtgttatgccggtcaaccagtcgatttatgacgcgttaacggtgcttcagcaccgtggtcaggatgccgctggcatcatcacgatcgatgcaaataattgtttccgtctgcgcaaagcaaatggtctggtcaacgatgttttcgaagcccgccatatgcagcgtcttcagggcaacatgggtatcggccatgtgcgttacccaaccgctggcagctccagcgcctccgaggctcagcctttttacgttaactccccttacggcatcacgcttgcccataacggcaacctgaccaatgctcatgagctgcgtaaaaagctgtttgaagaaaaacgccgccacatcaacaccacgtctgattccgaaatcctgctgaatattttcgccagcgagctggataatttccgccattatccgctggaagcagacaacattttcgccgctgtcgccgcgaccaaccgccagatccgtggcgcgtatgcatgtgttgcgatgatcatcggccacggtatggttgctttccgcgacccgaacggtattcgtcctctggtactgggtaaacgcgatattggtgacggtcgcactgagtacatggtggcgtcagaaagcgtggcgctcgatacgctgggcttcgaattcctgcgcgatatcgcgccgggcgaagccgtctacatcaccgaaaaaggtcagttgtttacccgccagtgtgcggataatccggtcagcaacccgtgcctgttcgaatacgtctattttgcgcgtccggactccttcatcgacaaaatctccgtctacagcgcgcgtgtcaatatgggcaccaagcttggcgagaagattgcgcgtgaatgggaagatctggatatcgacgtggttattcccatcccggaaacctcctgcgatatcgcgctggaaatcgcccacattcttggcaagccgtaccgtcagggttttgtgaaaaaccgttacgttggccgtacctttatcatgccgggtcagcaactgcgtcgtaaatctgtccgccgtaagctgaacgcgaaccgcgctgagttccgcgataaaaacgtgctgctggtggatgactccatcgtacgtggtaccacttctgagcagattattgagatggcccgtgaagccggggcgaagaaagtgtacctcgcctctgcggcgccggaaattcgtttcccgaacgtctacggtatcgatatgccgaccgcgaacgaactgattgcacatggtcgtgaagtggatgagattcgccagatcatcggcgctgatggcctgattttccaggatctgaccgatctgatcgacgctgtacgcgcggaaaacccggatatccagcagttcgagtgctcagtctttaatggcatctatgtcaccaaagacgtggatcaggggtatctcgactacctcgactcgctgcgtaacgacgatgcgaaagccgtgcagatgcagaacgatctcgaaagcttagagatgcacaacgaagggggccagcggcgcgatttacggcgtgcgcttgttgcagctatacagagcggcctgctgacgcgtgcggcggatgtggtgttaaaagagcgtcgcccgctggtgctgtgcgtgcgtgaaacaccgttgcatttaggccatctgcgtttgatgacgcaggccgcagaactgggggctgttatcatgccgccggtccccgcgttttaccatgcgccgaaaacgctggatgacattattaaccagaccgttaaccgcgttctggatcaatttgatatcgctctgccggaagatctgttcatccgctggcaggggggaaatgcctccagatatgtttacgcagcgcttccccagactgtacgcatcggtactgatgcgacatacgcacctttctcttccaaagatgcgaaagggaattttgtcggttttgacatcgatctcggtaatgagatgtgtacccgcatcaaggtcaaatgtacctgggttggcagcgattttgacgcgctcatcccgtctctgaaagcgaagaaaatcgatgcgattatctcctctctctccattaccgaaaaacgtcagcaggagattgctttctccgacaaactctatgctgctgattcccgtctgatcgccaaaaaaggctcgccgatcgtgccgacgctggactctctgaaaggcaaacacgtaggggttctgcaggggtctacgcaagaaggttatgcgaatgacaactggcgcactaagggtatcgatgtggtggcctaccagaaccaggatctgatctactctgatctcgccgcaggccgtctggatgctgcattccaggacgaagtggctgccagcgaaggcttcctgaaacagcctgccggtaaagattttgcgttcgccggtccgtccgttaaagataaaaaatactttggcgacggcaccgggatcggtctgcgtaaagacgataccgagctgaaagcggccttcgacaaagcctttgctgaaattcgtaaagacggtacctacgataagctcgcgaagaaatatttcgactttaacgtctacggcgagtaa

SEQ ID NO: 9900 - DNA, 3264 bp, Zea mays
  Peptide Sequence Number=SeqID_51679
atgtccacttcagaaaatcgccccgtcaatttttttggattgtttcgccggggacagcactatgcgaagacctggcccatggaaaaaagcctcgccccgctatttattgagaatcggacgatacgcgccacccgttatgccattcgctttatgccgcccgttgctgtgtttacgctgtgctggcaaatcgctcttggcgggcagttaggcccggctgtcgcgacggcgctgtttgccctgagcctgcctatgcaagggctgtggtggcttggtaagcgctctgtcacgccgttgcccccatcaattctgcattggttttatgaagtccgcggtaaattgcaggaggcggggcaggcgctggcgcctgtcgaaggtaagccggattatcaggcattagctgacacgcttaagcgcgccttcaaacaactcgataaaactttccttgatgacttgagtcgtaagatggaaatgaccaatgcccaacgactgattttgtctaatcagtataaaatgatgaccatgatggatcctgctaatgccgagcgctatcgtcgcctgcagaccattatcgagcgcggctatggtctgcaaatgcgtgagctggatcgtgaattcggtgaacttaaagaagaaacctgtcgtaccgttatcgacattatggagatgtaccacgcgttacatgtctcctgggccaatctgaaagacgcgcaatctattgatgaacgccgcgtcaccttcttaggttttgatgccgccaccgaagcgcgttatctcggctatgtacgctttatggtcaatattgaagggcgttatacccatttcgatgccggtacacacggctttaatgcccagacgccaatgtgggaaaaataccagcgtatgttgaattgcaaaggatttctgtttgacctggatggcaccctggtgaattcgttgcccgtcgtggagcggtcatggtgccgttgggccgaccgcttcggcatcgatcatgacgaagtgctgaattttatccatggcaaacaggccattacttcgttacgtcactttatggctggtcactccgaagaggatatcgcagcggagtttacctggctggaggagattgaagcgacggataccgaaggtgtcgtggccttgcccggcgcgctcgagttactgaaccatctcactgaatcccatatcccgtggggcatcgtgacgtcgggctccatccccgttgctcatgcccgccaccgggcggcgggtttgccgatgccggatgtatttgtcacggcggagcaggttaagcgcggaaagcctgagcccgatccgtacctgcttggggcaaaactgctgggtttgccgccgcaagagtgtgtggtggtggaagacgcaggggccggtgtgctttctggccttgcagcgaactgccatgtaatcgcggtgaatgtgcctgccgattcgccgcgtctggatgaggcggactttgtgcttgctcgtctggatgaagtggtcgtgacaaagcagcctgatgctgtcgtcctctttgcgacgggtaaagtgcgcatggatgcggtggcgttgctggtcattgtggcgtttattctgagcgggacgttgacgatgaccgaggcgttatcgggttttagcgatcccaacgttgtcttgatcgccgcgcttttcattattggtgacggactggtacggaccggcgtggcgaccagcatggggtcatggctggtaaaaatggccggcagcagcgaaattaaaatgctggttctgctgatgctcaccgtcgcagggcttggtgcctttatgagttccacaggcgtagtggcgatttttattccggtggtgctcagcgtctcgatgcgtatgcaaatctctccctctcgtttaatgatgccgctcagctttgccgggcttatcagcggcatgatgacgctggtggcgacaccaccaaatctggtggtcaacagcgaactgctacgtgaggggttggccgggttcagtttttttagcgttaccccgctggggctggtgattttgctgatgggcattgtctatatgctgctgatgcgctttatgcttaagagcgacaaagacgacagccagcgtgacggctggaaacggcgtaccttccgcgacttgataaaagagtaccggctgacagggcgcgccaggcgcctggcaattcgcccgggctcccccttaattggccagcggctggacgatctgaaactgcgtgaacgctatggcgcgaatgttatcggtgttgaacgctggcgacgtttccgccgtgtgattgttaacgttaatggggtatcggaatttcgcgcccgcgatgttttactcattgatatgtcggcggcggatgtcgatttacgcgaattctgcgccgaacaactgctggagccgatgattttacgcggtgaatacttttccgaccaggctctggatgtggggatggcggaagtttcgccgataccggagaccgagttattaggtaaaaccgtacgtgaaattggctttcgtacccgttatggcttaaacgtggttgggcttaaacgtgacggtgaggcaatgcccggcgttgttgtcgatgaacccctgcaactcggggatattttattagtggtgggtaactggaagttaattagccagttgggccagaaaggacgagagtttctggttctcaatatgcccgtggaagagagcgccgtctctcctgcccataaccaggcgcctcatgcgatattctgtctggtgctgatggttgcgctgatgctgacagatgaaatccccaatccggtggcggcaatcacggcctgcctgctgatggggaaatttcgctgtattgatgctgagagcgcctataaagccattcactggccaagccttattttgatcgtcgggatgatgccctttgcgctggcgctgcaaaaaacgggtggggtagatctggtcgttaaagctttactcgatttcggcggcagctatgggccctatatgatgctggtatgcctgtttgtgttgtgcgccactatcgggctatttatctccaataccgcgacggctgtcttaatggcgcctatcgcgttggcgacggcaaaatcgatgggggtctctccttatcctttcgcgatggttgtcgcgatggccgcatcggcagcctttatgacgccggtatcatcaccggtaaatacgctggttctggggccgggctaccccggcggcagtgcgagcgccggggtaaactttttcagacggagggtaacgccgtaa

SEQ ID NO: 9901 - DNA, 4104 bp, Zea mays
  Peptide Sequence Number=SeqID_51680
atgacccatcctgtaatgctcgcctttgctgatatccacccgaataagccgcctggcaagctccgcttcttcaagaaaaagccgctccaggaaaaagcgctgccctttaccctgaaaaccattgatttggaacacggcgagcagcagaagacgggatggactggctatcaccttactcgccgcgtgccggtgctggaaattgacggtttcgagctcagcgaatcctcggcaattgatgagtatctggaagagcgctttgcaccgccggaatatgaacgtatctaccctcacgacttacaaaaacgcgcccgtgcccgtcaggtgcaggcgtggatccgcagcgatttgatgccgattcgcgaagagcgcagcaccgacgtgattttcgccggagcgaagaaagcgccgctcagcgccgcaggccagcagagtgccgccaaactctttgcccttgctggggaattactgacgcacggtaaaccgaatctgtttggcgagtggtgtatcgccgatgccgatctggccctgatgattaaccggctggtgatgaacggcgatgaggtgccggagcgtctggtggattacgccaccttccagtggcagcgctcctcaatacaacgctatgtcgcactgtcggcgaagctgatgaaactgatgttcgcatccgatattcatggctcgctacctgctaccgaacgcgtactggcgctgtttgctgaaagcggggtgcagtggttagtgattttgggtgatgtgctgaaccacgggccaagaaacgcgctgccgcaagggtacgcgcccgcgcaggtggcggagctgctgaatgaacacgcgtcgcgtattattgcggtacgtggcaactgtgacagcgaagtcgatcagatgctgctcaatttccccattacggccccctggcagcaagtattattgcctgaccagcggctgtttttgacccacggtcacctgttcgggccggataatttaccgccgctggcgcagggtgacgtgctggtctatggtcatactcatctgccggtggcgcagcggcagggtgacatttttcactttaatccgggctcggtgagtattcccaaagggggattcgacgccagttacggcatgctggaagagggtgttttgcgcgtaatggcactgaatgataagcggcttattgcacaggtcgcgattaatcccgaggacaacgaagtcatcgcccaggcgagtcgcgagcaaatgcgcgcgcaatgtttgcgccaccgcgcgacctatattgtcgtccatgatgggatgggcaagatcctggttcagcgccgtacggaaaccaaagattttatgccgggtatgctggacgccaccgcaggcggcgttgtgcaggctgatgaagtgttgctggattccgctcgccgcgaagccgaagaagagcttggtattgccggtgtcccgtttgctgaacatggcacattttattttgaagacgaacactgccgggtgtggggcggattgtttagctgtgtctctcatggcccgtttgccctgcaggaagaggaagtgagcgaagtctggtggatgacgccggaagagatcaccgcccgctgtgatgaattcactcaggattcgttaaaagcgctggcgctgtggatgagccctattcaactgacacccgatcagacctttgaatttctcctgaatgttgccattacccgtcctgtctttttatggggggcgccggggattggtaaaagtgccctggtgcgacgttttgctgatgaggtcggaatggagtgcgtctcgctactgggtagccagcttgcgccagaagacctgctgggtattccacaaattgacgggcagtgttcgcgattttatcccccggcaaatattgtccgtgacaaacccttcgttttattcctggatgagctgaacgcctcctcccatgaaattcagaaagctttttattcgttaattctggagcagcgtattggtgagtatcggctgccggagggcaccgtcgtcattggtgctgggaaccgtgctaaagatgcggccatcgtgaaaccgatgccctcggcgttgatcaaccgcatggtgcatgtccatctgcgcgccgaccatcgtcagtggctgcactgggctatcaatgaatcctccattcacccttgggttgtggattggcacatgctttctgatgcccttaaatcatttggtgagtctatcagtgatgagatgctggaagccttgatttatggtcttttatcgcctgcacatgcggcgagttttaaagggtttatcaaacagattcgccaaaaacataccgtttcctccattcttaaaggcgatgcgaactggccggacgatcctgccgatcgcgacattctctatttccttgcccaatctttccgtacccatctttataaagagctgcccgaaacggacaaggcattgcgtaatgagcacaagcagcttgcgatgcgagcgaaagactgtctgaaaacgctggcgcgaatcagcgtcgagattgcgcaatccgtgatgagtgaagacgaaaatggcaaaaagcttccggcctggtttttactggaggttgcacgcgatcttcctcgcctggcggtgagtgcgaaaaactggctggcaatcagcaatgatggctatttgtggcttaatgcaaagcgccatgcccggccagaacaatgggcgcggatggttgcccaggcgctggcggcgctggggaagagggtatttctgaatcgcttgcccgctggcagaccatctattgcggcgagcaacgtcattttgtccacgttgaaaaatcatcgcgctatcattccgtcaactgggcaggaactgctggcggatggcctgagcaatagcgtcagccaggcactcgaacaggtcgggggataccagccgcaacaggggcagaaatataagctgacgttagcgcagaaagcccgacaacagataatgaccctttatcccttgctgggcgcgctggcggcaggattcgacattgaagaagatgcgaaattatgcagccagtatgatatcgcggtggcagcgattgacgtcggtattggcaaaatttggatcaacccgacggcccgcttaaaccaggctgagatgctctttgtttttgcccatgagttgttacatgcagggttgaaccatgcatcccggcgccgcggacgcgacgcggaactgtggaatgtggcctgcgattttatcatcaacgactggcttattgagatgcaggttggcgcgccgccggagctgggattgctctatgacgcccagtttaaggggatgtcggcagaagaaatttatgactcgctcgccatggatatgcgccggtcacgtaaacttatcaccctcaggggcagggcggggggcgatatcctgggcgaggatggcgatccgcgatttacgaatgccgaggcctattgtcgtcgggccttgtatcaggggatggagcgttgtctgtatggtcagagccggggggcgctgcctgcgggattgattgaagaaatccgcagcctggcgcaaccgcctgtcccctgggatgtcgccctggctgagtggttcgatgagcatttcccgccgcccgagcgacgtcgtacctatgcgcgtccgtctcgccgtcagagtgcgacaccggatatcccccggccagctattcaagccccgagtgaagaagaaaggcattcgcgcgtttttggcgtcgttctggatacgtccggatcgatggatcctctgttgctgggcaaggcgcttggtgccatcgccagttattcactggcgcgcgaggtgtttgccgtgcgctttatttgttgtgatgcaaaagcttacgatcgcgggtgggtccagcctgaacaactccttcaccattttacgttgcaagggagaggcggtaccgtcttgcagccgggtattgaattactggatagcctggcgttgcgcggagattttccacgtggagggccattactgatcattaccgacgggttttgcgagaataatgtctcggtgaaaatggagcatgcctggttattgccacagaatcgtcggctgccctttgtcccgcgaggaaaagtgttttcgctaagctaa

SEQ ID NO: 9902 - DNA, 1038 bp, Zea mays
  Peptide Sequence Number=SeqID_51681
atgaccattggctgtgtcctgtgggtcattatgcatgccctgtttatgtcgatgggactggggatgcgtaactacccgctgatgctgctgttctatggtattcgcggcctggcctatccgatgtttatctactctttcatgttgatgctggttcaggtgctgccgcgcccgaatctggcggcggcgacaggctggttctgggccatgtattccatcggcattggcgtggtgggcagttacctgccaagcctgaccattccgatgtttggcgaaacggggacgctgtggtttgccatcgtctgggtcggctgtggtggcctggtggcgttctttagcctgcgcaatgtgccagtggaccgttcgcgggtgaatttgccgctgcgcgacaaaatgaccgagctttcccgcgcggcgaccattctgtttactaaccgcgatatcttctatgcctgcctgattcgtatcatcaatacgctgtcgctgtttggttttgcgattgtaatgccgctgctgtttgttgatcggctgggctttagcatctctgagtggctgcaaatctgggcggtgttcttcttcgtcaccattttcaccaatattttctgggggatcaccggggaatacattggctggatccgccaggtgcgctggttcggctgcctgggcatggccatctccagcctgacgttttactacctgccggtctatgccgggcataacttcgcggtggcgctgattccggcaatcatgctggggatttttgttgcggctttcgtgccgatgacggcggtcttcccgacgctggaaccgcatcacaaaggcgcggcggtctccatctacaacctctctgccgggatgagcaactttgtcgccccggcgattgcctccgcactgctaccgtttttcgatatcgtaggcgtggtatgggcctacaccgggctctatatcttcgccggtgtgctgacctttatcatcaaagtgccgcagcccaaacgcgtgcgccagggacgttcagcggaagaggtggaacagagcgtgtaa

SEQ ID NO: 9903 - DNA, 1461 bp, Zea mays
  Peptide Sequence Number=SeqID_51682
atgtacctgggcattgatattggcacctcagaattaaaagcgctgctcattgacggcgacggtgagattgtcgcctcggcgcatgccgcgctgacggtgcaacgtccgcatccgcactgggcggaacaggatccacaggcctggtggcaggcctgtggtcgggtggtcaccgaactgcgccagcagcattcgcagcagtgggcggctattcgcgccatcggtctgtcggggcagatgcacggtgcggtactgcttgataacgacggcaacgtgctgcgtccttgcattttatggaatgacacccgcagcgccgacgagtgcgcatggctgagtgagcatcatccggaaatgatgactatcagcggcaacatgattatgccggggtttaccgcgccgaagctggtgtgggtggcccgtcacgagccggacgtgttcagccgggtggcaaaagtactgctgccaaaagattacctgcgctggcgtttaaccggtgagtttgtcagcgacccgtccgacgcggcaggcaccctgtggctggatgtggaaaaacgcgactggtcagacgaactgcttgccatgactgacctcaaccgcagccagatgccgtcgctggtggaaggcagcgcgcccagcgggacgttgcgtgccgcgctggctaccgagtggggcttaagctcctcggtggtggtcgccgggggcgggggggataacgccacctctgccgtgggcgtcggcgcggtggcgccgggcgacgcgtttatctctctggggacgtccggggtgattttcgtggtcaacgatgcgctgcaggcagacccggactctggcgtacatgccttctgccatgcgctccccggacgctggcaccagatgagcgtgatgctgagcgccgccagttgtctgcgatggatctgtaatctgctttcggtcaccgaaagccagttgatggacgagattgcccaactgacggaagaggaactgaaacgcgcgccggtattcctgccttatctatcgggggagcgcacaccgcataacgatccgctggcggcagggagttttttcaatctgcgccatgaaaccagccgcgcgctgttgggttacgcagtgattgaaggcgtcaccttcgggctggccgatggactgaatgtgctgggtaacgcctcaatttgccagtgcagcctgacgggcggtggggcgagaagcccgctgtgggcgcaactgattgccgatgtgctgaacattccgatggttacgcatccggcaagttcttccggtgcgctgggtgctgcgcgtctggcctggctggcagatggcggcgatgaggcgaaagtctgtctgaaacccccggtggtcacccgttttacgccgcagcctgaacgcggccaatggctggcgaaacggctggcgctgttccggctgctctatcagcagcaacaggtcgcccgcacgttactgccttaa

SEQ ID NO: 9904 - DNA, 5331 bp, Zea mays
  Peptide Sequence Number=SeqID_51683
atgatcgtacaatcagccgctttggaacattggactattgttgcgcggataagagaaatgaaaaagagtatatatttgggttttgccagccttctgctggcgtctgccggggcaaatgctgtgagcttgagcggccaggtgggtgagcactacaccaacctcggtgtgggtatgggaacggaaaccagtggcctggcgttgagcggcaactgggcgcataacgatgatgatggcgatatcgccggtctgggcctgggttacaacattccgctggggccgtttatggggacggttggcggtaaaggcgtttaccttaacccgaatgccgggagcgaagggtatgcgctggccgttggtggtggtctggcatggcaggtgagcgacagcttccgtctctttggcgaatattattactccccggattccctctccagcggggttaacgactaccgtgaagcgaatgccggtgcgcgtctgaccattattcgtccgctcagtatcgaagccggttaccgttatgtcgagctgaccgagatgctgtcaaccggcgatgaagtcttgcacgggcaaatcgtggacaccaatgccgcctggctggcagattttttctttaatcaggggctaccgcttacccgacgtaataccgttggcgataacctcgacgacctggtggccattctgcgtgagcgcagccaacaggcggatattcttattgttaatggtggcctgggcccaaccagcgatgacctcagtgcgctggcggcggcaacggcgaagggcgaagcgctggtattgcatgaagagtggttgacgcagatggagcgctttttttccgagcgcggacgcgtcatggcgcccagcaaccgcaagcaggcggaaattcctgccagtgcggagctggtggataacccggtcggtaccgcctgtggttttgccgtacagcttaatcgctgcctgatgttctttacgcccggagtgccctcggagtttaaagtgatggtggaacatgaaattctgccgcgcattcgcgcacgctttacgcttcctgagccgcctgtttgcctgcgcctgacaacctttggccgttctgaaagcgatctggcgcaaaacctgtcgcatttgacgttacctgagggtgtagtgatgggctatcgctcctcaatgcccattattgaattgaaacttaccggtcctgctgagcatcgcgaggcgatggaagcgttatggccggaagtgaagcgggtggccggtgagagcctcattttcgaaggcaccgtcggtttgccggcgttgcttgccgggcggttgcgtgaacgtcaacttagcctgacgctgagtgaacagttcaccggcggcctggtggcgttgcaactttcacgtgcgggtgcgccgctgctggtcagcgaagttatcccttcgcaggatgaagcgttagtgcaaactgcacgttgggctgcggggctgcgcgatcgccatctggccgggctggcgctgaccgtcacgggactcgaagatgagcatctgaacttcgcgctggcgacgccggaaggactggagtccaatatgttggaatcaagcaaagtaccggcactcagccgggcaattgaaatccttaatctcatcgctcgtattgggccttgcagcgctgcggtaatcatcgaagagacaggcattcccaaaagcaccgcctatttaattttagcggaattaaagaaagcgcggttattgcgtattgatagcaatgacaactactgcttatggacaaagctcgttgaacttgccgggcatgctttgggaagaatggatctgcgcgagattgcccgtccccggctgactgaacttatggatgagaccggtctgctctgccatctcggcattattgatgacgcaaatgcctattacattctcaaaatagaatcctcctccaccatcagcgtgcgctcgcacgagggcaaaagtctttccctttatcgctccggcatagggaagtgtctgctggcctggcagccgcccgcgacgcgcgatgaaattatccgtcatttgcactgggaaaaagcgacgtcgtcgactatcgccaatgcccaacaattacacgatgagctggtgctgattcgttccagggggtggagctatgacaatggtgaagattaccccgatgtccgatgtgtcgctgcccccgtctttgatgcccgtaatgcgctaacggcagccatttcggtcgtgggaacccgactgcaaattaatgaggaaaaccgggattacctcgcagagaaaggggcaggcggcggtgattatcacgatcagggcgctcatcactggatagatgaccatatcgccactccaatgagcaaatacaaggcctatgaacaatcccggcagtctttcggtattaacgtgctgggaaccttaattgttgaagtggaagctgaaaatggccagacgggctttgctgtttccacggcaggcgagatgggctgctttatcgttgaaaagcatttaaaccgctttatcgagggtaaatgcgtcagcgatatcaagcttattcatgatcaaatgcttaattccacattgtattacgcagggtctggcgggctggttatgaatacgatttcctgtgtcgatctggccttgtgggatctgtttggcaaggttgtcgggttacccgtttataaattgctcggtggggcggtgcgtgacgaaatccagttttatgcgaccggcgcgcgcccagacctggctaaagagatggggtttattggcggcaaaatgccgacacattggggcccgcatgatggtgatgcgggtattcgcaaagatgcggcaatggttgctgaatatcgcgagaaatgcggtgaagatttctggctgatgctggattgctggatgagccaggatgttaattatgccaccaaattggcccatgcctgtgccccgtataatctgaaatggatcgaggagtgtctgccaccgcagcaatatgagggctatcgcgaacttaaacgtaatgctcctgctggcatgatggtcaccagcggtgagcatcacggtacgctgcaatcattccgtacgttatcggaaaccgggattgatatcatgcagcccgatgtcggctggtgcggcggcttaacgacgctggtggaaatcgccgcgatcgcaaaagcacgcgggcagcttgtcgtgccacatggttcttcggtttattcccatcacgcggttattaccttcactaacacgccatttagtgagtttttaatgaccagccccgactgctctacgctgcgtccgcaatttgatcccatcctggtggatgaaccggtgcctgtaaatggtcgcattcataagaatgcgctcgataaaccgggcttcggtgttgagcttaatcgcaactccctacatgaggtcattacgatgaataccagcttattggatagcgtggtaaagaaaaaccgcgcccgtttaatcccctttatgttgatgttatacgtcctggcatttcttgatcgttcgaatattggctttgcaaaagagacgtatcagatagacaccggccttagcaacgaagcctatgcgttgggggcggggatcttttttgtggtgtacgccttcctcggcgtgccggctaatctgttgatgcgtaagtttggcgcacgctactggattggagggacgaccctgttatggggatttctctccgcggcaatggcctgggctgataccgaagccaaatttctgcttgtccgcacgcttcttggggcggcggaagctggcttcttccctggcatgatttacctgacttctcaatggttcccacagcgcaatcgcgccagcattatggggcttttttacatgggggcgccattagctttgacgctggggtcaccgctgtccggcgctttacttgagatgcatggttttatggggcatccggggtggttctggatgttcttgattgaaggcctgctggctgtctctgcgggtatctttaccttcttctggctggacgatacgccagcgcaggcacggttcctcacgccgcaagagaagggcgttcttgaggcccagcttgccagcgaagaggagagtaaagtgacgtcacgtctgaccgatgcgctgcgtaatgggcgggtatggcaactggctatcatttatctgactatccaggtcgcggtatatggattgatttttttcctgccgacgcaagtggccgcattgctggggacaaaagtggggttcaccgcctctgtcgtcaccgctatcccctggattgccgccctgtttggtacctggcttattcctcgttattccgataagaccggtgaaagacgcaacattgctgcactgacgctgttagcggcgggcattggtattggcgtatctggcctggtttctcccgtgctggccattgttgccttatgcgtcgcggcggtgggatttattgccgtacaaccggttttctggaccatgccaacgcagcttctgtccggaacggcgctggcggcgggtattggctttgtgaatttgtttggcgcggtcggcggatttctggccccgatcattcgtgtcaaagccgaaaccctgtttgccagcggcgctgccgggcttctcacccttgctggcgtggcgattgccgcgacctccgggtatgactggttattgattgatggcgaacatgcgccgaatactattcaggatctctatcaccagttgcaggccattgcgccttacaccagccaggccgtcattcggcccgttgaggggagtcgtgttcttatcaaacaggtgctcgatattggtgcccgtacattattaattcccatggtggagagcgcagagcaggcgcaggatgtggtggcggccacgcgttacccgccacagggtgttcgcggcgtgggggcgagtgtcgcgcgcgccgcccgctgggggcgagtcgaaaattatatggcccgcgcgaatgaagagttgtgcttgttgattcaggttgaaagcaaagcggcgctggataaccttgatgccattttgcatgttgatggtattgatggggtctttatcggtcctgccgacctctccgcatcgttgggctatcctgacaacagtggtcatccggacgtgcaacgcgccattgaacaggccattaagcagatacgtgatgccgggaaagcggcgggttttctggcggtcgatccgctcatggcaaaaaaagtgctggagtggggggctaacttcgtggcggtcggtgtggacaccatgttgtataccaatgcgttagatgaacggctggcgatatttaaaggggccagaccttcggcatcagcaacgaagggcagttattaa

SEQ ID NO: 9905 - DNA, 3444 bp, Zea mays
  Peptide Sequence Number=SeqID_51684
atgcagtcaaataaccacaggccagcctgcgtcgggtgctgcaaattgagcaatatcgcggtcacattacgcgagcgggttggcacgcccgcagaggacctccaccactctgaattgaccgtcgctgatctttacgccctgcttaagctgcgctgtgaagtctttattgttgaacaaacctgcccgtaccttgatgtcgatggagatgacctggttggtcaaaaccgtcatctgctcggctggaaggaaaatcagctggtggcgtatgcgaggattctgaaaagtgaagacgatctggagcctgtagtgataggtcgggtgattgtcagtgagcaggttcgcggtgaaaaattgggttaccaactgatggaacgtgcggtagcttcctgccagcaacactggccgcagcacgcgctgtatctgggggcgcaggcccatctgcagcatttttatgcccgctttggttttgttccggtgactgatgtttatgacgaagatggcattttacacatcgttgcgctggagcagttacgcgagaagttatccggcattgatgccaactcacctggattctacgtttttgacgttgcctttgccctcaatgacgctttcgacccactgacttttttagccagccagccctgtttcccccaattctactggcagcaacgtagcggtgaagatgaagccgctgcgctggggcaggtgctgcgttttccctcactggcagaagcccggcatttcctcaaagataatcccgaacatgacttgcgtgtctgggggctgaatgcttttgaccctcaacaaggcgagctgttcctgccgcgtctcgaatggcgtcgggaaggggggcgggcatccttacgccttattgtcttaaatggcaacgcgcaacaaaacgatgtcgcgcaggcccggtcatttattgatgccctggtacgggcgaaatcgctgccagatgtgcagatggaattggtctcgcagcatcactttccgcaacaatcgggctgggaagcgctggtcacgcaggccacgcaggcgattacccgcggcgagatggataaagtcgtactcgcgcgtgccacggattaccatttctcccaaccggttaatgctgctgcagttatggcggcgagccgtcgtcttaaccaccattgctttcatttttttatcgcattcgatccccacaatgcgtttctggggtcatctcccgagcgcctgtggcgcagaaggggaacctcattgcgtaccgaagcgctggccggtaccgtcgccaatgatacagacgatacccgggctactgagcttggcgactggttaatgaatgacgataaaaaccagcgcgagaatatgctggtcgttgaagatatttgtcagagattacggcatgcaacctctacgctggatgtattgccaccgcaaattgttcgactgcgtaaagtgcagcatttgcgacgttgtatctggaccgagatgcatcataacgatgatgcacagtgcttaacgttgctccagccaacggcggcggtagccgggctcccccgcctggcggcgcgtgcgtttattacccagcatgaaccctttgagcgtgagtggtatgccggttcggcaggctatttgtcacttaaacaaagcgagttctgcgttgcattacgttgtgcaaaaatcagtgccacaatattgatactggacaaacttatgtcagtgagtgcttttaaccgacgctgggcggcggtgatccttgaagctttaacgcgccacggcgtgcgacatatttgtatcgcaccggggtcccgttccacgccgctgacgctggcggcggcagaaaattcgtcctttatccatcacacgcactttgatgaacgcggtttagggcatcttgcgctcggtctggcaaaagcaagcggcactccggtcgcggtgattgtcacctccggtaccgctgtggcgaatttatacccggcgctgatcgaagccagcctcaccggggaaaaattgatttttctgaccgctgacaggccgcctgaacttattgattgcggggccaaccaggcaatacgccagccggggatctttgcatcgcacccggcgcaatcactggcgctgccgcgtccatcacaggacatcccggcccgctggttgctctctgctatcgatcatctaatggcgtccgcgcagacggggccagtgcacatcaactgcccgtttgctgaaccgctgtacggtgaaatggatgatacggggcttacctggcagcaggcgcccggcgactggtggcaggacgacaaaccctggctgcgtgaagatttgcatagcggcagcgcgaaacaacgcgactggtttttctggcgtcagaaacgcggcgtggttgtggcgggtcgaatgagcgcgtcggaaggcaagctggttgccgcatgggcgaaaatgctcggttggccgcttattggcgatgtcctctcacaaaccgggcagccgctgccgtgcgccgacctgtggctgggcaatgctcgcgcggtgagtgaactgcaaacggcacaaattgttgttcaactgggtagcagtctgaccggtaagcggttgctccagtggcaggcgacctgcgagccgcaggagtactggctggtagattccgttgccgggcggcttgatccttcacatcaccgtggccgccgtctggtttccggtgttgccgagtggctggaactgcacccggcggaatcacgcgcgccctggtgtactgacattccacaattatcctctcaggcgtggcaggcggttgccagccaacgcgaaacctttggcgaagcgcaactggcgcatcgactggcgaagtatctgccggatcaggggcaactgttcctcggcaatagcctggtggtccgcctggtggatgcgctggggcagttacctgtcggttacccggtttacagcaaccgtggtgcgagcggtatcgatggcctgatttctactgccgcaggtgtacagcgcggcacggcgcggcccacgcttgcaatcgtcggtgacctgtctgccttgtacgatctgaatgcgctggcattactgcgccaggcttctgcgccgctggtgctgattgtggtcaataacaacggcgggcagatcttctcgctgttgccgacgccgcaaagcgagcgcgaacagttttatttaatgccgcagcatgtccattttgagcatgcggcggcgatgtttggcctgaaataccatcatccccaaaactgggatgagcttgaacaagcgctggcgggagcatggagtaaagcgggggcaacgctgattgagctggtggtgaaagacactgacggcgcgcatacgctgcaacagttgctcgcgcagccgaaggggctattgggtgtgatcgttgaaggaggggcaccctggcctgacggatgcgactgcacggcaggagcgcctgatatcagatag

SEQ ID NO: 9906 - DNA, 1791 bp, Zea mays
  Peptide Sequence Number=SeqID_51685
atgtcgtcatccgatggcggccagtcgcgcaagaggctcgtcgtcggcgtcctgtcggtgtgcctgctgatcgccatggtcatcgggacggtcgtgttcttcgtgagcgagaaggctggctacaactcggagctgagcaagcgcaacatgagcaagacgatgcgcagcgtggagctcttctgcgcgcccgcggactaccagggcacgtgccacgagacgctggaggcggcgctgtcgcggacggacccggatgagcacccgcacgccgccgcggccgccgcgatcaccgccgtggagcgcgcgctggcggaggggttcaaccggtcgtcggtgctggacgcggtgcggcagagcaacgacaccctggtgtgggaggccatccacgactgccggatgctcctggaggactgccgcggcaacgtggagcgcgcgctgtccagcatcgcgtggcgcggcgtcgacgggcccgcgcaggacctccaggcctggctcagcgcggtgatcacgttccaggggtcctgcgtcgacatgttccccaagggagaggtccgcgacgaggtgaataacaccatggagaaggcgcgagaggtatccagcaacgccctcgccatcatcaagcagggcgccgccctcgcctccatgctggaccttcacaccagcctcgacaagggcggccgtcagctggaggaaaaggagaaatccgcgtcatcatcgtcgtcgtccgtccccacgtgggtgcccagcgaggagcgaaagctgctcggcgccaagggcgagcggcgcagggccgcgctcacgcccaacgtgacggtggccaaggacggcagcggcgacttcaccaatatctcggccgcgctggacgccatgccggagaagtacagcggcaggtacttcatctacgtgaaggaaggcgtgtacgaggagacggtgaacatcaccggtaggatggccaacgtcaccatgtacggcgacgggtccaagaggtccatcgtgacgggcagcaagaacatcgtggacggcatcaggatgtggagaaccgccacttttgcggtggacggcgacagtttcatggcgatgaagctgggcatccggaacacggcgggggtggagaagcagcaagcgctggctctgcgggtgaagggcgacaaggccatcttcttcaactgccggatcgagggcaaccaggacacgctgttcgcgcaggcctaccgacagttctaccgcagctgcgtcatctccggcaccgtggatttcatcatgggcgacgcctcggccgtgttccagcgctgcctgctggtggtgcggaagccccggccgggacagccggccgtggtcaccgcgcaggcgcggcgtgaccaccagcagaccacgggcttcgtcatccaccggagccagatcgtcgccgacgagcagctcgccagcagcagcaacagcaacaagtccgggtccgcgccggtcaatacgtacctgggccggccgtggaaggagttcgcgaggacggtggtgatggagtccgtcattgacggattcgtgcaccgccaggggtacatgccctgggagggcaaggacaacctgggcacggccttcttcggagagttcaggaacggcggcgacggcgccaacgtcaccgggcggaaggagatgcaggggttccacgtgatgggcaaggacagggcgctgcagttcacggtggggcacttcttgcacggcgcggactggataccggagactgggcacgccgctgatcaaaacgtacgtcctacgagccgtgtgttacaacatacagggtag

SEQ ID NO: 9907 - DNA, 375 bp, Zea mays
  Peptide Sequence Number=SeqID_51686
atgggcaagagcaagaaaggcggaagttcgtcgtaccattccggcgacaagcggaagcgcgagccgacccctccctcggaggacttcggcgatttcgagtactcggaggggatcgccgccgaggtgtggacatacatccgggtcgtcgagcgctccgggctcgagggctcggatgagtcggaggtctcctcggacgaggagaactcctctgacttgtccgaggaggagagcggcggtgatggcgacgacgagggcgatggcaacgacggaggcgacattgatggtgatggcgacggcggccagggcgacggcaagggcgacgacaagagcggcaacggcaacagcaaggccagtggcaaagcgccactggcttag

SEQ ID NO: 9908 - DNA, 210 bp, Zea mays
  Peptide Sequence Number=SeqID_51687
atggctgggaaaatgacacgtgtcctcgcgctagacgtagcaatacaagcaaacatggggctctggcgcaagtttccacagacacagagggttgccgcattggacggcgggttaattcctagggtttctagggcctcttctgcaaaccggttaagtgaaggggtacgggcgaaactgaccgttggatccaaatctcgcggtcaagattaa

SEQ ID NO: 9909 - DNA, 522 bp, Zea mays
  Peptide Sequence Number=SeqID_51688
atggcgcctcctgttgacgtggcgggcgacgtgggggttcctccgaagccgagattgagtctgccttttgttgctgtggccgagcccgagccaaggggtcgggcgaggcggaagtcgttcggccgaggccagggcggagtccgagccctggggtcgggcggagcggagttcgccgtcttccgggtcttagcccgagtccgagccctggggtcgggcggagcggagttcgccgtcttccgggtcttagcccgagtccgagccctggggtcgggcggagcggagttcgccgtcttccgggtcttagcccgagtccgagccctggggtcgggcggagcggagttcgccgtcttccgggtcttagcccgagtccgagccctggggtcgggcggagcggagttcgccgtggcgcctttggcaaggcctgtctgcctgtcagactcactctatcgagtggcactgcagtcggagtggcgcaggcggcgctgtccttctgtcagactggctagtggagtggtggagtga

SEQ ID NO: 9910 - DNA, 399 bp, Zea mays
  Peptide Sequence Number=SeqID_51689
atggaggccgccgcgcccgacagggccggcaaggcttcccccgacccccgaggagcccgactggccgcccaagctttgcctcctcgcgccgccgccagctacgggacggacgatccgcagttcctcagctcgatcatcggggacgcggccgcccctcccccgccccccgccgatgtcgccgctcgcgcagaagcggaagggggatgccgcccaagaggaaagacggcgcgggcgcggtggtaccggcctggcccgccaggcaaagggaggacgaggaggaggtcgtctgctttcatctgtttcgacgggggcaacctcgtcgtctgcgatcggagggggggtgccccgtgccgcgctctctcctccctctctgttgactgctgcaccgcgtcgaggagg

SEQ ID NO: 9911 - DNA, 192 bp, Zea mays
  Peptide Sequence Number=SeqID_51690
atgggaggggcgtgcagagcagctgctcggccatggagggaagctcggctgctcaagctacgccgatgccatgggaggaaccttcggacatgggatgaagttgtacatgaaatgaagagcgcggttcgggagaaggatgaaccagtgccgaagctacccgtgaaaaagctttggcttagcgatggaaaatga

SEQ ID NO: 9912 - DNA, 240 bp, Zea mays
  Peptide Sequence Number=SeqID_51691
atggggccagccagccccgggggcagcgcctctgctcctaagaaacccaagagcgacgagttcgcggacttgatttttagcggtcacaccagactgtctggtgtgcaccggacaatcattgttcactacctggtgcactatcagtctaacggcaagctgtcagaactagtcgttggagccgaccattggcgcaccagactgtctatgcgcccatgcgcagagagctacaacaatggctag

SEQ ID NO: 9913 - DNA, 111 bp, Zea mays
  Peptide Sequence Number=SeqID_51692
atggctaggctggcggtggccacgagggcgttctccgcttcggcctccaacggcgacactggcgacggggtcggcgatagcatggggaggaagaccacggcgacatggtag

SEQ ID NO: 9914 - DNA, 435 bp, Zea mays
  Peptide Sequence Number=SeqID_51693
atggctagatggcaaatcctgctctctgagtttgatattgtatatgtaagtcagaaggccatcaaggggagtgcgatagcagatttcttggctagcagagctctggaagattataagcctctggactttgatttcccgaatgaagatttgatgtatgtggcaaatgttgaagaggatccccgagaaaatcactcttggagattaaactttgatggagcatcgaatgtactaggcaatggaattggggtagtcctggtgtctccgaatgaagattatcatcatttcaccagtaaattagactttgattacactaataacatggctgagtatgaagcctgcatcatgggtatacgggcagccatagagcggaaaatcaagacattagaggtgtacggagactcagccttggtaatataccagctaagaggggaatga

SEQ ID NO: 9915 - DNA, 1392 bp, Zea mays
  Peptide Sequence Number=SeqID_51694
atggctcctaggaaggaagtatttgagggagtggaatggaggataagggtggctgctgatggctcatcagaggcattggttcccgctactgggcttgcaagaaaggcctggcttggaataaaaggtctaatttcaggttttgctttgaaagtgaggatgtttgtgaagaaagcatgggacgtggggactaatgatcctagaaaagtgatccattgcattaaagtaggactggcactcgcaattgtatcattgttctacttcatgaggcctttgtatgatggtgttggaggcaatgctatgtgggctgttatgacagttgtggtagtatttgagccaactgttgcttcggcagcaaccttctctcgacttattccatcagtaaagtcccggtttgattatggtgccctgatcttcatactcaccttcagcttcgttgcagtatcaggctatagagtggataaattgtttgagctggcccatcatagaatatccaccattatcattggatcttccttgtgcatacttgtaatcatgcttgtctgccccatttggtctggtcaggagctccatagcctgatagttcgtaacatggacaaactcgcagattccctggacggttgtgtaacacagtattttaatcagagtggggaaggcaccaacagcaaggaagaggctactgataataaattgcaaggctacaagtgcgtgctaagctccaaggcatccgaagaatctatggcaaattttggtaggtgggagccttcccatggccagttcaacttccgtcatccgtggaaacaatacctaaaaatcggtgcatccatgcgcagttgtgcttactgcatagaggctctcaacagttgcataaaatcagaaaatcaggctgccatcacatgttttaaacaggcagctaaattaataaagcagcatcttggcagtggttgcttgaaagtgagctctagctcttcaaatgtcataagggagcttgcagaaacggtgaagacgatgaagaagaaatcatcaacgacagatttgttggcggaggaaatgaagagcgcagtgcaagggctccagaatgacttaaaaaagattcctcatttgctgaatccatcagcaataccgggaaacaaaactttagagacagcctgctcggaagcaacaacacccacagtcactctgatggaactcgtaccagtggtgactttggcttctatactgattgaaatttctgggcggattgaagccctatttgacgctgtggaagaactagccaagctagctgatttcggaatcaatgatgacaagtccaagcacagcaaaatgactgataaaactgtatcagatgcaaagcagcaaactgagggaaccatgaaggctcttcaaagggtctga

SEQ ID NO: 9916 - DNA, 1791 bp, Zea mays
  Peptide Sequence Number=SeqID_51695
atggaagaatccgaagatgagataagagctcctctcatatctaaggatgaagatgatagcaatctatcatcatcaaggtcagaggccttggcatcaaaatctgaagcagagatcaaagaagtggaagaagaagaaaattcaccgttcttttggtaccgcacagaacccttgacaatcacggccatctcagcccagattgcagtggttcctcttggccaattgatggcagccaagataacaaaacgtgttttcttcaaaggaagccgctgggaattcaccttgaatccagggcccttcaatgtcaaagaacatgttcttattacaatctttgccaactctggagctggcagcgtttatgccatccatgttgtgactgttgtgaaggtgttttacaagcagcacattactttctttgtctccttgattgtcatcctaactactcaggtgttggggttcggatgggctggtatattcaggaggtacctagtggaaccagcagctatgtggtggcctgcaaatcttgttcaagtttctctcttcagggctctccacgagaaggaagagagggccaagggtggggtgaccagaacccaattcttcctaattgccttcatttgcagttttgcttactatgtcttccctggctaccttttccaaatgctaacttccctctcttggatatgctggatattccccaaatctgtggtagcccaacaactcggttccggcctttacgggttaggaataggtgctattggtttggactggtctaccatctcctcttatcttggtagcccacttgcaagcccatggtttgccactgcaaatgttgctgcaggatatatcttcgtcatgtatgttttgactcccatctgctactggcttaatgtctactccgccaaaaccttccccattttctccgatactctcttcacctccacaggccaagaatacaatatcactgctatcattgattccaattttcaccttgatgttgccgcttatgagaaagaaggacctctataccttagcacattttttgcaatgacttatggtgttggtttcgctgcactaactgccacaatagttcatgttgggctcttccatggaagacaccaggccattaccttcctgcaagacttcaagcttggtcactatatgaaaattccacctagaacaatgttcatggcacagatcgtgggaaccctcattgcttgttttgtgtacctgggaactgcctggtggctgatggagaacatccctgatatttgcgacacaacggcctccaacagcgtgtggacatgtccaagtgataccgtgttttatgatgcttctgtcatctggggtttaatagcaccccgcagaattttcggggacttgggaacttacgaggcagtcaattggttcttccttggaggagcagtggctcctctacttgtctggttggcctccaaggccttccctagtcaagaatggatcaggctcatcaacatgccagtcctgataggtgcgacaggcatgatgccaccagctactgcagtcaactatactacatggatcattgttggcttcctgtctggcttcgtgccgcgccgcttcgacatcggagcccccaaccatccggttccgatcggaaccaacgaaggattcggctgcgggtttaaccaggtacagcgtacggagactgacgtggcggtacggaggtggccgtggctggggagagcggcgctatgtggaggggagcctgcgggctgcggtgctgaaaattctggaaaccctaggggcttctga

SEQ ID NO: 9917 - DNA, 551 bp, Zea mays
  Peptide Sequence Number=SeqID_51696
ggtttagggattgtctggatgagaagtcaaaggctagtctggtgcaaattaaaggtcgattttcagtaacatcagaaaatttagatcttgtaaagtttcagacttcacctatcagaaagtctgctagcgtaggggattggatacttgaatcaaaacaagtggctatcaatcatgcccctaaggatttgaccaatggtagtgtgtccacatcgattcttacaactcaccttcaaaatcttttccagcgaacctcactgcaacaggatcttatcgtgaatttgttgaatagcttgcagccagctgaggttgtagatgcctcacaaaatggaaagttgcctgttctacctcgttccgagagcaatgggaatgttgaacttgaaacagcagcttctgagagggagcgtctactgctcggcaagatcttagagctacaatctagaatgatgaatttgagggatgaattgaatgctgaaaagtggagatatgaagagttgcaacaagaactaaggctcatggctggtgcggaagagaatggagatgatgctgcgtga

SEQ ID NO: 9918 - DNA, 327 bp, Zea mays
  Peptide Sequence Number=SeqID_51697
atgacaagggtgagggtattaacgggcaactacacaacaaggatgtattttagacaaaacttgccatatgtcaaagaagggggagcagtcaatgatgaagtaggtggggcattatcctcgaacatgaatggaaaagaggaggttttgaagggtaggttcaaagaaagtgtgaaggtaataatggacagggatgtagaaaagaaggtaaataggcataagacaaaggatataagtaccataaaggatggagttaagataggacttgcaaatggaaaaggagagggaacgtccaagggccagatatgtaaattgacactctccaagtag

SEQ ID NO: 9919 - DNA, 330 bp, Zea mays
  Peptide Sequence Number=SeqID_51698
atggccggccaaggtcagacgacgctcgtccatgtagaagggcggtccctgcgtgcagtggtcacggcggcgagcaattcgcccaccgcaccaacgcctgaccccaatcgcaggcgcgaccggcttccttggaagattacaaccccgcttggccacccgccaaggcagaactgcccgcaccgaaggggttcaccgacggcgcaacagattcttcctggcggcgtcaattccttcccccggctctctcactctccgcaacggtcgggttcacgaggttctaccacggagtactgggggaatagggaggcacctagggggttcttatccaag

SEQ ID NO: 9920 - DNA, 606 bp, Zea mays
  Peptide Sequence Number=SeqID_51699
atggctggccacaccgactaccacgcagggcgagccgcgggctgccgcgccaggcagctggggcatgctggccacgtgcaagggctagggccgaccgagcagggccacgggccgcgccggctacggactggcagccatggctgcacgccatggagaggcaccggctcgccgtcgagcctgcccgaccagggagatagagggaggggtgaaaggagcgggggctggcggttgcgggaattagggagaggaacgcgtcatggggaagcagggagaaaagatgggaaagggagagagatggatggtggtttccatagcaccgccacaaggcacgacgtgcggcttgccttgcccacacgcgctgggctggccacgcggacagcgcaaggagagggggccgcgacgttgggccaggcgcgctgccagggcggaaatggggttgggccacgcagctcggtgggccgattggggcacacgcgaggcgggggtgggctgcgcgcgcgcctacgaggggtgacgggtgggccgcggttgggccgtgcggctgcacgcgggagtgagccgagggtggggaaaatggcacgctgtcggatgggccagggagcgtga

SEQ ID NO: 9921 - DNA, 138 bp, Zea mays
  Peptide Sequence Number=SeqID_51700
atgacctctgccgcctgcgtgcgtggccagggcagctccgaccacctccgatgccgacccgcacaccaacatgaccgccgtaacctcctcgacgtcactaaccaccccgctggagctctactaccgccgagaacttaa

SEQ ID NO: 9922 - DNA, 231 bp, Zea mays
  Peptide Sequence Number=SeqID_51701
atggcgaacggcgccaggacgagcttcagcgaacctgtatcggccaagacacgcaatgtggccatggaggaagaaaggggtggaggggcttaccggcggcgagactgctccgatgaggtggtcgaggatgtaggagaggtcctgagggtcacgacgatgtgctggtcaccgttgggaatggtcggagttggccggtccatgtgcacaggcggagatgctcatcggcgatga

SEQ ID NO: 9923 - DNA, 444 bp, Zea mays
  Peptide Sequence Number=SeqID_51702
atgtcggtctttccgcacggaccgcgctcgcctcgcgctgacgctcgccggtggtctcggcatccgtgcaacgaccgtggggcgttccctgagtataagtacgtggcctccgactccctcctcacctttcccctcgactcttccctccgcaccgtcaccagaaaacctgcgcgcggcgagagaaattgccgctgcggccgtcgacggcgtgccccatcttggtcgccgtggttgaccttagtaccgaccggaaaagcttctgcgggtctctacggtggtgaccgaagacctggattggagaaggggccttgggcgacaccggaattccacgccggcgctcggcgtccgcctctgctcgtggacggccgcgactacctcacgatagctgaagagaccctagaagacttaagaatcaacccgccgtcccatgctacagccctctga

SEQ ID NO: 9924 - DNA, 252 bp, Zea mays
  Peptide Sequence Number=SeqID_51703
atgaagctgtggaaggagacttccaggagtttcaagactacgacgagttctaggcgtgggttagcggcaacccccagtcggctgcctgtgaaggccgcgtttatctacgtttcttttccgcactttgatttattcccaccggcggcgatccccgccgcggaactccgccccctccccgtgggcagccccctcccaaccctctccggccaaattgagcctactattagaatcgccagcctccacccgtgctag

SEQ ID NO: 9925 - DNA, 402 bp, Zea mays
  Peptide Sequence Number=SeqID_51704
atgggcttcaggaacgtccggtgctggacgaggcagaaactggagacaagaaacggaagaacgacgactgtttgcatctggtccatcatcaggtccgagcggccgcgggaagggagtctgaggaacggcgccatcatcaggtccgagcggccgagcgccaggagctgcctcgccgacgagagccacatccgcctggttcccatctggtcgagttttggttcccatcggaaccagagcgatgagcatgaaccagatgcagtcgccatcgacaccgcgcccgcctgtcgcgtttcggacgttggaggatcgatgggagcgcccctctggctgcagctccctcccggggcgccctcctcctggagctcgccgtgggcgactgcacgccgccgccgccccgcctag

SEQ ID NO: 9926 - DNA, 315 bp, Zea mays
  Peptide Sequence Number=SeqID_51705
atgcgaggcaatgctagactctggagaaggtggccccccggagcgagctacgatggctgtgtccaagctagaagccggcttaggatcctctccctcgatatccacctcttcatctgcttccatgtcctgatgcatctcctagtgatgcatgtccaggtgctcgtttgcctcctcgagctattgctgggtattttggagctggttttccagaacctcaatggtgttgttcctttcttccacttcctctacaagttcatggattcgggtacccatctactcagtctagagatccttctccaccaacttggtagatag

SEQ ID NO: 9927 - DNA, 360 bp, Zea mays
  Peptide Sequence Number=SeqID_51706
atggtcaagcgaccgtcgtcgaggtatgcatcgtccgccgtgatcgcgacacgctatgaccctttaaccacgttgcactacatcgccttagcatgtctattcgtcgccggtggtcttgccacgtcaagcacccaacacacccacccgtgcctccgattatccaccagagagccccaatttgagacttctcccaaatcggtccagagcaccgttctgagtgagctcgctgtggcccaacactctacaggggtcgaattaggtgtcaacctcttcagagcaccggtcattgcgtatcttggctggtacaggctcgccggagccactgctccgccgttcagcatcgtggacctggcgttgtga

SEQ ID NO: 9928 - DNA, 231 bp, Zea mays
  Peptide Sequence Number=SeqID_51707
atggccatgatgggttcaacatcggaaaagatgtacctctgccagataccaaactttgggtttgaaatgataaagctgagactgggcgggcttgttgatcgaggactctttaactggtcacatgcctcatcatgggtgaagaagcagcaaacttttgttgcttctgttccaaggtggtgcccaaagaagaaaatcaagactaaagctgctggaggaagggtactccgttaa

SEQ ID NO: 9929 - DNA, 387 bp, Zea mays
  Peptide Sequence Number=SeqID_51708
atgtggagcctcgcagccagatccgacagtggcggctttaaagaggtgagacgggctctggtccacccgatagcgatcggacgcgctagatcggcccaaccgaaccggcactcaaaccctagtcccagctgccccagggaaatcaatggccagtggccatcttctcccaccgcacaccagggcacaacggcgctctcgcgcgacagtggtgccatcgtcggcaactatgggatcaatgcccaagcgtaccaaactgtctaccgatacttgctaaacgcagctaaggacataatgaactcgatgagggcttcttaccaatggatcgcaagacgtaggagcacagaccacggtggagggcggctccgcattaacgataagctctggtga

SEQ ID NO: 9930 - DNA, 264 bp, Zea mays
  Peptide Sequence Number=SeqID_51709
atggcgagagtagcgtgtaccctccgtggcaagaggctggacggtggttatagttttgtggtgctgttgatggtgttaagcgccggtgggctcggccttcttgttataagtggtttattcggggtccttgggacactcgaacagatcctattaagttatctggtgcacatgcatagtcgtatgaggtctttgggacaagcgcaggtgcatgtgggcccaataacttgggaggttctgccacagctggtatcggagctggattaa

SEQ ID NO: 9931 - DNA, 300 bp, Zea mays
  Peptide Sequence Number=SeqID_51710
atgtccattaaaaactatttttgccaaaatcttagaaaaataagaaaggtaatgaaaaataataaccagaggatgaccatatttttccaagtataccgaagtgataaagaacataggaaaaatacagagaaccctggaccagagatagtccaagattgcaacctcgctgacagagagtacgtgctcattcccgagcaaggagctgcccaagaggaagtccaggagccagctcccgagcatgccatagaggatcttcccgcagccccagcatttgaaggcaagccccggttttatgcataa

SEQ ID NO: 9932 - DNA, 363 bp, Zea mays
  Peptide Sequence Number=SeqID_51711
atggtgcctatcgacgaactttgcttcatcggtttgtcgccttcggttcggcacatgtgtggccgccgaatgcgttcgctgcttaaccccgtggtgttagagctcatgatctcactgtcgtcagagttctcactggattcgtgtcctcgccagctcgcaccagactcaatctcgtcgtcgttcggtcaccccacctcgatgtcggtccctacgtgttgtctccgacttatgctcgcgccgacaaaagaatcccaagaagatgtggagaagcaagcccctggtcgatgtcccaagtgctcgacagaaagctcgaacaagtcatcgatcgtcatcctcgtccacgccaagatctgggaagattag

SEQ ID NO: 9933 - DNA, 171 bp, Zea mays
  Peptide Sequence Number=SeqID_51712
atggccatgatgggttcaacatcacaaaagatgtacctctgccaggtaccaaactttgggtttgaaatgattaaggtgaggaagcaacaaacttttattgcttctgttcaaaggtggtacctaaagatgagcaccaagactagagctgggggagggaaggccctccgttaa

SEQ ID NO: 9934 - DNA, 636 bp, Zea mays
  Peptide Sequence Number=SeqID_51713
atgtcaccaggccgttgggttccgaccgttggagctctgacgtgtgggcccgcctggctgtccggtggtgcaccagacaagtcttgtagactgtccgctaagattcatcaccttacgtcaaacgccaaggtggcactagcgaagtttgtgtgggcagcgacttcgtatggcggggagcgcttggtcgagtgctacatcgtgttccaacagtttaagctaaagaagggggataaaaatgaagacgcccttcagcgtgcgactaggactagcagtggttgcgacttggtggaagagttcattgcatgtggggtgtggccgcttgcgcatggctgggatgtgggtgcggtaaagttgcgtctgatgccctttttggaaaatcggatggtgatgagcctcgccttcgctatcgagctgcgtgggcgagattcagctgcctttgtcagagaagtagaggcggaggcggtgaggattgatggaaaatactcagcaaggacaaagatgacaagaagctgggacattcgaggttcaaatgtcaagttaaactatgtgtttgagctgaatggccttcactatggcatgtatcttgaggagggctctactgaagctaggatgaacgagggaagaaaaaaatggtga

SEQ ID NO: 9935 - DNA, 132 bp, Zea mays
  Peptide Sequence Number=SeqID_51714
atgaagagcatgcacacctaccatgagagggtgaaagctaccacgcgcgccggcatggacagggcacatacactttttgttgatgtatatcatgatctaggcgcagagacagcccccttcgacaagcgctga

SEQ ID NO: 9936 - DNA, 489 bp, Zea mays
  Peptide Sequence Number=SeqID_51715
atgtgccgccgccaccaccaccaccagcatgtcctcgttgccgccattgccctcatggctgctttcatcctccaaggcgtttcctccacgaccaacttcaccggatatgcggccacgacagcttacgatgtcctcgagctgaacaacatgccacgaggtcttctaccgctcggtgtacagtccttcgtgctcgacgccggtggcgctttggagttgaccctccccggcgagtgcaacttctttgtcgaggtcgccggaaagcaaatcaaatttcggttcgacagcagcgtcagcggcgccatcaggtctggatccatcagccgcttgtccggtgcgtggatccaagtggagtttgcactggtcgggttcaaccaggtcagccgcgcgggtgaccagcttaactttcggctggagaagaagtccacccagtcattccctaccagtgccttcgcggaaagcgtaccatgcagcggccttctggctccctga

SEQ ID NO: 9937 - DNA, 2007 bp, Zea mays
  Peptide Sequence Number=SeqID_51716
atgggggcgcccgcgcgaaggcatgggacgtacaccgtcgcatcatggaggatgccgaagccgccgcacccccccgcccttaaccgggcccagtcaaatcctcgcagtagcaacaatcttgctccgcaccatgccagaacccctctaccaccgaaggacggcgcatccacgacgaactttgagagctcttggaatgcgccgctgtccagtaggccgagagttcagcatctcgactttaggagcctgcctcgagtcattaagtgggaccctctggttttgaaagggaggccttggtctaccccgggcccactaaagagagggcaactacggtgcgtgatcgcctccaggacaaccgtctcgatgggcgcattcgacaccacgaccgacttcacgagacatatcactaataccctcggcagggaggccgttataacaacacggaggattggaacccctctcccaaaccaccggggcacgtacgttcgcatgggaaacttatgggatctccgaagctgccggcaaaagcaagacaagagcctccgtgagtacatttgccggttctcaaagcagcacattgagctctccaatgtcaccgactctgacgtcatcggggcatcccttactggtacctcctatcgggatttgtcgaggccctctccacaaggacaagggcgacgggaagcgaaaagagggcaccccccaaagaagggcaggaagaagaaggcgcagcagggtctacatgaggccctcgccactgagcttatcaccgcggccgagaagccgaccccaatctatcgagattggtcgaaccacaccatcaccttcgaccgagacgaccatccgaactacatgcccaaccctaggaggtacccgctcatcatagaccccatcatcggcaacacacgcctcacgaaggaggtcctcacgttcgaagtggtggggttccgaggcacctaccacgccatgctcgggaggccatgctacaccaagttcaaggccgtctcaaactacacatacttgaagctgaagaggctaggaccagtaggtgtgatcaccatcggcccaacatatcgtcacgcctacgagtgtgacatcaagtgcgtcgaatacatcaaggcgatcgtcaactccgaggcgctcattgccgacttggagaacctcgctggagaggttcctgacccaagaagcatgccgacaactttgagccggtcgaagccacgaagattgtccccctcgatcccaacgactctggcaaaaagtctctcgaacatgctgggcataccgagggaagtcaccgagcactccttggatattcaagccaactctaggccggtgaggcagtacctacgaatgttcgatgaggagaagtgtagggacatcggggaggacatccacaagcttttagcgaccggattcatcaaggaagtcttccatcccgagtggttagctaatcctgtactagttaggaaaaagggggatggaggatgctcgacagttgaggcctttgttgatgatatagtggtcaaaacaaggaaagccgatagcctcatcgccgacctggaaaccatctttgcttgtctacgagctaagagcgttaggctcaaccccgagaagtgtatatttggggtccctcgaggcatgcttctggggttcatagtctcgaaacaaggaatcgaggccaataaggagaaggaaaatcgagcacttcatttggacgctcgaagccaaaaagccctcaagaacctcaagaaactcctttccaacacacccattctggtgcctccctccgaaggggagcccctcttactctatgtagtcgtggccacccaggtggtcagcgccgagatcgtagttgagagaaaggaggaaggacatatcttgcagtacatcatacggctccacttcgttgcatccaacaacgtggctgagtatgaggccttgatcaacggcttgcgcatcaccactgaactaggagtcaggcgcctcgatgtgcgaggagactcctag

SEQ ID NO: 9938 - DNA, 366 bp, Zea mays
  Peptide Sequence Number=SeqID_51717
atgcctcacgggagttaccccggcccgcccgagaccttctttccgacgttctcccctctccgccctcaaattcgtggcctcttccccaccattgagtttgtcgtggcgttctctccctcgctgtccaactccggcgaccccggagccaccctagctcgcgcctgccccaaatccggcgacctcaccgccgcggagaggagcagcaccgcccgcatccgttcgcccctccccggtctgatcccctccgtccggtcttcatcgcacgacccagatcatgggataccgctttgcgcacgcacgcatgacgccctggcccgcctgttagcgcccaagtccccaggcgctgggcctgctcggtccctataa

SEQ ID NO: 9939 - DNA, 555 bp, Zea mays
  Peptide Sequence Number=SeqID_51718
atggcatggggagctattacttcccatgccagaggaggtggtaccaggagagttgacgtaggtgctgctggaagctctccgggtgtggtgctgatgttggctaggtccctcgaaagggactctacgtcgtcagtcatcctaggagttttgccagggcatggggtgcaatgggtggcacgattgcggttgtttcgtctagcctcctacgacgagaaggacagcgacgggtgctcagacgcttcagagggacaggtatgtgcattaaaagcgggtgtcccccattggccttcgggcgcactttgtcctcctcgtctgagatgggcttgggcgagacggatatggcggctccagggcgaggtgccctcgagcgaggtggagacaaaggacctgagttgtgagaggctcgggcgagacagagatttgcccgaggcggtgattttggagggccctcggggagggggctcggttaggatggcgcttttatggggaagacccctaaggtgggcctcgggtgaggaggtgacctggcctcttgcctttggggattacgtctag

SEQ ID NO: 9940 - DNA, 366 bp, Zea mays
  Peptide Sequence Number=SeqID_51719
atggtgaccgagtatgcaggagttcttcccaaaatacaacttgaagtgcggcaggtgtatgaaagatttgatgcatcttctattgctgaagctgacggtgctcgttttgattatttctgcaacaaggtatatccaaagatccaggacttggatgagatcaggggaacgaagcatctactagtctattcgttgcctgggagaaaagaattttatccggagcttgtaaatatgctgggcgaatcagaaaaccgcaagtgcaacgtcctcttctctcgtctagaccttctcaagttggagcggatcgttgggaagtcttcggcgcgaaggttgatttcctcggagaagggcatgtttgtcttctgctga

SEQ ID NO: 9941 - DNA, 777 bp, Zea mays
  Peptide Sequence Number=SeqID_51720
atgagcgggatttgtaaatacggtgaacaggcctcacctaacgtcatgggcatagggcagcggaggacagtgacgcgcgtcgaggtcaacaggggatctacagcaccacctaatctggctaacggcgacggcgaatttggacaccctagatctacagcggcgcacgggcccgtaccccggtggcgctgctggagaagcggaggcggcgcactcacctggttaacggcgaagcgccggccgcagccccgcgccgtcctcggggcgcgtcgctccgtcgcggcagatccggtcgcccgcgctgctcgtcgaagagccggtccgagccgtccagatcgcggcacgaccctcggggcagccgtagaccaagccatgccctctgcccaccgccacgacggtcgtcctcgcgcgcggacgctgatgcgtcgccactggaggccgtgtcgcagagacgacatggacgttccgggtacggccgctcagtcgcggtgtgggctcactggtggagagagtcgcggttggaagccgtcgcacggaatcactgggggagagaagacggctcagccgcggtgtcctcccagccgcgcccactgcgggcccacatgtaccgcgacgcacgcgtcggtgcgtaggcggcggaggtcgcgggaaacgcgctccgagcagcaataccatttatgtacggtactagcattcgacagcaatccatcccgaggtctcatcagatatttcggtactaacagtggcggatccaagattgattcaagtgggggctactaa

SEQ ID NO: 9942 - DNA, 459 bp, Zea mays
  Peptide Sequence Number=SeqID_51721
atggcagcgggcgggggtgctgcctgcgctccgcaaccagacgaaacggcgcgcgtggagcggttcagacgttgtcctggtggagatggcaagtccgttttctgtctagagggcaaagcatcacaagaccatcctactatggataacaataggggtgcgtcttccgcgatgctcgcgcccacctgctctcccgctggcacaccgcacactttgagcaaccccaagggcctgtgcgccgtgtcacagcagcccgggtccattgtgcttgtttgccctggtgtccagaaggggcaggttagggtggaacactataaggcaaggaagaccaagtttatcaatgcacacacttcctgcatcgcgtgctttgcgttgtcgcaaaatgggaggctcattgcgactgctagcaccaaggggactcttgttagaatctacaatgcagctgaaggcaatctcctgtag

SEQ ID NO: 9943 - DNA, 1353 bp, Zea mays
  Peptide Sequence Number=SeqID_51722
atggccaccccgggggccacctgcgccatctcctccgcgctggcccgcccgccggcgctcctcgactacgccgccatccacgcgtgcctgctccgcggcgacgcgcggcgctccctcccgctcctcgcgctgctcctcctcctccacttccgcctcctcgccgccgcggcctcggcgcgcttcaccccggcggtgtcccgcctcgccgcgcgcctgcggctgtcgccgtcgatggcagccgtcacgcttctcgctctcggcaacggcgcgcccgacgcgttcgcgtccgccgcggcgctcggggggccccggggcatgcccagggccgggctcgccgccgtgctctccgcgggcgccttcgtctccgctttcgtcgtcggggccgtcgcgctcgtcgccgcacccttcgccgtcccgccgccgtcgttcgcgcgcgacgtcttcttctacctcctcgccgcgtccgcgctgttctacgtctacctcagcgccgagatcttcctctggcaggccgtcgggttcgtgctcttctatgccttctttcgtggggctagtcttctacatggatttggggagcgcggacgggaagaaggcgaagtttgggagtggcccatcgcactcgttctgaagctcacaataccatcaacccttccttccgagtggagcaaagtttacatcagcgcaaacatcggcctgtgccctctcctaatcctgtactccttcagctcgttcatccctctagacacccgaatagtgttcctcctcccgcaagtccgcttccctctatggtccgtcgtgctcttcgccagcctgtgcctagccctctcccactacctcctcgagaaagaagccccagagacagagaccatcgcaagcaccatcatctccttcatcatgagcgtcttctggatctcgaccacggccggagagctcctgagctgcctcgccgcggtcggagccatcatggacttccctcccgccattctcggcatgacggtcctggcgtgggggaactccgtgggcgacctcgtcgcggacgtggcgctggccagggctgggcagcctacgatcgccgtcgccggctgcttcgctggccccatgttcaacatgctggtcgggctgggaaccgcccttgtggtacagacggcgagggtgtatcccggagcttttgtgctcgagttccatgttgggatcgtcgtcgcgtttgtgttcctgctcctgagcctgatgggcaccctgttggtggtcacctgggctaggtttcgggtgcccaggttctggggatactgccttatgggcatgtacatcttgttcaccgtagtcagtattgccatcgccagttattcaggatga

SEQ ID NO: 9944 - DNA, 951 bp, Zea mays
  Peptide Sequence Number=SeqID_51723
atgctggagaagctacggaacaaaagagtggtttttgtcggtgattcaattggaaggaaccaatgggagtctctactttgcatgctctctagcgctgttcataacaagagctctatctatgaagttaatgggagtcccatcacaaagcacatgggtttcttgattttcaactttagtgactacaattgcacggtggaatactacagatccccttttatagtccttcaaggccgtgcgccagcaggagcccctgagattgttaggtacagtattcgagtggatgcaatggattggatgtctgaccgcggcaagtggaaggatgctgatgtattgatcttcaacactgggcattggtggaacaatgagaaaacaatcagagggggtgcctactttcaagtaggagatgaggtcaaaatgggcatgaatgttgcagatgcttacagaagatcgatacagacattgtccgattggcttcgcaaagaagttaacccaagcaagactcatgtcatctaccgcacatatgctcctgtgcatttcagaggtggtgactggaagaccggtgggagctgccacttagaaactcttccagatgtgatgccagtgaagtccctggacgaatgggccgacttgcttcagcccgtggacgatttcctagggagcaacctcagatccaagctggctggattagacctgcttaacgtgacgagaatgacggcgcagagaaaagacggccacctctcagtatacctgagcccctcaggacctgtgccccgctacaaacaggattgcagccactggtgcctgcccggagtccctgatgcctggaacgagcttctctacgcccttgtcatgaggaggcataagaagatgggtcagaatgcttcccttgctggcgctaggacacccaacactgaagagggagatggagatgtcttcagccgaccatcatga

SEQ ID NO: 9945 - DNA, 459 bp, Zea mays
  Peptide Sequence Number=SeqID_51724
atgccgtggtggctgggccgcgggggggggggggggggcgctgggccacgcggatgcgccggcgagcgcggatgtcgtgcgctgggccgtagcaggccgagcaggcaagggtgcggggctgggccggcagagtttgagtgggccgcgggcaggccgagggaggggaagcgcgcgcgtggtgagctggggaggagcgctgggccgtgggaggaggtctccgcctcgcccgaccccagggctcggcccccgcctcggcctcggaaggtggtctccgcctcgcccgaccccagggctcggcctcaacctcggcctcagaagatggtctccgccttgcccgacccagggctcggcctcaacctcgacctcagaaaggaatcgcgtcctcgcccgaccccggccttggcctcaggaggagtctccgcctcgcccgaccttgggctcagaccgaccgcgccatag

SEQ ID NO: 9946 - DNA, 2409 bp, Zea mays
  Peptide Sequence Number=SeqID_51725
atggggcggttcggtcatgctcctagcctttgtctgtgcgtgccgtcgaggaggacatggtggcgcatgccacgcttaggttatctcaacgatgaggagttcaggtctgagatattggacaaccaaggcccgtattgtggcagcagtcggcatattcctacggagttggtggtggtgttgtgtcacctcgtccgcttcgcgaaaaacgctagatcccgatgcgaccttgtcacttcatatcccgctggacgcattgatgctttccgagccgagatccccattcaaatcctttttttgccgctccagttagagatcaagaggaagctcgcgcagaggtcggagagggtcaagtccgtggacctgcatcccacggaaccatggatcatgtcaagtctttattctggcagtgtctgcatctggaactaccagactcaggtcaagttaatgactgcagtaattgttcaccttaagatgatacctaatttcatgcacggagactgtgatgaccttctgaagagaagagcagtggtgggcttgtcaaggaaaacaagccacattacaatggtgaaatcttttgaagtcattcgttcggctaaatttattgcacagaagcaatgggttgttgctggtgccgatgacatgttcatccgtgtgtataactataataccatggataaggtcaagttgttcgaagctcatactgattacatcaggtgtgtggctgttcatccgaccctgccatatgtgttgtcatcatcagatgacatgcttataaagctttgggactgggataagggttggatgtgtactcaaatttttgagggccactctcactatgtcatgcaagtcacatttaaccccaaagacacaaatacttttgctagtgcttctcttgatcgtactgtaaagatttggagtcttggttcccctgatcctaatttcacattggatggtcattcaaaaggtgtcaattgtgttgattacttcactggtggtgaccggccatatctaattacaggctctgatgaccaaactgcaaaggtttgggattatcaaacaaagagctgtgttcaaacacttgaaggacatgcacataatgtctctgctgtatgtttccatcctgagcttccaataataatgacaggttcagaggatggaactgttcgcctatggcactccactacttacaggcttgagaatacacttaactatggccttgaacgagtttgggcattaggttacatgaagggctcacgaagagtcgtgattggatatgacgaaggaacaataatgattaagattgggcgtgaagcacctgttgctagtatggatagcagtggtaaaatcatatgggccaaacataacgaagttcaaactgtcaatatcaaggcagttggtgcggatgctgaggttatctttattgcagatggagaacgtctgccattggctgtgaaggagctaggaagttgcgacctttacccacaagtaggctcttcttttctctttttgctatatgttgcttacacatttctcattagcaagagtttacggcacaatccaaatgggaggtttgttgctgtatgtggagatggagagtacattatctacacagcgctagcatggagaaatagatcctttgggtctgctcttgaaattgtttggtcaactgaaggagagtatgctgcaagggaaagcacatcaaaaataaagatctacagtaaaaactttcagatacagcaacagtgtcccaatgttcttggcattgtgtcttgggattattggaccttgtatgcttccatttttattataactcaagggactagatatcatagactgcaacaccatgtggagtttctggaagtatgggacctaatattggaggtggaactgcatgagcagattgaggagtgcaggttgatacgtcgaattgacgtgaatgtaaaaaatgtatattgggctgacagtggtgatttggtgacaatagcaagcgattcgtcattctacattttgaagtacaatagggatctagtttcttctcatctagatggaggggcatcagttggcgaggaaggtgttgaagatgcctttgaattgcttcatgagataaatgaacgtgtccgtactgggttatgggtcggagactgttttatatacaataattcttcatggcgcctgaactactgcgttggaggagaggttactacaatgtttcacttggatcggcctatgtatttattaggatatcttgctaaccaaagtcgtgtatatcttattgacaaggaatttaatgtggcacatttccttgaatcacgtggcatgttggaggaagcccttgatatagccactgaccctaattacagatttgatctggctgtgcagcttggaagcctcgaagttgcaaaggcatag

SEQ ID NO: 9947 - DNA, 303 bp, Zea mays
  Peptide Sequence Number=SeqID_51726
atgtgctgctcaagccggagcaacgtagatttgctcggtttgggtgctttcctaccatttcctcgcaccaggaggctccgccgaggacccgaaacactcatcaaattcagctccgagccccggctgcctcacccggtcgcccccgacctggcgaccaaagccgtgcggtgcctactgcctaccgagcccctctcctcggcgaccgtctctctgttcctcgctctcgccgacggcagccccgtcctcgccctcaacgcgcgcgccgctgtaggcgtcccacgcttgaaaggctactcaatttaa

SEQ ID NO: 9948 - DNA, 117 bp, Zea mays
  Peptide Sequence Number=SeqID_51727
atggcttgcaaccctaatacctggggtcttgatcaccttcccatccgagttatcatcgaatgcttagctcctcaggcgcttacaactgcaccacccgagatatcagagcttcagtag

SEQ ID NO: 9949 - DNA, 300 bp, Zea mays
  Peptide Sequence Number=SeqID_51728
atggggtgttccgatctagttacccatgagggcacccagaacgctcttgcatgtgaaggttgtcatcactttgagccactcgggtgcattgacaaggtcttcgagcgaagtgtgtatgctattgagggtgatcgtatagtgggcttatctgccgaggagtgcttggaggcggaggctgacgagtcagataattcagacacgaagtccgacctgctagtgccgatagctagtgtgaaggctgctgtgcaggcaccaagttcgaaggtggctaagggaacaattcttggtgtattccggtag

SEQ ID NO: 9950 - DNA, 222 bp, Zea mays
  Peptide Sequence Number=SeqID_51729
atggggtctacccttacagcggccttcgcgaacattgcacatcagataaatattgaaggagaacaggctctcgagctacatagcctttttctatctgtccagcacaaccttggagtcagttttgactatgcatgttctaatgctgagagccctaagtttgcagagtccgagtatgattgctttgtattccgctatgttattggtgcacttgtctgtttctag

SEQ ID NO: 9951 - DNA, 354 bp, Zea mays
  Peptide Sequence Number=SeqID_51730
atgtggagttcatttgggtactttgggtctccaaagttttgtgaaaattctgtacttcctatgcttttgcagattgttttgattcgacgagtccactggttgatggcattcgtgtactttgtcttccccggggctgtgatgacgatgagggcggactacgctccatggcacatcttctttggcctcgccatctttctgatggccatttgcactgctgagaccggactggccaagttcgtctccgccttcatcgcttacccaggcgaagtgtttgtcgtcaacttcaccgggatcgccatcctcatgtttggcgttgccgtcgtcttggctgtcatccttccgtcaagatactag

SEQ ID NO: 9952 - DNA, 1343 bp, Zea mays
  Peptide Sequence Number=SeqID_51731
atgggttctcgaggaaggatgttatttgaccttaacgaactcccagcagaagttgaagaagcagcagctgctgtcgtgccaaaagaatctgctgctgttgtgccaaaagaatctgctgctgtcgtaccacaagaagctgttgttgtggcgttacaagaagctgctgttgtcgtgtcacaacctcagaaatcccttcgtgttccgacgacatatgccccaaccttgtttcagcgaggggaaggatcacagtcgcaggggatattgaacaataatgcctttaagcatgcatccattggttctggatttcagccttttgtgaggaacagcaaagattcaaacaatacaaaggagccgatgaaggtggaagataatcataattctagtatagcatcactgtccatggtaaacaatcagatcaccgacagtgctgcttcaaaggttgagacttgcaataaggtgtcacaagccattgaaagagaagaaggagaatggtctgatgcagatggcatttctgaaaatgcagggagtagcaacaaagatgagttcactggtaccgcaagcactaatttgaagaaagaatcccaagagagcgagccccatcttattaaatctggtgatgtgactaaagatgatactgctgcggaatgtagtgatgctgaaaaggttgatgcatctgaagatcgggttcacgggtccacaggatcagataacatgcaaaattctgaatgtaaaggaaatcagcctggtgatgatctagatctttgcaacaggtcaagggatgttaaaggagtcgaagccaattatgctttgaggtttgcgagcaaccccgcaaagaggcccaagttaaatgaacacaaagaggccatgttaggcaaaaaacgagctaggcaaactgtcttcatcaatgtagaggatgcgaaacaagctggtacaatgaagacatcaacacccaggaggcagtcatcttttccagcaccgattgttacacgtacagtgaaggaagcttctcgtggtgctggtgaaaaggctgcagaaaaacaaagtcagcaagcaatcagggatcagagacaacctgaaatgatgggatcagagcgaagcaattctgcagatcctagtgaccaatacactgaatccaatggtgatgctgagttgggtacccagggccggtcaaagaaaatgaatgcagaagatccagcctcagatgggtatcagcagcctgtccaaagacaagcttcattcaagcaatccatggacttgaagcaaccaaaaagccgatcattctcttcccaaagaacatttctaacaggaacaaacaatgctgatcagaagccagccagcaaaag

SEQ ID NO: 9953 - DNA, 288 bp, Zea mays
  Peptide Sequence Number=SeqID_51732
atgaggaatgaggtggtgatggatcaacttattccattttacaaaccaaacaaaaagaaaaagatgggtccacatgacactaattttctaccatcaaaacacgtccagtatttatgttgcttcattgacaaaatcatcagggaatgttatgttgcaaaccagatacatagtctaagagattgtggtttcaacatggttaaccacgaaatgctggatgccggaagcatgtgcaaacactaccctactgccacatcatgccttctcctgcgcacccgaccacgccagtga

SEQ ID NO: 9954 - DNA, 1293 bp, Zea mays
  Peptide Sequence Number=SeqID_51733
atgaccaagcccaacgaattccaattgcctaatggactaatggtgctggagcatacaaaagttgttcaaaagagcgtttatgaacacctacatgttatacatgaggggcatttgagaatcatattcacaccagaattaaaggtcaataatttgctacaggttgcccagaaattccaaaccgctgccactgaaaatggtcctgctggggtttcaaataatgatgcacaaaccatttgcaacatgtttgtggctgcatcacgacaactagcgaagaatctggagcaccacaccttgaatgaacatggcctttctaaacgatatgttcgctgcctgcagatatcggaggtggtgaataacatgaaggacttgattgagttcaccaacagaaacaattttggtcctatagagggcctgaagaattatccaaaaccaaatgtgtcggagcttccaggacagaatccgcgtgagacaaaacaaacaacggctgctggtggtcttccgaatgaccagaacaacaccgaagctatgggtaccaaacaagaaacaagcgctcgtgtggacaacggagcttctgttgctggagccgtcggtaatagtgctccgcagaacgctgcagcactaaacggttaccaaaatttaccgagaagctccagcgcaaatcagagtcagcttcagcagggggcatccggtgccttcaaaggtcctgccgcgacgcgcaatggcatgcagatggaagcatctaggtccttctgtggacctaaccaagtgcagctagcacgattccaacatcctgggtcatttcagcacccaatgccccagcacaacaacctccagggcttggggttgcaaaacaatcaccggggcctgggcgtgagcccacagtatcagcagcatgctttaaatcagctgattcaagaagttaagaacgctaaaaggcacacactgccacagcaaccacctctagatatccctaacataagcagtggtatcacatcaggaggtgctaacaccaacagtgctggtacaggagatcagggacagcgcatggccgtaaatggtgctgccaccatctataccgggcctactagtgtgatcaataacagcacagccagaagtaacaatttcaagtcggtaagcagcaatctggctgttgctgctgctcctgctggaggcaatgccgcgactttgaaggccaagcccttccatgaatttgatgacctggagcatctcatcgctaatgaattggtggggagcgggctgctcaacggtaacgagttggcgtggaacagttga

SEQ ID NO: 9955 - DNA, 447 bp, Zea mays
  Peptide Sequence Number=SeqID_51734
atgacgaactccgcttcgcccgaccctagggctcggactcgggctcagccccggaagacgacgaaccccgcttcgcccgaccccagggctcggactcagccctggcctcagccgacggtctccgcctcgcccgacccaggggctcgggctcgacttcggcctcggaagacagactcgacctcgacctcggaggagcctccacatcgcgcaacccagggcacggaccgaccacgtcgacaggaggcgccatcattaccctaccccaagctgactcaggctacggggaacaagaccggcgtcccatctggctcgctccgccagacaagttacttgtcgggacaactgaaggtgcgaaggcacgaaaggcagagaaggggaaggcacgtcgagggcggtgatcggcatcgacctgagcaaccgtatcgcgtcgtcatgggtgttcactga

SEQ ID NO: 9956 - DNA, 219 bp, Zea mays
  Peptide Sequence Number=SeqID_51735
atggaaagaggcagtaaaatgagacttaaaggatggaatgtagccaaagatttagccttgaatataagcgcatggaaaaccgttgtctactccctgctgtgtgatccaaacccaaactcccctgcaaactcagaagcagcaagactgttcagcgagaacaagcgggagtacaaccgcaaagtccgtgagatcgtggagcagagctggacagccgactag

SEQ ID NO: 9957 - DNA, 2721 bp, Zea mays
  Peptide Sequence Number=SeqID_51736
atggctccgggctcacacctccttgtccttttgccaaccgccgtcgtccagctcaatcctttgtggcctcttcctcacgcgccaagccagcccgtgatgctcggcgacagtagagtagtgctcgtgctctctcccagtcccagtccctcgcaagctgacctctgcgttccttcagcactggcactggcagtgaggcgctgtgctgctccagtagctgtagctgtaagatgtgtgggtgattaccaagaggctggagactcccactctcttcggttccagctcgaggtcgagaaaaggcatcctctgctcgccgtcttgctgccgttgctgctagtgctagcaatggtgcccgagtcggcgcagctgcagtcgtcgcagacgtggtcgctgctcaagatccagcagctgctcagctacccgccggtgctccgcacctggggcaacggcaccgacttctgctacggcggggactacaagaccgcctccgccttcgtcgagtgctacggcgacagcgtgacgcagctccacatcatgggccccggcggcgccccgccgctgcccaagacgttcaacctggacgccctcttcacgacgctgacgaggctccccgacctccgggtgctgacgctcaccgggctcggcctctggggcccgctgccggggaaggtgtcgcggctggcgtcgctggagatcgtcaacgtcagcggcaactacctctacgggcagctcccggaggggctatcccggctgggcggcctccagacgttcatcgccgacgacaacatgctctccggcgagctgcccgggtggctcgggaggctggcgtcgctggccgtgctcagcctccggaacaactcgctgcagggcgcggtgccggagtccgtccgggacatggggtcgctgcggtcgctggcgctcgcgtgcaacaacctctccggccaggtgccggacctgagcgcgctgacgaacctgcaggcggtggacctctccaacaactcgcttggcccggcgttcccgcgcctggggcggaaggtggccagcgtcgtgctcagcggcaaccgcttcggcaacggggtccccgccgaggaggtcgcctcgctctacctcctggagcgcctggacgtgtcgaggaaccggttcgtcggcccgctcccgccggcgctgctcgcgctcccgtccatcgagtacctcagcgtcgccggaaaccgcttcacgggcctgctcgccgccaacatgtcctgcggcgagaacctccggttcgtggacgtgtcgtcgaacctcctgacggggacgctcccgtcgtgcctgaagacgctcccgtcgtcctccaactccaagcaggtgacggtcctggcggcgtccaactgcctgtccggcggcgccggcagcacgcagcacccggccctgttctgccagaaccaggcgctggccgtgggcatcgtgcccgtgcaggcgcggggcggcggcaaggccaagggcaaggccggagccgtggccggcgccgtggcggccgcgctggccgccgcgctgctcgccggcgtggccgcgttcctcttcgcgcggagggcggccgtgaggcgcgccaaggccaggccgccccggcggctggtggagcacgcggcgtcgtccatgtcggtcggcggcggcggcgcgtacccgtcgcagctgttcgccgacgcgcggtacatctcgcagacggtgaagctgggcgcgctgggcgtccccgcgtaccggtccttctcgctggtggagctggaggcggcgaccaacgacttcgaggtgtcgcgcctgatggggcaggacgcgcacgggcagatgtaccggggcacgctcggcaacggcacggcggtgacgatccggtcgctgcgggtgcggcgcagccagacgtcgcaggcgttcaaccggcacgtggagatgatctccaggctgcggcaccggcacctggtgagcgccctggggcactgcttcgagtgcagccccgacgacgccaccgtcacgcggctgtacctcgtgttcgagtacgtgcacaacgggaacctcaggagcaggatctcgcagggaaccgaagggaggaagctgccatgggtgcagaggatctcggcggccatcggcgtggccaagggcatccagttcctgcacgggggcatcatgccgggcctcttcgccaacaacctcaagatcaccaacatcctcctggaccagaacctcgtcgccaagatcggcagctacaacatccctatcctcgccgagaccgccaaatccgagggaggaggaggaggaggaggaagcaagtatccatctgacagcagggtgccccccaatggcgacaagatcgacatctacgatttcggcgtgatcctgctcgaggtcgtgaccgggaggcccatcacgtccatacacgaggtggaggtcatgaaggagcagctgcagtcggcgctgacgtcggagagcccggggcggcggagggcgctggtggaccaggcggtgagccgggcgtgctccgacgagtcggcgcggacggtgatggagatctgcctgcgctgcctggccaaggaggcggagcagcggccgtcggtggaggacgtgctgtggaacctgcagttcgcggcgcaggtgcaggacgactggcgcggggactcgcggagcagcgccagcgaggagtcgccgctgtcgccgtcgcagatcccgccgcggagggacagggagaccagcgcctggtaa

SEQ ID NO: 9958 - DNA, 1287 bp, Zea mays
  Peptide Sequence Number=SeqID_51737
atggacgaggatgctggcggcgcctcgccgccgccggtgccactggctcacgtgccccctcttcagcaacccaccaccgccgccccctcgcatcgggacatggcggcgtcccccaccagctcgcgctccgtgacggagacggtgaacggctcccaccgcttcgtgatccagggctactcgctcgccaagggcatgggcgtggggaagcacatcgccagcgagaccttctccgtgggcggataccagtgggcggtctacttctaccccgacgggaagaaccccgaggacaactccgtctacgtctccgtcttcatcgccctcgcttccgatggcaccgacgtgcgtgccctcttcgagctcacgctccttgatcagagcggcaagggcaagcacaaggtccactcccactttgaccgctccatggagtccgggccgtacaccctcaagtaccgcggatccatgtggggttacaaacgattctttcggcgaactgcccttgaattatcagactatctcaaagatgattgtctgaaaataaattgcactgtgggagttgtagtgtcaactatcgattactccataccgcactctatccatgttccagactcagacatcggctatgattttggttcactgttggacagtcaggagggtgctgatgtcattcttaatgtgggaggagagaggtttcatgcccataagttagtgttggctgcacggtctcatgtattcggatctcaattttttgatgatgaatctgatggagagaagagtgaggttaatgagactgatgaactaaaagagttttctattgatgatatggagccaaatgttttcaaggcaatgcttcacttcatctatagagatacccttgttgatgatgatgagttgggcgcgtcaagctctgatggttctatctttgatactccggcagctaagttgttggctgcagccgataagtatcacttagcaagactaaagtcgctatgtgaatcttacctgtgcaagggcatatcagtggcctcagttgcgagtacgttagcattggctgataggcaccatgccatggagcttaaagctgtttgcctaaaatttgctgctgaaaatctttcagagagacaaaggactggttttgatgagagcgtgatgaaggataatgaggggagcgacagagatatctgtgcactgaaggtggttgcggtagcgatagcagtggaggcggtggctgtgtctgctagcgcaggcaggaggggactgtttggtttacggcctgccaggcaagtttag

SEQ ID NO: 9959 - DNA, 228 bp, Zea mays
  Peptide Sequence Number=SeqID_51738
atgtcgacgccggcgaggaagcggctgatgcgggacttcaggcgcctgcagcaggacccgcccgccgggatcagcggcgcgccgcacgacaacaacatcatgctctggaacgccgtcatattcgggtggaaccgtagaaattcatggggcgttaagatatttgggtgccacaggaaccgagactcgtctggaactaagactcatttgggcacatcagggctgttttag

SEQ ID NO: 9960 - DNA, 375 bp, Zea mays
  Peptide Sequence Number=SeqID_51739
atggcaagagggtccacaccggaccaatcccggcagatggcggtcagccggtcgccgttgaactgcaaaatcgaagaaaaggaggggctgcaaccagcaggattgaaaggaaggggaggagctgcaggatttgaagggaaggggagggcgacggaaatagtgcaagaccggattggaagggaaggggaggagctacaagctgcaagagaacgaggaggtcgaacagggtgggtaccagacgaaaaaaagggggatgttagttcatggaaactggcgccggcagcggcggggagaggggggatgcggaggcagttaaaggaggaacaacaaatcggtccacaagagggtcaggtgtacatatctatgatgccttag

SEQ ID NO: 9961 - DNA, 378 bp, Zea mays
  Peptide Sequence Number=SeqID_51740
atgggagggccgaggttccctgcgcttgagggggtttcctgcacaggagcagagagggagggaggtgccatggctgaaacagaggggcgtcagtccagccttgctgccctcctgcgcgctgctggtttccttgggaagatggtgtgggctgctgctcgccatggacaacagaggaaggaaaatctgcttgttgctgttgccgtgtgcgtgctggagcttgggggagggagacgctgcgcagggcgtcgaccagaggtggaagaaagggtgccgtgggggaggagaggaggagccgagctccctgcttgctgccgtggagcagggaggaagaaagggtgccctgctgctgcgcgtgggaggaggaggaagagagagtga

SEQ ID NO: 9962 - DNA, 1017 bp, Zea mays
  Peptide Sequence Number=SeqID_51741
atgccgcacgcgccccgccagccatcgccgccgggtattccgcccccaagcccgcgccccctcccgtctccaacgcgcccgccgcccccggctgcccgtgcccctgcagccctgcccccgcgacacgctctacccaccgagcacgcccgagcaggaagccgcggatcctaccggatcctgcccacacctgagcaggcaggtagggatctcgcccacgccggatcaggcaggcgtggatctcgcccccgctgtgcccccgatgcatggctccttgcccccaccgtgtcacgcctgcggggccacggatctcgccaacacgccggtggatctctcccttcccccgtcgtgccccaggccctggtgcgggagtccggggaagcgagcgtcggctcctttaggatcgggtcgtcgatgctgctgggccgcggggtgatgctctgtgtgctcctcttcagctctctgtggcgcctgcgggcgcgcgcgtacgccaccatctcgtgcgtgcgcagcgcggcgctgccggtggcggcgtcctggctgcgcctcaggaatacccacgtcctcctcctcatggtcgtcctcttcgccctcttcttacggaagctctccgggcgcgcggtcttgggcgacgctcatgcgtcggtgcaggcaatacgaaaagctcacttaattctccgcgctctcactcgatctcctcggagaagagccacgccgccgtgccccggccgccgccgcaggaggcgggcttccgcccctacatgccatgctgagctcgagatcttgttcatccccgacaggtcggcgatggacatggacatggcacactacctgctcacagagcccaggaaggataaggagaatgtggcgggcatggtggcatccccgtccaaggaggcatataggaggctgctcgcggggaagctgttcaacaaccggacacagatccttgccttcaggaacaagctgccagaacccgagaacatgtctatcaccaatgtcgcttcctccaacctgtag

SEQ ID NO: 9963 - DNA, 423 bp, Zea mays
  Peptide Sequence Number=SeqID_51742
atggggcgcgggggtttgaggtcgaccgcgtgcactttcccggcgtgcactttggcggcgggcgggcgagtgcgcggcgggcgggcgagggcagggagggcacggcagcgcggcgggccgagggcgaggtcccgggcagggagggcacggcggtgggcgagatcccgggctagcgcgcgggcgcgggcgaggcggcgaccgagggaagggtgtggcgcggcggcagcgaggggcgtcgggtgcggcgacgttgggccgagggcacgacggcgtgagggccgagggcgcggcgacgtggtggcagagggcagcggcggcgtggagcagagggcagcgttggctgagggcgtcggcgccgaggggcgtcgggcgcggcggcgtggagcagaggccagcggcggcagagtgagagtgagagagtga

SEQ ID NO: 9964 - DNA, 393 bp, Zea mays
  Peptide Sequence Number=SeqID_51743
atgggggtgcatggggctgttgccaaacgaccctgcagcaggcagcatctcctcctcctcgtcgtcgctattctcataggtagctacttcgccgccgccgccgccgccgctgcggacgagcagaaaagcaggaatagaggagctggtcgtcgcagccgcaggaggcgggccgcggcggcagtgacgtcgccgcctgcgcccctcatggtgcccatcaccatcctcgagtccgccgtcgacttgggagccgtgtgcatggacggaacaccgcctgcttaccacctgcacccgggctccggagcagggaacaacagctggatcgtcaacctggaggtgatgagttactacctgcaattgttttaccaccccctgaatgcatgcaccagccggtga

SEQ ID NO: 9965 - DNA, 378 bp, Zea mays
  Peptide Sequence Number=SeqID_51744
atgatcctacagggcctaaagccgaggatcttcaacgacctgaacaagttcggcaagcgatggctcgccgagctcccttcagtaatctggagcctaaggactactccgagccgagccacggggttcacaccattcttcctggtctacggggtcgaggctatcctacccatcgacgtagagtatggttcctcgaggctacaggcgtacaacgaaagcaacaataaagtcgaccgtgaagactcgctggaccagttggacgaagctcgagacgtagctctccttcactcagcaaaatatcaacaatcccttcggtgctaccacgaacggcgagtccgacccccgaggttccaggaaggcgacctggtgcttcggttataa

SEQ ID NO: 9966 - DNA, 369 bp, Zea mays
  Peptide Sequence Number=SeqID_51745
atggacaacggtctgaaggaggcgtacccgcgaggcttctacaactggctgccactgcactacaccccgcgcctatggtcaccaccgctgcgctctagcccacctccatcgaggagcgccgccgcctcctgctccaacggcttcaccttcgacccgtcgcctcccctgccttgctccaccaatcctagcaccgactacggccagggacaccctgatggtttccatgtgaggaagaccgagcgcttcgcttggacacccgaagctgaagaggccctcgagaacctcaagaagcttctctctaacgcccccatcctagtaccccctgctgaaggggagccccttttactctatgtagctgcaacaatctag

SEQ ID NO: 9967 - DNA, 174 bp, Zea mays
  Peptide Sequence Number=SeqID_51746
atgggaggcggctggtgcaacaacgtgagggcgtgccagttccgcaaggcgagccggcgcggctcgtcggacctgatggagaaggagatccccttctccggcatcatgagcagcagccctgtcgacaaccctggtccgtacgctgtctcacgttcacgccatcgtctaatttga

SEQ ID NO: 9968 - DNA, 522 bp, Zea mays
  Peptide Sequence Number=SeqID_51747
atggccgctgcggaccaggtgttgctcgctggctgctccgccggcgggctggcggtcatactgcactgcgaccagttccaggccttcttccctcggtccaacaacgccgccgccgccggcggtaccaccaccactactaccgtcaagtgcctcgccgacgccggcctcttcctcgacgcgtactatctgttgcattgctccatcaatatctctggtgcctggtgcagcatcgacgtctccggcgggcgcagccttcggtcctactactccgacatcgtggccatgcagggggtgggtcccaacctgccgccggcgtgcactgcccgtttggacaccgcctcgtgcttcttccctcagaacgtgatcgatggcgtaaacacccccatcttcctgctcaacgcagcgtacgacgcctggcaggggattgccaagtcagtgggcgactggtacttcggtcgagctcaagtcaaggcgatcgactgcccctacccctgcgacggaacatgccgcaacatcatatga

SEQ ID NO: 9969 - DNA, 801 bp, Zea mays
  Peptide Sequence Number=SeqID_51748
atgccttatcctctccggctggccgtcactgcagcatgcgccatcattctgatgtgggtcgtcctggtggcgaacccgaccgacgccgccttggatgacatatgcaaggccaagtgcgagacgccgcagccggcggtatgcttgcgttgcaccggcggcgtgagaatcgaagacggcaaggtggtgacaacagaagttgtgccgtgcagcgacggctgcatccctgccaccacccgtctccagtgcgacctcgcctgccatttcgggggcctattgtcgtcgtcgccaaggaccggatgcgtgagatgccctggccctgtccccgaccctggcctgccggactgcgccgtgcaggccgcattgtgccggcctctcagcgcggcggagcggtgccaggagtgcctggacgcatgcgaccgtcactgcaactccaccgccgccgccttctgcaaggaccgctgcgagacgcgacaggaggtatgcctggcttgcagcaggagaattgtagacgcaagactgctcacaacagtcgtcgttccgtgtcgcgatgactgcgtccctgcttcctccgtcgccgagtgcgagggcgcctgttctttgttcggctccctactgtcgaattcgccgaccggatgcgcgaggtgccctgaggtcaggttcgatccactggactgcgaggcttgcaagtccaggttaatcaaggactgcaacgcacgagaggcagaatgcgtcaccaacgcctgcgtcctcgacaacgtatgccctgctcctcctcctcctcccgttgttcaggagccctga

SEQ ID NO: 9970 - DNA, 219 bp, Zea mays
  Peptide Sequence Number=SeqID_51749
atgtcattgactcatgtggacccacataggcgttttgggtggcctactgacctaagagaaccccaagatcctcgacgacagggtccatcccgggagtccatagagaagtcttcaaggttctacatgtcgcacgcaggcaccagggatcctttccagaagctctatgcactcatcgcggatggcatggtgacctaccgtggatggtccgccaatcagtag

SEQ ID NO: 9971 - DNA, 342 bp, Zea mays
  Peptide Sequence Number=SeqID_51750
atgggaggggttgccaataccgtagtggttgacacagtgcttagtatgagaaaaggcttcttaagggacgtgtcagtgaatgtatctgatggcatcggggcgtccttcgtcacagatatcgagggcagaaccgggctcagttcgaaggagtggaccttcgcgggattcttgggggagcagtgtccttcgggaggcttgccacaagcttcatccttcttgcccgagatgggctcgagcgaggcagacatagcttcccaggggtgggggagcctcggtcgggacgaagacctgctcatacttatgtcccgtccgaaatcgggctcgggcgaggcagagttttag

SEQ ID NO: 9972 - DNA, 375 bp, Zea mays
  Peptide Sequence Number=SeqID_51751
atgaatcttggcgaggaggctgtaaaggcatgggaggaagcagagttcgatggcctggagtcctggacaatcttatggtccatcagcgcaagtgcaaatccctactgccgtcttgtcatgatccttcttgggccgaaattttcgtggatgctgggaggagccctgtggatgaggtgtagcaggactgaggagggatggacagcttcgcggtgggcaatgggaatgtggagacatgatgttgtgctggcacttgggatgagaggggcagatggcaggagggggcacactgaactccgctgtcacagtcgattctgggatcatgagttgaggaagctatgggagtcagggaaagaaagaggaaaggaaaaacattga

SEQ ID NO: 9973 - DNA, 456 bp, Zea mays
  Peptide Sequence Number=SeqID_51752
atggactcaggatctcgcagctcgaagaagtctaagctgaagctcggaccatcttcttcctcggagtccaagcaccccgagggaaaaggaagcccgacatacatcctggtgatggagctggtgggaggtctggtgtggctggtactgctcgctcaacggcatggggaactggcgcttcccataccagaggaggtggttccaagaaagttgatgcagaaggccccaggttcctccttttatagtcacaaggaggaggtccaggagtacaagggtgtttgtgctgctgttgtaatcagaggagacgtgtccgagccctatagcggcatggcctgtgggatggctctcgtccttgtgtccgagccctgtagcggcatgagagccgaggctaggcttgggagtatgggcatgtgcccgagccctagcatgtacaggggcgggggtgtcgagttggagtag

SEQ ID NO: 9974 - DNA, 1116 bp, Zea mays
  Peptide Sequence Number=SeqID_51753
atggcgcaccaggatgccggtgtcggcggcaaagatcaccgcgagctgcaggcgcagcacaccaccgacaccgaggagctgctggcagcccaccgcgagctttggagccatgccctgggctacgtcaagtccatggcgctcaaatgcgcattggaccttggcatccccgataccatccaacgctacggcggaggcgccaccgtaggcgaactcgccgccgccagcaacctccccgcatccagcctccccttcctgcgtcgactcatgcggacgctgacagccatgcgcatcttcgcggtccaccgtgatgacgatcccagcgacgaccctgctgatgatgcagccgccgttgtctcgtaccagctcacggcgacctcccgcctgctcgtcaacgggtgccgtctcccccatgttcagcatgagcgagtggatgaagcagcaccaccaccacgcgcccgacatgactctccacgagatggtgcacggcgaaccgtgtgggagtctttccgagccaaccccgcgatcagagcctggttctacgacgccatggacgccgatgcccgcctcgtcatgcacgtcgtgctcagcgagtgccctgccgtcttccacggcctcgcttcgctcgtcgacgtcggcggcggccatggcacagccgcggctgccatcgccagggccttcccacacatcaagtgtaccgtcatggacctccctcacgttgtcgctgaggctcccgcgggcactggactgtgcttcctcgccggcgatatgttcgaccacatcccaccggctgacggtattctgctcaagtggattctgcatgattgggatgatgcgaagtgcattaagataatggaacggtgcaaggaagcaatcggtggcaaagaaaggggagggaaagtcattataatcgacaccgtgattggatctaggccaaatgaggaagatatgatacgcagggaggctcaagtcctgtgtgatctaggtatgatgacaacgtcgaacggagctgagcgagaggagcacgagtggagaaggatcttcctagcagctggatttcgtgactacaaaatcacagacacacgaggtatcccgtcaatcatcgaggtctatccatag

SEQ ID NO: 9975 - DNA, 177 bp, Zea mays
  Peptide Sequence Number=SeqID_51754
atgaccaaggtgaatcatactggcaaagtgtaccacatgagggccaagcggcaaatggctcaaagcctcggccagattgcgaagttcaaacgtcgatatgagcaggaagcagagaaaagcaaagacaagttctgtggattcagccttcgtctgcacaaggcgaggacgaagtcgtag

SEQ ID NO: 9976 - DNA, 327 bp, Zea mays
  Peptide Sequence Number=SeqID_51755
atgcagggttcttgcctgaccgccatcgcagcaaaatcaacccaaggacctccctacactgaccactcccctactgcccttgcccctttcgggattccgagatctacggctaacatcccacgcccgcgctggaagggccaggatccaatcgcagccgtccacagtgagatcaacagcccacactacaccgcccctcattctaatcttgacccttggtctgagatgaacggctcagagggcttcttccccagcacgagcgcggccgtgatgtggcactgctgcggcggcacgccggctacaaaccgtgaacgctccgaggagtcctaa

SEQ ID NO: 9977 - DNA, 498 bp, Zea mays
  Peptide Sequence Number=SeqID_51756
atggtggctgcgaggctctcttcttcacgttggtggcctgctccacagcaagccggcaagccatccctcgcgcggctgcgtggagttgtgtgggtggctgctgcggctgtggcggcgccggctgatgcccacgcaggtgctgtggggtggcgctctcttcgttgccatctctcccctcatggcctttactgctgctatggtggggtgacaacctccttcggccgactggcccgcggtgttcgggcgggcaggggcggcacccgagatggtggggcacacgtcctgtggctgctggcggatgatggcggcaacatcgacagcgtgcaactgtgtgaagctgcgatggtggtggctcgacgctccggcgtcggcgtggcggcgcttgaggtcgcacatttcttcgccttcgatggttgctttcgattctcggcgtctggcatgcgggtgaagatggggctttgcaaggtgaagtcgaagctgcttcatcaggggttgtag

SEQ ID NO: 9978 - DNA, 258 bp, Zea mays
  Peptide Sequence Number=SeqID_51757
atgccaaatgacggagatggtggtagtagcaagagcatgggggaggctacgctggatggtttggatggaattcagatgcttgatccaaacactcttaggacactaaggatatatctccttgaaactttagctagatgggatttttttggactgcggttcaaggacatgggtggaagcagcatttcaagaagtagagcaattgctgatgcagccaagcctgctgagcagcaaaatgagaggaagaaaaaaattccttaa

SEQ ID NO: 9979 - DNA, 804 bp, Zea mays
  Peptide Sequence Number=SeqID_51758
atggcgacgacgctcgcgggcatgcctaggaaacggccgatgacctccatccagctccacctccacaggcacacattgttgtttgactgttgcttctcgactgattccatgggtgaggatgagtatcaggattactcgagtggcattgtcgcgcaattgaccaattgtaggattttttttccggacacatcacttatggcatccaatttttggtctggggacaaaagaagccggatatcagatatttcatctgagtatgacatgacagtaatggactacccacaacagtatgaaggatgtccgctgcttcagctcgagatgatccaccatttcttgaaatcatgtgaaaattggctatcagtggaaggacaacataacatgcttttaatgcatcgcgagagaggaagctcgccagtgcttgaattcatgttggccggactgcttttgtattgcaaaatatacatcggcgagcagaggacactagaaatggtctacaagcaggctcgcagggactttatacagcagttctttcccttgaatccccagccttcacatttgagatatctgcactatataacaagacaaagaggtggttcagaatggcctcctattagcagacccttcatcttggattcaatagttctccatattgttctgtggtttgacgcagatggtggttgtaggccatacttgattgtacatgggcaagactcaagtcctggtaacaagagtgcaaaggtcctttatgagatgccaaatgcaaagaagcaccttcagcgttatggacaggtgactgtctcctaa

SEQ ID NO: 9980 - DNA, 1608 bp, Zea mays
  Peptide Sequence Number=SeqID_51759
atggccggcgccgccgccgccgccgccggtcgctgcctcctcctctcccgcccgtcccccctccggctccgcctcctccacgctgccctctccaccgccgcccccaccctcggccccacctccactccggctccccctccgcggcacgagctcctcctcgagcgcctccgcctccgccacctaaaggacgcctcctcccccggcgccccgaggcctacctcgaggagctcggagcggagctcgcagcaggggaaggggaagagggtcgaggccgcggagagcttcgaggagctcggtctcggggaggaggtgatgtccgcgctgggggagatgggcatctccaagcccacggagatccagtgcgttggcgtgccggcggtgctggccggaaccagcgtcgtgctcggctcccacaccggatccgggaagacgctcgcctacttactccctcttgttcagctacttcggcgtgatgaggcaatgcttgggatgtcaatgaagccaaggcgtccaagagcagtagtactctgccccaccagggagctaactgagcaggtttatcgagtagcaaagtctatcagccatcatgcacgttttcggtcaacgatggttagtggaggcacccgtctaagaccccaggaagattctttgaacatgcccgttgacatggtcgttggcactcctggaaggattcttgatcatatcaaggatggtaacatggtttatggtgatattaagtatctggttctggatgaggcagatacaatgtttgatcaaggctttggaccagacatacggaagtttcttgctccgttgaagaatcgtgctgcaaagcctgatgatcaaggtttccaaacagtattagtcactgctactatgacaaaggctgtgcaaaagttgattgatgaggaatttgaaggtattgtccatttgcggacatcatcatttcaaaagagagtttcaacagcacggcatgactttatcaaactttctggagcagaaaacaaacttgaggctcttctgcaggttccagctgaagagagagttgagaacctgaacaagttccgcaatgaagagggggattgtccaacattagtatgcactgatctggcagctagaggcctggacctggatgttgaccatgtcatcatgtttgacttcccatcgaattctattgattaccttcacagaaccgggagaactgcacgcatgggagccaaagggaaagttacaagcattgtggctaagaaggacgtagctttagctacacggattgaagaggccatgaagaaaaatgagagcttggaagctctcacgactaacaatgtcagaaggccaaccagctcgcagagtgtgaacacgaaagggaggccctcaaggttggttaagacttcaaatgctcttaaagttgtcagtcagaagggtagaaggggagtatcgctatctagcaggtcatcccgggctccccaaggatacaacttcaacccgaaggcgctcgccaccgaagagccaggcaaaggcaacaaaatcgtcagcccctcggaaagccaagccggtgaaacccactcagagcagcgcaaaggtctcgaagagcaaagcaaaacctga

SEQ ID NO: 9981 - DNA, 618 bp, Zea mays
  Peptide Sequence Number=SeqID_51760
atggccccccgcgcgcgctcggccttgtacttcttcttgagcgtgtcgacgcggttcttgcactggatgtcgagacgaaggaacgaacgggtgaatagatgtgggggcggcgatggaggagacgaggcgggggtggtgaatagaagaagggagagggggtggtcggcgaggggggaggagcgtcgggccgtgggccatgatgaccgcgacgcggcacgtggaggagcggtgcagatgcatggttgttgtttggatcctcgtgtcggtcggggcaggtttgaccgggacaccaagccagcgagggattaccggattagcgactccctcgcgcaggcacgtgcctccatcgtccgcgcatgcacagttgcagtcacgccctcagagctaggtgccccaaactgcacacccaacccctaccctttcatcctcaccgtgaatcgacggcggcatgggcgccatgatcgtgcgcacggaggggtgcaaatcctgcttcttctcctaccatggtcagtgacgccggatctggcagtttccaggtccacccgtgattgtatatcctacaatgtgcttccctttatttttttaaatcctacgatctgtcatattatgtttttgtga

SEQ ID NO: 9982 - DNA, 645 bp, Zea mays
  Peptide Sequence Number=SeqID_51761
atggcaattatgacccaccatgataacaaacaactagccaacaggcgcatgcgtggtccctggccccctccaagcggccacaggctccctcaacgtcgcgcctggcagttggtggaatgggttcttcgccgatgtcgtaggtgcctgccacatgaagccgaggaaacttgccatacatttcccttccagaatcaaacttcacaggcatcaagttcagtcccgggcaacaacattactgctatgacctcattagtctcgtgtgcaattctagaaactggcacagatgatcaggttattgacaactatggtaagggtaggccttcagtcatgaaaactaccaggctgttgcttgatgactatggctggaggggcttttatagaggtatgtacactaccggaatcgggtgctttgccgagtgcctgaagcactcgacaaaccctgaaaaacactcggcaaagtatttgccgagtgtcgcactcggcaaagtatttgtcgagtgtcgtactcggcaaagagagctcggcgaacagtgcatcggtaaaggattctttgccgagtactttttatcaggcactcggcaaagactttgccaagtgccagacggtactcagcaaagaaaagcgaccgtcatagcgctggggtga

SEQ ID NO: 9983 - DNA, 282 bp, Zea mays
  Peptide Sequence Number=SeqID_51762
atggctcaccagagttactccggcccgctcgagaccttctcaccaccgttctcccttctctacccatggattcatggcctcttccctgccattgagttcgccgtggtgccctctccctctctgctcaactccggcgaccccagagccaccctagctcgcgccagcctcaactccggctacctcaccgccacggagaggagcggcgccacccgcagtcgtctgtttccccctggtctaatctcctccatccgattcagatcaaacggctcagatcacggatga

SEQ ID NO: 9984 - DNA, 1347 bp, Zea mays
  Peptide Sequence Number=SeqID_51763
atggcgctccgactaacgctcgccgccgtcgcactcgccgtcctcgcagcggcggcggcgagtggcgccagcgcccccgcctcggcgctggggatcaactacgggcaggtcgcggacaacctcccgccgccgcaggcggccctggtgctgctccgcgcgctgaacgcgacgcgggtgaagctgtacgacgcggacgcgcgcgtgctccgcgccttcgcggggtccggggtcgacttcaccgtgggcgtcccggaccgcctggtcccgcgcctggccgcggaccggggcgcggcggccgcgtgggtgcgcggcagcctgctgccccacctccccgccacgtccatcaccgccgtcaccgtgggcaacgaggtgctgtcgggcaccgacgccgccatgcaccgggcgctgctcccggccatggaggccctccacgcggcggtggccgcgagcaacctcacctcccgcgtggccgtcacaacggcgcactccctcgccgtgctgtcctcctcgttcccgccgtccgccgcggcgttccgccgcgaggtggtcccctacatggcgcctctgctcgggttcctggccccgcacgggcgcgccgttcctggcggcgtggccgacgccgccacggggctgcgctacgacaacatgctccacgcgcaggtggacgccgtgcgcgccgccatctgcgcggccaactacggcagggcgctggagatccgcgtgtcggagaccgggtggccgtcgcagggcgacgacgacgaggccggcgccacgccggagaacgccgccaggtacaacggcaacctcatgcgcctcgtggcgcagggcaagggcacgcccgctgcgcccgacgagccgctgcaggtctacgtgttcgcgctcttcaacgaggaccagaagcccggcccggcgtcggagcggcactacgggctgttcaagcccgacggcacccccgcgtacaacgtcggcgtcaaggcgcccaccatcacggtgcccaaaggcagcgggagtgggaacggcaccggcactggcggcttggttgtggcgcaaggacccggcggcgccgacggcgtcgggccgggcaccggctgcctccgtcccccggtgttcaaaatcacaggtgaagagcagacagcggcggcggcggagcctggtggcggcggctgccgtcctggccatggtgtccgggctctggtagtctgggactgggagagaacagatgacgagagacagtccatgaaaggacaagaccggccggccaccatcgttggtgctagtgctacgaacaatgcaaacccatgcatgcaagttgttcgcaagggatgtgtgcttcacgcgtcactgtag

SEQ ID NO: 9985 - DNA, 468 bp, Zea mays
  Peptide Sequence Number=SeqID_51764
atgtccggtgcaccagaggattccaactcaaactcatcgccttcgggaaattccagaggcaactccgctataattcaccagactgtccggtgtacatcggacagtgtccggtgctccaaggaagagcagcctcaggaactcgccagcttcgggaattcatttcagctgctccgctataattcaccggactgtccggtgtatctgcgggacaacggctacctgcagcgcatttattgcgcgccagcgcgcgcagaagtcaggcacgcccatgctggcgcaccggacactctacagtacatgtccgaactcgccaagaaggagatggagaccggtgacaagcccgctacaagccatgggaaggcttcatcagaagagtcccgcaacaaggagaagaggaaggagaagaagaaggaaaagaagacttcttctcacaagtcgcatcggagtggtgacaacgaatcaagctga

SEQ ID NO: 9986 - DNA, 420 bp, Zea mays
  Peptide Sequence Number=SeqID_51765
atggcctccgtggttgcgccgccgccaccgtaccagacggagtccgacctgcgccgcgccgaggcgtactccaagctcttgcacaccgccaaatccatcctcgactgcctccagaagccccccgctgccacccgcagtcgaggtacaagcgccatccacgccgacatccccctcggcgccgaccgcctcttccgcacagcctggtttgttgcacattttgtcactcatcgagtgcaggttgtcgaatgtggagttgagggcgacgatgaaggcggacacgagcgtggcgttgtactggctgcacctcaggttgagcatgattactcgatgcatctcaatcctttgaggactaaagttcatcaagctcatcatgatttggtaatagatatgttggagtcagcaatgaaagatctattgtaa

SEQ ID NO: 9987 - DNA, 1104 bp, Zea mays
  Peptide Sequence Number=SeqID_51766
atgagcatctcggtgaacgggcagtcggtggtgcctccggggttccggttccacccgacggaggaggagctgctgacctactacctgaagaagaaggtggcgtcggagcgcatcgacctggacgtcatccgcgacgtggacctcaacaagctggagccatgggacatccaagacaagtgccgcgtcgggtcgtcgtcaggccctcagaacgactggtacttcttcagccacaaggacaggaagtacccgacggggacgcgcaccaaccgcgccacggcggccgggttctggaaggccaccggccgcgacaaggccatctacgcggccggcggcgccgcccgccgcatcggcatgcgcaagacgctcgtcttctaccagggccgcgcgccgcacgggcacaagtccgactggatcatgcacgagtaccgcctcgacgccgccgacgccgaccatcaccatccatgctgctacccctcgccgcctcctcttcctactgcgatcgtccgtggcgcggcggggccgggggaccaagtgccgcaggagcaggaggggtgggtgatctgcagggtgttcaagaagaagaacctcgtgcaccacggcgccgcccagagcagcggcggcggcggtacggcggcggcggcgtccaagatggagagcagcccgaccagcaccaccatcatcggtgaccacgccagcgacgacgcgctcgaccacatcctgcagtacatgggcggcggcgacaccaagccggcgctgctgaaccacaaccaacaccttgctgccgcggcagatgctactactactacgaccgccgcgtgtcctgccgccgccacaagcgccggcctctacgggaacaacaagttcatgaagctcccgcccctcgagcacgccggcggctggctgccgccgagtccggggccgtgcgagtacggcgcctcggggatcgccgactgggacgccctggaccggctcgccgcctacgagctcaacggcctctccgacgcgtccaagaacatggccgccttcttcgacggcgacctctggagcatggccagatcggtgtcggcgctacacgcggcggatttggccatgaacaacgcctag

SEQ ID NO: 9988 - DNA, 375 bp, Zea mays
  Peptide Sequence Number=SeqID_51767
atgggcacacgacccacacgtaccatcaggagaaaggcagagaagtggcgcctgaaaaggcacgccgctgccttaaagcgacgcctcaacaggcacactgacgtcatcaaaagaaaggcgacagaagcctcatcttcaactctggtggccatcatcgttcaccagccgacatccgtcctcgacttgctcgaggatgattcgagtcatggctcgaccgaggctaactccgatgccgatgaagcgctagaaagggcttgcttcatggcaacaccatcgcgaaatgacaatggcaggggagacaaggtgtcccccaacccagaagaggagtacaagcgccaagcgtgcatcctcgctcgtgaggcctccctctgctag

SEQ ID NO: 9989 - DNA, 189 bp, Zea mays
  Peptide Sequence Number=SeqID_51768
atggttcttttcctcatcctgaagaatgacatgcgttgtgttgcatttgcaaaccaaaagcttcttgggattcatttaacgaaaaaagaactaagtaggtttcgacccattaaaggagtcaatggcacgcacacaaagcaggaggaaatcggtaccccgcgaggctggcgaagtcggcacaagaagtag

SEQ ID NO: 9990 - DNA, 366 bp, Zea mays
  Peptide Sequence Number=SeqID_51769
atgaagtcgatcctcgcccctatgttgcctctgtggagagagccggaggccaccgagggcctccatgatggcgtcgagatcgttgggtggaaaagcttgtgcttctggggccctggccatctccccttagttgctaatgatggggccaaggctcctggaacggatggtcgctccaagggccctaacaacatcgtggtcggacatccggagctagaaagatctgtcaatgtgacagatataaccttccactatgttgatgacggttacacgatgtcgcggctgcttacaatctttgcgacaacactccggcagagtaacaactctcaagatcttgctcttgctctcagtagcactactcctctataa

SEQ ID NO: 9991 - DNA, 549 bp, Zea mays
  Peptide Sequence Number=SeqID_51770
atgccccaacggccccacaccgatggaaagcgaggaggccaacgccgaggcacacggcccacacgcccacctccattgcccaacgcaccgtctccatctcgacctcctgctcctcctcctccgccgaccacctcccacctgtcgtcgtcgcactcgcagcggcaccagccgcagaggcccgtggtggcgtcctcctccggtatcccctccagccgggtggctccgcaccgcatccgccccggtcggccgcgcgggccctgtcccgcatcagcagccgccctccgcgagcaccaccacctccgccacacacacctccggcgaggccagtgcccgacggcactccacgttccacccccctcgcgccgcgcggagaagacgcccttcgccgtgacctcctcccaggcggggacgagcaccacgaactgcgcgacctcggcggcggcgacgcggtcggcggcgacccgacggagagtgaccttggcgggcgcggctggcgggagcgcgcggccgtttagccccagcgccgtgtcccagatggccgggtggtag

SEQ ID NO: 9992 - DNA, 273 bp, Zea mays
  Peptide Sequence Number=SeqID_51771
atgggtctcccgctggagcagtggcgcggcggcgaggcggacggcaggaaggtcgtcgacggcgacgcgacggcggccgggtgcaggacgcccgacgctgccaacgggcaggcggccggtcgacgcgctggcggcggggactgccccgccgcgccacggaagaggcgggccgcccccgccgccgccggcgtggtcgcgcagcagcagcagcggcgcagggactactacaccggcgacgacgtggaggccttcttcgccgcgcacaacctctag

SEQ ID NO: 9993 - DNA, 2739 bp, Zea mays
  Peptide Sequence Number=SeqID_51772
atgggcaacagcacgtcccgcgtcgtcggctgcttcgcgccgcccgacaaggccggcggcgtcgacctcgacttcctcgagccgctcgacgaagggctcggccactccttctgctacgtccgcccgggcggcggcgccgccgcagactcgcccgcgatcacgccctccaactccgagcgctacacgctcgattccagcgtcatggactcggagacccgcagcgggtccttccgccaggagcctgccgacgacctggccgccgccgccgccgctgccgccggtctgcagcggccctgcaggagcttcggcgagactaccttccggaccatatcgggggcctccgtcagcgcgaacgcgtcctccgccaggacgggcaacctcgccgtctccctcgccggtgacgtgcaggagcccgccgccgcgttcgagagcaccgcctccttcgccgccgtgcccttgcagccggtgccgcgaggctcgggggcgctcaacaccttcctgtcgggcccgctggagagaggattcgcgtccggcccgctggacaagggctccggcttcatgtctgggccattggacaagggagccttcatgtcaggccccatcgatggtggcagcagaagcaacttctcagcacctctttcctatggcgggaggaaggctcgtctcgggcgtcttgtacataggatcagcagacccatgaaaaccgcattgtccagaacattcagcaggagctcacaaaatccaggctgggttcaaaagtttctctcgcatcctatgactcaactgccctgggcaagggacgcaaagtccagatcagaaggctcacagaatggcttggaacccgggatacctgaacatgagtataatgtgacaaggaaccttcagtgggctcatggaaaggcaggggaagatagggtgcatgttgttctatccgaagagcaaggatggctattcattggaatttacgatggttttagtggccctgatgcacctgactttctaatgagcactctatacaaggccatcgataaagaactggaaggactgctctgggtctacgaagacagctctgaaaggagtgatcatgtatctactcatgaagagggtgaatcagttgctgcttctgtggatgctcctcatggtgatagtgaccagttccagagtgacagtgggaaacaagaacaagttggtaattttggaaaacaaaatatttcacctggaaagggttgtgatgaaagtgtcttgcaggttcagccaaactgtaccagcagtgaagagaaaaatttggctacacagggttcaactagtgagaagttggccagggatgagatagttgaggaaatggctggagctgatctgggaaatgatctccaaagtagagaatctcaaaactcaaacagaggtctttcagatacagatctaaacaacaattgtagctgtgcaacagaaaccacttcctattgtgatcagcatgccaaattcttgaaagaaaacagaaagagcaagcgtctttttgagcttcttgagatggaattgctagaagattataacaaaaggttatctaaggcatcaccaaaggaaaggaaaataccgaacttgcatgttacacaggcgggcactgcagaagtgttctcaagaaacacagctgaagtctccaggtgttcattggcagcaactggagaatgttttgatgattctgaagatcttggaagttcaagacacgctgatagtgtacttggcatagatattaaagagtgtactgggtgttccatatctacatcttcatcagggcacaagcaagttacgagaagatttgtgttcggatcaaagttgaggaagatgtacaaaaagcaaaaaatgctgcaaaagaagtttttcccgtggaactacgattggcacagagatcaacctcatgttgatgaaagtgttataaaatcttcagaggtcactaggagatgtaagtcagggcccgtagagcatgatgctgtattgagggcgatgtcacgggcgctggaaacgacagaggaagcatacatggatattgtggaaaatgagcttgatagacacccagaacttgcattaatgggttcttgtgtccttgtaatgttaatgaaggaccaggatgtatatgtcatgaatcttggggacagccgagctatcttggcacaggacaatgatcagtacaatagctcaagtttctcaaaaggagatttacgacatcgaaacaggtcaagggagtcacttgttcgtgttgaacttgataggatatcggaagagtcgccgatgcataatcctaacagtcacctaaacagcaacacaaaagctaaggaactgtcaatatgtagactaagaatgagagcggtgcaactgtcaactgaccatagcacgagtattgaggaggaagtcttgaggattaaagtagagcatcctgatgatccccattctgtctttaatgatagagtgaagggacagctgaaggttactagagcttttggtgctggttttctaaagaagccaaaatttaacgaggcactacttgagatgttcagcatcgactatgttggaacatcaccatatatcagctgcaacccttctgtacttcaccatcgtctctgtgcaaatgatcggtttcttgtactgtcctcagatggattgtatcaatatttcagcaatgatgagttgttggaacttatggatataattcattggaagctttctggcaatgagaaaggatcctaa

SEQ ID NO: 9994 - DNA, 336 bp, Zea mays
  Peptide Sequence Number=SeqID_51773
atggcaatggacgacctcgtgggcgcctcctcctcctcctccatggcggcggcctcctcctcctcgtatggctgtgttacgattactaaggatgatattaaggtctttgtcatggtgccgtcgaaatctagcactgagtttcctaatgctgcctggtggatgaatgcagaaggcattgatgctatgggccatggtactcatctcaactatgtccttttcttttttcctgattgcagtgattaccggaggatggatgagcatgatcagtatgagtcagttggtttagatgattcactagaggatgagaggaatcttgatgaaaccatggctgattga

SEQ ID NO: 9995 - DNA, 234 bp, Zea mays
  Peptide Sequence Number=SeqID_51774
atggctcctcggggaagctatccaagggctcggttgaggctgagggtctctggaaatggctggctgcggtggccggcgctcgggtggcttgggcgggtggcgcagagctcgccggagctaagggtggtgcctggccagcgaagggatgagtacaacaaggttagtggcttggacaatgccaagcaaatatggataccctcaaaatctctcaagagggtaatgatgccaccatga

SEQ ID NO: 9996 - DNA, 474 bp, Zea mays
  Peptide Sequence Number=SeqID_51775
atggcacttaagggaggcgatagagagggagaaggccaggggttcctcaccttagagcagatgaccggctcgacagagatggtcgtggttgcggcgcgcgtagcgagagcttcctgcgtggcgacggcgaggcgagccaacgacaaacggcgaaacgcggatgcagacagtgaacaccacggccgtgcaatggggcactgggaggcggacgacgtcgaggctgttctggacggcggtggggagagcagggacaggtgttttgagcgagcgaccgttgtcgaggctcctttgatcgcggctggcttgggtgggatcatgggagaggaggttaccgagaaggagatgcgcgcgcgggcgacgtgcaggcggccgagcgagcgcacgcaggtggcggcgctgagcacgacggcgcgcgcccagggagcagtccaaggacagagcaacgacgccattagaggaaagctcgatccgtag

SEQ ID NO: 9997 - DNA, 468 bp, Zea mays
  Peptide Sequence Number=SeqID_51776
atgtcaggcaggaaagcaggtcgaacaaatcatccaagcaagaatgggaggaagagatcaagaccactagaacttcttcatatggatctttttggacctattgcttaccttagcatcggggggagtaagtatggtcttgtaaatgctgatgatttttcccacttcacttggcgcttcctaaggagagcccaaaatgagtttgagctcaaggtaaagaaaatcaggagcgacaatggatctgagttcaagaatcttcaagtggaagaatatcttgaggaggaaggcatcaagcatgagttcttcgctccttacacacctcaacaaaatggtgtaatagagaggaaaaataggatgctcatcgacatggcttggacaatgctaggagaatacaagacgccaaagcggttttggtcagaagccatgaacgcggcttgctatggcggaaccgcccgaattattccagcttaa

SEQ ID NO: 9998 - DNA, 471 bp, Zea mays
  Peptide Sequence Number=SeqID_51777
atggcaggggctcggatgggagctaaccacgccgggggaggggcgcacacgccagcggccaagagcagtgatgccggtggcgtggcctcgcccgagaaacagaggtgcgggacagcttgccaacacacgacgctacgagtctaccactgctactgcgccacgagcggggaagagcggggtcggcggcgatccgatatcggacagcagatggcacttaagggaggcgatagagagggagaaggccaggggttcctcaccttagagcggatgaccggctcgacagagatggtcgcggttgcggcgcgcgtagcgagagcttcctgcgtggcgacggcgaggcgagccaacgacaaacggcgaaacgcggatgcagatagtgaacaccatggccgtgcaatggggcactgggaggcggacgacgtcgaggctgttctggacggcggtggcggaggcgattgctacgcgctatga

SEQ ID NO: 9999 - DNA, 1875 bp, Zea mays
  Peptide Sequence Number=SeqID_51778
atgggtatgaaaattgacccaaacccgtaccctaatggggccctggcccactgtttgacgctgaccggtgggccttcctcgcaaaggtacaagctggatggcctgacacggaagcgtcgtggcgtgctccccaacgtgcgccgtttcggaagccacacgcccacggccccacccttccgctttccccttcctccatccttcctcctccccggcacgccccactccccgccaccattaccaaccaaccaaccaacccgcgcacccccgaaggagaagagctggggtcggaggccccaggtcggagctgaacgcgcccccatctcccgtcggcgagaagagaccgcgcacagggtagccagcgattccgcgggcgaggcgagaacgatcggttcgatctcccttgatctttgcttcatgagttctgggaaagcactggcatccaacatctcttattcaacaggccccaaccactgcccagtcaatatactcctcccaacggggcccccagatgtcgtctcctcagataatgttgagtacgatttctctgatgtttttggttctaccccggtccaaacaccaacaaacctttgtggttttggtccggagagtcctgcacctactgttgagtccaatgaagaattttacagtgatcctgttgtcatcatcaaccgatcccattctcttgtcggtccaacatcacttgtcagccgctccttgcgacttagcaagcttagtctaggaaaaaacgagggatcatcggaacttgtcaagtgcctctcagaagaaaaggaaggggaccaagggcagctcagtgatgaagatctgggtaatgcgatgacagaggatgagggcattgggcttgatgacttagaaatcttgaagcttgttggccaaggggcattcggtaaagtatttcaggtgagaaagaaaaacacctcagagatatatgcaatgaaagttatgaggaaggacaggatactagaaaaaaaccattctgaatatatgaaggccgagagagagatattgacaaaagtcgaccaccctttcatagtgcagctgaggtactcatttcagacgaaatatcgactttaccttgtcctggacttcataaacggggggcatcttttctttcagctctacaagcaaggattatttagggaggagcttgcaagaatctatacagctgaaattgtatctgctgtagcgcatcttcatgctaatggaattatgcatagggatctcaagcccgaaaacatccttctggatgctgatggccatgccatgctcacagactttggccttgcgaaggaattctgtgaaaataccagatcaaactcgatgtgtggcactctcgagtacatggccccggaaattgttcttggccgggggcatgataaggctgctgactggtggagcgtgggaatcctgctgtttgaaatgcttacaggcaagcccccatttgttgggaatagggagaaagttcagcagaagattataaaagacaaactgaagcttccttcatttctgtctagtgaagctcattccctcctgagaggcgtaagcttttacattcatttcatcagtgcagaagcctgccccggaggcagcaacgagataaaaaaccacaagtggttcaagccaatcaactggaggaagctggaggcccggcagatccagccgagctttcggccgaacgtcgccgggcttacctgtatcgccaacttcgacgagtgctggacgaagacgcccgtgctggactctccggtaagcacccccgctggtggcgggcacagcaacttcgcggggttcacctacgtcaggcccgcgccgatccttgaggaggtgaacgcatccggctctaggctcaaggactaa

SEQ ID NO: 10000 - DNA, 2220 bp, Zea mays
  Peptide Sequence Number=SeqID_51779
atggaaacaagctcaactgggataaacatacctcagtttgttcatggcatggctcctaacctcagtgtaatagatttctcctacaattccttcacaggagaagtacctgcaagtttacaaaacctcactcagttaaccgttcttaatttgcaagataactctttctctggatccatccctgacctcaagcttcacagtctgaaactattaaatctgagcaacaatgaactgaaaggctcaattcctcgatctctccagaaatttccaaagggttcattttcaaggaatcctggactgtgtgggctacctctagctgaatgctcacatccttcaccagcacgctcacctgaatcatctccatcgcctcaatctccacctttgacacatcatgataagaaactaggcacgggtttcatagttgcagttgctgttggtgggtttgcattgctgacgctaatcgtggttgtgtgcttttcaaagaggaaaggcaaggacgagattgatgtggaatccaaaggaaagggtactgccaccaggagcgagaagccgaagcaagaattcagtagcggcggccaaattgctgagaagaataagttggtgttcttggagggttgcacctatagctttgacctggaggatctactgagggcttctgcagaagtccttggcaagggtagttatggaactgcttacaaagctgtactcgaagatggtactgtcgtggtagtgaagagattaaaagatgttgtggcagggaaaagagagtttgagcagcagatggagctcatcgagaggttgggcaaacatgcaaacctactcccactacgcgcctactactattccaaagacgagaagctcatcgtctatgattatattgacactggaagtgtttcggccatgttgcatggtatccggggcgttaccgcgaagacaccgttagattggaactccagaatgaagatcatccttggaacagcatatggaattgcacatatacattcagaagggggcgcgaagctcacccatggcaatgtcaagtcaaccaacgtactcgtagaccaagatcacaatccttccgtctcggactatggcctcagcgctctgacgagtgtgccggtcaacgcatctcgcgtcgtggtcggctaccgtgctccagagatagtcgagaaccgcaagatcacccagaagtccgacgtctacagcttcggcgtcctcctcatggagatgctcacagggaaggccccgctccagacgcaggggaacgacgacgtcgtcgacctgccgagatgggtgcactcggtggtccgggaggagtggacggccgaggtgtttgacgtggagctgatgaagcaccagaacatcgaggaggagctggtacagatgctgcagatagccatggtgtgcactgccaagtcgccagaccggcgcccgacgatggaggaggtgatcaggatgattgaggggctccgccagtccacctcggagagccgcgcgtcttctgatgagaaatccaaggagtcgaaccctccatcggtggatcggagcgagagtaggggcgtgtcggcggtgaaagcgactgcgtcagccatggcggacgaggagcattcggagaggagagaggaggcctccgagcttgcccccttcgacccgaccaagaagaagaaaaagaagaaggttgtcatccaagaaccttctgatgaagtggacaagcttgcagagaagacagaaacactggcagtcgcagaacccgctgaacttaacttcactggaatgaagaagaaaaagaagaagccggtggatcttgattcaactcttgatgagcttggagatggggaggacactcaagatgatcaagctgtagaggaacaaggggaaggcattgtgctgggaagtgtccctacatacccttgggagggaactgatcgggattataaatatgaagagctgctggacagggtgttcaacattctacgtgagaacaacccagatcttgctggggataggcgtaggaccgttatgaggccaccacaagttcttagggagggaacaaagaagacagtttttgttaactttatggatttgtgtaaaacgatgcataggcaacttgagcatgtgatgatgtttttacttgctgaaatgggaacaagcgggtcacttgatgggcagcaaaggttggtgatcaaaggaagatttgcccccaaaaactcgaagcaatcctga

SEQ ID NO: 10001 - DNA, 215 bp, Zea mays
  Peptide Sequence Number=SeqID_51780
atggcgtcgtcaggtggccacatgacagtaagtcacgcgcgcaacctgtgcctcctcctcgtcactgacggcgggaccagcagcctcaccttgttattgaaagggaaatgtgccccttgggccatttctaagtattttggtgatcgaatgtcaacacaagtgcttcaatgtgaatcaatgcccatggatgaacaaagcgcaaatctagagcaaag

SEQ ID NO: 10002 - DNA, 532 bp, Zea mays
  Peptide Sequence Number=SeqID_51781
ggcagaccaagggtgcagggcgacaggcaggtccaggaggaaaccacccgtcgtcggagttcatcatcagctacttggccagaacacctgccgggacccctccaccatcccgctcgtcatcccggacgacaccgctccgccgccgccggactgcgcaaacctcatcagcttcggaggatccaccgtcgtcggcggaggcgcatccccgagcgcaaacactactacaactgttccgacgacgatgttgtctcgcttcggctacagctcctctctgccgacgcagacgcaggcgcaggcgcagctcgccgcagccgtggtgggacctccggggacgacgatgactgcctcgtgggctacggtggggtccgcgccggcggagtactggccgggagggacgaccagcgacatggcttgtggccctgctggcacggccagcttcccgtcgtctcctagcagcctcggattcatgaccggctcgccgtttggaaacgccggcgatgacgacctgtttctgtttggcttcgatccctga

SEQ ID NO: 10003 - DNA, 216 bp, Zea mays
  Peptide Sequence Number=SeqID_51782
atggcactcccggcgtcaagctccggcctcttccgcttcgtctccccccgcagccgtccccagtccactgacatcgtggccgctgcctcctggggagtcttcgccggcaccgccggcctttacctcgtccagggttgtgttgtttgcgattggatccgtgttcttcgtgtgaacttcgttgttcctatggatctgcgaatgttggatcggtcttag

SEQ ID NO: 10004 - DNA, 336 bp, Zea mays
  Peptide Sequence Number=SeqID_51783
atggacgacgaggcgaggcgcgtccgcgtcgcgggcggactcggcgtgaccgtgaagctgccagggccagagcatgcgtatgcatgcgttgtccgctgccgtcacccgcccggcgctccacagacagacagcttccatgccgggcgcacgccttgcccttgtgtcgttgagaagaagtatccctgccccgtcgtggacaccttgtctctgcctaatctcaaccgagggaatatttccatcaacgtggacatcagtactccagtctcaactctcaagaatggtgaagagcaggtatcatcagaggaggactactacaatgagttctacgagatctag

SEQ ID NO: 10005 - DNA, 1869 bp, Zea mays
  Peptide Sequence Number=SeqID_51784
atggcgtcgacggcggccaggcggctgcttctgccgctgctgctggtggcgctcatcgcggcgcaccgggcggcggcgcggttcgtggtggagaagaacagcctgcgggtcacgtccccggccgtgctccggggcgtctacgagtgcgccatcggcaactttggcatgccgcagtacggcggcaccatgcacggcgttgtcgtctaccccaaggccgacgccaaagcctgcaggcccttcgccgactccggcctctccttcaagcccaggtccggcggcctgcccgtcttcctgctcgtcgatcgcggagattgctacttcacaaccaagggatggaacgcacagaacgccggagctgcagcagttcttgtggccgacgacagagtggagcctctgatcacgatggactccccagaatccagcggcacggagcacatagagaacatcacgatcccatcggcgctcgtgaccaagagattcggcgaggacctgaggaaagcgctgcagagcggggacatggtgaacgtcctcctggactggagggagtccctgccccaccccgacgagcgcgtggagtacgagctctggacgaacagcaacgacgagtgcggcgccaagtgcgacatgcagatgagcttcgtgaggagcttcaggggcatcgcgcaggctctcgagaagagggggtacacccagttcaccccgcactacatcacgtggtactgccccgaagccttcgtcctcagcaagcagtgcaggtcgcagtgcatcaaccacgggaggtactgcgcgccggacccggagcaggatttcagcaccggttacgacggcagggatgtcgtgctccagaacctggtccagatctgcgtgttcagggtcgccaatgggactcgcaggccgtggatgtggtgggactacgtgcacgacttcgctgtgaggtgcccgatgaaggagaagaagtacacgcgactggacatcgagaaaatcaacaagtgtgttggagatccagaagctgataaagaaaatccagtccttaaggcagagcaggacgctcagattgggcatggttctcgcggcgatgtaactatactgcctactcttgtcgtcaacaacagacagtacagaggtaaactggaaaaaacatctgtgttaaaagcagtatgctctgggtttgaggagacaactgaacctgatgtctgtttgcgcgaagatatcgagacaaatgaatgtttggagaacaatggtggttgctggttagacaaggctaccaatgtttctgcgtgcaaggataccttccgtggtcgtgtctgcgaatgccctattgtgaatggtgtgaagtttatcggtgatgggtacaaccactgtgaagcttctggccttggtaggtgccagatcaacaatgggggctgctggaatgagactaggaacgggaagagtgtgtctgcctgctcaaaccaagaagctaaaggctgcaagtgcccagcaggtttcaagggcgacggagccaacagctgcgaagatgtggatgagtgcaaggagaagcttttctgccagtgcaaggactgcgcttgcgagaacacgtggggaagctacgagtgcagctgcggcggcggcaactcgctgtacatcagagagcatgacacttgcatcagcaaacattccagctcgacgccgagctggggcttcctgtgggtggttttcttgggccttgccttggccggagcaggagcgtacgccgtgtacaaatacaggctacggagctacatggattcagagatccgcgcgatcatggcccagtacatgcccctggagagccaagacatgccgagccaacaacaccacctcgtccccgtcgaccgtgcagacgtctga

SEQ ID NO: 10006 - DNA, 2475 bp, Zea mays
  Peptide Sequence Number=SeqID_51785
atggcctcaccctccgctccgccgcccctcttcattttctattgctcccccggtgccggccccggtctccacccacgtatccgcggaggcggaggagctgccgctcagcgaactcgacgcgcccatcccgtctcccccctggcgattcattcggccgcccaaacccacagggagtcggagccggaggagggaggcgttctggagtccgtccaaggagcagttggcgacgacggaaggcgcagcacacgagcaacgtacgagggaaaggggaaacaaagagttcgccgcgtgagatgcccgaggtgccacagcgttctcgaggagcccagcgcgccggtgtaccagtgcggcggatgcggcactagccttcgagcaaagaaccgtaccggcaccggcaccggcagcacgggagacgcggccggggcgtcgccggcgcggagctggctgcctcctcagagcaggcacctggacgccagcgacgtcgcgagcaccagcaggtccagcaccccgacccctcctcgtgtcgccagcaccagcaggtccggcaccccgacccctcctgacgtcgggaccagctggcaccgagacaccgacgcgacaggcacccggcatggttccggtgatctcgctctcgtgtcggccgggacgcgtgggtccggtgacgtcgcgagcaccagcagtactcctgttgccaccgcgagaagcaggcgccgccaaggcaccgacgcgacgagccgtggctccggcgacgttgccagcaccagcagtactcctgacaccaccgcgagaatcaggcgccaagacaccgacgcgacgacccgtggctccggcgacgttgccagcaccagcagcacacctgacgccagtgccgacacgacgagacggggcgagtccggtggtcccgtgccggcgaggaatcgtgtccctgagcaagcggcagcggcactgatcgagaaaagagggcgcgaacagagcgcggccggtcaggaagtccgtgacgactctgaaggccgcggaacacgagatgccagtggtgcggagtccggcgtcggtggtgtcggcttctccggaggaaacagagatgccactcctgaattgcaggatgacacggagaaggggatgaaacgccatgacgaatctaacgatgctgcgagaaaggaacgtcgtggtgaagctgcagagcagccgcgttacgaccatgaccgacgccaagaacttgcaccgaaatcatcggctcaacccgcggctgctcagcttgcacgcgaagatgaagctgctactgccggagaaaaggcgccgagcccttctcgccacgaggttcaagaggaacatctgcggcccctgcggaagaagattctgaagacggtggatgagctgaaaggcgatctctctgaacttttcagcaagtcccccgagctcaacgcgccacgcgcgcgccctcctcgtcttcccaggcaagaagcctacgtgtcccacgcggtggcgggggcggcctcgggcctccctgccagagctcgccacgtcgcttctgctgccgaaggtcaccgtggcagcgtagctcgtgcggcgaagccccgtccagccgcggctcctccccgtggcttgccatcccggcgctaccgccagtgcagagcgcacccgtgctgccatgacgtggatccgaggccgtgccatcacgggcacggctgctgcggccaccacggcaaaccggagtgcagcagctgccgaggatactgctgcaggcccagagcgctggagccgtccgcgccgcggaagcccccggcagccaaggagcccaagcggcggctgccgccccgcaaccactgccggccagtactgaagggcgcgccgttcatcgtgtgctccagctgcttcaagctggtgcaggtgcccgccgacttcgccgtctcgaccaggatggtgcgcaggatgcggtgcggctcctgctccaccgtcctctcctactcctacagggacccggccaggaagaaagcctaccaggactcggtcaatcggtgcagcacagacggctccgagctgcacggcggcacaggcgaccaacggtcggacccgttcgcgccgttcatcgatggcttcggcctcagcagctactcgacggaggacgagcggcggctgcccgtctcgaggaacacgtcgttcgacaccctcgacgggacgaaaggcgtgggacggctgcaccggctgatggggtacgggtcagctagcgagctgctgcggcactcccctgacctgtacgagagcttcagtgagcgaacgacgcctgacgtgagacagcacgacacgaaagggaaaggcgtttgcatcgacgatgacgactacgactacgacttggatgacactgacgatgaagacattggtgcgctgaagagatcagcgaggaaagggtccggctggacgctcccatggattcccggcaagcggcaaggggactcgggagccatcaggatcaagtaa

SEQ ID NO: 10007 - DNA, 726 bp, Zea mays
  Peptide Sequence Number=SeqID_51786
atgaagtctggatttagaaggaaaaagaaacccaggtgttctattgttgagacagaagacaaatacatttgtgcactgtgcttggagcttattgaagcaactcaaactaatatactcagccatgctacattgatagtatgtcccgcaccaatattggcacaatggcactctgaaattacccgacacacaaggccaggatctctgaaagtttgcatttatgaaggtgcaaggaacttggatccttctaccatccaaaaaaatgatatgactgaaataattactgctgatgttgtcttgacaacatatgatgtcttgaaagaagatctatcacatgattttgatcgtcatgatggcgatcgccgtttcttgagatttcaaaagaggcaagtcatgtttagttttcacttttcacaacgaagatatcccgtcattccaactgtcctgacaaggatccactggtggcgactttgtttggatgaagctcagatggtagagtcaggcaggacttctgtgactgagatggcattgaggctaaatgctcaacaccgttggtgtatcacaggaaccccgatacaacgcaagcttgatgatctctttgggcttctacgttttcttaggacaaacccatttgacacatatagatggtgggtggacattattagagatccatatgaggccgtctctgacagatcatgccaatggccgcataaccgttttgcattgtag

SEQ ID NO: 10008 - DNA, 2769 bp, Zea mays
  Peptide Sequence Number=SeqID_51787
atggatgaaattttacagtgttgccagttatacgtttgcatccaggttcttattggtaaagcaaaaattgaaggagaggaagagctcaggaaaattgtagttgccctgaatggtcttgctggattagctgttattgaacaaaggaaccaagaagccatttctttatacaaagaagcactagcattggctcatgaaaatattaatgatttccgtgttgaccctctgttgaatcttcatatcaactacaatcttgcagaactgcttagaattagttctgagtatttacaagaatgcccattaaaaaatccggcttttgaagttgcaatcagccgaaaaagaaaggaaatagatactgttgagacaaatgtacttagtgtaaaacgaaataaaatatgtgaaaacagtgttttgagtttgacagctaatgggctagaaacatctgaagataaaaacactattggacaaacatgcatgactagagatgtggatgtggagaatgtcactgggtgccactcatcatttgaatgttttgctgatgactgcttgaggaagacttgcaatacaatcacagaaaaatacctgtcaacttttacttcaaggctggtagtagcgcagaaggattttaatgcatcattcacagaggtcttgaatatcactaaagagctacagagtgagtatatgaattggtggctgtatgctttggactgcattgaagagaacaacatttctgctgacgatctgatcaagaagattgataattcttctagtaagagcaccactggtttgggttcatggggaatatcttccagggttaaaagtattgctggcttaaaatatgcaattcaagctgatattgattctctacaaagttcgaggcaacatcttatggatagacttctggaagttgacaaaacaatggctaacccaagggatgaggacattgagggccagcgatattgtccaaactgctatgatggcactggttctctatgtatccagtgtgagctagatgaactctttcagaggtatgaatcacgcctgtttcttgttaagaaatcgaacaatggttctgtcattgattcagtagaagaagcacatgatctactgaggcgaaaatatgagctcaatcacttcttccgtaatagaaaatccaaggagggacctgaacctgactatgacaataacaaccctaggtcagctcgagaaaacatacaggtctataggcatccttctagaaccgagactgcattaagggttatctggaatcactcaaagacagtattgggaaagcaatattccacaatggctaaaaaacatttacttctttttgaggctatgcgcaaggaatttcctcaagcaaggtttctgtcaattgctcaaacacaattattgcgtgctcatgatgagatcaagatgtccatctcaagacttcagctcaaagagaaagaggatgatcctagcgctgccaatattgtaactagagaggaactcataccatataatgttcagtttacaagtgaaaaattcatgtcactctcatctttagcccgtgtaagaggtcaactccggtacttaaagggattggcggtatgtaacaagaaaacacataaccagcatgatgaatcactggctaaagcaggcgatgctgttgatacagctacttcatgttcagccacagggcaaactgtttctgattttcgtaatgaaccatgcccgatatgccaggagaagaacaaactgcagcacaattcggaaagcgtaaacaatggattatgtgccccacatgccgccagcgaacagatattgagaacattgctttttgtagttgagaaaccttgggacaaacatgaaaagagcattgaagatttggctgaaagcactatttctgtccaaggttcatatggaacaaagtttgaagctgtcacaagaagaatcttgagaatcacttcaactgatggaacagctaaagttcttgttttctcaagttggaatgatgtactggacgtactagagcactcccttgctgctaacaacatttcatatgttcggatgaaaggaggaagaaaatcacaggcagcactctcccaattcaagggtcaggagagcaatataaatgtagataaagtgaacagggcagcctgcaaaatgcagcctgttcaagtacttctgatgcttatacagcatggagcaaacggtcttaatctactagaggcacagcatgttattctagtggagccattactaaatcctgctgctgaggcacaagctatcagcaggatccatagagttggacaagacaaaagcacatttgttcaccgttttatagtgaagaaaacaatagaagagagcatctacaaattgaacaggagcagagctgtctgctctactataaaccgtaaatccaaaaacttcaaagatgagcctgttttgacgctgaaggatgtggagtcgctattcccgatggcaggacctgatgaacccctagaacaggcagatcaaaattacggcgatagcttgaggagtttgcctccatctgttgccgctggatgtgccggatggtcagtcaggaagatgcagcaaggctttctgatagcttctgcatccgggcccctgctgtgccaggctcgacggcgggcgtcggcgcacgacatccgagtgcgggtccacgagcagagcatggccatgaccgccggccgccgccaccaccacgtactggtagaagttcactccactatcttcagcagcttacccatcactatcttactgtaa

SEQ ID NO: 10009 - DNA, 450 bp, Zea mays
  Peptide Sequence Number=SeqID_51788
atggcgtcttccgctggcggcggcctgcgttcaccggctgctacggcggcgccacgggtggtgatggacagcctgatcgaggtgcgcgagggcgcgaccaggctccagaccatgctgctggaggagtcgcccacgccttcgatcgctgcggcggcggcggcggcgggggccaccagtgaggtcagacagacgcttgacgggatgatgagcagcctgtcaagcgccatgtcggctctggacaccaccggcggcggcggcggcggtcagggacagcagggccggaggaggaagcgaggcggcgcggcggcggccaggtctgggccgctgcggcggagcagcaacaggagaagggtcgcaaactgcactatcccggggactaaggtgcggggaacatctgcactctctctcggaacggtgcagatttgggaaacgtcccagttggcggcgtag

SEQ ID NO: 10010 - DNA, 810 bp, Zea mays
  Peptide Sequence Number=SeqID_51789
atgacgacgacgacgtccgctcgactccggccgctcgccgtcggcgtcgctctctttgtcttcctaccgtggctgagctacgtgctcgaggctgccgaggagggccgggcggcggcgccgtggttctggccaccacagatcggcggcgacgacccctactactactgcctcagctggcgcctgatggtggaggcgggcaacgccaaggggtggcgcgcggtgccggcgcagtgcgtgggctacgtgcgcgtgtacatggcctggggccagtaccaccgcgacgtgggcgccgtcgcggagctggcggccgccggtgcggacgggctgatcgacgcctgggtgctggacgtcgacgacacctgcctgtccaaccagccctactaccaggtgaagcagttcggggcgtatgatccggtggctttcagggcgtgggcgagctgggcgacctgcccgggggatacctgcgatgcaatggctgttccagacgctgagaggcagagggttcagggtgttcctcgtgactgggagggacgaggagaccctgggctcaagcacggccgccaatctcgccgccgccggcttctccggaagcgcggcgtaccgtgggcagagcgcggtggcgttcaagtcggcggtgcggaggaagctggcggaggaggaggggtaccggatccggggcaacgtgggcgaccagtggagcgacctgcagggcgaatgcgccggggaccgcgtcttcaaggtgcccaaccccatgtacctggtcccatgatcgatcatctcctttcttcttactccctccgtttcttttag

SEQ ID NO: 10011 - DNA, 408 bp, Zea mays
  Peptide Sequence Number=SeqID_51790
atggctcctaatgacgttgggcgttcgtttgttggtgttatagaggatgaagccatgcttgggcgaggcagaagtctacccgaggctatgaccgagcctgctctggggctcatagtcgtgcaggaaacatttaaaggaatgtcctcctacgggatttgcggggagcaggtagccgaggcagagctcgagcgaggcggagtttgttccgaggctgaggtacgcgcattgaatgctcatgtctcctgcaacctttggctgatgcttggctcgaggttgtctttcttgtccaagacgggctcgggcgaggcggaaacgacggttccgtggagagggtaccttaggcgggacaaggatttccccgagtacataccaggtccgagggcaggctcgggcaaggcagagttatga

SEQ ID NO: 10012 - DNA, 135 bp, Zea mays
  Peptide Sequence Number=SeqID_51791
atgggggtaactcacagctctcaaactgggttgaaagaaaggggaggcttctacaggataagttcaagggtcaaaggcgataacggacaagggtacgagagaaaagatgaaggcattagagtgccagtggtatga

SEQ ID NO: 10013 - DNA, 315 bp, Zea mays
  Peptide Sequence Number=SeqID_51792
atggtggggcctagggcattggccgccggccgccagccaggcatccgagtcccgccttggacacttccacctgaccacctctggggcctcgccgcctcggtcgacggacgtatcgctgactcgctgccaggcacgatcctgcacggtgtcgtgttgcgcgcgggactgcggagcggtggccgccgggtggagaagggtcgaggcccctcacggccgctgctcccggcgatctccgcacccttccgcttgctcccggccgacaagcgccacggcgtcaccggcaggcggcaggtcgcggaacagccgcgagactag

SEQ ID NO: 10014 - DNA, 525 bp, Zea mays
  Peptide Sequence Number=SeqID_51793
atgaaggaggatgaggagatgatgtgcagatgtcggataggagaacgtgggcgcggacgtctggtttcttggagtagtgggcgagtgtcgcgcgagcagcagggcgtgcggcggttgcaggagcgtgcatggggagaagtggaggccagcgctctggcaggtgggccccaggccgcggctagacgagcacgcctgggcgagcgcggcggcagggacgagcgcgagcgtctcggcaggcgtccactccggcgcgccacccgagcgggtgcgccacgggacctgggcgcctggacgcgtcggggtgcagggacgtcgagcacgggctcggggcgggtccctggcgcgagcaaggaggccgggcgcgcggttgcctgggcgcgcatggcgtcccgagcagagcgacggcggctgggaagaacaaggggagaagggagaaggaggcgcgggtggggcccgcttgctagtgagaggcggcaggagtgggaggcgaggggacggtcggctgggcctaatgggccagtttag

SEQ ID NO: 10015 - DNA, 903 bp, Zea mays
  Peptide Sequence Number=SeqID_51794
atggtgactactacgatcgaggacctccacggcgacgtgctgggctgcgcgctgcggcggctggacgggcggtcgcttgcggcggccagctgcgccacggtcgcgctccgggcgctggccacggacccggagacgtggcgcgcgctctgcgtcgccgagtggccgtcgctggcgctggcgctggcggcgcagcgccggctgctcgaagcggtagcaccgcagcggctcttcgccgacgcgcacccgttaccgtccgcggacaccgggggaaccggagatcccgaccccgaacccgtccccgccgggagagctggtctccgcggtggacgtctactacaggggcgccctcctgctgtcccgcatgatggagacgcccgcgtcctcaccgccgtggagcggaagaggccggcctccgccgcccgcgtgcccctcgccggtggagctcgagctgagctgaatggtcgtggaccccggcccgcggccgcgcggtcaacgtctccagcccggcgcccccgtgggcggtggcccggcactggtacacgggcgagacgctggcgcggttcgccgtggtgctgggagggtgcaagttcgaggccaccgtcgccctgctccgagggggcggatggtcacgtcagcgaggtcagcctggccgtggaggacgccgacggcgccgccgtcagcggcgagggcacgctgcggctcctcgccgcggcgatggaggccccccggaagggaggggcgcgggagccggaggaggcccggaggcggtacctcgacttcgtgaagcgcaagaaggggaggaaggagagcaaggcgcgccgcgaggcgctcgtggacctgtgctgctccgctgccagcgccgtcgtcgtgctcacctgcctcgccgctgtcgcgctccggtga

SEQ ID NO: 10016 - DNA, 1704 bp, Zea mays
  Peptide Sequence Number=SeqID_51795
atgacgaggatcttcgtgcagcgcgggaccgccggctcctcgtccagctccggccgctcggacacgcagccagtgcagccggcagcagctgcccgggaggaggagttgccgctgcaacctcaaccacagctgccggagctattggccatagatgatacaactgataatttaaatgagggcagcgagaatatcagcaataagcctttgaggacggatgacaccatttcagagagctcaagctccgcagaggagagggctgccagggagaagcctcttaaggatgactctaatgtaatcaaccccacttttcttagtagaggacctgtagggatccagatccctgatcagattgagcatgaaaattctgtgctgtcagtcactggttcatcacagatggcaggtgcagcatcgcacccaccaccaccgccagctccacctccaaaaccattgttggggaataatggcttgcggagaatggggcctggaagttcgaatagtgtgcggattggatcttcaagaaggccagtagcttggccactagtggcagcccggacatctgcttcaggttctcggccttcttcacctaggtcacttgttgatggggaaggttacaacagtgctgatgaacagggcccctgttatgccttgagttatgatgattcggaaagggagcgtatgtttgaccatgacctaaggcgagtgaaagggttggaaatcagaaagatggccgaagatgggaactgtctattcagagctgttgctgatcaagtttatggagacgcagaagcttatgacatggctaggcagatgtgtgttgattatatggtcacaagggacatacaaggggatatcccttggtatatgtttcttgcggacgatgtagtgctagttgatgaaagctggataggagaaagggaacgggatcatttctctcagttcataactgaaattgaaagttttacattatactgtaagaggaaaaggagagataaggtttatggcaacaatgttgagatccaggcatttgcagagatgtacaatcgtcccattcacatatattcctacagtacagagcccattaatatttttcaaggaagctataacacagacgttcctccaattagattaagttaccatcatggtaatcattacaattcagtggttgatccccgacggcagacagttggggcaggacttggatttagctcccttagagggacaaataatgttgacagggaccaggtgaaggctgcaataaaagctcagcaagaccagcaaattgagaatgcacttttagcagaagggcgattctactctgatctggagttaacagagagggaaatagaacggatggtgatggagtcctctcgttcagaatatctcgccaaggagaaaaagcttaacattcgggagtcatcgacatcaagggcagagccatcttcatccgccgcaattagtggttcctcccgttcagttgctggagctgatagaggcaaagaggactactttgtgcttccagatactgcactgactcgcagcatgcagttgctcctcgcaatgggcttcagctacatccaggtcatggaggcctacagcatattcggcgaggacgtggactcgatggtctgctacctgttggagacaggaggcaccggagcctcagcgggcggtagcaatcgccggaaaggaaaggctgctgagtga

SEQ ID NO: 10017 - DNA, 1671 bp, Zea mays
  Peptide Sequence Number=SeqID_51796
atggcggactggtcgtctctcccggcgcacctcgtcaaccgcatcgcggaccgcctcctggccaccgacgaactcgactactacatggacctccgcgccgtgtgccgtggctggcgttcctccaccaccgaccccaagagcaggcctttggacccgcgcttccggccgcaccagtgggctatgctccacgaggtacaccagagcgatgagcgactcttcgtcaacgccggcaccggccgcttcgtccgcaggtacctgccgttgctccgcaggtacatcgtcgtcgcaggcgccgccggcggctcggtcgtcctcgcggagagaaccgctccgcacgccgcccgcgtcctgaaccctttcaccggcgccatgatcagtttcgatgcgcctgtgccgcctaacttgtggcaagtcgctgctcatgtgatcggctcttcgccgacgctggttctgctctgtaaagattcttgtacgatctactgggctgatccttgtagcggaagtttcatggagcataatgagggacgctttgctcgtcctctggtcagattggccctcgaaagcagagtctatgctgctgcacgagagggtggaccgttggtgttgttcttcgttcctgatgccagcaaggtattggatatagcagctaagctgctcgctgagtatttctccggcgggaaccaacggttttttctcgtggaatctggaggggagattctgatcgttgtcaagctgattcatggcgtcgttgtcttcaagatcgacaccgggaccggtcagctcgaactggtaaagaacttaggcagccgagccctcttcgtcggggactgcaggtgcctgtccgtggatgctgacaagttcgcgtcggtggaagccaactgcgtatactacgtcgtggaggaaccttggttcgacgtgtgcgtgtacagtctcagcgacaagactgaagtgagggctggtggagccatagattctctgaaccccatcaccctcagtgttgaccctccattctcggaagttcagctcctctgctgctacactttcatggtccaggaagtgtttgcaatgttattggtcgatgagcttattgaacggaatagttattggcaccgatctgcagagtgggcttttcctcctgtattagcgcatccagtcggccgtcctcttccatatatcccgcgcgacaacctgcctgccggagttctcccgctgcgttctggtctgggcggtgactatgcgccgactgaaatgtcgcctctgttccctggctgtgagagcccacgcatacctcttagtttctctgttcgtggcactaacttcttcctctctgccctccctgttcgtctctctgttcctgcatgggagattgggtttccaagcttcttgtggcaaaccagatcgtgggtaacgccttggccgtcgtcggccctctgcgcgttggccgttcggccctcttcccgcacccttcgatggatgttgttctcaagctccatgctctcccgaacgtggcctgacccaggtgttcttcgtcggtcgcttctgggtgttgcccccgctcttcggccaaataagactggaaggcaattgttaaagatatatgctaggggaatcctagatcaactcgacgaaggagactatgaaaggtgggattgggaacaagggctcggatga

SEQ ID NO: 10018 - DNA, 222 bp, Zea mays
  Peptide Sequence Number=SeqID_51797
atggctgttgtcagcggcaaacgtagagatttgtttttccacttctttactttccgcactgtctctccaggcgaagcgacttcagaggattttcaggtgcagcagcaggcggaatcagccgtgccggatgggctacagcagcaacagagcaatgcgaagactggtgagccgcaagaggaggcgacagttgggccgataaggcgatcgtgccagcgcaagtga

SEQ ID NO: 10019 - DNA, 309 bp, Zea mays
  Peptide Sequence Number=SeqID_51798
atggaggttgttcgagagcacgtggcggcggaccccaaggctgcggttgcggcggtggttcctcgatccagagttgtggcggtggctcctagattcggaggcgcggtgggggcggctcccaatcggagggcgagcggcgtcgggccccggggcgcgcaagcggtggtgactccggggctcccaggcgacgacactctcgaggcaggcggtcaagcggcaacatcgctcccgagcgacggtgcccacccagacacgtgcgacatcgacggttcccgagagcgcgcggcagcgacggacccccaaggctga

SEQ ID NO: 10020 - DNA, 1155 bp, Zea mays
  Peptide Sequence Number=SeqID_51799
atggcgaactggtcgtcgctcccgtcgtacctcgtcaaccgcatcgccgacattctgctggcaaccgacgacctcgactactacatgaacctccgcgccgtgtgccgtggctggcgctcctccactgccgaccccaagagcaggccgcgggacacgcgcttccggccgcgccagtgggctatgctccacgaggcagggaaaacattctcggcgaaaatttttcgagaaaaccgaaaatcacgtttatcggtccaccagagcgacgcgcgtctcttcgtcaacgccggcaccggacgcttcgttcgcagggacctgccgctgctccgcaggtataacgtcgtcgcaagcgctgctggtggcttggtcgttctcgcggagagaagcgccccgcacgccgcccgcgtccagaaccctttcactggcgccatgatcagtttcgtcgcgccagtgccttgcttgtatgatcccgctgctcacgtgatcggctctttgccgacgctggtctttatctctaaggacgattcccctacgatctactgggctgatcctgatagcaaaagtttcgtggaggacaatgagggacacttcactcatcttctagtcaggctgcctttcgaacgtagagtctaccctactacactgcagggttggctgtttgatccatccttcgttattgatttcttcaatcaccatttcgacggcaacgctgaatgcccactcgtgaacaaacgatgtttccaagtggaatctgctggggaaatgctggcagtctacctgtgtcttcatggtcatggcgttgatgttttcaagatcgacaccgggagcgatctgctcgatcgggtgaataacctaggcagccgagctatctttgtaggagagcgcaggtgcctggccgtggatgctgacaagttcgcgtccgtggaagccaactgcatatactacgtcaggaaggaaacgagctggtacgacgtgtcactgtaccgcctcaaggacgaaacgggagtgagggctgttggagccatatattctttcggctccagcttcctcagcgatgaccctccattctcggacgttcagctgctctgctactacacattcgaggtccagaagatgtttccacagttgcagcaggattgctttttctccgagtcgtag

SEQ ID NO: 10021 - DNA, 483 bp, Zea mays
  Peptide Sequence Number=SeqID_51800
atgtgcagtggttggcgctcctccaccgccgaccccaagggcagtccgcgggacccacgcttctggccgcaccaatgggctatgctcgacgaggtctaccagagcgacacgcgtccctttgtcaacgttgccaccgaccgcttcgtacgcaaggacctcccgttgttctgcatgtgtgacgtcgtcacaggcgccggcggcggcttagttgtcctcgcggagagaaccgccccatatgccgctcgcgtcctcaacccttttactggcaccatgatcagtttcgatgcgcccgtgccttgcttgtatgaacccgctgctcatgtgatgggctccttgacgacactggtccttacctctaacgcttctggtacgatctactgggctgatcctgacagcaaaagtttcacagaggacaacgatggacactttactcatggcttggcggccggattcctcctattctaccgctgcgttctagtctag

SEQ ID NO: 10022 - DNA, 1095 bp, Zea mays
  Peptide Sequence Number=SeqID_51801
atgggctgctgctccacctgctgttgtacgacgtcgttctgctacgcctcttccttcgtcctacgggtgctccccctcctcgtcctcgacccatcgcccactatctttgtccaaccatctgtaattataactctagaacctctttctcatcctgtatgcgtcttcgatcagtggcagcgctcctttctctcctacattcgttcgactgtggtgacttcttctatggcctcgagcatgtgcaattctggccctgcttcgacgatgaatgtggccttgattactgcgacgtatcttggccaccaaacatgcgagcatggatccaccactgtggacgagcgcgacctcagtcgagaatccatctcggaagaagatgaagttgacaagagggattcacataccactaaggctttatttggttactctagtatggacttcaatctacatgtattgaggtggattgagtcatcgctcccggcggacatcatcaaccgcatcgccgaccgcatcctgtccaccgacgacatcgactactacatggacctccgcgccgtgtgtagtggttggctctcctccaatgccgaccccaagggcagtacgcaggacccacgcttccggccgcgccagtgggctatgctcgacgaggtctaccagagcgacacgcgtccctttgtcaacgttgccaccggccgcttcatacacaaggacctcccgctgttctgcatgtgtgacgtcatcacaggcgccggcgacggcttagttgtcctcgcggagagaaccgcctcgtatgccgctcgcgtcctcaaccctttcactggcaccatgatcagtttcgatgcgcccgtgccttgcttgtatgaacccactgctcatgtgatgggctccttgccgacactggtccttacctctaacgcttctggtatgatctactgggctgatcctgacagcaaaagtttcacagaggacaacgatggacactttactcatggcttggcggccgccggccggattcctcctattctaccgctgcgttctagtctgggcggtgactatgcgccgactgaaatgtcgcctctgttccttggctgtgggaggtaa

SEQ ID NO: 10023 - DNA, 1053 bp, Zea mays
  Peptide Sequence Number=SeqID_51802
atggcgagctggtcgtcgctcccggcagaccttgtcaaccgcatcgccgacctcctgctggcaaccgacgacctcgactgctacatggacctccgcgccgtgtgccgtggctggcgctgctccaccgccgaccccaagaacatgccgcgggacccgcgcttccggcctcgccagtgggctatgctcgacgaggtccaccagagcgacgcgcgtctcttcgttaacgtcgccaccggccgcttcgtccgcagggacctgccgctgctccgcaggtacgatgtcgtcgcaggcgccgccggcggcttggtagtcctcgcagagagaaccgccccgtacaccgcccgcattctcaaccctttcactggcgccatgatcagtttcgacgcgccaatgccttgcttgtatgatcccgctgctcacgtgatcggctctttgccgacgctggtctttatctctaaggacgattctcctacgttctactgggctgatcctgatagcaagagtttcacggaggacaacgatgggcaatgtactcatcctctggtcaggttgcctttcgaattcagcgtctacgctgctgcacgggagggtggaccgttggagtcgttctccgttcttgaggggcccattcctaagtatctcaccggcaacgctgaatggccatacctgaacaaacgatgtttccaagtggaatctgctgaggaaatgctggtcgtcgtcttccagcgtcttcatggcgtcgatgtcttcaagatcaacaccaggagctgtttgctcgaacgggtaaagaacctaggcagccgagctatctttgtaggagagcgcaggtgcctggccgtggatgctgacaagttcgcgtccgtggaagccaattgcatatactacgtcatggatgaaccgtggtacgacgtgtgcgtgtaccgcctcaaggacgaaacgggagtgagggctggtggagccatagattctttcagctccagcttcctctgcgacgaccctccattctcggacgttcagctcctctgctactacactttcgaggtcagggtttaa

SEQ ID NO: 10024 - DNA, 795 bp, Zea mays
  Peptide Sequence Number=SeqID_51803
atggcgagctggttgtcgctcccggcagaccttgtcaaccgcatcgccgacctcctgctggcaaccgacgacctcgactgctacatggacctccgcgccgtgtgccgtggctggcgctcctccactgccgaccccaagaacatgccgcgggacccgcgcttccggccgcgccagtgggctatgctcgacgaggtccaccagagcgatgcgcgtctcttcgttaacgtcgccaccggccgcttcgtccgcagggacctgccgctgttccgcagggtctacgctgctgcaccggagggtggaccgttggatccggacttcgttgttgaggacttcattcagtatctcaaaggcgacggtgaatatccagtcgtgaacaaacgatgtttccaagtggaatcagctggggaaatgctggcagtctaccagtgtcttcatggcgtcgatgtcttcaagatcgacaccgggagcggtctgctcgatcgggtgaagaacctaggcagccgagctatctttgtgggagagcgcaggtgcctggccgtggatgctgacaagttcgcgtccgtggaagccaactgcatatactacgtcatggatgaaccgtggtacgacgtgtgcgtgtaccgcctcaaggacgaaacgggagtgagggctggtggagccatagattctttcaactccagcttcctctgcgacgaccctccattctcggacgttcagctcctctgctactacactttcgaggtctggaagatgtttccacagttgcagctgaattgctttttctcacagacttag

SEQ ID NO: 10025 - DNA, 912 bp, Zea mays
  Peptide Sequence Number=SeqID_51804
atggcggactggtcgttgctcccgtcttacctcgtcaaacgcatcgccgaccgcatcctggccaccgacgacctcgactactacatggacctcccgcgccgtgtgccgcggctggcgctcctccactgccgaccccaagagttggccgctggacacgcgcttccggccgcgccagtgggctatgctcgacgaggtccaccagagcgacgcgcgcctcttcgtcaacgccggcaccggacgcttcgttcgcagggacctgccgctgctccgcaggacgattctcctacgatctactgggctgatcctgatagcaaaagtttcgtggaggacaatgagggacacttcactcatcttctggtcaggctgcctttcgaacgtagagtctaccctactacactgcagggttggctgtttgatccatccttcgttattgatttcttcaatcaccatttcgacggcaacgctgaatgcccactcgtgaacaaacgatgtttccaagtggaatctgctggggaaatgctggcagtctacctgtgtcttcatggtcatggcgttgatgttttcaagatcgacaccgggagcgatctgctcgatcgggtgaataacctaggcagccgagctatctttgtaggagagcgcaggtgcctggccgtggatgctgacaagttcgcgtccgtggaagccaactgcatatactacgtcaggaaggaaacgagctggtacgacgtgtcactgtaccgcctcaaggacgaaacgggagtgagggctgttggagccatatattctttcggctccagcttcctcagcgatgaccctccattctcggacgttcagctcctctgctactacacattcgaggtccggaagatgtttccacagttgcagcaggattgctttttctccgagtcgtag

SEQ ID NO: 10026 - DNA, 840 bp, Zea mays
  Peptide Sequence Number=SeqID_51805
atggcggactggtcgtcgctcccggcggacctcgtcaaccgcatcgccgaccgcatcctgtccaccgacgacatcgactactacatggacctccgcgccgtgtgcagcggctggcgctcccccaccgcggaccccaagagcagtccgctggacccacgcttccggccgcgccagtgggctatgctcgacgacgtctaccagagcgacacgcgtctcttcgtcaacgtttccaccggccgcttcgtacgcaaggacctctcgctgctctgcatgtgcgacgtcgtcacaggcgccgccggcggcttggttgtcctcgaggagagaaccgccccgttgcctttcgaatccagggtctacgctggtgcacgggagggtgtaccgttggagtcgttctccgttcttgaggcgcccgtccctcagtatctcaccggcaacgatgaatggccagtcttgaacaaacgatgtttccaagttgaatctgcacacgaaaggctggtcgtcgtcttccagcatcgtcatctcgtcgatgtcttcaagatcgacaccgtgagcgctttgctcgaacgggtgaagaacctaggaagcctagctctctttgtcggagaccgcaggtgcctggccgtggatgctgacagattcgcgtccgtggaagccaactgcatatactacgtcctagaggaaccgtggtacgacgtgtgcatgtacagcatcaaggacgaaacgggagtgagggctggtggagccatagattctttcggctcgagcttcctcagcgatgaccctccattctcggacgttcagctcctctgctactacactttgtcactttcgatgtcctga

SEQ ID NO: 10027 - DNA, 174 bp, Zea mays
  Peptide Sequence Number=SeqID_51806
atggcggactggtcgtctctcccggcggacctcgtcaaccgcatcgccgagcgcctcctggccactgacgacctcgactactacatggacctccgcgccggctgggcgaagagcggcacagtgataatagggcagggcagcgaggcgaggtggaatagggtttcgtttatttag

SEQ ID NO: 10028 - DNA, 1227 bp, Zea mays
  Peptide Sequence Number=SeqID_51807
atggcggactggtcgtcgctcccggcggacctcgtcaaccgcatcgccgatcgtatcctgtccaccgacgacatcgactactacatggacctccgcgccgtgtgcagcggctggcgctcctccaccgccgaccccaagagcaccgtggcggaggttgacttcaccagctgccgcctgccgtcgacggtcacggaacctcggccggtcgctggtcggcagtcgcccctgcctactggtctggagtaccggctgtctggcttgcactctcgccgaccagggcccgagcaatatcatatgtgtcgccgtcgccgagcagacgaagacaccgaggccgagctccaatccagcgttatgtgggatagtgattcccaattcatgaataaagatggcgagttagtgagtagcgacacgcgtctcttcgtcaacgtttccaccggccgcttcgtacgcaaggacctctcgctgctctgcatgtgcgacgtcgtcacaggcgccggcggcggcttggttgtcctcgcggggagaaccgccccgtatgccgctcgcgtcctgaaccctttcactggcgccatgatcagtttcgatgcgcccgtgccttgttgcttgtatgaacccgctgctcatgtcatcggctccttgccgacactggtccttacctctaacgcttttggtgtggtctactgggctgatcctgacagcaaaagtttcatgcagaacaacgatggacactttagtcatcctcttgtcaggttgcctttcgattccagggtctacgctggtgcacgggagggtgtaccgttggagtcgttctccgttcttgaggcgcccgtccctcagtatctcaccggcaacgctgaatggccagtcttgaacaatcgatgtttccaagttcaatctgcagaggaaaggctggtcgtcgtcttccagcgtcgtcatcgcgtcgatgtattcaagatcgacaccgggagcggtttgctcgaacgggtgaagaacctaggcagcctagctctctttgtcggagagcgcaggtgcctggccgtggatgctgacaaattcgcgtccgtggaagccaactgcatatactacgtcctggtggaaccgtggtacaacgtgtgcatgtacagcctcaaggacgaaacgggagtgagggctggattgctcagcgatgaccctccattttcggacgttcagctcttctgctactacactttgtcactttctcgatga

SEQ ID NO: 10029 - DNA, 345 bp, Zea mays
  Peptide Sequence Number=SeqID_51808
atgacgccagctaacggtgacggagcctgtcccgagtgtcacaaagtgacactcggtaaagactcactctttgccgattgtccactgtacagacactcggcaaaaagctccccatgggcccctttaccaggtggttggacaaagatagtgggcgatgggtcgaggagggggagcacccgtatgacgaaagaggaggcgcaacagaacgacgtcgtacaacagcaggtggagcagcaggccactgtcgatgcggcgcagcaagacgacgacgatgctcagcaggacgcctttggcgcctcaggttcgacgcacatctacttgcaaggtcctgcgagtcttccttag

SEQ ID NO: 10030 - DNA, 1095 bp, Zea mays
  Peptide Sequence Number=SeqID_51809
atggcgagctggtcgtcgctcccggcagaccttgtcaaccgcatcgacgacctcctgctggcaaccgacgacctcgactgctacatggacctccgcgccgtgtgccgtggctggcgctgctccaccgccgaccccaagaacatgtcgcgggacccgcgcttccggccgcgccagtgggctatgctcgacgaggtccaccagagcgacgcgcgtctcttcgttaacgtcgccaccggccgcttcgtccgcagggacctgccgctgctccgcaggtacgatgtcgtcgcaggcgccgccggcggcttggtagtcctcgcagagagaaccgccccgtacaccgcccgcattctcaaccctttcactggcgccatgatcagtttcgacgcgccaatgccttgcttgtatgatcccgctgctcacgtgatcggctctttgccgacgctggtctttatctctaaggacgattctcctacgttctactgggctgatcctgatagcaaaagtttcacggaggacaacgatgggcaatttactcatcctctggtcaggttgcctttcgaattcagcgtctacgctgctgcacgggagggtggaccgttggagtcgttctccgttcttgaggggcccattcctaagtatctcaccggcaacgctgaatggccatacctgaacaaacgatgtttccaagtggaatctgctgaggaaatgctggtcgtcgtcttccagcgtcttcatggcgtcgatgtcttcaagatcaacaccaggagctgtttgctcgaacgggtaaagaacctaggcagccgagctatctttgtaggagagcgcaggtgcctggccgtggatgctgacaagttcgcgtccgtggaagccaactgcatatactacgtcacggatgaaccgtggtacgacgtgtgcgtgtaccgcctcaaggacgaaacgggagtgagggctggtggagccatagattctttcagctccagcttcctctgccacgaccctccattctcggacgttcagctcctctgctactacactttcgaggtccggaagatgtttccacagttgcagctgaattgctttttctcacagacttag

SEQ ID NO: 10031 - DNA, 285 bp, Zea mays
  Peptide Sequence Number=SeqID_51810
atggtgcgcggcaagggcatggcagcgatgtactcgtggtcctgcaagaggagggaggtgttccctgatagaatattgtttgcttctcgtgagtcccattattcagtattcaaagcaacaagaatgtacataatggactgtgtcaaagttgacacccttatgtctggagaaatagattgtgctatgtctagagaaatagattgtgataatttccagagaaagttattacagaatggagacaaacctaccatcattaatgttaacattggaaatcaggatttttag

SEQ ID NO: 10032 - DNA, 357 bp, Zea mays
  Peptide Sequence Number=SeqID_51811
atggatgaagagcgaacgcacggatgggtcgggctgggaccagaggacgacgaatatgcagagcttcaaaatcacgcgtgcaagatgaaaagacgcgcggccagagacctaagcatccgcggtggtaatttagacgaaagcgaactagtgacgacaactctcggccagacagcgacaactctcggccaggcaacgatgcaccgacacgagtgtcgtggaatgtcagcaccacaacagcaggcgagctgcgaagcggaattaacggcggacaagagcagccaatcggcgagagctaaataccgcgcgatgggcattagggacaagcgcgtgcggcagcgactatggtcgactagctaa

SEQ ID NO: 10033 - DNA, 272 bp, Zea mays
  Peptide Sequence Number=SeqID_51812
atggcgcttcctgtcgacgtgactggcctgtgccctaggttgggcgacgtggaggctcctccgaagccggggtcgagtctgtcttccatggccgaggccgagtccgagcccctgggtcgggcgaggcggaggtcgtcagcagaggccgagtccaagcccctgggtcgggcgaggcggaggtcgttcgctgaggccgagtccgagcccctagggtcgggcgaatcggaggtcgtttgcagaggccgagtccgagaccctgggtcggtcgaggc

SEQ ID NO: 10034 - DNA, 603 bp, Zea mays
  Peptide Sequence Number=SeqID_51813
atggatgaatcgttggctcggtcgtgctatgcaagggagctatggaggttcagctcgttccaccgcctatgtgcttggccgagttgggcgttgagagataaccgaggccagggaaatcgctcaccggtgtgtagcgccgcctcggatccgcactccgtcgcggttggggaaccctactgctcattctccgataaggtgactcctaagccattcaatatcgcgccttgtattggccatggcgccaccgtgtctctgcttgattggattggcttcgatgccgattgcagcagcgccggacgcagtacgccggacgccggagctggagcgcagccgcgcccacgcaggagcagaacgccgggagcagtggagcctggagcggacgccgggagcagtggagcggacgcaggttgggcgctcgctgcgtggccaaggcctggcgcgggtccggaagcatggcgtgaggaagctgcaggggagggaagcgagggagagaagctagaggagaggagggagagggagaagggatggcggcggctgctaggagccaggggcggcggcttagggttagggaaggggcagggggcggccggctcatgggcctaa

SEQ ID NO: 10035 - DNA, 1701 bp, Zea mays
  Peptide Sequence Number=SeqID_51814
atggagcgaaagaactctagaaagagaagcagggcactcacaggcagcattgttcatgctgtgatccacccgcgccgtggtgtcgatgcaattccccatcttgctctctaccagttcacccactgcccatgcaccgtgcacccagacaagaagaatgcgcacgagaagctcaaagaccagatagcgaggcaagctaggagtgagcgaaccgcccccaaaggtccaatctttgcaaggtctggatggagctcagccgctaattcgggagggaaaccagcaaggtcgactgagaggaaggtgtgtagcatcattacctgcttgcctctgccagtcggtttaccaaactctccgattttgaaggctagcgagcggggcgaaatcctcgcgcggctggggaggaagggggcagagctacctccggatgaggatggcggcgttgagtgcggcgatgcgcacggggagggaggccgagtttcgttcgccagttgtcaccactggcggttgagcgggtccatcacgtcagtcatcgaccaagtagccggcagccgcgcgacgtccgcgtcactccaatcccctcgccccgcggcgcctccgttcacagcgtcatggcggggtggatctcctccaagctcaaagcagccgagaccctcctccaccaggcgaggcagcgctctcttcgtcactcgccgcgacgtgccccatcccctcccgagtcctccagctcttctgactcttcacttctcatggaccacgcggcgagcagggccagggtgcacgggcaaggggcggcaggctagggatggggtggcggcggatttgggagaaggtcttgcgaggaaaggggaggtggttggcgtgacgcgcccgctccacggaatcccaccgcgcaaaccgcccgcctccgccgatgacctccttgacgtgccgaggcggggaccatatggcgagcaaagccagggtgcacgggcaaggggcggcaggctggggatgggggtggcgatggatttgggagaaggtcttgcgaagaaaggggaggtggttggcgcgacgcgcgcttcacggcggggcgcaaaacggctaggggcccccatctcgtccatcaccgcccccaaatttcaatttcccgcacgctcctccatcctcaccttctcgccgaaaccagccgccgccatggggggcttgcacagccgcgaggacctcgacctatccgactctaactccgaggacgctgagtcccgggcttccgacaactcctccgactacggcacgtctcccccggcctccgtctcctccaagttagccagcggcgcaggggcggctacccctgcctccatcgacgccatcgaccgccacctccgccagctccacctcaagtacaacgagcccatctccccgaaccctagccccgggtccacccccagcgctaaccccaccgcgctcaacgccgtcaaactctacctccacatcggcggctcctctccctccaccaagtggatcgtctccgaccgcctcgctgtcgcctccttcgtgcgcgccggtgtcggcgaggacgacgacgcccccgccgtcggccggccgtggtgcctcgtcatgggcttgaagatccgggctagggtcgggttcgagctgcacctcaaggccttccccgtgcagcgccgggtggatttcgtcgccgacggtgtatgggccctcaagggatag

SEQ ID NO: 10036 - DNA, 285 bp, Zea mays
  Peptide Sequence Number=SeqID_51815
atgcgcaccagcggcgagcggccatctccattctccccaggcgcccagcggcgagcggccatctccccagcggccatctccggatctccccaggcgcccaacggccatctccccaagcgccatcttcccaagcgtcagcccagtggccatctccccaacggccatctcctgatctccccacgggccacggcgaccgagacgcagaggccgatgcgtgcttatcgggactgcccaagctccatgcccccaggccccaagggcagagtgttggaatcatatggataa

SEQ ID NO: 10037 - DNA, 708 bp, Zea mays
  Peptide Sequence Number=SeqID_51816
atgagagatcgaaatgagcttcctactcctcggatagaaggtgaaatcttgtcatcttctaatttgaaggcattcacgttcaatgatctgaaaaatgcaaccaagaacttccgaccggacagccttcttggggaaggagggtttgggcatgtctacaaaggttggattgatgagcacacgcttgctccttcaagacctgggagtggtatggttgttgctgtgaagaagcttaaaccggaaggttttcaaggacacaaggaatggctgacagaggttgattaccttggccaacttcaccacaagaatcttgttaagctcattggttattgctcagatggtgacaaccggcttctggaaaacaaagaaggccttgaactattgaaggcagccatagaaaaggctggctacactggaaaggtggtcattgggatggatgttgctgcttctgagttcttcggtgagaaagacaagacttatgatcttaatttcaaggaggagaacaacgatggctcaaacaaaatttcaggcgacagcctgaaagacctgtacaagtcctttgtttctgagtaccctattgagtcgattgaagacccatttgatcaggatgactggagcacttatgccaaactcactgatgagattggacagaaagtgcagattgtaggagatgatcttctcgttaccaaccccaccgtgagtaacatttag

SEQ ID NO: 10038 - DNA, 231 bp, Zea mays
  Peptide Sequence Number=SeqID_51817
atggtcccaggcgccatcatgctggctacactgacctctggcttctgtagcctggggctcggtgcggctcgtcgtgtagtgccctgcaagaggctctgccacgcccagcacaggctctgtgccacgggggttcgtccggggattttgctatgtatacttgtgtcacacccggttttagaaggcaaatcgaatgcgaaccaggtgaacaaggacatgataaacaaagactag

SEQ ID NO: 10039 - DNA, 453 bp, Zea mays
  Peptide Sequence Number=SeqID_51818
atggcgggacgcggggcgacgacgacggtgcgagctctagtgaggcgtcggcgagcaaccgggtcgacaccaaataacatagacaagcgcggcagcacgacgcgagcgtgggcgtacaggatggcgcagcagcaggggctgagttcgatgcagacagggaatcggccgcgagcactgagacggcggggagaaggatcgacaggggagagtaagagctcggtagccattaatggcgctggaaagagaggaaactgccgactcactgaagaagaggaaggggagaggaaacggacaggtgcgggcataagcctgctctactcgcggccagagcggggaggtgtagaggtggccgcgcggaggcaaaagggcacggcagcagacgtcccagcggcggctgcgctgtccttgcgtgcgggtgaggagctggaagacgaccagggctgggaggggtga

SEQ ID NO: 10040 - DNA, 399 bp, Zea mays
  Peptide Sequence Number=SeqID_51819
atggcgagcgtaggagacttccggcgaacagcaaagactgggcatggcgatggccgacacctgtcattgatggcgagcaacaatgggaaatacgagagggaaatacgcgcgagtggggaaggtgacagacggtcgacttctctacggcgcaggcgcggggagtcgaggagcagagcagcagacacgaagtggcggtcggcgcttcagctttctcatggcggcgtcgtcgtcatccgattcgtgcatgcgggcaaggggctggaagacgagcagagctgggaggcccacacgggttacatcggggcttggcaccggcgatggggcagagctccggtgaatcgcaatagctggggcacagacaacgagctccgacgaggtgcagcaagcaacaacaagtag

SEQ ID NO: 10041 - DNA, 405 bp, Zea mays
  Peptide Sequence Number=SeqID_51820
atggcgagcgtaggagacttccggcgaacagcaaagactgggcatggcgatggccgccgacacctgtcattgatggcgagcaacaatgggaaagacgagagggaaatacgcgcgagtggggagggtgacggacggtcgacttctctacggcgcaggcgcggggagtcgaggagcagagcagcagacacgaagtggcggtcggcgcttcagctttctcatggcggcgtcgtcgtcatccgattcgtgcatgcgggcaaggggctggaagacaagcagagctgggaggcccacacaggttacagcggggcttggcaccggcgatggggcagagctccggtgaatcgcaatagctggggcacagacaacgagctccgacgaggtgcagcaagcaacaacaagcagtga

SEQ ID NO: 10042 - DNA, 1215 bp, Zea mays
  Peptide Sequence Number=SeqID_51821
atggagattaaagccgagcaagatgagagggtgcgctggcaagcacgaagtcacgcgcgagagaacgagaccgagcagagagagcaacctggcagcacggcggcccgcatccgtggcaagcaggctgagcgcgcgctggaagctcggaccaagacacaaggagccggccatggagcttggggagctgcgcgcagaggcgaactcggcacggcgaggggcgacagaacgcgcgcgacgcagccaaggaggatcagggacgatggcaaggagcttgaacaggagagcacccacggtgaagcgtccggcgagtgctgcaagtaccagagggagatggagcaaaagaagttgcgtgccatgggagatagcagggagggagccgagcagggagctgcagcgcggcgtgctagggaagacgagctgggggcgcggccatggcaagggagctcggctgggagagctggaatagggcccagggcgcggcgagcaggaggccaagcgccggccatgggaggtagcatgagagagctctactgggcgccaggaagaagatcgagcaggaaccagggctgggagaagctgggtgagctgcgcgcaggggcgcgctcggcagagcgcaaaacgagaccgagcagagagagcggcaagcaggctgagcgcgcgctggaagctcggaccaagacgcaaggagccgtccatggagctcggggagctgcacgcagaggcgaacatggcacggcgaggaacgacggaatgcgcgcgatgcagaggaacagggacgacgaccaggagcttgtacaggagagcacccacggtggagcgtccggcgagtgttgcaagtaccagaggaaggtggagcaaaagaagctgcgcgccatgggagatagcagggagggagctgagcagggagctgcagcgcggcgtgctggggaagacgagctgggggcgcggccatggcaagggagctcgactgggcgagctggaatagggcccagggcgcggcgagcaggaggccaagcgccggccatgggagggagcaggagagagctctgctgggcgccaggaagaagatcgagcaggaaccagggctgggagaagctgggcgagctcggcagagcgcgagcgagccgaggaacgcgcacccagggaagtgaccagggcgctggggaagcttggctggctggggataaacaccagagaggagcggcagagagataa

SEQ ID NO: 10043 - DNA, 456 bp, Zea mays
  Peptide Sequence Number=SeqID_51822
atgcagaggaacagggacgacgaccaggagcttgtacaggagagcacccacggtggagcgtccggcgagtgttgcaagtaccagaggaaggtggagcaaaagaagctgcgcgccatgggagatagcagggagggagctgagcagggagctgcagcgcggcgtgctggggaagacgagctgggggcgcggccatggcaagggagctcgactgggcgagctggaatagggcccagggcgcggcgagcaggaggccaagcgccggccatgggagggagcaggagagagctctgctgggcgccaggaagaagatcgagcaggaaccagggctgggagaagctgggcgagctcggcagagcgcgagcgagccgaggaacgtgcacccagggaagtgaccagggcgctggggaagcttggctggctggggataaacaccagagaggagcggcagagagataa

SEQ ID NO: 10044 - DNA, 228 bp, Zea mays
  Peptide Sequence Number=SeqID_51823
atggcgtccaagtctctgcgcagcaatgccggtccaaaaactgcagccctgtcactcccctggcttcgtcgctgctttgtgctgcgcagtgaacagcacgccgtcgacgctcgccggagaggcaccccgtgttttgagtggagaagaaggcaagccgctcgatgctcgtcagatgttcggagcgatgcacaaatcggaatcaccgtcgatcttgaaaacgccgtttga

SEQ ID NO: 10045 - DNA, 321 bp, Zea mays
  Peptide Sequence Number=SeqID_51824
atgagggaggcacaggagatgggggcgattcttgctctggcaacgatggaagttcttgctccggcagcaagggcagcttcagctcctactcggctagcaggcgacaaggccaagaatgaggaaccaggttcccggatcgatggggtcatgaaatgggaacatggcttacagctccagctccacgattttctggagcacctaatgacctgctccaccaactccaccaaatttgttggagctggagctatcccaaacagggcatatcaaaatttaagagttggagaccaaatgacaccgggcaagttcaaggaccgtttgtga

SEQ ID NO: 10046 - DNA, 225 bp, Zea mays
  Peptide Sequence Number=SeqID_51825
atggaaattccaaatgctagagcggttctccgtgtgagatgcccgaggtgccactgcgttctcgaggaggccggcgcccctgtgtaccagtgcggtggatgcggtgctagccttcaagatgacattgaggcttatgtttatgttcctgaagctgatatcctatcagtcttagatgtgcctccagggaaatgggcgagttattggcaaaaacggggtcaacaataa

SEQ ID NO: 10047 - DNA, 630 bp, Zea mays
  Peptide Sequence Number=SeqID_51826
atggcagagagcttaaaaggagcacaaaagattttgaagtcggagataaattttctaggaaggctctcccatccgaacctagtgaagctcttgggctactgttgggaggacaaggaacttcttctcgtgtatgaattcatggccaaagggagcttggaaaaccacctattcaggagaggatgtgcccccctgtcctgggagctgaggctgaagatagccattggtgcagctcgaggactcgcgttcttgcatgcatcggaaaagcaagtaatctaccatgatttcaaggcgtctaacatccttttagacgtgattgaaaccacacgcaaagaatgggcattcatgtttgaacgtcaaccttgttttgctgcttcttatgggtttgctcctcttctctcctactctgctcgtgaagtcgagacacgtatctatttcagccgcccaacagtggctgaatatcaatgcaaagatcttggtctactggttgagaatacaagagtggagcagtttggcgtagctcggaaagttacaatctcaagtgcctcgacgactgttatagcagatgctgccagcaaagatgatatccaggccatacaactgccaaaagagaagagaccatatcaaatatga

SEQ ID NO: 10048 - DNA, 399 bp, Zea mays
  Peptide Sequence Number=SeqID_51827
atgtggcaacttctcaccaacttgtctgtttatatagccctgcaggagaagaaggcgaaccgccaagacgcacgtactggccaatcggtggactggcaagcgctgtggatattttattcattttttaataacaagctcagggatggtgtttttcggatcttcgacattccaaacccttcgtattgttcgtggatcgagctctttatgaaaaaacgatctagcaccgtaaaggggctactgttggggggtcttcttctccacagaaggtcctcaagagaaagacaccatgggcaaagtgattgtgaagactttcttctttctgtcgaaggtcctcaagacgatggaagtgccaaagttgccttcggcttagaccaaataaagaaggaaaagactagctag

SEQ ID NO: 10049 - DNA, 1047 bp, Zea mays
  Peptide Sequence Number=SeqID_51828
atggggacactggagccaattcctatcatatgtacccttacttttgactgccaggcggatgtcagattgctaaaggaaataggcatggacgcgtacagattctccatctcttggtccagaatactgccgaagggaacgctcgaaggaggtattaatcaggccggcatcaagtactacaaaaagctcatcaacttattgatagagaacggaatagagccatttgtaacaatttttcattgggacgtccctcaagcactggaagacaagtacggtggctttttaggcgacaggattgtaaaggattacacagacttcgctaaggtgtgctttgagaacttcggtgacaaggtgaagaattggttgacctttaacgagccacagacatttacaaccttttcgtacggaacgggagtttttgcccctggacggtgctcaccaggagaaaaatgtgctcagcctattgctaactcactcaccgaaccatacattgctggccacaacatccttcgagcccacgctatgactgttgacctctacaacaagaattacaagggtacagacggccgcattgggcttgcgtttgacgtaatgggtcgcgtgccatatggaaatacatttctcgatgaacaggcccaggaaaggtccctcgatcaaaacctaggatggttcttggagcctgtggtccgtggtgactaccccttctccatgagatcattagcgaggaaacggctacctttcttcacggataatgagcaagcgatgctagcgggttcctatgacatattggggataaattactatacctcaaggttctctaagcacgtcgacttctcagaagactactcacctaagctcaacgccgacgacgcctatgccactgcagaaatctttggacctgacgggaattctattggtcctcctatgggaaatccatggatctacatgtaccctaaaggcctaaaggatcttcttatgatcatgaagaacaaatacggaaacccgcctatctatatcaccgagaacgctctatatcagctagctacttga

SEQ ID NO: 10050 - DNA, 705 bp, Zea mays
  Peptide Sequence Number=SeqID_51829
atggacgacgaagctgtagccgaagagcttcggcttgatgtgatgacgaagaccaactccagccgccgctccctgacgctgcctccctctacccgcctagccgcctcggcgcctctccctaccagcgcgctgcgcgctccccgcggcccgccagcgctaggacaccgccgccgctccgccaggcgcccagacgcgctcgcccgccaccgccagtctgccagcgagctcgcccgccacggcgccacccacacagccacacgccacagcgcgctgtcgcgctcgcggctcgccctagtcgcccgccaccgccaggcccaggcgcggtcgcgcactcggcattcgcacagaggcgccagccggcagccgcggagcgctgctacgcaggagccgcagaccgcagcagcccgagccgtcgagcgcgctcgcccggagcccggagcagacgagcagtggagcaccgccgaccacgtgcacgccgccatggacatggagctggagcacggaggggctgaagacgacagagggagttattcctcctcctcctcctccaagcggagcttcggcgccttgtcggacgcaaccgtcagcagcacgccaagcaagttgcaagctctgagcaagctgatcagcgccaaggccgtcgttgtccagccgccggagtccgaagcacgggagcagccgaggcgagcaccgccatcgccgtga

SEQ ID NO: 10051 - DNA, 1305 bp, Zea mays
  Peptide Sequence Number=SeqID_51830
atgcagcgccatatccgtgcagtctactccatttttgttcccctctccggtggcggcctagcgggggtgtggtcttcctcgcgtcgcctcccctcgctctcatccgatgatgcggagggccgagttggtgtcagggtcatcagtttgaggtttcaacctatttcaccagagctgattggactcatggatgggaacaaagatgaggcattgagatctgtcaagcttgcaaaatctgcatttgcatctggggataggcagcgcgcagaaaaattaattaaaattgctcaaagattggaccctggtcttccacttgatgatttgctgagcccagttgagaaggttggcatcctgaatatttctacttgcaaagacaagactgaaagaggacaagctcttttatacccaaaaacaacaaaagaatctgttggtcctttaaatgttgataaggcttacactgaggagaatattagagtggttcaggatatcaggaaaaagaaggattactatgcagttctcggagtagagagaagatgcactgtggaggaaattaggaaggcatacaggaggttatcactgaaggttcatcctgacaagaacaaggttcctggggcagaagatgctttcaagatggtaagcaaggctttcaagtgcctaagcaatgatcagtcgcggaggacttatgatcagacaggcaccactgaggaccatgaattcaatgagcaatatcccaatgtcatgaggcggggagctgctaggcggagaaggccagcaagaagtggcttctataactatgaagaagattttgatccagatgagatattcaggtccttttatggcacccatgataatatgttccatccccagtatacctacagggctaggggaacaggcaggcaacagcaacagagaagggagcattcagtggagggtggttccagcataaatctaacagtgtttattcaccttgtagtagtactgtttattgtttcgcttgcatttattccagcgcgtcaagctgagtattcgctgcaacagacaaattacttccccatttcaaaggtcactcaaaaacaaggagtggagtacttcgtcagcaaacaagattttgatcagcagtttccacagggtagtcagtctagagagaatcttgaacggcatgttctgatggactataagagtatgcttggaagatattgccatgtggaactccaacgtcgtcaatgggccaaggactaccctacacctcgctgtgacaagctaagggagctgtctgtggcgcagaatgtgcatatgccatcagtttga

SEQ ID NO: 10052 - DNA, 279 bp, Zea mays
  Peptide Sequence Number=SeqID_51831
atggtgtcgcccgcgcccctaacagtcggggtggagacgctgaggacggggaggccgcggttgccattccctcgcatcgcgctagggggatctggggtggaggtcggcgtggcggcggtggaggcgccagagccgcgatcggaaagggcggggcatggcgaggaggagctggttgcaaatgttgtggggttttggttgggggataagacaccttcagcgaacttgatcagggcacatcaagttgcattgaacttgatagatgggcacaatccagagtag

SEQ ID NO: 10053 - DNA, 627 bp, Zea mays
  Peptide Sequence Number=SeqID_51832
atggctcatggtaaacgtctagctctggagtgctctcaccaaggtcggtccaagcgtcgcccgtcacaggaaaggtgggtagtgaccaagcactcactcgactcccgccccttcatcatatcgatgactaactttcctcatagggcagtggactcaagcgttaaaggagaggtcatatcgctttcgtcttctagctcaccgaacggggagtcgaaggctggcccttgtggcgacaaacctgtatcgctggttttgccggccggcaccattggcaccccggtcattgtcgattgtcccgtgatggtcgtgaggttggttagagctggaccccaacctggtcatgttatcttatgccggagggtcgtcgcttcctcctcccctgcccctcatgtgtcttcttgcgaggtcttcaggcgcgattggccatcatggaggcccaagcggcgagaacaccactcgccttgcttctcaatccctttatgcctctcggggagcatccgtgcacgtgtagcaactcgcatgcagcgcctgctcgacattccgggccacgacgccctgtctgtggtctttgagaacctttctaggggtacgacgaggccacctgtgaggtggccaacaccgtattag

SEQ ID NO: 10054 - DNA, 243 bp, Zea mays
  Peptide Sequence Number=SeqID_51833
atgtggcagattatcctcgtgagctgcgaaggcgtcctgtttcgaggtgcaaattctggcaggcttcgtaggatcgcaaaaagcgaggaggtctacgcctttgacgaccatgatgcatttgagcaaagggtgatagtgtccttgtatgtaaagggcgatgtggccctcaagtcttcggtcatgatgaggcttataattctatgcccatcgtggtcccttacgataggggcttcgattatttga

SEQ ID NO: 10055 - DNA, 603 bp, Zea mays
  Peptide Sequence Number=SeqID_51834
atgtgccaagccgggggaggtcatgacttcgcccgacctctggaaaacatttttgtgaatgatgagggtgaccgggctgttgtggataaggaccaccaggagtccacacaaaaaaagcagaaggcgctgctacggcttgtggacccacgacgtgaggcgaagatgttgcgccctagcgcgaagggttccgctgcggttgcgacaatgcttccgcctacggagctggcggcatctgccaggaaggtgccctcgcctgcgaaggctagtgaagttgagggagcaaagggtactaagattggtggagccggcgacgtaagccgggaactgtctgtggatgattacttgatcgaaggtgtgagcatgttcgatgctcacaccagactagcggctggtgggtcggggtctgacgagggcagagggatcgccaatgcatctgcggctggtggcgtagcggcaactgttgcacggcagctgcgatatgctgctgccttccctgatcaagtggcgtctggggcgctggtggacgtagcgaccttacagttgcgctccgagagaaagcggtcggaggacaagattgagcgtctcttgacgcaaaacacatag

SEQ ID NO: 10056 - DNA, 768 bp, Zea mays
  Peptide Sequence Number=SeqID_51835
atggagacccaagtcacccagaagcgtgttgccgaattggagctggaggtgaagaatacacgaactcatcatgaaagggtggaggctaccacgcgagccgacgtggaccgggcacacacgctttttgtggatgcccatcatgacttgggtgcggagacaacccgattcaataagtctgggggggagagggtggttgagcccattcacaaagatggacaggagtcttatgaggatttggatttttttgttgcgttagatgtgtcagcggtggaatctagaatgggcgaggaatcttcgtatagggccctgatacctatcatgaagaacaaaatgaaaagagttggtgtaccgaagagaaggttgggcagtgccgatgcgctgacaggaggtggcgagggctcccaaagacgttctcatatgggactgggcgggcctcgcccgcgggtctcgctctgcgaggtgcttcgcatgtcaccctcgcgtcctcaagaaagggagagggcacggtcggaagagggacctcgccgaattgttctagcaccgacgatcgaaaggggcttcaaagagtgggattttagggcgctttttaaaggcgaagagcttaaacttatgttgcttaaaagatatgtattatcgtggctcgacgaatttgagtggaacgcttccctcgcccccttcgtcgagggacgactatactggtcttcagtgtctgattatgctcacacattttttgtgttaacctggcttcgaaatgtttgtgtctgctag

SEQ ID NO: 10057 - DNA, 381 bp, Zea mays
  Peptide Sequence Number=SeqID_51836
atgtcgccacttgcacatggttgggaagtgggcgaagtgaagctatgcccgatgcctttcttgaagggtcggcaggtgttgagtcctgccttcaacattgaactgcagggtcaggatgctacaactttcgtccgagaggtggaagcggaggttgtgatgattgtagggaaatattcgatgaagacagagatgccaatgagctgggatatacgcatttcgaacgtcaggtttatccttgtatttgagttgaatggtcttcggtacaacccgtaccctgaggaggactctactgaagctggggatgatcaaagaaaaaagagagtggcaacacgggtggacgaaggctgctctaaagggaaggttgtggttacagcagcgtga

SEQ ID NO: 10058 - DNA, 303 bp, Zea mays
  Peptide Sequence Number=SeqID_51837
atgggccgtggcgccgaggagaccagtaaatgcacttgggagacattctttggtaaagacgaggtgatgaagacgataaggtcgaagatgctcatggacaaaagatgtgttgtggatcctaggtcaaagggatcttctgggggctaccataggattggaggccccacaatcgccacagactgcatgagaaattccaacctcattcgagggcgattgagcatccgccacaacaacaacaacttcttctacacggttgggcaaaggagcttcacaaggagatacattgggcaattctggagataa

SEQ ID NO: 10059 - DNA, 378 bp, Zea mays
  Peptide Sequence Number=SeqID_51838
atggcagcccacctccctctccctcctcctccacaccattctgcccccctcctcgcgcgctcggccagccatggcgcggcgccccctgctccttcctcgcgcagcagcagccgagcgtcccctccctgggccgacctcggccaagtccctgtccatggcgcgcatggagcagccctagggccagcgcccctgcgtgcgttcctccctaacgcccagaaatttcagcagggagctccttacactcatgctccagtgcctcgccgtggaatccccctctcctccctgctctggcatcaacacggccagggacacaaccagcggcagccttgctgttcacgtgtggcaccaaggaagaagaagacccctttgggtctatga

SEQ ID NO: 10060 - DNA, 207 bp, Zea mays
  Peptide Sequence Number=SeqID_51839
atggagagtaatgattgcaaggtggatgaagacactggggacgataggatttcaatgaagaacactaaggtggttgatctgcaagccacatctggccatgtgatcaacaagcttgaaatgaagaagccaagggaaggacggcgtatcaacaaacataagcaagatctcaggaacaagataaaacatttgcttttagataatgggtga

SEQ ID NO: 10061 - DNA, 891 bp, Zea mays
  Peptide Sequence Number=SeqID_51840
atgagaccgtcgagtggcgaagcggatgagagcaaatctagatctctgcctgcccgcaaacatgcgtccaccacctcttggcgcatgttctgccgccccgcaaccgcccgcatccgcggcagcgccgcagtcgctccttccatcctccgcggatccccgcgctccctcccgcgctccctctgcgcccgcccgcagtcgcgccgcatcccgcagccgccccgcatacgccccagccgcgcatcccgcagccgcgccgcagccgctccttccatcctccgccctccttccatcctccatggaagatctatatcggcgtccatggaagatatatatcgtgtccgcgccgccagcctccaactgcacggatctgcgccacgtctctccaccgcgttcgcgccgtccatggaatccgcccggatctgcgcgccccagcttccaactgcgcgcgccagcctccatggaagccgcctcggatctgcgcgacccaccttccaactgcacgccgcgtccgcgccatccatggaagtcgccccggatctgcgcgcaccagcctccatgaaagctgtcgctaacctcgacccaactgcgcccaccgtgcctaccccaacctcggctctccattttttccagctcgaattacaagaaagaatagcctccgatgtcgatgagccggcagcagacgccggtgtggcctcgtcgctggcggagatgggggcgctcgtgctatccaccgtcagaccctcgtcaaggcacgacgcaccaacgccgccttctactggtggacattcaggctccccgtcggacaggcgacgacccccgaccaccccacgaggcccgataagccccttgtggtacaccctctcgcgctgctcgtgcatctcctccctctga

SEQ ID NO: 10062 - DNA, 984 bp, Zea mays
  Peptide Sequence Number=SeqID_51841
atgggcgagcaaacccactcccagactctctcctccacgcctcccgtctccgcctccgcctccgcctccgcctccgccgcgttacctgccacgaccagggcctcggaccccgcctctgccgcctccacctcccgcgccagcgccgcggcctcccgcgccagcgccgcggcctcccgcctcaagaagaaggaggcgaacgcatcgcccgaccccaacccggccaagaagcaccgcctgacgttctcgatcccgggccagcccctgtccgcggccggcgaggtgggcgtggccatccgccacctgcgcgccgtggaccccgccctcgccgccgtcatcgacgcgcacgagccccccgtgttccagtgcccgcaccgcccgttccactccctcgtacgatccatcctgtaccagcagctcgccttcaaggccgccgcctccgtctactcccgcttcctcgcgctcctcggcggcgaggccagcgtggcccccgacgccgtcctcgcgctcagcccgcaccagctccgccagatcggggtctccccgcgcaaggcgtcctacctccacgacctcgcccgcaagtatgcctcagggatcctctccgacgcctcgatcgtcaacatggacgaccgctccctcgccgccatgctcactatggtcaagggcatcggcgcctggagcgtccacatgttcatgatcttctccctcgcgcgccccgacgtgctcccctccgccgacctcggcgtgcgcaagggcgttcagatgctctacgccctccaagacgtgcctcgcccctcgcagatggacaggctgtgcgagcggtggcgcccctaccgctctgttggggcctggtacatgtggcggctcattgagtccaaggtgccccagccggcgccgcccatccctgccctcccttcgccggacggccagattatgctacagcagcagcagcagcaatctgtcatccaaatgatcattcccttttag

SEQ ID NO: 10063 - DNA, 207 bp, Zea mays
  Peptide Sequence Number=SeqID_51842
atggcgagagtagcgtgtaccctccgtggcaagaggctggacggtggtgtatctgtgctctcggttggcgtgaacccgcatacccttgagagtcttttcttttgtcaggtgaggaaacagcggacttttgctatttttgctctaaggtgctgcccaaagaagaacctcagcagtgaagccgtgggaggatgttggcctcccacttga

SEQ ID NO: 10064 - DNA, 285 bp, Zea mays
  Peptide Sequence Number=SeqID_51843
atggcagcgacttgggcgagatccgaactagagcagcagcacaccggcaagtatggacggctggcgaactccggtttaggtgaatggaacgcgacacagggagctgggacagaggaccgcgcacgcaaggcgagcagcaaggcgacggcgcgcaggaacgggaagcctcgacagggcgctgtacggaggagttcggctgggactcggcagggaggagacctcggctgggggcttggcgcgcggcgaagcagacagcagagggagctcgcggccatggaggaatag

SEQ ID NO: 10065 - DNA, 504 bp, Zea mays
  Peptide Sequence Number=SeqID_51844
atggaggagtggctcaatggagctcaggccgtttgtcgcgcagatctcgtccctcgccagctgctccctctgaagcgcgggacccggtctctgccgtttgggccccatcgcgcagaagcctccttccaccatgaatgcagggagatgaacgctgtgaaggccatggagatcggaatgccgtttgatgcacaaccaaatccgccgccgcgacggattgaccgcgcccatgcgcgtgggctcttggcgcccgggatcctcggggtaggggcgaatcctgccctggcaagtttcagcgcttggaatagggcaccgaggtggagagtagcaccggtcgtcgacaatggcgccgccggatttgggggtgttcctgtagaaacccggtggggttgtgtgagatattttctagccgtcgaactcacgatgagcgatctgtatgggatcggcgtaccgatcgggtgtggggtggctgtggccgttgatcttctgatgaacgcgccagattaa

SEQ ID NO: 10066 - DNA, 489 bp, Zea mays
  Peptide Sequence Number=SeqID_51845
atggggaaccctaggaacatcacaaaaatcgctcttagagagcaaaaaagatcacataaacccaaaagaatccctagagaaaatcaatttcgacctatcatcttgaccagatatctgctccatgtgacaccgcagtcaacaaaggatgatgggatcgcggtcccatctactttcaccgactacgatgacgcaagcacgcgaatatcggaccctgctcccccactccggtcactgttctcgaacaactccggatgggacatgcaaacgtctaggcacaacctcaccctcgggagagaactccacctcgcccgaagacggcttcagcctcaggagaaaacttcacctcaccttagttcagcctcgaccgactgccctggtagtagccaccaactccccgtgaatcccgaaggaggccacccgacaattgttctaaccactccctgcacgactacatgctcaggcgctggtccgaccatggcctcgggataa

SEQ ID NO: 10067 - DNA, 216 bp, Zea mays
  Peptide Sequence Number=SeqID_51846
atggccaacaaagccacttcccttactaggataagtataacttatgatgtggactcgtatgaacattgtaatattatatggatgtatatgtttgaatttgtgatgtggtattgtgtggatctgatagtacagcctgccgctgccaagtacagttatgcattccaagtccccagagaagcaatcacttctgggatcgaggagaaacccagcaaataa

SEQ ID NO: 10068 - DNA, 231 bp, Zea mays
  Peptide Sequence Number=SeqID_51847
atgagagcgacgctaacatttggtatcagagccatcctggagccagttcacgatcaccgcacaaggttacaaatgaagacaggagtcatggcgcccgtcgcgggtggaagatacgacaacacatttgttggcaaagatataagagggaaattgggagatgcatcgtcggatggagacgatgcaagcctcgaccgcaaacatggaaaccactgtgaagagcgtattgtctga

SEQ ID NO: 10069 - DNA, 405 bp, Zea mays
  Peptide Sequence Number=SeqID_51848
atggcacttggggattcaggtgtatggatggagaggacaaccacagaggacatggattttgctgtccaagcacacctgaacgactgggtgtttctattcctcaacgatgttgagtctctgattcgattatttgttctttttttatctctcaggaagcgcttgttcagcatgatgagtgatcttccttccatcttagaagcattcgcggacaggaaacacgatagagataggtctggggttgatagcagcggcaagtccagacactcatcaaagagaggaaaatatggccatgccaagagttccagagcagcacctcctgccgccaaggagtatgacgaagacgaggaggagcacacagagaccttttgcggaagctgtggcggcctttacactggcagcaactaa

SEQ ID NO: 10070 - DNA, 128 bp, Zea mays
  Peptide Sequence Number=SeqID_51849
gcgactatcagaaggccttaagccctactcctttaaagaaaattgctgaagctaccaaagcacaagccaaaaccgaaactggacaggccgaagtcgaaactggacaggccgaagccagaattgggtag

SEQ ID NO: 10071 - DNA, 1383 bp, Zea mays
  Peptide Sequence Number=SeqID_51850
atggcaggaggcacgctgcaggacagatcggaggccgaggacgtgcgcgtgggcgtggaccgtttcccggagcggcagcccatcggcacggcggcggacgacctgggccgcgactacagcgagcccccggcggcgccgctgttcgaggcgtcggagctctcctcgtggtccttctaccgcgccggcatcgccgagttcgtggccacgttcctcttcctctacgtgaccgtgctgacggtgatgggcgtgagcaagtccccctccaagtgcggcaccgtgggcatccagggcatcgcgtgggcgttcggcggcatgatcttcgcgctcgtgtactgcaccgcgggcgtgtcgggcggccacatcaacccggccgtcacgttcggcctcctcctcgcccggaagctgtcgctgacgcgggcggtctactacgtggtgatgcagtgcctgggcgccgtctgcggcgccggcgtcgtgaaggcgttcggcagcgcgctgtacgagtccgcgggcggcggcgccaacgccgtcagccccgggtacaccaagggcgacggcctcggcgccgaggtcgtgggcacgttcgtgctcgtgtacaccgtcttctccgccaccgacgccaagcgcaccgccagggactcccacgtccccgcgctggccccgctgcccatcggcttcgccgtattcctggtgcacctcgccaccatccccatcaccggcaccggcatcaaccccgccaggagcctcggcgccgccatcatctacgacaacccgcacgggtggcacggccacattgcaattgacacgctggcattattggatggtgacagtggatcttctgggtgggcccgttcgccggagcggcgcttgcggcgggctcggactcgggctaagccccggaagacggcgaactccgctccgcccgacccagggctcggactcgggctaggccccggaagacggcgaactccgctccgcccgacccagggctcggactcgggctcagccccagaacacgacgaactccgcttcgcccgaccccagggctcggactccgccctggcctctgccgaacgacctccgcctcgcccgacccaggggcttgggctcagcttcggccatggaagacagactcgacctcggcttcggaggagcctccacgccacccgacctagggcacaggccagccacgtcaacaggaagcgccatcatcaccctaccccgagccgactcgggccgcagagaacaagaccggaggacgtcagcaaggactcaaccgctccgacagctgtccctccgccaggctccgttgctcctccgacagccacgacatcacaccagctgggtgccaagatctctccggctgccacattggcatgtacttag

SEQ ID NO: 10072 - DNA, 219 bp, Zea mays
  Peptide Sequence Number=SeqID_51851
atggacgtcaatctggcagcaccaccgcctcctccacccactgcagtggcagttggacgtcgttccccaactccaccagcgtcagtggtcgtcgagaccatcactgctcatcgtggacagccacctcgcgccgtcgacgcctcgcgcggacgtgttatcttcactagctacaacccaaatggggtggccccatcttcctcctccaatgggagggcctaa

SEQ ID NO: 10073 - DNA, 159 bp, Zea mays
  Peptide Sequence Number=SeqID_51852
atgcccaaacccgatgaaccgctagtaacacatgctaataataaacagcagatggacaatgctcaaatatgcgggccgccatcgggccaacccatttatcgtgtcgggctgagccaaagcacgcgggccgccgtatctgccccatacccggcccgctaa

SEQ ID NO: 10074 - DNA, 639 bp, Zea mays
  Peptide Sequence Number=SeqID_51853
atgaccactgaagctgtagccacttccaactgcactaaccccctagcccccactaagcagcacatgttactctcatcagtgacctgtcagagaacctgctgcatattgggagatgcaccggatatgtttggaataattccaggtgatacagattatagaatatttgctgaagacattacaaacattccaggacttgatataatttttgttctcggtggttatttctatcatacttcatatgatacattggagaatctacttcctggaagtattcaagcacgtggtgaaaatttattcaaccttgtgaaggcattcacaaatcctatgttgttaaaagagaacgagatatctaataaagctgctaaggatggaattgaagatgtgggggcggtcttttttgattatttgacttggttcatggtattttattctcgtgatatatctctgattcttcacagtctaccgatagccatttttcttcttgtaccgctgttcctgaagttcccaaacattaccttgatgtcatggtttgtaactctcctaggtttcatgagagaagaaacaaacaacagtggtggccgtggtgatgagcaagacaaggatgatgttggtttagatgatttggatgatggttattga

SEQ ID NO: 10075 - DNA, 210 bp, Zea mays
  Peptide Sequence Number=SeqID_51854
atggcacctcactaccagaagtttttagcttacgagcgagagttgattgtgctcgtcaaggtgtcccttctcgttccgtctgaggtatggagtgatatagccatgaattttattgaaaagtttgctaagatcaaggatcaaccggttcaggcccaagtaacaatgaagcaactccaagataagtcacaaagagacatgctattgaggtag

SEQ ID NO: 10076 - DNA, 462 bp, Zea mays
  Peptide Sequence Number=SeqID_51855
atgtcgcaatctgctggtcatgagccaaggtgttcacaggggggctacgacgcctcccgcgcgacacaagaagccactgaggttgaagtcgagctgctgtgggtgcagcttgccgaggtcgatggtcgtgtcgtcggtcctaggcccaaagcgttgggcttttccgtatgcatagatcaggctacaagattcactcgtacacgagggaggaatcagaggttgcaactccttgacatcctagagcgtgttcacgaggttatggagtttgggattcaccatggcgcagtgacaacctttgccattgcacaactacactacggtggccgccttcgtggtgttgtcggcctacccgtcgggacaacatcagcggacttggaactcctaacaagcggctttaacgccacggagaacatcatgctcagagttgtgacgatggaggaaataatacgtgatctcccataa

SEQ ID NO: 10077 - DNA, 198 bp, Zea mays
  Peptide Sequence Number=SeqID_51856
atggcggatgacgtgggggcggcaatggtcccaagcgtcatcactatggctatgccgacccctagcctcattagcctggggatcgacgtaggccattgtaatgccctacgggagttggttctttgtctagacttgaaacaatcaatgaagaagaataaagatattgctttgcaacaacaatttttgtttgttatctag

SEQ ID NO: 10078 - DNA, 309 bp, Zea mays
  Peptide Sequence Number=SeqID_51857
atggttagttctaaatatcacaccgatttctccctagacaatatccttaggccggctattgaaagcctgtcaaccaatgagcaacagcaatatgaagacttcatgtgtcaagcgaaggagaatttcttgttacaattcacagcggatcataaccagaagattgtcaaacatggagagatcgaggttgcatcttgtctaccttcacttcaaatctccaatatcgcgcccctagacatggtcggaccatccgagcctttgcctggacaatctggcccttatgcggaccatctggcttttcctgctagatag

SEQ ID NO: 10079 - DNA, 402 bp, Zea mays
  Peptide Sequence Number=SeqID_51858
atggatgcttcgatatccgagacaccactgactgatcccctccccactggtgggggcaacaacaacagtggccatgttccagatggcggtggcggcggcgacaatggcttctttggccgaggcttccacaacgacttcggccctcgtcgccacaagctgatgttacccatctatgatgacgagtctggcctgatgaccaagtgtgaaacctacattcgtggtatgtacttactcgagttggatgatgagacaaaggaacatgaggccatggacaactcaggcatctctttgcatgccctgactgacaccgacatcagcaacaccaagaagttgtttgccatcatcaacagcacaccactggtggcactcgtagacacctactcgacacacaccttcatttag

SEQ ID NO: 10080 - DNA, 366 bp, Zea mays
  Peptide Sequence Number=SeqID_51859
atggtcattttgacagcccgcttggatctcctggtgcagcagactgtggttcttgtgttgggctcacatggttttattaagacacatagatggaacaggacaatccgtgctttcatcaatattgaagcttctgggagtgggggtacagatttagtttgtcaatctggacctggatcatggccttctcgtgtttatgctcagactgcaaagtatcccatggcaaacagtgttgctcaggttcttgcttcttacctagtttactcaacatcattacctattgagtggctgagtgctggccttgagccggatcccactactcactggcgcatctcgaggtctccattggacatgtccaaaccatcttaa

SEQ ID NO: 10081 - DNA, 516 bp, Zea mays
  Peptide Sequence Number=SeqID_51860
atgacgacaagacaggggctgcaggcggcgggtcgactaacgtctctgcgagcggatcctgccttacaggcgcaagaagtggggaagtcccccgggcgcagactttcaattcgtcagactccaggcgcactcctcgccccgtcttcaatgcatcccttcaagcgcccacctcgcctcgacgacgcttccaccttccccatgctcccggtgggcagaatgtcgctgcccgggaatccagagctctggccgatggagacagctgccgtggcgtcgtccacctcggctatggaggaggagctattgtgtctgtccgcctgctcagtagtagcctgcctgtggaagaaggacgacatcgagccggaggaggacatcaaggtgtcgcgccaccgtctaggggcctttctcatcaccttcgtgcaccagcaccatcgcaacgccgctttggagctggggcgcatcggggtcggccgcaccgacatcgacatccgcatcaagccatggcgcatactcccctaa

SEQ ID NO: 10082 - DNA, 390 bp, Zea mays
  Peptide Sequence Number=SeqID_51861
atggaggttggaagtccaggatgttccggagtctcacacgccccgaccttggactgggagcgtgaccggtctgtgtcgcaccacggcctccaaaaggacaatgtgtcatcggcggggaggcgtcaccgacctactgttgccccctccacctcaatgtgcacgacgggcgccacaggagcttttccagccgacgagacgtgccggtctctagacggactacaagaggacgcttcaagccgggcgttttctgccgacgtcgtaaaggtggacaggtggacacggcggcgcctacgcccacaccgctcagacgcttctaacctggccgcgtcttcagacgccgtccgcggggacctggtggcacatcacttcgtcgtggctgttccagcctga

SEQ ID NO: 10083 - DNA, 609 bp, Zea mays
  Peptide Sequence Number=SeqID_51862
atggcgacgagcgccctggcggtgaggtggagcagccgatgcgctttgcctcccctggtggcgtgcgtgtatggcggggctcgtgcccacatgggggcacttcctgggggaggctatcatggtggaggtggcggggcatcggtgattgaaggacgggggcggggcacgcacggaggagggggcacgcgcatggggaaggaaggtgatggcgtagatggcggcctcggcgcatggggaaggaaggtgatgccgcggatggcgaattgcgcggatggcggccgaggcgcgtggggaagggcggtgattgcgcagtggggaagggcggtgacggtggtggaggttagcggtgcagggatggagtggagggcagcgctgatggcgttgggtgaggaggcaagatttgcgggggagggcggagggccgcggatgcactgcagggatggagcggggcgtggtgtagctggtgcacgcccacactccacacttaagagtagtagagatatgtttgcttgtgcctgtttgtattcgttgcgcatcgcaaatagattgcgaactgttgctgagcttcgaggaatcgacgatcgagatttggtgaaccgttggtcctga

SEQ ID NO: 10084 - DNA, 303 bp, Zea mays
  Peptide Sequence Number=SeqID_51863
atggaggacataaatgaggaaacaaaggttgcaaagtcaaggaacagggacaagtatgaacataatcttgccaatgatggacgaaagaaagaccaccgaagaagacccgcccacactaccatgggtcttaggaagttgctcatggagcaagtcaatgaacgtatctatcgatacttaaatacgggttacccactcttgctgggtcaaggcgagacccctgtggttgcccaaagccacgaaattaccgagtgtccagcccgacctagggctaggacccaccatatgtggccttgggctagctag

SEQ ID NO: 10085 - DNA, 1479 bp, Zea mays
  Peptide Sequence Number=SeqID_51864
atgagggggcaggcgtggctggcgctgctggtcgtggtggcgctggccttggcggacgcggcggcggggaggttcgtggtggagaagaacagcctcgaggtgacctcccccgacgagctcaagggcaagtacgagtgcgccatcggcaacttcggggtgccgcagtacgggggcaccctgcacggatgggtcgagtaccccaagtccaaccggaaggcgtgccagagcttcgaccagttcgacatctcgttcaagcccaagcaggctgggggacgacccatcttcgtcctcgtcgaccgcggagaatgtttcttcacaaccaaggcatggaatgcacaaaatgctggagctgctgcagttcttgttgtggatgacaagtcggaacctctaatcacaatggacaacccagaagaaggcaaagagcacctagaaaacatcactattccctcagtgcttataacaaagaaattgggggaaaaccttaagaaatccgcggaaaatggcgatatgctcagcgttcttctggactggagagaatcccttccccatcccgatgagcgtgtagagtatgagttctggacaaacagtaatgatgaatgtggtcctaaatgtgatatgcaaatggacttcgtgaggagctttagaggaactgcacaaattcttgagaaaaagggttacactcagtttactcctcattatatcacatggtattgtccagaagcttttgttgatagcaagcaatgcaaatcacagtgcatcaatcatgggagatattgtgcaccagacccagatcaggattttagccaagggtatgatggaagaaatgttgtggttcaaaacctacatcagatttgtgtattcaagattgctaatgagactggaaagccatggctgtggtgggattatgtgcatgatttcgcacttaggtgtccaatgaaggataagaaatacaataatgactgtgcccatgatgttatcaaatcacttggattggacatcgagaatataaacaagtgtgttggagaccctgaagccgatgtggaaaatgaaattctaaaggcagaacaagatgcccaaattggtcatggtaaaaggggagatgtcacaatactaccaacccttgtcatcaacaacaagcaatatagaggtaagctggacaaagttgctgtcctgaaagcgatctgttcaggatttgaggagacaactgaacctgctatttgtttgagcgaagagattcaaacaaatgagtgtttggagaacaatgggggttgctggctggacaaagctaataatgttactgcatgcaaggataccttccgcgggcgtgtttgtgagtgccctattgtgagaggtgtaaaatttgttggtgatggatatacccattgtgaagagatccgtgccatcatggctcagtacatgcctctggataaccaagaaggagcaaaccagcatcaggtcgtgcacgccaatgatatctga

SEQ ID NO: 10086 - DNA, 663 bp, Zea mays
  Peptide Sequence Number=SeqID_51865
atggggtcacacctaatcgaaactggtagaccccgtacctgcaatatctccaccaaggagagctacccctcgacagagccgaagctcggcaactggtgcggcgcgccaagtcattcgtcttgctgggtgacgggaaggagctctatcatcacagcccctcaggaatcctccagcgatgcatatccatcgccgaagacccacctgcccgctcaggctctgcagacggtacccatcacctggccgtttgctgtgtggggtctagacctcgttggtcccttgcagaaggcacccgggggctacacgcacctgctggtcgccatcgacaatttctccaagtggatcgaggtccgacccctaaacagcatcagatccgaacagtcggtggtgttcttcaccaatatcatccatcgctttggggtcctgaactccatcatcaccgacaacggcacccagttcaccggcagaaagttcctggacatctgggtggactgggccgccgtagctcaccccatgacgaatgggcaagtagagcgtgccaacaacatgattctgcaaggactcaagccacggatctacaacgacctcaacaagttcggcaggcgatggatgaaggaactcccctcggtggtctggagtctgagaacatgtaacacccggttttaa

SEQ ID NO: 10087 - DNA, 267 bp, Zea mays
  Peptide Sequence Number=SeqID_51866
atggctcaccggattgctcggtctaggcacggccgcgggcgaccgaagtccgacgaaggcgatcttgggtctccagtgccaaaggttcacaataagccaataaaaagaccaagacaagggttcaaacaagagagcaaaggacaacccgaaaggcaccctggtctggcgcaccggactgtccaatgcaccagggcacttcagctcgaactcgtcaccttcgggaaaatcagagggcgctccgctataattcaccagactgtccggtga

SEQ ID NO: 10088 - DNA, 402 bp, Zea mays
  Peptide Sequence Number=SeqID_51867
atgccgggtcaccgcgccggggaccacggagggtcgtgccaagccgccgtgccaaggccgagcgcccgcacaccgagccggtgccgcacttgcgccgaggccacgctcgcgcccgcgccaaggcccgtgtgcccgcgatggggccgcgcttgcgcgctggggccgccagggctggccgccgcgccgagcgggacgaaggagagggaggcactggcggtttggaggggggagagcgagcgcaacggagaggaaatgggacacggcttgagggcgtcgtgggcacgggatgatcgggaggcggttggcggcgctcggcggagaagaggaacagggactagggtgcggcctggtgggtgggacccacccacaggcggcagcgacgctccagctcgtgcgcgctag

SEQ ID NO: 10089 - DNA, 246 bp, Zea mays
  Peptide Sequence Number=SeqID_51868
atgtcgttgtatgagcgcgcattaaacactaatgagagagtacttaatgagcgtggtagtaggtttacttcaaagatgctagaggctcttatgtactcacatgattgggtgcggaacatatgcaaaaaatttgtcgttgtattgtcatatagggacttgaactttgaggaagagctaatagcctctgaaaggatcacgatgcccaagagggggggtgaattgggcttttctaaaaatcaacactaa

SEQ ID NO: 10090 - DNA, 759 bp, Zea mays
  Peptide Sequence Number=SeqID_51869
atggactccgccgccagcgtcctcgccatcctcagcaagctgcagtccctcggcttctgcgccgatctccgggtccccgacgccgtcgcggcctccgacccctcggaggcgttcgacgccgtcctcgccacgttcctgcgcgaggcctacaccggcggccgcgaggcgcggcctatccccgtggctcttggaaatggacgatgcgttgaccttctccgcctcttcctggccgtccgcgctgcagggggctacgccggcgtgcccaacactcccggtggttgggctgccgccgccgagtctgctggcattgactccgccctcgcggcgcccgtcaagctggtctacgccaagtaccttggtgccctagaccgctggatccagaggctcgtggaagcacatgggcccttcttggacggcgacatgaggaagaggcaagagctgttcattggtaccgatggagtggagggagaagaagggctcctgggctacaatgggagggagcagcggcatgtgatgcttaagaggaagaggggggacgtggttgggatgttgggttgggtgagggagatggccgagaatgctggcaatgatgttgctgtctctgctgggtcgtcggctgagtgcttctcaatggcattggcggtcaggaagatggttaccacgaagaaggctcgccgagcaagcatgttggacgcctcactttttcaggtgatttcaatacctttgaagagtttgttggcaaaacgttttacaatttga

SEQ ID NO: 10091 - DNA, 474 bp, Zea mays
  Peptide Sequence Number=SeqID_51870
atggggacggaagtaggggaaggaatcggagatgatgtgaggcaaatctcagttgacgacgaagagggctcgcggcggcatttcgtcgaacgtgtgcagtgcgcggaggtaagcgatccaacagctgatggtcgctactgcaccgagccgttcatcaccgagtcaatgacccggatcaaacctcacgaaacggcttctacggcggtgaactcgtggtccgacagtggcgatcgatgcaggcctggtgtcaatctatctctggtggtgcctggcgaggggttgaagagaaaggggaggagaggaaggggtaaggcacgcggtgatcgtgaccgcaagctccgccgaggtccccgtgaggcagttggggacgaaactgacggggagggcccacccagcagcgagaacttgagtcacgcggtaaacggtgacaggtggggtcacggaatcggtgagcgctctacgacagacgcgtga

SEQ ID NO: 10092 - DNA, 861 bp, Zea mays
  Peptide Sequence Number=SeqID_51871
atgagcaggcttgcgtcggggctccagcgcccgcggaggtcgttgtcgccgtgcgaggtgctgtggtgcgcgctcgcgtcatgcggcctagtgcttttctcgcagctcgccgtggcgatggttccccgcctcttcccttccctctatctcctcgccatgctccccatcgcggggctggtgttactcgcggctatcgtgctcggccgcctgtggaggaggttcatcggagtgacggcgtcggcgccgctcttcgtgctcttcaacatcctcctatcgtggggcgtttacatcttcgtaatccgtagaaaaacttcttctctgctggacatgctaataaatgcagaatgtgcactgcttctgtggggattctacaggattttatcttgtgatcctggtatttttgcttgtgattcttcttatttggcagaggctggttgcaaggattttgtggaagctatatacacgagtgagagactcccaatgctctcaagagtcaggcagtgtacctggtgcaaagcaaacattaggggctatgaccatcattgccctgcatttggtacttgtataggacagaaaaatcatcgtctatttatggcccttttgacaggatttgttgttgctgaatcaacatatacgatgtgctcaacaaaatatattactatatgcattagctcaggaactataaaatcagagaatcctgtatctctaaacatggtaatcagtacaatgctcttctctatcctccaagtcctctggcagattgtcagggttggtgcttcatctcttagagaacttcagaaaatctgtgtattgagttttgacttacctcatgcctatgctcccattgatcattcttattaa

SEQ ID NO: 10093 - DNA, 1845 bp, Zea mays
  Peptide Sequence Number=SeqID_51872
atgggtaatgccatcaccaagaacccatgcttctccggcgaaccgtacgccgccgccgtcacgtcggacccgctcccggacgacagccatggtcattccttcacctacgtgccatcgggcggcgccttcgaccagcccccgacggctgccgcgacgtcgtcggagtcgtcgctcttctctctgtccggcgccgccatcagcgccaatctggcgacgtctgggtcaatgccgtcgttccgcatgttcaacgagctgacgtggccgcagtcgaccgcgtgcaccttcgagagctcgcgatccttcgccgccgtgcctctcctggcgccgccgcgtacgctgtccatgtcggggccggtccagttcacgtccggccgtttctccgaggcatccggttccgcgtccaccatctccggcacgccctcgggccgtgcattcatgtcaggtccatttgaccgctcctcgtccgcctcctcgtccgctgggttccaactgagcgtttctcagctcatcgctgagcgccacgccgcgcgctctcgcctccgtgatgagcgatccctgctacggttcttcgtcggtacggcctccaaactccggctcgggtcgccgcgctgtggccgccggccagaggaacctgctcaggtctccttcagcgatggggactcccgctccccgccgaacggcaatgtggagtgggctcagggcatagccggcgaggaccgcttccacgtcgcggtgtccgaggagcatggctgggtgttcgtggggatttacgacgggttcaacggccccgacgcgaccgactacctcttcaccaacctctacgtcgccgtgcacaacgagctcaaaggcgtgctctgggacgacattatccaagccggcgacagcgccaggtgcggccaggaagatcatgcggcggcaggcaatgccgaacgcctccgtcttgctcaggccgacggcggcggcgcggaagcgcccacgccaggcaacagcgcagcatcagtgcaccgcgacgtgctgagggcgctggcgcgggcgctgaagaagacggaggaggcgttcttcgcggcggcggaggaacgcgcggccgagagcccggagctggggctgatgggctcctgcgtgctggtcatggtgatgaagggcacggacgtctacgtcatgaacgtcggggacagccgcgccgtgctggcgcggaggccggagcccgacctgaagaacgtcctcggcaaggcgtcgcaggacctgcagcagttcaaggccgacatcgtgcgcgagctggaggcgcgcgaggtggacggcctgcaggccgtgcagctcaccccagagcacagcaccgcggtccaggaggaggtgacgaggatcaagggccagcatctgaatgaccggaacgccatagtcaatggccgggtcaaggggaagatcaacgtcaccagagcgtttggggtcggctacctgaagcagcccaagtggaacagcaggcttctggaagccttcaagatcgactacgtcggcacggacccgtacgtgagctgcgcgccgtcgctgtgccaccaccgcgtcgggtcgcaggacaagttcctggtgctgtcctccgacgggctgtaccagtacttcaccaacaaggaggtggtggaccaggtggtggaggcgctcaccgccgcggagcccgacggcgaccccgcgcagcacctcgtcggggagctcgtgcaccgcgccgcgaggaaggccggcatggagtcgcgccagctgctggacatcccgcgcggcgagaggaggcactaccatgacgacgtctccatcatcgtcatctcgttcgaggggcggatctggaggtcgtctgtctag

SEQ ID NO: 10094 - DNA, 309 bp, Zea mays
  Peptide Sequence Number=SeqID_51873
atggaattcaaatttttggcatatgcatgtttctacgacctagtgtcccagccagaggagacggcgaccgatgctaggaaaaaggtatccacatggtccaggcgagcaggaaaagacaaggccaaagctagccgagaatgtgcaagggggccaagggctgatggcgatgggtcgtcgtctgaggttaggacacgcattcatctacatctggttcaagtacaagagcttgtttattgggatagctccaaatctgaaaacccagatctggagcatcagattgaccttgaagcacctctactttgtatctga

SEQ ID NO: 10095 - DNA, 1173 bp, Zea mays
  Peptide Sequence Number=SeqID_51874
atggggcacggcgcgagctgcagccgcccaagcgaggaggtggacttcttcggcgcggcgcagtgcggggacacggcccgcctcgccgccgctcttcgctcccgccccaccttgctcgcccgcaccacgctcttcgaccgcctctccgcgctccacatcgccgccgcacacggccacctccaggtggtctccctagcattagatctttgcgtgcaccccgacgtcgttaaccgccacaagcagacggcattgatgctcgcggcgatgcacgggaagaccgactgcgtccggcggcttctcgacgccggcgccaatatcgtgatgttcgattcctcgcatcggcggacgtgcctgcactacgcggcctactacgggcacgcggactgcctccggaccatcctctcggcggccaagtccgcgccggtgtcggaatcctgggggttcgcgcgcttcgtgaacgtgcgggacgacaccggggcgacgccgctgcacctcgcggcgaggcagggctggcggcgctgtgtccacgtcctgctcgagaacggcgccatcgtgtccgcctccagcggtgccttcggattccccgggagcacaccgctacatttggccgcgcgcggcggcaacctggactgcgtccggcaactgctctcctggggcgccgaccgcctccagcgagactccgtcgggagaattccgtatgaggtcgccgtgaagcgagggcacgtcgcgtgcgcggcgctgctgaacccgtcatccgcggagcccctggtctggccgtccgctctcaagttcatcagcgagctggaacccgacgccaaatctctcctcgaagcagccctgatggaggccaacagagagagggagaggaggatcctgaaagggactaagaatgcgttgccgtcgccaccgcaccacgatgacggcgctcatgacaccgccattgccgagtgcttatcggtaatggcaagcctcgcacatgtttgccaaagggcgggcagcgtagcgcatgagcgcatccacttgctcgactggcccattgcacatctgagcaacagcgccaatccatatgagctccacattattttaaacgccaccatgcaaatcaatgtacgattacacatgcgcgatcttggtggttcccccatgacgcggatcttgttcggaactgactag

SEQ ID NO: 10096 - DNA, 480 bp, Zea mays
  Peptide Sequence Number=SeqID_51875
atgggcaagaacaacaaacgcaagcgtgagccgactcctccatcagaggactttggcgactcggaatactcagaggaggagttctcctctgagtccgaggggtctccggctcccgtctctcccccagcgtcgtccgatgactcggacgactctcaggggattgccgcggaggtctggacttacatccgggccgtcgagcgctctgggctcgaaggctcggatgagtcggagtactcctcggacgaggaggactcgcccgaggaggacagcgaaggtgacgacgacgacgacgacgatggaggcgacagcagcgacgatggtgacgacggcagcaggggcggcaacggcggcggcaggagcggcaacggtggcagcaggggcggcgacagcggcagcagcaggggcggcaacagcggcggcaggaggggcagcgacggcggcggcagcagcagcaaaggcagcaacagggccagtggctag

SEQ ID NO: 10097 - DNA, 1215 bp, Zea mays
  Peptide Sequence Number=SeqID_51876
atggcatccacggggacgacggcggcggcggtgccggaggtgaccctgcggtcgggcaacggaaagccgatgccgatggtgggcatgggcacggcgtcgttccccgtggtgcacgaggccgtcagggacgccgtgctggcggccatcgaggtggggttccgccacttcgacacggccttcctgtacggcaccgagaagccgctcggcgacgccgtggccgaggcgctgcggcgcggcctcctgaggtcccgggaggagctcttcgtcacgtccaagctgtggtgttcgcagacccacgcggacctcgtgctgccgtccctgcgggaaactctcgagaacctgcagatggagtacgtggacctgtacctgatccactggccggtgtgcctcaggccggccggcgggccgcccaagttcccgaacaggaaggaggacgcggtgccgctggacgtggcgggcgtgtggcgcgccatggaggagtgccagcggctgggcctcgccagggcgatcggcgtcagcaacttcaccaccaggcacctggacaaggtcctggccatcgccgcggtcccgcccgcggtgaaccaggtggagctgaacccggcgtggcagcagcggacgctgcgggcgtactgcgccgaccggggcgtccacgtcgccgcctactcgccgctgggagggcagaactgggacgggcggggcaacgccgtgctcgactcggaggtgctcgcggagatagccagggcgagggggaagaccgtggcacaggtgagcgttacgctagctgccggctgcgtcttctggcgtgcggtagcagtgtcgtggacgtttgccccggccggtgaaggtttggttgatcacgcgttcgtcgtctactgtctggtctgccacaccattctattcagttttgcctttgtcttcccgtattaccaggtggcgctgcgatggatacatgagcagggagtgacgtgcatcgtcaagagctacaacagggagaggctgaagcagaacctcgagatattcgactgggagctgaccgatgacgaccggctcaagatcagccacatcccgcagaggaaggttgtcgaggccagcggcttgttctcgcaggaggccttccggttcgctcatagctccttacatgcctcacagctcgtacaggcttcgcttccctgcgaccgtgaagcgacctcgctgtcagaggccgccttgtcgtag

SEQ ID NO: 10098 - DNA, 258 bp, Zea mays
  Peptide Sequence Number=SeqID_51877
atggctgttgaggccccgcttgagatcgactgcgagcatcttgagttatcgcttttctgctctttgccatatgtcagcgaatccaccttggctgggctcaccggtggattagtggcgtatgcctggtacgacatattgcctagtcccttctggtgtatgggtcactgtagagaccgcaatgctaaggtccctacgactggggttgactggtgccagtgccacaagtcagcggggatacgtatccggcgtcgtgcttga

SEQ ID NO: 10099 - DNA, 459 bp, Zea mays
  Peptide Sequence Number=SeqID_51878
atggccggatttggggcgaaaaagctctgggcgagcaggggttgggcgaattgggtctggcctggagctggactgcgtgggggagagctttctgcgcctggggaaaggaaggggtggcgttgggtagaggaggccggctgggagacatggcgccatggatctgatgggggaaggggcgcctgcaccaggggagtcggatccggcgcagcacgagggggaagaaagctaatcgagctccacggtggctacacgaacctggctgtgggcaagcgcgttggagctatggcctgcggcctggcatccagtgctggtgcttggagggaaggagctcgccgcggcaagagcagggaagggggcgcacacgtctgggtgcccagggagaagagcgccatggaggccgatgtggaggtcgaggcagggacctcaggctcggccatgggagagagggcaccaagctga

SEQ ID NO: 10100 - DNA, 510 bp, Zea mays
  Peptide Sequence Number=SeqID_51879
atggcgctaacgatgttcattactgtctttatatccctttttttgcaaagctatgttgaacgtgtgtttgagaggctaaactcaaggggtaccatttcacacaggttatcaagacctgcaactaagtacgtggatggaaaacattaccgagatttgtcaaagttgaacagaaaccctgctcaagtgatctatctcagcgcccatgctcttgaatcttgcctgcagcatgaaaattgtgttgaaatcaaaccttttaaacttgaagataaaaatgatacccaactgctggatctcattccatttctcgagtatgttgccatggctagaccttctgacattaggacagtgctggcatcctatcaaggtcatgatgttgttgctaagtttattgagcgttcaaggaacaccagcagcgtgtgcaggaacagagcaaacttgggcgcttatggcgacggtgatggatcctattccagtaacagttacactaaatcattttctcgtcgggcttaa

SEQ ID NO: 10101 - DNA, 495 bp, Zea mays
  Peptide Sequence Number=SeqID_51880
atgtccggtgcactagagggctccaactccaaactcgtcaccttcgggaaattccagaggcaactccgctataattcaccggactgtccggtgtacaccggacatgtccggtgctccaaggaagagcggcctccggaactcaccagcctcgggaattcacttcagctgctccgctataattcaccggactgtccggtgtacaccggactgtccggtgtaacagcggggcaacggctacttctggcgccaacggctacctgcagcgcatttaatgcgcgccagcgcgcgcagaggtctggcacgcccatgctggtgcaccggacaccctacagtacatgtccggtgcgccaccggacatccaggcgggcccagaagtcagagctccaacggtcggaacccaacggctttggtgacgtggctgtcacaccggactgtctggtgtgcaccggactgtccggtgcaccatacgacagacagcctccaccaaacgactag

SEQ ID NO: 10102 - DNA, 639 bp, Zea mays
  Peptide Sequence Number=SeqID_51881
atggctgaagctaggcgctgggcgctggacctcggcggcgacagcgactcgggcactcggctacgacggacggcgactcggcgagcgggtgaggggccgacggccgaggcccgaggggcgagggcgactggccgcaagacgggagggagtgcgccagtgcggcacggcgggcctccggcggctgcagactgcggtgcgccgtgcgccggtgtggcggctccaaaccctagcggcgccaagctgcggtggcgcggtgctgtactgctgtcgacctgtcgtcgcctcgtcggaaccgaggccgaggccgagggctcggtcatgtacccgagccccctggcgaggggttgccataccatagtggttgacaaagtgctaagtatggggaaaagcctcttgaggaatgcgtccgctccactatattggatgacattgggggcgtcctctgtcacagatatcgagggcagagccgtgctcgggcgaggtggaagtttgctcgaggtcgcgaccgagcctgtgctgagattcaatgacggcgagttctacattgggcaagatggagtttgcgcccgagggctggtccatgctcctttcgtattagatgtcccgttaggtgctgtcagatggcgtgcacacgcgtaa

SEQ ID NO: 10103 - DNA, 1287 bp, Zea mays
  Peptide Sequence Number=SeqID_51882
atggagctctgcctcgccgcgcgtgtcgggacgatggcggtcgcatgccggaggagggcaccgacgataggcgtgccgaagaagaggcacggcggtggcactgtgcgcgtacgttgcgtggtgacggcgcccatgggggagaagacggagtaccgggacagcccgctggagcgtgtgttcatggggctgttcgcgcgcaagatggagaagcgaaggagaagagggcgtgtgggagtgggactacgagagcttcgtggacgtgtcgcggcgggtgatgttggggcgcgcgcgcagctggaggaggcggtgcgcgaggtgctgttgttcatgccgcgccccggcgcgccgacgcagttccggcggcagttcccgccgacgcggtgggcctgcgagttcaacgcggcgctgaccatgcccttcttccgctggctcgtgggcccctcgaaggtggtggaggtggaggtcggcggcctccggcagcgcagcgaggtgcacatcgagaagtgccggtacctggagagcagcggctgcgtggggatgtgcgtcaacatgtgcaaggtccccacacaggacttcttcaccaacgagttcgggctccccctcaccatgaacccaagtgccgcctccgttggaagaggacccggcgttgaagcaagcttgctacccgagcctctgttccatgtcgacgtcgtctgccccggcctgtcccaagcttcaataggtccatacatgcatgcgcagagtttgccggccggacttgggatggaagaagctgaaatgtcaactattgggccaaaggttatagagaactcatatttgatggctaaacataaaagcgacttagaaggattcaagttagatgtatacgaaagtgtgactgagagattcatggagtactcagaccttgacaaggatctgaacaatgaggctgctcagcctgaacaagggtaccaggatggcggtctagcgttggccgcgcccgcaacatggcatcatccatccgcacccaccatctacgtgcttcacctcgtcgagctcctcgtcttcgaggtcgccccggtgctgacctccacgtctccccgatcagcaccaactgcaccatcgagatgttgtcgtgcagggtacgtggcttggttgtctgcctccccgtttcgtgtccacatctctgatccccacgctcggcgctttgtcttacggttcgagcagaaccttcactcacctgagctcttgataatttttagttcgagggatcagaggcacttgagcagcagaatggactcttctcag

SEQ ID NO: 10104 - DNA, 525 bp, Zea mays
  Peptide Sequence Number=SeqID_51883
atggtcctcacctcagttgctaacacctcgttctccatcctacttcttttctctctcccctcgtgcctccgcctctgtgccaccccatcttcgacagagggcgtgggagcaggcgcctcctccccgtattcgtccgacactatccccgacaccgacccatgcagtggctattgcatgtccatgaggacgtttcacaacacacgcgcaccatcgttttcgccgttgtcggatgtcccattcgtctttccgacctttgcactactcttcccaacctgctgccccggcccacggtcacagccacgagtcggtcttgatcctgaccgttctctatgtgtgtcgccgttgtcatgctttggttatcttggcgatgaggagtccaggtctcactaccagaatccggctctttgccgagtgctcggcgctttgccgagtgctttctatcgggcattcggcaaagaagtctttgtcgagtgccgcactcggcaaagttccactctcggtaacgaccgcgtttaccgagagtag

SEQ ID NO: 10105 - DNA, 315 bp, Zea mays
  Peptide Sequence Number=SeqID_51884
atggcgcaaacgcatagcattggcggcgccgccacatccgaccatcgtgagaaggagttttgttcttatgtttggtgtgaagttaattttgcctataccatgtttgtttgtgttactactgctagcagcgaggttacgagttacttgaagagcaagttggtacctggaaatcttgagtctcaggcaagttgtgcccttgataacttctttttacctaataatattcctgatcattgtgttaattggaacatggagcaaccacccgggaaaacagtgctaccacaagggtggtatgggacacccttggctgactaa

SEQ ID NO: 10106 - DNA, 453 bp, Zea mays
  Peptide Sequence Number=SeqID_51885
atggtgaacggaccgttctcgcgagcaattgcggtgctccctgtggagattcttcaatggagcggtcaccattacagtcacgagaaccaagcaaacccactgctcccacctttcgaagcagcgcgcggcaacccgcgagtgccactgacggaggtgctcttcccttcaacggcaatggtgggcatccgcggccatggcgttgaggcccaagcgagcgtggctcagagcaggaagccaggcaagttacggcaagagaggatgaggagcgtggttggcatcgagtggagggtatggcgcaggatatttattgctcagctggcgttggcttcaacggactccgcagatcgtggcacgcccgccatgcgcgccgagaggagatcggcgcccatggcttctgtttgcgaccgagcgggaaagggggagaccctaacgagtggggccgtggaccagtga

SEQ ID NO: 10107 - DNA, 117 bp, Zea mays
  Peptide Sequence Number=SeqID_51886
atggcagttcctggaggcacgagaggcgacagcgaccctagagtcgtgttcagcgtcgacggtggccccggaggccgttggaagttcggagtccgtagatgtgaagatctcatttaa

SEQ ID NO: 10108 - DNA, 903 bp, Zea mays
  Peptide Sequence Number=SeqID_51887
atggacggctcccgctatcttaacccaatcggtccccagtttctaatctgggccgttcgccgtgcatccaacggtgcccggatacccctgccacaaccctgccgcacggtggcgcacccgccgaaccgcgacggcgccatcgccggggatccaatcctccacatcccggagctaatcccacgcgcaacccggtgcaaactgaagcggacgcaatgggggtgtttccacggggctttgcccgcagctacccgccatggagtttctcggccacaggtgtggcgaattcacggcggaattcaacggcgtcgagctaccccagagtctatgctagtaaaatttgggcacgaggcgattctccaccgatcaaggaacatgacgaagctgagggatggaaattaccagcggacacgacgtgaatcactcggtgcggggcgagtcgcgaacgacggcgaggcaatcgcggtcgcagctggcaaggcgggcgcgattttcgccgagcaatacgcagagagcaagcggccgcgcggcgcaagggaggctgacccgcgggccccagttgtcggcgcgagtgtgcggaagcaggtcccagaaatgggccgagcgcggacactctccccccctggtgggccgaattaccatctggcggcccaggacaacacgaaggccgcgggtttcccctttatggtcgactccctcctttttccccccttcgtgctccgtctcgcgctgacccatctgggctgggacacgcggcgacagtttactcgtcggtccagggacccccgtggtcgaaacgccgacaggcatcttcctccaaaatggtgcatcctccaactcaagatggtgaacaggtacctcaagaagagggacaggatcaagggggagcacaagaaggacaagtga

SEQ ID NO: 10109 - DNA, 183 bp, Zea mays
  Peptide Sequence Number=SeqID_51888
atgacggcgacgcactcggcgaggctaagatcttgcgatgcttgggctacagcaatggaggatgagctcatttttgtcgaccgggagctcgatgttggcgctggggctagctggagccctatcaagcgcagggtggagttcaagctactagataggttgttggtgaggagcttgaagttttaa

SEQ ID NO: 10110 - DNA, 312 bp, Zea mays
  Peptide Sequence Number=SeqID_51889
atgaggttgagaagttgctgggtcctgaacgccgcagcgttcgtcagcgtgagggcctacctgcgaatggccctatcggccgcagcccccatcacggaggacaacatggatcagagggaaagagcgcgagggtgggcgggaggcatggtccaggagctaggatttgaggatgaagaggaggcgggcgagggttcgtgcggggaaaggaggtggatatggtgctccgggaaagggtgcaagaatgctcgtaggaccatactgcctgatagcctggtggaaaggaagagccccacaagctttgggggaaattaa

SEQ ID NO: 10111 - DNA, 288 bp, Zea mays
  Peptide Sequence Number=SeqID_51890
atggaggccatcaccagcgccatttggaaggcaaacaaaacaagctcaaacaacaaggtgaagaagatcgagcctgtctacgactacgacctagtcaccagaccctgggtgttcggcaacccgagagtggtgacggtgctggcaaggccgccgccgggtgccggggtttctgtcgcctcaggccagaagaagctgttccagagggcgctgtcagagcaagagatcatcaacgactacatcgccagaaagaagaagcagtttgccggggagatcccatatagtacctag

SEQ ID NO: 10112 - DNA, 1440 bp, Zea mays
  Peptide Sequence Number=SeqID_51891
atggcgactctgcattccatggtgaccctgctgctgctgccgctgcttctactcacagctcggccggcgtcttcctcctcctccatcgacaggtacgaaaaacaccatgaccgtgaagcactgctggcactcaaagaggctctgataggcagctcgggactactaagctcatggaacagcagcagctccgacgtgtgccgttgggccggcgtgacatgcagccgccggcacgcgggcagggtggttgctctgagcctgcgccagagaaacctgggaggcagcatctcccctgccatcggcaacctcaccttcctcaggtcgctcgatctcttcgacaacatgctgtcaggggagataccgcgcactatgacacggctgcgtcgcctgagcttccttgagctggcgtacaactatcttgctggcgagatccctgaaggcttggccaactgctccaacctcgcgtacctgagcgtagaggtcaatcagcttcatggcgggatccctagcggtctgggcttgctgtctcggctacaagtcctgtatgtcggcgagaacagtctgacagggcatgtaccgccatcgctcggcaatctctcggcgctgcagaggctggcactgtatcagaacaagctggaaggagccatcccagagggcctttcccgtctgaggtatctccggtacatccaggcggcgaggaacagcctctccggcacgattccgcctcgcttcttcaacatatcctctctccagtacttcggtttcagctcaaacaggctgcatggtagactgccaccagacgcaggcaggcacctgccggacctccaagtgctccttcttggtggcatcgggaacaacttttctggaacactcccggcttccctctccaatgccactaaactacaagagcttggtcttgctcacaacagcttcgaaggaaaggtgccgcctgagatagggaagctctgcccagagagcgttcaattggggggtaacaagctgcaagctgaggacgatgcggactgggagttccttagacatttcaccaactgcacccgtctagcggttctagatgtcggtggcaacgcccttggaggagtgcttccacgcttcgtagctaacttctctgggccggtgaatactctgatcatggagaagaaccggatgtctggatcaatccctctgggtgtcggaagcctcgttcaccttgaagacctggaattcgggggaaacaacctgcgtggtgttatacctgaggatattggaaggcttcggaacctcaagtttttcacgctggaggagaatctcctgtcaggaggtatacctacctccttcggcaacctcacgcagctgctcagccttttcctgtcgaacaataggctcaatggctccatccctgagaaccttgggagcttgcgcagagctgaaattgcctccgtgtga

SEQ ID NO: 10113 - DNA, 306 bp, Zea mays
  Peptide Sequence Number=SeqID_51892
atgggcttgagatctcagcctggtttggagcccgataaaggtttgacatggcaaatgactaaacgaagaggtgatcaggaagtccacaagtttgttgaaataatggcaactgtattctcaagggatgcatggcgctgtgtatggcatatgattcagaacgacttggtccatggatggggccttgattttgctcttaggaaatgtgtggagatagcaaatgtccgagagtggttgctcgacttcttcatgaatgaggtgatagacgttggtggatcatgcagggttgaggttgcttcacataactaa

SEQ ID NO: 10114 - DNA, 198 bp, Zea mays
  Peptide Sequence Number=SeqID_51893
atggcgcagcaaatgttatcgctgcgtgttcctatttatatgcccaatgcattgcaacttggcgggccctatatgtcattgaatttcgctattctagcgaagggaaggtgtggagcacagggatggtggtcgacggctgaggtgaaggtcatgcgggctcgtgctgatggattgggagtggtgaagggcgagtgctag

SEQ ID NO: 10115 - DNA, 177 bp, Zea mays
  Peptide Sequence Number=SeqID_51894
atgggcgcagcggaggaagttcacggtgcggctggggaagaagaagaggaactcgagcttggggaaagggaaccgggtgtgctgaagaacaaattggatcataacctcgcgcacgatttctcagctcatgagcagagacaattatttcaccccaaaaacttagtcgtcgagttctaa

SEQ ID NO: 10116 - DNA, 279 bp, Zea mays
  Peptide Sequence Number=SeqID_51895
atgacgatcgacgacttgttcgagatttttgtcgagcacttggtggctatcatacagggtaagtctgatgcggcgcttgggatgacgtcgagcgaggagacatgccaaaattctggacgcgacggcgatttcacaccgaggcgaccaatgggggcagtgcccaggcacacacgacatgaacgaggcaaccagctgccgacggcgcagcagggacagagggaggagcgcagcgtgacgggattaaagctgagcgatccgagagggcgtgctgttgagtag

SEQ ID NO: 10117 - DNA, 387 bp, Zea mays
  Peptide Sequence Number=SeqID_51896
atggggcaagaacaacaagcgcaagcggtgagccgactcctccatccgaggacttcggtgactcggagtactcagaggaggagttctcctctgagtccaaagggtccccggctcccattcctctgcgtgaagtcgtatgatgattcagacgactctcaggggcttgcggtggaggtctggacttacatccaggctgtcgagcgctccgggctcgagggctcggatgagtcggagtactcctcggacgatgaggactcgtccgaggaggacgacgacgacgatgacgaaggcggcggtgacggtgacggcggcggcaggggcggcagcagcggcagcaaggatggcgacggcggcagcagcaggggcagcaacaaggccagtggctga

SEQ ID NO: 10118 - DNA, 435 bp, Zea mays
  Peptide Sequence Number=SeqID_51897
atgaccggcgcagacgcgtgcgctgccgtcggcctctctggcagcgctcctcgacatccggacgatcaaagaagcaagaagggaggacgcggtggggctattttccacaagggaaaaagctcacgcgatgttggcaagcccagtagcgagagaaaggatcggcaggagcatcccgacagacactggagaaattaccgccccatgcgcaccgaggaaggagaagtcgctgtcgcggatcggtcgcccaggccgctggcaaagaccaacaacgaccacttccagaagctgatggactcactgtgccaaagtcatggctttcccgtccgccacaagctccgggagtgcgaactcctaaagcgcttcatctccaatccgccggccaaaaagcaaagcaggagagtcgacaaagccgacataacaagaagcccacgctga

SEQ ID NO: 10119 - DNA, 479 bp, Zea mays
  Peptide Sequence Number=SeqID_51898
ctggcgtgccaaaccttgatatggttgagagtgtcgatgatgagaagattgctaaccgtcttgatcgagtggtagctgacttggggagaaaacctcttaaggttttggtccaagtcaacactagtggagaagaatcgaaatttggagtagatccctcaggatgcatggaactagcaaagcatgtcaaactgaactgcccgaaccttgtgttctctggtctgatgacaattgggatgcttgattactcctcaacccctgagaatttcaaggtaaaatatagtatattctgggatgcagaaattgtgcgctggctaactgccgggaagaggtgtgcaaggagcttgggaatacccgaagagcagtgcgaattgtctatgggcatgtcggctgattttgaacaagcgattgaaatgggaagcacaaatgtaagagttgggtcaaccatatttggtgcaagagaatacccaaagaagaactag

SEQ ID NO: 10120 - DNA, 756 bp, Zea mays
  Peptide Sequence Number=SeqID_51899
atggccagctactcagcatccaccgggagcgagaccttcgctcccgagagccagatcatatttggctccctcagcttcctcgcccaggagaccggtgagctccgcctggttggcgacgacaaggctagtgccatgggcctagggcccaagcgttcaacccgaaccaaggaggaggaataccagcgccagtgtcaggcacgtatcctcgcccgtgaagccaccctccgtcagcagcaggacgagcttgacgcgctcgtccagaggctcgaccgagtttacagaaacatcgagcaaagatgcctcaaggctgaacagcctcaggcaaaaaagatctacgaccaaatcacggagagcagcgatgggcacctacaagtgccctggaagctcttggaacctaaagagggaggacgcggtggggctattttccacaagggaaaaagctcacgcgatgttggcaagcccagtagcgagagaaaggatcggcaggagcatcccgacagacactggagaaattaccgccccatgcgcaccgaggaaggagaagtcgctgtcgcggatcggtcgcccaggccgctggcaaagaccaacaacgaccacttccagaagctgatggactcactgtgccaaagtcatggctttcccgtccgccacaagctccgggagtgcgaactcctaaagcgcttcatctccaatccgccggccaaaaagcaaagcaggagagtcgacaaagccgacataacaagaagcccccgctga

SEQ ID NO: 10121 - DNA, 276 bp, Zea mays
  Peptide Sequence Number=SeqID_51900
atggcccaagggcacatttccctttcagctggtcgtgaggcatatggccaaggaccctgcggcagtggctttggttattacttccccagcggaccacaatttccttttcgtggacagtggcctagagaacatatggctcatggggttcgactgttcgggccacatgatcaaagcaacaaatggttctctagccttgaccccgtgaatggtaaggaatacatcaaatttggggataagtcgagaggtaaggtgtctctcgtggctccgttcgagtga

SEQ ID NO: 10122 - DNA, 495 bp, Zea mays
  Peptide Sequence Number=SeqID_51901
atgacgtcgatggctctcagctccctacggaagcaaggaaacatcagcaggatccatgttgcaccgctagctgcgcttctacagggctcaaggcacttctccgccggccacgggtcgtgcagtgagccccaattgggcatggtggtcagccaattcaagaggggaactggtgaaccaggattaggctttgctactaaggattgtagtgcaacttgctttgggaaggttggtgaatggagtcgattgaaaccattagagaagccatcaaccactcccaagcttatcaaaatcatcccacctaagcctatcacccctgtgagacatggtgtgattgaggagcctgtgagagcccctcagaaacaagtgtgggttccaaagcctaatcatctcaagaacacacttgataccctttccgacatctctagtgatccccttcctagagatcctcagccacagccacaccaaaagcccaagactcaaacagattccacctaa

SEQ ID NO: 10123 - DNA, 510 bp, Zea mays
  Peptide Sequence Number=SeqID_51902
atggattctatccttgtcgcagcgcctgctgttgatgtcgtggcaaatacggctgtgagagggtcggcacaggcggcggcgtcccctgtgatgccctcggatcttatggggtgtcgtgtggaggcgtttccctgggttgcaccgcagtcttccgttccttcgccggtcgccgcgtacgtggtgcacaagtccgtgagggacgtggtcttggtggtcagaacggcatctgcatcccctgggcccccggactgcagtcaccaggaggtgcccccttctgagggtggcgatgcgaaagccgaagagcgaaagcggcttgaatcggcctcgctcccagatatcgcggctctagaaaccattgaacgcatgctcggtggtttcgaggatgcgatcttgattgctcaggcatcggtgacgggggacctcgtcccttcgggcggaggctcgggtggaggcgctgcgatcagcttaggtggaggtagggcagctttgggcgagtgccgcctgcgctaa

SEQ ID NO: 10124 - DNA, 276 bp, Zea mays
  Peptide Sequence Number=SeqID_51903
atgtccatgtattccagcgttaatgaccctgaccgtggctccatcgagccgctcacgctgtccgagatcaaggcgagggttaaggttatcagtgtgctgccgtcagagcccttcatggatgaggatttactgcaccccctttcttggggcatgctggggattagtcctctggcgcccagccttccaccactccctgagggggggggcacagtccaactggagcacaagcgcaaaaggagcgacagggaaaccctggggcgcatgagtcacctttaa

SEQ ID NO: 10125 - DNA, 2313 bp, Zea mays
  Peptide Sequence Number=SeqID_51904
atggcagggcaggagcgtaggacaatcgatctggaggagggatgggcgtttatgcagaagggtatcaccaagctgaagaacatcctcgagggcaagcccgagcctcagttcagctccgaggactacatgatgctctacacgacgatatacaacatgtgcacgcagaagccgccgcacgactactcgcagcagctctacgacaagtatcgggagtcgttcgaggagtatatcacctccatgatttcctactcagagaggagtaaggcagcttggatgggagtttttttagcttttgttgacggggaacaaatcgtgctctcagagcctggggctcacatgagcacttcaaatctggtactaccttcgctaagggagaaacatgatgagtttatgctgagggagctagtgcaaaggtggtcaaaccataaagtcatggttcgttggctctcgcgtttctttcattaccttgaccggtacttcatatcaaggaggtcacttaccccacttaaagaagttggtcttacttgcttccgagagttgatatatcaagagattaaagggcaagttaaagatgcggtgatagctctgatagacaaagaacgcgagggtgaacagattgaccggggtctgttgaagaatgtattggatatttttgttgaaattgggctgggtcaaatggagtgttatgagaatgactttgaagatttcttgctcaaggatactacagagtactactctgtcaaggctcaaagctggattcttgaggactcatgcccagattacatgattaaggctgaggagtgtttgaagcgggagaaggagcgggttggtcactatttgcatattagcagtgaacaaaagttgttggagaaagtgcaaaatgaattgcttgctcagtatgcaaccccgctgttggagaaggagcattctggatgttctgctttgcttcgtgatgataaggttgaggacctttctaggatgtacaggctcttctccaaaatcagccgcggtctggagcctatttctaacatgtttaaaacgcatgttacaaatgagggcacagccttggtcaagcaagcagaagattctgctagcaataagaaggtctttgtgtggaaaatcatcgagctgcatgacaaatatgtagcttatgtgacagaatgtttccagggacatacactcttccataaggcacttaaagaagcctttgaggtcttctgtaacaaaggtgtctctggcagttcgagtgccgagttgttggctaccttctgcgacaatattctgaagaaaggttgcagtgaaaagctcagtgatgaagccatcgaagatgcccttgagaaggtggtgagaatgcttgcatacatcagtgataaagacctgtttgccgagttctataggaagaagcttgcaagaagattactttttgacaaaagtgctaatgatgagcatgagagaagtattctgacaaagctcaaacaacagtgtgggggacagtttacttcaaaaatggagggcatggttactgaccttactgtcgctagagatcatcaaactaagtttgaggagtttgtagctggacatccagagttgaatcctgggatagacttagctgttactgttttgacaacgggattctggccaagctacaaaacttttgacataaaccttcctgccgagatggtgaaatgtgtagaggttttcaaggagttctatcaaacaagaacaaagcacaggaagctgacatggatttattccttgggaacctgcaacatcaatgctaagtttgatgctaaacctattgaacttattgttacaacatatcaggctgcattgctactactgtttaatggatctgacaggcttagttattctgagattgtaacacaattaaacctgtcagatgatgatgtagtgcgtttgctccattctctttcttgtgcgaagtacaagatccttaacaaggaaccggctagtagatccatctctcccaatgatgtttttgagttcaattcaaagtttactgacagaatgagaagaatcaaggttccactccctcctgttgatgagaagaaaaaggttgttgaagatgttgacaaagacaggaggtatgcaattgatgcatcaattgtgcgcattatgaagagccgcaaagttatgggtcatcaacagctggttgctgaatgtgttgagcagctgagccgcatgttcaagcctgacttcaaagccataaagaagaggattgaggatctcattacaagggactacttggagcgcgacaaggacaacgctaatacgtacaaataccttgcctga

SEQ ID NO: 10126 - DNA, 498 bp, Zea mays
  Peptide Sequence Number=SeqID_51905
atggctgctccggccagatcgttcggcggcagcaggaacgcctgcgcgcggcggcagaaacgcgcggcagcaggaatgcctgcgcgcggcgacagcaggacggcctgcgcgcggcaggaagacggcctgcgcgcggcagcgggcgcgcggcagcaagaagaaggtcgggcgcgcgcggcagcagaggcccgtcagagaatcagagctctgaggctgctcacatcaggccaccaccaacccctcacgtcggcggtggcgtcgtcggcgaaggcagagatggcgtccgtggccgcggcggaggtcgcggcggcggcgctccggtcggtgctgtcgcgcgcgcagcaggcggcggcgcgggcggggcgcgcgccggggtccgtgcgcgtggtggcggtgagcaagaccaagccggtgcctgtcatccggggcgtctacgacgcgggccaccgctgcttcggcgagaactacgtccaggagctcatcgacaaggcgcctcag

SEQ ID NO: 10127 - DNA, 462 bp, Zea mays
  Peptide Sequence Number=SeqID_51906
atgctgctcgaccactaccaagacgttgccgctggcgtcaagtgcggagagggcgtcgagcctgtccacggcgagcagcaaaagggcagggctgcgtccatggcaccatgggggaatggtcggctggtaccagagagtcgcggatccgggcgagcgtggttggtggcgaggacgggctggagaccgggcggcctgacggcgtccatggctagggtaggggtgagcgccagggaggagaggctgggagtggcggctggcaagctgctgagatggagagaggagcagagaagatggggcggcgtcaagctgctggaaccagggcaaacgcagctagggctgatggcggccatgggagagacgccgagagagagggctagagaggatgaggctgggcgtgcacaagagataatgctgggcaacgacatcttcgcgaaagtgccaggggcggtgaagacaggataa

SEQ ID NO: 10128 - DNA, 1089 bp, Zea mays
  Peptide Sequence Number=SeqID_51907
atggagacgaagccggagcggcaccaccgccacgaggaagcccgtgacggggaggacgacgcagtagccatggaacacggcgctctctcgctgcaacgcggcggagccaccttgtttggctggcggcaggacgaggaggccggccgccgccgccgagtagagatccgggaggtggacttcttctcgagggactccagagcccgcagccatgacgacgccggcgacggacgtgacgacgtcaacatcgggctacacctgctaaccacgacaagccccgacgaggaaatgacggcggcggcggccaagaatcaaaagacccgcctgaccaccgcggcctcgtacaacgacgacacgtccgctcagcagctgttgagggttgaggacgaggcggctagcgacggagctggagaggcgtcgccttcgctgagcaatggaggaaaccataacgacggcggcgacggcaagcagcggaggacgtcttcgaatgtgacagcaccgccggcgagagagaacggcggcggcgagcgggcggagttgccagcccacaagacaagggtgtctgtgcgtgcgcgatctgaggcaccaatggtaacaaatactaacaatttgattcccttcccctgctatgttgacctgcttaaagaaacatttttaattaagaacacgatcagcgacgggtgtcaatggagaaagtacgggcagaagatggccaaaggtaacccatgcccaagagcatactaccggtgcacaatggctgtggcatgccccgtgagaaagcaggtgcagcggtgcgccgaggacaagacaatcctggtcaccacatacgagggccaccacaaccacccgctgccgccggcagccgccaccatggcgagcaccacgtccgccgcggctaccatgctgctctccggcccggccaccagccgcgacggcgcggccgcgctcctcggccacccggcggcgctgttccaattccaccactccagcagcatcccctacgcgtccactatgggccacgctctccgcctccgcgccgttccccaccatcaccctcgacctcacgcagacgcccggcggcgttgtcggtag

SEQ ID NO: 10129 - DNA, 576 bp, Zea mays
  Peptide Sequence Number=SeqID_51908
atgccggtgctgccgggcaacaagcggcgaccgaggcagcacgtgcagccactgcccggcgcgccgcttgtcccccggatcttgcctccccctcccaccaccaatcacctctcgtcgacctaccctgccgcgcgccgcgctgtgctcatactcatagctcccatcatcccctcgccccttcgccatgatttatactcgcgtgacgcccacacaacgcccatgattagaagtcgcccggccgcccgcgcgctgccgagatccatcagctcttatcctcaacatccttccagcttcctggagcagtgccgcctttcatataaaccttatatgggttcttgggtgcgcaccatcacaacgcccttcaggaaagcctgcaccatcttcggcccacacaaggacggcggcggcaagaagcagacgcagcagcggccaaactcagcagcggtggtgcagcacgtcgacgccgagagggccaagctccacggggaggtgatggcgtgcgcctacgacgacgtgcaggtcatgtggtccatgctcgaccaggcaaggatccgggatctcagtgccagctcgtga

SEQ ID NO: 10130 - DNA, 552 bp, Zea mays
  Peptide Sequence Number=SeqID_51909
atgaagtgctcgagctcatggaatcatgaggctagtgaagtgatgatcaagaggacatcagtggtacatggttcaagaagtcaacagattgatcaagaggaatcaatacaccctaagaaagcagtaggggcggacccacaggggggtccaggtgggcccctggcacaccctaagccaggcccaccgaagaccccatcccggtatcccgagcgatcgttcagcttctttacatcagacggcgggcgacagctgagattacttttcgtctttctgcgatctgcgcccctgcccctgcctccgtccgaccagcgcggtgcgatctgctactgctaccgaagaccgaagtgcccagttggccagttgcctgcgcggtgcacggcggcgccctgccagcctgcctccgtctgctcgtctagttggctgttggcttttggagtcttcgtctggacgtctgcccaagacccaagtacctgttgcctgttggctacttggctgctggatgttagttgttgccgcttgcctcttggtctgttcaacgcttcagccggccag

SEQ ID NO: 10131 - DNA, 183 bp, Zea mays
  Peptide Sequence Number=SeqID_51910
atgaaccctatccccggcaacgacgaccgacctggaggccgcgacagccccaccccccacaaggaaacaaacaagctcatgatgatggacatgtgcaccctaccagatgatgattcccaagattactttgctatgaagaagaagcatattcaagctaaggcaaaggaatttgggtttgagtga

SEQ ID NO: 10132 - DNA, 748 bp, Zea mays
  Peptide Sequence Number=SeqID_51911
atgacgacgatcgacgactactacggtcagaactggtatgccgatcgcgacatcaaccggagggcctctgattacatcgagaggacactgccacgccgccgcacctcagctccgcgcggactcgcctcggctgatgcatggggcccgtatgccaggtcttccgtctatctcgcgccgaattcggaactgacgttcttcaagccgcacgaacgccgtggatcccgcgcgtggaccaagtccgtcgctcgcacaacggcatcgccgctttccctcgctcgctcacgggctgcgctggtgggaccgcttctcagctgctctgcgcgccatgcctggtcagggacggatggggcctcggtgtcagctttgtctccattggatcgaacctccgcatccctcgccgatccgctcggagttgcaactgagtccttatccgccgccgggaaccgcggatctaggccccgcgcacgcctgggctctccccgcccctataaaccggccgcgaccccccaactcatccaaccttcatcgcaagtcgggtgccttctgccgtggtccgctcgggctccgccgctggcgtgttccagggaggaagaaagcgcctgggagcaccaacagggttgggtgggacttgaactgcgcccaatcggcagtggggcgccgctgtgggccggtgattcctcgtcgcggttggtcatcgtcgtgatgtcgcgcctcaacgtgaccccgtgttcccacacggccatactag

SEQ ID NO: 10133 - DNA, 747 bp, Zea mays
  Peptide Sequence Number=SeqID_51912
atggattctcaagcgccgcttcgtcctcctctagctttcgcctgcttcatcttcctttgctcatccttctgcgcagcaaatgggatgtacgacagggttggtgcggcggcgtcagatggggagagcaggaggatgcggctgcacaccgacgggagccgcggcgacgcgcacgcgtggcctgggtacctctacacccgagcagttgggagatgcacaccccagctgtacagcacttgctccatcgagtacgtttcggcttttgaacaagaagttaggacgttgtctggtcagttctgtggatcacgcctttctacatacgatttttatggcgacaagtcagcaaaatggctacaactacctgctgatgttggcgagatcctcgtatcaatatcacattaccgtctgcaaacacactgcagattctggagcagcggagccgagccctggcccaacatcgtcccacaggaagcggcggtggcgaaggtgttcgggtctaggtccgtggagcgctacgggccgcgcctcaccctgctggaagctaccatgaggaccgacgatgccggtggcagcgccttcgtgaagctcgtgaagcaagggagcgccgccctcctcaacgcctacgcgaggagagggttccctttcgactcctgggaggtgaaggccctgctgctggaggcgctggtgtccgaggatgccgctgtggtccaggcggagcggtttgagcaggccaacgagtcctgcgtttga

SEQ ID NO: 10134 - DNA, 2100 bp, Zea mays
  Peptide Sequence Number=SeqID_51913
atggaagcgcgctgtgtacaccttgtcatcgttggtgttctactcgtgttggcggcggcacaggaggccaccgctattgcggttcctggccctcaatgccaaagtcagtgtggcggcgttgacatccatttcccgttcggcatcggtgacaattgctcgcggtcaccacgcttcaacgtgagctgccaggaggtccaagatggcatctacaagccattcctcagcggtgtctttgagctgctcaacatttccttgctccatggcacgatccgggagctgaaccccatctccacgtactgctacaactcgccctcaggtcgcatggagagcaggacctcggggcacgacgcggtctcgtccacgttccggttctcagacgtccacaacaggttcactgtcatcggatgcaacaccctcgccatcatctacgacaggaccggcaccggctaccagagcgggtgtgtctcgacgtgccagagcctgtcggacgtggtggacggcggctcctgctccggcaggggctgttgccagacggccatacccaaggggatggactactacaacgtgagcttcgacgcgagcttcaacacgagccggatttggagcttcagccgctgcagctacgccgtgctgatggaggcggcggcgttccgtttcagcaccgcgtacatcaagaccacccgattcaacgacacgggcgctgggcaggtgcccgtggtgatggactgggcgatcagggagagggaggcgtcgtcgtgtgaggtcgcccaacagaataatgggacgggctcttacgcatgcgtcagtagcaacagcgagtgcgtggattcacaaaatgggccagggtacctgtgcaactgcacccaggggtaccaaggcaacccataccttccaggcggatgccatgatgttgatgaatgtcttgcactaagtagtgccggtgccattctgattgtcgctgcagctgttgctatctttacacggaggtggcagagaatcgttcagaaaaggcttagaaagaggtactttcacaagaacaagggtattctcctagaacaactgttctcgtcatcagcaaataacaacggtacgaagatattctctctggacgacctacagaaggccaccaacaacttcgaccgcacacgtgtggtcggcaacggcggccatggcacggtctacaagggcatactggctgatcagcgcgtggtggcaattaagaaatcgaaactcgtagagagcaccgaaatcgagcagttcatcaacgaggtggccatactctcacagatcaaccatcgcaacgtggtgaagctccatgggtgctgcctcgagtccgaggtccctctgctcgtctacgagttcatctccaatggcacgctgtacgatctcttgcaccaccgcgaccgcgagctgccctgggaggcacgcctgaggattgcagctgaggtcgccggcgcgcttacgtatctccactcagcagcatccgtgtccattcttcatagagacgtcaagtccatgaacgtgcttttgagtgacagctacacggccaaagtctccgactttggcgcgtccaggtctataccgattgaccagacacatctcgtcactgctgtgcagggcacatttgggtatctagatccagagtacttccacacaggccaactcaacgagaagagcgacgtctacagcttcggtgtcattcttctcgagttattgacaaggaagaaaccgatcgtcgatggtgacagcggttataaggtaaacttgtccagttatttcttatgggaaacggagaggaggccacttgaggagatagttgacgtcggaattataggggaagcaagtacggaagcgattctaggcatggctcaactggcagaggagtgcctcagcctaacaagggaggataggcctaccatgaaggatgtggagatgaggctacaaatgttaaggtgtcagcaagatgttgctccaagggcacatccagcaaagagaacaaaaatgattagtcatgctattccgatggctgctagccagcacggctcacgccaatacagccaagagcaggagtttatcttgtcctcgcgtgtaccacgatag

SEQ ID NO: 10135 - DNA, 126 bp, Zea mays
  Peptide Sequence Number=SeqID_51914
atgggtatttactccattaggatgtttaattctttgggtacgggtgatccgatgggcaacccatacccacatgagtatgggtatgtgtattggggtaaatttatacccgccaatgtatatgagtga

SEQ ID NO: 10136 - DNA, 135 bp, Zea mays
  Peptide Sequence Number=SeqID_51915
atggccggaaattctccaaactccgacctggcgtccaactccgatctaaagaagggaagaacactgccaggattggcccacccaccagaggacgacatcggagctgaggcgcgggtgaattacgctgtggagtag

SEQ ID NO: 10137 - DNA, 162 bp, Zea mays
  Peptide Sequence Number=SeqID_51916
atggagggtacaagtgcagccattgcacggcggcagctgtggtcaatggagcattgttcactacaagacatggttgatggtgtgacttggccagccaccctaccaccggtttggacggtcgagtgggatgccgcctcggcaggagaggaccaggaggagtag

SEQ ID NO: 10138 - DNA, 309 bp, Zea mays
  Peptide Sequence Number=SeqID_51917
atgccgaaggagattgctactagttctagcgagggtggtctggtttacatgagatacatctatcgctatagaaatcagtttgatgagccgaatgatgactggcttgaggatgtcgaagctaacagtgatgagctattggtgttggtgtttagagtccgactgcacacccagggttaccccttgtggtctaaagtcaatttgatcggtgacagattggacgtttggctagttgaggcagatggctctcaactggacatcaccccgctctgtgcttcaatgcttctgttgattagacttgcacttcagtag

SEQ ID NO: 10139 - DNA, 543 bp, Zea mays
  Peptide Sequence Number=SeqID_51918
atgggtaagggtaggaggggcagtggctggccacgccgcgctgacggcaagcgcaaacgtgcttcgagtcctccctcggaggacttcggtgattttgattacttggaggaggcctcctccgaatctgagcgatcgccagctccgtcttctcccccagcgtcatccgaggactcggatgactccatggggctgtccgctgcggcctggacgtactggcgctccatcaagcacgccaggcttggtgggtcggatgagttgggggtctccttggatgaggtggactcctccgactcctccgaggagtggagtggtggtgatgtcgacgacgagggcaacagcagcagcagcggcgacgacggctggagcgatggcagcaagggcgatgatggtaagggcaacagtgatggcagtagcggcgacggcaagggcgacgacggcatgggcaacggtgacgacagcagcgacgacggtgatggcaggggcgacggcagcaggggcgacaacggtgatggtggtggcgacgtcacgtgtttctcaagttaa

SEQ ID NO: 10140 - DNA, 105 bp, Zea mays
  Peptide Sequence Number=SeqID_51919
atgggcctgctcatcctcctcctcatggtgttgcacctcctcctcgtcatcctcctcatgggcctgctcgtcctcctcctcatgagcgataggtgtatcacgtag

SEQ ID NO: 10141 - DNA, 420 bp, Zea mays
  Peptide Sequence Number=SeqID_51920
ctcacgacagaggaagttccgcagcgattcagaaactccgacgaaggatcccaaggtccccggccaccaaacaccttcggcaagcctgaggcggcgtccgccgaccaggagcctaggcagccccggtgttttcccccactacttctcgcgctcgagaggatcagaaccgatctggaggctctggaggtccccaggtcgcgcagcgaggacagcgagcgtgacatctgtgaggccgcggcagccatcgaccaccacctcgcggagatcatgcgcacggagggccaggtcgcgccggcgctacggctggagcctacgacggcgcaccagcccacgatgtccgctgcaggtgacaaggagatgggcaggagcgaatttgtgcgggtgaagtccgcgatctgcgcgccaccgccagcaaggtag

SEQ ID NO: 10142 - DNA, 483 bp, Zea mays
  Peptide Sequence Number=SeqID_51921
atggcgaccaggtttactgtgctgctcaaccaagggttgccttcacagatgggtgggacaatcacactctccgtgttgccagtcaacggtgagggcctctgcaccctggaggttgtcctccagacggcgtaccagaaaggtagcctcctagaggttcggggggtgcctccagctgaggcacaggggacgggcacctcacagactccacctcctgctgaggcggggaggaagagtcctactgctccctctctagacactggcactcctgcacctcgtgcaggcggtggtgcaacccctccaggtgactcgattgactggacaccatgtggcgaaagtggacgttgcacaaggcaaaagggcaggaaggggatcactaacttacgagaggtgtttaggaggcgaaccatctatgagttgagaaggcaacaaggttcaaggttgttcctggcaaggcaagagcagcaacaacaggagccagtgtaa

SEQ ID NO: 10143 - DNA, 429 bp, Zea mays
  Peptide Sequence Number=SeqID_51922
atgcctgctgtggcgcaccttgtcttgctggggcattggaagatgactattgttgggctgctttcttcgggcaatgcatcgcccagtggccttgttctccacaatggtagcatcctctacctcctcctggtgctgggactacctagttgctctgatttgttgctggggcaggaaggcaaggtgcctgattgctttgcctctggtactgatttcctcccgcttagttgtgttggcggtactacaacttctactgagggtactgcctctggaattgttgttgatgcagaagttggttttgttgctgatatccttgccttctggaacatgatatcggcaaaagttgtctttgaactcctcctaagtgatagctttggggtcagcatggatggcgagataggactcccaccaagattgagctgctccacttag

SEQ ID NO: 10144 - DNA, 498 bp, Zea mays
  Peptide Sequence Number=SeqID_51923
atgtcgaggaggaagaccagggagcccaaggaggagaacgttacccttggacccactgtccgtgaaggagagtttgtctttggtgttgctcacatctttgcatccttcaatgacaccttcattcatgtcactgatttgtctgggagggaaactttggttcggatcactggtaccatcctacaacctgggttcatacttgacctagatgtcaaaagtggcatgaaggttaaggctgatcgtgatgagtcgtctccttatgctgctatgcttgctgctcaagatgttgcacagcgttgcaaggagctcggtatcaccgcgctgcacattaagcttcgtgcaactggaggcaacaagaccaagacccctggacctggtgctcagtctgctctcagggctcttgctcgttctgggatgaaaattggacgcattgaggatgttaccccggttcccactgacagcactcgcagaaagggtggtaggaggggaaggaggctgtag

SEQ ID NO: 10145 - DNA, 180 bp, Zea mays
  Peptide Sequence Number=SeqID_51924
atggagtacttcgataggtacgaggggagcgagggtgggctcgccctggtgttcaggcgcgaagggggcttagaagctcacgcgccggcgagggcacgcgggccgggggccagcttcctgcctacctgggcgggggacgaagggcctgcctggcacgggctttgcagggctggccgccag

SEQ ID NO: 10146 - DNA, 159 bp, Zea mays
  Peptide Sequence Number=SeqID_51925
atggattcgccgagggaagctgctgctgcacggaagaatcaagcactgggctctcaaccactaacgagtagccgcctagtggcaggtggtgttcgcctggacgcgcttagcgcgaccatggagaggcccttgccatcaatggcgacgcagagcatttaa

SEQ ID NO: 10147 - DNA, 624 bp, Zea mays
  Peptide Sequence Number=SeqID_51926
atgaaacaacatattaaggtgaacaagtctcttgatgtgagtatgccttggtgctgtacaaaagttggagtaatatgccccaaggtatccactgtcagatcagtgaagctcttcccgtttgtatttctaactctaccattgtcgatggtccagaacagtgtcgcgccgccacagatcgacgtcgtggacagctccaccgtcgaccgaccaacttgcatcttctccgagcagtttcgtgcgtgcacggagaacttgcaagcattcataatcatgacatttcatatagaacaccaagaagaagagatggtttctgaagaggagtctactctggtgcctgctcatgcagtggttgggagctatctaactgctagtataggccaagtgcatgaactagatcaggataagctagatttcaggaaagaagttaatacgctaatgaaaactcggcttatggatcaactgctaccatctaaggccattatggtaaggattggtgcacgtgggcctgataatttgggaggactgtcacaagaaacactcagcaatgttaaaggatcacctattcacccccctctaggtgctctcaattggtatcagagtcgtactcttcatctaagggactaa

SEQ ID NO: 10148 - DNA, 237 bp, Zea mays
  Peptide Sequence Number=SeqID_51927
atgggcccaagtgagccacttgatgtaaaatggtgtaagtgtaagggaacccctcaagaagatccaaaagaagttggagaagtttggctcaaaagagccaaacttgagctagtttgggacccatcgaactgtctggtgatcagtactgccgaagacgccgctctcgagaattttatttgtaaaatttggaaagggaaatgtgcccttgggccatttctattatattttggtgattaa

SEQ ID NO: 10149 - DNA, 249 bp, Zea mays
  Peptide Sequence Number=SeqID_51928
atggttaaaaattttggcagcaaaacagtgcaaatagcaatgaatgctgtggtaacttcacaactacttgtcagtttatatagtgctgcaggaccgaaggtgtgtgcccgtgcgttgccacggaagttaaaaatcaatataaaacatagatacggaacaataagcatcactatgagataccaaattcgtgtgcctctcaaggtcatccctaagctgagcttcttgtcaagggcgttggaaacaacctga

SEQ ID NO: 10150 - DNA, 723 bp, Zea mays
  Peptide Sequence Number=SeqID_51929
atgtaccatactgggttgactccaacaacccagctgcacgtccaaagcgggctcccgcagggtctggaggccctgcttcttccgatgagccgcctccttagtctcctcatcatgagtcctcctctcacgccgccgctgcttcacgtccgatggaccgcagcgggagaggtagaggtcagggccagggacggggacaaggccggggactgtttattcgtctggccaagggcattgctagcgccttcgccatgtgccgcaaccgggccatcgaggagtccgtgcataggcgccggactaaggcgctgcattaggactttcgtcgatatgccgcctccatgggtcatccccttccttctgggtctcctccgcctccgacccccacctaccttgagaatcttaatgagttgcaccaacaggaatatggtgggccattcattactcctgaggatgaggcagaggagtttgatgactcctactatacctcggctcctcctcctctctattcgggtcaaggacccattcctagtgaccctaggccacctggccccggtcactttccccctcctccctatttgggtcagggacccattcctggtgacccaaggccttctcgctctggttaccaccatcctcctcctcctccttatcagggcccgtcttcctcatccgattttccctctggcgatgagcctcctcgggactcatcatacgaggaagacatga

SEQ ID NO: 10151 - DNA, 930 bp, Zea mays
  Peptide Sequence Number=SeqID_51930
atgagctcgacgtggctggcttttgcatgggcggcggccgccctcgtcgtggcggcggccacggcgcacgccccgcaccacccgtcgtcgctgcaggtcggtttctacaagcactcgtgcccacaggccgaggacatcgtgcgcaacgccgtccgccgcggtctggtccgcgacccgggcgttggcgcgggactcatccgcatgcacttccacgactgcttcgtccggggctgcgacgcctcaatcctcatcaactccacgccgggcaacctagccgagaaggactccgtggccaacaaccccagcatgcgcggcttcgacgtcatcgacgacgccaaggccgccctcgaggcgcactgcccgcgcaccgtctcctgcgccgacatcgtcgcgttcgcggcccgcgacagcgcctgctccgccggcggcctcgagtacgaggtcccctcggggcgccgcgacggccgagtttccagacaagacgaggtgctcgacaacaatgtccccacaccgaccgacgtcgtcgccgagctcatcgagagcttcaagcgcaaggggctcgggcagctggggtggacggacccgtccctcgaccccgcctacgccgggcacctcaaggcgcggtgcccttggccgtccagcgacgaccagatggaccccacggtggtgccgcaggacccagtcacgccggcgaccttcgacaaccagtacttcaagaacgtgcttgcgcacaaggtcctgttcgtctccgacaacacgctgctcgacaacccctggacggccgggatcgtccaatttaacgccgcagtcgagaaggcgtggcaggtcaggttcgccaaggccatggtcaagatgggcaaggtgcaggtgctcaccggcgatgagggagagatcagggaaaagtgcttcgtcgtcaacccacactactag

SEQ ID NO: 10152 - DNA, 525 bp, Zea mays
  Peptide Sequence Number=SeqID_51931
atgggaccgggcaagagaggtcgaggctcgcctcatcgtgccggtgacaaatggaagagcgatccaagtcctccctcggaggacttcggcaactctgagtactcggaggaggaggggttggtcgctgaggtgtggacgtacatccgctccgtcgagcgcgccgggctcgagggatcggatgagtcagaggtctcctcgaatgaggggggctccttcggctcattcgaggagcggagcagcaacgatagcaaggacgagggcggtggcgacgacagcgacggcggagaaggtgatgacgacggcggcaagggcggcaacggcggcagtggcagcggtggcggcaaggccagtggcaaggcgccactgttcatccatgtgcctaacgctgtcggcgtttttagaggtaaccgccgagcgatagctgatgataccggcgtttttagaggtaaccgtcgagtcatggttgatgctgccggcgttttagaggtaaccgccgaacgatatctgacgctgcagacgttttag

SEQ ID NO: 10153 - DNA, 891 bp, Zea mays
  Peptide Sequence Number=SeqID_51932
atgcaggcggcatgcaaccgtgccaagtgggcgcgccccttcgactccaacgcgcccagcatggaggtccaggcccacgcgtcatgcaaccggcgcgccggttgctacgtgcgagcaactgcaccaccactcgcgccactaccgcgcctcctcgactgcggagtcaataccgcgactcgaggcaaccctgcagtgccagcgaagcgcgacggggcaatgagggagccctctctcacggtgcgaagacgcgggataggcggcgcctcaggcggaagaagcaagcgatgcttcgccttcgccataatgaccgcgtcgaaagaggctggcccctcggaggggttcaacggccgcctcagatcgattaggttctacgcccactactggtcagagccaaggccggcctcgggcgtaataggaaactccgcctcgcccgaccctagggcttggactcgggcccagccccggaagacggcgaactccgctccgcccgacctagggcttggactcgggctcagccccggaagacggcgaactccgcttcgcccgacccagggctcggactctggctcagccccagaagacggcgaactccgctctgcccgacccagggctcggactcgggctcagccccggaagacggcgaactccgctccgcccgacctagggctcggacatgggcttagccccggaagacggcaaactccactccgcccgacccagggctcggacatgggctcaaccccgaaagacggcgaactccgcctcgcccgaccccagggctcggacatgggctcaaccccggaagacgacgaactccgcctcgcccgacctgggggctcggcctcgacctcgacctcgacctcggaggagcctccacctcgcccagcctag

SEQ ID NO: 10154 - DNA, 246 bp, Zea mays
  Peptide Sequence Number=SeqID_51933
atgggttttgcattgctggaacacctgacagaaatttttagtttcccggaagtaaaggagttctggtttatgcgccatcctgagtattctagctttcttatatggacaataggaacccaagctttgaaactcgatgaaccaattaagaaagtactgcttatgaagatggagaagcatggaaggactattcctaaatcaaaggcaaaagaagttggaagagttttgatttgcatgaaggataggtga

SEQ ID NO: 10155 - DNA, 2583 bp, Zea mays
  Peptide Sequence Number=SeqID_51934
atgcccggcataccgagggatgtcgccgagcactcgctggatatccgagctggagcccgacccgtgaagcagcctctacgccgattcgacgaggaaaagcgcagagccataggcgaggagatccacaagctaatggcggcagggttcatcaaagaggtattccatcccgaacgacttgccaaccctgtgcttgtgagaaagaaaggagggaaatggcggatgtgtgtagactacactggtctaaacaaagcatgtccgagggttccctaccctctgcctcgcatcgatcaaatcgtggattccagtgctgggtgcgaaaccctatctttcctcgatacctactcagggtatcaccaaatcaggatgaaagagtccgaccagctcgcgacttctttcatcacacccttcggcatgtactgctatgtcaccatgccgttcagcttgaggaatgcgggcgcgacgtaccagcggcgcatgaaccatgtgttcggtgaacacattggccggacggttgaggcctacgtcgatgacatcgtagtcaagacgaggaaagcctccgacctcctttccgaccttgaagtgacattccgatgtctcaaggcgaaaggcgtgaagcttaatcccgagaagtgtgtcttcggggtaccccgaggcatgctcttggggttcatcgtctccgagcggggcatcaaagccaacccggagaagatcgcggccatcaccagcatggggcccatcaaggacttgaaaggcgtacagagagtcatgggatgccttgcggctctgagccgcttcatctcacgcctcggcgaaaaaggcttgcctctgtaccgcctcttaagaaaggccgagtggttcacttggacccccgaggccgaggaagcccttgggaacctgaaggcgctcctcacaaacgcgcccatcttggtgccccccgctgccggagaagccctcttgatctacgtcgccgcgaccactcaggtggttagcgctgcgattgtggttgagagacgagaagaggggcatgcattgcccgttcagaggccagtctacttcatcagcgaggtactgtccgaaaccaagatccgctacccacaaattcagaagctgttgtacgcggtgatcctgacgcggcggaagttacgacactacttcgagtctcatccggtaactgtggtgtcatccttccccctgggggagatcatccagtgccgagaggcctcgggtagaatcgcaaagtggtcggtggaaatcatgggcgaagcgatctcgttcgcccctcggaaggccatcaagtcccaggtcttggcggacttcgtggctgaatgggtcgacacccagctcccaacggttccgatccagccggaactctggaccatgttcttcgacgggttgctgatgaagacaggggccggtgtaggcctactcttcatctcgcccctcggaaagcatctacgctacgtgctacacctccacttcccggcgtccaacaatgtggctgagtacgaggctctggtcaatgggttgcgcatcgccatcgagctaggggtccgacgcctcgacgctcgcggtgactcgcagctcgtcatcgaccaagtcatgaagaactcccactgccgcgacgcgaagatggaagcctactgcgatgaggctcggcgcctggaagacaagttctacgggctcgagctcaaccacatcgcccgactctacaacgagactgcagacgagctggctaaaatagcctcggggcgaacaacggttcccccggacgtcttctctcgagacctgcatcaaccctccgtcaagatcgacgacacgcccgagcccgaggcaccctcggcccagctcgaggaaccctcggctaagtccgaggcaccctcggctcggcccgaggcaccctcagctcggcccgaggcaccctcggttcagcccgaggtaccctcggcccccgagggtgaggcactgcgcgtcgaggaggagcgaagcggggtcacgcctaatcgaaactggcagaccccgtacctgcaatatctccaccgaggagagctacccctcgaccgagccgaagctcggtggttggcgcagcacgccaagtcgtttgtcttagtgggggacgggaaggagctctaccaccgcagcccctcaggcatcctccagcgatgcatttccatcgccgaaggccaggagatcctacgagagatacactcaggggcttgcggccatcacacagcacctcaagccctcgtcggaaacgccttccgacaaggtttctactggccgacggcggtggccgacgccattagaattgaccgcacctgcgaagggtgtcagttctacgagaggcagacccgcctgcccgctcaggctctgcagacgatacccatcacctggccttttgctgtgtggggtctggaccttgttggccccttgcagaaggcacccgggggctacacacacccctggaaagggctgttcgccatcgccaaagttctgaagcccggaacgaacaagctggccaatagtcagggcgaggtctacaccaacacttggaacatccagcagctatgtcgcttctacccttaa

SEQ ID NO: 10156 - DNA, 192 bp, Zea mays
  Peptide Sequence Number=SeqID_51935
atggcgttcatggtcctagaactaagcgtgatggtctcctcaggcattggcttcgtgggtggctgtatgtcaaaacttgaacctttaggacacctgttgctagcacctgaggctttaaacgaatctcaatcacttgtgctcatattggttttggccaatagtggtcatcatatgaacggatgggtaatataa

SEQ ID NO: 10157 - DNA, 678 bp, Zea mays
  Peptide Sequence Number=SeqID_51936
atggccaggaggaggtgccgcggtggcaggcgtctgcgtctgcccactcgcccaggtgagagccgggaggcatggcaggctggccggctggcggccgtcgggcctgcggcctgcaactctgcgagtgagagacagtggatggcattggaaggtggctgcgacgtggagtgccagactgccggtgccaaagtgggcgacgagctgacgacggacctccaggtaaggccggcagttcggcactcggcacgacaggtttgggccttggctagttgcccagtgctgggcgcctggtgtcagctgcagtccggcgtcgccaacacctacacctggccctctcgctccctgttcctgttagccaccgtcggcaagccctgtacccgaccgctccttgtccctatccgcatcgtgggacgtgcactctactcggtcactcatgtcccctgtccgccgccgccggcagatgtacgcagtgcagtccctcgaaaggcgccggcgacgaggaacttgatcaacgttggacgagcggacgaagcgagttgtcgcaaaaggtgggacggggatgggatgtatgcaaggcgtctgagaatgtcatgtgttctctcgtactgtggtcgtaaccagaaggagcctcccctcctcatatatatacacgcgctgagggaggccaacaaacagtaa

SEQ ID NO: 10158 - DNA, 1008 bp, Zea mays
  Peptide Sequence Number=SeqID_51937
atgggcacgtcgttggctagaagcgttgctctgtttactctgctgctctgcctgcttcttccgtcccatggccatgggaagctctcgaccaagttctacgccaagtcgtgccccagcgtggccgccatcgtgcggtcggtgatggagcaggcggtcgccaaggagcccaggatgggcgcctccatcatccgcctcttcttccacgactgtttcgtcaatggttgtgacgcgtccatcctcctggatgacacttcgacgttcaccggcgagaagaacgccggagcgaacaccaactccgtccgcgggtacgaggtgatcgacgccatcaagacgcaggtcgaagcagcctgcaagggcaccgtgtcgtgcgccgacatcgtcgccttggcgtctcgtgacgccgtggacttgtgtccagaaccgacgctgatccgcacgcaatgcaatgcaatgcagctcggaggccccacatggaacgtgcagctcggccggaaggactcgcgcgcggcgagccagagcgcggccaacgccaacctcccgggcccgggctccggcgccgcgtccctcgtggccgcgttcgcggccaaggggctctcggcgcgcgacatgacggcgctctccggcgcgcacaccgtggggcgcgcgcgctgcctcttcttccgcgggcgcatctacaccgaccagaacgtcaacgcctccttcgcggcggcgcggcagcagacgtgcccgcagagcggcggcgacggcaacctcgcgccgttcgacgaccagacgcctgacgccttcgacaacgcctactacacgaacctgatggcgcagcgcggcctgctgcactcggaccaggagctcttcaacggcgggccgcaggatgcgctggtcaggaagtacagcggcaacgcccgcatgttcgccaccgactttgccaaggcgatggtgaagatgggcggtcttgcgccggcggccggaacgccgacggaggtcagattcaactgccggaaggtgaattga

SEQ ID NO: 10159 - DNA, 546 bp, Zea mays
  Peptide Sequence Number=SeqID_51938
atgtggggcccattggccggcctccccgtcttcgtgcgaaagcgcgttctggtgcgtcagtcctcttccaagtggggcccatgcgtcaggggcggcggcggggcatctggatctctcatcggcggcgacgcggctcccagcggcgacagcaaccctccatccctcccaggctcaaggtactcacccaaccgccatttaccgctttgcctcccagcggcgacagttctgagggatctctcgtcgtttggtctactgctttgcctcgggggcttcccctcctccacgccaccacccccgccgcccatcttcaccctcgatgaccgctatgcctccgcagacttctccccagaccccaccgcctccgaccttctccccgtcgcgttgtctccctacccccgcaccgctgccagccgctcgccgccatgggacctgtctcggggcaaggtggcgctctcggcaccaggatctcccatggatggggtcgtcaagccgacccggaaagatatgctcgctttgccgcaacatgaagaactgctcttcctgtag

SEQ ID NO: 10160 - DNA, 816 bp, Zea mays
  Peptide Sequence Number=SeqID_51939
atggagaagggctcggcgacggccgggcaacaggggccaggggcagcagcggacgggagcccgggcggcgacggttccagggttgtgcaggccagggcggggggtgacgaggcggacgtcggtgttgtttgtggttctacctatgaggcgccggagattcaaaaaaatcctatcgaagaagcacaaggcaaccccaccactaaaactcatgaaaaccccatacaggcagaagaaattatgatagctcagctggctgacaccgtgcatgcctatatatatggcttgcagcatgtcaacagctcctaccaaagcaagcagctgccggccgtgatcgtcgccgccggcgatggccccagcatgcaccacctacacttgtacatgcacgagaaagacgccggccccaacagcacggccgtggtggtcgtgaactgcaccggcccgccgctgccggcggggagggggtcgtacggctgcttcggcgacacgagggtggtggatgacgtgctgacggcagagccgaaccggacgtccccggtggtggggcgcgtgcaggagttccacgtgatggcgtcccggcaggagtcggtacttatcatgtccctgaccgtggtgctcacggactacccaccttacaccgggagcacggtggtcgtggttggccggaacgacctcctcgctccggtgcgcgagctgccggtggtcggcggcacgggcagcttccgcatggcgacgggctacgtcctcttcaagacaaagagctggagcagcgactaccacgacgtcgtcctcgagctcgacgtcttcctgcgcacctga

SEQ ID NO: 10161 - DNA, 285 bp, Zea mays
  Peptide Sequence Number=SeqID_51940
atggtcgattttgtaaacaaccaggaccaacccgtaactggttttaataagagagggatggcagttgttcacgatggctcaggcagggtggcgacactagatcttcatgcaccggggcaagggtcccgtagagcacatatcgggtcgtgcgcggattcccagcggcgggcggatttcactgccatggcgacggcgaacgagcggaaccacagcggcggcacccttccagcacgctgcatgcccatggcgatgaggttcatcgagaagctctcgactttggtgtag

SEQ ID NO: 10162 - DNA, 273 bp, Zea mays
  Peptide Sequence Number=SeqID_51941
atgggttacattagggataaggttaatcaggggcaagttttacttgataatgtggacatcaagacgttgcaattaaagcgacttagagaccagatcggattggtgaatcaggaacctactctttttgcaactacaattcttgagaatattctttttggcaaacctgaggcgacaaaggcagaggttgggtctacgactacttccgcaggttcattgctcttcttcctagtggccacaacactcatgcgggttctacttctctttatattctaa

SEQ ID NO: 10163 - DNA, 324 bp, Zea mays
  Peptide Sequence Number=SeqID_51942
atggcccgaggcggcgccgccggcctccatggtggcgcacctcaccggaaatacatgaccagacgccctaagcgacaaacggcaatccaaacgatgctacgtgttctaagaaccgaggcgaatcgcttgagggaattctcacaggtggcggtgttgcgaagaagccggacgtcggcggacagaggcttcacggcgacgctggaactctggcgtcatatccccagcttgcatgtcgataataccttttggtgcgactatgaagacttgcagggacctcctgcaaagcgcccccgaccctcttctcccctcgagcagccccattga

SEQ ID NO: 10164 - DNA, 354 bp, Zea mays
  Peptide Sequence Number=SeqID_51943
atggcgcacagcgctgccgaggggacgctacggcggggtggtaccggcgaggacgctggtcaaggggaggaggacggagcggtgccaaacttccctgtgcggcgagatggcagaggggaggacggaggcgacggccggagggagctccgccttgcccgaccccaggcctcggcctcaacctcggcctcggaagaaggtctccgcctcgcccgaccctgggcctcggcctcggcctcgggaggagtcacaacctcgcccgacctcagcctcggcctcaggagaagtctccgcctcgcccgacctcggcctcggaccgactacgctacgggggatacatcattaccctacccctag

SEQ ID NO: 10165 - DNA, 465 bp, Zea mays
  Peptide Sequence Number=SeqID_51944
atgggtcggcgcgagacggagcgcgaaggggggaggcagccggagggagacgggcgtgagaggtggaaatcctgcggccttcgtgtttgtcccgcgcccaggtcgggtgtgcttgcagtagggggttacaagcgtccacgcgggagggagcgagcggcctcacgttggtcgatgtggaggctcctccgaggtcgaggtcgagtctgtcttccgaggcccaaggtcgagtctgaacccctggggtcgggcaaggcggaagaccgtcggctgaaggcagggctgaatctgaaccctgggggtcgggcgcagagatgttggtcatcttccggggatgagcccgactccgagccctggttcgggcggagcgaagtcaatgtcttccgaacaaagcccgagtccgagccaaggtgtcggacggagcggacatggttatcttcagcaagtgagcccgagtccgagacctag

SEQ ID NO: 10166 - DNA, 274 bp, Zea mays
  Peptide Sequence Number=SeqID_51945
acattatggtacaggtggttatgagatcgatggttctggttatggctatggtgctgctcacctcaacggtgcggcaactccgggcgggacgcggcactccgacggcggtgctggcgaggcgaagggcgagaccaaggcgctccacgcgcggccgtgcgcgcaggaggcgctgcggctgggccgcgagccacgtgggccggcgcaggggacgcggcaggcgcgcgtccgcgaagctggcggggagggagctgggctgcctcgcgcgggcccatga

SEQ ID NO: 10167 - DNA, 384 bp, Zea mays
  Peptide Sequence Number=SeqID_51946
atgagggacctggccaatggggaagaagaacttgtcgaaggatctccatacctagaggtttcagggttactcttctggcttgaagggttactcgaattggttcttctgtttgctggtccagaaagggaaaaggttgattactcattggctaaaggaaaggttgattactcattagctggctgtgctagtgaactacctccaactatgaagtggcaactcggcaatcgtccaaggaagattcataggattggtctcttaggaaaacaagcatctcaatcaagtatcaagtcaaagtcatctgagttcccgctttcgcctagacagcaatccaattctcacttctgctttccaaagaaagacagcattccaatgagtcacgtataa

SEQ ID NO: 10168 - DNA, 375 bp, Zea mays
  Peptide Sequence Number=SeqID_51947
atggtgaaagaccaccacaaagagaccctcgctcacgccttagttgcgcaaccagtgccgtctcagatttcatcagtgccttctctacctcagtcgactgagtggctcttagactcaggagcttctcatcatgtcaccggtgacttgcttcgcacctgtcctcttattttgcttatgctggttcagatactctcaccattggagtggagtggagatggtactgatggttgtagtggtgaagctcgtgatgctctggatgagactgactctgtatgcccgaaaggaccaatcaggtggatcatttggatagaggaagagatgggtgggtgcactaccctgccgcagagaaagaagacaactctatctcagaagtga

SEQ ID NO: 10169 - DNA, 1764 bp, Zea mays
  Peptide Sequence Number=SeqID_51948
atggcaggccgtcaaccaattgttggaggtatttctaccacatctgttaaagtggagccaacaaccatgccaccgatagtttctgcacctgctttctcgcatgtaacgcctatttcaaatgtggcttcacaaggaatatcagcactgcaaacctcatcaccttctcttatttcacaagaagcaaatatgggaaatgataatgtacaagaacacaagcctataataaacccagttcaacaaccgattcggcctggtggtcatggcagcctcctcaacaatctgtcacaggttcggttgatgaactcaacttctttaggaggaggagctacctcgatgggactgcctaacatgggagcaacaccaatacaagtccacatgtcaaacatgatatcaagcggcatgacatcaacaccctctgtcatctcctctatgtctggacctggacaacctattagtactcaacagatggtacagagcacagctcttggttcgtttggctcaaacactcctactgttacaggcaattcaactattgctgtatcatcctctttgactaacaaccaaagcagcatgggcatgggtcaatctgtgcaatctgtggcacagggaggcttggtgtctggttcacaattaggacaaggtggaattgttgcaaaccaaaatgtgatgagcacccttggacctacagctatctcttcaacgcctgcgatgatgccgacacctgggatggtcccacagacaggagtcaattccttaggtgtgaataacaattctgctatgaatatgcctattacgcagcagcatgccaatgcccaacagccgccaccaaagtacgtcaaaatttgggagggaactttatctggccaaaggcaaggacagcctgtaataatttgtaaactcgaaggttataggagtggaacagcgtctgaaacacaatatgttggcaaggcagactttctagtttttcggactttaaatcaccatgggtttcttgtacaactacaagagaagaagctgtgtgctgtgatacagttaccatcgcaaactctgttgctgtcgatggctgacaaagcaggtcgtttgattggcatgctcttccctggggacatggtggtgttcaaaccgcaggcctcaactcagcagacaccaatgcagcaacagcagctacagcaatttcaacagcagcagcagcagctgcaacaacacatgcatatgcagccgcaaggcctcccacttcagcaatcacagatgcaactccagcaacagcagccgcagatgcaaccgatgcagcagcagcaaccttcgcagatgcagcagcagatgcaatcgatgcagcagcagatgcagccaatgcagcagcaaatgcagcatcaacagcaacagatgcagcatcaacagcaacagatgcagcaaatgcagcagcagcagcagcaacaacaacaacaacaacaacagatacagcctcagcagcaacagatgcagcaaatgcagcagcagcagcagcaacagatgcagcctcaacagcaacagatgcagcaaatgcagcagcagcagcaacagatgcagcctcaacagcaacagatgcagcaaatgcagcagcagcagcaacagatgcagcctcaacagcagcagcaaccccagatggtgggtacaggaatggggcagcagttcatgcaggggcacaatcgggcagtgcagatgatgcaagggaagattacgccacaggggccgggcagcatgcctgggggaggcttcctaccttaa

SEQ ID NO: 10170 - DNA, 444 bp, Zea mays
  Peptide Sequence Number=SeqID_51949
atggcggcggcggataggcagttggtagttgccgtcgaggggaccgcggcgctggggccctactggtccaccattgtggcggagtacgtcgagaagatcgtgaggcgctgtcagctcgggaacgaggcacaagccgctaggactgagtattaccggtctatggtcctaaggagctgtcaggagagcttttgtgcaagtgaactgccaggccagaagcttgtgggtactccgcctgaacttgcattagttgtttttcatacccatggaccttacagtgcttttgatgtgcagcgaagtggatggacaaaagatgtcgatgctttcctatcatggttatctggaatattgttcagtggtggaggattcagtgaagcttctacttgtgaaggtcttgctgaagcattgaagatgatgagttcttcgtggccaaaagttaccagttaa

SEQ ID NO: 10171 - DNA, 465 bp, Zea mays
  Peptide Sequence Number=SeqID_51950
atgacaatgactctagcgatgaaagcaagcgatcctgtctcaacatggaccatgattgtagttccgcatcaccataaagtgtcggaccaacacaccctagagagcttggtggctcggaaggacgccgaggtggaggcgggagtggatgagcagtccttgctcaaggaaggtggcactgagggccctacgacggtggggacttatgcgcagtcatggacttcggaagatgaggtgttgatgagcccatttcctggaatggacgacgagtcttcggaagatgacctagattattttgtggcactagatttgtctgccacagagtctacgcctagggttgcccccaatgtggcggtgtctttgcctagggttgtcccagatgagctgcggggtaaaataagaattaggatgtcgaagagaagtgtgggaatgcttggtgagtcttcacaaggcactggggtcccttag

SEQ ID NO: 10172 - DNA, 315 bp, Zea mays
  Peptide Sequence Number=SeqID_51951
atggcggccattaatggtgtcgttaaggaggagaacatggggagggagaggaggaacgaccggcggtttccggccgcgggggaggtgcgcgggcgtggccgagcgccgaggagctgggcacggggcggggtctggcgcggcgcctggcgcggccagggtgcatgcgtcgagcgcggccagggagcaagcgcctggcgacggtggaaggaggaagaggagaggcccgggtgggccacacctggtggtgagagggaggaggggatgggggcgccggggcgcagcggcttgggcctaatgggccggttaggtttctag

SEQ ID NO: 10173 - DNA, 390 bp, Zea mays
  Peptide Sequence Number=SeqID_51952
atgggcaaggaagatagcaggctgatcaggacggacatgacatttagcagagtcgatactaaaagtttgatcaaggctaagggtgtcaagtccgttgagctgaccatcagaaccaagaccctcgtcgttgctttcttcatcgccgaagtgaaggctcggtacgacgggtgcgtagctccggcgagttccacaggctccaatgatggcgtggcgaactccggcgacggcggcggtggatctaatggcgaggagcttgagagagagaatggggcgagctcggggtcgggctgctcggctgcggtcggggccgacgctcggcagtcggggtcgcggggctggcatggcagcggcgcctggatgcggcggggctcctggcgcgtggggctctag

SEQ ID NO: 10174 - DNA, 582 bp, Zea mays
  Peptide Sequence Number=SeqID_51953
atggagaaccaccagctgcagcagcaacagcagcagccggccgctccggtggccgccgctgccagctccccgcagtaccgaggcgtgaggcggcggaagtggggcaagtgggtgtcggagatccggcagcccggcaccaaggtccgcgtctggctcggcagcttcgactccgccgaggccgcggccgtggcgcacgacgtggccgcgctgtgcatgcgcggcccgcgggacgcgcagctcaacttcccggggtccgctgggtggctgccccgcccggccagcaccgacccagccgacatccgcgccgccgctgctgaggcagccgagcgcgtgcgccgtgaaccggcgcttgtcggcactgatgccgccgccgagcccggcaggggccctgccagtgccagccgtcttgacctggccgtgggagacgagtttgacgacgacctcgagtcgcccaggctgtggaccgagatggcagaggccatgctgctggacccacctaagtggggcccggatggtagcgacggttccgagggctctggctcccagaattggccccatgggtccctgtgggatgcatgctga

SEQ ID NO: 10175 - DNA, 447 bp, Zea mays
  Peptide Sequence Number=SeqID_51954
atggagcagatgaaaaaggagtatgaatttgaaatgatgaagctgaggcaattgtctgctgaagtggctgtcaaccttagcagtgctcaagtaaagatggatgacatgaaggctgaaataaaccatgtaaggagcttgaatgaaaattatcgaatcttagtggccaactgtcacactctaggcaacaaataccacagagagatgttgaagaccttctctactgccggagctttgtccaaagacagaaaagtttcagattttgacttagaagtttccactacacaggatgtgattgaggtgaaacatactaaagctgaagccaaggatgctgctaccgaagctgaagccatttctgccaacgctatagagaaggctaaagatgatgagatcttgaagatatgtgaacaaatttataaagaagccatgcggagcgaccctggaaactga

SEQ ID NO: 10176 - DNA, 501 bp, Zea mays
  Peptide Sequence Number=SeqID_51955
atgagaccgagcgggtggcttgcacgagaggggagtctcggtgtagtgtctccgcctgagtcgattaaggaccgagccgatttaggcttgatgatcgaggaccttttaactggccacatgcctcatcatggcaagtcggaagccgaggctctgcagcggtccttcggggcccgaaagaggcgctggctaaatcgtgtctttgatgacatcgggttcttatatcctgaccatcctatcatggctcaggatttgaagaaaaggaagaaaaaagtgaccacaaggcgaagaaagattctgaaggtccatgatggatcaactcctcaggcttctgaggaaatcctggctacacccgaagccctgatagaaactaagattgaagagctccctcccatgagatctaaagaagcaaaaattaaagaagctattgacttgatagcacagagggttaagcccttggaggtgcttccagaaagtgacaaagaagagcatgacggggagtga

SEQ ID NO: 10177 - DNA, 243 bp, Zea mays
  Peptide Sequence Number=SeqID_51956
atggacgacccagatgaatacccacgaaccggttatggcgaaaacgtgggtcgacaacttaccgacagtgacgcagtagaaactcccggtcgcggaacagagctacccgtggcggagttcagtcgacggcgagaaattgcccacgttccgcgggtcacgccttccagttatggtcatgaacgaccaccccaggtgttgacgatcctcctcggcgccactccgaggatggagacccaacgatga

SEQ ID NO: 10178 - DNA, 255 bp, Zea mays
  Peptide Sequence Number=SeqID_51957
atggagctactattgcagggatggatcacttccgcacaacgcatgagcataactcccgttcgagaggagctcggtgtggacgtcgacacattggaaggagggaggcgcgaggtagcagtggggtcaccgatagaggacagggaagaggcggcggcgttcgcggatcctagcatcgcgcgcgaggaggggtcgtggggcgcaggcggcggcgttgcggggctggcggctcccaaatgtggattcccccggcggtga

SEQ ID NO: 10179 - DNA, 240 bp, Zea mays
  Peptide Sequence Number=SeqID_51958
atggcggtgaaaacgccaccacggcggcgctcccgccggcgagggcgcaccaggcgcaacggtgtgccagtttcaaatcggaggaaggctacacgaagcggacatgatggtgaagagtttggcggcgctattacctcgtgggaggataaggaaggggaatgttttgtccggtttgggtatggtggtggctttgttccttccagtataatcgctaagagaaggagattgttgatcgggtaa

SEQ ID NO: 10180 - DNA, 615 bp, Zea mays
  Peptide Sequence Number=SeqID_51959
atggctaagagggatggctacatggacagctcttgtggctactctaatggaacccctaaaaggctggtgcaggatagtagcagtcatgtgcaggcgcatgctaagaagtgctactataggtgcacataccaccaggatcatggctgcccagcaaccaagcatgtggagcaaaccaattcccaggacccgccattgttccgggtaacctacacgaatgagcacacatgttgcagcgcccatgtctcagattacatggcttcatctgtacacatccagcagatcgccgatgcttctttgagaaagctagcagatgtggaaataccgagcctgacccactgttttagtggccatgaattgataaaagaagagaatgatgccgtcatctcctcattgctcacggccgtcagtggttgtgatgtggcaacatccgatggcgtgcatgcagccattcaagagaacacacctgctcggatgtcccgaagcagcaatgaggctagctcttcgatttcaccacctgtactgttgccggcatccgataacccgaaaacagacttcatcgagccactggagacccaatggttcgagcctttggatttaggttggttcatagaataa

SEQ ID NO: 10181 - DNA, 849 bp, Zea mays
  Peptide Sequence Number=SeqID_51960
atgccgaagcacatttctttgtctgatgttgaatgttcgtctcgttccgttccggatttcggatttggagacggcgatcaccggattttggaccccgaggtgagctcccctcccctccccttcttctctctctctctctccctctccctcctcttcttccccacgcgcgccctccctctccccctgcccgcgcgcgaccccgaccccgacccgaccccggcgcgcggcccctgcccgcccgcccccgcgcggcccctcccccctcgctcgcccgcgagggcgcgacccccgtctggcctcctcggcgcggcgcgaaaccctgcaagccccgcccccgcgcaccccttccccctccctccccgacacgctcgccgtggagcgctcgaccccgctcgcccgcccgccccgctccctcacgcggcggcgctcgaccccgctcgcacgcccgccccgctccctcccgcggcggcgatcggcccctgcccgccccttcccgcggcggcgctcggctcccctccccgctccctccccggcgacccgcccgctcggcccctcctctgcccggtgcgcgatcccgcccccgcctctccccgcggcgatcacgcccccgcccctccccgcggcggcgcccccggctcgcccgcccggcccccgctcggcccctcggcgcggcggctcggcccccctgcccgctcgcccgcggtggcgctcggcgcccgccctcggcccgcccgctcggccccggccggtggttatgagatcgatgattctggctatgactatggtgctggcgaagatgaagccgtggaaggagacttccaggagttccaagattacgacgagttctag

SEQ ID NO: 10182 - DNA, 174 bp, Zea mays
  Peptide Sequence Number=SeqID_51961
atggcgtccctctccctggtgtgtccgtcgccagaatcccaaggattggatgaagacgaagctagcaacgcgatataccccaagcgctcgacaaaattgcctgaatcgaaaaatcgctaccgatctcggagattcgtgtcagctgtggaaacggtacgtgaattaaccacgtga

SEQ ID NO: 10183 - DNA, 1482 bp, Zea mays
  Peptide Sequence Number=SeqID_51962
atggaaacctacgggcacggcctggtgaaggacgagctacacagcggcggcggctgtggcggcggcggcatcggaggacaaggactgtactgcggtgctactgctaccacgccgagggcggcggcgcctgctgcggccaccaccggcagcggcggcggtgtcgtgaagagcgtgagaaggaggaagagggcgccgccgccgccgtcgtccctggtggtggcgacggcgatgagcggctgcaaggacgaggcagccggcggtgacaagtcggcgagtagcaatagtagtaacaacgcgtccaagaggagctcaaggttcagaggcgtgagcaggcatcggtggacgggccggttcgaggcgcacctgtgggacaagggcacctggaaccctacgcagaagaagaaagggaagcaagtttaccttggagcgtacaacgaagaagacgcggcagcaagagcctacgatctggcagcgctcaagtactggggacctaccacctacaccaactttccggttgtggactatgagaaagagctcaaagtgatgcagaacgtgtccaaggaagagtaccttgcctgcataagaaggaagagcaacggcttctcccgcggagtttccaagtacagaggcgtcgcacggcaccaccacaacggcaggtgggaggcgcggatcgggcgggtgttcggcaacaagtacctgtacctgggcacgtacagcacgcaggaggaggcggcgcgcgcctacgacatcgccgccatcgagtaccgcggcatcaacgccgtcaccaacttcgacctcagcacctacatccgctggctcaagccgcccggcgccgaggacggcggcaccaccgcgacgacgtcgtcgggcatagccgccgccatgccgccgccgccgtcgtcgctgtgcatccaggccggcggcctcctgcagcacccgcacggcgctgcggcggcggcggccgccatgctgcacgacgtcgacgacgacctctaccgcggccggcatgctttgttctcggccggcggcagcctcgacgacgtcggctcctcctccgtgtacgccgccggcacagggcccggcccgacggcggcggcgctgtgcgtcggcgggaggccgtcgccgacgtcgtccagcacggcgctcagcctgctgctgcgctcgtcggtgttccaggagctcgtggcgcggaacggcggcgccccgcagcagcagcagcagctcgtgcccgcggacgacgacggggcggtgtcgttgcggcgggcgtcgtcgtcgacgccaaagttgagcagcacgaggaggcggagggcgacctgggccacggtggcagctctacgcggcgcgcgggggcggacgagaaggacgcgttcgctgctccatgtacgagctcgacgacagcttcgcgcgcatcgagcactcgctctggggctgctgcgatcatcggatgggtctgatgctctaatctctgtccccggtcagtga

SEQ ID NO: 10184 - DNA, 381 bp, Zea mays
  Peptide Sequence Number=SeqID_51963
atgatggtcatcgcctcagttgccgccacctcgttcgccatcctgcttcttttatctctcccctcatgcatccgcctctacgccacctcattttcggcagagggcgtgggagcaggcgcctcctctccgtattcgtccgacaccaaccctgacatcgacccgtgcagtggctattgcacgtccacaaggacgtttcatcatgcgcgcaccatcgttttcgccgtcatcggacgtcccgttcgtcttcccggccttcgccccattcttcctccccaacctgctgcccccgcccacggtcgcagccgcgagccgaccaacgctcatcgacatgggtatggggtgcataaagttcaacaaaaaccaaaaaagaaattgagttga

SEQ ID NO: 10185 - DNA, 588 bp, Zea mays
  Peptide Sequence Number=SeqID_51964
atggatgtgttccatcaacggcttgagcaagaatatggagctcaagtcatatcgaccataccaaccgtaccttatatttttgaatacggtgatggaagccaaagggctctgttgaagtaccgattaccattgaaggagataattgtggacttctacaatgagttgaagggcattacgtctggctatgctacttttgactacgaagattcagaataccaacaagctgatctagttaagatggatatccttctcaatggtcaacctgttgatgctatggcaactatagtgcataaccagaaggctcagcgggttggaaaggatttagtggagaagctcaagaaatttatagaaaggcaaatgtttgagatcaccatacaagcagcaattggttcaaaagttattgcaagggaaaccctgtccgcaatgaggaagaatgtcctggccaagtgctatggcggtgatattactcggaagaagaagttgctagagaagcaaaaggaaggcaagaagcgcatgaaacgtgtgggatctgtcgacattcctcaggaagccttccatgagctactgaaggtctccaattcaaaatag

SEQ ID NO: 10186 - DNA, 372 bp, Zea mays
  Peptide Sequence Number=SeqID_51965
atggctcacaggcgagcgccaccaccatgggggagggaggtgggggctgcggtcctgcgaagcgagccagcgggcaaggccaccggactggacactgagtgtaacgtgacaagtcaggtcagcagagaaaactgggttcagcaagtgctcaaaggatggttttccatcaatcaatcaacaaatacaaagatggtggctctactgaaatccgtctgcggccagctgagaagacttgtgtgtatatcaatcaccacaggatggatgacaggactacaggaggagcaacttccagcacaagttggctcgtctgacaaggcgcaggagaggccattatgtactcaatggaatcgatcattctgtcaagatctgtga

SEQ ID NO: 10187 - DNA, 369 bp, Zea mays
  Peptide Sequence Number=SeqID_51966
atggagctcgcctctgccatggccgccctctgccccctcccttgctgttcttatggcagcccctctccatgccaagctcgccctccttctgtgcccagccctagctcgccccagcccctctccctggctgtcataagtctcggactatggtcgtcacaccgaggatggtggtccctgctcgcgtctcggacgacggccgtcgtgttcataacggtgacccctactcgcgcgaaggacgcgctgcacgccgccgaaccccaacgtgaagccacgcgagcaccgcacgacacgctcacctggtgttcgaccaaatgcatcaaagtgcttgatgcccagcttgaagaaactacaagtgtttgcttccattaa

SEQ ID NO: 10188 - DNA, 681 bp, Zea mays
  Peptide Sequence Number=SeqID_51967
atggccaccgaaattagacttattttcgacggccactcgccccgctaccgcgccccggccccatcgctcgccgcgccggccacgcccccaccactgccctgtcccgtcgcgctgcccccgcctggccccatcccgttgagccgcctaggctctcgtccgtcgtcgcccttggctcccgtcgcccgtggctcccgtcgcccgatcgctgccgagccctcctaccgccaccactccgccatcgtcgccgagctcttcctcatcaaaaggcagtcaggccttgccaaaggcgccacggcgaactccgccccgcccgaccccagggctcggactcgggctaagacccggaagacggcgaactccgctccgcccgaccccagggctcggactcgggctaagacccggaagacggcgaactccgctccgcccgaccctagggctcggactcgggctaagacccggaagacggcgaactccgctccgcccgaccccagggctcggactcgggctaagacccggaagacggcgaacctcgctccgcccgaccccagggctcggactcgggctaagacccggaagacggcgaactccgctccgcccgaccccagggctcggactcaggctaagacccggaagacgacgaaactccgctccacccgaccccagggctcggactcgggctaa

SEQ ID NO: 10189 - DNA, 615 bp, Zea mays
  Peptide Sequence Number=SeqID_51968
atgctcatgaatgacgtccttcagctcgacaatgacaatgccgactgtcgaggatccaagacacacactgtccatacgacaccaggagggcataaacatgcggtcatcaatgaggatacgatcgtcaaggacatagcgctgcaaagcgaggacaaggatggcgacgatggaggcctcgttagtgcagagggcttcaacatcgccagaagcaaagggcgtgcagtctgcaacgaccacctcaagctgacactcggcttccgcaagctgacagttagaggcatccacaaaggcgcgctcctgctcccagatgagggtgacggtccactgacgcatacgcgtggtggcgacaacggacttggatgtggcaagagcaacaagggtgaagtgaaccacaaccacctcatcatgaggggcgcaaccaacaaagaggcccaacaagggaaggagagctatgtatcatcattacattataagatagaagtagaacaatacaagggccaaaggcctacagaaacaaaaaaaaaggaaaaagaaaaaaagaagaaacacgacactaaaacatctaatccagagaagcaacaacgtgcctcaatgtgggtcatgaccataaactaa

SEQ ID NO: 10190 - DNA, 2244 bp, Zea mays
  Peptide Sequence Number=SeqID_51969
atggcgaggacttcacgtgaagtaattggttctctgtctatgcctattggacgaggagcaaccatgttgaaacgagctccttctatgaggatgattcagcatgtttctgatgtcaaacgggtgctaacatgtcctcttacaaagaagggtcagatacctaattttgaggacaggaaaaaaggtggtgttttagtactctcaagctgttatgtggaacgttctactcattcatatttccagaggttgaaagacagtataaacaatgtggagagcgacttctgtataggacttagcccagatggtccatgggaaagttttactgcagctttgccagtgaccgtccttccaaaatcgcttaataataaccgttttgcatttgaggtcactatgaggaatggaaagaaacatgcaaccttgagaggtcttgcagttattgccaatgatgctgacataaaacttgaagtgtctatatgtcctgtaaacatgcttgataactctatgttaaatactagattggcaagctccaccagtgttattgatgaagtatttgaaaatcagtggtaccgaccaattgcagggtggggacataacccttcaattggtcacagaaaagacttaaagcagtggagcacaaaggactgctcatactcatctaaggcattttttgagcctggccttccatctggttggaggtggacctcaccgtggaaaattgaaaggttgaattttgtagataatgatggatgggcatatgctgcagattttcaaaacttgaattggccatcatcatcctggagatcttctaaatcaccacacgacttcgtgagaagaaggcgttgggtacgttctagacagcagtcgcaagaacaaagtgcagaaattcctagaaaagtacttgctactgtcagtcctcattcatctactgcgttgccttggacatcgatgattagggatatggatttatgcttgcaagttcgcccatattctgaaaaatcagaggaatcatatagctggagccagatttgttcactaggttctgagagtatacctaaacagcagcactcttcactttctaggcaaagcaccgtaaagcagtcagtggtatcatcaaggaattctgttcttaagcttgctgaactcgagaaaaaagatgtgctctcatattgccatcctcctgttagcactgaaagatatttctggtttagtgttggaattgatgcttctgttgttcatacagatttgaatgtacctgtctatgactggagaatttctttcaattcaattcttagacttgaaaataaacttccctatgaagctgagtatgctatatgggagatttccactaaaagtaatatggttgaaaagcagcatggtattgtcccttcgggtggaagtgtatttatctattcagcagatatacggaaaccaatttatcttacattgtttctccaaaacggttggattctagaaaaggatgctgtattgataatggacttgttgtccttggaacatgtttcttcgttctggatggttcagaagcagagccagaggagactacgagttagtgttgagcatgacctaggtgctagtgatgctgcaccaaagacactgagattgtttgtcccttactggataaaaaaccactcgtcaattccattatgttatcgcatagtagaaggggaatccacagaaagcacagaagcagactcacttagcagaccagactcgctaagtagagtgtctaagtcttcaaaattttcccttaaatattcttcaaagtctcttgtcagaagaggaacaatgtcgcacagaaatatgcaagtactggaagatattgaagattgtagcacagactatgtgatgctatcaccacaagattacttgaaccgatctgctggtatgcgctctgagtcaagggataacaatttcagtccagctcgagttgcaatatctatggctgttggtggttgcacacagtacagcgtaggagtatcgctttttgagcttgagaacaaggagcatgttgatatcaaaacatttgcttctgatgggtcatattactggttctcagttcaattgaagatggcttcagataggacaaaggcaccgcctcgccttacgctttaccgcctaaaagataaaacgggcgaaagggcctctagcctagtggttaaggacttccgagtagcacctccaagtcctgggttcgattccccccgggagcgaattttcaggcttggttaa

SEQ ID NO: 10191 - DNA, 2235 bp, Zea mays
  Peptide Sequence Number=SeqID_51970
atggagctttcaactgccattggagtcttggttgtatctccagaatttacattctatgacagttcaaagttatcaatggatgattcgttgcacattgagaagcttcttcgggccaagatggatttcagtttcatgtatgcttcaaaagaaaaagatatatgggctcgatctgtcattaaagaccttacaattgaagctggttctggtcttcttgttcttgaacctgtagatgtttcatggaaatatacttcagtcaatgaaaagacaaacatagtgttggtgtcgacagatgtttgcatccatctttctctgagtgttgcttctcttatgcttaaactgcaaaaccaaactcttgcagcattgcagtttggtaatattagcccactaatttcttgcacaaactttaagcgaatttggagctcaccaaaaggagctgatgtcttgcaccttctcaggtctgtgccaccttctcaggttgtggttgctataagtaatacttatggtcgtgtacgaaaacctcttggatttaggctaattcatgtattacctggttctctggatctcattgattcctgtcaatcaactgaagaaaacgaatgttctatctggattcctgtaccaccacctggatatttagctctaggatgtgtggtaaatattggaaggttaccaccttcaaaccatgtagtgtattgccttcgttctgatcttgcgacttctgcgacattttcagattgtatacacactctctcacctgctgctggaataatctctgaatttagcatctggcgtgtggacaatgtgattgcttcattctgtgcacataattctatagagcaacccactaaaacagaagctcttaatttgcaccatgttctcctccggaatccaaattgctatattgttaaagatctaagtgcagattcatctatccagaatgaccaatcttctgatcaattaaatcaccgcaagagtctttctggatgggatgtacttcgcactttgtcaagaccaagtaactattgtatgtctactccccattttgaaaggatatggtgggataaaggaaacgataccaagaagccattttctatatggagaccgttacctcgttttggttttgcttcggttggtgactgtataactgaagggtttgaaccacccactcttggcattcttttcaagtgtgacacagttgtttctgagaagcctgtacagtttactaaagtgacacaaattgacagaaaaggccttgaggaaatattcttctggtatccagtgccacctcccggttacgcttctcttggatgtatcgtaacaaaaacagatgaaatgccaagcaaggattccatttgctgccctaaactgagtctagtgagccaagcgaatatgtcagaggatcctatctccatgtcttctagctcaaaaggtccttgctgctggagcatctggaaagttgaaaatcagggctgtactttcctggccagaccagatgtcaagaagccctcagctcaactggcataccgtattgctgaccatgcgaagccgaaggcacgtgaaaacattactgctgagctgaagctgggttgtttgtcggttggcattcttgacagctcttgtggaatggtcacaccactttttgacacaacaatcgctaatataaatcttgcaacacatggaagatttgagacattgaatgctgtattgatctgttcaattgctgcatccacattcaatagacacttggaggcatgggaaccctttgttgagccatttgatggaatattcaaaatttttgttctgcaaccttatcattattctgccatcattgaaggtttgaaacatatgataccagtgaacaccctccttccaaagttgggtaccattgaaaacatgaaaaaagctgatgattcttcgtactctgcattgaatgaagatgatttccagagagtgggcttgcctatcatagatgacggcaatggtcacagctacttctgtgctttacgcttacttattggaagccatgcttctgatcagcacaaagtgttcccacagagtgccaggacgagatgtgtaaaacctgtggaaactactgagttactgacccactgtgccaagtggaatgaacattttatatttgaagttccagaacaggcatcagctaatttagagattgaagtaacaaatcttgcatcaaaagctgggaaaggcatgagaactgcatatgtatattaa

SEQ ID NO: 10192 - DNA, 543 bp, Zea mays
  Peptide Sequence Number=SeqID_51971
atgacattgatgctgatatcttcctgcagttatatacagtttgatcttggtcaattgaaagtaaggaatgagtttagttggcatggaggtaaagagactgacccttctgctgtaaggcttgatgttctccatgcagaaataaatggaatcaacatggcggttggggtaaatggaactctgggaaagtgtatgattcgtgatggtcgcggcatcaatatagaggctgcaacactatttctgatagaatctcccaaaggttcagacaagccagataaagattttgatctttttgaagactatggactgccaactccacagaaacgttgggggagggttgatggaagcagagctgagattttagaacttcgaggaactgaacttgctatttccccaaggccttcaaggacagaggagtatgaaaagtatcttccatggacattgctgaggaaggactgcattgaggattacttatttttttgcgaaggagtagagacaagggaatgccgtcatgggggaatggttgttccaaacatcgtggcgtag

SEQ ID NO: 10193 - DNA, 855 bp, Zea mays
  Peptide Sequence Number=SeqID_51972
atggcctccagcgcgtcagcgtctgaagggaaggctgagcggctggcggctagtaggcgcggcggcgcctcgcacggagcagagcgggccatacggagcagaggaacgatggtggagagtgcgcaactgttagcggaaacgcggagcggagagcggcagcggatgtcgtggccgcgtgggccggtggaggtcttctgctctgttttgatgccgcagcaaggctcgataactggcagagaggaaagcttagacccgaagaatgatcctcttatgagggctgatgatattatacttactgagcatgttttcttgcaaaaagaggattttattcaactatctcctgtaaggcagctaatagttgatggttgtgatattgacgagttcatttatgatggctgtgggggcactgtatccttatgtgaggaatttgataagaaaggacagaatggtgcactgcttagaagatgtgtatacttgaacatgggaagcagttactcaatttcttctgaagatgatgtagaggtttctgtgttagaaagttctttcacgaatgatgaagactgtttaaaccttgaagaacataaaaagagaaatctgcagaatgccattgatggtcccacaaaccaaatactgaactttacatttgaggctcaggaggtggagttcatggagctgaggcgtttagttaggagctttgagagtggagtggatgtcgccaaacgcccccatatgagtaacagaattatagaagttcagagaacaacattcagagcatggggacgaggagaaatggagcaagaggagaaagggagcaagcgcccagtctggaaccagcacacaatacacatagcatga

SEQ ID NO: 10194 - DNA, 711 bp, Zea mays
  Peptide Sequence Number=SeqID_51973
atggaaacagcaactgctctacagctgaagctggagaaggtcacacgtagggctcaggagcagcttcagctggtgttagaagaacaaagcagatttggacttgatattgatctggatgcaccaaaagttaggattcctttgaatgctaatcaacctttgctgggcaatgagtactttgttcttgattttggccattttacattgcatacaagagatgctcagaacatatactcaatacctgaaaatttagatcaagataccctcctaggtcatacctttgatgataatcagttctgttctcttcttgatcgctgtggaatgtcagtgataattgagcaggcactagaactgaccagcacactggtaattgaatttcgtaatgaaatcgagaaggctatgtggatgaaagcacttgtccaggcaacataccgagcttctgctcctcctgacgtgaacatattaggagatcctgttagccctcccccagaatcaagtacaccacggcttaatagcttgggattagtggatcttgttgtgaatggctctgttattgaaactaaactttcactgtatgggaagctggacagaaagagcagtgattcgcaagagcttctaatgctagagctccttgggaatggagggaaggagcagggattcagggaagatgcgggtggagcagaggaaggaaatgcggacgctagcgaggtatag

SEQ ID NO: 10195 - DNA, 132 bp, Zea mays
  Peptide Sequence Number=SeqID_51974
atggtagacaacatcaccaacaccacgcttcttccaacttcaagctcgtatccacggaacttcaccttgccaatgaagcgtgccacaagctcaggatggtctaaagacctacaaccgcagcaacaagggtag

SEQ ID NO: 10196 - DNA, 684 bp, Zea mays
  Peptide Sequence Number=SeqID_51975
atggcccctcaaccaggcacctatttggaggctctcaagggattaaggctgcttgcagtgccaagctttgtggtgtttttgctcagaggaaatagcgagaagccgagaagcattcttgcagttcacagcaaagaactcgatgtcggatttgtgatgacagaggagacacttgctgatgtgatgaccaacgaggaatggctgactctgagtgtgatagcaaatgcacagaaattagaactagatcatgataacatcttcctcaaggattatgatgcatggatatacatcaaggaggggggtgtcacgtatcgacacgatacagatatgtcgtcgatacgccaccgatacatatccttcaagtatacgttttttgctcaatttctacaatattcacccttcctcaacgacatccgctctgaggacgccggcgccaccgtctcctctggctcgcttgccgcgctccatgaggtcgtgtccctcccgggccccacgcccccggatgccgcgctcggctacgaggtcatcgatgtcgtcgccagctaccgcttcgaggctagggctatgcccgccgccgaggaggatgtgctcatgaggacactgcaggcgctcctcgcttgcctccgtgtgcccgctctcggggaccggcgtgtcgtagcagcagcagcaggagaagggaagaaatga

SEQ ID NO: 10197 - DNA, 1065 bp, Zea mays
  Peptide Sequence Number=SeqID_51976
atgctggtgctgtatctgctacgcaaatatttgggtgaatatgttgaagggctttctgttgaagctctcagaataagtgtatggaaaggtgacgttgttctaaaagacttaaaacttaaggctgaagccctgaattctctcgggtttccagtgacagtgaaagctgggtttgttggcaccataacattaaaggtcccatggaagtgccttggtaaagaaccagttattgtcctcattgatcgtctatttgttcttgctcatcctgctcctgatggacagactctcaaggaagaagatagacaaaaactttttgaagccaagcttcagcagattgaggctgcggaggcagctactcttgaagcaacaaataggaactcaagaggagggcctgcaccaggtggaaattcatggttatacaatttaatatctacaattattggtaatcttaaagtcaccatcagtaatgtacacataagatatgaagattctgtcagcaattctgggcacccatttgcgtctggtttcacgttatcaaaacttgcagccgttacagtggatgaggatggtaatgaaacatttgatgcaggtgtagccctagataagctacgaaagtctgttgaactgcataggctgggcatctaccatgactcagacagtaatccttggaagcttaataaaaattgggaagctctaaatcgtaccgaatggagtgagatatttcaagatggcattgaagatggctctcaaagttccatctgggcagtaaatcggaactacttggtctcgcctataaatggaacccttaaatataaacgacttgggaagaatgaaagaggggatccagataccccattggagaaagcctcacttgtcctcagtgatgtttctttaactgtaactgaggcacagtattatgatggcattaaactgttggaagcattttcgaggtttagaacacgtgttgatgtgtctcatttacggcctgttgtgcctgtaaaggaggatcgtcgtgcttggtggcgttatgctgtgctggctggtctgcgacaaaggaaactatggtaa

SEQ ID NO: 10198 - DNA, 675 bp, Zea mays
  Peptide Sequence Number=SeqID_51977
atggcgatgggaagacaaaacaagaagctggaaaccaagacatgcaaaggaagggaaaataggttgtatatattatgtgctacaagctacgaggatttgagaagatataacaacatattacatcccacgtttaaggaagcatgtagagcacgaggtcttcttaacgatgacaatgagtggtacaatgcatttgatgaagctgccagatgggccacttctgagcagttgcgacatctattcatcaccatgcttctttattgtgaggttggagatgagtatgcatttttcgataaagtatggcaacaactaacagatggtattcaatatagaatgagaaaaacattgaatcttccttcctatcaaatgccaaaaatagaattgcgagatcatttaattgacaaattatctgtgcttttcaacaaatatggctccaatataaaagaatacaacttgccacaaaaaactaattcaatgggctcaatctacgacaatcgatttattgaggagttatcatataactttgatactttatcacaaactgcatacaatctccgtgtgaaactgaatgatcaacaattgcatgcttttaatattatagttgatactgtcctatcaaacatatttggattcttctttttatctggatatggaggcaccgaaaagacttccctttga

SEQ ID NO: 10199 - DNA, 1167 bp, Zea mays
  Peptide Sequence Number=SeqID_51978
agtcaagtttgcaagaatgcttatcatgcgttttacctggcacaggatgtggtaattgttgctacaaggaggatcgtgaggccacccaagaagggttcagctgttgtgcgccctcgcaccaggactctcactgctgttcacgatggcatcttggaggatgttgtctacccagccgagattgtggggaagcgtgtcagataccgtctggatggttccaagattatcaagattttcttggacccaaaggagaggaacaacaccgaatacaagctggagacctgcactgcagtctaccgcaggctgtgtgggaaagatgtggtttttggcatgtcatccctcctcatattttcacctcaagaacttgactatctaatatgtggccaacaagaaatttgggagtctagaatacctggtgcagttacatggatgttaggatataagattgctatagttttatccaaggaggataccgcaacagtcatctccaccatgttattagtctctggtcttactacaatactacatacttttttgggttctcgacttccactgattcaaggaagctcctttgtatatttggctccagcgttggtaattgcaaactccgaggagttcagaaatcttactgacaataaattcaagcacataatgagggaactacagggggctatacttgttggttcagtattccagataatattaggatacactggtcttatttcactgtttctgagtgcggacttcctaaagctgagctccttgcctgtaggtaaaatcggagctctcctagcatctatacctcttgccttggccgcctctgttctgtgcttcacctgggcgctaattgtcgcgcttggtatgtccacattgcgatacacccaagcagcaagctccaggaacatgataatagttggatttaccctgttcatctccttgtcgatacccgcatactttcagcagtatgaacccagctccaacctaatcttgcccagctatcttctttcatatgctgcagcgtcaagtggaccagttcacacagccagcagcgggctgaactatgcattgaacgcgctcctatccatcgacgttgtggtggctctccttgtcgcgttgatccttgacaacacagtgccaggcagcagacaagagcgcggtgtgtacatttag

SEQ ID NO: 10200 - DNA, 405 bp, Zea mays
  Peptide Sequence Number=SeqID_51979
atggcggcgctctccgcgcccctccgcgccatcgccgccggatcccgcgtcgccgcgtccgaccccgtcaaggtctcggtccggtggcgaagggaaggcaagatgtacaccgcgaggaagaagatccagaaggagaagggccttgagccctccgagttcgaggactccgttgcccaggctttctttgatttggagaatgggaaccaggagctcaagagcgacctcaaggacctgtacatcaacaatgctatccagatggatgttaccgggagcaggaaggctgttgtcatccacgtcccataccgcctgcgcaaggcctttaggaagatccatgtcagactcgtcagggagctggagaagaaattcagcggcaaggtttatatgctgattgtagctactacataa

SEQ ID NO: 10201 - DNA, 130 bp, Zea mays
  Peptide Sequence Number=SeqID_51980
atgtgcttgtatggttgtgctcgcatagataacggtctgattgcagagtccgaagagatcgcaggagaagaccctgagcagcagtcggtgggaatgagattgatggctcttggttttaactctggtaatg

SEQ ID NO: 10202 - DNA, 1074 bp, Zea mays
  Peptide Sequence Number=SeqID_51981
atgaagggcatcataccggtgataacgtcgtggagcagtccgtccgcggtgcaggcagggttcacggcggagcgccaactccaacccgacgaatggcgtgatcacagccctaccctagtggttcttctacctctcggcgatggtggcggtgttcgccgcggccggtggaggtccgaggatgcgggcgattctgttgaaggagctgctacgcagactggcaaggagggcccacctgtaagtgcttggttcgacgcgcacacgaagatccgtgttggctggtgcggcggccgagttgccgcgcggcccagcgccacgcgcttcaccccccctcgcggcccacctggccagtgccccgcgcgacctagccgctctctccccgcgcgcgacccagcctcctcccaggcacggcacaaaagccaggcgtccttggcccatcccctgcgcacggcacgacacataagccaggcgcgggtgcatggtcgacgcagccgccatgcgttccggctgccgtttcttcaaccaccgcccgtgaatctcgcgcccacgacgagagaattgcccacgatctcgctgtgctgtgctaatctgcccggaaacaatcccattcgagtcgcaagcgttttaccctcttccccaaaccgcatggtgccgagcttcgagaccgttccctaccagagctcgccggacgtgctacgtttgcatcccgtccccgtcgaggtgaatcctcccccatcccttccctttcccctccctccctctgcgtggtcgacgcagcctggcgtgctgctcggcccgtgtctgctcgcagcacgcgcggcgcggttgctcgcggaggccccggcgaccctatgtggcctgcttgtggcgtccccggcgcggctgctcgcgtcagccccatgtggcctgctcatggcacggctccctggctcggcacgaccccctgctgcctgcgcgcgcgtccaaagttccggcacggtgcggccgaccccggcgcggtcctggctcgcggccagtgcccccggcgcggcgtggctcgcggccagcgcccccaacgcggtcctggctcacggctag

SEQ ID NO: 10203 - DNA, 420 bp, Zea mays
  Peptide Sequence Number=SeqID_51982
atggatctcaacctcggcgccaacatctttggcgccgagggggtcggtgccatatatcttggtgccgaccccgtatatcctgccgatcgaacaatccccgcccacatcctcccccgccgccgtttgcacatccggcgtcgcccgcctcggccgcggctcccccgccgagcatccagccggcatcgtcgccgccgcccgccctcggccgactgggcccctgctcgcctctcctcggccccggcccaccgccccgccccacctcccacaccgccgtcccacaccgccccccgtcgtcccacaccgccgtcgttgctccccaccatcctgatcccgtccgtcccgctctcggccgtcgaactcctagtcgaggttttagtatcctccccgtgcaggggaggtgctgtcaaaatttatacttag

SEQ ID NO: 10204 - DNA, 183 bp, Zea mays
  Peptide Sequence Number=SeqID_51983
atgtactcttgctttagtggcgggcatacatatacaactccattggttggctgggcgggtgcaaccacgctcacgcgtgcctggccgacaggaaatgaacgttttgggcgtatgagcggatgctgtgataaaaaattgaaaaagtttcgagaaaactatgacgcgctatgtgtacaaacctaa

SEQ ID NO: 10205 - DNA, 213 bp, Zea mays
  Peptide Sequence Number=SeqID_51984
atggcgggttttgctgagtttggacatcagaactcggcggcggcggttctaatgggaattagtgtcggcacgtggcatcacaatgaagggtgcattaaggcgaagcaacttcgtgtggagcatctgcggttgattcacagcaaaaatgattggctctcattcacccccaatggtcgtctcactggtccttcaattggtatcggagctggttaa

SEQ ID NO: 10206 - DNA, 156 bp, Zea mays
  Peptide Sequence Number=SeqID_51985
atggggaggaaaagcagggtagccataatctctgttggtgtcgcctgtttcattgtgttcatgatgatcctttcagtaataggcctttttaggcttacacagacccgttttgacaagagccgagcagcgatgcttccatttcggaccacgacctag

SEQ ID NO: 10207 - DNA, 1065 bp, Zea mays
  Peptide Sequence Number=SeqID_51986
atgacgcccgaggagatccttggaaagttcgtaagcgggcggatgatgatcaaggaggcgagatacgtggacgacgcattgaacggtccaattcatgagcctcaacccattgctctcaaggcaacgaggagcaaggaggcgctatctagcaaggtagcacaagttgaggcggccgggctcaatgatgaggagatggctttcatcatcaagcgcttcaagacggcgcttaaggaatgcaaaggacagccttacaagaacaagacgaaggggaagcgctcatgcttcaaatgtggtaaggttggtcattttatcgctaactgtcccgataatagtagtgaccaggaacaagggaacaagagggaaaagaagaaagcttacaagaaggctaagggcgaggcacaccttggcaaggagtgggactcggattgttcgtcgtccgactccgacaacgaaggactcgccgccaccgccttcaacaaatcgaccctcgttcccaacgagcgccatacatgcctcatggcaagggagaagaaggtttatgcatccaggggctctagctggattatcgacagcggatgcacaaaccacatgacgggggaaaagaagatgttctcttcctacgtcaagaacaaggatccccaagattcaataatattcggtgatgggaaccaaggcaagcttgtcaagcaggataaatctgaaacccaagggaccctcaagcgcttcctaaggagagctcaaaacgagtttgagctcaaggtgaagaagataaggagcgacaatgggtccgagttcaagaatcttcaagtggaggagtaccttgaggaggaagggatcaagcacgagttctccgctccctacacaccacagcaaaatggtgtgatgaagaagatgttccaaccgccgcaatacgcaccatggcgattggagatgtgcggccacaggaacaaaaggagcaagatcaaccgtcttcctcaacaatggtgcatcccccaactcaagattataaacaggttcatcaagaggaggcaagtgatcaagggggagcacaagatgatcaagtaa

SEQ ID NO: 10208 - DNA, 816 bp, Zea mays
  Peptide Sequence Number=SeqID_51987
atgaaactcgggttcaggtgctttgtcgagccccaagagagcgcttacaggcctcgcttctctcgaacatcaggatttctcatccaagagaggggcgatgggaggagggcacatggcacaacgatcagagcacacagcaaggagaccgtcggtgaggggacttggctggcgaaccgcgcgtgcaccagagaagccgagcagcagcggccagcttccatggcagggaaggggaacagcgaactggagactagagccgacggcgaggacaagcagagaggggcggctaccggcgaactccatggcggcgtccagggagaggcgagagacccaatttggccgagctggggccgggcgctggggttgggcgctgagaacggtggtgaagagctcagctggggaagggatgagggaggggacgccgaacccggcaccgggatgaccttgttgatgcagaggttggagtgcgccgtaggagagaccgatggcgccggaggccttggtgatctccccatggtgatgcagtggtacatgtacccgtgccccatcccgccgtactccatggttgaagctcgggagccagggaacaggggcacgacggagggagttcagggagatggggcgagctgcagcagggagggcgccgccatgggcgaccaggggaaggaggcgaccgtgggagggacgccaagggagctcaacgtgcgatggagagcagggactgaccggatgaaggagatggagaaccagcgacgagaaaaggctgagaggagagaagggatgaggacacataagaaatatcgatttggatctgggtaa

SEQ ID NO: 10209 - DNA, 324 bp, Zea mays
  Peptide Sequence Number=SeqID_51988
atggcggaccggcgttggggaggatcgcgcacaccggtcggccacacgcccaacaactccaccgcacaggatcagggcagtggcgcaggtccctgcggtgatggcttggcacagcgacgacggatcacgacacagaggtggccgaggagcgtttggccatgggaatcacaaggcgaaagagcgctgggtctgcgaggaggacgaggagaccgcgatgcccaatttataccccagcagcgaagatcgagcatgggcacgaggagcgagatccccgacgaggtagtcggcgtttctgttgcaatggcatcggggagacagacctga

SEQ ID NO: 10210 - DNA, 312 bp, Zea mays
  Peptide Sequence Number=SeqID_51989
atgaggcgagctctagggagggagggcgtcggccatggcaagaaggggagggcgccatgggagatggatgacagaggagatggggaggaggccgagctagcctgggaaggtcttggtgaccgcgcccgggaggatcttttgctggagcactggcaattgctcaccatggtcttacccatgctacagttgggttactgggtcgcctcctcgctggctttgcccgccgcggtggtgaacgccgccatgggctgggtacggcgctgctggtggggaagaagtctggtggccattggatccctagccaatggctaa

SEQ ID NO: 10211 - DNA, 273 bp, Zea mays
  Peptide Sequence Number=SeqID_51990
atggtgcgtggttcaaatccaagccctcaatcatccgatcgacgcttcacgtgcgtcctcccctccacccagccgaccaaggaggcgcctcccccgaaccgcggcggaggttcaccggcgtccatcgacccggctcctaggtgccctaatcagacatcgaagaggtgctatctacagttgaggctcgggcgaaggtctgaggcgacgcagtccgagttcccccactgcccgcctctttctcactcccgatggcggacgaaccctgttgactag

SEQ ID NO: 10212 - DNA, 426 bp, Zea mays
  Peptide Sequence Number=SeqID_51991
atgtccttgacacagatcgatgccaaggtgaagaccgagcgtgagcacgatggagatcgacgaccggtgacggacatggcaggacctggcgacgtccaagcgctgggcgctgcttcagcgtactgctttgctacacagcctgagcgatggacagggatgcaaggtgctgcagaagatgagagcagggaggcgagcacctgggcacgcgccggagtaaagaggagcaaggcgagctccacagcaacggcaatggcaacaacatcgacaagaacgcagtgcgcgaccatgggtgacccgggtctaaggaccaacaccattggaggggcggcgctgggagggctgggaaaaccgaccagaggtccaggcatcagaaattcttcaaataactccagaactcttccacagaaccaatggagcccgatttga

SEQ ID NO: 10213 - DNA, 612 bp, Zea mays
  Peptide Sequence Number=SeqID_51992
atgggtgctactggtaagttgtgtgtttctacccatgatgtagtcataaaagaatgcgttgctccaatgtcaactaacacatttgcagaatctcttcgacagagaacgtacctagtgccactcctggggtcttctaaactgtgtcgggctctaggtggttcacctttcaaaactgggtatgaggttgtccatggttgttggctccttgctgaggaaggcgaggtgtctggttgttctgtcgctgatactggtttcgtccctgttggttattctggcggtactgctgctactgagggaactgcctctggaactgttgttgatgctgacgttgattctggtgctggtgcccttaaggctggtagtgaaggaggtcaaccaaacctctcaagacctgtattgcatcttggcatcaatattgacatcctcaggcacatggtaccgatggaagttgtctctgactcctcccaggtgatagcttcagcgtcggcatgggtggcgagctcctgctccactgtgcgcaaccagtcttcggcgtcccatggggcatctgcggcatctgcacttgcagttgaggttgaggtggaggttgttgttgctgcacctgttgcatag

SEQ ID NO: 10214 - DNA, 2679 bp, Zea mays
  Peptide Sequence Number=SeqID_51993
atggcgacttcgctagactcgtgggcgcaattctgcgctggtgctaactgtaacaccccagttgagcgtgctatgcagcgatggagggctgtggagattttattcccttctgaagcagaagctgctgctgatttcgtggatgatggtgtttctataccaagggtgtctgcaactgcaagtgcaactgtagctccatctgctggttctggtaatatggaagattcacaaaccttaattgataaggctttagcagagctgccacaagagcttgctgacctcgctaaagatcctaagaatcatgctagatcaaaggatccgggctggaagtatggattttggcccaatgagacaaagaaggaaatggtacagtgcatattttgtaaaaaggttgtgcctgcagggataaggagattcaagcaacacctttgtggtggttttggagacactgaaaaatgtccaaaggcacctgccattgttaggaaagagatgcgtgattaccttgttcagaatacaaggtcaaaagccacgctgatggaagaagagaatgtacaaactgcagaagaggaatgtcaaggtgaagttgttgttgtgccaagttctggaacaaaggcaaaggaagcaaaaagaaaagttattgctcaagcttccattacttcttttgttggaaagaaatacgtaaaatcagtgagttcgatgttgtgtaagactcctgaagaggtagtcaatcagaggcatagttccacatcttctcaacctacacttgagcattgtacaaagaagtcaaaggaagcaaaacaaattgtagatgatcatgttgcagattttttttatgagaatggaattccattgaatgcaatcaattcaagaagctgggaaatcatggtggagtcaattgggcaatatggacctggttaccgatctccttcttacaatgccatgagggaacccgtacttgagagggcagttgtgaagacaaatgaattaaggaaaaggcatgaggaatcttggaaggagtatggttgcacactaatgtctgatggatggactgaccaacgacaccgccatctcatcaatttccttgccaacagtccagcaggcaccttttttctaggttatgtggatgcttctagtgaggttgttgatggcattatgttagcaaacttacttgagaaacaaattgagatgattgggaaggaatatgtggtacatgttgtaacagacaatggtgctaacttcaaggcagcaggtaggattttaatggagaggataccaactttgttttggaccccttgtgccgcccattgcttagatttgttgcttgaggaccttggtaaaataaaggatttcagttcttgcatcaatgatgcaaaaaaggtgtctaggtttatatataagcatgggagaattcttgatatgatgagagcaaaggtgggtggagatttggttaggccggctgttacacgttttgcaacctcctttcttacacttgctagcatgcataggcataagcaagcactgaaaaacttatttgtcagtgaagattggtaccgcaacaaattatctacatctatggaagggaaagctgcagagaacattgtgttgtctgtacccttttggaatcatgtagaagattgtttgaaagcttcacagcccattctaattgctttgaggatagcagatggtgatgagacacctgcagttcctgagatcgtgtcagccatgaatacagcaaggacgagcataaaggaatctttgaaaaaaaagccacagctgttgaatgaagttctagggtactttgagaagagatgggagaatcaaatggagcaaaaactatatggggcagcattgtttttgaatccagccaagttttttcctataagagagaatgatagaagggaagcaactagacttaggtcattgttcaatgatgttctatggaaaatggtgtcggacgatgatgagcaaagcataattagcaaacaggctgatgattacgagaggtctgaaggtgaagccttctcaaaggcaatagcaataaaggataggaaccgaaaaaatcctattctttggtggggtgcatatggtgggcttgcatatgagcttcaaacattagcaaaaaggattgttagcctttgttgctcggcatcaggatgtgagcgcagctggagcacattttctcagatacacaccaaaaggaggaatcgattagagcacaagaggttgaataaattggtttatgttagctacaacagaaaaatggcaaataggtttacaaagatacgtgagctcggttcgaagggaaagagaagcaacccattgcaccttgaagaatttcagtgggaaaatgagtgggttgtggctgataatgattcagttcatcaaggagctgcacatgatgaggcaattggtgcatctcaaggtttaagtggccacaatttgccaatggttactgctgcacatgccagaaacttatggactactagtgagtttccaacaaggaaaagaacctcaagaaagcgtcctagggtacctgaaccaactattaatgaagaggagatccttgaagatggcgaagaatctgaatctgaggaaatgcaaaagaatggggaagatggttctgggccttctacctcatttgggactgaaaatgcatttcaagtggatgaagatttgctttag

SEQ ID NO: 10215 - DNA, 309 bp, Zea mays
  Peptide Sequence Number=SeqID_51994
atgtacttgacttggagtcagctgattgaactaaggacaaaggcaagaagaacttcgaggtacccagtgcacgtgagaaggtcaaggagaccgaggtacccaaagccaggattgaagaagatggctggcagaagtcaagggtgttggagctcatggatagctttagagatcaagtcaagtcgacttgaggctttggagttcaaccttgagctcaaacaggccaaaaggagccaaacgatgaaaaaggtcaagtatgcaagatctagtgttggcgcagttataagccaaaaaagagaggagaggtgctag

SEQ ID NO: 10216 - DNA, 3156 bp, Zea mays
  Peptide Sequence Number=SeqID_51995
atgaggctggtggtgcgcgtcatcgaggcgcggggcctcccgcccacggacgccgacgggacacgggagccctacgccaaggcgcagctcgggaagcagcgggccaagaccaaggtgatgcgcaagacgctctgccccgtctgggacgaggagttcaccttccgggtaggggacctcagtgacaacctcctcgtctccgtgctcgacgaggaccgctatttcgccgacgacgtcctcggccaggtcaaggtgcccctcaccgccgtgctcgacgccgacaaccgcacgctcgggatgcagtggtaccagctgcagcccaagagcaagaagtccaagctcaaggattgcggagagattcatctcagcgtttctctggctcaaaactactccgacgagacaacggcacattgggcctcagatgaccatgaccttgcatcgaattcagacaaatcaactgaactggtgaaaggatcttctttctcaaatattcctatagaggtacgcacacaagtatcagaggtcgatgagacagaagttgccaaggaggataaatcaaacgctgccccatcatttgtcaacaagctatatcaaatgtttaatagtaaaccaaaagatgcagaagcttctgctccatcttcctccaagttgaacgacgcttcagatattaccgaagaaatgctgtcaaccaactctgaagctcctgataagcaggatcttgatgccagtgcatctatgtccttcgatgagctactgaaggcctttggttctcgaggtgaagggaaagaaatgcctgaaaatttgtcaggtggagttgttcttgatcaagtttatgctgttgcaccgagtgatttgaacacacttcttttctctccaagttcagactttctgcaatcacttgcagagattcaaggaactacaggtcttgaaattcaacagtggcgacttgaaaatgacggtgaaatcctgaggagggtggtaagctacacaaaagctcctaccaaactagttaaggctgtgaaagcaacagaagacatgacatatttgaaggcagacagagagatgtttgcagttttagcagatgttagtactcctgacgttccttttggcaatactttcagagttgaggttttgacctgtataataccaggacctgaactaccagatgacgaaaaatcttcacgacttatggtctcttggcgcataaattttgtccaaagcaccatgatgaagagcatggttgaaaatggagcaaaacaaggcttaaaggataactatgttcaattctctgagctgctggctaaaaattttaggccagttgatgcaaaagatacaacatacagtaatgaagtcctttcttctgtgcaaccagagcaagaatctgactggaagctagcgtttcgagtatttggaaatttcacacttttttcctcagtttttgcatttgtttatgtttctgcacacatcttccttacaagccctagtataattcaaggtcttgagttcccgggcctggacttgccggattctgttggtgaagttgtagtttgtggagttcttattctacaaggacagcgtgtgctaaatatggttgcacgattcatccaggcgaagaggcagagaggtgatcatggagttaaagcacaaggggatggctggttattgactgttgctctcatggagggaactaacatggcagcaaccaaatcatctgattactctgatccatatgttgtatttacatgcaatgggaagacaaagacaagttcgattaagtttcacaccctcgagcctcagtggaatgaaatttttgagtttgacgccatggaagatcctccatcagtgatggaaatacatgtgtatgatttcgatggaccgttcgacaaagttgcctcccttggtcatactgaagtgaatttcttgaaatataataatatatccaagcttgctgacatttggattcctctgaaaggaaagcttgctcaagcatgtcagtcaaaattgcatctaagaattttcttaaacaatacaaggggtactgaagtagtgaaggattacctggacaaaatggagaaagaagttggcaaaaagattgctatgaggtccccacacacaaacttagcattccagaaaatattttctttgccaccagaagaatttcttatcaattattttacttgtcacttaaagaggaaaatgctaacacagggtcgtctttttctatctccaagaatatttgggttttacacaaatatttttggccacaaaacaaaattcttcttactttgggaagatattgaagacattttactggtccctgcaaccctatccttaatgggaagtccatctctggtgattattcttcgaaagggcagaggaatggatgcaaagcatggcgcaaagcaactggacagtcaagggagactaaacttccatttccaatcttttgtctcattcaatgtggcacataaaacaataacggcactgtggaaggcaaggtccttgacccctgaacaaaaggtagagcttgtagaagaggaatcagaaacagaagagttccaaaacgtggaaggagaatctttcttagggatagaggatgcccaaatgtcaggagtgttctcatccacaaaaccttttgatgtaacaacactcatgggcatatttgagggtggtcctttggagtgccgggtgatggagaaagttggctgtatggactactctgttacagcatgggaacctgtcagagctgatatttaccagaggcaagttcattataaatttgacaagaaatcagtacggcatggaggagaagcgatgagcactcagcagaagtcccctttgcctaataagaatggctggcttgttgaagaagtgatgacgcttgaaggtatccctgttggtgaatgtttcaattatcaatctaatcaagcaagaattaagaaggaagatctttccctcttgctcgcccatggaaaaggccctggccaccccttgtgctccctcaacactagccaccactataacctatacaacaatctggtaccggagatgccaggacatgacgacgacaacaacctggtggtcttctccgttgtcgtctccatcgccacagcgactaccatcgactccactgtctcccccgccatgtatgactcctag

SEQ ID NO: 10217 - DNA, 818 bp, Zea mays
  Peptide Sequence Number=SeqID_51996
atgacggagcatttgcggagtgtccttttcgacactcagcaaagaagcccttttgttgagtgcctgcttgtctggttacgcgagattgcagctccctccgcgtttgaaggagcattggctaccgctccacgtgacgcgtgtcgtgtgctgtcggacccgaaaactctcttcaaatcagctctgaacgcgcggtacactcgtgttcctctcccccacgccctccctcccatcgcgccatgcctcctcccccagacctctcccctccccacgatccttctttggccaggcggtctgtcggtgcttgcgcccgggcccctcgcgcgctcgcccggcgtcccacggacagcaggggcggcggcggcaagccggtgcgtcagcttctatcgcacgtcgcccgcacgatgcgacccgcgcccgcggcccgccccctttccctcgccgccacacgatggtcgacaccgggcggagcttcgtggtcaatcaccggggcccgtccgagaagtcccctccgtcaccgccaccgacgcaggcggaggccacgacttccctaacgaaggcaggcgcgccggtggagcccgcgtcgcccccaccgccgtcctagagccgatcggccaagcccaccaaggttgtgggaggaggaagaagaataggccggtgagggtgttcccgacggacaaggggacgctctggaagacacgatccgccgatggccacgctgagtcctgggaaattgattatgtgaaggtatcgaatacaattcttccaagagatatacgtgtactgggttggtgtcatgttccagcatattttaatgcaag

SEQ ID NO: 10218 - DNA, 1140 bp, Zea mays
  Peptide Sequence Number=SeqID_51997
atggacaggtacgcgcccgcgctcctctgcctttgcctcggcgcgctccgtgccggttccgccgcgcctaccaccaccgggacccccgacggctcggagctgtgggggtacgtcgaagtccggccaaaggctcacctgttctggtggtactacaagagcccgcaccggacgtcgacgcccagcaagccatggccgaccatcctctggctgcagggcggcccgggcgcgtccggcgtcgggctcggcaacttcctggaggtggggccgctggacgtggacctgaagccgcggagctcgacgtggctgcagaaggccgacctcatcttcgtggacaacccggtgggcgtcgggtacagctacgtggaggacgacagcctgctggtgacgaccgactgggagcaggcggcggacgccaccgcgctgctcaaggcgctggccaaggaggtgccgacgctgcagggcagcccgctgttcctggtcgccgagtcctacggcggcaagtacgccgccacgctgggcgtgtccgtcgccagggccgtccgcgcgggcgagctcaaggtcacgctggcaggtctccaggacgtgtacaacttccttctcgacagcggcatggacccagtgtccacagactcgtcgccgtcgtcgtcgtcgcccagcagcgtgctgcaggcgctgaggtactcgacgtacctcggcagccagctgggggactcgtccgccggctcctccaacaccatcgacggcatcatgaacggggtcatcaaggagaagctcaagatcatccccaaggacgtcaggtgggtggaggtctccaatgccgtctactacgcgctgattgatgagctgctatcgtatggtgtgaatgttactgtatacaacgggcagctcgacgtgatctgctctaccgacggcgcagaagcatgggttcagaagctcaagtgggacggactcaagaccttcctgagcctgcccaggcagcctctgtactgcggccccggcaaagggaccaaggcgttcgtccggtcctacaagaacctgcacttctactggattcttggggctggccactttgtgcctgccgaccagccttgcatcgcgctgagcatgatcggcagcatcacccagtctccagccagttag

SEQ ID NO: 10219 - DNA, 1035 bp, Zea mays
  Peptide Sequence Number=SeqID_51998
atgccgctaatcgacgccgccgcctcggcggtcgcgccgcccccaccccggcgagtggctcaactccgcttcttcagcactcgcagacccggaatcctatccctaactgccaccagctgctccccctcccctccgcccccggtcgctgcggaggtgcctgcgccgccacaggaagcgaagtcgaagccgaggccacggcggtacccgaagcagtaccccggcgagtcggtgggcgttgctgaggagatgcgctttgtcgccatgcgcctgcgtaaccccaagcgcaccaccataaaagacaagtcggggacggaggacgcggacgccggggcgggggtgtcggagggcgaggctgaggaggacgacggcggcggcgtgaaggaggaacacgaggaggaggatgagggcgagctcgaggaaggggaatggatgcccagcatggaggggttcgtgcgatacctggtggacagcaggctcgtcttcggaaccatcgagcgggtcgtggccgagtccaccgatgtcgcctatgtttacttcaggaaaagtggtttggagcgttcagctagcatttcaaaagatttggagtggttcagaaaacaagggattgcaatcccagagccgagtacttcgggatcaacttatgcagcttatctgactgaactggctgagagcaacgctcctgcattcctctctcattattacaatatctattttgctcatataactggaggtgtcacaataggcaataagcactacatcgtccgcaaaaaaacatacgtaagggatatacccttgtatgtcccttgtgacctcatccatcaccaagacaaaaagatctgcgaaaagattctggaaggaagggatctggagttctacaagtgggatactgatgctgaacttctactaaaagatgccagggagaagctgaatgagctcagcaagcactggactcggaaggacaggaacttgtgcttgaaagaagctgcaaaatgcttccagtacttgggaaagatggtccggttaattatcttgtga

SEQ ID NO: 10220 - DNA, 248 bp, Zea mays
  Peptide Sequence Number=SeqID_51999
agacaaccgatcaagccaaggatggaggcaagaagagcttcgaggtaccgagtgcacgggagaaggtcaaggagaccaggaacccaaagccaggggtgaagaagaagacttgcaaagtcaaggttgatcgagttaagagttatgagtccaacatcgacctcaaacaagccaaattgggtaaaatgatgaaaaaggttaaagaaagtaccattctgagctctgttggaggaaaaacagaaaagctatga

SEQ ID NO: 10221 - DNA, 2388 bp, Zea mays
  Peptide Sequence Number=SeqID_52000
aagaattttcactcgtcttctcctgatctcatggaacttcttgatagtaatggccacggggaaacaagagcacagggtgctgaaaacattgcaccagtttctgctaatagtccagatacatcatcggaaatgcaagggaagttacctcacagtttgacagagcaccaggaagaaatggggtcccctgcaggccatgcagggagtttgtcgccgaaaattgtctcccacatagaaccagctcgagcatctgatgacccctcaaaagatgagggacgtcatgctgctttattaacagataagagtggagttgaaatcatatacgaaaatggttttactggcgccagtagtattattccagcagctgaaatgaaatctgaagaagacaatatgtactgtcgtaacaacgttgccgtcacccccacaaagaaagtagaatcagtaaaggggtgcgaaggctcacacacaggtcttgttgacactagcgccccattcgagtctgttaaacaggctgtcaccaagtttggaggaattgttgattggaaagcctacagggctcggtcattagagagacgcagggtcatgcaacttgaacttgagaaggttcagcaagagattccacagttcaaagaagactgggagactgctgaggtggccaaggcacacgtcattgaggagctagagagaactaccagacttgtcgacgagctgaagcatgagctggagagggcacagctcgaagtggaccaagcgaagcaagattccgagcttgccctgctgagggcacaagagatggagcaagggattgacgatgaagctagtgtaatagcccagacacagttggcagtcgccaaagaaagacatgaaaaggctgttgaggagctggaattgctgaaagaggagctaagatcaacgcatgaacagtatgctgtattagccactgaaagggatgtagccgttaaaagggccaaggaagttgttcgtgctgcgaaggatactgagaagcaagtagaggaactcactttagaactgatcgcatccaaagagtctctcgagtcagcccacgcttcacaccatgaggttgaagagcacaggctcggggcagctttggcgaaagagcaggatttcctggcttgggacaaagagctgcaggaggcacaagaggagctaaaccagctccacgaacaaatcgcatcgaaaacgaatgtggaggctgaagctgttgaaaacgagcgcaaactacttagcctgaaaagtgagctagctgcctatgtggaagacaaattgaatgaagaggctggaatgcttcagcaacaaggttctgacgaagaaaaagaaatcagtaggtcaatcaagcaagctcttgcttcaaaaaggaaggagcttgctgaacttaaagggaaactagaaaatgcgagaaatgaagccaacctagtaagagttactgcagaatcactcagttcagagctcgatagggagaaagcttcactcgccgcattgcagcagagcgagggtatggcatccatcacagtttcctctctagaagccgagctcgataggacagagcaagagatagagatggtacataagaaagaagcggaagctcgggaaaaaatggcggagcttccaaggatgttgcagcgagcagcccaggaggcagaagatgccaagatggcggctcactcggcacaagaggaactgagaaaggccaaggaagaggttgagcgggccaaggcttctgcgacaacggcaggtaccaggttgcgtgcagtttcgaaggagatagaggcgtctaaagcatctgagcggctagccatagcggcagctcaagcgatgcaagagagcgaggacacaggaagcactggcgcttctcctcgagtagtaacgcttcctgtaagtgagtaccatgctcttagcgagaaggttcatgaagccgaagaacttgcaaacgagagggtggcggtcgcgttggcgcaggtagagttggcaaaggtgtctgaatcgaggagtctagagaggctacaggaagcgtccaaggagacggagaaaaagaagagcgatcttcgcatcgcgctggagagggccgagagggcaaatgaagggaagcttggcgctgagcgggagctgagaagatggagagctgaacatgtgcagcgtcggaaagcccatgaggctgcacagcatgcagttagtccggtaagaactccacccaggatgtttgtccagcagaagggctcttatctggaaggaaacgaactcagagatccaaaggtgcacaagtcaactggcagcatggatcagtttgtttcggacaagaaatcgaggaaaaagaagtcgttcttaacccagttgtccacacttttgtctagaaagacacatgcacaaacataa

SEQ ID NO: 10222 - DNA, 198 bp, Zea mays
  Peptide Sequence Number=SeqID_52001
atggctgggaaaagactgggcgtctattttcagaaagatcaggggctaaaccagagttttcccaaagacacagcttactgttgccgaggatggcgggtttatttgacaaaagtacaggggcccgactgcaagataacatggccgaaagggtatctccggatctgggccacccgattgaacttgaacgctcgagattag

SEQ ID NO: 10223 - DNA, 192 bp, Zea mays
  Peptide Sequence Number=SeqID_52002
atggcggaggttgtgcagctgggcgcgcgtcagtggcgaccttcacgggtcgttggcgaagatgccggtccgctcccaggcgccgcggtgaagccgttggggaagaggatcgtgcggttcaggtaccctgagacatttcttcagctgagatacatgaaaaacattatgaacatccgcaagatgatccggtaa

SEQ ID NO: 10224 - DNA, 255 bp, Zea mays
  Peptide Sequence Number=SeqID_52003
atggctgggaaaaaaagatcaggggctaaaccagagttttctccaagacacagcttactgttgccgaggatagcgggtttatttgacaaaagtacaggggcccgactgcaagataacatggccgaaagggtatctccggatctgggccacccgattgaacttgaacgctcgagattagatcgagaactttatgaatcggtatgcgacgtcgaccccgggatccaaaatctatggtgtagattacacccgacctga

SEQ ID NO: 10225 - DNA, 495 bp, Zea mays
  Peptide Sequence Number=SeqID_52004
atggcgccccgcatgctctatgacgacggtggctctcagcccccttacggaagcaggggacgtcagcaaagactcgacagccccgacagctgtccttccgccaggctccagcgctcctccgacggccacgacaccacacgaaccgggcgccaaaacctcttcggctgccacgatggcatgtctagggccctcttagagagggttggccgcgcggggaaggacgggacggcgctcgcgcaaggccgctcgctccctcccgcgtggacgcttgtaaccccctactgcaagcgcacccgacctgggtgcgggacaaacacgaaggtcgcgggtttcacctcttacgcctgtctccctccggcttcttcccccttcgcgctccgtctcgcgccgacccatctgggctggggcacgctgcgacaatttactcgtcggtccagggacccccgggttcgaaacgccgacaaacacctcattccaacagactctccaaaatga

SEQ ID NO: 10226 - DNA, 1227 bp, Zea mays
  Peptide Sequence Number=SeqID_52005
atggaggtgcacgccgacgtcgatgggtccggtgtgcccctggccgtgctcctcaagcgggagctgtgcaaccagaaggtggagaggccggacattctgttcggggaggccaacaagagcaagaaaggggaggacttcacgctcctcttgcccaggtgccaccgcaccacaggcgaaggcggcggcagtggcggcggcgagaatgcaggcggcggcgacgacgacgacaccatttccgtgtttgcgatttttgatggacacaatggctctttagctgccatatacacacgggagaatctaataaacaatgtgctggctgctattcctccaaatctcacaagtgaggagtggacagctgcgttgccaagggcactagttgctggttttgtaaaaacggataaagacttccaaacaaaagctgcacgttcagggaccactgtgacttttgttataatagatggatgggttgtcactgtagcatcagttggcgattcacgatgtattctagaatctgctgaaggttcagtatattttttatcagcagatcatcgcctggatgctaatgaagaggaggtggagcgtgttacagcaagtggtggtgaagttgggagaataaatattgctgggggtgctgggttgtccaatgctggtgggcggcttgtcattgccagtgatggtgtgtgggatgcgctgtgttttcaagaggctctgaactacatcaggggtctaccagccgaagctgctgctaatcgaattgttaaggaagctgtcacttcaaagggattaagagatgatactacttgcatagtagttgacatactacctccagaaaagttaagccccccactaaagcgacctggaaaaggagtcatcaaaactctgttccgtcggaggccctcggatgaaatgtctgaagatcagatggacagaggatgtttagaacctgatgtcgtggaggaaatatacgaggagggctctgcaatgcttgctcgaaggttgaatataaattacccatcgggaaatatgttcaagctgcatgattgtgctgtctgccaattggagatgaaacctggtgagggcacctctgttcacggtaacatgcccaagcattcaagagttgacccctggggtggtccttttctctgttcctcctgtcaattgaaaaaggaggccatggaagggaagctacattcaagaagtatggatgtctttacccagaagctataa

SEQ ID NO: 10227 - DNA, 519 bp, Zea mays
  Peptide Sequence Number=SeqID_52006
atgaagcgcctacaaaggcaattcgaatcgcgtgacttcagacgatcttgttccaaggagaggggggcgtctatcgcgataaggcagggggccgggcaacatgcaggggctatggaggatgaaggcaagaaggacttcgaggtaccaagagcaaggaagaaggtcaggaagactgaggtacctaaggccacagaggagaagaggttcttgcaagaggtcaaggttggtcaagctgtgaagagacatgggtgtttgagctcaaaaatgaataatgggatcaagtataatatacttggagttttggagtccaatcccaagctcaaacaggccaaaaggagcaaaacaatgaaaaggttaagtatgaaagtggaagactacaactgtagtgcctacagctacagctacaactacagcacaactcctagcaagcagcatcagcagcaaccatcagcaagcagcaagcagcaacacgcaacaagcagcaagcagcagcaacaacacgcagcagcacgcagctag

SEQ ID NO: 10228 - DNA, 1209 bp, Zea mays
  Peptide Sequence Number=SeqID_52007
atggcagccgaagccagcgccgtccagcagctcgctggcctcctggaccaagtggacgcgccgctgaagaagacatttgagctgaaccaacatgaatacggatctaaggataaattcacagttgtgaaagttgacggacttgctgattccctgcaaaatgttactttgttctttgatctaagccacacgtttgggatccctgggaatgtgcatcagggctacccaacagagacattattgcgtttccttaaagctagagagtggcatgtgaataaggctcacaggatgcttgaagattctttgaattggaggatgcaaaatgaaatcgatagtatattggagaaacctattatcccagtagatttgtatagatcaattcgtgatacacagcttattgggttatcaggatactccaaagagggcattcctgtatttgcagttggtgttgggctgagtacatatgacaaagcttcgccatcctcatgggccatgggccttgatatacttaacatctgtcagaatgcatccatgtcaatcaaattaaatataagtaaatactattgcacttgtaaagttgttaactactatgtgcaatctcacattcagatcaatgagtaccgagatcgttttattttgcctacagtgacaaagaagtatgggagacctattaccacctgtataaaggttctcgatatgactggtctgaaattgtcagcactacaccaaatgaagattgtgactgcaatatctacagttgatgatttgaattaccctgaaaagactgagacctattatatagtaaacgctccatacatattttctgcatgttggaaggtcgtgaagcctctgttgcaagagagaacaaggaagaaagttcatgtgttgcgtggctgcgggagagacgagcttctacagatcatggactactcctccctcccccatttctgcagacaggagggctcgggctcatccaaacattcgtcaggcgacgccgataactgcttctctctcgaccacccgttccaccaggagctctacagcttcatccaggagcaggcgctgaaccaggagctcatcaagcagggctccttgcacgtgaaaatccccgagcaggaccctgaggacgcaaagatcgtggaggtcatcgaggccgagttccacaagcttggcgtgcagaacgggtccgccaatggcatcgaccaagcatag

SEQ ID NO: 10229 - DNA, 549 bp, Zea mays
  Peptide Sequence Number=SeqID_52008
atgggtgtcggaaatcccggtgccgggcacgcggaagcggctgtggctggggatcatacgcggcgcccgaggccgccgccatcgcgcaacaacgcccgccgcggtgcctcctccgcggctgcgcgggccgccggcctcaacttcccgggccgcgccgcctgctactacgcctgcggcgggcagcagccgctgtcgccgcgctccgtgcagcgcgtcgcgtccgacgccggcatggccgccgacgcgcagatcgtcgacgcgcgggcggccctcgcctcgccgccgcccgttgtccagcccgccgctctcgctggcattattggcggcgccgcgcgagaaggcggcggaggcgtgcgaggccccgcgtgcgcgccggcgccgccaagcaacggcgctggcagcagcacatgcagtcgcagccgcgaaacttgttcggccgtctccgctcaggctcagctcaagagtttcgcaaagtgcggggtgaaggatgtgggagctctagagccatccatccatacattccagttgtccaaaaaggcggcgcaatga

SEQ ID NO: 10230 - DNA, 429 bp, Zea mays
  Peptide Sequence Number=SeqID_52009
atggggctgaagcggcctgcggcgggagcaggggcggcagcagcgcagaccgtcacgctgtccgcgcctgccgtgcgggacgcggtgcgcaccgccgtaagggaggccgaggccacggcgaaggctaccgccccggccgccagggtcccggcgacggcggcagtgccggcggagatcgctagggatggggtgctgtgcctggaggaggtcgacgggaggcggtggagctatgtggtcgacgccgccggcgccgcggtcaaggccaagggaagggcgtccgtcggcggcgccttcaaggccgtcccgctccagtccccgatgccgcccgtcgaggatggggctgggcgtgttggaaagatgctttttgcccgccaagggaagaaatttgattatgacctgaagcaggttcttgctatagtatgttactaa

SEQ ID NO: 10231 - DNA, 204 bp, Zea mays
  Peptide Sequence Number=SeqID_52010
atgggcgggggcctcctggcagcagcatccgccctgaggtcatcgctgctgctgttcggccccccggagcagaagtcgtcgtcgtcgccgctgctggagcggggcctgaacgtgtatgtatttttggcacggagccgtgtttttcctcattttcgagcactaagactcgcctattggttgtctgaaccgcttcgccaagcgtga

SEQ ID NO: 10232 - DNA, 207 bp, Zea mays
  Peptide Sequence Number=SeqID_52011
atgctggaccaccaaggcgctgaagcctggtgggaggaacggctccgggtctacgcgccggcaaaggtgggaggggtcccacccgtcagggacccaggggaagggcagaacaaggacccgaagtccaagagagaaactctgaggaaaccgaaccagacaaatccgccctcccaagggtggggggcgaaaggccaggcccaggcctga

SEQ ID NO: 10233 - DNA, 361 bp, Zea mays
  Peptide Sequence Number=SeqID_52012
cgtgcttggcgcgagcacggaaggaatccccgtagcgaggaaaggaatcaccggcagcgggtggaaagcttcacggggcccaagcaggggctgcaggaggccgcgaccgggctgtttcggctcatgcctggatctgggggagagggacgcgcggagccgcgccgcgccggatcccgttcgtcggcgcccggatggtgatcagcggttccaggtatgggtggttttggcctgcccgctcttgtctgggttcttgcttggttttgggagtggggggccgatgctgttccggcttcttggtcggtctctgactgagggcagagtagtgcgggagatgccgcctcgcgaggttggcggtggttag

SEQ ID NO: 10234 - DNA, 357 bp, Zea mays
  Peptide Sequence Number=SeqID_52013
atggcccaccagcagcgacgcaacgccgtcgaaaagaaccatccagctgcagcaaagcggagccttcggtgcgaaccaaacccggccgcgtccggcccgtctactaccactacaaacggcccaacgccaaggcctaaccgccaggccgacaagcgccaccaccgcgcgctcaagcagccagacaccacccaaccaaccacgaggccaccagcccaccatcacccccacgaaaaaagcgaaccgagggagaggaaggatcggcgcgttccggccggagatgaggggcggatccagaccgggccccggtcgtcctgtttctcctcgctgcgtccgggatctgcgcccagttcaccgcag

SEQ ID NO: 10235 - DNA, 2082 bp, Zea mays
  Peptide Sequence Number=SeqID_52014
atggagggaatacatggtatccacccctgggagggaacatcacaaatgtttggtcatggttccatatcttttggaagatttgacttggaatcattagaatgggagaaatggtctgtatttaccaatgacaggcgtcatgaagagtttggaaagttcaatggattagttgcgaagaagaaggcatactttgaagaatactttaagaggattagggagcttaaggctttacagcaacaggaccagcaaactgaacttcatctggagtactgtggtgatggcagcgattctagtcaaacaggagaatatgaaccagctgcagcccatggagctcctactgaatctgaaacacttgttgaagattccacaaagcagacagcagctgcaaccacgtttgaacatggaacggaatgctacggttatcatgagaatgggagtttagttaatgaaatttctgcaccaacccatttttcacctgttggtgatttgcagcatataggcaaacaaatgaaaggaagtgttagtggcaaaatggatatattgaagcaagatgctaattccagccaagatgttcctatgatccatgagattatgatcactcctaacaaacgagcaattgagaaagactctcgggttggtcaggcttcaaaaacaatttcgaagactgtcaaggtgacttctagtaatgtttctgatcacacatacgtttccaagggaccctgttcaggcgagcctagtgtgataaaccagatggcgaaaccagaaaatatcctgtcattgcggaggccaagagaagcaaccagtgatttagttggcaccacagcaagaagtggtattacaggtgtaagaagaccttcagcagcattacaacggccctctaccaaagaacggcgacctgtcacaaaagatgcttcaaggaagcatgctgaagttaccaccccatgccgtccatctacttctgaaagacgcacggtgaccggagagtcggcactaaagcctgaaaacaatgctattccatgtcgacctgttaccgctcacagacgccctatcaccaaagaatcagcaacaaggcaatgcagcattgctacaccacgccggccttctactgctgacaggcgccctgccaccaaagatctaacaccaaagctatccaacattgctgccccacatcgaccttctactgctcacaggcgccctatatccaaagagtcggcaccaaagcatttcaatgttgctagcccacatagaccttctactgttgaaaggcacactagtggcagagatatgacatcgaagtatgttggtattgctacctcatatctgccatctgctgtcaaacagcgccctatcactggagagggtgcacataagcatgctgatgttgtcaccctgagctgttctactgctgataggcgccccattagagacgttgcaccaaagtatgccactttagctctgccaaggagaccgtctactgccgagaggcaccccattgctagagatattgcaccaaagaatggtttatcactcagaccttctactgcagagaggcgaaccattgctagaaatgttgaaccaaagcatgcaccggcacagaggccttctactgctgagagacgtcctgttaccagagagactgtactgaagcaagctaatgttgccaactcatgtttacctttgacgccagatagacgcctcaccaaaaaaggtgacatttccacccttgagtgcccttctacaggaggaaggtgccctatcaccagtggtactgcactctggtcaagaacaatgccgtactattcaaagggtgctttggtcacagaagttactccccagaagacaataactcccagggttgttagaaacagcaagctagaaaacctaagctatgcaaaagaaagggtggaacttcaagtggatagaaagcaaaagtcaagtctttttaacctgtcctcgaagaaaacattgacttccaacgttagagatgaccaaggtcttgaaatgttcaaaaagccaaacaaggagacaagctggtctaggctgattggtgatagtttggaaagagtccaggctgataggtgctag

SEQ ID NO: 10236 - DNA, 555 bp, Zea mays
  Peptide Sequence Number=SeqID_52015
atggctctggttctgccatctacgtgcccccacaggccgtacacgcagccgagcaggcccaagtggtgcgtcctgttcacccacgacgcctgcgtcggccctgcccgaactggcgtgcagagcagtgctccacgacgccgccaccacctgccccagcagcggcacgctccaacaacggcgaccatggcggtgcgggcgcggtggctggggagtctgttccctgctagatccggttcctcgctctccctagccatcacagctgtgcaccacgcctttgtctccatcgtcgtagtcgccgtgtggaggcttggtgtggaggcgctcagcagcgggtggagagagggtgatttggttcacggcgagaagggagaatactacagcaggtttctccgccgcggcgcccacggcgacgtcgacgcccacgctgacaaggatgctcagttcatcacgagcgcgaggaggagggtgaagattagttggagcatgccgctgaccccgacgtcgtcgactccgagcgtggagttgctacaaaacagcgaccacctcgatgtatag

SEQ ID NO: 10237 - DNA, 264 bp, Zea mays
  Peptide Sequence Number=SeqID_52016
atggcacgtgagaccatcgagatgttcggctataggattttgcagggcacgacggtctccttgacgggacagactcctcgacgggaacctccacccgctgctgagcgcctccacaccaagcctcctgcacagtcccaggttattatgggagaacatcgtaggtacactgtgggggagatagaaggagcatgcgagctacggttggtgcggcgtaccacacggcgactacgacgatggagacaaaggcgtggtgcacagctgtga

SEQ ID NO: 10238 - DNA, 141 bp, Zea mays
  Peptide Sequence Number=SeqID_52017
atgcgccgagtcatgtgggattacctactgagcttcaagatatacagcttctattataccaacgatcaaaagcggagtttgaatggacaccatacaaggattcaacaatttgagaagtcatccttgaggaattctttgtga

SEQ ID NO: 10239 - DNA, 144 bp, Zea mays
  Peptide Sequence Number=SeqID_52018
atggacgtcaatacgtccggaggcagtcaagttgttggtgtcagtgtcggggaggcaatggatgctcaacggatcagttttttgggaaaagaagaacgtaaaacaaaccctaggcctaacaaccctaggaagtcgtcaaaatga

SEQ ID NO: 10240 - DNA, 342 bp, Zea mays
  Peptide Sequence Number=SeqID_52019
atgaagctgagagctgaagggaatgggccagcttgtaggctgtttaatgaagcaaagaaggactacactgagaacactgtgcctaaatggtgggaggagcagcgcattggtattgaagccaagtttcaggagaaccagacttatatgaccaagatgtcgaatctgatgatgcaaaagggagatacctcagctgaactgaatggtcaagcagctacttcaactgtcatcaccagacgtgatgggatccaagcatcctaccaaatggatatacaatccccattacccactctccaagacattccattcttcgacaatttcttcgtcgtccatatgctcctttaa

SEQ ID NO: 10241 - DNA, 228 bp, Zea mays
  Peptide Sequence Number=SeqID_52020
atgaaggaagtagctacagaagagagacctgagaagaaccccctagacctcaacaacttgcccgacgattacactagggatggtaaacaggtgtttgaggaagggtcctctggctataggacaaagaaaagcggcggcagggatgggaaagatgagtgcgggaaggtctacgaatctttggggattgggggttgtattgagctgactgtgggtaaccggggactatag

SEQ ID NO: 10242 - DNA, 408 bp, Zea mays
  Peptide Sequence Number=SeqID_52021
atgaagtttttgttgtttctgctaagaattaaagaaggtatgcatgcgggattaccaaaatacataccggttaacttaaaagacatcgaaacagctggatttcaagagggagatgaggtgtcgttggagactttaaaggagaagggtttgatcaacccttcaggaagagagaggaaactccctttgaagattcttggtgacggggagctgaaggtaaagctgaacttgaaggcccgtgccttttcagcatctgcaaaggaaaagcttgaggctgccggttgctctctcaccgtactgcctgggcgcaagaagtgggttaagccttcagttgcaaagaaccttgctcgagctgaggaatactttgccaagaagagggctgcatcatcatccgactccacttctgcatga

SEQ ID NO: 10243 - DNA, 675 bp, Zea mays
  Peptide Sequence Number=SeqID_52022
atggcggtgctgcggagtagaggacagagcgagcgagggctgctgcaggggcgctgcgcagggctactgccggccggagtagcggcacgggtctgcacagaggggcgccgagggagaagagtgcagggcggacgccatggaagttgcacaggggaactcgacggggtggctgggacatcaggcgtggtgttgctgctgccggcgttgatggctgctggagctcgatctgtaatagagggggtcggccatgggggagaagaggagacgccatgggcagcaggggagggcatcggttgggagcttttctgtgccatgaacagggaggcaacgccatggaagacctcacgagcacccaccactagagctgaaggggggagaagggcgctgggaggtggggtgcgcacccttggagcaggggaaacagggagctcggccatggcgcccatggcaacagcggctagcaaggccggtcgtctgaaatggggaagcgagcgcctagggcaggggtgggcggccgtggaagggagggagctcatccacgccacggaggagagctcgacggcatcggtgcctggaggaaggagctcgccgcggggaaggctggctgccacggagctcctgcgcgctggctgttgttgccgtggagcaggtaggaagaaggttgctagcggctga

SEQ ID NO: 10244 - DNA, 966 bp, Zea mays
  Peptide Sequence Number=SeqID_52023
atggatcgagttgtagaccccgacgaccataatgtggagggtgacaatggtgtcggcgtcaagtctggaggcgtggggagccttaggggccaccgatgggggtggggtagggctgagaccgaggaggaggcgctacgccgtggccatctgagtggtcaaggcggtgcccatggcgcactcgcgctcaagggcgagagtcggcagcacgctcgtgctcctgggaggcagcaatggccgcttggatggtggcgatggcctcgatcaacgcggatgaagtgggcggacccctctagcgtatgggtcactatagaggcttcgatgctgaggtctctgcggctgaggttgactgatcctactggtcagcggcagctggtcagcaacaacgagcagctcctcaccctcactggcaggacccgaccgactcgccctttgccgctccgctccgatcgccgccgccgcggggttgcattccaatgtggcggcgcggggcgcacgccgacgccgcgcaccatctccccaccgcgggcccgggagcgtcctcctcctccaccgccgccgcctccgcgggcgcggccgcagcgcggagacggcggcgcccagggctgccctgccgcccgagcccacctcttcttcgcgctcctcgtggcactcttcaccgcctccctgctagtggtctggcagctgctccccatcggcgacggcgacgcagcggagggggacggggaggcgccgccgcgccttcaaggaggcgaagccggaccgatgcggttctcgtcctccagcctggcgctgcgcgcgttcgacggcgagagccggctcgaggccgcgagatccgggcggcggctgtgggccagcctcgcgcccgtcagagtagcgctcgctgttggaaatatgaacatagatgcacaatctctgatgcttgcaactgttgcgaaaagtcttgtgagtctgggctacgaggttgag

SEQ ID NO: 10245 - DNA, 507 bp, Zea mays
  Peptide Sequence Number=SeqID_52024
atggcggactctctccacgaccttggcgagcctatcgtcgaccttaccttggtgtggaaccttctgcgtggtctcagccctccctacgaccatctaaaggctctcatcaagcggatcgtgccattttccaccttccacatcatgtgcaatgagcttctcctcgaggagctcaccatagagatgaggaaccccgcttcggccctggtcctctacaacgctccttcgggcagtcaggcgccttcggggggaggcaggcccctcgccctccatcgatcgggacccctacccgccctccacccatcgtccctacagcccctcgtccttcttccaccgccgatggaggctgtcgttcccacaagggcgggcacgggagtggtggctccacacgaggtggtcccttcaggcggggtggtggctaggcgtagcattcattctacaacccctagaccaggaccatctccttgtggctgtgccaggccccgagtgcctcccgtcctccgttgctaa

SEQ ID NO: 10246 - DNA, 1359 bp, Zea mays
  Peptide Sequence Number=SeqID_52025
atggccactgtctcgctcaccccgcaggctgtcttctccacggagtccggtggcgccctggcctctgctaccatcctccgctttccgccaaactttgtccgccagcttagcaccaaggcacgccgcaactgcagcaacatcggcgtcgcgcagatcgtcgccgccgcgtggtccgactgccccgccgctcgcccccacttaggcggcggcggcggaggggagaggctgggaagaaggatcgccacggatgcgatcaccacaccggtagtgaacacgtcggcctactggttcaacaactcgcaagagctaatcgactttaaggaggggaggcatgctagcttcgagtatgggaggtatgggaacccgaccacggaggcattagagaagaagatgagcgcactggagaaagcagagtccacagtgttcgtggcatcggggatgtatgcagctgtggctatgctcagtgcacttgttccggctggtgggcacattgtgaccaccacggattgctaccggaaaacaaggatttacatggaaactgagctccccaagaggggaatttcgatgactgtcattaggcctgctgacatggatgctctacaaaatgcgttggacaacaataatgtatctcttttcttcacggagactcccacaaatccatttctcagatgcattgatattgaacatgtatcaaatatgtgccatagcaagggagcgttgctttgtatcgacagtacttttgcctcccctatcaatcagaaggcactgactttaggcgctgacctagttattcattctgcaacaaagtacattgctggacacaacgatgttattggaggatgcgtcagtggcagagatgagttggtttccaaagtccgtatttatcaccatgtggttggtggtgttctaaacccgaatgctgcgtaccttatccttcgaggcatgaaaacacttcatctccgtgtgcaatgtcagaataacactgctcttcggatggcccagtttttagaggaacatctaaagattgcccgtgtctactatcctggcttgcctagccaccctgaacatcacattgccaagagtcaaatgactggctttggtggtgtggttagttttgaggttgctggagactttgatgccacaaggaaattcatcgattctgttaagataccctatcatgccccttctttcggaggctgtgagagcataattgatcagcctgctatcatgtcctactgggattcaaaggagcagagggacatctatgggatcaaggacaacctgatcaggttcagcattggagtggaggattttgaggaccttaagaatgatcttgttcaggccctcgagaagatataa

SEQ ID NO: 10247 - DNA, 222 bp, Zea mays
  Peptide Sequence Number=SeqID_52026
atggagacctcttgttatgccgcggatgggctacaggttgaggcagcgatcgtccttgtccgagcagcaaggatcactcaaggcatggacgagatgaaggggcaccagatcggtgcgttcgtgcaaggcatgggagaggcacaggatcacgacgccgttacacttatgcaaggcgttgaggaggcacagcaggagcaagaaactgaaactcggaaattgtaa

SEQ ID NO: 10248 - DNA, 480 bp, Zea mays
  Peptide Sequence Number=SeqID_52027
atgtcgtcgggaaggcaggagggcgaggtgggactgtgggagggaagctggtgggattgggaagatgagaaggtggtagaccagggagccacatatgccttgaaatgcaatgctcgagggcatagttccacattaaaaattgcaaacaagatgcaaattccagggtcaggaattaggatgcctcaccaagcttgtgctgctcatgtggatcacactgcggataaactgggagaaagaggcaaccaacgcaaaagaaacggtgttcagttcatctcttcccgtagcatgataggcgaagcgcgccagggctgtatggagcgggaggccaagcgcgtcaggtggctggagcatgagatcagggccaaggccctgacggtcgcccgtctcagattgagaagcggcagaagcggcagatcgagaagcggcagaagcggtagatcagggccaagagctaccattcttggcgagggggcctgctag

SEQ ID NO: 10249 - DNA, 759 bp, Zea mays
  Peptide Sequence Number=SeqID_52028
atggccgcgcgcgtccccggttccctcttggctctcctcctgctcatcctcgcgaccgcgtcccccaccggcgccctccgcttcgacctgcgttcgggccacaccaagtgcatctccgacgacatcaaggtgggcgccatggccgtcgggaagtaccaagtcatggcccccgacggcgtcgcctcttcgtcgtcgtcgccacagcagctcccggactctcaccgcatctcgctgcgggtcacctcgccctacggcaacagtctgcactacgcggagaacgtgcactcgggcaacttcgccttcacggcctccgaggccggcgactacctcgcctgcttctgggcgcccgatcaccgcccgcccgccatcgtcgcgttcgagttcgactggcgcagcggcgtctccgccagggactggagcgccgtcgcccaagaagggtcaggtccaaattttgttaaaatgatggaattggaactcaggaagctggagggtaacatcaaatctatccatgatgaaatgttttaccttcgtgaaaggcatgcactctgcctgaaaaagacccagaatacattgttctgttttacagaatttatcacatgtcatcgatcatacgctgttttgtcattctttcagggaagtagagatgcaggaactgaacaggagaacaaactcaaggatggcttggcttggtttcctctcgctcgccatctgcctatcagtggcgggctttcagttatggcacctgaagaacttctttga

SEQ ID NO: 10250 - DNA, 435 bp, Zea mays
  Peptide Sequence Number=SeqID_52029
atgggcaagagcaagaaaggtggcagctcttcacatcactcgggcgacaagcgcaagcgcgagccgactcctccctcggaggacttcggcgactcggaatactcgaaggaggagttctccgagtctgagggctctctggctcctgcctctcccccggcgtcgtctgatgattcagacgactcccaagggatcaccgcggaggtatggacctacatccgggccgtcgagcgtgctaggctcgagggctcggatgagtcggagtactcctcggacgaggaggattcctccgactcgtccgaggagggcagcggcggcgacggcggtgacggcgacgacgacggaggcgacggaggcggtggcagcggcaagggcgatggcgacagcggcaagggcggtgatggcagcagcaagggcagcaacaaggccagtggctag

SEQ ID NO: 10251 - DNA, 270 bp, Zea mays
  Peptide Sequence Number=SeqID_52030
atggtggcgcacagtggtgacgatgggatggctcgggcagatggggcgacaggatggctcgggcagacgcaaggtgccaagccgagctggaatcttgccctcgagattcagacggggttcgagaaaaggtctttcggactactgagtcaagaatttttattggcttttcttggtactgaagatctttctgaatctggattgtctcttcttcaatgtgactttctgggcaactttctcttcagcctctttaacaaaggtaggtccttctag

SEQ ID NO: 10252 - DNA, 387 bp, Zea mays
  Peptide Sequence Number=SeqID_52031
atggggagagagaggggcggtcagatctatatcggagggctgggattagatcccgctcgggttaagttcaaccgcccaatctcggacggacgcccaagatctaaaggccaggggcagacacgggcgcggtggcaccgctcggtcccgcggagagggctcaccggagacgagggggctggccacggcggggcactagaggcttggagtttagctcaggcgcaatcagggcggtctggcggactcagccatgggcatcacgccggcgctatgggggacagatatccccgggattggatagactcgggcccagacggctcatgggatttaaggattatccgcatcattgatctagttctcccgcacagcaccctcagacgtcggaactaa

SEQ ID NO: 10253 - DNA, 492 bp, Zea mays
  Peptide Sequence Number=SeqID_52032
atgggcaagaacaagaaaggtcaaggttcatcgcaccacttcggcgataagcggaagcacgagccaagtcctccctcggaggactttggtgactccgagtactcggaggaggagttttcctccgagtccgaggggttgccggtctacgcctctcccccggtgttgtccgatgactcggacgattcccaggggatagccgccgaggtgtggacgtacatccgggccgtcgagcgctccgggctcgagggctcggatgagttggaggtctcctcggacgaggagaactcttccgactcgttcgaggaggaggagagcggcggtgatggcgacgacgagggcgacggcggcgatggcggtgatggcagcgacgacgagggcaagggtgacggaggcaacggcagcgagggcgacgacaacggcggcaagggcaacggcaacggcaagggcagcggtggcagcagcaaggccagtggcaaagcgccactgccttaa

SEQ ID NO: 10254 - DNA, 468 bp, Zea mays
  Peptide Sequence Number=SeqID_52033
atggccggaagcggcgaggcgacgacgcgagtagctggtggctgctgtttgagacctctcgtgcgacaaggatgtgagttgcaggagccaggctactttgcttttcatatcctaactgacgctcagaacttctatgccatgaaacactggtttgccaggaattcgtataaaaatgcagctatccgtgtcataaactacgaagcaattattttggagaaacttccaaagtatactatccggcagctgtatttgccagaggagttccgtgttctcattaggagcattaagcggcctactgaaaacacaagaatgaaatacctgtcactgttcagccactcacatttcgttattccagaaatattcaagtatctaaaccttgacgcatccacaacgttggaatatatatgtactcatattcggattatagaatacaggcttatctgtagaaatattcaggccatcgtatag

SEQ ID NO: 10255 - DNA, 681 bp, Zea mays
  Peptide Sequence Number=SeqID_52034
atggccaatagaggccgcgacgagccgcatatctgccggtggggtctggggagggtgaagttatgcttgttggagatgaccgacgataaggagacggcggcgagcacgaggctgagcctccggctcggccacgtcggggtgatgcaatcgtcgtcctactccagcagctccggcgctgctgtccatccccggcacatcatgctcaccgaggcggagaaggaggcgaagcggctgcggcgggtgctcgccaactgggagtcggcgcggcagaccatcctccggcgtcagggggtagattcacattcacacggcgcagcagagactctagccctgccgccaggtgtgccgattggacacagtgtgcgcggacattggcatgccgtgatggtgaactgccgacgccacagggccgggggaggcaacagatcgctgtcgaggaaacaactatctggtgacgggtatcatattctaacaagtggtatcaaagccaaagctatgctgattttattttgtgagaaggttgatagggataaggatcacaagattaagatgttgtcaaagatgtggaataatcaaggcatttttataggtcacgttgttggagatgctctaataagaactaatcgatgctctttgagggcaccaaagggcaccaaacgagacaaggcaactaatgaataa

SEQ ID NO: 10256 - DNA, 390 bp, Zea mays
  Peptide Sequence Number=SeqID_52035
atgggcatgttgaatttatatcctaaaggatattgtgccattcgcaaagatgcatcatgcatgctgatcactgtcttcgtgcgagctcaagtgcagatgcgtacaaccagtggcggagcacaacccaaagtcaaggctgaaactgacagcctcactggtcaccagcagaccggaagggggcacacagggagacgctgtggcggcgactggcaaggcacgaacaagctccggaggtcggctgcaatgcaccgccacggacgagctcgggacagactgggaacagtggaagctaggaagcctgggaacaacggtacgaggtgggagcctgggaacagtggaagcttggaacggcggctagccgcagaagccaagagaagccggtgggcggtg

SEQ ID NO: 10257 - DNA, 192 bp, Zea mays
  Peptide Sequence Number=SeqID_52036
atggtcagcgaactgggccgcgccacggccgggacaggggagcattttggggggcgcgcgctgagggcgagcgcgtcgctggcgcactgggtcggggcactccagggccacaccggttcgagcgaggagtgggaaggataccgggtccggccgtacggcgccatggttggtgaatgggaggtagggatttga

SEQ ID NO: 10258 - DNA, 339 bp, Zea mays
  Peptide Sequence Number=SeqID_52037
atgctgatcactgtcttcgtgcgagctcaagtgcagatgcgtacaaccagtggcggagcacaacccaaagtcaaggctgaaactgacagcctcactggtcaccagcagaccggaagggggcacacagggagacgctgtggcggcgactggcaaggcacgaacaagctccggaggtcggctgcaatgcaccgccacggacgagctcgggacagactgggaacagtggaagctaggaagcctgggaacaacggtacgaggtgggagcctgggaacagtggaagcttggaacggcggctagccgcagaagccaagagaagccggtgggcggtggttggctga

SEQ ID NO: 10259 - DNA, 153 bp, Zea mays
  Peptide Sequence Number=SeqID_52038
atgggcatcgatgaggcggggcatccagaggttcggccggtgtggggctgcgagatcttggaccagcggtcaaaaggtcgtgtgatcaggagcaggatgagcagtatctcctacggggtgatgttgcctaaccggaggccggggcggatgtag

SEQ ID NO: 10260 - DNA, 438 bp, Zea mays
  Peptide Sequence Number=SeqID_52039
atggtgccgcctctccttcccctcaccggcggccctgcccggaccgcagccgctagcctggcagccggcccggacgcgtgcgctgctgccggtctacgtgcaaccgtcgcctccctgccgtcggccgaccagcaccccctcgccggcgtcattccacatgggacccgtagcgagctcgctgttgatggggccccctacatctccgaccttgggcccctccccgacgactcccccactgcgctgcaccaactgcagcggcaacatgggtccccgctaggcttctccgcccgcgcaaccgccacatgggccgaagccactgccccctaccaacctcgtcggcactggtcaccgccatcgccatcatataggcggctgtggaggcttccagctgccgagagcgtgctacgaccctcgtgctacaatgagagcgtgccatga

SEQ ID NO: 10261 - DNA, 552 bp, Zea mays
  Peptide Sequence Number=SeqID_52040
atgcgggggccgctagcatggcaggcccgcgacgatgataaacgacgacggggggttggcgaatctggtcgcgctcgtcaagggggcccgggtccgcgggcgctgagggaggcgcgtgcccgcggcggtggtagacgagggcggggtcggcgaagcgattcccatgcgtcgacgggtcggggtcgtcgtggtcgtgcgtggcgcaggggggtcgacggggtcataggaggcacaagcggggtcgatggggccaaacgtggcacgggcggggtcaatggggccgtgtgtggcacaggcaggatcaatggggccgcgcgaggtgtaggcataggtcacgtggccgcacatggtgcgggaagaattgcgagtaggggcatcaaggccgacggagccgcacgcgaagacggtgaaggcgtgcgtggcgcgggcaacggtgcgaggcgaggtgtccggggggaacaggtactcggatcggactcaaggagggagtcgagatcgatgggtggggaggaggcagcaaggggaaacacatcttcatcgaagacgatgtga

SEQ ID NO: 10262 - DNA, 300 bp, Zea mays
  Peptide Sequence Number=SeqID_52041
atgcgcgaacgctcaacggaacaccccgcgacctccgcaatcaggggactcaacgccaccatcgccgccgactctgcgcctcggcaataccccgcgatagctgctgttggaccatccaatcagtccggggcgcttcggatcatcctgtgggcggtaatcccatgctcgctgggcggaatcggcaacagtgtgcccacgaattggtcgttgtcgtggaagattcgcaccgggccgctgcggaccgtggacggcttccctaacctcacccttgtctccgatagtaccactgttttcatatga

SEQ ID NO: 10263 - DNA, 351 bp, Zea mays
  Peptide Sequence Number=SeqID_52042
atggtcggttccaaggatcataccaaggtctccaccaccaacatcatcaagccggccatggaggcactcccagctgatggccagcaaccctttgaggacctcgtaatgcatgatgagaaggaggttgtgccatacatggctggatcatccgggtacaaccccggacaattcggccctgtcgcggatcgtgtggtacctcacactggaccatccggatatgtcgtggaccgtctgactgcccaagtcacgccatacatgaccatatcgtccgggtacaaccctggacctttctgtccaatcgcggacggttcggccccttacgatggacgatctgagtacgaaacaacctag

SEQ ID NO: 10264 - DNA, 195 bp, Zea mays
  Peptide Sequence Number=SeqID_52043
atggcaagccactgtaatttttacaggatttttggaaaacactgtaacctcgctgacggagagtacgtcctcgtgccggagcaaggagctgctcaggaggtagccccagatccagccccagagcctgcaccagaggatctcccagccactgctttggaaggattgaatgtgcacttaagtgtaggagttgtttga

SEQ ID NO: 10265 - DNA, 414 bp, Zea mays
  Peptide Sequence Number=SeqID_52044
atggagggatacactaagaagtccattgagagttgtatagattacatcagtgacggaccaatgatagatgtgcctgtacctaaacatgaggcagatgagaagatgcatgtagttatttctggaaagcaaaaaattgttggagttgagaatgtgggagaccaagatgaagaatacaataagtatgaagagatgaacaaggcggagaaacggcgccttaataggcttgccgacgccatcatacagaaggcggagggagcctcgccttcaacacttgtggtcgtcgttgaccaactgctaagatatgttcttgacttagctcgtggacgactcgagacacagctcgactgggcccaactccgacgtcgacgaggccctggaaagaatctctttcgtggcaacaccaccacaaaatga

SEQ ID NO: 10266 - DNA, 318 bp, Zea mays
  Peptide Sequence Number=SeqID_52045
atgtccggtgcaccagaggactcctactcaaacttgtcaccttcgggaaattccagaggcgactccgctataattcaccggactgtccggtgtacaccggacagtgtccggtgctccaaggaagagcgccctccggagctcgccagcctcgggaattcgcttcggctgctccgctataattcaccggacatgtccggtgtacaccggactatccggtgtaactgcggggcaacggctacttctggcgccaacggctacctgcggcgcattaaatgcgcgccagcgcgcacagaggaactttgtgttccaagtgattga

SEQ ID NO: 10267 - DNA, 1533 bp, Zea mays
  Peptide Sequence Number=SeqID_52046
atgctcttggggttcatcgtctccgagcggggcatcgaggccaacccggagaaaatcgcgccaatcaccaacatgggccccatcaaggacttgaaaggcgtacagagggtcatgggatgccttgcggctctgagtcgcttcatctcgcgcctcggcgaaagaggcctacctctgtaccgcctcctgaggaaaaccgagcgcttcacttggacccccgaggccgagggagccctcgagaatctgaaggcgctcctcacacgcgcgcccatcttggtgccccccgctgccggagaagccctcttgatctacgtcgccgctaccactcaggtggtcagtgctgcgattgtggtcgagagacaagaagaagggcacgcattgcccattcagaggctagtctacttcatcagtgaagtgctttctgagaccaagatccgctacccacaaattcagaagctgctgtatgtagtgattctgacacggcgaaagttgcgacactacttcgagtctcatccggtgactgtggtgtcgtccttccccctgggggagatcatccagtgccgagaggcctcgagtagggtcgcaaagtgggcagtggagataatgggcgagacgatctcgtttgccccttggaaggccatcaagtcccaagtcttggcggactttgtggctgaatgggtcgacacccagcttccagcggctccgatccaaccggaactctggaccatgtttttcgacgggtcgctgatgaaaacgggagcaggcgcgggcctgctcttcatctcacccctcggaaagcacctccgctacgtgctacgcctccatttcccggcatccaacaacatggctgagtacgaggccctggttaacgggttgcgcatcgccatcgagctaggggtccggcgcctcgacgctcgtggcgactcgcagcttgtcatcgaccaggtcatgaagaactcctactgccgcgacccgaagatggaggcctactgcgacgaggtccgcccctcaggcatcctccagcgatgcatatccatcgccgaaggtcagggtctcttacaagagatacactcgggggcttgtggtcaccacgcaccacctcgggccctcgttggaaacgccttcttacttggtttctactggccaaccgcggtggccgacgccattaggattgtacgcccctgccaggggtgtcaattctacgcaagacagacacacgtgccctctcatgctctgcaaacaaaacccatcacctggccgtttgctgtgtggggtctggacctcgtcggtcccttgcagaaggcacccgggggcttcacgcacctgctggtcgccatcgacaaattctccaagtggatcgaggtccgacccctaagcagcattaggtccaaacaggcggtggcgttcttcaccaatatcatccatcgcttcggagtccagaactccatcatcaccgacaacggcacccagttcactggcagaaagttcctggacttctgcgaggaccaccacatccgggtggactggcggctgtag

SEQ ID NO: 10268 - DNA, 444 bp, Zea mays
  Peptide Sequence Number=SeqID_52047
atggaggactacgtagcgccagagatcatcgccgggcgcgaccacgacttcacggtggactggtggggcctgggcgtggtgctatacgagatgctctacggccgcacgccgttccgggggcagagccgcaaggagaccttctaccgcgtcctcaccaagcagccgggagctcgtcggcgagtggcgcgcccgccgttcatcccgccgccgccgccgcaggacgagggcgaggacggcgacgaggcgcttgacgtcgagaaggtcgtccgcgaggtgttcgcgtccaacgatgcggagggcgggaaggcttggcctgtggcggacggaggccgtgtcggcggcggcgacggcgacggaatggagaccgggtcgctcagcgacggcgatgccgtcagttttgggatcgaaatgccagaaaaaagagatttacgtggagagctttga

SEQ ID NO: 10269 - DNA, 534 bp, Zea mays
  Peptide Sequence Number=SeqID_52048
atggcggtgcggaatgggaagcacagtgcggcgcccgctggattccttgcactgccgcggctcggcgacggcgcggcgaccagaagcgccggcttgggactggtcaccggcgcgtcaggctcctgcgacggtgccgggagccgcgtggagaggtcgaaatcaacgagcatgatgtggccgctgtcctggatgaggacgttctccggcttgaggtcccggtacacgatgccgaggctgtgcaggtactcgagcgccagcaccagctccgcggcgtacaacctgcggttggaaaaacccaaaaaaacgatcagggcagaaattagcggccgaaattgtcagacacttgcgcggctgagcaccgccagcacgcttcgctcctccctgcgcaaaattttgcaatatgaccgtcgagatgaaccaaaggatacattcacagagttggtcgtaccgcacatgttgaggaaggcaaatgaagtgaccaatgttactctaacagaatacgagtttaataagaagaatgtgccacatttgtaa

SEQ ID NO: 10270 - DNA, 171 bp, Zea mays
  Peptide Sequence Number=SeqID_52049
atgacatcttcggaaccttggcgacgctttgaggaatcactggcctacacaaaaacgagcttcgtggttttagggtttgttccattcgtctgcgacatctatggggaaaagtatttggattactaccagaaatatgtattcattccattgcttgcattagactatcattga

SEQ ID NO: 10271 - DNA, 2232 bp, Zea mays
  Peptide Sequence Number=SeqID_52050
atggtgggaggtctagttctgtcccaggcgcagacgcaccataccgccgcgccaagaaccgccgcaccggcgccggcacaggcgttggagaagcggccgagggaccaggcccagccatgtggcacagcggcggcggccgtctcggtgcggagcttggacgaggtcaggaaggcgcacgcgcggcacatcaagctgggcctcgaccgctccccacggcacgcgcggccgctgctcgcggcgtgtgcgctctcgggctggccgggcggcatggagctcgcggcgtccatcttcgagtcgctcgtcgagccggaggccttcgattacaacaccctgatgcgcggccacgtcggtggcggccgtgaaccggcggccgcgctgcgcatgtacgttgacatgctggaggcgggcgtccggcctgacagctacacgttcccgttcgcactcaaggcgtgcgcgcagctcgcggccttgcaagaagggagacaggcgcacatcgtgaagctcgggttccagcacgacgaacacgtgcagaacagcctgatcagcttctacggcaagtgcgtcgagccggcgatggctcgtctggcgtttgaccgggtggaggcggaggagcgaacggcggcttcctggagcgcactcctcgcggcgtacacgaaagccgggctgtggggcgaatgcctcgagtcgttcggcgcgatggtgctcgatgggtggcgtcccgacgagagctccacggtcagcgcgctctcggcgtgcgcgcacctgggtgccttcgacgtcgggcggagtctccactgcgcgttgctgaggaacaccgcgaggctgaacaccatcatgcagacgtccctggtggacatgtacgccaagtgcggcagcatcgagaaggccgcggcggtgttcgacgcgatggacgacaagaacgcgtggacgtacagcgccatgctgtccggcttggcgctgcacggggacgggcggaaggccctgcaggtgttcgacgcgatggtccgggagcgccacgcgcccgacgcagccacgtacgtcggcgtgctgaacgcctgcagccgcgccgggctgctcgaggacgggctgcggtgcttcgaccgcatgcggctggagcacaacgtcgcgcccaacgcgcagtactacggctgcatggtggacctgatggcgcgcgccggaaggctggacgacgcgcgcgcgctcatcgggagcatgtccacggggccgacggacacggcctggcgaagcctgctgaacgcctgccggatccacggcgatctggatctcgccgagcgcgccctccaggagctgaggcgcctcggcgccgcgaacgccggcgactacgtcatcgtcgcggacatgcacgccagggccaaggactgggccgctgccgcccagctccggacagaggcggtggactggggcctcgcgcaatcccccggggtcagcgccgtggaggtacgcggcgagctgcaccggttcgtgtcgcaggacaggtcgcacccgcggacgagcgacatctacgagatgctccaccagatggagtggcagctgcggttcgatggctacaaacctgacacgtcggaggtggcgctggacgtgggcgaagaggagaagcggcgtgtggtcgccgcgcacagccagaagctggccatggcattcggcctgctcagcacggcggagggggcaccggtgaggatcgtgaccaacctccggatgagcaaggaatgccacgcgtacagcgcgctgatctcggaaattttcggccgggagatcgtcatcagggaccggaaccgcctccaccggttccggcgcggcgtctgcagttgcagagactactgcgtcgcctgcgccgcaccgactgctgagccactcgacagagtgaggctgacagcagccaagtctggccctaggcgccatgggaaactccgcttcgcccgaccccagggctcggactcgggctcagccccggaagacgacgaactccgctccgcccgaccccagggcttggactcgggctcagccccagaagacgacgaactccgcttcgcccgaccccagggctcggactcgggctcagccccggaagacgacgaactccgctccgcccaaccccagggctcggacttgggctcagccccggaagacgacgaactccgcttcgcccgaccccagggctcggactcgggctcagccccggaagacgacgaactccgcttcgcccgaccctag

SEQ ID NO: 10272 - DNA, 213 bp, Zea mays
  Peptide Sequence Number=SeqID_52051
atggccaataagcacgaggcccgtgagcccggcacgaagcccgttgtttgggcccggtggttccgcgccagccttgacgcggcgtccaccgacgatgtcgagcacgacgacgacgccagagaggagtacgacgatgaggactggggcagaggcgagagctgcgagaaggaggtggcggtgggagcaggaggtggtggcgggagcgcggtgtaa

SEQ ID NO: 10273 - DNA, 522 bp, Zea mays
  Peptide Sequence Number=SeqID_52052
atgactggaaacaatgttggcgtggcacaggctcctagagcaaccattcgctttgggaatcctgacaacgtccttgacaacgaagaagcaacaaatagggcctcagaagccccgactctcccaaagggcgattcgctcgatatcgttggaagcttcgatcacctccaccttgatcccttgggaggtgggaatgtgcgaccgtgctcactgttttcaattttcaccaaggtcgtggaggcgttgggtctcgttcagggactattgtccggcctcccccccgtcaaggtcaggaaacggacctggttcctcgctgaatgggaccacccacaccttggcctaggaatgattcatgatctcgtcgactgggggaatcctctgtattcacaagaagcctcgaggagaccctcaccgatgtcgtgggttcgctctgtagcgtcagccctgtctcaccctgacctctcatgccgagaattgccgctagggcgggtaccctgctcaaggcagccaaggtcctcctgttag

SEQ ID NO: 10274 - DNA, 183 bp, Zea mays
  Peptide Sequence Number=SeqID_52053
atggggtccactggagggtcagttgacgcttctggggtcaggaggaagccacaccgcgtcaatcttactccaggcatagaccccgctccctttgctagggaggcatcattgaaagagaaatgtgcccttgggcaaatttctatgagtattttggtgattagattcccaacacatattaattga

SEQ ID NO: 10275 - DNA, 506 bp, Zea mays
  Peptide Sequence Number=SeqID_52054
atgaactcagagcaaaattgccccagttattctcggaagttctttaatctcgaggacgagattcttttaagagggccgccgccgcctttggctctcttctccctctcccctctcttccccacgctggccgccgccagccaagcgcccccgcccgaccccacgcccaggccgaagccccgcgccaggacgccagccgaccgaccagccccacgcccaacacccgacggcacccaagccgagcagcctctctctgcctcctccctacccgagctcgctccctactctctctcactctcctcaccgtttgagccaccgccgccgtcgccggagttcgccacgccgttgccagagcccatggagctcgccggagctacaccacccaccgtaccaagccttcgcctagacacacgcccaagtactgtctgccgttcgtcgcgagtggactatgagttagacgagcctaacacgttcgaggatgaccagcaggacacgttcgagcaaggcaa

SEQ ID NO: 10276 - DNA, 540 bp, Zea mays
  Peptide Sequence Number=SeqID_52055
atgggcgtcgaatggaaccctaaggtttccggaagacaaaccacggcgcctccgcacatcggagacgggattggtatcgcgcggcgaactggaggagccagacacgggttaaggcggaattggattgggcaggtggggcggcaggaacaagcctacggcgaagtgtacggggagagcgaattctccggattggacgggcaaaagcgcagggaacctacagagaacactgtggaggcggcgaggatgggggcggagacgaacactcaccgacgagaggaggatcgagcggacttggaccccagagcagatccaaccgcgcttggaggtatgagggcggcgcgcggacggagcgggaggacacgggcggcggcggagggagcaggtgttggtcgtcggggcgtggccgacggcgtggcgactggcgacgacgggatagtttgggtctcaaatttgagagcaggggtggaggggaagaggctgggtggtggccggtggggcctatcgctggtatgtggatttacatatcctattgttggttaa

SEQ ID NO: 10277 - DNA, 282 bp, Zea mays
  Peptide Sequence Number=SeqID_52056
atgaagaagttgctcctgaggctgatgcagctgagcagatgcctcctcctccacctcctcctcagcctgagcatttctggcagtctggtccaggctattttgatccttacttctagcacatgcagcaagggctcgagacacatatggatggccgattttaggactcactttgataactttgatgggctgcactctgagcttactgagcttcacactcacatccaagacactgttcatgatccaattattactagaatgaacaacgtccatcagagcttttag

SEQ ID NO: 10278 - DNA, 141 bp, Zea mays
  Peptide Sequence Number=SeqID_52057
atgaagagcatcgaggataatgggtcgccttgccgatgtccacgccgaagcaaaattatttcaccacgaatgccagctttgtgcattgatgaggaagatggccaagctctccacaattataacaatccatctctgagatag

SEQ ID NO: 10279 - DNA, 351 bp, Zea mays
  Peptide Sequence Number=SeqID_52058
atgggggcggtggaggcggggttgaaggcgaacgtgactgcgacaacgtgcctcggcgagatcgagcgttggagcgagagtacaagcacgcgcatcccgcctccacagcggcaacaacagcactggtgccacgcaaatgggggcacagagcagcagcgagtggttccgcaacacgaagaggcggcactgagacgtcgccagcacgtcttcgccaccgggactcgggagatccttggtggagtcgcggacgttgaggagaaagcgaggggtgaaggggagcgcagccgtgacagaggtgggaccaaggtggggagccgcggtgagcagcgaggccaaaaggcgggggtgtag

SEQ ID NO: 10280 - DNA, 312 bp, Zea mays
  Peptide Sequence Number=SeqID_52059
atggcgccatcacgtcgtccagctcatcatccacctgaagcccaacatgccacctcaactaaaataaacctaaaagtgcacacaagcacttcgctgtcacttaccatagggtttggggagtctgccaagtctgaagcttcgacccatgtcagaagttctgacttgcgcgaaactcctaggagaagccacagtcttcttttcactgctaggtcagagcttctaacctcccgtcgtatgttcggacctacactaatcctctccataatagatcttcaggctcacaagtctaaccttgactcaaaggtatcttag

SEQ ID NO: 10281 - DNA, 336 bp, Zea mays
  Peptide Sequence Number=SeqID_52060
atggggctttccaccgcggcccgggcgtactggcgctctatcgagcgtgttgggctcggtgggtcggacgagtcgggggtctcctcagatgagccagactcctccgactcttccgaggagtggagtggtggcgacggtgacgacgagggcgacgacagcggcgacgacagcggtgagggtgacgacagcgacgacggcggcaagggcgtcagtgaaggcgacgacggcagcggcagtggcgataacagcgactgtggtgatggaggcattaagggcgacggtggcgacggcgatagtggcgacggcaaggccagtggcatagcgccactggtctaa

SEQ ID NO: 10282 - DNA, 162 bp, Zea mays
  Peptide Sequence Number=SeqID_52061
atggcggtattacaccatgccgaccgattctcctcaccgcggccaaacttttccacggttattggaacggagggctcgccgccagagaacgtcgtcgcgtcacagttctccatcgaccggtctcctcgtggttccctgatcaaggtgataggagttgattga

SEQ ID NO: 10283 - DNA, 558 bp, Zea mays
  Peptide Sequence Number=SeqID_52062
atgggaacccaccgctaccatccatggcggcgctctagggaaccgcccctgacatgcaatcacggcaagtacgggaggcacacatgccccgtggccatcaaaaccaaggaagacaagcggcgcctcaagaggcatgctatcgccctcaaacgacgcctcaagaaacatgtcactgccatcaagcaaaaggcagggggaatcacaccctcggtcaccaaccaacttctgtcctcgatctcctcgaagacgattcaagccatggatcgacatcggagcccgacgacgatgcctctaagacagttgggtgaatttgtgtcatggcaatgttgccatgagacaaagacggtgtgggggacgaagaagcccccaaccaacaagagcagtactagcgtcagtgtcaggcatggatcctcgctcaaaaggaacgagcttcctgatgtcaccgatgccgacatcgtgagtgccttcacctacgacaccacaaatgaggcgctcgtgcacgagctcggtcgcggtcgaccaaaaaccaccatcgacctccttgacatcgccacctag

SEQ ID NO: 10284 - DNA, 690 bp, Zea mays
  Peptide Sequence Number=SeqID_52063
atgaggaattggactaaggaggagtttgttcacatactccgacgtcaaagcactgggtttgccagggggagctcaaagtaccgcggtgtgacactacacaagtgtggtcggtgggaagctcggatgggtcagcttctcggaaagaagtacatctaccttggtctatttgacagtgaaatcgaagcagcaagagcgtatgatagggcagccattcgcttcaatggaccggatgctgttaggaactttgattctgtttcctatgatggagatgtcccacttccacctgcaattgagaaagatgtggttgatggagacatccttgatctgaatttgaggatttcacaacctaacgtgcatgatctcagaagtgatggtaccctgactggttttggattaagttgtaattctcctgaagcttcaagctccattgtttctcaggaggcgcctatgcaggaagaggagaaccggtccgagccggcgtgtccccagccgttcccctcctgggcatggcaaacgcagggctcccgtgccccagttctccctgccaccactgcagcatcatcaggattctctaccgccgctgccaccggcgtggacgcggccacagccggccacagcgtgccgccgccgtctggtagcctccggcagttctcgggctaccaccagctccgcttccccccaaccgcctga

SEQ ID NO: 10285 - DNA, 693 bp, Zea mays
  Peptide Sequence Number=SeqID_52064
atggcggccgcgctcttctccagctcgctctcgccccgcttcctcgccctatcctccccgaagccggccgcgcccgcggccacagccttcctccccttcaggctgccgccgcgcgctgtctcggcgccgggtaggcgggtcttcgagcccgtcgccgtcgcggtgtcgtcggagtacaagacggagggcgcggagcaggagggggaggatggatccgaggagttctccgaggacctgaagctgttcgtcggcaacctaccgttcagcgtcgacagcgcgcagctcgcagggctcttcgagcaggccggctccgtcgagatggtcgaggcatttcaaggaagacaactgagggtgaactgcgggccaccgccacctagagatgaatccacaccaagagcaccaaggggtggtggtggcggcggcggcggcggctttgtcgattcagctaacaaggtctacgtggggaaccttgcgtggggcgttgacaactcgactctggagaacctgttcagtgagcaagggcaagtgcttgatgctaaggtcatctacgacagggatagcggcaggtcaagggggtttggtttcgtcacctatggctccgcccaagaggtcaacaatgccatatcaaacctcgatggcatcatgtataggaaaaacaatgtttctgagatatttaagaaggacaacaactaa

SEQ ID NO: 10286 - DNA, 390 bp, Zea mays
  Peptide Sequence Number=SeqID_52065
atgacacgggaggacttggggagtgaggaggggcttaataaataccccccaccccacgagaagccaaggatatctgttgttgcaagtgttgtctctgccacgtcattcactcgtcaaggtgccggcatcattcaagcggtcacgcagtatgtcaccctgcttgctgcaagcatccatacagagctctaccgcctgttgacaaagctcaccctcctcgtccgcctccacaccgccgcgcgccgccccctccgcgctctccacgtgcttcgccgcttccgccacgagttcgacgtcgaagtgtacaagtcacacccctcccacctccccgagaggtcggcgctgcagacaggggacaggcagtggttcttcttcagccagacgggggactag

SEQ ID NO: 10287 - DNA, 225 bp, Zea mays
  Peptide Sequence Number=SeqID_52066
atggcgggcgatcgggctggcggcgtccggggcgcgggcgaggggcctgggctgccgcccgtgggcggcggcgacgtcgccgggcttttttggaccgccgacgagcccagcttcgcggaggacgccgccgcgtgccgcgccatggtcgtcgcggccggcggcggccgcgacgcccggatgagcctgttccagttcgtcgcgttcctcgagaacggcctgtgctga

SEQ ID NO: 10288 - DNA, 465 bp, Zea mays
  Peptide Sequence Number=SeqID_52067
atgggtgacggcgcagtcagaggtgcccggtcgtcgcggccatcagcgcggtccgagggtcagcctgcctctgtcagcggatcagggcggccagtgttggggaggggagcgaggtcgcctggggcgacggccaccatgggcgcagcaggagaggaagacccaccggagccgctacaagcgctgcgagaaagcagaggcggcctgagccagcggggctgtcctcgcagcagagaagagcgtggcagcaagggagaccgatctgggggtgggcgtgcgggagctccatgggcgctggccggcgacgagggaggatgccgagaggaggacgaggtggccggcatcctgggtgtggacggcgactggggtcggaggcggcttagaagaggaaccgcgaggacgatatccaccgtgcgaacgcagctcggccaggcggtgtgggtggaggtcctcgcggggcgtatctga

SEQ ID NO: 10289 - DNA, 645 bp, Zea mays
  Peptide Sequence Number=SeqID_52068
atggcgatggagattccggcgcaggtgcgccgctactggctgccgatactcctattcaccgccggattcctgttccaggtcctcgtcctgccccgccacttcccgcccactcactacgacgtattgggagtggagaggttcgcgtctgtcgagcgggtcgtggaggcatacgagtcgctctccaaggagtggctatctgaaacgagtcaccaaccaactgttgatattataaagatccgttatgcatatgagctgttgacaaatccagttttaaagagggactatgatctttttggactggatgagcataaggtatattcaaaggggagtcctcggtgtgctcaatttattgagtactggaagcaaattgggtcaggcactcaattggatggaattgtcagaactgctatggtagaagttggtgattcacaagtggctggttatttcgccgaaaaacggttctcgaaacggccatttttccgtaatggtgtaccaacacttgttgcataccctgctaactgcaaaagtccatcctgttacatgagcattcccaagatgagattttatgccacaccatttcccatctgtgctgaagacatgtcatatttggtaggcgatctaaatagccatgttttctatgcctag

SEQ ID NO: 10290 - DNA, 345 bp, Zea mays
  Peptide Sequence Number=SeqID_52069
atggtcctgcattcttcactatcgaacgtcgtgcactacacctgcggcgcggtatttgccacggctgctgcgcagatcggggccacggcagtggcggggcacccaagtgcgcagtctgtgctcctgttcctcaccggcgccgggttgagctcaccaaatttctctgctgtcgccgtcgtgacttggtcgggatctggtcggttttgctacgacaccaggggtgagttcttctactgttcgtcatcatgtaggtttcgggtagtggtgttcggtccgtggtctcgggctcggacgacgagctctgccaagctcgctgccgcgactatggctcggctgcaggcgtaa

SEQ ID NO: 10291 - DNA, 147 bp, Zea mays
  Peptide Sequence Number=SeqID_52070
atggtagcagatgaggaagaatacaactgtaaagatcagtacgaacccaagaatagaagacatgttcgaaatcctaacatatatggcaagatagtagcagacgaggaagaatacaactataaagatgagttcgaacccaagtcttag

SEQ ID NO: 10292 - DNA, 123 bp, Zea mays
  Peptide Sequence Number=SeqID_52071
gctcgaatcaaaaagataatgcaagcagatgaggatgttggaaagattgcattagcggtgcctgttttagtctggctgatgtccgactctcagctcagcacttccagcattgcgatgtggtaa

SEQ ID NO: 10293 - DNA, 180 bp, Zea mays
  Peptide Sequence Number=SeqID_52072
atggcttcaaggctgccattgatggcgtccatcaatggggagagcttctgcgggcgctcggcctgtgcttcgcgatgctccctggcacacgcgccggggctcggggcaggagcgtcgcgggcaggcttcctgtgcgcggcactgcgcggtgtcacgaggtggcctctggtccggctctag

SEQ ID NO: 10294 - DNA, 582 bp, Zea mays
  Peptide Sequence Number=SeqID_52073
atggacatgggagccgtatggttcgctcctgggacggcggcaacatgtgtagctgcaactgacctagctgtactgcacgcgttggtgtgcagaggctgtacgagctggggcgcgcggcgcgtgatcgtgacggggacggggccgctggggtgcgtcccggccgagctggcgctgcacagccagaacggcgagtgcgcggcggagctgacgcgcgccgtgaacctcttcaacccgcagatggtggacatggtgcgcggcctcaaccgcgccatcggcgccgacgtcttcgtcaccgccaacacctaccgcatgaacttcgactacctcgcaaacccgcaggacttcgggttcacgaacgtgcaggtggcgtgctgcggccagggcccgtacaacgggatcgggctgtgcacggcggcgtcgaacgtgtgcgacaaccgcgacgtgttcgcgttctgggacgcgttccaccccacggagagggcaaaccgcatcatcgtcgcccagttcatgcacggcgacacggactacatgcaccccatgaacctcagcaccatcctcgccatggaccaggagggcctctag

SEQ ID NO: 10295 - DNA, 492 bp, Zea mays
  Peptide Sequence Number=SeqID_52074
atggttaaaaataaactaatcggccacaaatattctagaatgcagatcgcaatatctccttaccctgacagccgggttggattgagaaaagaaaagctttacgaagcgttctatgcgtcattcctcggtcctctggcctccagtagcagtagcaggatcaggatcagggcccgtttggggacggagatgctgatacggcggcaccgcggcagtaacttcaggcctggtcgtcccggggactccgtggagatcaatcctcggtgtcacaacacagccacccggccgaaggtgaaaaacaaaaactggatcccccaccctcacagagtgaggtcgtggtactggcacctcctcaaccaggtcagaattggagcacagggcggtggtggtgtatttttgggatggagggacaatgtacaatctcaggcagttcagagaatgttcaatagagaggatgaattggcagctgtgttaattgtgaagtggatcgagtag

SEQ ID NO: 10296 - DNA, 2151 bp, Zea mays
  Peptide Sequence Number=SeqID_52075
atgaaacatgtggagattgataggttctttatcaaggaaaagattgatgttggggctttgaagttgaacacgataaatcaaattaaaatcccaacaatttttttctcgaaagcacagggaaaatacgccttaaattatattaagaagagaaaagccctcttccaccactccaagaaggatgtgaggccaggttgtggagccagggcgtaccccttttggccaatcgatcagcagtccagcatctgttgtgtgccatcagccaaacgaaaaaacagcactttgaggcgcccaagattcccagattctcctgtagtgatcaaggctctgaagactgctggagtttatagctttgagaccttggcaactgctgatgcaagaaagatagaattggccacagggcgcaattatccatttgggaatcatatcaaagaatcaatgtcatcattaccacccaaaattgacatacacatagaggaaactggaaacagacttgggaaatcgaccattactgtaacactaactcgtctatcacaggcagttaaatccagtaaacgcaactgtgctgacatggttgtggcctcagaggaagacaatgtgatcctctttcatgagaatataaggactcatgaattccacagcccatattctgtaaaagtttttgtgccatgcccccaaaatgcacgggtgactctgaaggttgatctaatatttgaagaatatggtaatatcaccatccggacaactcgaacaagccgatctcaatctcacactgaacagaaccctctttccaaagaggtttatgtcatagaagatgatggcgctgctgtgagtgctgtcagtgctctcgagaaagctgatgatgcagtgggaaccataaaatttaacaacttggcttcactatcagcatacagcacaacttttgtactggatggttttggtccccagatggttttcttgggggatttgttactggatcctttgctctttgggatcaacctggaggtcccaagctttgatctactgcctgaagaagagtatggagctcctggaccagcagaggcagaatgcaaaggtgccacagacagcacgatttttgatcacatacgcaaaaagtccaaagacttccccactctgatgctatcaaaatccatggattgctcatatgaacctcttatactgaagaagatgaagatatcaagggaccagtttggagtaaagcatggttgtctgcatgcgggtgaggccaccacaatggattttgatcctgttgagcctagggtctctccaaccaatactgctgagaagttccgcgggatcctgggtagaagttcagaaaggagtcgcatgctgtttggaaaaatggatagcccgtttgagaagagcgagatgctgggcacgacgccagctgaaagttctcttcggttcgcgggtggaaaagacagctcactggagaagaacaagaccctgatcagaactccagctgaaaactctctccaaattgcagcacgtggaaaggagagcaaggtgagcaaggtgctgacaaatctagataaaagccctcttgggtttgcgggtggaaaggagagcaagatgagcaatgtaccgagcacttcagctgaaaactctctccagtttgcagctaggcgtgtcagatcatctgagaagagcaagatgctgacaactccatatgaaagctctcaagcgtttttgggcgaaaaggacagcccatcggagaaaagcaaaatccttattaatagtccagttgagtatcctttcaagaaaggaagtccaggtgaaaatcctttcaaaacatgtagtccagttgaaaactccctcaaatttgcagctcaacgtgacagcccatctgagaagaggaaatcctgcatcagcaatccccttccgcccttccagcaggctgttcaatgcacaaagcaagtaggagttgcaggtcaaccctttgatattaaggaatattgcaaggaaatattgaggagcagaaatgacagtcaaggaggcgatccttttgctggttacaagatgctctctgcggaggcgtggacggtccacggccaggggccggatggtccacgacctggtgcagggctcgggttcctgcatgacgtgccggacggccactcaagacgcctctaa

SEQ ID NO: 10297 - DNA, 501 bp, Zea mays
  Peptide Sequence Number=SeqID_52076
atgactaatgaaactagaaaacatcgttccaagtgggacacaaaagaaggatctgatgtagttgagatcagtgatgatgagtctcctgataagacaggtgttcaccgtaaaggtggcgatttacacacaaaacctgacacatccatgcaccacagaggcgctggacatgagaaggaacatgctgatgggtccaatgaagatatgaaggaaatgcaacataaggcaccctctgaaagatcacaacctcttagaatggttgatgagcgtgataataatgagtggagcaaggcaactggtaaccaaggcacaaacagatatgcagatgacagaagacgtggtgatggatgggggcgccttctgatccagatgcatggaggcagcgcagcctatttccatctccaagaggggtttggaacaaatcacgcaggaacaggagtcgttccagaagcagaagcagaagcagaagcagaaacagaagtaggagcagaagcaggagtatag

SEQ ID NO: 10298 - DNA, 609 bp, Zea mays
  Peptide Sequence Number=SeqID_52077
atggaggaggatccagcaggcggcgaagacctctcttccacggccgccagcggccactcctgctccggtgacgacggcgaggagagtggctggacgtcctacatcgactacttcatggagacgcagcagcgacgacgacgcaagcagggggacgtgagccgtgctgctgctggtgatggtccatccaccgacgacgatgctgggcgccgccgcagctctacggcggagtgcagtagtggcgctggagtgggagcctcgtcgtcatgcctggcgccaccggtgctcgtcgacccgccagtagtggtggtgtcgagaaggttgagcctcagggagggctggaggaggaagaaggtcctgcacgatgagtccttggaggataccgccacgtctcctatcagtagccctaagcggaagaacagtacaggcggtgatgtaaacaacggggcaaacacaagaacagacacggcggcggtcaaggaagacagtgcagcatatagcaacgacgatgaagctgaggaagaaataagcaggcctaatttggtcggcccggcctatgcctgcttctcgtgtatagctgatggcgatgccaacaaattcattggttgctag

SEQ ID NO: 10299 - DNA, 2325 bp, Zea mays
  Peptide Sequence Number=SeqID_52078
atggattttgagaagatcgtcgataacatgatggatgggcaccatcagctcgctatgatgcagcagcagcatcagaaccacggccagcagcaggcagccacgagcgagagcgacgcgcgaggcccgcgccacgacgagctgctgatggagagcaagtccggcagcgacaacatggagggaggcgcccggtcaggcggctccggcggtgaggagctgcaggaggaggatctcggcctgcggcagccggcccgcaagaagcgctaccaccgccacacccagcaccagatccaggagctcgaagcgttcttcaaggagtacccgcaccctgacgacaagcagaggaaggagctgagccgggagctgggcctggagcctctccaggtcaagttctggttccagaacaagcgtacccagatgaagacgcagcaggaacggcacgagaacatgcagctgcgggcggagaacgagaagctgcgcgccgagaacgcgcggtacaaggacgcgctcgccaacgcctcgtgcccgagctgcggcggcccggcggccacggccgtcatcggcgagatgtccttcgacgagcaccacctccgcgtcgagaacgcgcgcctccgcgacgaggtcgaccgcatctccaccatcgccgccaagtacgtcggcaagcccgctggcagcctgctgctgctgccccccaacaacctgtcaaacaacgtctccggcccggcgctttcctcccaccaccacctcctgcccggcggaacagacgtgttcggtggcctccaccgtcatgctggcggtgggtttgactttgacaaggggttggttgtcgagctcgccgtcgccgccatggaggagctggtgcggatggctctgctcggcgagccgctctggatccctgcccttgccgtagacggggctaccaccgagactctcaacgaggaagagtacgcccgcgggttcttccccaggggcgttggtcccaagctgccggagctccggtcggaagcgtcgcgggaggccgtcgtggtcatcatgaaccacgtcagcctcatcgagatgctcatggacgtgaaccagtggtcgacgctgttctcaagcatcgtgtcacgggctgccaccctcgaggtgctctccaccggcgtcgccggcaactacaatggcgcgctgcagctgatgacggcggagttccagatgccgtcgccgctggtgccgacacgtgagtgccagttcctgcgctactgcaagcagcacacggacggcagctgggcggtggtggacgtgtccgtcgagggccagctgctacgtaccggcagcagacaggggcgcgggcgcggtcgacgccggccctcaggctgcctgatccaggagatgccgaacggctactcgagggtgacgtgggtggagcacgcggaggcggacgacatgatggtgcacgacctgtaccgccccctagtctgctccggcctggcgttcggcgcgcggcggtgggcatcgacgctggagcggcagtgcgagcggctcgccagcgccatggccagcggcgtcgtcgtgccggcggcagcagcagggccagccgcgggcgtggtgacgtcgccggaggggcgccgcagcatgatgcggctggcggagcgcatggtggcgagcttctgcggcggcgtgacggcgtcgacgacgcaccagtggaccacgctgtcgggcagcggcgcggaggacgtgcgcgtgatgacgcgcaagagcgtggacgacccgggccggccgccgggcatcatcctcaacgccgccacctccttctggctccccgtggcccccgcgcgcgtcttcggcttcctccgggacgacgccacccgcagcgagtgggacatgctctccaacggcggcgacgtgcaggagatggcccacattgccaacggccgcgaccacggcaacgctgtctcgctgctccgcgtcgataacgccaactcgaaccagggcaacatgctgatcctgcaggagtgctgcacggacgcgacggggtcgtacgtgatctacgcgccggtggacgtggtggccatgaacgtggtgctcaacggcggggacccggactacgtggcgctgctgccgtcagggttcgccatcctccccgacggcggtggcggtggcggtggcgggtcgctcctcaccgtggcgttccagatcctggtcgactcggtgcccaccgccaagctgtccctgggctccgtcgccaccgtcaacagcctcatcgcctgcaccgtcgagcgcatcaaggctgccgtcgccgccgacaacgccggtgtggcggcggcggcggcggcgacgtcccaccattga

SEQ ID NO: 10300 - DNA, 1218 bp, Zea mays
  Peptide Sequence Number=SeqID_52079
atggagtccgatcgtgagaaacaacagtctcatggcaagaaacaaggtgaccatggtagcaagatgcatgattctgatggcaataaaaatgtgtcagatgaaaagagtcaagagtctggtggtaaggaacacaaatccaatataaagaaacatgaatcacgtagaaagagcgcggcgccggcccagccacgccggaagaagtcgccgcgtgaggtcagtgtccccgttgctgccgcctctaacccgaagcctaggccgctgccggtgcataacaaggagaatcaggcggaggggaaagtagcagaggagggggcagcaactgaggagggggagaagtaccgggcggaaccggaaatcttgccgctgccgccggccatggcgaagctgggcccggggcaggggctcgggtgcgaggcggcggaggggtcgctcgtgcccagccggaagcgggagtacaagccctgcggcaagcacactgaggggaagcgcccgctatatgctatcgggttcaacttcatggacgcgcgctactacgacgtcttcgccaccgtcggcggcaaccgcgtgacaacttaccgctgccttgagaatggtagtttcgctcttctacaagcttacgttgatgaggataaggatgagtcgttctatactctaagctgggctcgtgaccatgttgatggctcaccactgctggtggcagcaggaagcaatgggatcattcgggtcatcaattgtgctacagaaaagttagctaagagctttgttggccatggcgactcaataaatgagataagaactcaaccgttgaagccttcgctcatcatttctgcaagcaaggatgaatctgttaggctatggaatgtccatacagggatctgtatcttgatatttgctggagctggaggtcatcgcaatgaagtattgagtgttgacttccatcctagtgatattgaacgttttgcaagttgtggcatggacaacactgtgaaaatctggtcaatgaaagaattttggctatatgttgacaaatcatattcatggactgaccttccatcaaagtttccaacaaaatatgtccagtttccagtcttgattgctgcagtacactctaactatgttgattgtacaagatggcttggtgacttcatcctatcaaagagtgttgacaatgaaattgtgctttgggaaccgaagacaaaagaacagagtcctggggag

SEQ ID NO: 10301 - DNA, 294 bp, Zea mays
  Peptide Sequence Number=SeqID_52080
atgggtctggacccccatgtacgcaatccgaaccccctggaaggttcaggacctccacgtatacaaaacgggcccccaagtagggatccagacccccgtgaccgaccggacgtgacaacacaagcgactgcgcacgctcctatgcacgtcaccgtgccagcctacgctgcaacccataccagtgccttcacccatatgctgacaagacatgacgaaggagaggatggtcaggaaatccgcactgcgaccaagagaagatgtttgtccaccgacgacattagttgttcaatgtag

SEQ ID NO: 10302 - DNA, 213 bp, Zea mays
  Peptide Sequence Number=SeqID_52081
atgaagacgcaggagctgattcttgcgagccaagagaagtctctacggctggccccgaagattaatgccatgcgggggaagaaaagacctgattcatggctcttcattcagaggatcatcttttcggaagacggtctggtcagtgaatcgtcagctcaggtcaatggggcaagatcttctgacgcgggagtagctcgcctggaggcattataa

SEQ ID NO: 10303 - DNA, 423 bp, Zea mays
  Peptide Sequence Number=SeqID_52082
atggccatcactgcccgttcggcgcggcgcggtcgccccggcgtggccccctccctctccctcgtgcttgccctcgccccggcttgcccgctccttcccgcggcgtggcacgctcgccccagcccgcccggcgctcgtcatgcccccacgcgctcgccccctccccggctcgccaccccgtgcccgtggcaaggccttgagctcggccagcgcgtggcgccctggcatagcgctcggcgcggctgcttgctccctcgcgtctggcgcgatgcgcgcgaccccctgcgctcgtcgctggcgcgacgcgcgatgtcttggcgtggtggtgatgagaatgatggttttggtattgactatggtaatggcgaagatgaagctgtggaaggagacttccaggagttccaagattacgacgagttctag

SEQ ID NO: 10304 - DNA, 990 bp, Zea mays
  Peptide Sequence Number=SeqID_52083
atggaggcgcggctgccgccggggttccggttccacccgagggacgacgagctcgtgctcgactacctctgccgcaagctctccggcaaaggcggcggcggagcgtacggcggcatcgccatggtcgacgtcgacctcaacaagtgcgagccgtgggatcttccaggtattccgtcaggtccaactttgcgctaccgtatatatatcgatttgctgcagacgaggcgtgcgtgggcggccgcgagtggtacttcttcagcctgcacgaccgcaagtacgccacggggcagcggaccaaccgcgcccacgcgcaccgggtactggaaggccacgggcaaggaccgccccatctccgtctccggccgccgcggggccggcgacaccgccgcgctggtcgggatgcgcaagacgctggtgttctaccagggcagggcgccccgcgggagcaagaccgagtgggtcatgcacgagttccgcgtggacggcccgcccgttgccgaccgccccggctcacctctcctccagctccagctccaggaggattgggtcctgtgcagggtgttctacaagagccgaactgccagcacaagaccagcagcaggccccgacgaggccgggccgctgtccagccagctgatcggcggcctgccgatgccgcgaatggccgcccctgctgacgccgcctacctgtccttcgacgtcacacctgccgctggcggctactaccaccaccaagactccggccccgcggacgcgcgccaccacctgccgccgccgccggcgcagcctttcagcaggagtagcctgtccagcttgcgggacttgctcagcagcatggttgaaggcagcgacgccgccgccgccgttcgggagacggagctccacctgcagctggagggctggaccgaggcggcctacgcgcagcagcagggcggcgccatgccggcgcacccgcagcagacgtggagcccgtttctgagctcgggatga

SEQ ID NO: 10305 - DNA, 1485 bp, Zea mays
  Peptide Sequence Number=SeqID_52084
atggcaagccagccaagtacaagctctgcgacgcgttcagctgctggatctatccacataacagtgggggttaagcatggtaaccgaggtgacagtaaaagcgttagaaaaagggtaaagatcagacaaataatggaagagttacaagattgcaactcaagaagcctggttgcccttccgggctctttggttctgcgtctctttaggctgtttggccagcaggatcagagttcatggcagaagtacatactagcttactttctgttggtcaggaatgagtacttctctggggagtcgaagaaacactcagatgtgttctgtgatatttcagaattagatttctttctatatgctacagatttggatagtgaagaacttgaactgaaggagcagaaacccattacgaaggctcaatcaggaggtgattcaagtggcaacagatcgaatgattgctacttccccggccttcatgatgatctgtctcaagactgccttgcttgggcaagcagatcagactacccttccctttcttgtctgaacaaaagattcaatttgttaattaacagtggatatttgtacagactgcgaaggaaatatgacattgttgagcactgggtctatcttgcttgtagcttgatgccctgggaagcatttgatccttcacgaaagcgctggatgaggctaccgagaatgccatgcgacgagtgcttctcctgtgcagacaaggaatcacttgccgtcggaacacagctgcttgtcttcggccgtgaatatactggccttgctatttggatgtacaacttactgactcgcagttggtccccatgcactccaatgaatctgccccgctgcctttttgcctcgggaagctcaggtgagattgctattgttgctggtggatgtgataagaatggacaggtgctgaggtctgctgaattgtacaattcagagattgggcactgggagactatcccagacatgaacctgcccaggcggctctcttcaggtttcttcatggatggcaagttttatgtcattgggggcgtgtccagtcagagggattcattaacttgtggagaggaatataaccttgaaacaaggacctggagaagaatacttgatatgtaccctggtggaaccagtgcatctcaatcgcctcctcttgttgctgttgtgaataaccagctctacgccgctgaccagtcgacaaatgtggtcaagaagtatgacaaggcaaacaatgcctggaacatactgaagccattgcctgttagagctgactcatccaatggttggggtctagctttcaaagcttgtggcgatcgattgctggtaatcgggggccatagaggacctcgtggcgaggtaatattgctgcattcctggtgccctgaaggtggggaagatggtgctgactgggaggttctctcggtgaaggaacgtgcaggcgtcttcgtttacaactgtgcaataatggggtgctga

SEQ ID NO: 10306 - DNA, 897 bp, Zea mays
  Peptide Sequence Number=SeqID_52085
atggaccgaaggcggcggcttcctctgccgccgtcgacgaggttcgtcttgtgtgccctcgccggccgctcccccgtcaccgtctgtgctgctgactgtgcagtgatgcagagcagaacgatactgctcccacgaaacagcagtaatcggcagctcagaccgcccccgctcgccaaccagccctacctctccgcgccgctgcaaaccgtccgccatccccgcttgcccgaccgccggattctgcccccgccactaccaaacgcccgccgctaccgcacgcccgccgcagcgcacgctccgcgaatcccgcacgcccgccgtcgcgaatctcgtcgctaccgaaccgcccgcacgcccgccgccgcgaatcccgccgctaccgagccgcccgcctaccacccgcacgcccgggaaccctacggccgccgcgactgccgcatatccgcccccacaccgccagccatgccgcggaacacccgcctccctacgccgctaaacaactgtcgagatcgtcctctcccctcctttgccgccaccgcctcctggtcccgcacatcagcctcgcctccgcccgttgccacgaccgcatcaccaagaactctagcgcccccgaacccgatcgacgccatggtgtcaaaggccagcaagaggaaggccatcggagagatagttgaacagataccagaagaatctggtagaagctatttagaaatatgcgacgatcttgagaaaaaacctcccaagattatgtggaatcaatcatttgatctgcgctcccccatcgccaccagcgatgacgccacccctgctgcatccatgggtgccaggaaagatggtgatcagcttgctattggtaaagagactggaaggaggcttggcatgggcaccaatatgtga

SEQ ID NO: 10307 - DNA, 3585 bp, Zea mays
  Peptide Sequence Number=SeqID_52086
atggcatcctggaagaacacttgctcttactcttacactccagtgtcaaatgccgttgcgatgctagctctagcgttgctggtcctggcggcgccggcggcgtccgcagtccccgacgcgtccgcgtccgtgcacctcgaggcgctgctggcgttcaagaaggccgtcaccgccgaccccaacggcacgctgaccagctggacggtggggtccggcggcggcggcggcggcggccgctacccacagcactgcaactggaccggcgtggcctgcgacggcgccggccacgtcacgtccatcgagctggtggacaccgggctccggggcacgctgacgccgttcctgggcaacatatcgacgctccagctgctggacctcacgtcgaaccgcttcggcggcggcatcccgccgcagctcgggcgcctcgacgggctcgaggggctcgtcctcggcgccaacaacctcaccggcgccatccctccggagctcggcggcctcgggagcctccagttgctggacctcagcaacaacacgctccgcggaggcatcccgcgccgcctctgcaactgctcggcgatggcagggttgagcgtcttcaacaacgacctcaccggcgcagtccccgactgcatcggtgacctgaccaacctcaacgagctggtactctcgctcaacagtctcgacggcgagctgccgccgtccttcgcgaggctcacgcggctcgagacgttggacctcagcggcaaccagttctccggcccgatcccgccggggatcggcaacttctcgcgtctcaatatcgtccacatgttcgagaaccggttctccggcgccatcccgccggagattggccgctgcaagaacctgaccacgctcaacgtgtacagcaaccgcctcaccggcgcgattccaagcgagctcggggagctcgccagcctcaaggtgctgctcctgtacggcaacgcgctctcgtcggagattccccgctcgctcggccggtgcgcgtcgctggtttcgctccagctgtccatgaaccagctcaccgggtccatcccggccgagctcggagagctacggtcgcttcggaaactgatgctccacgccaacaggctcaccggagaggtgccggcgtcgctgatggatctcgtcaacctgacatacctgagtttcagctacaactctctctccggacctcttccggcgaacattggatcgctccagaatcttcaagtgctcgtcattcagaacaactcgctctccggccccattccggcgagcattgccaactgcacttcgctgtacaacgcgagcatggggttcaacgagttctccgggcctttgcctgccggccttggtcagctacagaacctacacttcctgtccttggcggacaacgacaagctgtccggcgacataccagaggaccttttcgactgcagcaacctcaggacgttaaccctggccgggaacagcttcaccggcagcttgagccctcgcgtcggcaggctcagcgagctcagcttgctgcagttgcagggtaacgctctgtccggggcgataccggaggagatgggcaacctgacgaagctcatcgccctgcagctcgggggaaacgggtttgtcgggcgcgtcccgaagagcatctccaacttgtcgtccctgcagaagctcacgctgcagcagaaccgcctagacggcgccctgcccgacgagatcttcggcctgcggcagctcactgtcctcagcgtcgcgtcgaacaggttcgtaggcccgatccccgacgccgtgtccaacctgcggtccctctccttcctcgacatgtcgaacaatgcgctgaacggcacggtacctgccgcggtgggaagcctcgaccatctcctcacgctggacctctcccacaaccgcctcgccggcgccatccccagcgcgctgatcgcgaaactgagcgccctgcagatgtacctcaacctgtcgaacaacgggttcacgggcccgataccgaccgagatcggcgccctcacgatggtccagtccatcgatctgtccaacaaccgcttatccggtggtgtcccgtcgacgctggcagggtgcaagaacctctactcgctcgacctctctgccaacaatctcaccggcgccctgcctgccggcctcttccctcacctcgacgtcctcacaagcctgaacatctccggcaacgagctagacggcgacatcccttcaaacatcggcgcactgaagaacatacagacgctggacgcgtcacggaacgcgttcacgggggccctaccgtcggcactggcgaacctgaccagtttgaggtcgctgaacctctcctggaaccaatttgagggtcccgtgccggactccggcgtgttctcgaacctgagcatgtcgagcctgcagggcaatgctggcctctgcggctggaagcttctcgctccctgccgccacggcggaaagaaggggttctcgaggacagggctcgcggtcctagtggtgctgctggtgctggccgtgctgttactactggtgcttgtgacgatcctctttctcggataccggaggtacaagaagaagggaggctctaccggtgcaaacagtttcgcggaggacttcgtcgtgccggagctgaggaagttcacttgcagcgagttggatgccgccaccagttcattcgacgaaggcaacgtcatcggtagcagcaacctgagcacggtctacaagggcgtgctcgtggagcccgacggcaaggtggtcgccgtgaagcggctcaacctagcgcagttcccggccaagtccgacaagtgcttcctcaccgagcttgcgactctgagccgcctgaggcacaagaacctggcgcgcgtagtcgggtacgcgtgcgagcccggcaagatcaaggctgtggtcctcgagttcatggacaacggcgacctcgacggcgcgatacacggcccggggagggacgcgcagcggtggacggtcccggagcggctgcgcgcgtgcgtctcggtggcgcacggactggcgtacctgcacaccgggtacgactttcccatcgtgcactgcgacgtcaagccgtcgaacgttctcctcgacagcgactgggaggcgcgcgtcagcgacttcggcactgcgaggatgctgggcgtccatctgacggacgccgccgcgcagtcggcgacgtcgtcggcgttcaggggcaccatcgggtacatggcgccagaattcgcgtacatgaggacggtctcggcgaaggtggacgtgttcagcttcggcgtcttgatgatggaactgttcaccaagcgacgcccgaccgggatgatcgaggaggagggcgtgccactgacactgcagcagtatgtggacaacgcgatctcgaggggcctcgacggggtgctcgacgtcctggaccccgacctgaaggtggtcaccgagggcgacctgtccacggtggcggacgtgctgagcctggccctgtcgtgcgccgcgtccgatccggcggaccggcctgacatggacagcgtgctttcagccttgctgaagatgagcaagcaatggcttattggtggggagaaggaataa

SEQ ID NO: 10308 - DNA, 282 bp, Zea mays
  Peptide Sequence Number=SeqID_52087
atgaccaccgtctccgggtgggatgacgagtccgtcctcctcaatgtgatggtcattgaggccaccctcgtctatgagtcccatcgcaagaggcgagcctccacctgctccaacgatgacgacaccagatccaacaccaaatacggagatacagttgacagatcggtgcttattctgacgcctctcctgcagcagggctcctctcttccacgctgcgaaggtgtacttagcaatggtgcaaatcatgcccatccacgagatcttggcctcaacgctgattga

SEQ ID NO: 10309 - DNA, 363 bp, Zea mays
  Peptide Sequence Number=SeqID_52088
atgacctcagggcggatgctgctgccaggaggccctcgcccatgcccccaactcgagaggcaaggacgggcagaaggccgtagagttggaggtcctcccccacggtgcgggggttgggtcccacacgtcatgcaagtcagcctagggcagaagaagccaaaccgccgcgcgcggtgcgtacaaccgcccagcagttacaagtggctctccacttttgcccagaccagcgggcgaaagggcgggcagccatgcaggcggcatgcaaccgcgccaagtgggcgcacctctccgacttccaacacgcctagcttggaggaccaggcccacacgtcattcaactggtgcgtcggttgctacgtgtga

SEQ ID NO: 10310 - DNA, 348 bp, Zea mays
  Peptide Sequence Number=SeqID_52089
atggaatccatgtgctccggcctccgagcgagcgcgctgcgcggctgcgggctacgctccgtggctggcgcctccgcgtctggcggtggcagcctggcgggcgagcacgttgtgggcaggtgcaagggtccagctgtcgcagctcgccaggagcagcacaacgccacgtggctcttgaagcagctggagcgtgacgtccgcgccacgctccagcaggacaaggaggcgcagcggctgggcaagtccgacgtacagaacgccgtggaccgggtgctcgcgctcgacgctgtcgctggcgagcggcggccggcggctggtctggagctggaggaggcaggtggcgggtag

SEQ ID NO: 10311 - DNA, 135 bp, Zea mays
  Peptide Sequence Number=SeqID_52090
atgccgtgcgcgttcgccgactactatatcaaggattgtggcgttatctcggtgccagaggtccttggccatggagaaaaactcgaccgcttgcaagagcacacgaaggctagatatcatgatgtccctatataa

SEQ ID NO: 10312 - DNA, 351 bp, Zea mays
  Peptide Sequence Number=SeqID_52091
atgcccaggcacttggtcggtgactctgtgggaaacttgtcactcaaagagctgaagcagctggagagccgccttgagaaagacatctctaagatcagggccaggaagagtgagctgctggctgccgagatcaattacatggccaaaagggagactgagcttcagaatgaccacatgaacctcaggaccaagagccaagctaatgtatggctgacatcaacctgcaggacccaagaacatgccctacaggccaccgaccagaagatcaacctgcaggacaccaagaacatgccctacaggccgctcaagtgccagtcctgctgcccaggattcttctgcccagaccactaa

SEQ ID NO: 10313 - DNA, 2082 bp, Zea mays
  Peptide Sequence Number=SeqID_52092
atgcaggtgccgggccgcctccggcgcgtcctccgggcgccgccacccagaatcctactctaccgcgcgatctcctccccgccgcccggtggcggcagcggggtggcggtgaagcaggtgacgcgggggaacatggaggaagccctggagaagctgcggggacgcgtgcgggaggccgcattcgtggggttggacctggagatgagcggcgtcacgagcgcgccctggagagacaccttcgagctcgaccgcgccgacgtgcgctacctcaaactccgcgactccgcggagcggttcgccgccctacagctcggcgtctgccctttccgatgggaccctgccaagtccgccttcgttgcccatccgcataacttctttatcttccctcgcaaggagctccctagtgattgttcatctcatgagtttctttgtcagacaacttcaatcgagttcctagcaaagtaccagtttgatttcaacacatgcttccgtgaaggaatatcttatctatccagagcacaagaggaagaagcgctacagaaatttaacatgttgcatcatggccgaacagttacatcttccactaattctgaagaggatggagacatgcctttaaagagtgcttctgatattcttttcacggaaaggatgaaaatgaacttcaaggaatggcgtgatgcgatagccagcaagccaatggttgacaaccatttgtcaggaaacattaaatgtggttcaggacaattccagacagttttcttcaaaatgcgccctgctattattcttaatggattctcatcacatcaattgaagttaattcaacaggttttgagaaaaaactttagggatcttatttttgtctgtacatttggtgaggatgacacatctgaaaagaaagtagtttattcagacactgatgaggacagaatattattaatgaaagatgtgcaggaagatctactaaaaaacagggaagaaagaatcaaatcagcaataggaatccgccatgtcatcgaccttctttcatcagaaaggaaattgattgttgggcatagttgtttcctagatattgcacaagtgtacagcaagtttgtacgtcctcttccatcatctatcaaggaatttgcgttaagtttccacaaatttttcccacacattgcagataccaggcatcttatgtctgtcaatcaagcagttcagaaactgatgaagcacaaaagcaaatcactatcttcagctttcttattgttgtgccctgcatcttattcatctgttgagaagccatccagtcattctcctgtgacaattgaagttgaaggagatgaaacgatgtcttctcgcttcatttctggtgccaagcatgaagctgggtacgatgcatacatgactggatgcatttttgcgcagttgtgtgcttatcttggcatacaatttgagcagttctcacctctggataacctagcaacgaacactaagctgcagaaacacatcaattttttgtcccctagctggaacagtggaacagtgcttgatttgagcactggcatggagacaccagatccaggttatacgagaaggtaccctgctgctgtgtatgataacattgttgtcatctggggattcctgtctaaggttagaccgaaggaaattaaggattgcatctgcaaagtatttggttcaggttcagttacaaccgtcttctcaattgattccactgctgcccttgtgcagttcaagaaacaagagtctgtaaacgatttcttggatttgaaggctgttttggagagggcagatagtgctatctcaattctacaccccctgtcaactatattggaaggaggccaaacacgagctgcaaagtatgatacctacagagacatatgcagctcttctgaatcaaaatatctctttgctgatcaagctgaagcagtctgtgcaacctcaaagaatcaactcatagaaaatgttgatggcaatcttatatctgatgttcttgatggagtcgcactcgcctctgtaaccgaggaagatggaataataccgagttcgaagaatcaaaacgttgctgaagctacatgttag

SEQ ID NO: 10314 - DNA, 312 bp, Zea mays
  Peptide Sequence Number=SeqID_52093
atggcggacacatttctagagtattcttctcctttccacttttttgagagttttaatgaaattcaatccatctcaagtttatcaagtgcactattatgttggtttgaggattgtttcgagatcaataagaagacacatgatgtggttgaaagttctccaaccggtgatgaatctgaagcacatggacaacaacaaggagataatgctaaagaagtagacgatcatgttactcaatctgaactcagggactcactgatgaagggtgttaaatatcctaacattgaggttgttaatgagactgtgaagcagtag

SEQ ID NO: 10315 - DNA, 1377 bp, Zea mays
  Peptide Sequence Number=SeqID_52094
atggacggggacgacgccggcggccagctccccgcagcccctgcttctccgcgcaccgaggaggcgatcgccgcggcccatgatgacgcccgcctcccacccaccccctccgacggcgaggactacgatgacctctacgttgccaccccagtggccgcaccgtcccccgcctccggaacccctgcccgcgcctgcgcccccagcgcgagcccgagccgcaaccaagacagataccaagcgacaccagccgccgcagcctaccccgtccgtgccgagacaccacatgacgccgcgcggtggcggcgcctccaactcgtcgtcgcccaggtgcacgtcgctgtacatcagcgagctccactggtggacgacggacgcggaagtggaggcccgctctcgcgctcgcgccggacggtgccgccgccgcgttatacggcctccacttctacaccgaaaagatcaccggcatgtcgcgcggcatctgccgcgccgatttcctccatccagccgcggccgccgcggcccgccaccgcgctccatggtcacgccttccacgggcgcaagtgcgtcgcctctctcgccccctctccctccctcaacctcctgggcgacgacctcgactcctacgccgaagccgcctggtcccggaaccctactggaggcctcggcaacggtggtcatggtgcgagcgatgccacggcgggtcgaggcaatgtggccctcgccttggctgatcggctgcctctggcgcgacctcagctgtccgtggttccccggccgacacctaggagcgttccgttcgctggtattggtgggtacggtgggttccagtcaatgagacagtacagtgcggggatgggcattgctatgatgccgtcggcattggcacaccgcgtgaacccaccgttcttggcgttgcaaggttcaggattttggtatgatcaggggatatctgggagcttttggggagcacagcaggaacggaatttcggaggttgtcaaatgccatggcagcagctaatggccccaaggcagcagcagcaccaacaggcgcagcagcagtttgggaattggaactacgggatgcaggggcgtggcttaagacatgaaagactaagtaatacgaggagcattggcaatgtgaggtatctggatagaaggcaggctaactgtgatgggggtgatcggtacaaagagaatgattgtgagaagggtcgtcatcgggagggcatcttggacaaggaaagggagcaggagaagcactggaatcagagggatagacatggtggcgacaatcagatggatagaagagtgcgtgcaaggtcaaggagccaatcaagggatgatagtgatgacgataatccaaggaggcggcgctaa

SEQ ID NO: 10316 - DNA, 144 bp, Zea mays
  Peptide Sequence Number=SeqID_52095
atggcaagtcgtggccttcaccatgatctgttttgctgcttccagcccagcactctagacaacctcttcctgaactcaaaccaagagcttcatgtacaccgtcatctacactgcaagaatgcagagaggggaattgtagtgtag

SEQ ID NO: 10317 - DNA, 327 bp, Zea mays
  Peptide Sequence Number=SeqID_52096
atgagtagtctcgctgtaagcatcttgctcatcgtctccttgctcactcttcacctccccatcgcatgtggtcgtcgccacgttgtcgtgctaaatccaagcgataatgggatgatgaacagcagaggaaagaaggttagttccaccgtgggagcggcggcggcggcggcgacgacgcggacggtgaagatgcgcgcggcagtcaagcacgggtacgcggtcgccgaggtgtacgagatgctgaggagggactacgcgtccaaggcgaggcgccgccggccgatcaacaacggcgccacgccgctgcaggtgaacaagaagccctag

SEQ ID NO: 10318 - DNA, 1947 bp, Zea mays
  Peptide Sequence Number=SeqID_52097
atgcggcgctcccagtggccgcgctcgttctggatctcggcgagcggcactcggaggcgaggtagggccggcgctctcggggcttgcgcggggggttcgcgaggcgggcgcggggggttcgcgggtcgggcgcggggcacgcgcagaggacgcagagaggaggcgggcggctgtcgggctttgcgcgaatcgcgcgggcgtgcggccgtgcggggcgtgctggcggggttttcggcgtgcgtggttggcgagctgtttgcggcggcgaggatcccggagggtgggcgagcagaggcgggggcgtgcggcgcggtggcgatgaaaacagaggtcgggcggacggggttggggacggtttgcggcggcgatgaatacggaggtcgggctgccggggttggcgggcggtttgcggggtttccgtgtagcgggggcgtggttatcgggggcgggggcggtctacacaccgcccttaattgttatactagctgtatgcccgtgattaagaatggtggaagcacggaggattttcttcctgctagcgcttgcagtgtgcttgaaggaagactggagaaggaacagaatgctgaaggtcgggtcgctgttagtaaagtgaaggagttggtagaaggcttctctagtggcagtgtctctcgagactttatcagtagcagggttgggcagatgatatttgatgaatctgaaatgttgttcatgagtggtccatatggagattctgttcaatacaagaatggtgaacccacaaaacagtttgctaagtgcgatggtgtgagaatcctctctaactcaagtatgatagttatacaccgagtctcagtctttattacatcatctgttggcattggaaacaagattccagcagcattactgtacaacgttcgtgatcactatggcaggcagaacaaagacagtgtgcaacttggaataactggactgacacaatggtggctcaatgcttttagttcaggaaacagtggtatggcagttcagtcacagccaaacattcaaaggaactccatgaacaaattaaggggattatcgtttagaatggtgtacgataaaggcaaggagaatatagtggctgatacattttcacaagggggttcacttatggctacgtatggtgaccttgctattcaaatagatatacctaaatctattgtgactaattcctatgctctggataagttgccaatagtgaccatccacagtccacatggggttgtgtactcagttcagtggggcaaagttaaaaggctccatcagttcgggaagcagtgtttagtttctgagcaagcgaaagaagagcaacaactctttggtgggttctggcatttgttttcagtgctacaggggatctggaagggcctaaagtcagattttcttgaggattttcccatacctgaaggctgtgattttattatgctgcttcagtgtgttgcccaggaccatctcccacggtggaaaaccttgccgccatttgttgaactgtggtaccgccctgataagaatgctagcaatccagaagcatcagaactcttcaaagaagttgcatattcttataacatcttgtcagatccagagaaacaaaggcagtatgataatgctgattttgaggcattcgaaaatgaaggagtggatatggaaattgaattgtccaatcttggaacttgtcgcagtccggaacgagaccgcgctcggttgagcaccacctggggcccagcgccccagcgtcctcgtgaccacctcggcgcggcatccgccctctgcagccccggtgtctccgcgaccgggctccggtgcatccggaacgcagctccacaggtcctcccgacgtactccgcctactcgggattcggctccatcaccgccgaggtcgtctacgcaaactacgccaactacgcgattgcagcgcgcgagcaggagtag

SEQ ID NO: 10319 - DNA, 387 bp, Zea mays
  Peptide Sequence Number=SeqID_52098
atggaagtagttctcgtcctcgttataatgcacctcaaggcacaccaactcatggcagttctgagcaacagaccccaatcagctcctcctcaagtgaacacactagcaggacaagttgctcctaatacatccacaagcaggtcatgcttcaaatgtggacagcccggtcattaccccaactattgtcccaacagagccacttacacctctccagctccgatgaagcaaggtcaggcctccgggggcaagagtcagcccttatctatcaatcgggggcaagtcaaccatgtggaagcagaagctgaacctggtgaacccgaaaacccggaagaggtgccagttgaaggagaagaagccaatgaagaaggcaacgagcaacaagattaa

SEQ ID NO: 10320 - DNA, 876 bp, Zea mays
  Peptide Sequence Number=SeqID_52099
atgtggcagctgtctagggcttaccgcatggcctccttctgtctcatcagcctggccgccgccgccgtctctccggcgaccggcgacatggctgataccgtcgacatgatgtggggcaacacacaggtgctctacgacagctcctccggccgccaaacggtgtcgctgtccctcgaccgctggacgacctctgcgttccgctccaagagcacgtacctcttcgggagattcgacgtcgacatcaagcttgtccccagggactcagctggcactgtcaccacagtatatatggtaacagaggggccatggcagtaccacgacgagatcgaccttgagttcctggggaacaccaccggtgagccatacaccttgcacactaacatctacgcaagagggaaaggtgaccgagaaatgcagtaccgtctttggttcgatcccactgaagacttcaacacctattcaatcatatggaacccgcatatgatcttaatacttgtcaatggcgtaccgttgcggcggatgaagaatcggatgagggacgacactcccttcccgctcttccagcctatgcggctgtacgccagcatctgggacgccgatgagtgggcgacccagggcgggcgcatcaaaaccgactggtcccatgggcccttcacagccttcttccggaactacaccgccaacgcttgtgtcccctacaacagggcctggatttgcggccagggttcaggcgacagcagttggttcaaccaggaactggacgaggagggccagcagaaactgagtgaggtgaatggtaggaacaagatatacgactactgcactgactccaggaggttccctagcggataccctccagaatgtgggtcacagtag

SEQ ID NO: 10321 - DNA, 432 bp, Zea mays
  Peptide Sequence Number=SeqID_52100
atggatttgggcgggtggaaggtgctcgagccaggctcgggcggcatcagacagaaacaggagcaggttacgaatgatgagattgtcgtcatttgcgggctcttgaagtcgggaggtagaactctcggcctactgtactgcgatgcattccaggagacctttgatgtcgccgtggattcggtggccctcggtgatggatggctctatcattgttcagagcaagattacaaccgctgcgagatgtcttgtgatttggcacgtgctccccgtcaggggctcagcctgccgcttcctgctcgaggacgtgctgaagctgccatagccattcctgctcttatccgagcatggcatgtacttaccaaagaggggtatccaagggaatcaaagctcatccggaagggcatggggtggaacaccgtccctatgccctag

SEQ ID NO: 10322 - DNA, 375 bp, Zea mays
  Peptide Sequence Number=SeqID_52101
atggacgggttcctagtgtcgagcaacgaggtgatacaccagtcgcttggcgagagagcgggagacggtgtcacaagaggcagcatcgaggacgcaggacacggcagagccgcatgtggttgcgcgggagacgacgaagccgcgcatggcagcatgggagactttggtgccacgtgtggtgtcgtaggagtcgacggtgctgcatgtgacagtgcgagagatgacagtgttgtgcgtggtagcgtgggagactctgggatcacgcgaggtagcatgggggcatcagggctgcgcatggcgcggtgggggcagaccaaccaggggaacaataggggaaccatagagtcagtcttaagaagggtgtcaaatgcatag

SEQ ID NO: 10323 - DNA, 363 bp, Zea mays
  Peptide Sequence Number=SeqID_52102
atgtcgtggctgtcggaggagcaacggagcctggcggagggacagctgttggaacggttggtgatgatggcgcttcctgtcgacgtggctggcctgtgcccttggttgggcgacgtggaggctcctccgaagccggggtcgagtctgtcttccatggccgtggccgagtccgagcccctgggtcgggcgaggcggaggtcgtcagcagaggccgagtccgagcccctgcgtcgggcgaggcggaggttgtcagcagaggccgagtccgagcccctgggtcgggcgaggcggaggtcgtcagcagaggccgagtccgagcccctgggtcgggcgaggcggagttcgtcgtcctccggggcttag

SEQ ID NO: 10324 - DNA, 759 bp, Zea mays
  Peptide Sequence Number=SeqID_52103
atggtgaaggtcgttaagtcgaccaagggcaggcaaaggatcgagatgaagtgcatccaaggcgaggaggcacgtcaggtatgcttctccaagcgccgtccaagcttattcaagaaggccagtgagctttccaccctatgcggcgcagaggtcgctgttgtcaccttctcccctggcggcaagtgcttctccttcggccacccctccacttcgtctgttactgaccgcttcctcgctgtgcacactctggacgatggccgcgccatggcaagtgggagccatggcagtcgtcgaggactgacagatacaagccatgcgatgaaccagcagctcatggagctgcaacggttcatggagaccgagaagaggaggaaggagagggcaatggaggccatggtgagggagagtggcgggcctgtgatgcaactgttgagtgcaaatgttggtgcgttagggatacgtgagttggaggagctgcggaaggagctttgtatggtggaaaacatggtcaaggagagggcccgcgaggtgctgcgcgatgccatgcaaacaagaaggctaccaccacaatctcatgtgcacatggcactgccctcgcaagttccgtttggtggccagagggcgggaaccatgtatgccaatttctccagtttgagcaataatggaccgcgtgaagggcttcacgtcaactctatgctccatggtttcggccttggtggccttggcgattattacttgaatggtcaatttggagggtga

SEQ ID NO: 10325 - DNA, 597 bp, Zea mays
  Peptide Sequence Number=SeqID_52104
ctcggaagccacaggcgcacagcggcggaccgcggaagtcacagacgtcgcgtggcccgcgtgggcgcgttagtgcgtggcccatggccggaaggctgggcgcctggccacctgggcacagcagccgagcagcggacgctggctcgccggctcggcacagaaggccagaaggttggggccgctgggcgtggcatagcgacggccggtggctcgacacagcggcggaccgcggacggtgtcagcgtgtggccggaaggctgggcacagcgggcagcggcgaaaggttcggtctccccttggcggttcggcggacgtcagctgtgttcgaaaaaaggggcggagccctgcttctctccgcgatcgttcctgttcattgtcggcccgttgcggcgcgagtgcgattcctgggccatccccttcgcttccgtctcccgttgcttcgtcttcgcgcggcccagagaggcaggcagtcggcgcggcatggatccgaagaatcgcaaccctaactgggaccggtggggggcgaaggatgccccacaggggtcccaatcttggggaaaaccggagtctcagctggcggttgaagactggatctag

SEQ ID NO: 10326 - DNA, 675 bp, Zea mays
  Peptide Sequence Number=SeqID_52105
atggtcgtcaccggagatctcggggtcttcccttccccgccgacgaacttccctctgcgcggactcaccctcctctataaaaggatggccgcggtggggaattgcgggactcgtcgggaatttgttgccgaacctagtggcgccgccgcggagccacctgtaccgtgggtgggggatgggattagatctggggaaggaatcaccatggtccgtctgatcggagatcaaaggccgcagctagatctcgccttaattaaatctgggcggtcgatcctggattgggcgaccagccgaagtgaccgtcgtcactccaccgctccacccgaccccagggctcggactcgggctaagacccggaagacggcgaactccgcttcgcccgaccccagggctcggactcgggctaagacccggaagacggcgaactccgctccgcccgaccccagggctcggactcgggctaagacccggaagacggcgaactccgctccgcccgaccccagggctcggactcgggctaaggcccggaagacggcgaactccgctccgcccgaccccagggctcggactcgggctaagacccggaagacgacgaaactccgcttcgcccgaccccagggctcggactccgccctggcctcggccgaacgacttccgcctcgcccgaccccctga

SEQ ID NO: 10327 - DNA, 2012 bp, Zea mays
  Peptide Sequence Number=SeqID_52106
atggctccccccgcgctcggatctcaggtggccgccgcagcctcggtgcccgtcggctcggactctctcgccaagggcgcggcgctcaagggtaacagcactctaaactttcggaccaaaccatgcatcgggatggcattagcgtggaaaaacaggacccagcaaccacggcgtctgaacaaggtactctgcatgtctgttcaacaagcaagcagaagcaaggttgctgtcgtgcccatcgagttggagaaggcaaaggagccaccgctccacctgtacaaaccaaaggagccttacacggccacgatcgtctctgtcgagaggcttgtaggacccagagctcctggcgaaacatgccacgttgtcattgatcatggcggcaatgttccgtactgggaaggacagagttacggcgtcattcctcctggagagaatccaaaaaaacctggatctcccaatactgttaggctctattcaattgcttctactaggtatggtgattcttttgatggaaagacagcaagcttatgtgttcgccgtgctgtttattatgatcctgaaactggagaggaagacccctcaaagagaggtgtctgcagtaacttcctgtgtggctcaaaaccaggggacaaagttcagatcacaggcccctcgggcaaaataatgcttcttcctgaggatgatccaaatgccactcatatcatgattgccacggggaccggtgttgctccctaccgtggctacctacgtcgcatgttcatggaagatgtcccaactttcaaatttggtggtctggcttggctcttccttggtgttgcgaactctgacagccttctctatgacgaagagttcacaaactaccttcagcagtatccagacaatttcaggtacgacaaagcgctaagcagggagcagaagaacaagagcggcgggaagatgtacgtgcaggacaagatcgaggagtacagcgacgaaatcttcagactgctagatggcggtgcgcacatctacttctgtggtttgaaggggatgatgccggggatccaggacacgctcaagaaggtggctgagcaaagaggcgagagctgggaccagaagctgtcacagctgaaaaagaacaagcagtggcacgtcgaggctgagccatccagctcagcaccccagggggctcccaccaccgccgacgcccgggccccacgagccacataccggggccacccgcattaccgcacgtcccattgtcccaaccaccccctaccggcgacttccttctccgcttctcctctgtgttcgtttggccgcaagtccgcaaggctccgattcaccaccacccgtcctcttcaactgccgccgttatcccctacccggcacgcgctgggcggggagcagctgaaccccaccccagccgcccgcaacggcgccaacaaggcgctgaagcggactctccggctcctgccaatggcgcggatccagcttgtaagtctctccgtgccgccgtgcttgtgcgttcggaattccgtggtggttcgttggggtttggggctgctcgaattggctggcgcggttcggagcggggatggtcgatgctgccatgcttacttagtggctgtagctggagacgcttcgcgggcgtcctccgccgctagggttttgccgttctggaggatcgaggtggacgggcggaagcggaaccttcattgctttgcttcaatgcgtgctctgcttttggtgcgggagggcgtggggttttgctgttttgggacggggaagagcaccgcccggggtgaattgctctgctcttctctggtcacctcgcagcgtccaatactccactgctgttggttgcttcggcacgcttttaccctggctgagtgggagaggaatggaatagttgtctatggtactgccgtactggcatactggtgttctgttcccgtcctgcaattgtcgctcttggctattacttcgcacccgtcaccagagttcctctactccgttagctctactggatg

SEQ ID NO: 10328 - DNA, 3030 bp, Zea mays
  Peptide Sequence Number=SeqID_52107
atgcctctggatgatgccaaccttgatggggacgacctcaaggacgatgccttcgtcaccgatgcgtcacacatccgcgattcccttctttgtcatgaggctaggacaaatacttcattgtttgtgtttcctcgtggtcatggtattgcttacctcatgctctatgtggatgacatcgtgttgactgctttctccacgccaatctgtagtcacatctatggagcaattcaatattttcacagcctctttggtgctctaacagattcaacattttctttcctacttgagcaatggaataataagctgcctcaaggttacatggtgaataaagcttatgttgaccatccgtttgaagaggatccatgccattgccattttagattcacaaatcttggtggtgagggtgagctagtcctcaaataccaatggtttctgggtggcaaaacaccaacagattttgttgctatccctggtgcatcgagcgaggtgtactggccaaaacgtgaggatgttggaagatgtttgaaagttgaatgcactccaatagtaaatggtgcagaattttcgcccgtttttgctgtatctttacctgtttctccagttaaagtgctcagaaagttcatctgcagttgcgcaacattttttgttcttgttagggagttttttttacaaggtactggatgtccaaaggtcatcaatctggcagtcagtggtgaagtagtggaaggaaacatactcagtggagttcctgaaattgcctggtgtggtggaacacctgggaaaggcgttgcaagttggttaaggcggaggtggaacggcaatgctgtagtaattgatggagctgaggggatggaatatcagttgacagtcaatgatatcaattcaagtttggtatttatgtacacccctgttacagacgagggtgtcaagggagagccgcaatgtacaatgacagattttgtgaaggctgcaacaccatcagtcagcaatgtgcatgttctgggagatattgttgaagataacattatcgtagggaaaggaaaatacttcggtggcagagagggactaagtaaaatccggtggtttagagagaaggaaaatggtgaatttcttcttgtgctatcagacagcatggagtatacactaaccaaggaggacgtggggagacacctcaaatttgtatatatccctgttaaccttgaaggtcaggagggtgaatctgcttgtgcgataacagatgtagttaagaaagcccctccaaaagtattcaatctaaagattgttggggaatctatggaaggaagcaagatatctgccagtgctactgttacaggtggaactgaagggtccagcagggttcaatggtacaaggcatcttcctctgaatttaagaatgaacatgagcttgaagcccttactccgtcacgagtttctaagacattccgcattcctcttggtgctgttggatattatatcgttgcaaagtttacacctgtggcacctgatggtgaagtcggtgaaccagcctatgctacatcagatggccttgtggaaacactaccacccagcctgaacttcttaacagtcactggtgaattctctgagggtcagatattaacagcatcatatgggtatatcggaggacatgaaggaaatagtttatacagctggcaccttcatgaggctgaagatgacgaaggcactccactttcagaggcaaccggtttgctacaatactgtgttacaaaggaagctgttggaaagtttgtttctttcaaatgcacccctgtcagagatgatgatattgttggtgaggcaagatcattcataggaaaggacagagttactccagtccaatctgatacctatttggagacacaatatttcagttgtagtgtagaagagaagactgcagggatgccgacattactttctcttgaagtaactggtgatgcaattgaaggaacaactatgtttgccagtaaaaggtattggggaggagaagaaggggacacaatgttccgctggatactgacaaattctgatggaaccgagaaagaaattgaaggagcaacaagttcatcatacaccttgaaatgcaatgacattggcttctacatatctgtcttgtgcaagcctgttagaaatgatggagttgatggttctttagtgtcgactgaagcgattggtcctattataccagggccaccaacatgtcaatctcttgaactagctggctctatggttgaaggtggccgtttgacctttcatgctgtgtatacaggaggtttgcggggaagttgcatccaagaatggttcagattacatgatgatgggcacaaggacaagttgactgctgatgaatgtctagaccttgatctagctgatatcgattgccggattgaacttatgtatacacctgtacgagaagacggagtgcacgggttaccaaggagtgttacttctgatacaatcttacctggggagcccaagggtgtcaatcttattctacctgagtgttttgaggacaatgaaatttctcccatcaaaacctatttcggtggcaaggaaggcactggcaaatatacatggtttcgaaataaagagaaacttgataacttggaatttgatctggttgctgaatcatcagaagttgttggagaaaccttaaaatataagccttcattgaatgatgttagttcctatctgattctttattgggttcctacacggcgtgatggaaaggttggtgatcctttgatggctatctctgatgatccggtcatggcagatccttacccttgcataacacttgcagcttttccatctgtttcggatgttcacttagagcagaaaagttcagatgtatattgtggactaggcatctattatggtggatatgagggattaagcttgtatagatggtacagggaatctagtgatggaactaggcttcacatagatggtgctgattcagtcacatacgaagtgacagatgctgattacagctgccgtctactgtttgggtaa

SEQ ID NO: 10329 - DNA, 348 bp, Zea mays
  Peptide Sequence Number=SeqID_52108
atggcggggaaaatgcagaagcaaaggatggctcatgaaatgaggatgtggaaatcatctcgcgtgatggacatgaggtctagacaacatgctgatgaaacacataacattactcggtttcatgaagatgaagcttatgtggaggataaaagctctgatgagggggaaaacttgcttggaagcaatcatgttagtgttacccctgcagtacatccatctcaaggcaaccctaccaatgcgtgttggagctcaaagatgtcaaatatgatcaagttaagccgacttgaggatttggagtccaaccccgagctcaaacagaccaaaaatggcaaaatggtgaaaaattaa

SEQ ID NO: 10330 - DNA, 285 bp, Zea mays
  Peptide Sequence Number=SeqID_52109
atggagctgggccggggaagtgaaatcagcccagtcctcggggtagtagcggcgtccacggggagggggtccgagggcttctatcagacgcctcaggcgatcaggcagttggaggttgcaacagccaagacgaggtggacggggaaagttctggtttacccggcggcggaatcggtcagcatgccgcggtcacggcgagatggagctgaccctgcccgagggcccagggacacggagacacttcttaagttgagacacttgaaatacattgtgcacatcggatag

SEQ ID NO: 10331 - DNA, 410 bp, Zea mays
  Peptide Sequence Number=SeqID_52110
atggccttgatctcacatgcatctgggatccagttggaatcactatacccttcaagtatagcaagtcgccccccccctctcgcgccgtgggccggcgtgaccgcggtccgcctcgccccccctcgcgccccccgctttgggcccaatagaggcccgcacgtaccgagctcgcgccgcctcgtccgctccagccccggaggagctcaccgtccctggacgctcacgccacaggacaaattcgccgcagcctgccgcgacagccatcggatcgcccgccccgagctcgcccccgccatggtcccggtcaacgacctcgatctccccggccatgaagacccaggccttgtcgcacccagcgactgtacccatgccacgtggaggagtacgatcgtgtactcgccagaagagag

SEQ ID NO: 10332 - DNA, 1842 bp, Zea mays
  Peptide Sequence Number=SeqID_52111
atgctcctcaagatcattgttgatcaacaccgctacaacagcagcatcgtctccacggtatccacacatgcgggaataaaacaccgtgacgccggtgtgatccaccagaaatggtggcatgtggggaaggggaacttggcaattgccaataggcagaccatgcgggaaaaggactttcctaagcagggaaggaacactgtgctccttgcctgcgtgggaagtgagacgtatcggtactatgatctacccttttgtgcaccagaacatccaaaggacaaaaaggaagctcttggcgaggttctaaatggcgaccggttggttgatgccccatacgagttgaacttcaaggaagacaggaactccaaggttctctgcaagaaagtgttgtcgaaggagcaagttgccaagctccgggatgcagtcgccaaggattactacttccagatgtactacgatgatttgccactatggggattcctcggtaaactggacaaggacaaggagcaaggagacgtgaaatacctactgttcaagcacatccacttcgacatcatgtacaacgacaaccgcgtcatagaaatcaatgtacagaccgatccaaatgtggccgtggatatcacggaggacaaggaagtgccgatagagttctcttattcggcgacatggaaaaagacagacattcctttcgagaaaagaatggataagtactccaagtcttcctctatgccacaacacctagagatccactggttttctataatcaactcgtgcgtcacagtgctcctcctgaccggtttcctggccaccatcttgatgcgtgttctcaagaacgacttcatcaagtattctcatgaagacgagtcccttgaagaccaagaggagactgggtggaagtacattcacggtgatgtattccgtttccccaaacagaagtccgtttttgcagcaattattggttctggaactcagcttctcgcccttgcgattttcatcttcctcctcgctcttgtcggcgtcttctacccatacaaccggggagctctcttcactgccctcgttgtcatctacgctctcacgtccggtatcgctggatacacagccacttctttctatctgcaactggagggcacaaactgggtcaggaatctggtattgactggctgcctattctgcggacctctcttcctgacgttctgcttcctgaacacagtcgcaatagcgtacagcgccacggcagccctgcctttcggcaccatcatcgtcatcatcctcatctgggcgctcgtgacctctcctctcctcgtgctgggcggcatagccgggaagaacagcgacactgagttccaagccccctgccgcacgaccaagtacccgagggagatcccccagctcccgtggtaccgcagcaccgtccctcagatggccatggcggggttcctcccgttcagcgcgatctacatcgagctgtactacatcttcgcgagcatctgggggcacaagatttacaccatctacagcatcctcttcatcgtgttcatcatcctcatcatcgtcacggccttcgtcacggtggcgctcacctacttccagctcgccgtcgaagaccaccagtggtggtggagatctgtcctgtgcggaggctcgacaggcatattcatattcttctactgcatctactactaccacgcgcggtcggacatgtcggggttcatgcagacgtccttcttcttcggctacatgacctgcgtgtgctacggcttcttcctcatgctgggaacggtcggcttccgcgcgtcgctcttcttcgtgcgccacatctaccgctccatcaagtgcgagtaa

SEQ ID NO: 10333 - DNA, 1188 bp, Zea mays
  Peptide Sequence Number=SeqID_52112
atggcagccgccgcgcccgcgccatatatttcttcccatatgtgcagccgcgatccctccgcgcacgggcggctccccacaaatcgcgcctcccccaccgcgcatgaccgactgaccctccgcgacgcccttccatggcagccggcgcgcccgcgccagaaatttcttaccatttgtgcagccgcgatccctccgcgcacgggcgactccttcccatctatgccgacgcatccatggcagccgtcgcgcccgcgccagatatttcttcccatttgtgcagccgcgcccgcaaatctcgcctccccacgacgcccttccatccatggcgtctcgacatcctccgctccgctcctagcccacaacatctttcttcccatcctctccctcaaagatctcgtccacttggtctcgcggctgccttccccaacagcgtctgctcaagggctccgggcgctgtcctcgggagagtaccgcgtctgcggggtgctcagcagcagggagctccactgctggcgttggcgcggcctcaacatctccagggacctccggttcgccgtcgccgccgtgggggacagcttcttcctcgacgtgcgcgcgtacgacaaggccttttgtggcgtgttcatggccaactactccctggtctgctgggccctggtctgctggggcgaacctgagttcaacgccaccaaccgcctcgtcttcggtcgcgtcttaccgggcccctgcctgcccatgtccttgtgccaatgcggcgtcttgccgggctccgccaacctctgcgacgatggccgctgcgtctgcgtcgactgcgcgttcgagctcaacgtcgccaggcccaacgcatcgctcgtccccgtgaagggcgacaggattcacgctggtcctgtggtgtcaccggcgccgcgccgctgcaggaacgaacaggatacctccggtggtgcgcagcagttgctgatgccgccgagggtcgggtccagcaggagtagggggcctggcagcgtggtggtggagaacttcacgctggacatgctccacgcctcgacggacgggttctccgacgacagccagatcgggaccggcagcttcgggtccgtgtaccgtggcaccctgcccgacgggcgcgaggtcgcgatcaagcacatcgaggactcggcaaaggcatcaagctcagtggcgtggcactga

SEQ ID NO: 10334 - DNA, 1146 bp, Zea mays
  Peptide Sequence Number=SeqID_52113
atggccagtccaaatcggggcgaaggcttgaacaaaccaaaggtcggccgccccccctcgacatcacaccagatgactgggaatcaccaaacgcctcaagtcgaaggcctctgggacccggagtcagaggactacgcatggctgcctaggacccaatatatacgattgtatatgtatgcatccattgttcttgtcttctttaataaagatgaagcacagcgaagtcgagccatcaccgtggccgactgtgctccgggcgacgcgaccccggcagtgaccgagatcagcgcgacggggaagcgcggcatcccggtgctcgttgcgccgctccacagccagcgagaatgtgagggaagcggagggcgccgcgccagtgcggaggagatgatgagcatggggttccagggcttcctcctcctggaggagaaggacgacgacgatccggtggcgcagcgcaagaagtggttcaaggagatgcgcgggtggctgatggtgctggccaccgtggcggcgtcggtgacctaccaggccggcctgaacccgcccggcgggttctggcaggacggcgaccgcgccggcaacccggtgctccgggacaggcactggtcgcggtacatgatcttctactacttgaacgccaccgcgttcgtgacgtcgctggtgatcatggtgctgctgatgaacgagcggttctaccacacggagaccaaggtggtggcgctcatgctcaccaccttcatcgacctcatcagcctcatcggcgcctacatcgccggcaccacgcgcttcttctcctcctgcatctacatcatcgtcatcgtctgcgttgcctttgccggggtcatctacttcggagaggtgatggctgaaatatgcaagttcaccgtgagaaagatgccctgcatgctccgacttacgcagaacaagtggttcccaatgccggcggaggtggtgaagggtctgcagcaggaggaggagcgcattagccagaagaggacgacggcggggaacgtttcactagagaatcgagctgtttcttcattcaaaaggatccctataaatataacggaaaagaaacaatttctagtttgctccgagactagtgctggtttgatgaccaatttctattcatgggggattgaatag

SEQ ID NO: 10335 - DNA, 192 bp, Zea mays
  Peptide Sequence Number=SeqID_52114
atggagtcggctagacgagccgacgatgctgagtcgccactgaaggcggggaaggcctgtgcaaaagagctagacgcggagctctcgcgtgagcgcagggcatccgaagagctccagaaaatgttctctgaggttcgagatgtccggaaggtgaagcttaatggtgtttggtttctagggatgaatttatag

SEQ ID NO: 10336 - DNA, 423 bp, Zea mays
  Peptide Sequence Number=SeqID_52115
atgcggccgcaccctccacgccccctcaggctagccactcccaaattgtctgaaacccttcaaagagatgaagttgcctctggtgcagcatcgatttctgaagtcatgagggcatctgcagagctaaatcaaaggggggatcttaaggatacaaccgagaagattttcgaatttttagaggaagagtatgagggccagccaattaagccaagctacattgagatgggccgatctattatgaaggctagtgatttggaggttatgaaggagctcgggatgattgccattgtcctgaagaaatatgaagtatacatgcatcacctgacacccaatcctattgtgaggctcagtgtatttatatggggtgtgcaaagccaaggtgttcgcatcgacgcctccatttccctttcaatcttagactaa

SEQ ID NO: 10337 - DNA, 330 bp, Zea mays
  Peptide Sequence Number=SeqID_52116
atggcgatcaacgacatcgatgtgtcagcacaacgatttccattcgacgaagacaatggcatgatgactttcaagcaccatgctgacagtggccaccagaagggcgaggacaaggtcgagcaagggaggacggggttcgacgggctcgacggcactcacggccggagcgagcttgagaacagcgagcagggaggtcgacacggctggcaaaacggccccaagggatgcgagcgcgttgaggcgacgaagtgcaagacagagataggagaggcaaggcgcttggacaaggacgccgaggcgaagagaggaaaacccgagcgtgaccaatga

SEQ ID NO: 10338 - DNA, 486 bp, Zea mays
  Peptide Sequence Number=SeqID_52117
atgtcaattagtgagtacagagacagattcctgcagctatctcgttatgtacccgaagacgtcggcactgatgtaaagaggcagtacaggatatggaagatcgaaaacgcaagatgggtggaccgtagactaagagcagtagctgcccccgcttctcaggcagttcatcccaacaatacaagcagggtcacccacaaggatatcagcaacagagccaacgttcgcaacaacaacaatttcagaggtagtaccctcagtaacagcggcaacagtaccgtcagcacaaccaactgggaggaaatcaataccagagacagagcaatcaggcaccttgccttcctgccccagcaaataatcagagcaaccaagcgatcccagcaccaagaggaggcagaggatgcttccattatgggtagcaaggccactgggcgaagcattgcccgaagaaaacaactcaacagtagtcagctcccaacgcaccagtaa

SEQ ID NO: 10339 - DNA, 1554 bp, Zea mays
  Peptide Sequence Number=SeqID_52118
atgggaattgtcgccgccgccgccgccacgactgccacgtcccgtctcctctaccgctacgcagccgctggcagcgaccgccataaccggcaccacctcaggtactacgcgagtccgtatcctctctcgctgcgctgcggctccggccggcgtgaggcggcggcccgggcgctcctgcccgaccgcgttaccccgttctcatacggcgtggatgaggacgcggatgaccacccgcgcgaggagtgcggtgtaatcggggtcgtgggcgacccagacgcgtcgtcgctgtgctatctggggctgcagaagctacagcaccgcggggaggagggggccgggatcgtcgccgtgggcggggacggcaagctcaagtccgtgaccgggctggggctcgtggccgacgtgttcgcggacccgtcccggctcgcctcgctcccgggccccgctgccatcgggcacgtcgccgtggcgcataacggaaacctcgtcaactaccaagctctgcggaacaaactcgaggccaggggatccatcttcaacacgtcctcggatacggaggtcattctccacctgattgcgacgtcgctgtcgcggcccctcctcgcccgggtctgcgatgcctgcgagcgccttgcgggggcctactcgctcctgttcctcacggccgacaagctcttcgccgtgcgcgacccacacgggttccgcccgctggtgatgggccgccgccggaacggcgccgtcgtcttcgcgtcggagacgtgcgcgctggacctcatcgacgccacctacgagcgcgaggtggagcctggggaggtggtcgtggtcgaccgccgcgacatgtcggtggcctcggcctgcctcgtcccgcaccgcccccgccgcgcctgcgtgttcgagcacatctacttctcgctgcccaactcggtggtgttctcgcacgccgtccacgagcgccgtaccgccttcgggcaggcgctggccgaggagtcccctgccccgggcgccgacgtcgtcatcccggtgcccgactcgggtttctacgccgcgctcgggttcgcacgcgcgtcggggctcgagttccagcagggtctcatccggtggcactacagcggccgcagcttcatccagccgacgcaggcgatccgggacctcgccgtgaagctgaagctcgcccccgtgcgcggcgtcatcaccggcaagagcgtcgtggtcgtggacgactccctggtgcgcggcaccacctcgagcaagatcgtgcggctgctccgcgacgccggcgcgcgggaggtgcacatgcggatcgcgagcccgcccgttgtgggctcctgcctctacggcatcgacactccgagcgagggcgagctcatctccaaccggatggaccttgatggcgtgcgccgggagatcggcagcgactccctcgccttcctctcgctggacaagctgcacagcatctacggcgaggagtcggggaactactgcgacgcgtgcttctcgcgcaagtaccctgtgctgcccacgctggccgatccggccgccgagctggaggattga

SEQ ID NO: 10340 - DNA, 159 bp, Zea mays
  Peptide Sequence Number=SeqID_52119
atgaggcatacattaaatgcatcccaaggcatcgaggccctcgagggtgtcaagggccctccaagtcctttcgaggcactcgggcgctctgcttcctttcaagtagagatggcaatgggtacccgcgatccgatacccgatgggtatttacttcattag

SEQ ID NO: 10341 - DNA, 489 bp, Zea mays
  Peptide Sequence Number=SeqID_52120
atggcggacggtgacgagcagggcgcgggcgcaggcgcggcagcagacggtgccgccgtcgacgcagcggtggaccaccgaggccggccggcctcccgcgccaccaccggcggctggaagtccgcttccttcatcataggcaagtcgcgtccgcggtccgatcgtccgtatccatgcagcgcataccgcatagcagaggttgatttgcaccgcgcgcgcttgggacgcgggagcggcggccggccggcgaacgctgcggtggagatcgcggagcgcttctccttctacggggtgtcggcgaacctcatcaccttcctgacggggccgctgggcgaaggggtcgcggcggcggcggcggccatcaacgcgtggaacggcacggcgcagctgctgccgctgctgggcgggacgctcgcggacaagtggctcggccgctaccgcaccatcgtgctcgcgtcggtcgtctacatcctcgtaagaaaaaaataa

SEQ ID NO: 10342 - DNA, 141 bp, Zea mays
  Peptide Sequence Number=SeqID_52121
atggataaagctggcctttggttgaagcaacttatagagaaccttcgtgtgtacgcgcaagcaatgaaggtgcaagcagaagtcgataatttcgacaaagaagaagatcttcgaacacaaatgcacatcgaagcaagttga

SEQ ID NO: 10343 - DNA, 825 bp, Zea mays
  Peptide Sequence Number=SeqID_52122
atggcgtgggcaaggcaaaagccggtttcagaagtgagctcaattttaggtagagctagcactgttgggcttgaaaaggcagtggaggttctggacacacttggcagtagcatgacaagttttaattctagccgtggttttgtgtcaagttctgcagcaaagggaaacaaaatatccatgctggcttttgagatggcaaatactatagttaaaggctctaatctgatgcattctttatcggagcttagcataaagcatctgaaggaggtggtgcttcattcagaacttcagaaggtgttcaacaccttatatccaaagattttgatgaactgctcaagatggcagctgccgacaaaaggagacagtctggatatactgaagcaggcagtgaaggtccagagtaagcatgttaaaagtatgaaaaagaaatcactttggtccaagaatttggaagaggtggtggtaaagcttgtagatattgtccacttcttacatttggagatatataacgccttcggtcatcctgacaaggaagagccacaagaacgtggcaaacaccataatagattgggaccagcaggccttgcgttgcattacgctagtatcatcaatcagattgacaatcttgtttctcaatcatgtgcaatgcctccaaatgcaagggatgcattatatcatagtttaccacctatcatcaaatctgctctccgctataaactacaatcgtttgaagtcaaggaagagcttacagcttctcaggtccaagcagaaatggagaagactttgtggtggcttgtccctttggctagtaacacaaataagtaa

SEQ ID NO: 10344 - DNA, 1290 bp, Zea mays
  Peptide Sequence Number=SeqID_52123
atggctgccgcttcctggtccgcgcccaccacctccttcgcgccggcgccggcgccgccatgggggcggtggaggaccaaggcggcgcctttacccatcaggacgcttccccgccgagtgcttctcaacgcagttggcgaatccgccatggttgctgctggtgacacattgcttggtttgtatgagaaagagcggttaggcctgttgcagtatgccgacgacgagtctaaagaagagaggtactgggaaaccttggatgctgatttgcgttactggaccagatccctgcgcccagtgcagtggtatcctggtcatattgcaaaaacagagaaagaattgaaggaacaattgaggctcatggatgtcgtcatagagatccgtgatgctaggattcccttgtccaccagccatcctaagatggactcatggctaggcaaccggaaaaggatcatagtcttgaatcgcaaggacatgatctcaactgaggatatgaatgcatgggctacttactttggtaatcagggcatcaaagttgttttctccaatggccagctgggtatgggtacaatgaaattaggtaggatggcgaaatcagtagcatctgttgcgaacacaaagagaaaggagaagggattgcttcctcgtccggttcgagctggaatagttggatatccaaatgttggcaaatcttccttgattaatcgcttgctaaaacgaagaatgtgcccagcagcacctaggccaggtgtcacaagagagctgaagtgggttcgttttggaacagacctagagttgttagattcacctggaattttacctatgcgaattagtgaccagacatctgcaatcaagctcgctatatgtgatgatattggagaaaggtcatacgattttgctgatgtggcggcgattcttgtgcagatgttgataagacatcctgcagtaggttctgaagcatttcgaagacgatataagattgatgtagatattacaaacgatatgtcatttttacaacattttgcctattctattcggtacaggatatacgataccagcttgcttctcatactgttagcttctcatactgttagcttctcaccagagttcaacggccggccttgctactcatatctgatactcagtaactgtttatatcgcggctggggtttcaagactgcggatgaccacattcaagtttacgttccgaatcattgtacagatgctaaccctgtatttgccaactctccaacccaaccgaagccatggtatgccctgatcataggtcattag

SEQ ID NO: 10345 - DNA, 183 bp, Zea mays
  Peptide Sequence Number=SeqID_52124
atggactcgcccgtgggcgtcttcgctgtgagccttcgatctcgcatgacaacattttttatgtatatgccgaggtggacttcgcccttcaaagaccgagcccacacatctgccttcgtttccctggctgcataccttgcattagaaaatcttgtcggttgtaatacacgtgctttggcctga

SEQ ID NO: 10346 - DNA, 372 bp, Zea mays
  Peptide Sequence Number=SeqID_52125
atggcgcccaagcggaagaaccaaaattctgctacagtggtcattcctcccattgaccccaacagccagttgcctttcgcaggggactccaagctaaacttcgcaccttcgggaattctcagaggcgcttcgtataattcaccggactgtccggtgtaccaccagacagtgtccggtgctccagaggagagcgactctgaactcgccagcttcgggaatccgcttcgctataattcaccggacatgtccgaggaacagtgcacgcgcgggtggcacaccagacagtctacagtacttgtccggtgcaccactggacaggcaggcgggcccacaagtcagagctccaacggtcggaacccaacggcctggtga

SEQ ID NO: 10347 - DNA, 246 bp, Zea mays
  Peptide Sequence Number=SeqID_52126
atgggcaagagcaagaaaggcggaagttcatcgcaccactccggtgacaagcggaagcgagagccgagtcccccctctgaggacttcggtgactccgagtactcggaggaggagttctcctccaagtccgaggggtcgccaggcctacgcctctcccccgataactgccgagctgttctggaccatgtgaacgttttagaagtaacggccgagttatattgggccacgtcggcgcttcagaggtaa

SEQ ID NO: 10348 - DNA, 375 bp, Zea mays
  Peptide Sequence Number=SeqID_52127
atgcacctcctttgcccactggccactacagccctagaactggacccgttcattggcgacgccaagacacgtaccgtcgacgtgcgcctacgtgccctgccattgctcgctgtctgggtgccccttcgtggccaccctgccgaggctccacaaccacctcgttgtcgaccactcatggcccctgaacactcttcccgccttcgggaatctgtttcctctctatgtcccagcgttggatctgcagtaccgctgcctcgtggtcgtggacagggacaagcactgcctgttcatgctgtccgtgcacctgtgcagccagctgcatcgtatcggtattgtgtgttagaggctggcctgcatttcacgtacatgctctag

SEQ ID NO: 10349 - DNA, 423 bp, Zea mays
  Peptide Sequence Number=SeqID_52128
atgagtctcgcttgtcttgtatgccatggcatgagcagcccctcgcactctcttagaagctactcggtgtcaagctcagaggaggaaagccggtgtggagctgttgttgcctgcttagctcgaagagtaacaccagctggaacctctactagcgttgggacatcgaaagtgaccccctttccacccgtggtgagtgatcaagttggtacagagggcgctcctcgacttcaacgcagccgtgctgtgtccagggaccttgttagagactggaacttcgacgaagtagaactggtttatggatcaattgttggttctcctattgatcgtaacccttcacatttatttgggaggggtctggactcgtttctagacgaagcccagcaaaaatacgcgagatattcaaagaatcccacaagatattag

SEQ ID NO: 10350 - DNA, 534 bp, Zea mays
  Peptide Sequence Number=SeqID_52129
atgaaagaacaaagatcaagcaactaccgccaacaactaactgacctacttaagttgcctatccatgtcgtccttctcgtcgacctctgtgagcagcgccgggggcatgcccaacagctccagcgaggggtccgtgcatccaacaatggacgtgcgttgcttgctccctcatcgggctccagatgtccaggaaggggactccctcgtgctccccatggcgcgaatgcaggaagccatagtcaggcatgcacaatcatgaggaagaagacatcaggaacagggcgagaagtagagaacccaagcatcactaccggaatcaacctcttcgccgagtgccggaagcactcggcgaaagccttaaaaacactcggcaaaggctttgccgagtgtaacactcggcaaagaaggctcggcaaacagtgcatcggcaaagacttctttgccgagtactttttctcgggcactcggaaaagatctttgccgagtgtcagggtgcactcggcaaagaaacgcgaccgttacggcgccggttga

SEQ ID NO: 10351 - DNA, 192 bp, Zea mays
  Peptide Sequence Number=SeqID_52130
atgcccaaaccggacaaaacattccccctccttatcctccaggtgctccccagccttcataacccctggggttggactacaacagtaaggcgggacccaaatagctggaatgatgtggtattctggtccgagtgggctgtgatgtacctccaatttgaaggaaatgaaagtacaagcgtgacgcaaaagtga

SEQ ID NO: 10352 - DNA, 651 bp, Zea mays
  Peptide Sequence Number=SeqID_52131
atgcggaggaatctcggcttctgttacgcgaagtccgcggggaggaaggcttccgccagggcggccccacgcgccagcgagagctcgacccatgtcgctgttccgtggagcgctgaccgcatggcccctcctgtcagcgatcctgtgaggtacaatgcctacggaacgaggtcgttcgcggaccagctggttctagaagccatggacccatcatcatccatggagaacccgtgccatcatcgcctcccgccgtctcaaagctcgtcgttcgctctctcgagctacccgcagctcggggcgcggctgagcgacctgggccagcagcagcagggcacggtgagctcgctgccgaagacggagaggcagccgcagccgcagcagcagccgctctccttcctagggaggagcgacttggcggccatggactccgccgcgtccgcgaagcaggaggaggaggagtgccagacgctgcggcccttcttcgacgacgagtggcccagggcgagggcctcctcctggccgggcatccctggcgagaacgcctcgttcccgtcggcaacggcccagttgtccatgtccatgtccacacccatcgcgtgctcggagttccccgtggcgtggtcagctcccaggcgccggtcgaatggttaa

SEQ ID NO: 10353 - DNA, 141 bp, Zea mays
  Peptide Sequence Number=SeqID_52132
atgaaggcggtaccaattggacctttgaggcgaccctgtgacggtgatatatggcataagaccatggatgaaagaggctatggcagtctggtatatgggcttgtgatgatgaaagatgactcagagaagggaccaagctag

SEQ ID NO: 10354 - DNA, 489 bp, Zea mays
  Peptide Sequence Number=SeqID_52133
atggacatatcgaagcatgcaccaatgcataaggaaaaacgaggtggaattactgttccgaaacttagtgatagccatatactgacaagcaaaggtgccgatggggcgattgggtcatgtcttacaaccaaacaagttttcgatcttggaactgagtgtggaatatcttatagagaattgaaaacgaaagagagtggcaaagacaaccacatccaggcaagaatgtgttacctgattcggaatggatcgttcgatggatgcaagaagctgaaccaatttttgaagactgtgagagaaaaaaatgagttgacgcttccacaattcccaattgctaagtataaggtaatgatcaaatcaagcaaagtgaagaaagagaaggaatttgaggtagaagaaaaccccgaagaagatccggaggaagacccaaaagaagagtcaaaaggagaaccaagcaaagaagataaagcctcagatcctgattttgactaa

SEQ ID NO: 10355 - DNA, 237 bp, Zea mays
  Peptide Sequence Number=SeqID_52134
atgggtatggttaaggaatcacaaaggtttagagtgacgaacatgagtaatgtatcaaagttgcggaaagtaagacatgacttcagagtcatgggtgacatctatggtacaaagaatggtattttgggaaggttgaatgtgaaacgatgccaagactacgcccaaggagtagcgtatcagattattatgcatacagagcaagctttgatggcgttattgagtctgtttaccacatag

SEQ ID NO: 10356 - DNA, 1893 bp, Zea mays
  Peptide Sequence Number=SeqID_52135
atggaaagcgggtttcttgataaagtggaggacaatgcggctgttcgaacttggtctgaaacaacgcagcaagaaaaaggtgatagtttggctaatgggcatgtatcggagttatgggactttacgcatatcaatgcaactcaaaacaatttgcaagaattgaaggaaatctggggtcaatggagtgatgaggttagacagctcttttatgataattatggggatttgccttatttgcttgatgtgaaggtagataagcgtttgtttcaagccctcgcccaattctggaatcctgcttacagttgctttacattcgggaaggtcgatttagtgcctacgatagaggagtatatggctttactccattgttcaaagtttcaagtggacagggtctattcgagagcggtaaatgtgccaactttttccaagaagctgatgagtgtaactggaatgagcgagcagtgggttgtcacacgaattaagcaaaagggggacagtaagtgtgttccttggagaggcttgaaagatacaatcctcacacacccagatgtcaggaaaaggttagatgtttttgctttaagtatatatggcttggttgtcttccctaaagccttggggtatgtggatgaaacagtcactgatttattcgaccagctcgataagaaagttacgccgattccagcaattttggtagaaactttcaggtcattgagtgcatgccgaaaaacaggtgaaggtagatttattggatgtgcacagcttctactcgcgtggtttcacagtcacttttggaaggtggataaagtgtcgtatcgggttttttataaaaattattcaccactaaaggagatagtcgctacgcccaggagagacgacatttcgaaggagaagtggatagcaattcttcaaaatcttcgagaagaggacattgagtggagagctccttggttacttccagatgagatcctgtataggtgtggtagttttgattgggttcctttgctaggggtttggggagctactggatacaccccattattggtgctaaggcaatataggtcaaggcaatttatacctgcgacccaagggatagctgattgtgaatattcatacaaggatgatggttatagaaagaaggattttgagaggaagaatgcggacttggagaaaaggatagagcaaatggaggcggaaaagatgaacttgagattggacatagacgttcagaagcttgagaatgagaggttgaagaaagagaaaaacaaggttgatgaggaaataggcagtctaaagacggattataaaaagttgcgattgtcaataagaactgctgggctgggaaagacgtcagaacagtggcgagtagaaatccaagaagaaaaaggtaaggccaatagatgggaacagaaattccaggagatgcaaagacgaaacgaggctttagaaaagagtttattagaaagccagaaagaaaaaggcgagttgaaggatagggtgattgtattggaaagatctcttcgtcagtatcgaagccgaaattctacgatagagttaaaagctagcttgagcaagattgaagaaatggagaaaagaattgaagagttagagacggagctgcaaaattgtgagatccagatcaagcacttgaaagtgaacgagagtcatagtaatgaacagcttcaccattttcagaatcaagttagaagcagagatcatcttatcaagaaagctgtagtccagattcgagaagtagctgaccatatacagactttagcagtacaagctgacacgctgagtgtgaaatatgaatcagaatcaaaacgagggcaagaattggctttgttactgagaaagattagagttctgggtactagggcaaagtcgtatttgtaa

SEQ ID NO: 10357 - DNA, 369 bp, Zea mays
  Peptide Sequence Number=SeqID_52136
atgtctcgcaaaagaactagatcatccaagacttctacggaaaatccggttgtgattcaagatgaggaagcaagggaaagatttgattccatcttcaggaatcaacccatgatgctagaaaaagctttcaatttggagagcaattacaagatggttatgccattgtcaattcgaaagacaattaatgctttaaattgggagcaattttataatgcacattcaatgtcaaataaagatttagtgcgagagttctatgccaacttgaccacactaaatgctaatgaagttcttattcataagaagaagtacaaggcaagaggagaatgtgggatcgagtgcgacaaagaagggaaaaggaaaaagacatga

SEQ ID NO: 10358 - DNA, 213 bp, Zea mays
  Peptide Sequence Number=SeqID_52137
atggagaacaacataaatgatgaacaatccaaatggcaaacaaacatggtggatagtccaagcatgggtcattttgcacacgatcaaaatatgagaaggatgttcatatccccaagagagatgttgcaaaagttgaggatagagaaggagggagttgttaaggagaaaggtgacatgttgaagatgaaggaggaagagcttgcgactaagtga

SEQ ID NO: 10359 - DNA, 612 bp, Zea mays
  Peptide Sequence Number=SeqID_52138
atggtggcggataatgaatcgggtgatagcattgagagtgaagttcgaaccagctctggcatgtttcttcagaaagctcaggatgaagtagttgctgatatcgaagctaggattgctgcatggaccttccttccagcagagaatgggaagtctatgcaaatactacattacgagaatggtcaaaagtatgagccacatttcgattattttcatgacaaggctaatcaagagctgggcggtcactgtatagccactgtactgatgtatttgtctgatgttgagagtggtgaggaaactgtgtttccaaatgcagagtctgccttctgtagggaaaactttctcagccaaaggatgatagctggtcagattgtgcaaaaaatggatatgcagatccatgtcaggtcattcgatacggcaaagaggcagtctgtaaatagagattgtgttgatgagaacgagaattgtgctaactgggcttcagcgggtgagtgtgaaaagaaccctagttacatgattggttccgaagactattacggatattgtaggaagagttgtaagatcaagaacccgaagataaacgaggaaaggagaaaattactgattagtcactaa

SEQ ID NO: 10360 - DNA, 780 bp, Zea mays
  Peptide Sequence Number=SeqID_52139
atgcaatcctcccctaactgcagtggcttccctggtattttaccaaatactatcatactaatttacataaaactcggagtccggataacgaagctgtacatagaccaggggaaagctgatgatcaactgaattggagagttcgtcaaagcgagaagctaactaacttgaaagagaagcttcgccgaagcaaggaacaattagctcaaggtaaggttaagattgagagagtgtctcatgagttaaaggttaagtatggagtgcttaaatcagctcgtggcacgttggaaaagaatcgtgtggaaaagctcgaaaagttctatcccaatcttatttgcacacaaagcctggggcatgtacatttagatgaggagcgaagagatggatctagtggtcagtatgatctgatttgcaatgcacgcttgccaagggggcttgatccacactctgttccctcagaagagcttgctgcctcgttaggatacatggtacagcttctaaatcttgttgttcataatttggctgctcctgctcttcataactcaggttttgcgtcattcaggtttcctgtgacaatcttcaagaggggtcttgctcccgaatatggcaacgggattcttattgggatgcacgtccttcttctcgaagcaatgaatatccgctttttataccacgccaaaattactgctccactagtggggataattcatggacagataaaagctctagtcagagtgcaaatttgcgcaatcgacatgacctgccacatagtcgtgtggtag

SEQ ID NO: 10361 - DNA, 177 bp, Zea mays
  Peptide Sequence Number=SeqID_52140
atgaaggtgagtgtagcatctgatttgagttggggacactacagagctcagatggctgttgcaactgatataatagaagcccttgagggctttgtaaatcaggggattacttcaaccgtctccgagctctcagttcactctgagttgcccatccacgttaaccaccaatatatctag

SEQ ID NO: 10362 - DNA, 168 bp, Zea mays
  Peptide Sequence Number=SeqID_52141
atgaagcatcttgtggttaaactgactctcagggagagggtctcattgttcgtgggaaacaagatcggaatgctgatgatgatcgtggaaggacacaggaatgaaatcctcgcggccgaattgagtgaagattcaagggaccaatccaagagattttgggcaacatag

SEQ ID NO: 10363 - DNA, 2400 bp, Zea mays
  Peptide Sequence Number=SeqID_52142
atggagcgaggacggggtggtagtggcggtcgcggtggcggccgcacgtttcagaggaacaatgcgggggaggagtggcccaacctcgtcggcgtggtgctgtcgtggagcctagcggatgtcatgaacaaggacctcttcaaggacaagttcaaattgctctcaacgctacgagcctacgatgctaaatcgctagaaacaccagtgcccattttcagtttgtcacacttgtgtgtctcccttacagcacggttctttagcatggtcaagcagataccgtccacgttccccaacctcaagagctacctggagtgctacacctctccattgctggaggagctgagagctgagatgtcgtccagcctggaatccctgtcaaccgtgccttctgtcaggatctcacggatagaagaaaagagagacaaacacgaaatttatctggcttctgattgccaggttgctaagccacacaatcgccctgaatgctacactccaagtgtcggtgatgtaattctcttgtccgatgtgaagccgggccacatttctgatactactcgcaacggaaggccgtaccgagttgcctttgtcacagatgcggatggaggggatgaatacgacgactcaccaccggctaagtatggcatcgtagcgtcaggcaaaatcgatgccgccgatgacgaacgccaagatggtaaaagtacctcactttttgctgcttgtctgctcaacattgtgacatacatccggatatggcgttgccttgattatgaagcactcagaacaaaccgaggccttatagagaagatggtaaactatcagccgatttcatctacttcagagaacagcacggaggatgctggtccaactgacagcgtggagatatggaccaagttgtctgcaatggaacttaacacttctcagaacgatgctgtcttgaactgcatttccaaaatgcactccaagagcagcacatttacccttatctggggtcctcctggcacagggaagacaaaaacaatcagtgtgctgctttggttaatgagagaaatgaagcatggtacgctcgtatgcgcaccaacaaaccttgccatcaaacaggttgcttcacgtttcttgaagctggtccaagagcactctggcgacacaaggtgcttgggagatgtcctattgattggcaacaaagagcgcatgtgtgttgatggtgacctcaaacaaatatatttatatgaccgtgtaaggaggctttttggctgctttgcaccattgaccggatggaaacatcacctatcttccctgtctgattttcttgagaatggctactcacagtacctccaacatctacaagacagtcaggaaggtgatacgccttcctttttctcttacgccagaaaaagatttgccgttatttatatggagctcagaagatgtttcaatgatttgttgttacatgtcccaaaatccagtattctggaagtgaattacaacagtatccttttacttcttgaaatgcttgaagagttcaaccacatgattcagtgcagctccacaaaaataaccgctaacaaaaaggtagagtttcttgtggttgatgaggctgcccagctgaaagaatgtgaaacactgatccctttgcgtctgtggaccttaaagcatgctgttctaattggtgatgagtgccaattaccagcaacagtcaaaagcaaggtttgcactgatgcattatttggaagaagcctctttgaaaggttgagttcacttggacacgaaaagcatctacttaatatgcaatacagaatgcatccttccattagtattttcccgaacactagcttttatgaagggaggatctcagatgccactaatgtcatggaaaaagaacaccgaaggatgtatcttccagcttgctttaaaaccaaaaggaaagtcacggttggtgtcatatgcccatacaatgctcaagttgtagcaatccaagggaaaatagagaaaatgaggttcgacccattgcaagtaaaaactaattctgtcgatggctttcaaggtggtgaagaagacatcatcattttatcaactgtgaggtcaaactcggttgggaaggttgaaacgcgatccccaaatgacctgaatgaacagggcacttcttcgacgagtgtttcacattacgctggaatcccgtcaagtgacattgttgttgtttctgaattccagcgtccaagcaataaaaatgaggatgtcgaggatataactgtcattccaaataaagagaatgataaggatatcaatgctatgcccgttattccagataaagggaatgtcgttgatggcaaccatatcctcgccattccttgcgccatgttgagtaatctagctagatggtgtatccgttcgttccgatcttaa

SEQ ID NO: 10364 - DNA, 1017 bp, Zea mays
  Peptide Sequence Number=SeqID_52143
atgcccgccccgcacatccccgtgatgcccatggacgagaggagggagatggattcggtgacggacgcccaccgcgtcgcgtggctccagcacggcctcctcggcctcctcgtgctccgccaactccaccccatccgcccaagcatctgcctccacctccacggggacgctaccgtccgtcatcctatcatgggtggcgcgcgtggccacgggggacagctactactacccgaggcggcctccgcacgcaggttctttgcgggcgccagggaccggaggctcttcttctatgaccacgccatgggggaggggaggggtccgacgctaccgagcgccgcagcctggccgttctcaggaggagggccaccagcggcttcccgcgagcccccgcgggtgcatcgccatctcaccccccaccccaccgctccctcaacccgcatcccgctggtttgctcgatctccgcccagatctgcaatccatggagtggtcctcgccccagcctctccaaccgcgttctccatggattccgcttcctcggcaaagatcgacgtaatccatggagtctccccacctgcgcccgaccccttcatgtgcggtctctgccacgagcagcctgctgccagatctgtggcagtaacgaccggagcatcgaatcctgggtgctcgtcaagaagccgtgcagcgtagtgcccggcgacgacgctggctccccatcgtgggattcgtcgggggcgtcgcctgcgacgaatcagttgccggagatagaagcccggttcttgaacaagaacgtgatggtgagaatccattgcgaggatggcaagggtgtggtcgtgagggtgctcgccgagttggaggagctccccctcagcatcgtccacgccaatgtcatccaccactgtgaggtccttgatgtatcggcgccacaacgaggacctcgacgtattgccaccgtcgctttggagaaagcagaggcagatggcaacatcgtggcgctgaagaactacctcaagacgtag

SEQ ID NO: 10365 - DNA, 345 bp, Zea mays
  Peptide Sequence Number=SeqID_52144
atgctggacgcgctgctcagcggcaacgagggtaccagggcgaagctcagcgacgaccaaatcatcgaccttctcatcaccctcatatactctgggtacgagactgtgtcgaccacctcgatgatggcggtgaaggcggcgtcaaaccaggcgttgggcgtgctcggccgcgacgccttctggctctgttttctggagaagaagcagcaaacacgtggaggactagctagcactacgggaagatgccgcccttcctggagcaaccattcagctaacgcaagtgaagaacttcatgctcctgtggctcggccatcgccggcgctgccaagccagctgctggcttaa

SEQ ID NO: 10366 - DNA, 1008 bp, Zea mays
  Peptide Sequence Number=SeqID_52145
atggagaccagcgctgcaccgctcttcatgctgtcagcattcagcgttgcaccgaatgtactcggattgctcgatattcccataggagtgaatggtcgagaagcccaactgatctcatgggccgccagagtgctatttgccttacaaaggatcatatgttttaatgagaagagaaatcacattgatattaagtatcattatattcgagaaatagttgtggaagagtctgaactaaaagattttcttaaaaaaagtgcacagatacggaagtcgaagcggaggatgcaggccgtggcgagctactggaacaggaagaagagctcgttcgggctcggccatctggagcgcaaggtgttctcgtggtccgtcccagatatcttcaacagggacctgctcaggcaccaggtcaagaggataccggatattttcgagtcttttgcgagttatttgaactcctttgcctacccatttatcgaagaagtgcatgctgatttattctcttcattggatggttatgttcatgcgagctttatagaagtaatccaagtggcaaggcttgacgaggagaggccaatatttggccttgacgtcgcagaacctgtgaaagatggtgagaggtcaagggaggtgtatgaacccacaaggggcgatataatagtcatgtcctcacagaaaccgaagcatgtgtctgatttaacacgaaatcaggtgtcctatgtgttaggttcggttctcaaaagccatagagaagaagacgacagcttgccacctaattgctgcattgtgcaactgtcatctgccatcctaattgattcatatcatcaaacaaaaaaaccgaaggggcaattgtttgctgtgtttctcataagcatggagacatacaatcgtgtatggaaatgccttcatatgggacctaatgacgctattgtcgagcttcggaacaaaaagtgcactgatctcgttaattcggtgtggcagtacaagcgaaggtatattgcatttgtgtag

SEQ ID NO: 10367 - DNA, 861 bp, Zea mays
  Peptide Sequence Number=SeqID_52146
atggaggcctacgtcctgttcgcgcgcgccaaggagcaggaggaggacatcggctgcccgtccgagtcgtccgcggcgcgttccacgtcctcgtcgtcggacggggtggacctcgccgacgacgccagctcgtccgggtccacctgccacttcgagatggcctccctcatgacgcacctcccgatcaagaggggcctgtccaagttcttcgccggcaagtcgcagtcgttcgcgtcgctggcggcggtgggcggcatcgatgacctgcccaagccgccggcgaagcggctcaagacgtcgtggagctgcggcgtcggcctcgaggacgcgcgccgcggccctccctccgtgacgaccgccaataagcaggcgtccagcagggcacggctgacgccgtcggcgctcggctcgacgccgagaaggctggatgtcagcgccgtggttattggtgccgacctccttttcaagaaacggcggctcggctcatatctcaacaagtggtgcgcgtggctcgtgcataagttcatctacaagtattctaaatcgactgtccggaataccgtagattatttcggacaggagaagttttttgggaaaatcacccaagcgcggactgtccgggcccttgcggtggaccgtccgcgacacccaagtggcctcggacaggaacactgcataaacggaagtcaaacactgtggatcgtccgatggaaaagcaagcaccgtccgggaccaggcgcggaccgttcggtcggcacaaccaaaaaccccgaaggtgacaggttcggtaaaatgaattatagcgtcctcacggaccatccggggtacacgatcggaccgtccgcgactgcctttatctga

SEQ ID NO: 10368 - DNA, 1029 bp, Zea mays
  Peptide Sequence Number=SeqID_52147
atggagttcgcgagctcttcgagtaggttttccaaagaggaggaagagcaggaggaggaagaggacgaggaggtgtccccgcgcgagatccccttcatgacagcggcagctacggccggcaccggagccacctcctcctcgccctcgccttccgcggcagcctcggcgtcagcgtcgagttcggctgctgccctccgctcgagcggcggtgggggcgggggcgacgacgacatggaggtggtcgagaaggagcacatgttcgacaaggtggtgacgcccagcgacgtggggaagctcaaccggctggtgatcccgaagcagcacgcggagaagtacttcccgctggacgcggcggccaacgagaagggcctcctgctcagcttcgaggaccgcgccggcaagctctggcgcttccgctactcctactggaacagcagccagagctacgtcatgaccaagggctggagccgattcgtcaaggagaagcgcctcgacgcccggggacaccgtctccttctgccgtggcgccgccgacgctgcgcgggaccgcctcttcatcgactggaggaagcgcagcgccgactcctcccgccacccgcaccgcatgctgccacgcctcccgctccacatgccgccactcgcgtcgccctacggctatggcccctggggcggcggcgcgggcggtttcttcgtgccgcccgccacactctacgagcaccaccgcttccgccaggccctcgacttccgcaacgtcagcgccgcggccgcgccggccaggcagctcctcttcttcggctcagccggcatgcccccgcgcgcgtccatcccgcagcagcagcagccgccgccgccatctctgcacagcattatgatggtgcaacccagccccgaggccacggccggcctgcccatgcttctcgactcggtgccgctcgtcaacagcccgacggcagccgcgaagcgagtccgcctgttcggggtcaacctcgacaacccgcagccaggcagcagtgccgagtcaagccatga

SEQ ID NO: 10369 - DNA, 1974 bp, Zea mays
  Peptide Sequence Number=SeqID_52148
atgactcctctgccgctccacctccaccacctccttctcgcgctacttgcagcatcagccgcgcaggccaccgaccccagcggctgcggcgggggcgaggaccgctgcggcgacctcgtcctcccgtaccctttccatctcaactcttcgtgtgccagcgccggaggcgccaactcctccctcttccgcctctcctgcaacgccagcggcagcgccaccctcaccctcgcgctcggctccgccacattccgggtcctcgccttcctgccctcagggtcgctcctcctcgactacgccccagctgcgtcgaagtccccgtgcgacgcggcctacgccgccttctcgcgcccttcctcgccggcgaccgcgctcgacgccgcgcccttcctggccgtgacgccggccaacgtgctccgcctctacgcctgcgaggactcctccctctgccgcgccggctgcgacgacgtcgcgacctgcggcggcaggtctgggtgctgctacccgctctcggacggcagcgtctggaagcccgggaacggactgggcgttttcgctgactacgggtgccggggcttctcgagctgggtcaggaaccggtcgtcggcggcggcgggggcggcacgcggggtcgtgagaggggtcgaggtcgagtgggccgtgccgaggggcagcgccatggcgaaatgcgcggatggcgcggcgctcgtgaatgccacggcgctgcacgacggcgtgcggtgcgcgtgcgcggcgggcctcgtcggggacggcttcgcgcagggcactggctgcaccaaaggcacctcctgcagcaatggtggtggtgagcatgcaagtgacggcagggattgttgccagggacggttctgctccaggaaggcagtcgtccttgctggatttttcgtttcgctcttcttcctggcggcggcggtctcgttctggctcttcctgaggcagccttcaaaggaaagccgccggtgggacctcgacccggcgtgcatccccaagatcctgcggagcgtgtgcgacgcgaggcagttcacgtacgagcagctggaggaagcgacgaggagggtcgacggcgagaaggccgtggacaccgccgacgacggcgcggtccacgccggcgtgctcgacgacgggtccctggtggcggtgcagaggatcggctacgagacgcaggggaggctgaggctggtcctggaccggatggagctcctgtcggagatctcgcacccgagcatcgcgcgcgtcgtgggcttctgcctcgactccagcagcaacgcgctgctgctggtgcacgagcacttcgcggggggcacgctggaggagcacctgcgccaggtgaggcgccgcgtcgtcctcagctggtaccaccgggtcaacatcgccatcgagctcgccagcgcgctcacgtacctgcaggcgcacgaggcggccccgaccttcctgcacgacctcaggtccagcgacatcttcctggacgccggcttcaccgccaagatcgccggctacaagctcacgggcccgggcccggcgacggcgtgctgctccgccgccgcgtcgtcgtgtgagcaggacgtcgtgtgcaacttcggccacctcttggtcgagctgctgacggggctgaggcagcaggtcccgctggactcggtggcgcccaaggtgagggaagggcgggtccacgaggtcatcgacccgacgcttctgtcgtcgggtggtgggaatgggaagcagctcccggcctcgcacgacgaggtgaggaaggtgttcgagctcgccgtccgctgcctgtcctgcgccgagaccggcctgtgcatgctcgccgtcgccaaggagctgatgcacattctgagggacaacaacgggagcagcagcaagatcgagatctccctcgaggagacgttctctagctccagcctgctgcagatgatctccatgtcgccggagacactgcaccaccatcttccttaa

SEQ ID NO: 10370 - DNA, 333 bp, Zea mays
  Peptide Sequence Number=SeqID_52149
atgtcggtacgctcggcctcggcgacgcgatctggattctggcatgcgtgctgcgtgcgacccgcgtggaacggcaggtacgtcctacacacgcgcctggctagtcatgctgcgctgagcctgtacgtcctacacacgcgcctggcgcggtcggcgcacgctaccatattaggtacgggatggctaataagcacgaggcccgtgagcctggcacgaagcccgctgtttgggttcggtctgagcctggcacgatccggttctatgcgggcccaggccgacccggcacgaataagcggaccgggctcggacaagaaactaggtacggtgatctag

SEQ ID NO: 10371 - DNA, 1434 bp, Zea mays
  Peptide Sequence Number=SeqID_52150
atgggttctctcggcagcgccgcgcagcagcagccgcagcaaccgcacgccgtgtgcctgccgtacccagcgcagggccacatcaccccgatgctcaacgtggcgaagctgctgcacgcccggggcttccacgtcaccttcgtcaacaccgagtacaaccaggcgcgcctcgtccggacccgcggggcggcggccgtggccggcctcccgggcttccgcttcgccaccatccccgacggcctgccgccgtcggaggacgacgacgtcacgcaggacatcccctcgctgtgcaagtccaccacggagacctgcctcgggcccttccgccgcctgctcgcggacctcagcgacccgcccgtcacctgcgtcgtctccgacgtcgtcatgggcttctccatcgacgccaccaaggagctcggccttccctacgtccagctctggactgccagcaccatcagcttcctcggctaccgccactaccacctcctcaagagccgtgtggagcagctgacgaacggattccttgacacggcggtggaggacgtgccggggctgcggaacatgaggttccgggacttcccgagcttcatccgctccacggacccggacgagtacatggtgggctacgtcctccaggagacggggcgcacggcgggcgcgtcggccgtgatcctcaacaccttcgacgagctggagggcgaggcggtggcggccatgcgctcgctcggcctggcgcgcaaggtgtacacgctgggcccgctcccgctgctggcgcgcgaggacccgcccaccccgcgctccgccatcagcctcagcctgtggaaggaggaggaggagtgcctgcggtggctcgacggcagggaccccggctccgtcgtctacgtcaacttcggcagcatcaccgtgatgaccagcgagcagctggtggagttcgcgtgggggctggccaacagcggcaggccgttcctgtggatcatccggcgcgacctcgtcaggggcgacaccgccgtgctgccgccggagttcctgtccgagacggccggccgcgggctcatggccacctggtgcccgcagcaggcggtgctggaccacccggccgtggccgcgttcctcacgcacagcggatggaactccacgctggaggccatgtgcggcggcgtcccggtcatcagctggcccttcttcgccgaccagcagaccaactgccgctaccagtgcaacgagtggggcgtcgggatggagatcgacagcaacgtccggcgcgacgccgtggcgagcctcatcgctgagctcatggagggggagcaggggaaggagatgaggagaagggcactggaatggagggacaaggccatcgaggtggccaagcccggaggcacgtctcaccggaatttcgatgacctggttcgcaatgtgctcctgccaaagaactag

SEQ ID NO: 10372 - DNA, 1455 bp, Zea mays
  Peptide Sequence Number=SeqID_52151
atgagctccggaaaggcgcagcggcggccgcacgccgtgctcatcccgcagccggcgcagggccacgtcacgccgatgctgcacctcgccaaggcgttgcacgctagggggttccgcgtcacctacgtcaactccgagtacaaccaccggcgcctgctccggtcccgcggccaggactccctcgccggcaccgacggcttccacttcgaggccgtccccgacggcctgccgcagtccgacaacgatgacgtcacgcaggacatcgccgcgctctgcctgtccaccaccgcgcacagcgccgcgccgttcagggacctgctggcgaggctgaacgccatgccgggcagcccgccggtgagctgcgtcatagctgacggcgtgatgagcttcgcgcaaagggtcgccgaggagatgggaatcctggccttggttttctggaccaccagtgcgtgcggcttcatgggctacctccacttcgccgagctcatcagacgaggctacgtgccactgaaagacgaaagtgacctgacgaacgggtatctggacacggcaatcgactggatccccggcatgccggacatccgtctgaaggacatccccagcttcatcaggacgacagaccgagacgacgtgatgctcaacttcgacggcggcgaggcgcagaacgcgcgcagggcccgcggggtcatcctcaacacgtacgacgcgctggagcaggacgtggtggacgcgttgcgccgcgagttcccgcgcgtgtacactgtcggcccactcgcagcgttcgcgaacgccgcggcaggaggcgagctggacgcgatcggcggaaacctctggaaggaggacacgagctacctccggtggttggacacgcagcggccgggctcggtggtgtacgtcaacttcggcagcatcacggtgatgaccgccgcgcagctcgccgagttcgcctggggcctggcgggctgcggccggccgttcctgtgggtcatcaggccggacctcgtgtccggcgagaccgccatgctcccggaggggttcgtcacggacaccaaaggaaggggaatcctggcgagctggtgcccgcaagagctggtgctctcgcacccgtccgtcggcctctttctgacgcactgcgggtggaactccacgctggagagcgtatgcgccggcgtgccgatgctctgctggcccttcttcgctgagcaaccgacgaactgccggtacgtgtgcgacaaatgggggatcgggatggagatcgacaatgatgtgaggagggaggaggtggcgcggctcgtgcgcgcggcaatcgacggagagaggggaaaggcgatgagagtgaagtcggtagtgtggaaggagaaagctcgacaagcggtggaggatggtggatcctccaggaaaaacttggatcgactggtcgatttcctgctcgcagggagtgatctcccttgctga

SEQ ID NO: 10373 - DNA, 340 bp, Zea mays
  Peptide Sequence Number=SeqID_52152
atggcgacctcgtcgtcgtcctctggccccggcgggccgtaccaccaccaccggtcgcggttcggcgacacgacgctgaccaaggtgttcgtgggcgggctggcgtgggagacgccgtccgaggggctgcgccaccacttcgaggcctacggcgacatactcgaggccgtcgtcatcaccgatcgcgagaccggccgctcaaagggctacggcttcgtgattttccgggaccccggtgcggcggcgctggcggtgcagaacccgaacccggtgatcgccggccgtcgcgccaactgcaacattgcggcgttcggcccgccgttttccgcgcagccgagag

SEQ ID NO: 10374 - DNA, 282 bp, Zea mays
  Peptide Sequence Number=SeqID_52153
atgactgaatggaaaacgagggccgttctggttcagtcaaaaaccctcagccccagcaggagggcacatggttgggaccctcctttgctcaggacagtaacaactgttcttagcaagccagtgctccccttatccgggagaggaggaggaggaggtgccgtccgcgagccccacgggccggatcagccgccgcaggggtcgccttacagctacaggttgccgtcgcagatgaccccgcctcaggccgccgcggtgttatacagtccccagtacggcgggtga

SEQ ID NO: 10375 - DNA, 381 bp, Zea mays
  Peptide Sequence Number=SeqID_52154
atggcgacctcgtcgtcgtcctctggccccggcgggccgtaccaccaccaccggtcgcggttcggcgacacgacgctgaccaaggtgttcgtgggcgggctggcgtgggagacgccgtccgaggggctgcgccacctcttcgaggcctacagcgacatactcgaggccgtcgtcatcaccgatcgcgagaccggccgctcaaagggctacggcttcgtgattttccgggaccccggtgcggcggcgctggcggtgcagaacccgaacccggtgatcgccggccgtcgcgccaactgcaacattgcggcgttcggcccgccgcggaccgcgcagccgagagcatatactatactaccaccactactactcctcttcctgtag

SEQ ID NO: 10376 - DNA, 456 bp, Zea mays
  Peptide Sequence Number=SeqID_52155
atggccctaggctcatcttcccaggaatcccacacgactttcattactatggtggaccacattaggacctgggatctggtgcaagaatttcttgcaaatcagacattcctcacgctatctggctcgagaatgctgaagcctagaagggagatgaagagacgaagagtggtgtgcttaaggtcaaaacaaaggctgaatagagttatgaatgctatggtgtttgaataccccaattatccaaagataagtgaagaggctaatgaagatggaagtaatcagtttgagtcccctaggatcggaccagaccaatttggtctaaaaatcactagttttgcaaattttcatgggtgcatgtgcaccacctattttatatgtagcttcgcccctgctgaccttgaagggccaggaaggaaaagttgtgccaactacagcttcggctcctcaaacttcacatga

SEQ ID NO: 10377 - DNA, 423 bp, Zea mays
  Peptide Sequence Number=SeqID_52156
atgccctttttgtttgacaccagttttctagcaagggtaattgaagccgtaaccctgatccactgcgcgcaggccgtggccgccagcaaccgccccagcgccgtggacctgctgggcaagatctggggagacaccacgcagaggctagcgcactgcttcgccgaggggctggaggcgcggctcgcgggcatggggacccagcagctcacggcggcgatgaagtgcgccgccgtcgtggagatcctcagggcctaccagctctacctggcggcctgcagcttcacagcgatggcgtataagttgctgggttccagtggcgtagaagttgctggtcgtcggcgggaggaagaaggtgcacatcgtggactacggcgaccactactacggtttccagtggccgtcgttgctgggctactggggtag

SEQ ID NO: 10378 - DNA, 606 bp, Zea mays
  Peptide Sequence Number=SeqID_52157
atggggggagaagagaggaaaaaggagaaacccgcggcctccgtgttgtcctgcgcccaggtcgggtgcgcttgcagtcgaggtcgagtccaagccccgggtcgggcgaggcggagactgtcgtccgaggccaaggccgagtccgagccctggagtcaggcgaggcggagttcgtcgtcttctgaggccgagcccgagtccgagccctggggtcgggcgaggcagagttcgtcgtcttccggggctgagcccgagtccgagccctggggtcgggcgaggcggagttcgtcgtcttctagggccgagcccgagtccgagccctggggtcggtcgaggcggagtttcctatggcgcccgagatcggacttggctgctgtcagcctcactctgtcgagtggcacagcagtcggagcgacgcaggcggcgctgtctacttgtcaggccggtcagtggagcggcaaagccatccttgcattaaatgctcctgtgatacggtcggtcggtgtggcgatctggccaaggttgcttcttggcgaagactgggcctcgggcgagccgaagctttgtgctgatgggggttaccagctgagattaggggtcttgggg

SEQ ID NO: 10379 - DNA, 507 bp, Zea mays
  Peptide Sequence Number=SeqID_52158
atggtgacgaacggtttggtcgacggcgagctcgggaatgaggagggcgtgagcgagagggagagttcggagtggagaagggagtcctgctgtgggagggagaagagaagggctcgactcgggttttatagagagagggaggaagagcagaggtcgtcgggtgcttcgtggctgccattgatggcggtagggagtaatggcgaggaagaaacgattgtcttgaaggtccataacgcagggagaagaacggacggtcgcgcgggacgtgggcgcggcatcgtcggtcgtctgcgcgggcgtgcaggagcagggcacggacggctggctcggccagtcgctggcggctactcgtcggtgtcaggctcggggtcacgcgcggtcgcggctggggcgctgctgggcgcggctctggtccgggatggcgcgggacttggctcctggcgtggacgcagaggcgggggctggtcgctcggcttggagcaggggagaggaagcagggcgcgcgcg

SEQ ID NO: 10380 - DNA, 495 bp, Zea mays
  Peptide Sequence Number=SeqID_52159
atggtgacgaacggtttggtcgacggcgagctcgggaatgaggagggcgtgagcgagagggagagttcggagtggagaagggagtcctgctgtgggagggagaagagaagggctcggctcgggttttatagagagagggaggaagagcagaggtcgtcgggtgcttcgtggctgccattgatggcggtagggagtaatggcgaggaagaaacggttgtcttgaaggagcagggcgcggacggctggctcggccagtcgctggcggctgctcgtcggtgtcaggctcggggtcacgcgcggtcgcggctggggcgctgctgggcgcggctctggtctgggatggcgcgggacttggctcctggcgtggacgcagaggcgggggctggtcgctcggcttggagcaggggagaggaagcagggcgcgcgcggtaccagggtgttacaaaatctacccctcttaaaaagaatctcgtcctcgagattaagaaaggctag

SEQ ID NO: 10381 - DNA, 915 bp, Zea mays
  Peptide Sequence Number=SeqID_52160
atggcttccgggctccggcttcttctcctcgccgtcgcactcgtcgcgtcagccgtgaagcggcggcgcggcgcggtcgtggtggcagcggacgcggcggcggcggccgggagcgcggagttcggcgacgaggagaacccgtatgagcttctgggcatcaggccgcttgatagcttcgatcacatgaaaatggcctacaagaagaagcgcaaggacgccgaggagactggagacgacgagttccttgccaagttggacagggcctatgacactgtcatgatgcagcagctgcagtatcggaagaagggagtcacatacgggtctgttcagcatagcaaggagtacaatgtgtttgttatatgctccttcatcaccagtttgaaggtgtccaaggatatcaagtatgctgacaatcaaccagtggtgccttggggaccaagattctcccgatcaacaatgaaggacatgcgcataaatatggcagtatcagcagcatttgttgtttggatagctattatgggcaatgcagactggaagcctttgcagttcctttgttttgctttcttctacagaatactacagaagctaagagctactgaaccaccaattactccaatatacaatgaatatggcgaggtcgaaggacgagggataagaatggcaaaaagagtagtccgtgctttgggtttgatatttggatgtgtgttcgctgcatccctgggttatacagcagctattaacttgatcgagctttcaatgcagtacactccccgccttgtttattactaccagtgcctaacatggttagaaaatgtggttattgagagcttcagtataattcttgctgcatgcttttggtgtgacaaaatccttgtcattctcgctgtcttccgcgaggagatgaccaatggatga

SEQ ID NO: 10382 - DNA, 210 bp, Zea mays
  Peptide Sequence Number=SeqID_52161
atggcgcaccggacagtccggtgcacaccggacatgtccggtgcgacagccacgtcaccaaatgccgttgggttcgaccgttggagctctgtcttctgggcccgcctggatgtccggtggcgcaccggtagggatggcaatgggtacccgaaacccgaaactcgatgggtaaaaaccctattagggcatgggcatgatgttgccatttaa

SEQ ID NO: 10383 - DNA, 1155 bp, Zea mays
  Peptide Sequence Number=SeqID_52162
atgcccacgcgcaacacggagctgggctggggcaggcagggccgcatcggcatcggcatcggcatctgcatctgcatgcatcggtcccagagaatgcggcagatctcgtcgctgctgcagggcctggcccggtcactctcggtggggagggacagggacagggacagggaccggaaagggaacggcgcaggcgaccgcaagaccgccgtgccggcggtgctgcggacgtcgggcaccctgtggggcgacggctcggacacgttcgccgccgtctgctcgcggcgcggcgagaaaggcatcaaccaggactgctccatcgtctgggagggattcgggtgccaggagggcaccatcttctgcggcatcttcgacggccacggccagtggggccactacgtggccaaggcggtgcgcgactcgctgccgccgtcgctgctgtgccactggcaggaggcgctcgctctcgcgtcactcatcgacgacggcgagaagaagctcggcgactgccagttcgatctctggaaacggtcctacgtggccgcatgcgccgccgtggacgatgagctgcggcgcagccgccgcttggacgcggtccaaagtggctgcaccgcgctatccatcgtcaagcagggggacctcatgatcgtcgccaacgtcggcgactcccgggccgtgttgggcaccacgtccgacgatggcgccattgcggctgtccagctcaccgtcgacctaaagcctaacctgccacaggagaaggagcgcatccggcggtgcaatggtcaagtgtactgcctcgccgatgagcccggggtgcaccgcgtgtggcagcctagccgagagtcgccggggctcgctatgtcgcgcgcgttcggcgactactgcgtcaaggactgcggtgtcatctctacgccggaggtgacgcagaagaggatcagcagcagtgaccaatttatcatcctcgctaccgacggggtatgggacgtgctctccaacgacgaggcggtacatatcgtggcggggacgccggaccgggcgaaggcggccaagcggctggtggagtgcgccgttcgcgcgtggaggcgcaagcggcgcgacatcgccgtcgatgactgctcggcgatctgcctcttcttccacccgccgccgccgtcgtag

SEQ ID NO: 10384 - DNA, 381 bp, Zea mays
  Peptide Sequence Number=SeqID_52163
atgtccggcgccgccgacgatttggggaccctctctgatgtggagaaaccggatcgtatcctggcgcagctgcaatccataaataacaggctggattcccatgacaatcgtttggccaagctcgagcaggcgcgggttggctcctctgcttctaccacgggcggcttgggtgcaggcaacgttggcacgagcgacgaaggtggcttgggcacgattgaaggaggcttgggcgtgagcgacggaggcctgggcacgggcgaaggcggccacatgggcagctgtggcggtgctctggaggaggcagacgagccatgcgaggttgtgactaaccttggattaggcgagataatcacccccacgggtactgtagcatatatatag

SEQ ID NO: 10385 - DNA, 747 bp, Zea mays
  Peptide Sequence Number=SeqID_52164
atgacgctccgccccggtaagctgcctagtgagggcatcgataacaatgcactcttgctcccaggtccgagcagcgaggcgctcatgttcctgcttggcagccacaacaactttgtccgtctagagggcttcgatgagggtgaattgggccacaacgacgtcggtggtagggatgaccggatgacaatcgacggagggaaacttggggcggaggatgtggcgcagagagttggaacaacaattcccagtcctgtggtagcgagatcggggtggagaaaaccggccatagtggtggggaacggagcagaggcccatgtgggggtgtcagctgcgaccgtttcatggggagggatgagcccagcccgtgttggatggagcgtaggtgcgttggagccggcgtgggtgccgtgcgtggcttgggagagagttggggcagtggcggccaccaaggaggcgctagtgactagattgtgtgaaggaacgggaccaaatgctaataatgctcttgctgcgggagtgcttgccactgttggagaactggccaaagtgggtggctttgctatgaggcaatatcttcctgagctgatgcctgtagttgtggattctcttttagatggaggtgctgttagtaaaagggaagtggcagtgtcaactctgggacagattatccagagcacagggagaactgcgccccaatatattaaggagataaaagggtctaaaaagaccagccatcctaatagctaa

SEQ ID NO: 10386 - DNA, 1764 bp, Zea mays
  Peptide Sequence Number=SeqID_52165
atgaaaccctcgccgcacttcccggagatcggaaagaagcctaaagatttgattgctaaggaccacacatttaacatcgcggcttacatctcgtctggagcggatgttattgctgccgcgctccgtaaacatgttgaggaggaagcccgagatctcagcggtgaagcttttttaaggtttatggatcagctctatgagcagatatctagtttactgcagagcaacgatgttaatgaaaatttactggctctccgtgctatcgatgcattaattgatatgccctttggagaaggcgcttccaaagtttctaagtttgccagcttcttgagaaacgtatttgaagtgaagcgcgaccctgaaatcctagttcccgcaagtgaagtgctgggtcatttagcaaaagcgggaggagcaatgactgcagatgaagtggagcggcagattaaaacggctttggggtggcttactggtgaacgagtggaatatcgccgatttgcagctgtactcattctcaaagagatggcagaaaatgcgtcaacagttttcaatgttcatgttcctgagtttgttgatgctatatgggtagcactgagagaccctaaacaagctgttcgtgaaaaagcagttgaagccttgcgcgcttgtctccatgttattgaaaaacgggagacacgttggcgtgtacaatggtattaccggatgtgtgaagccgcacaagttgggcttggcagaaatgcttctgttcatagtattcatggatcattattggccgttggagaattgctgaggaatacaggggagtttatgatgtctcggtacagagaagtggctgatattgtcctcgattatttaaagcatcgagatcagcttgttcgacgtagtataacatcacttcttcctcgaattgcccacttcctgcgtgacagatttgtgactaattacctgaagatttgtatggatcatatcttgtttgttctacgtacaccagacgagcgcgctagtggttttgttgcccttggagagatggctggggctctgggtgttgaacttgtgccttatttaccagcaattacctcacatttgcaagatgcgattgctcctcgcagaggaaggccatctcttgaggcaatttcttgtgtaggaagctttgcaaaagctatgggtcctgcaatggaacctcatattcgtagcggacttctagatgctatgttttttgctggtctttctgataaacttatagatgcactcgagtctataagcacaagcatcccgtctttactacccacaatacaggagcgtttattggattgtatatctcaagcactaccaaagtcatcaataaggccaggtgcttctgttggtcgagcaagcaggtcaaacaatttgcaacagtttgtggactctaatagtcctgttcttgtgcaacttgcactgtggactctagcaaacttcaactttaagggccatgaacttctggaattcgctagagagagtgtcatactttatttggaagatgaagatagcagtaccagaaaagctgcctctttgtgctgttgcaaattagttgcacactccctttctgcttcttcagcttcacagttcggttcaaataggacaaatcgtattggaggagctaagcgccgccggcttgtagaggagtatcacatgttaaaaatcagatctgaactcagtactacattcttggatacacttctcactttcttttggctaactatattttgtgattccaaaccttttatgtga

SEQ ID NO: 10387 - DNA, 1254 bp, Zea mays
  Peptide Sequence Number=SeqID_52166
atgcccatctgcctcttgcacgctgcctcgctcgccatagatccagcgtggggggtgcggctcggagtggcaacgacgacctcgccggagccaatgtacctccaggggcctcgacacggcagcctggaaaaacaggcggagcgaccagcatggcccacgggcttcgctcggcctcgccccaccatcgacgacaccttcctggagctccgggcgcgcagatctggggcgtcctccctagcggccccgtcggtggctgacacgctgcgcgcgggaccagcgccgggcggagtacatactgaggagtggtgtcgggggcacgggcagcggcgcgccctcagctgtgggactccaagggcggcgggcgacgacgacggtgccagcgagctgggggtacgacatcgacacgctcaactacgtggtgacggcgagcctcggcacgccgggcgtggcgcagaccatggaggtggacaccggcagcgacctgtcgtgggtgcagtgcaagccgtgcgccgcggcgccgtcgtgctacagccagaaggacccgctcttcgaccccgcccagtcgtcgtcctacgccgtcgtgccgtgcgcggggccgtgtgcgcggggctgggcatctacgccacgtccgtctgctcggcggcacagtgcggctacgtggtcagctacggcgacgggtccaacaccacgggcgtgtacagctccgacacgctgaccctgtcggcgagcagcgcggtgcagggcttcttctttggctgcgggcacgcgcagagcgggctgttcaacggcgtcgacgggctcctgggcctcggccgcgagcagtcgtcgctcgtggagcagacggcgggcacctacggcggggtcttctcctactgcctcccgacgaagccgtccaccgcggggtacctgacactgggcgggccggcgggcgcggcgtcgggcttctccacgacgcagctgctgccgtcgccgaacgcgccgacctactacgtcgtgatgctgacggggatcagcgtcggcgggcagcagctgagcgtgcccgcgtcggcgttcgcgggcgggacggtggggcgcgtagatccggggcggcgtcgggcgctccccttccatggaggctggggcgcgcagatccaggaccaacgtggattctccttccatggatggcgcgaacgcggcgattctggagatctccagccgaatcattctggagagccaagtacgaggacaccgacgacctctttgataaggctatga

SEQ ID NO: 10388 - DNA, 3948 bp, Zea mays
  Peptide Sequence Number=SeqID_52167
atgcaccaacagattcttatgtcacatgtcttttacaacaatgatgatctgcggaaagatgctgcagaagcgctctgctgcctcgcacatgcccttggagaagactttactatcttcataccatcaatacgcaaaattcttgtgaagcaccacttgcggtacagaaaatgggatgagattgaaaatcggctactgaggcgagagctactcatcactgaaaacttgtctgtgcaaaagtacacacaatgtccacctgatgtcattagagacccccttgatgattgtgatggtacaccttctgagatagctgatgatacacagcgacaagcaagaagtcatcaagtcaatgatgtccggttgcggagtgccggtgaggcttctcaaaggagtactagggaagactgggctgaatggatgagacatttcagtattgcgcttctcaaagagtcaccatctccagctttacgcacctgtgcaaggctagctcagcttcaggcagaatttatggaacatgatgagaagccacttcctattgatacaagactgcttggtgcacttgctgagaagtgtcgagcatttgcaaaggcactccattataaagaaatggaatttgaagctgtgtgcaccaagaagatgggtgcaaatcctgttacagtggttgaatcccttattcatattaacaatcaactacagcagcatgaggcagctattggcatattgacttactcacagcaaaattcggaagttcaattgaaagaatcatggtatgaaaagttgcaccgttgggatgaggctcttaaagcatacaccgtgaaatcatctcaaacatctggtccctttacaaaacttggatgctacattaggtcgaatgaggtgtctagcagctttggctcggctgcaaatgctgcttggcatatgggtgagtgggaccatatggcagactatgtttctcgcctggatgatgcagatgaaaataagctccgtatgttgggtaacgcaacagctagtggtgacggaagcagtaatggtgctttcttccgggcagttcttttagttcgttacaaaaagtatgatgacgctcggatgtatgttgagcgagctcggcggtgtttagctacagaacttgcagcactggtacttgagagttatgagcgagcgtataataacatggtgcgtgttcaacaactttcagaactggaagaggtgattgattactgcactcttcccatggaaagcccgattgctgacggacggagggaacttattcgcaatatgtggaatgaacggattaaaggaacaaaacggaatgtcgaggtgtggcaagccctacttgctgtcagggagttggttcttccccctaacgaagacagagacacctggataaagttcgctgaactttgctggaagaacggtcgtattagtcaggctagatctacgttagtcaaacttttacagtttgatcctgaatcttcccctgaattgacactgtatcatgcacatccacaagtagctctggcttatctaaaataccagtatgcagttggtgatgagcttaaaaggagggatgcattttctaaactgcaagagttgtctgtgcaggttgctaccaccatgggcaatttacctggaacatcagcaaaccatggcaccatgtcaaatgctggagtaccactcattgctcgtgtctacttgacacttggtagctggaagaaggcactatcacctgcattagatgacgattccattcaagaaattttgatttcttaccataatgccacgctaagtgcaaaggactgggggaaggcctggcacatatgggctttgttcaacacagaagtcatgtcacgctatactttccgaggccgaccagatattgctggaaaatatgttgttgcagcagtaactgggtatttttattctattgcttgtgcatctactacgaaaggggtcgatgatagcttgcagacagttctggtttcaacttctaatgattggagggctgcaattttgtgcccgacgattgatgatgtttgttttgagaattggtggcgaatctgctcttacaaggtggctaatcatttgaagggttccaattcgctggtgatcctaggtgcttggactatttggaatcataggaacaagaaaaataactcggccggggagggaaagaccgccctcccggatatccttcgtctgttaactctttggttcaaccatggggatacctcagaagttcaaacagcgttgcagaaaggtttttcccttgtcaagattgagatgtggctggttgtgctgccccagataattgctaggattcattcgaacaatagagtagttagagaactgatacaatctttgctagttcgaattggaaaggggcatccacaggctttgatgtatcctctcttggttgcctgcaaatcaataagtatattgagacaacgtgcagcgcaggaggtcgttgataagatccgccagcacagtggaggtcttgttgaccaggcacaacttgtgtcgaaggaactgatacgggtagcaattttgtggcatgaaatgtggcatgaggcactcgaggaagctagcaggatgtattttggtgagcacaatatcgaaggaatgcttgctgtacttgagccattgcatgcaatgcttgagaggggggatgagacaattaaagaaaatgccttcattcaggcttatgggcatgaattactggaagctcatgaatgctgtttgaaatatcgggctacaggagaggatgctgagctaactaaggcctgggatttgtattaccatgttttcagaagaatcgacaaacagcttccaagtcttacgaccctcgatctgcactctgtttcgcctgagctactcaaatgtcgaaagttggaacttgctgtgccaggaacttatgctgcaggccacgaagatttgcggcaagatgaacgagtaatgcagctttttggtttggtgaatactctcctagagaactcaaggaaaacatcagagaaggatttatcaatccaaagatatgctgttatacctttgtcacctaacagtggtttaattggatgggttccaaactgtgacacacttcatgctctgatccgtgaatacagagatgccaggaagattttcttgaatcaggagcacagacttatgttggcttttgcacccgattatgatcacttacccctcattgcaaaggtggaagtgtttcagcatgctttgcaaaatactgagggaaatgaccttgcgaaggttctgtggctgaagagtcgaacttcggaagtatggcttgagcgccgcacaaactacgctagaagcctggctgttatgagcatggttgggtatttgcttggtttaggagatcggcatccaagcaaccttatgttagatcgctatagtggaaaaatattacacatcgacttcggagattgctttgaggcttcaatgaatcgagaaaagttccctgaaaaagtaccattccgtttgactcgaatgcttgtgaaagctatggaagttagcggtattgagggtacattccgaacaacttgtgaaaatgtgatgcaagtccttcgcacaaacagagacagcgttatggccatgatggaggcatttgtacatgacccgttaatcaattggcgtctgttcaatttcaatgaggttcctcaagtgtcgaactatggtaatgttcatgctcacacggttgtcagtagtgaagaagcagtggctaaccgagagctcatgcaacctcagcgaggagcacgtgagagggaactgctacaggctgtcaatcaactcggtgatgccaatgaggttttgaatgagcgtgctgtagctgtgatggcacggatgagtgacaaactaacagggcgtgacttctcttctgggtcagctttggctggagcaggtggtgtccgttctggtgagctctcttggaaacagtag

SEQ ID NO: 10389 - DNA, 306 bp, Zea mays
  Peptide Sequence Number=SeqID_52168
atgaagttatttcatcaatatgctagatacaggaagaagaaaaattttgttgccaagcttaattccgaaggaaacagcttcaccgaacataatgacaaggcaaaactcgtgcatgagtactactcttcactgttgggttgctgtttggacagatctgcctccattaatcttgatgttctagggattcaggccgatgatcttgctgttttggactctccttttacagagcatgagatttgggaggttattaaggggttgccatccgacaaagctccagggccagatggtttcactggccgcttttaa

SEQ ID NO: 10390 - DNA, 438 bp, Zea mays
  Peptide Sequence Number=SeqID_52169
atggctatggggcatcaccaacccgtcgcgaaccctctagtggcggttggatgtatgggggagcacctgagagctgccaattcctcgccggagctcacaggcggcggtcaggccgcgcctcacggagtcggccgcgtcggggtcatcatggctggtgagttgccctcccctggtatcgccttcacatccctcacgcgctgctggatcgtcctggtgtttggtgcaccaggggggccgagtccgctgtcaccaacgacggtcgccgccgcgggcgggcggtggtcccctgatgcctgtgtccagggaaggaagaagggaggatgggcgtgcgatgtgaaaccaacggtagggattagaagttgtcgtaccttttcgcttggacgagtaccggccgttgatctaataatcgggcggttgtgcttagattgggattcataa

SEQ ID NO: 10391 - DNA, 429 bp, Zea mays
  Peptide Sequence Number=SeqID_52170
atggatttctatgcgccagatctgaaatggatggaccgcatcgatacaggcaaaccggacgagctacgcggtgcgcaaaggaaaggaatctacatgcacaccaaactcaccgaggacaaggtcgcacataggcagcacacgacgaggcgcggacgcggcaggaattccagctccggcgagaaattcaaggcgaaagcacgagtgctttcccccaatagcgccaagggaaccttcgcctcacccagaagaagcctccccaccgacgcaattggccggagcgcctatggtttcgagttccacggcggcggtgaatctcacccgcgcggtgcacggcaacgcagtggtggtggtttttggcttctcaggatgattatggctttatgggtcaggagcatgcatcaggctccaaattatactctgtcgtattga

SEQ ID NO: 10392 - DNA, 588 bp, Zea mays
  Peptide Sequence Number=SeqID_52171
atggccccggcgtggtccctggccgacgagctcggccgctggcctgttgcatctgcccaccatggtcacgcagccaggcccggcctcaggcaccataggaaactccgctccgcccgacccagggctcggactcgggctcagccccggaagacggcgaactccgctccgcccgacccagggctcggactcgggctcagccccggaagacggcgaactccgctccgcccgacccagggctcggactcgggctcagccccgaaagacgacgaactccgctccgcccgacccagggctcggactcgggctcagccccagaagacgacgaactccgtttcgcccgaccctagggctcggactcagccctggcctcagccgacggtctccgcctcgcccaacccaggggctcggactcaagctcagccccagaagacgacgaactccgtttcgcccgaccccagggctcggactcaggcctggcctcagccgacggtctccgcctcgcccgacccaggggctcggactcgacctcggcctcggaagacagactcgacctcgacctcggaggagcctccacatcgcccaacctag

SEQ ID NO: 10393 - DNA, 273 bp, Zea mays
  Peptide Sequence Number=SeqID_52172
atggcgccttacacatcacatgaactcccacctttgtacaatgggtcaagcagtcttattagctgcgagaagcagatgattcgaatcgagtttttaaccatgcaagtgaccgcacttgtacccaccatagctagcctgggagacctagtctcaggacaagtgaggtggaaagtccgcgcccggcttcactcaggtgggcttgaactacaacctatctttataaacttccaaaaattctgtaaaaattacagtagcctctcactggtgcaataa

SEQ ID NO: 10394 - DNA, 1659 bp, Zea mays
  Peptide Sequence Number=SeqID_52173
atggctcctcgatctggcaggcagcaattaatttccctgcaaatccttcaacgattcggttcgatgtcagaattgcttaatcagaaatcttcagtccaagggaaagttccttcaggctattttaatgctctctttgaattaagtggagcttggttgactgatgccaaagagaccaagcatctagcattcgacggatatttcatttctttgtacaacttgcatctaaaggcttctccattagttcttcgagatgaagtaaaaaaggctgttccatcgaagtgggatcctattgcattatcatggtttataaagaattatgggacacatataattgttgaaatgggaatcggaggtcaggatgtcatatgtgttaaacaaagtcattcttcaaccatttcaactgtggatcttaagttgcacctggaggaccttggcgatttcttgttttctgatgggaagaaccactctccaatacatcgcaagacaaaggatggcaagagcaaggtgcctgatgtttttgtaaggatagtgcagcaaccaaataacctgcacctttctagctactctgaaacatcaaccaaggatggcctgacagttacatgttcgaagaggggaggagaagcatacctacccaaccactccaagtggctgcaaacagtggcaaagaaacctgatgccattatgtttaaatttgtccccatcacctctcttctaactggtattcctggtagtggttacctcagccatgccatcaatctatatcttcgctataaacctgatcttcaagacttgcaatatttcttggagtttcaagtgcctctacaatgggcacctatgtttaacgagcttgtccttgggccccaaaagaggaaaagctcttatccttcaatgcagttcagatttctcggccccagactccaagtcagcacttctcaggtatctagttctcagaaaccggtggttggcctacggctatacctggagggcaggaagtgcaaccggttggccatccatgtccagcacctgtccagtgttccaagcatgattggagactccgtggcatcttcaatgtcagaatggcgcgagtcccaagacagcgacccggggtacgtcgaggccatccagtggaagaagtactcgtgcgtctgcacctccgtcgtcaagtacaacccggagtggcacaagagagctcccggcggagtctttatcgtcactggcgcgcagctcgtcacgaagggggcctggtccaagaaggtcctccatctgcgcctcctctacacccacatccccaactgcaccatccagaggaccgaatggacgaacgctccggcggcgtctcagaaggggagcttcctgacgacgatcagcacgacactgagctccccgttcacgcagcgtgacacccaccaggggaagcatgagccggtgcagctgaactcaggtgtctaccccgacggaccgccggtcccgctccggtccaggaagctcctcaagttcgtcgacatttcggaggtggtaaaagggccacacgacgtcccaggccactggctggtgatcgcggcgaagcttgtgaaagagagaaggaagatcgggatccatgttaagtttgcactgctgggctatgaaggcctgtcgcagaatgatagtttcatgggttga

SEQ ID NO: 10395 - DNA, 507 bp, Zea mays
  Peptide Sequence Number=SeqID_52174
atggcaaacggaggaagcaagccaggaacgacggcaaaacggcaacaggtagattctcgcccagggtgtgatgaaccgtcgcaggaaagggcccgcccctcacactgcatatacctccaagcaatccacatggattacttgggggctcgggcgccagcatctagcatatgcgctcgcacacacccgagacactggccatcaaaacttaagtgcccaagtcacgccttagaggtcgcaacacacttaaattggaataacccgtcagtcctcagatctagtctgataaagccacttatccaggatcagataccactaactcacttgatgtacaaggggtcaagcagtctcattagctacgagaagcagcggattcaaatcgagtttttaaaccttgcaagaaagctgactgggagacgccacctagatcgaatcgaaagcctcaatgttaggcggctcctcttcaaccacctgttcttctcctgtgggggtgtgagagagcaagagtga

SEQ ID NO: 10396 - DNA, 396 bp, Zea mays
  Peptide Sequence Number=SeqID_52175
atgaaggcgtctggggaggcacaaaaggcagcggaggatgatgtgtttaagctttcacttgcctacaatgatgttatcgccacacagctctctcctctgctaccagccaggttccccctgatcgaccgcatgcgggcactgcccagtcacgtggagcatgcagtcttcgagggggtgttccacagggatagtctggctttaggtcggatggtctcccatttcgatgaaattgatgccacaataattgaggagggtttcgctttcggtcggttcgatgaggacctggacgccattgaggggcaggtgcgccctcatgctcgctcgctcgctagccgggttgatgtaaggattcttttgacaaggcccgtgagccaggaaccacctgatgatggttag

SEQ ID NO: 10397 - DNA, 384 bp, Zea mays
  Peptide Sequence Number=SeqID_52176
atggccgacctacgccccaagcggcccccggtgcgagagcttcaaatgaacgggtgctacctaagcataaaggagaggatgagggcccgaggtgggcgatggaggccgcgaggcgcgcctggagtgcggtgccataggtactggagaagctcaccgtaccatgagcacatccatggcgtcggccggcagagggtgctgcgccatgggggagatgagtgcggtggctggcagtgggggagacgaagggagggaggcaagcgcggtgcttatatccacagcaaggtggagccacagccgcatggcgagggtctttggtcgtttaccagaattccgatcccggcgcgtacggagcagagcggtggagatttcgcgggtttgttatga

SEQ ID NO: 10398 - DNA, 243 bp, Zea mays
  Peptide Sequence Number=SeqID_52177
atgaccatcccatccgggcggctacgggtggctcctgatggattgagtcgaggggaaagcgggcacggtatttatttgctagagcctaagaaatcgcgtagtccggcaaaaggaacagcaagagcggaatccacggtggttgttggcgcaagctccggcgaagaggacgaacccgacatgcgggccccagccaccagtgaagaggcacgtgcagcacggctgacagactgggtccacttgtaa

SEQ ID NO: 10399 - DNA, 189 bp, Zea mays
  Peptide Sequence Number=SeqID_52178
atgcgggccccagccaccagtgaagaggaacgcacagcacgactgacagactgggtccacttgtttaacggttaccatatttcccgacatgtgtttagtacgttcaaacgcttgactcagggatgcggggagatcttcggtggcaggatcgggagctggctcctggtcttcctcatggatagctcctag

SEQ ID NO: 10400 - DNA, 435 bp, Zea mays
  Peptide Sequence Number=SeqID_52179
atggagcacccactgggtccgcccctgtggagagcgcaggctctcccggcctttgaccctatggtagatccaaagcgcagagcaaagtctaatgatcctggatggaactatggattttggacagagattgggaatcgagataaggggcagcaaggcgaagaggattccgccacatctatgcaacaacctagctcggggacaactgccaaaaggaagagagctgcatttcagtttagaacagctgcatggccacatacatcaaacaaggaaaaagaaaaagggaaaactgcaaccatgcctcgaagaactcctgaacaagttgtggatgagaggctctcctcagggtcacaccaacaaaccaccatggaagcatgcactaagtctaaggctgacagagattatgtcaacaagcaatggggctatgtggttctatga

SEQ ID NO: 10401 - DNA, 1143 bp, Zea mays
  Peptide Sequence Number=SeqID_52180
atggcgtcgccggacgaccccgtgctctccgcttgcaagaaaaacttgagccacttcagaataaaagagctcaaggatgttctacaccaacttggactttcaaagcaaggaaagaagcaggacctagtggacagagttatggcagtgttgttgagccagcaagatcaaggcattaatgaaatcttggcaaactatcgcttgttgcttcctgtttcaagaaaaatgcaagaccctacaaatactgttgcagtctcaaggagccacgaattaggagacagtgttacgtgtaaaaagaaaccggatgattctgctcaggcagttaaggttcgttgcccttgtggtgactccaagccaaatgattccatgattaagtgtattgatccacaatgcaacatatggcaacatgttggctgcgtcgtcatacccgatactgagaaatccgcggacaatatttctcctgaattaccttcctgcttttattgtgaagtgtgccgacttagcagggctgatcctttttgggtcactgtgaaccatctgttactccctatcttaataggaccctctactgtagcagcagacgggtcatacactgtacagtataccgcaaaaagctttcagctttcaagagctaatagagaaattctgcagcaagctgaatgcaatattcaggtttggtgtatccttctcagtgacaaagtaccttttaggatgcactggcctttacactctgacatgcaagttaatggtatttatgttagggtggttaacaggcaacccacacaaaagttaggggccaatggtagagacgatggtccactattaacagattacctgaaggagggacctaacaagatttctctatcaagaaatgacactcgtactttctgtttgggtatcagaattgccaagaggagatctctagaacaggtcctaaatttggtgccaaaggaacaagatggtgaaaacttcgatgacgcccttgcacgtgtgcgtcgctgtgttggtggtggagctgaggcaaataatgcagacagtgatagtgatatcgaagttgtggctgattttgtctctgtgaatcttcggtgccctatcctcaatgaactgcttataaaatgggcaattgctctgatatatgtctattaa

SEQ ID NO: 10402 - DNA, 540 bp, Zea mays
  Peptide Sequence Number=SeqID_52181
atgggaagttgggtagcttgggtgtcatgtcaagcatgtctagtcctcaagctggacatggttatttataggagactaacagatggccccattctgcatgtggtggacccattaggccttcattgtgcgcatgtggacatgaaaaaggtggatgatggtgagggatggtcattagctagtgagatgacttcatttgattacacaaccttccctcgatttgtggtggaggaacgagatttcaatgataatgtctttggcaattgttgcaaggggagatggaaaggaaaaggcgttgcagcaggtcaagggggtagcgaggcattagctcgagatacgaaaaggaagaaagaaacctcatctttgaaggccaagaagacacgggtccaaatccaagtgcccatgggtacttcatctactagcactaacaacttcaatactgaggccgtggatgtggtcttcgctgaagagttaggcacaacctatgagtctccgaggtcttctcttggtgatagcgcttccgcgactgcctttgccaaataa

SEQ ID NO: 10403 - DNA, 441 bp, Zea mays
  Peptide Sequence Number=SeqID_52182
atggggggcattgggccaacacatgaagtcccagctatgactgaggagctaggcatcttagactatgaagtatgtagttttggattgatgtctgaggctgatatgcttgtgctaggttctagcccccgctttgatatcgacgactcccgagaccatagttcaggggacgacccagtgactgactgtgatggggatggccagcttgtcgagggcaaggttcctgttatgtggcctgcacaaggtgaagaagttgatgtcatctatgccaagatggagcctttggactttatgggtgttgagggcttccacttggtaggccttgaggaggggaatcagaaacaacatactatgttttaccagaaaaacttctgtgtcatcctcaatatgatagtggatactgtctttgccttagtccactgtgaaatactcgatggtgactaa

SEQ ID NO: 10404 - DNA, 354 bp, Zea mays
  Peptide Sequence Number=SeqID_52183
atgaaccgcctttctcatggtgttcatggtcttcctattcaaagacgtcctacgaggcctagaggtgctttgcttcttgctgctaggcctcaggcagtgagatcacgtggtggtcatgcccgcgtggtgctggtcatgtgccatatggccaaggcccccgtggtagtggctttagttcttacttccccagcggaccgcaatttccttcttgtggggcaaatgctacaacactggggcctggagaacatatggctcatggattttggctgttcgtgccacatgatcggaagcaacaaatggttctctagccttgaccccgtgattggtaaggaatacatcacattcgaggattag

SEQ ID NO: 10405 - DNA, 762 bp, Zea mays
  Peptide Sequence Number=SeqID_52184
atggcttccaccgccaccgctgctgcttctctccgcctcgccttccctctcctctccgcgccggcttcctcctcgtcgagcccacccaacccctcctggtcgacgaagacgccctgcctcctaaggccggggtctacgggcgtctacgacgccgccggcgagctgcagttcgtcgggatttcgcgcaacgtgagggccagcgtcgagggccaccgccggaaggtccccgccaacctctgcgcctccgtcaaggtcgcagtatcagatgaggaggcaccagatcgatctgcccttaacaatgcctggaaatcatggatggaagaacacatagcggccacgggcaaggcgccaccagggaacgttgcaggaaaccacacctgggttggtgccccccagcggcccccggacctgcgtctgacgcctggacgccacgtccagctgacggttccgctggagcagctgatagaccggctggtgaaggagaacagggtggtggccttcatcaaaggatcaaggagcgctccccagtgcgggttctcgcagagggtggtgggtatcctggaagcgcacgccgcggatttcgtgaccgtggatgtgctcgacgaggagcacaaccacgggctgagagaaaccctcaaggcttacagcagctggccgacgttccctcaggtcttcgtcggaggggagctcgtgggaggctgcgatatcatttcgtccatggctgagagaggggagcttgccgccctattgattcagaaatga

SEQ ID NO: 10406 - DNA, 759 bp, Zea mays
  Peptide Sequence Number=SeqID_52185
atgaagcccagccggagcaactccaaactgagaggcacccgcacccgacgtcaatccgagaaggacgagagaatgcgactctgcccccttcctccccatccgcgcgaggatttcgccccgctcgccagccttcacaatcgcccaacgccaaccacctcccctttcctcgcaagctcttctcccaaatcctccaccacccccatccccagcctgccgccccttgcctacacgcgcacccccgaggacgccgccgccgccacgctccgcgtcggcctcgacctcgactgcgggccgttcctcgcgctctacgccggctccatcgtcgccgcgggcaaggtcgccgacgccgacgtcgacgtcgcgctcctcaacactggagcaccaggacctggcgctcgacgtggcgcgcaccgcgtcatgctcctcaagaactggtgcggcgccaagcacaacagggacgtgctcccgctccgccccgccgcgcaccgcgtcgtcgccgtcgtcggcccgcacgccgacgccaccgttgccatgatcgggaactacgagggcaagccctgccgctacaccacgccgctgcagggcatcgccgcgtacgccgcgcgggttgtgcagcaggccggctgcaccgacgtcgcgtgccgcgggaaccaacccatcaccgcggccatcgaggcagcgcgccaagctgaagccaccgtcgtcgtcgcgggcctcgaccagaatgtggaggccgagggcctggaccggacctgttag

SEQ ID NO: 10407 - DNA, 1245 bp, Zea mays
  Peptide Sequence Number=SeqID_52186
atgtgggacgggctggagagcgcggcgaccgtggcgcagctggtcggtctcgacgtcggcggcctcatcaccatgatcgggcaggcggcgcggaaggctcggcagaacaccaaggactgcgagcacctagcccgccgcgtcggcatgctcgcggagctggtcccccacctgcaggacccggaggcccaggcgggcggtggccgggctcaaagatgcgctcgtggaggctcaccagctcatcacatcctgccagaggagggggctcacgtcccagctgttctcggcgtccaggcaggccgacagtcggcgggaggggctgaggatcgggagttcacgctggcggagatcgccgtggccaccaacaacttcgccgtcgtgctcagcaacgacgccgacactggcaccaaggtatacaagggaaggctcctgcagaacgggcctgaggtggccgtcaagcgcctcaaccgcgcgcggcggggagcggaggacgccttcttcgcggagcagcacatcctctcgccgctccgccacgaccgcatcgtccgcctcctgggcacctgcgccgacgacggcgagcgcatgctgctcacccagtacatgcccaacggctcgctccacgaccacctgcacgggcaccacctgtcgtcctcgtcggcgtcgccggtgacggcgtcctggaggactcgcgtccaggtgctggttggcacggcgcgcgccgtcgagcacctgcactgccacgccgtgcctctcatcatccacggcaacgtcgcctcctccaacgtcctcctggacgccgcctgggcgccgcgcctggccggcttcggcgcatcggtgtggcgcgcggccggcgtggactcccagcccgtggaggtcgccggcgccgcgtcgtgcggcgggtacgccgacccggagtactgcggcacgggccggatcaggccggcgagcgacgtttacggcctcggcgtgctgatgctcgaggtcctgacggggcaaccaccggtggtcagtgtctgggacgcggcgaagcagggcgtggtggccgtgaccttggcgtcgttcgcgctgccgagcatccaggccggccggcttggggacgtgctcgacaggcgtccggcgccgcagcagctccagccgctgcagctggtggccaacatggcggcgcgttgtctgcatctgcaggggggtagtcgcccggccatatcagacgtcgtcgccaacctcgagcaggcactccgcctcatatga

SEQ ID NO: 10408 - DNA, 231 bp, Zea mays
  Peptide Sequence Number=SeqID_52187
atggaaggccgcttcgctaaaattcaccggactgtccggtgtgcaccggactgtccggtgcgccagcggagcaacggctacctcgcgccaacggtcgactctgacagcgaacagtgcgcaacagtacacgcggcagaagtcagagcagaaggacagaggggcaccggactgtccgagagggaaagggttgaaaaagacccgtccttgagtggactcctcaacggggactag

SEQ ID NO: 10409 - DNA, 422 bp, Zea mays
  Peptide Sequence Number=SeqID_52188
gggtatacgaaaacctctccgccgaactcctgcagatcctaattaacctccccctgctgcaccaattgccgctggcgatggatggtagcggacgagctctcgattgtcgcagcttctggaaggccggcgcgtacgaggcccccactgctccgaccagggagttccaagatgctcttgagacgggggacttcgaccgcgcgcgcgtgcaccccaagttcctccacaccaacgccacctcccacaagtgggctttcggagatcggtaccagtatacttctccactcgttcgacatctattcgactggaagatatggttgaacaacttggggcagcaaagggaggcagtggcgagcgtgagcagcaaggggacagcgaacagggacaacgagctggagcactggagtggcgagcacgagcgctga

SEQ ID NO: 10410 - DNA, 1053 bp, Zea mays
  Peptide Sequence Number=SeqID_52189
atgtccaagaaggcttcagatgaggagctcatctccagtccctgtgttctcttttctcccagccgatgtagagagaaagccgtcagggaagctgaaaagacaactatagctgaacttcttgacaatgcagtggatgagataagcaatggtgccacgttcataaaagttgataaaagcatcaatttgaaagacaatagctcaatgctagttttccaagatgatggaggcggcatggatcctgaaggtgtccgtcgatgcatgagtttaggattctcaaccaagaaatctaagaccactattggccagtatggaaatggctttaagacaagcacaatgagacttggtgcagatgcaattgtttttactcgtgctatccgaggaggtaatgttacattgagtataggtttgctctcctacacttttttgagaaagacattgaaggatgacatagttgttccaatgcttgattttaagatccaagatggggacattgtaccgttggtgtatggttcacagggtgattgggatagtagtctgaagatagtacttgattggtcccctttttcttcgaaggaagaacttctgcagcaggatgttggtagtcatggaactaaagtggtagtgtacaatttatggatgaatgatgatggccttttggaacttgactttgaggatgatgatgagaaggagggcgccatagacgaagacggcgacgcagtcgaggcagtcgtagaggaagaagccgatgccgaggacgatgttgtcaaaccgccatggacgaggcgtgctccaggcgaagaggcaggcgtggcgacacatcaaggatcctcgagtcgcagcggcgagagctacgacacacaggaagaagagactcgacgacgccagtggagcgtgacgacggtacttgtcggcaaagaactcgaggacgaacgtggtacagaccaacgacggaggtcggcgcgcgacgacgtcatcccgacgaaggccagcgtgcgacacgaccccgatcgagatctacgcgacgtgagtctggtgaagcccgacacgtcctag

SEQ ID NO: 10411 - DNA, 225 bp, Zea mays
  Peptide Sequence Number=SeqID_52190
atggcttgttcagccaaagacagcttggtctgggtgcaccagactgtccggtggtgcaccagacagtgtccggtgcgccaggctgactctgacgaactggctactctcgggacttcgacgacggtgtacggctataaatcaccggactgtccggtggtgcaccggactgtccgtgtccggtgcgccaacggctcggaatctgcaacggtcggcttcgccaaataa

SEQ ID NO: 10412 - DNA, 324 bp, Zea mays
  Peptide Sequence Number=SeqID_52191
atggcggagacgcggagtgcgggaagcaagacaggaagtgcagctgtagaccgcgtctcctcaggtgcgctccagctcgtgaccatggaagccaggaagacagctaaaacccgcagaccgtggacgttgcggagtgcaggaagcaagccaggaagtgcagctgcagaccgcgtctcctcaggtgcgctccagctcgtgaccatggaagccaggaagacagctgcagacccgcagaccatggacgttgcggagtgcaggagcaggaacgaccgaacggggcctcacagaccgtgtctccatgttgcgtgctccctgagaggctga

SEQ ID NO: 10413 - DNA, 429 bp, Zea mays
  Peptide Sequence Number=SeqID_52192
atggcagccactaagttccagtctgctaagttctggatgctatctcatagtgatatgctccctggttttaaagaaggccaggagaaaatgtcaaagagtgacccatcctcggctatctttatggaagatgacgaggcccaagttaatgtgaagataaagcaagcattttgccctcccaaaattgttgaggggaatccttgtttggagtacattaaatacatcgttttcccttggtttggaaggacatttacaagcatggatgaactaatttctgattatgagactggtgctttgcatcctgctgatgtcaaacctgcactggcaaaagcaataaatgaaattttgcagcctgttcgtgaccacttcaacaacaataacgaagccaaagttctactaaacactgtcaagaagtacagagtaaccagttga

SEQ ID NO: 10414 - DNA, 597 bp, Zea mays
  Peptide Sequence Number=SeqID_52193
atggcaacacctggggtgttacagcgccccacccacccacccccatctccggcgccccacccacccacccccatcccttcaacggagccccagcctgtgggcgtccacacccagaaggcccccacctgtccccgcctctgccaacgctcctgccccgcacacccacccgccgctcccgcgttgtccgcccccgtcataaattgccctcttccatgtgcaccacagaaatctcggcgcgagatccccccgaaacctcgccataccctactgcgaggcgtaccattcgacagcgaggccctccttggcgggaacggcgtggtagtcgtggaggctaagacgctccacctcgacggcacacaggcctcgcggtggcccaaggacgtcgggcggaagtcgcgccgagctacttccctgcctacgccaaggaagcccaacacagagaagaggatgcccaccagcgacgtcccgtgctgcgaccgccacgcgaagaaggctgacggcatgccccgctccgatatgcccaacagctgtctgacgaaccggggtacattggttttgttgggttgctgccctcgtatagacggcaagctcttttaa

SEQ ID NO: 10415 - DNA, 315 bp, Zea mays
  Peptide Sequence Number=SeqID_52194
atggcggcgacgaagagcgacggggagggcgcggacgccgtgaagccgagcgagaaggtgctgttgggcgacgtccacgtcgccgagttgcccggcgagagggtcccccagcggcatgtccgcgccgcaggacagcagcggcgggaggaggaagaggcagcagccgagggccacaaggccccccggagcttcgccgcaaagggcgtatcttttttgccttcccggcggtttttgggcggcggaaagcagcggagaactcacggcgctcggacggcggctgtatcaacgacactaatcgtcgttcactactggtag

SEQ ID NO: 10416 - DNA, 552 bp, Zea mays
  Peptide Sequence Number=SeqID_52195
atgggcgtgtgcagctacaacggcacgtcgccggtctgcgggtgcccgtcgcttaacttccagctctccgacccttccaagccgcgcgccggctgcacgcgcaaggtcgagctcgccagctgccccggcaactccaccacgctcgagctcgacaacacgcagttcctcacctacccgccggagatcaccacagagcagttcttcgtcggcatcaccgcctgccgcctcaactgcctctccggcggctgctttttcgcgaatccggctcccaactttttcaataactgcgagcctattgtggacatcaactgcctctccggcggctcctgcgttgcgtccaccgcgctctctgacggctctggcctctgcttcctcaaggtgtccagcttcgtcagcggctaccagtcggccgcgctgcccagcacgtctttcgtcaaggtcttccgtgggggaacgacggcgggggacaacttccgtggggaacgacggcgggggtgtttggagatctctggcagcgaggagaataaacagagctctctggtgcgtttctga

SEQ ID NO: 10417 - DNA, 954 bp, Zea mays
  Peptide Sequence Number=SeqID_52196
atggaaagttggaaacacaacttcctatccagtatgaaactcagcaggagaacaagagaacaggctcagcaggaggagcaaggtggtaatcagatcgaacctgcagtggaggctcacttggaggtgaatgatggagctgctgatgctgatgcgtctgtgaacaacgctaatcaggtagtcactactgaaggattggaaaacagagtggttgagatggtggacagagaagtgaaaagagacgagcccagggttggagagaacatatgtcctagatgtgaaatgcaaatgaggcatatgccttctgtggggtctagagttgagaagtggaatcctgctattagttctaaaggagccctggatctggcttggttcaggatcacaggaatcccttctgaaagagatcttctcctaatagggaggtttccaaaccatgctggaaatcaatggatcggaaatgaggaggataaagcaaacaccaagatgggcatctggaagatgaaagtgaggatcaagtttgagactggaaatcacaagcttttcagtaaaggactagatgatatagtggaagagagagaacaggaagtcactactgggagggcaatatctttgagtccccaaaaagggtgccaagaagcccccgtcgtagaactatcaggtcaagaggagagtgtcaaggtgatacaagtaaccacttctgcggctaagggtgttgagaaccaacaggtttttaagtgttttatcatgatagctgagactgccaaagaaaaatgggcaaaggtctgtggggatattccatccagaaaggttgatttgcagtataagttcaacctggagtggaacaaggcaaatgaaaatcagaaaatatctcaagtggggatggaaagtcaggaagctggtattcaagtcgaacaagagtctaatgctgaaactgttgatgggttgaaagatcactag

SEQ ID NO: 10418 - DNA, 381 bp, Zea mays
  Peptide Sequence Number=SeqID_52197
atgccgacgtgggagcgcttcaaggagctatgccatctgcagttcgggccacctgtccgggattcgcgccttgcggaacttggtcggcttcagttccgttccatggtgcaggaattcatggagcggttcaacaccgttctatgccacacgcgcaatcttgacgttgtccagaaggcggagctcttcgtgggaggcctttcagacgacgtccgcgttgacgtggcgatgcgcgcgacgaaggaccttccgacgacggtgtacttggctcaggcgttcgagctgcgcgccaacaacatcatggtgatggccccgtcaggccccatgcaacctacgtggtcgttgcctctccagcccaaagtagcacctagaggcgctgcatag

SEQ ID NO: 10419 - DNA, 246 bp, Zea mays
  Peptide Sequence Number=SeqID_52198
atggaggtatcacacaccttgaattgtgttgcgccgagccctatcgaccacggacggtggcttaacggcaatggtaaattctggcaatctccccaaccacaccgcggacactacacagcaaaggaggcaaagcgtgggcgtaacggcctggatccgaaccaactcagcggagacgaggtacctgacgatgagggcccacgtgccatcgacagaggcaatgcgcgcaacggggagaatggtcactga

SEQ ID NO: 10420 - DNA, 900 bp, Zea mays
  Peptide Sequence Number=SeqID_52199
atggatcatttagtagcctatatatcattgtcttatgccgctatatgctcaaaagattgtatatgctttcaggccccaattgttctggagaatttggaaacaaagaaaattgtccttgttcatggagaagggttcggtgcttggtgttggtacaagaccatctcacacttggaggaagctggtctagatcctgttgccttagatctcacaggctctggcatagaccatactgatacaaacagcatagctacgttagcagattactccaagccattgattgattacctcgacagacttcctgaagatgagaaggtcattttggtcggccatagttgcggaggtgcgagtgtctcgtatgcactggagcagtacccccgaaagatctcaaaggcggtgtttcttactgctacaatggggctcacgttgacctacattcgacagctccggtcggcggatgttttcttgcaagagtcacagtttctagtctatggaaatgggaaggacaagcctcctactgggctgatgttcgataagcagcagatcaaggggctgatatgggcactagcagcggtgtccatgaggcctatccctctagccccaatcatggagaagctctccctcaccccggagaactacggctccgtccgtcgctacttcatccaggcactcgacgaccacatgctgtcgccggatgcccaggagaagctggtccgcgagaaccctcccgacggcatcttcaagatcaagggcggcgaccactgccccttcttctcaaagccgcagtccctcaacaagatcctgctggagatcgcgcagatccaagctcctgcggcgctgctcaaggcgagctcccccgaggagaccgccgccgccatggtgacagggccagccaagtcatga

SEQ ID NO: 10421 - DNA, 906 bp, Zea mays
  Peptide Sequence Number=SeqID_52200
atggaggacctgagcgtggaggagctcgcctccaacctctccacctacaaagagcagctacgcgaggtcaagaagcttatcaaggagaagaaggatgatgctggaatttctgaatatattgatatggagaaggagcttcaagaggtcataacgttaaccgaagagattttggcaactgcaaagcaaactgagagtgcccagaatgttgcaggtctatcaccgccaagctattcagctggagtgcagtctgagtcttgtggcagggactggatgacctttcacattcccataagtttgccgttggtactagagttcaagctgtgtggagtgaagatggagaatggtataatgcaaccgttgaagcttttgacaccaaatggatactatgtagcctacgatggctggggaaacagtgaagaggtggacccagataatgtgaggctgcttgaggaagaagcagctgatgccttgggacaagctgaaaaggaagctgaagctacaaaaatggcaataaagaggaaaattgaacaagcagcaacatctgattttcaggcgcgtagcttgccggccaaacttcgtatcgaaccaagtgaccctgaggatgttaaagctgcaaagcgtaagaaaatacatgctttcaaatcaaaatcccgctttgagcagcttgaatttgcccaaaacaaaaggcagaatgcatggcagcagtttcaaaccaaggggaaagccaaaaaggtggggttcttctccggtcgcaagaaggagagcatcttcaagtcaccggacgaccacagaggtaaggtgggtgtcactgggagtggcaagggcctgaccgacttccagaggagggagaagcatctgcaccttaaaggtgggtccggggatgcagcggatgatgacgaggagtaa

SEQ ID NO: 10422 - DNA, 354 bp, Zea mays
  Peptide Sequence Number=SeqID_52201
atggcggacttcggctgcatggggaagattccggtgagcacggaccgggcgaaccagaggggctgggggcgtaccgaggggtgtcccaagttgctgacggtgaggcggaactcaccgaggcaacaggcgcggctatgccacaaggaaggccacaagtcataccaatgcaaggcaaagacacgggataagccaaagcaaaagctcaagcaaaagccaataagcaaaatctccaacacctgcatcaacaaggttgataaaaaggttgctacaccatacttgatcaaaaagaaaaagaatggaaaggtgatagcaatcaaggccaacaagcaagctagcaaaggaaaaggggcctaa

SEQ ID NO: 10423 - DNA, 570 bp, Zea mays
  Peptide Sequence Number=SeqID_52202
atggccggagttgccgtccacggtataagcaccctaaactccaatgctaatcggttcgacgcgttacgggaaggaaaggcagagatatccccacacgacgaagcacggatcctcgctggaacacgccccggcgagcaattcacgccaagctggagcacttctttggctaatagcggcagaatcacaaccagtaggccaaatcggagcgccacagtacttcgcgcggcatcaatttcagtcacaaaacgagttgcacccatggaggcggagggtttgcgggtggaatccttaacgaaggcacccgcacctttatccttgccgaggaaaggaccgcaaggcgcaggattgaccgggcgcaacggtgagccgactccaccgggttcgctgatatcggttgagggcgatggtggggcgtggagcgcacgcgagggagttgaccccatggccccattagtccgagacccagtagtcatcagccgagctggcgtgaccggcaggtggccccaaggcatcggcgcccaagcgcggaggctgactgagtcgcgggcccaagctgtcggcaccaactag

SEQ ID NO: 10424 - DNA, 378 bp, Zea mays
  Peptide Sequence Number=SeqID_52203
atggaaactagaacaacaacgggacaaaagtggggtttctggcagaaacagatagctattagaaattcctcaaaatccgccaccgcccttgcccttgccgccgctgcctttctcgtcatcgaaatcactttcaccattgttgccaccaccacctttacagccaacattactgcccctagcatggtcgctgcggtcgttgccctcattgccattgtcgccttagctgtcgtcgtcgtcctcgttgtccttgacctcctcctcgccctcctcctccgagctaccgagaacggggtgctccacaaccttgatgaaggcccgctcggctggagtcaggtcatcagacttaaggggaatgagaggagggagaccgaggcatag

SEQ ID NO: 10425 - DNA, 328 bp, Zea mays
  Peptide Sequence Number=SeqID_52204
cgaagcgcctctgaaaattcccgaaggtgcgaagtttggtttggagtctcctggtgcaccggacactgtccgtgcttcgcccagtggttttgttccccataatagaagcatgcgcgacctcctacttgttatggagctgcttggttattctggttggttgctggggcaggaatgcgagctgcctcgttattctgacgctagtactgatttcctccctgctggttgttctgacggtactgctgctgctgctgagggaactgcctccggtactggtgctggtgctggtggtgacgctgatgccaatgaccttgagggtgaccttgcttga

SEQ ID NO: 10426 - DNA, 435 bp, Zea mays
  Peptide Sequence Number=SeqID_52205
atgatggacgacgttgatgtggggaggccgcggctaccgtggacggcggcgggcgacggcggtgggagggcgcgcggccgtgagcagacggcggctaccgtggacgacggcggtcgtggtcggcggcgggcctcggcgggcgcgcgggcgggggcggcggccatgggcgggtcggcgaccgtgggtgggtggtggtcgtgcgcgtggcgcgagcacgcggcgcgggcacgcggtgcaaggggcgggcgccgggctgcgtgggcggcggctaccggcggcgtggggcgggcgcggggcgcgggcggcacggcggcgtgggcggcgcgggtagagaaaggtagaagaaacaggaagatagaagaaaggggctcccggcgtcggttatttcgaataactcctgtcggcctggcggcgcggccgacaggagttatttaa

SEQ ID NO: 10427 - DNA, 297 bp, Zea mays
  Peptide Sequence Number=SeqID_52206
atggctactgcccaagggatgagcccctttttaaaggcagatttccccgatcatgccccgaagcgtcatggccaaggtctcccccaatgcgcaccagggttcccattctatgacatgggggccaggcctcacacgtcgtacaagctggcccaaagcgcgaagaaggcaaaccgccgcgcaaggagcgtgcaaccgtcctgcggttattcgcccttccatcttcaccacaaccagcggaaagtctcaccgccgatcgtgccaataccgcgcctcctcgaggccgtcgcagaagactaa

SEQ ID NO: 10428 - DNA, 108 bp, Zea mays
  Peptide Sequence Number=SeqID_52207
atggcgcctccagatgcccaggtcttcgtcgtgtccttctccggcaacaaacaggatatggattttgccctccaaaagccaaaattcaaaccaaaggattcaatctag

SEQ ID NO: 10429 - DNA, 279 bp, Zea mays
  Peptide Sequence Number=SeqID_52208
atgaacagtgtcatgtccggtacaccaccgaactatccgaacacgccaagagggagatggtcaccagcgaaaagccccaagcctcgggaaaagaagaacgaggaacggactccgtcaaaggaggccagcgacaagcacaaagaagaatccgctagctccatcaagtcatacaggaagggtgacaagaagaaaaagaaaatgaagaaggtggtctactacgagaccgactcttcatcaccttccacctctgacgccgagtctaccacttcgaagcgctaa

SEQ ID NO: 10430 - DNA, 144 bp, Zea mays
  Peptide Sequence Number=SeqID_52209
atggcgacaggccgaccacagtgccccgaccacatccacgatgagatcttttcaccgggagtcgttatccgcgcgatactgagcgtgaatcgcaacgccgggcaaaatccttatagatttaaggatatagagctccaaagttga

SEQ ID NO: 10431 - DNA, 1596 bp, Zea mays
  Peptide Sequence Number=SeqID_52210
atggcttcggcggctgcagcggtgatcccggacggccggcgatggagcaaaggtccgggctcctcgtcgtcgccggtgacaacggccattttcctcttcttcttcgttgtcgtggtcggcgtcctcgtgtccgcccgctggatcaccaccacgactcatctgtcgaccaccaatctggatcagtggagctcaaagctggctatcttaaccgcgacgcacaccacctcctccatcccggccatccccgcggcaccgccgccgcctcggccgacctactccctctcctgcccggcgccgccgcttcaccgtgacccgaccatccccagcaacatctcccagaccctcgacctcgtgctctcccccaacgcctcctccgcctccacttgcgccgcctttcccgaccccccgccgctccctgccaactccaacgcctcctccacctgccccgcctacttccgcttcatccacgaggacctccacccatggcgcgccgctgggggcatcacccgcgccatggtcgaccgcgcgcgcgccaccgccaacttccgcctcgtcgtcatccggggccgcgcgtacatcgagcgcatcgcgccggcattccagacgcgcgacctcttcaccatctggggcattctgcagctgctccggcgctaccccggccgcgtccctgacctcgacctcatgtttgactgcgtcgactggcccgtcgtgcacgccgaccagtaccagggggagaacgccacgctattgccgccgctcttcaggcctgagatcaacataaaaccgtgggatgctctgcagaaggaattgaatggtggaaacaagagggtgaaatggttggctagagaaccttatgcttattggaaagggaatccagatgttgcagttacaaggcaggagcttgttaagtgtaacgtctccagtaagcatgaatggaatgcaaggatttacaaacaggattggctcaaagagatcaaggcaggatacaaacagtcagatttggctagtcaatgcactcataggtacaagatttatattgaaggatcagcatggtcagtcagtgagaagtatattctagcttgtgattccatgacactagttgttacaccaaaatactatgatttttattcaagggtgctgatgcccatgcaacattattggccaatttgggatgacaataagtgtagctccataaagtttgctgttgattggggcaactctcacaagcagaaggcacagaggataggaaagcaaggaagcaactttattcaaaaagagctcagcatggaatatgtatatgattacatgtttcacctcttaactgagtatgccaagctcctaaggttcaagccaagaaaaccacctgaagctattgaggtctgtcctgaatctctggcttgccaagctataggccgcgagaagaagttcatggaggactccatggtgagatccgccagcgatgctggcccatgtgacctgcctcctcctttcagtcctgaggaattcaaagcactgcgacgtaggagagagaaggcaatgaagcggatcgaaacatgggtgcaaaaaacttcgaggcccatggttagcaagccctga

SEQ ID NO: 10432 - DNA, 537 bp, Zea mays
  Peptide Sequence Number=SeqID_52211
atgccgcaaccaaagtttaaggagagggagagcgcgcatcttgccacgtgcatttctgggctttccacctccaaatgggtctactacgacaagatggtgtcaattctttgcccctccccactgccgctcccggtcccgcttccgttgcctctccagttgctacctctggtcgctaagcatcgtcgtgacatgcagccaccacgacgctttcagtggggggtgaaagctcctgagcgacttcttggtggtggagaggacgtcgtaggtcccagggtttcagggtcaggttctacgaggatggagagtagcaagaggcaacacatggtggaggtggagcaaatgaggagggatttgcaaaaggacctagatgcaaagtggagggagattttggagaaggcacatgcggagattgctcgtctcagtaatgaggatggggatgaggatgatgtggacgaagatggggacgttggcgatggtaagagattagaagatggtggtgacgagcaaacaaatagtgctatggatgcttctacttag

SEQ ID NO: 10433 - DNA, 318 bp, Zea mays
  Peptide Sequence Number=SeqID_52212
atggacttctttggagctacaattgggtggagcttcaattggaaaattgctttgtttcttttggtaactgttcttgaacttagcacagtacatgaggaagccttggatgatgctgacattgaccctataacttgggcatcatcatctggtcctgcttcatctccagatgcggagggaggaggggggcacaggtcagaggagaggatggaggctgttggaggagtggaggtggaggatggttggaactctagaaggctgaagtcggaggtgggcggcgacgatgctggaggtgggggcggcgacgctggtccactatag

SEQ ID NO: 10434 - DNA, 618 bp, Zea mays
  Peptide Sequence Number=SeqID_52213
atggagaatgggagcaagatcgtggtcacaagcaggttggagaagatagctgctctcgggacaaccgaggctctcagactcgaggccctctctagagaagcctactggtacgtgttcaagtcgctcgtgttcggagccgccgaccccggtgatcagccaaagctcgcgtccctgggcaagcagatcgtggagctgctggacggctccttcgtggcaggaaacatagtggcgagcttgatgagagccaacatgagcgccggattctggctcagggtgctacactgcttgagagactacacgaggaaacacctactcatgttcggcgagcgtcctagccatcttcgtcagaaaggtgagactgtgaagctttggaggatggccagggcacacgatgtagttacaatctgcaacgtctatcagctgccgtatacccaggacgatgtacccgacgtcactgtgcaagatcttctgtcggggcgtgttactcgggaggggaatttcagtgcggtggcatggagatccaccattccaccctgctacacctacttggtacgctgcacgtcgcagacggccaggtgttctacggtcaagaaacggccccgggatgcaagggagtga

SEQ ID NO: 10435 - DNA, 345 bp, Zea mays
  Peptide Sequence Number=SeqID_52214
atgaaggggcccgctgaccaggcgcaacagctctgcgcgcccgccttggctcgcctggggtcgctgccagtaggggcccgcgcgtcagctctttccctctccccgtgtaacagaacccgagtccgtggccggctgtacgcagcggcctcgcgtaacgaccgccgccccatcgcggtggattcgtggccgggggataaaagccggggccatctccctacctctccacatctacaaccccgccaactagcagagcgccattgccagggaagagaattggtgcttcagaggggggcggaaggaaggggaaatccgccgtcgccgtctgatgcctgtgacgccacatag

SEQ ID NO: 10436 - DNA, 852 bp, Zea mays
  Peptide Sequence Number=SeqID_52215
atgccccccatcgccatccctaggaaactagagtggggtgctacgactgtcaagaaggagaagaaatgccccttcaccactgttgagatcgaggatatctcggacgacaaggttttgaacgacgagggattttctagggctgcgcagctcgccatcgagaccaccgagaatgagcagatcgtggttaagccagatgtcgcgttacaagggcccggcggcggtgtcgtagccatcttgtgcagagtgaggctgacagcggccaagtccggcttcaggcgccataggaaactccgcttcgcccgaccccagggctcggactcgggctcagccccggaagacgacgaactctgcttcgcccgaccccagggctcggactcgggctcagccccagaagacgacgaactccgcttcgcccgaccccagggctcggactcgggcttagccccggaagacgacgaactccgcttcgcccgaccccagggctcggactcgggctcagccccggaagacgacgaactccgcttcgcccgaccccagggctcggactcgggcctagctcacgaggtcgacgccgatggatccaaggacaccagcgccgcccctctccgagctcccccaatggccgccgcgggcgagtgcccctgtgtagccgtccgcccctctcctaccgcattcgagctcccacgagcgcagagcgggcagggcgtggtcggcggtgccacaatggacgtgggtagccggcgtccggctgagctccatccagatctgaccataggcgtccacaagcgacaccccgcccccgccccggcacccctagcctccgcccgctgcgccatgacagatgtcgcatga

SEQ ID NO: 10437 - DNA, 357 bp, Zea mays
  Peptide Sequence Number=SeqID_52216
atggcgcacgtttctacctcccactaccacccaccacaccctccgctccgcgcagcaccagtcgccatccccgcccgccatctgtgcgcgtctggcgtctccctcgcccccgctctcctctctgttgtccacatcatctgcccgcgtctcccagccacccgcgagcagagcctctgcactcggatcccacgcccgcgagcagagcctctgctgtccacgttgtctgcgtcggatccgctcctccctcgaaaggagaatctccaaatctcgctgccatccccgcccgccatctgcgcgcgttggccatctactggctacgcgcgtgcgattgccgttggatccccctgtgggggatag

SEQ ID NO: 10438 - DNA, 453 bp, Zea mays
  Peptide Sequence Number=SeqID_52217
atgggggcagtgacattcccacgcaagccttattttgaccaagaggtggaagatgtcgtccccgaagacattctatcaaagcctcctaaagctgacaatcccactatctgttcagaagtccgagatggtggtcttctgctgcatgattctaccgggcaagaagtaacccgggtggtttctcgtgcctcgtcgaacttagagggcggccttccttgtgaaaatgttgacctgagtcacccggctcccatggatgtggctgaggaatcttcagccctagaggtggccgctgcggaaggcccagcccccgagggtggtgctggtagtgacccagccccaagggattttcttggcggtgtatctgcccaactgagatcctgcagtgctcctatccccgaccaagctttgtctctgatgcagtgtgtaaggaaaatgaacctcgagccatttggctaa

SEQ ID NO: 10439 - DNA, 636 bp, Zea mays
  Peptide Sequence Number=SeqID_52218
atgggtagaggtaggaggggtagtggctggcctcgtcgcgctgatggcaagagcaagcgcgctccgagtcctccctcggaggacttcggggactcggagtactcgaaggaggcctcctttgagtctgatcattctcctgcactggcttcacccctggcatcatccgaggactcggatgattccatggggctctccaccacagctcgagcgtactggcgctccaacgagcgcgccgggcttggtgggtcggatgagtcgggggtctcctcggacgaggcggactcctctaactcctccgagcagtggagcggcgacgatggtgacgacgagggcgacgatagcagcagtggcgacgacgatgggagtgacggcagcaagggcagcggcggtgagggcgacggtgacggcagcaacggcgacgacaagggcgtcggcgatggcagcagcgacgacggcgagggcgacggtgacaacagtaggggcggcagcagcaagggcgacggtgacaacggcagcggcaacggtgatggcggcaggggcgacagcgatgatgacggaggcaggggcgacggcggcaatagcggcaagggctacgacggctgcagcaaggctagtggcataatgccacttgtttaa

SEQ ID NO: 10440 - DNA, 489 bp, Zea mays
  Peptide Sequence Number=SeqID_52219
atgacggtgtgggaggcccgggcatgggcccgctccgccaacttcgattatgctgggtgcaaggttgataggaagagcacatcggggacttgtcagtttctaggatggtccctagtgtcttggagctctaagaaacaaaattatgttgccctatccaccgccgaggtcgagtatgctgccgcaagccagtgttgcgcgcaactactttggatgaggcaaaccctccggaactttagctacaatctaagcaaagtcatactcctaagtgataatgagagtgcaatccgcttggcggataatcccgttgaatacagccgcactaagcacatagacatccggcatcattttctgagagaccaccagcaatggggagatatctatatttgccatgttagcaccgatcaccagctagccgatatcttcaccaaacatttagatgatagaaggttttgtgagctaaatgtcttagattcatggaacttggattga

SEQ ID NO: 10441 - DNA, 510 bp, Zea mays
  Peptide Sequence Number=SeqID_52220
atggcaaatagaaaatcgatgaccggccaagatgtgatcggaaagttaaacgactccgacgatttgacggccacagacgtagccgggataactaaaatactacgacagctaagaattaactcggagacgacgactggcacgtacgagaggagctcgacgcggaaacttgacacgccgttgcgagcagagaattttcgtgcgcacggcaaacaacggaagagcgagctgcgcgtgcgcagagggctcgacaacctgcagcagggactagcagggcgcgagcaaaggaaggaggtggagtcagagagatgggcgtgccatgaacggacagagggagcagggggttcacgacgggagcagagaagtcggcacgcaggggagaacaacggccgagcaagagctagagcttcaccggcgtgccgagaggaaggctgtgctgaacgccggcaggggaaagacccaggcagcagcgcggctgggcactgtacggtggagctccgcgcgcgtatataa

SEQ ID NO: 10442 - DNA, 192 bp, Zea mays
  Peptide Sequence Number=SeqID_52221
atggggccgtgcgaggtggagcttcctatggcgcccgaggccggacttagctgttgtcagcctcactctatcgagtggcacagtagtcagagcgatgcaggcggcgctgtcttcttgtcaggcgatctggccaaggttgcttctctgcgaagactgggcctcgggcgagccgaaggtgtgtccgttgcttga

SEQ ID NO: 10443 - DNA, 393 bp, Zea mays
  Peptide Sequence Number=SeqID_52222
atggagcatcccaccttcgatgccacccttgtgaccgtcggcgcgggcgtcggtgtgcgcaccgccaccaccacgtccgcgggcctcctccctgatgttggcctgctcgctctcaccgacacgggtgtcgtcttccccgacaccgcggccgacctcctccctgccgctagcagctccatctcctcccgcaacaacagcaagctcatcgtggatggggcccccttcatagtcggccttggcccctctccggaggcccctgttgtcctctctgtgcagcagggtgcccgacgctcctcgccaggcttcctcgcccactaccccccctcatcgagcccacgtgaaccgacatcgtcacatcctcgtcgccctctacgcttgtctctaccgccttag

SEQ ID NO: 10444 - DNA, 522 bp, Zea mays
  Peptide Sequence Number=SeqID_52223
atgaagattgagaagatcaggcctttgccgcctgcagattcatcaattgttgataccagtgatagtgaaccagaagtcactcagatcgatgttaaggaagtgggcaatgagggtacattggagaaagaagagaaagctactgatggccttaagactgatgggtctgggattgttaataccatggttgaagttcaactgatggagaaaaactctaacaatgccactctggatggtgttatacatgccaattcagagattgccgttgaaagctattttttagttctggatgcaaaaaattcattagaaagcatagaagatcgacgcaaacaaaaaactgatacaatttctgtgaaagaacaagaccaacttgaggaggctcagggatcgttaaaaagtgatgtcaagactggccagtcaaaagaagctaggttagctcgggtttgtgctggactttcatcctgcctccaagagtataagtctaaaaatgcacagctggaggaacttcttgttcaagaggtctag

SEQ ID NO: 10445 - DNA, 237 bp, Zea mays
  Peptide Sequence Number=SeqID_52224
atgccaggcataccaagggatgtcgccgagcactcactggacatccgagccagagcccaacccatgaaacagcacctgcgccgttttgatgaagaaaagcgcagagccataggcgaggaggtccacaagctaatggctgcagggttcatcaaagagaaacgttatatcccttcgggtataaacgaatctcagacgaaggttacaaaaggaaagacctttcgcaagatagacaagtga

SEQ ID NO: 10446 - DNA, 870 bp, Zea mays
  Peptide Sequence Number=SeqID_52225
atgaccgaccaagccacgcaaccactaatccactatttcgagaaaataattctgaaccatcggctcaacagcaagacaagccagcagtcgctttgccttctggacatggctttgctgggctcacgcgtctctcaccggtggggaggcatccgatttgatgaaacatcatgtggatcaccgagatggatagggagaggcctctcgtgtgtgtgcatcaagcggaaaggcacatatgaaaggatatgcatgaacctcacaccagtgcaggaagaaaggcttcagagattgaagcatcgcatgaaggtttactttgatccatctagacgagatcaccaggaagccctgaaagctctttggcatgcaacataccctgatcaagaacttgaaggtttgatatctgagcagtggaaggacatgggctggcaaggaagagacccatcaactgactttagaggcgcaggattcatatccctggagaatcttttgttctttgccaagacgttctccgcatcgtttcagagacttctaaataaacagtgcggtaacagagccacatgggagtacccatttgcggttgctggtgtaaatattacattcatgatcatgcagatgctagatctccagtctactaagccaagaacatttgtgcgagccatttttatccaaatgctctcagaggatgagtgggcatttgatctgctctactgtgtcgcatttgttgtgatggacaagcagtggctggacaagaatgcatcttacatggacttcaatgaggtgctgaagtcgacacgagcccagctggagagggagcttatgctggacgatgtcatccgcatcgaagacatgccgtcatacagcctgctttgctag

SEQ ID NO: 10447 - DNA, 765 bp, Zea mays
  Peptide Sequence Number=SeqID_52226
atggagcggccctccaatgagttggccatgaggtattcatgggccaagctgtggttggacacactcgatggggagctaagtccgtcttccaaccccaagaggggaaggtcatggatcgagtctgggtcaggatcgagcattcccacgattttggtgaaggcgcgttgcagcgcgcctcgctgctcgtcacttccttgtggggggctgagccagaggttgtcgagaccccccagcaatgtcgagaggggggacacgttggccataaataagccgcagtccgaggggttcgtaggtcatggtgcgctgcagcccaaggggctcgtagttcatgtgtgggaggaggaccggtgcctctactatgccttggagtcaggttgggcgaggtggaggctcctccgaggtcgaggtcgagtctgccttccgaggtcgaggtcgagtccgagcccctgggtcggacgaggcggagaccgtcggcttaggccagggttgagtccgagccctggggtcgggcgaagcggagttcgtcgtccttcggggctgagcctgagtctgagccctggggtcgggcgaggcggagttcgtcgtcttccggggctgagcccgagtccgagccctggggtcgggcggagcggagttcgccgtcttccggggctgagcccgagtccgagccctggggtcgggcggagcggagttcgccgtcttccggggctgagcccaagtccgagccctggggtcgggcgaagcggagtttcctatgacgcctga

SEQ ID NO: 10448 - DNA, 264 bp, Zea mays
  Peptide Sequence Number=SeqID_52227
atgaactccatattcatatcaacaagaagccctcctcggcagtctctcattgaaactgttggaataactgaagaaggcgtgttcattgaggctagcagcgggtttggtcagtcgtcggagagtgtccactgccaccatggaatcatgtctgctgagaacaacggtggctgctgctactgttgtgggtccaaatccggacctgaggccgatgccggcgttgcgggggtggtggcgaggcggaacctcagcgtcagcttcatctag

SEQ ID NO: 10449 - DNA, 735 bp, Zea mays
  Peptide Sequence Number=SeqID_52228
atgccgaccgaagagggttccgacggcggtggcggcgccggagccggagccggggagaagaagagctcgcaggcgcccgcaaagcctggagcgtgcggcgccgcaaagttcctcgcggggttgccgtcgcgcggcaacttctcttccggctccgccccctccaatctggtacggaccctcacactggaagcccccaatggctactttcttcgcgcgcactgtgaggcgcctcgatttgcgcggcaaaggagggttcagggtttacgtctgcgagcacagcacagatcccccagaatacaagtgaatttcctacctctctccatcagcttaagcttttgggttgaagaaggacaagttataaagacggattcaacgaatattttaatcaggcatctccagttgaacaagcagaagactgagggcaaagatgtggattccagaactgtcggcgaaaacaacagagggaaaagggatatgactcttaacttggttgaggcatcccgaccacgtagttctttttttgaagatatttcttctatgtttgaccatgctagacatttgacaaaaacaattggggggcacttcttagattttgatggggtgcttattgggatggtggtgataaatgagcatagacagcctaaacgtttacctgaggtgttatcttatctcctcgaaccaaataatgagttaaaggaaatatcatgcacatgtggattcttctttacaaattag

SEQ ID NO: 10450 - DNA, 399 bp, Zea mays
  Peptide Sequence Number=SeqID_52229
atggcgctcatcgctagccgcattcgggaactagaggctaatgcgttctggctcggggttcaccacgcactggtcacgactgggtctcatcttgacgactcgatcaagcgggatcgagaatgcctctgtcatgctaatggatggggggacatgggtcgcgaggataaggtgtccttcattttcctcatcgttgggagggtaaggttgaggccgccgagtgcttccacaacgatgttcgggtttttgggcggtgaaggtcaggtgggtgacgcttggaccatctcgtcatctttgtcgatgatgaagtcgaggctcctgaagcgatcaatcactctgagagtgagaacggcatgggggtcaccgcaggaccacgtcatagcgttgagactcctaggatga

SEQ ID NO: 10451 - DNA, 432 bp, Zea mays
  Peptide Sequence Number=SeqID_52230
atggcctctagagggacctgtgtgcggctcacgcagctttggaggcggttaatgattcaggggcagagggacttgggcgcagctcgcgtagctatagaggcggataatgttgaactacgatgtcttcggtcgcagctagtggctcttaatgattcaggggcagagctggagcttgaagcattgagcctttacctatgcaaagaccaagccacaggattcatttgtgcaagggggaggaatcactatatgtgcttccttgacatccgggatcatgttcacgaggctgtggagtttggggtccacctggacgcagctgtggctcttgccattgcgatctacgcagctacatttcgatggtgtggatcacagagacggtggttgacgactgaggtgaatgtcaagcgggctcgtgctgatggtcaagagcggtga

SEQ ID NO: 10452 - DNA, 1497 bp, Zea mays
  Peptide Sequence Number=SeqID_52231
atggcatgcccaagaggaaggacaccatttcccctttgtttctttctgatgatttgcctcatggctcagctgggagcttccaatgttgtactcatggcgaacaacactaccttgtcgttggatgatgtcgaggcaacttttagtgggtgttacacattattacactatctccatgtatctctgtacatgtcaattaaaaatctggcttatctgacccttttcattcttcctgcagctccagcagtggaaggttcaggtgtaagtggcgttctttatgctgtggaacctaaggatgcatgcagtccattgagagcgaaagcgattcaaggctctgtctcaccttttgcgttgattataagaggcggttgccaatttgatgacaaaattagaaatgcacagaatgctggattcaaggctgctgtagtatataataatgaagataatgacatccttgtttcaatggctggaagctcgcttggtgtccagatatatgcagtgttcatctctaaggcatcaggggaggagctgaagaaatattcaggccaaactgatgcagagttatggataataccaacatatgagaactcagcttggccaatcatggcaatttcattcgtatcactgcttgctatgtctgctatcctagttgcatgtttctttgcgaggagacaccagatcagacgggacagggcaagacttccccgagctcaggagtcccatggaatgagcagtcaattagttaaggcaataccaagccttattttcacaaaagtgcaagaagacaactgtacatcagcaacatgcgccatttgcttggaagactacagtgttggagaaaagataagagtgctaccttgtcgacacaagttccatgcggcttgtgtggacctatggctcacctcatggagaacattctgccctgtatgcaagcgggacgcaagtgctggaacgtcagacccccctgtatcagagtctacccctttgctttcatcatccgccacacgcttgccggaatcaactgtgttggcttccttgcggtctacagcagcagcgtctccccccaggacgatcagccggcatcctttgttgcggtcaatatcccgcaattactctgtttcaggttccagtatccttcgcacccccgactctaggtttgatgcaaactcatctatctgcacaagtggaagcaacttggaccttgcaaatgggctacttgtccccaccgatcggcatcaggaatacctcagcacatgtctcgcgttctgccaatggatctcccagtcgttacgtaggctcatcacgcatgtcccatggatcttcagggcagcagcatcctcacctgaggcactgcacattgtcaggcccgagcctgttcaccatggtgccccagtcaccgcaacagaaccagttgcagcatggtggatactcggaaacaaatctgtcggctgccgcatcggctcaatcattccgtcagctctacctgcagcattgccctga

SEQ ID NO: 10453 - DNA, 2445 bp, Zea mays
  Peptide Sequence Number=SeqID_52232
atgagggctgtcagccagcgcctggtgacgcaccggacattggtgtctggtgtgcaccggactgtccggtggtgcaccgaacagtctgcgcagagaggccacagacaggcgctctctggctgtagcaccggtcttgttctgtatcacaagcaaagcaaaggatcggaggctactccattcggcagcaagtctgcaaagaaccaaaatcagagcacctcaggggaggatgagagcagggagggggctctagcaggcggcgtggagcagctgactctgaagtctgaacgttggagtagaacaaggtgcttgttcaaaattgttagttgcatggagatgggaatgactcctgaagtaatgtatggacaaaatgttttcgttcctgctactgcaaatccctaccaatatggctatacagaagttggatcaccaatggaatggtatagtcacccgaactcttcaggatatgctagccaagatattttctattcggctgaaggcatgcaatgcgtatactatgcagccccagacaatggatctatgcatcctacctacattccttatccttcagatccttctttcgtacccgatggctcatttatgcctcaggagtatgttgctgaccctgctaactccacatgccaaataggcccgtcatcctattacattccagctgttcttccttatgcacaagatagtgtcccgggaagcgcaaccacacctctttactcctccaatgttgcatttcttcctggcataccaggttatgctgcaacatctgcaaatgcagcatttcctttaattgctcccgtcaccacaaaaagtgacatcgttgtgcatccacctgtacagtctactattgtacctttgaagcagttgcaggaccatgcaaaaccgccaaaagttcaactgcacaattcggttccacagaagcaagagttgccagatagatgtatggtacctgctaaactccctcatgcttctcaggtatcagcacatttgtctggaaacaattgccttggatgtgctgctggatctgatcttcataagtgggctgccgccgagaaattccagccatcttcaaagtcaagtggtcatctaaatggtactggccaaaaggtgcatagcttagttgattctgagaaaccaagcaatcagagctttgccatgattgtgaaatctcacacattaaggctccctgtcggtaatccggatgggacaatcattataagaaccgaccagtacaacagagatgatctccgagttgactatatgtatgcaaagttctttgttatcaagtcaattggtgaggcagatgtgcacaaatcgataaagtatggtgtatggtcaagttcctccaatggaaacatcaagctagatagcgcattcagggatgctgacaggatatcaaggaggcattctactaagtgtccagtattcttgttcttctctgtgaatgggagtgggcacttctgtggcatggctgagatggttggtcctgttgattttcacaaggacatggacttctggtgtcaggataaatggaccggctgctttcctcatatcacactgcagaataatgaaaacaagcctgtgacgcacagcagagatacacaggaaataccatacctccctggaatatctgtgatcaagatcttcaaagacatcaaagtgagggactgcctgtttgatgattttatgagatatgaggcagaagaggcgcaaatgaagccgcacagaagatgcaagctgagttacgatgctccagattttgtacctgtctcccagcgcactgagcagacgaagtccagcagtgtgctggtagacagaacatctgagatacaaaatgtgtctgagaagccgcatgatgctaaggtgatcaatcctcaggagccgcgtgcctctgataagcaggcgagtgaggctgagaaagagaatgaactacaggaaagtcattgcagcggcagtcagaaccaagaggatgcagcgaaaactgcaaccaaccatccaccaggtccaagcttgaaggcggcaggtgcggatgggaaacagcagtactggaagaaggtcgaaaatccaaagcagcatgcagacagcggtgctgcccagggctcactgaaagcacctgaaaagcggctaaatggagtcagcggctctgcgagcacagttccagttccagagggtggcgagcagcagagggtcactgccaaacttgggtctctcaagataagctccaaggcagtggaggctgaccgtaagactagcacagctggtatggagaagcagctaaatggagtcagtggctctgggagcgcagttcctgagggtggcgaggagcagaaggtcaaaatcagttccaaggtagtggaggctgaccggaagacgagcaaagctggtgtggtgacaatcggctcgatgccggtccgggttgacagttatgccgtctag

SEQ ID NO: 10454 - DNA, 210 bp, Zea mays
  Peptide Sequence Number=SeqID_52233
atgagccacggaggggtcagagaaggtcacgacgacacggtgaaaggcttggacacgcggcataaggccgggaagcggcggtcaccggcgagctctgacagagcaacttggagcaagcttttctctaaattcctcataacaactatgcttgctccctttagcaaagttgttctcctattattggtcttcaactttgatgtggtgacctag

SEQ ID NO: 10455 - DNA, 473 bp, Zea mays
  Peptide Sequence Number=SeqID_52234
ccctagaccccgacccgatcgcaacgtccgattccgacagcacctgtctcggtccagagcatagcgcgtcagcgcccgggacccgtcctgaccacgtcccggacgcgccgacccgcgccggtcatggcgcccccgcctcggccccggtcacggcgccgcagccacggccgcgcccgcccccgcccccggccgcatctgcccggccccgtcccagccgcaccccatgcgcgcccgaacagacacgcctcggtccctgccgcgccgccccgcgctcggctcgccggcccccggccgcgcccattcgcgccgccccggccccggccgcccggccccgcgccgacccggccccggccgtgccccgccccagccgtgctccgtgctcgctcgcccgccccagcgtgccctgctcacgttgtgacggccccggcgcggcctcgagctcggcccagcgtgcctatggcgcgcagccttga

SEQ ID NO: 10456 - DNA, 324 bp, Zea mays
  Peptide Sequence Number=SeqID_52235
atggagttcggtctgagggctcaagaagctttacggggctctagggatgctagccaaggagttggattggatggagggctatctagtttgtgtgagttccaagtgaagatatggtcgggtgtgggagatatggtggtgccaagtcaggtatttcaatgtgctacaacttttgtaaaaggttcaagccatgatttggtaatttacttagtcctcccactaatcaaatcttggggctctaatggcttaaggagggtggtccagggttttgagtatttttctcaattagagatgcttgaaaaagctaggatattcctcctagtatga

SEQ ID NO: 10457 - DNA, 99 bp, Zea mays
  Peptide Sequence Number=SeqID_52236
atggcgtactcctcctgtttgaatcagagtttgaaaccaaacaaacttctcctcaggaggatagatagggcgattcagggatcaggagattggatctag

SEQ ID NO: 10458 - DNA, 231 bp, Zea mays
  Peptide Sequence Number=SeqID_52237
atggggagctatgacataacagggctagcagcagacgttaacatgatgggatatgcaaatgctgagcagattgcatcaggaattcactttaggctaaaggcttgtgcctttatcgttgctgagcctaacagcaagcgtgtcgtgtttgtaaatcttgatgcttgcatggcatcacagcttgttactataaaggtgcttgaaaggcttaaagcaagggtatcattcatataa

SEQ ID NO: 10459 - DNA, 297 bp, Zea mays
  Peptide Sequence Number=SeqID_52238
atggtttttgaaacatttgttgaatctactcttgtacaaccaacatttgtccttgactacccagttgagatatcaccattggcaaaaccacatcagagtcatgttggccttactgagcgattcgaacttttcatttgtggccgtgagattggcaatgtgttgtctgagctcatagacccaattgatcaggtgatcattaagatagatggaaatcacaacttgcttgttagatcatttcaaattcaaatgtgcattttcaaattcaaatgtgtctttattgcaacgaagccgtcttga

SEQ ID NO: 10460 - DNA, 1101 bp, Zea mays
  Peptide Sequence Number=SeqID_52239
atgttgctcggtgtatgcggctcgctctgccaaggtggtgatgaggatgatggttttggttatgactatggtaaagtccacttcagccaaacgggacatattgctgagtatgttgatgtgtactcacccttgctttacacaccaaccccccaggttgtccgcattgcaaccactgctcgggtgaagatgaagtcgtggaggaggacttctaggagttccaagagtacgatgagttctaggcatgggttagcggcaaaccccagtcggctgcctgtgaaggccttatataactgctgtctacgtgaattgctgatcctggcacgtacatggtttgcattcggtttgccttctaaaactgggtgtgacataggtggtatcaaaggcgtgttgacttcgtggggtttacccggaccgctgggaggcaacttgtttggtgcgccgtccggagaacagtctccggggtgtggaggtttgctcagaacattactcttttctgagcgggactcagctgaggcggccgtgcaagatgccgcacggcgtgcgctttcgcactactgttcagtgttcggtggggtagccgatggtcttaacctgaagtattacccccgctgtccatcgggtagcacaggtggcgtggttgtctcacatgtcggtgaggacaatcctaggttgagcagcacagtcaacctagctgtcgtgctaaacacggagctggaccatgcattagacgagttgagtagggctcgtgctgagatcgcccagttgcaggctgagcgcgcgaagcatcttcatctggaggatggttcccccgctctcgtcgggactcagcacccataccgctcacctcagcgtggacaccatgcttatgatgtcagaaaacaggcgcagaggaggaaggcgtgctcagcaggagcaggcagccccgcagtaagaggcaccccagcagcagctgccacccccgcccccgatgaccatagagcagatgttcctaatgcagactcagacagttcaagccatcggtcagactctggccgctatttagcagcatcagtccccacctcagccttagatgcctcagatgcccagagacaagcgtgctaa

SEQ ID NO: 10461 - DNA, 330 bp, Zea mays
  Peptide Sequence Number=SeqID_52240
atgacgatcaagaacacgctcaaggacccccacggcgtgctcaagaactgggaccaggactccgtggatccctgcagctggaccatagtcagctgctcgctagagaacttcgtcaccagactggaagcatcattccactccctcgatcgctctcccatcccatctacacaactcttccccgtgtccatggaggtcccaggtcagaacctctctggcctgctctccccaagcatagggaacctaacgaaccttgagactatcgaggttgatcgtttgcttcccttccctgctgctgcagtctcctgcagaacaacaacatcaccggcctaa

SEQ ID NO: 10462 - DNA, 273 bp, Zea mays
  Peptide Sequence Number=SeqID_52241
atgggtcgtgaaccaagcaatactttccaagacttgataaaggagtacgaagttgtactgaagggtccattcaactacacggctcgtgatgaagctggtataccccgagaatggaaaaatctctttggaaaggagatagcttctttcagccaaagtcagctcagtctgggtgcaccggactgtccggtggtgcaccgggcagtgtccggtgtgccaggctggctcgggcggactggctgttctcgggacttcgacggcggtgtacgactataa

SEQ ID NO: 10463 - DNA, 1803 bp, Zea mays
  Peptide Sequence Number=SeqID_52242
atggaaacgacgtcatgcttcctggcctccaaagcatcgtccgccagcaggagcaccgcggtgctgccgcccaccgcccccggcttcgcaaagcctaagccttatctgcagctccttggtagcagccgccgccgtgcctgctgcggcagcatcagcgcgcggggggcgccggaggacggcgccgcgccaccacccatcggtcccgactggcgctcgttccgtgcgcagctctacttcaaagagcagctgccagcggtacagaccggcggcgacaggtgggcgcaccctctagcggagcccgagaaggggtgtctcttgatcgccacggagaagctggacggctcgcacatcttcgagcgcacggtgatcctgctgctgtcgtcgccgtcgtcgctgggccccgtcggcgtgatcctgaaccgcccctcgctcatgtcgatcaaagaggcgtcagggtccatcttcgcggacgacgccgacatcgcgcgcgccttcgcgggccggccactcttcttcggcgggccgctggaggagtgcttcttcgtcatagggccccgagcggcggccggaggcggaggcgacgacgcggtggcgcggacggggctgttcgaggaggtgatgcccggcctccactacggcacgcgggagacggtcgggtgcgcggcggagctggccaagcgcggcgtggtgggcgtccgggacttccgcttcttcgacggcttctgcgggtgggagcgcgagcagctgcgcgacgaggtgcgcgcggggctctggcatgtcgcggcctgcagcgccgccgtgctggagctcgccaccgtcgtcaagggcgggctctgggaggaggtgcaggggctcgtcggggagaggaggctctgcgcccgcctccctacggcgagctccaccacggcgagctccaccgacgttggtcggctccatacgatcgcggaggtgcttgccatcctcgactcccagggcttcggccgcctctccgacgccgcggacgattcaggctcagagtacgaggccgacacgagcgatcccaatgccggtgagaggaacggaggcggcgggaatgcagcggaggacgcgctgacggggtcggagctgggagccccggcggtggcggctgctgctgcctctgctgctcaggccgggggcttgtcgtggaggggccatgccgcgagccccaaatgcgagaggcggcggccgcagcaccaacagcacatgggcaggcaactaaggcagaggcacggccacggccataggaggggttacttttactgccgcgctgcggattcgtcgcccaagtaccacccagggcagtcttgccggaagatcaagaggaaggagctgagatctcagacagaagaagaggagggcaacacagaagaagtggagggcaacgacaatgcagtggagaacacggaggatggacaggagagatcagattgtactgtttgcactgatctaccggctgatgttgatggcgaggtgaaccaagatgggcatggctcttctagtaatggaagagtggagggtcgtgatgatcttgccatggtatatcagaaggatggggagatggagagggtactcgagaagcaggctgagctaattggacagttcaaggctcaagaaaatgctcagagggagtgggaggagaaattcagcctgaggcgtgattcagttatggataatgttaacttattaaacaacaagctaaatcaggctgaaaatgcttgtgagaggagggaaactgctcgggagagcgaggcagagaggaggagcagagaggaggagatataa

SEQ ID NO: 10464 - DNA, 2361 bp, Zea mays
  Peptide Sequence Number=SeqID_52243
atggggaggaggaaggagcgccgcctggctgccatggccgcggcgggccgcagggtcaagctggacctcttcctcgatctcccccccggggaggcatcacataatgatggaataggaggtgaaaaccgtgaccaacagactgtggttcccacttcatcttcagataaaaaggagaatcctctagcattgcttgggcaatatagtgatgatgaagaggaaaatgaggaaacaacagatcaacccactgatgaagctaagaggagtcctggagatgctagtgctaagttatctagtccgtgtgtggatacagctggtaataatggcgtggcaagaactgaaccatcggtttctgtcggtgatcaacaagaagcacctcaagctggtgatattaagaactatacccaaagtgttacagaaaacactattgctcccgagccaattctacaagacgagaatgtgaaatcaactgaatctgttcctgattcatctggcatgcaaattgttggtgaagtcggtggaaattggagagcaataatgcatgaacagagtaatcaatgttattactggaacactgttactggagaaacgtcttgggacataccaaatggattagcttcaggagctgcgactgcatctgttccttctgatgtgggctattcaatagaagctcaagcccatgttcttcctcacagcacacttgaagcgtacccaagtgacatgtctgtcgggaatggcacatcaacttttgctaattttggaatggcatgtggaagtgcacaggttactcaagatgcttacgcttatgctgctcctatcgccagtcatgagcctatggacattgatcccttgtatcttgcaaaatatggtgatgatttgctgcaaagattgaacctgttggaaaggctctgtggcttgaatgaaggtcttgaattgataaggagagaaatcgggatacggatatcagactgcaatgcactttcatcgtatgggtcttctttgctcccgttgtggatgcatgctgaggtgcaccttaagcaactagactcttccatttctaggatggaaatgagctaccatgcagatacagaacataggaattctaagacagaggttgttgaacacaatgcacctgatggagctgacctgacaacaccctccaatggtgaggctttgaaatctgaggttagtcctgggattactatcgatgaaaatgtggagattgataagccaacttcgatattatctgctcaggattcacaaggtagggatattgcagcagttcctccaaaagttgaatctgacaatgaccaagatatggatgtggaaatggaagttgatgaagataacgtcgaagagcaggcacattgcagttctgtacctaaaaaggagcatcctccatcagaacagttgagttcaactaatttgccatcatttgaagatcctacacctgaggataattctgtccctccgcctccaccagaagaggaatggattccacctccaccacctgaaaatgaaccagctcctccagaccctccaaaagagccagctgcatcatatgttcaggtggatgccattcctcagccatatatcgctcaagaaaatgttgggtatacaatttcaggaatggagtactatggtattgtaggtacagaaggtacaaatgccaattactatatgcaagtgagtgagcctcatgtccttcaagcacaacagcattcttattatgcaccagtatctgggagtggcgtatctgtttctgttgatggcacatctattgccccagaatcttattatacccatccttcagtcactatggctgccagcgcagtagcagctgaacattctgtatactatgcttcatcaatctctgccatttctagcagcgcagcagatatcaaaacaagctcagcttctcttgtttctgcaaatagcaattcagatctcaaaggtcctgataaacttatatccaatgatgcgagtattgtacctttgacccaagctgtagtagcaacatcaggcgcaggaacgccatctgtcctgggaagttctacacagccttctagcagtactaaaaatctgaccaaagttactcgtaacaagaagcgggctgttggtattacctcgtctctgaggtctaataagaaagtttcaagtttggtggataagtggaaagctgcaaaagaggaacttcgcaacgaagaggaagaggagcctgaaagtgctctggaggcattagaaaggaagcggcaaaaggaaatagaggaatggcggaaacaacagatagctagtggagaagctcaggaaaatgccaattttattcctgttcgtggtgattggtactctttctttcccttatga

SEQ ID NO: 10465 - DNA, 174 bp, Zea mays
  Peptide Sequence Number=SeqID_52244
atggcaatgggtacccgcgatattagggtatgtatatgggctaaatgttctacccatgggtctcttattgggcaaaaaaccttcacccaatgtgacccaatgggtgacccatacctacatgagtatgggtatgagtatgggggtaaattcatacccaccagtggatatgggtga

SEQ ID NO: 10466 - DNA, 285 bp, Zea mays
  Peptide Sequence Number=SeqID_52245
atgattcacaagaaagaagattaccagatccaggcaaaaggagagtacaatggatcaagcagtctcattagctgcgagaagcagacgattcaaatcgagtttttatccttgcaagtgaccgcacttgtacccaccataaccggaatgggagaccacgtctcaggtcgcgtgaggggcaaagtctgcgggcagaccattaccattctgttatcaaagtggatacaaccaattcctgacctcgcgcgagtgctagaaaaatcactcgacttctaccgagatccctaa

SEQ ID NO: 10467 - DNA, 2169 bp, Zea mays
  Peptide Sequence Number=SeqID_52246
atggtgacggttccctgcgaaggagccccaaggcgacgatacctggagctgccacgggggccgacgagaacgcaagctctaagcatctcgtgccggtggggggccgcgtcgccgaagaggaagaaggtgctcggggagaggaacgacagcggcgtcgggggcatggagggcgccgcgtcggcaccagtgcagcagccaaagctcgcgttgagccccccgacacccgcgagccgcggcgcggggccgtacgacccgaagacgaactacaccacgccgcggccggcgttcctgcgctacgaccccgaacggcgtcgcgagatcctcctccgggtgtcgcgtgcggcagaggtgatggacgacgactgctctagcaccacatccggcactgcggcctcggaggaggacggtggctcgtccttggcctcggacgcggcggcaggctcccttatctcgtcgccgccaaggagcgactccgaggccgagcttgatgacagcgaggaggaagaggaagtagtcccagctcgtcgaggccggtgggccaggcggttgcttctgttgctcgtctgtgtgtcctgctcgttctgctacatgtattgcgccaaaccctctggctttcctacttattcagaagacgcacttgatttggatagaggtattgggggcatgtacgatgcctatgatcatgaattagactcactgagattgttagggccagttcatatgatgggtccagaggatgtgctggaagaaattacaaatcaacttgtgcacgaggactctaaaagtgtggaccatctgtatggcaacagagctcctagaaatctggtggcagttgctatggtagggctagctgatatctgcctcaatgtttcttcaggagaatttacatgccaaattgggggtgaaaaaggtgagaatgtgcctgatttgaaggaagattctgaaatggacaaactcgatacagaactgacaatctcctttcagaatgacaagcaaagcagtgaagttgattgcctgggtggaaacgccccactggattccattggttccacttctactcacactgataacttggagggcagtttggaatcattccatctagaggaatgggatgattactcaaatcaatctgaactgcagttagtctccatggagagggctataaaatcagcaagttacaagctgaaagacagaacgggtttggaaagtgaggagttggatctatggcagtatgagaatacagcagaagctgctaaaacaatatgctctactgtaaaatttctgtggtctgcaatggaacctcacttgctgcaggtattggcatgcttgtcttttgcaggtttggtggctgcattatataggtattatcaaagatcaagagagtgctgcaactgcatcataacctatgactcacttgctgaacaaccattgttagttcaacatcaagttgcgcagctgtcagtgacttcagttcgagatgcacagctacctgttcactcttcggagcaacctatacaattggcaattcctaaccaaggcacggctggtagtttggaggttcctatggagttgacattgcccaagctggacccattggtcagtcttgaggatcctgcacaagagtcattgcccatgacagacccactggtcaccgtcaagattcctgtgattggtcgtgggatccatgatcagaaacttaaacgtggggattctgagaacattaaggcttcaaatggtatgtttctgaaccatagtgacgttgacagctccaagccaccagtggttgaactacttggagagttcgtgcttgcaagtagctcaagagaaagatctaccaagaaattgtatcagaatgctggagatgctacagataagaaattgttgaaacctttgaaaaaggatgaggatgttgaaaagatgcagatgcattcaagcatcatccaaagccctagtgttggaagagccaaaaaagagaaaattatgtattatcaaatcagacaggacagaggaattgagattttgattcgcaatttggttggcgcaggagaaatctataaaccgggagaagaccgatgcgacgccaactccactgagacgctcaagccgcctccgcaacaaggtgacttctccctgaccaaaatccaaggtgctcagctcgtcgttcgctaa

SEQ ID NO: 10468 - DNA, 642 bp, Zea mays
  Peptide Sequence Number=SeqID_52247
atgggccttgatctgtgtcacgggcgtcatgttatttgggctcagcatggatcggaggacacggcatcatgtagcccagagtcaaatcatccgtcatgggttggagatcagaaagacgagactgcccccgcctgcgaatcccacccgccactccgcctcccccgcggcgaatcccgcgcctcccccaccgtagaacccgcctccacccgcgaatcgcccgccgcgccttcacccgcgaatcactcgccgctgctccatctccgtgaaccgcccaagcgaaatgcccgctgccatctgcgaaacgcccgccgcgattcgcccgccagccatgcggtgaagatgtcggggcgcggcaagggcgggaagggcctgggcaagggcggcgcgctgcgccaccggaaggtgctccgcgataacatccaggggatcacgaatccggcaatccagcggctggcgcgcaggggcggcgtgaagcgcatctccgggctcatctacgaggagacccgcggcgtcctcaagatcttcctggagcaaggctgttggtttaggggttcttcgcgcgcgcatccggccaggcctccaaggtcggtggccatggctcagtgtcgccatcacctcctcctcatggttattgctgctccg

SEQ ID NO: 10469 - DNA, 210 bp, Zea mays
  Peptide Sequence Number=SeqID_52248
atgtcggtcgacttgtgctgtacaggcccgatagcatactggcgaagcccacaaaagataatggcaaaattgccaatggcttcgtgtggagcacaggtcgagtggtcaacaacaaagatgaaggtcatgcggtttcgtgtcgatggactgggagcggtgaaggacgagtgttgggacttgaccgagggaccagagtcactaggtgactag

SEQ ID NO: 10470 - DNA, 288 bp, Zea mays
  Peptide Sequence Number=SeqID_52249
atggtgccgaggggtagaggcgggatccgggtctcgagcggcctgggcgctgcgggaaggcgagccaggcgaggacgaggaggtaggggggaggagcaccgcgaaggcagtctccgagagcgggaccgtggtggagaaggcgagcacggccgccgcgcccagcgtgttgagctgcttgatggagaagaggtagtggtggtggtgcgggcgcgccgtgggagaggagcggacccgatcatcaacatgaagatcttccttctccatgacgcagcactgcagcagcattaa

SEQ ID NO: 10471 - DNA, 288 bp, Zea mays
  Peptide Sequence Number=SeqID_52250
atggcaagcacaccccttctactcctctcgccccaacccctgtgcagcccagcgcggtggcctataacccacagcaaggcgcaactagctggctggtggccctgccccggctacctggcgattggtggaaagagatctgatgacggcgatcatggtcgaagagtaggagaggccctagaagaaagaaaacacttctctctagccatctacagatcaaaggattttgagtgtgatacagttggcataattttcatgactatagtctattcgtataatgggattatctga

SEQ ID NO: 10472 - DNA, 270 bp, Zea mays
  Peptide Sequence Number=SeqID_52251
atgtccttgatgagtgtaaacttgttacaagaattttggaagcagagaagaactctgctctatcgtcagaattggacggtcgcatcgacgccaggttccagcagaggagtcgttactctccttgattccttcaccgagttcaccgaggaatatgaactgaaaatgaaagagaagggtgagcaactgattgtgccacaatggatgaaagaacaacatgtagaattgggttccaaaggacttgagggctacttcatcacaacctgtaactga

SEQ ID NO: 10473 - DNA, 2067 bp, Zea mays
  Peptide Sequence Number=SeqID_52252
atgccgcagtggtggggccgggaggcgcggggtggcggcggcggcggcggcacgtcggtggtggtgaagatggagagcccggactgggccgtccgggagccagaggcggcgagggggaaggccggccgcggcaagaacgctcgccagatcacgtgggtgcttctgctcaaggcgcaccgcgccgcggggaagctcacgggcgccgcctccgccgcgctgtccgtcgccgcggccgcgcggaggcgggtggcggcggggcggaccgacgccgacgccgacgccggcgccggcgccggcgccgcgccgcacggggagagccccgcactgcgcaccaggctctacggcttcctccgcgcctctctcgtcctctccatgctcctcctcgccgccgacgtcgccgcgcacctccagggctggcacctcctcgccgtcgacgtccccgacctgctcgccgtcgagggtctcttcgccgccgggtacgcgtcctgggtgcgcgtccgcctccagtacctcgcgccggcgctgcagttcctggcgaacgcgtgcgtcctgctcttcttggtccagagcgccgaccgccttatcctctgcctcggctgcctctggatcaagctcaggggcatcaagccagttcccaatgctgctggcaaagggccagacgacgtcgaggccggcaccggggagttccccatggtgctcgtgcagattccgatgtgcaacgagaaggaggtgtaccagcaatctattggtgctgtttgcggtctggactggccacggcccaacttcttggtgcaggtgctagacgactctgatgatgctgccacttcagcgcttattaaagaggaggtggagaggtggcaacgtgaaggcgttcgcatattgtaccgacaccgggtaattcgtgatggctacaaggctggaaatctcaagtcagccatgaactgcagctatgtgaaagattatgagtttgttgttatctttgacgctgattttcaaccccagccagacttcctgaagcgaactgtgccccatttcaagggaaatgaggatgttgggctagttcaggcaaggtggtcttttgtgaacaaggatgagaacttgttaactaggctgcaaaacataaacctgtgcttccactttgaggtggagcagcaggttaatgggatcttcctcaatttctttggattcaacggaacggctggagtgtggagaataaaggcacttgaggattcaggtgggtggatggagaggacaacagtggaggacatggatattgctgtccgagcacacctcaagggctggaagtttctgttccttaacgatgttgagtgccagtgtgaattgccagagtcatatgaggcatatcgaaaacagcaacaccgatggcattctggtccaatgcagttatttagactatgctttgtggatattatcaaatcgaagattggattttggaagaagttcaacctcatattccttttctttctccttcgcaagcttattttgcccttctattccttcacccttttctgtatcattcttcccatgacaatgttcattcctgaagccgagctccctgcctgggtcgtgtgctacattccggcaaccatgtccttgctgaacatcctcccagcccccaaatcgttcccgttcattgtcccctatctcctgtttgagaataccatgtcagtaaccaaattcaacgccatggtttctggcctgttccagctcgggagcgcctacgagtgggttgtcaccaagaaatcaggccgttcttccgagggcgacctcatcgcccttgtcgagaagcagcctaaacagcaaagggtagggtctgcacccaaccttgagtcacttacaaaggagtcttccagtctcaaaagggactccaaaaggaagaaacacaataggatatacaggaaggagctggcactctccttccttctcctaacagccgctgctcggagcctgctatcggtgcaagggatacatttctacttccttctgttccaaggggtgtcgttcttggttgttgggctcgatctaatcggtgagcaagtcgagtga

SEQ ID NO: 10474 - DNA, 135 bp, Zea mays
  Peptide Sequence Number=SeqID_52253
atggtgctcgtgcagattccgatgtgcaacgagaaggaggtcgcatttggggattgggccttgagtgccctagccgcattggtggttgcagagatcgaaagattcggttttcaagctgaaacagatggtcgatag

SEQ ID NO: 10475 - DNA, 765 bp, Zea mays
  Peptide Sequence Number=SeqID_52254
atgaagaacaatggaagaagaatgaatgccgcagtgaaaactaatgccagatggttgtttggaggagatgggcgtagcaatgatgcaaggctggagcgcagtgagtctgctaatgaagatattttgatcttctacttccagatggatctacagacccggatacagtatgcattgaatatagaacaatttgatgtggcaaagcaattgagggaaaaactaaccgagattgaaacagaaattattaggcagcgtgaagctagaaggggttcaccaaagactgaagcccaagacaaagctctaaatcttatacgtgtgcgtgcagacttgcagaaggctattgacagtgaaaactatgctttggcagctggtctccgtgatgacattgccaaacttgaggttgagtctcttgcagtatctgctaaagctcttgcttatcaaaatgtgaaatatgcatttcgattagggcagaaagtcctggttgatgtatatgttgatccagaactgctggttgcatatggttggccaattattctcgcttcctttgacacgcatgttaatctagagtcgcagaagaaaatctttctgcagctgaagaatcagaaaaagtggggaaggtttgatcacccctacattgagtttctcttttacggtgaggacacagctggggatttcattcctatcaagcagctccgtgagaagtatgaccagccacgctatgaagcttctggagatgaaagtgacaacgatggcaacacaaatagctaa

SEQ ID NO: 10476 - DNA, 1104 bp, Zea mays
  Peptide Sequence Number=SeqID_52255
atggccttcaagctgatcaccaagcccgcggcggcgtcgcccgctgctgcttactggggagatctcgcccgggggccgcagggtacgagccgcgttgccttcggaccagcgcccaggaacaaggggctccgcgcggccaacaactccgcaacgcccatagctaagtacgaacactccttatcctgcttagaaattgtttggtttaataaacaactgtgccccttggttccgtgtaaggttcatgacttcgtgtttgtgcgtggtcgtggtcgtggtgtggtccatgacttcgtgtttgtgcgtggtcgtggtgcgggtgcggtccatgacttcgtgtttgtgcgtagtcgtggtcgtggtgtgttggagatttgtggtttggtgtgcttgagccctcctggacctgatcatccatgttttagggtagagagggttgatcgaagtgacatattgacattggatagcatcagacaagttttgattagactagaagacagcatcatatttggccttttggagagagcacagttttgttacaatgctgatacatatgatagcaatgctttccacatggatggttttggaggatctttggttgaatatatagttagagaaactgaaaagctccatgcacaggttgggagatacaagagcccagatgagcaccctttcttttccaaggatctgcctgagccccggttgccacctatgcaatacccaagggttttgcatcccattgctgattctatcaatatcaacaaagagatttggaaaatgtattttgatgaacttcttccaagattggtgaaagaaggaagtgatggtaatgctggatccagtgctctttgtgacacaacctgcttgcaggaccgtgatcaactcatgaaccttctcacatatgaaacggtggagcgtgctatcgaacacagggtggaggccaaagccaagatcttcgggcaagaggtgaacattggtgctaaggacaacggcagcccaccggtctacaaaatcaggccgagcttggtcgccgagctgtacagctacagaatcatgccgctaaccaaggaggttgaggtcgcgtacttgcttaagaggctggattga

SEQ ID NO: 10477 - DNA, 1548 bp, Zea mays
  Peptide Sequence Number=SeqID_52256
atggctcctctgactcctagactggtagtgcccatagacgtgaagaagcagccatgggagcagaaggttcctctccacaaccgctggcatccagacatccctcccgttgctgatgtaaccgaaggggaactgttccgggtcgagatggtagactggactggagggagggttagagacgataactctgcagacgacatcaaatccctggacctcacaatcactcattatcttagtgggcccctaagaatcgttgattccgaaggggttccggcttcaccaggcgatcttctcgcggtggaaatctgcaaccttggcccgcttcctggcgacgagtggggctacactgcgatatttgagagagagaacggaggtgggttcctaactgaccacttccctactgcgaggaaggccatctggtatttcgaaggaatctatgcgtactcccctcagataccaggattaacccatcctggtattgtgggaactgcaccgtcagccgaacttcttaatatatggaacgagagggagaaaagattggccgagacaagcccacagacccttaaactgaggggactgctggatggcacaaagtggcgaatgaagcagccaggactattccgggaagggagaatggcgggcgatggtgaagtttcgttttgtggagcaattgaaatgagtggattccttgagctcaagtgcgagatcataagaggcgggatgaaggaatacttgaccccagttggtccgacaccgctacacgtgaaccctatctttgagatcggtcctgtcgagccacgcttctcggagtggctagtgtttgagggcataagcgtggatgaatctgggaagcagcatttccttgatgcgtcagttgcttacaagcgcgcagtcctgaacgccattgagtacattgctagatttgggtactcaaaggagcaggtgtatctcttactatcatgctgtccctgtgagggtaggatctctggaatagttgactctcctaatgcagtggcaactattgccatccctacagcaatatttgatcagacagatgctggttggattcatgaaatagcctccggagctgaaggaagtcctaaagagggtggagcggcgattaccaacaagggcgagctggagagcatcaacgaggagaacctacggtcggcatgtgcgcagctgcggcatgccatgtccgaatctgacggcgatggcgccatggagaaggttctgggaatggactggagtaggaagcccggagatcctgtcgacccggccgttgacgcggagtggatcgcggggatagctaggctggggctcgacactaacttcgtcgtcgtgcacggggccgtggagatatcagttgcagcacatgacaccaccggtgggatggagaccaaaatactggaggctgcagtgatagctaggcttggaatagacgtgtatattaccaaggctggaacagaacactcgctgagggccttgaagggagatgtgagcaccgactcggaagattggcttggaactattatacgctcttccaaatag

SEQ ID NO: 10478 - DNA, 1302 bp, Zea mays
  Peptide Sequence Number=SeqID_52257
atggccgaccctgctggcctcccgccgcggcttcgcccgtccactgtgccgcctccagccgccgtcacgcgcgcgctgcacgcgatcaacacctgcacctccgccgcggcactcgcgcccctccgcgtccacatcctccgggaacccgcgctcctccgctccaccgccgtcatctccgccttcttcctcgcctgcggccgcctccgtagcctcgaccccgcactcgttctcttcgcctccctcccgcggccccacctcaacgtcgcgcactcccaggtggccaagtccggctttgcgcgcgacctccacgtccgaaacgccctccttgctcgctacgcggcctgtgatccggacctcgggcacgctgagcagttgtttgatgaaatgccacgcccggacgtcgtctcgtggaccacggtgatcaccgcgtacagaaaccacggccacagtttcttggctctggccaccttccggcggatgttcgctgcatctgttgctcccaaccgcgtcaccatggtttctgcacttggtgcttgtgcagcacatggtgctgtggacactggcatctggattcatcagtacgttcagaagctgggttgggaactggatgtcgtgttaggcactgcgcttgttgacatgtatgggaagtgtggacacgttgcggaaggagtccgtgtattctccaaaatgactgagaggaatgtttttacttggaactctatcattggagcatttgctttggtacaggatggagaaatggctctgcgttggttcttcaggatgaaggctgatggcatacgccctgatgctgtcacgctaatttgtgttctttatgcatgcgtacatgctggattagttgatattgggaggaaaatatttaacttgattgttcaaggcgagtatgggtttcaacctgggatcaagcactttggatgcatggttgatcttcttagtcgctctggacacctgaatgatgctttcagggttgttgaggcaatgccatcacagccaaacgctgtcatttggggcctgctattgcgaggttgcaaggaccatggtgattcagtcttgagtgagcatgtgacaatgcagctgctggagttggagcctgaaaatgcttcgcattatgtgacacttgcaaacttgtatgctgagacagggaggtggctggaggctcacgaggtcttgaagtggatgaaggaaaaaggattggcaaaggatgcaggctggagccttaggatgttagaggacaggtcaagcaaatgtataagtgatggaaatttcatggaatgtgcactttga

SEQ ID NO: 10479 - DNA, 1245 bp, Zea mays
  Peptide Sequence Number=SeqID_52258
atggggagcgcgctggagaccctgtgcgggcaggccgtgggcgccgggcagctccagatgctgggggtgtacatgcaacgctcctggatcatctgcctcgccacctccctcgccctgctcccgctctacgtcttcacgtcccctctcctccgcatgctccggcagtccgcggacatctcggcggtggcggggcggtacgcgcgctggtgcgtgccgcagctgttcgcgtacgccgtcaacttccccatccagaagttctaccaggcgcagagcagggtgtgggccatgacggccatctcgggcgccgcgctcgccgtgcacgcgctgctcagctggctcgtcgtggccaggctcgggcgcggcctggccggcgccgccgtcgtcggcgacgtctcctggtggctcgtcaacgtcgcgcagttcgtctacctcgtcggcggctccttccccgacgcatggacagggttctcgcgcaaggcgttcgacagcctcggcggcttcgtcaggctctccgtcgcctcggccgtcatgctgtgcctagagatgtggtattatacggcagtgctcattctggtgggatgcctgaagaacccagagattcaagtcgatgcgatttccatatgcatgaactaccagctttggacactgatggttgctgttggcttcaacgctgcagtaagtgttcgcgtgtcgaacgagctcggcgccaaccacccaaaggcggccaggttttccgtggtcgtcgccaccgtcacgtcggccgccgtcggggtggtcttcacggccgtcgctctggcggcgaggaagcagatgcctcggcttttcaccggcgacgacgtggtcgtcagggagaccgccaagctagggtacctcctagccgctaccatattcctcaacagcgtccagccggtgctgtcaggcgtggcgatcggtgccgggtggcagtccttggtcgcgttcgtcaacgtcggcagctactacctcgttggcctgcccctcgcggccgtgtttggcttcaagctgaagctcaatgctacggggatttgggtgggagtgttgatcggaacggtattacagactgtgattctgttcgtaatactcagcagaaccaagtggcaaaaagaggctatgctagcagaagagaggatacgggagtggggaggaaatgtcgagctgccacatactcaagaaacggggccaagtgaaagcactgccgcgccagacgcaagaaaggggcccaagtga

SEQ ID NO: 10480 - DNA, 324 bp, Zea mays
  Peptide Sequence Number=SeqID_52259
atggcgaacttccctgagggcgggcgagctgcgacgccggcctcccctaggcgcgagcagcgtcagaacccagaggcgtgtttcgcctattcacccccctctagacgactttcagactcgttccacaacctccttctgtcagggtcagaaggcggactcaactcccagtctaattgggtgagtcacaacctagcccaggagtgcctcgtagataacatgctagaggaccactccccactcatggaaaaccctgaggggacccccactagtgtcacgatgcatgtggcagcatctgccccgcctcggctcaacctaccttcttag

SEQ ID NO: 10481 - DNA, 624 bp, Zea mays
  Peptide Sequence Number=SeqID_52260
atggctatcgcggagagctgtgttgatgcggtggtcatggagatggtggctgtctactgcggtggcctctatgccgccaagccagagcttgctgcccgccgcattgaggccatcggctttcaggttgggcaccagctctctgagagatataccatggagcgtccacgatttagtgatcatcttgaagcaatcaaatttatctgcaaagacttctggtcagagctgttcaagaaacagattgacaatctgaaaacaaatcataggggtacctttgtccttcaagataaccgttttcggtggcttactcgtgtttctctagatccatatacagagaacagagattcaactgaaaatgattctgcagcattgggtgatacagcagcccaaacaactaccatgcttctgtatttcccatgtggattgataagaggtgccttgactaacttaggaattccgtgttctgtctctgctgacatgtcaaaccttccagcatgccacgagagtgccccagacgagctgttcgtcatggaggacacgcacaggaatgggatgtgggacgggagccgtgaaggaagagtccccggaggcgaagccagaggggcggagggtggtgagaccccgtag

SEQ ID NO: 10482 - DNA, 717 bp, Zea mays
  Peptide Sequence Number=SeqID_52261
atggcaggagaacagtgtgctgatgtgcccttggcaccttcatcaagcatccaagaggtgaaggttgagaagttagttacaacaatagaggctaccgcctctcaggccgaagccaacactgtgaacccattcgaggatagtgacaacattgacgtcgaagaagatagcactaccattcgttctacaaagccaagccatgtggactttagcaaatcaaatatcaaagaaggacatattgagggtgttgaatttgatgttgaagctttatgtgaagcctcctgtcaagtccatgagatgcactttcagacaaaggcaactagaggccttcacaacaactttggtagttacaacttcgcttatcgaagtaaacctgaggctgaagctttgcaacaggcttttgcggctcaaaaaaggcaacgattgaaccatgttttcgatgctattggcttcttcaatcctaacaatcccaacatggttcaggattcaaagaagaggaagagaagagtgactatgaagcggagcaaagtcccgaagacacaatctaagttgacacctcaagcttcaaaggaaattttggctatacccgaagctaaggtggtagccgtagttgaggaactcccttctatggaagcggaagagacaaagatcgaagaatctattgccttgatagcacaaaacgttattcctttggagacactcccagagagcgaagaatag

SEQ ID NO: 10483 - DNA, 375 bp, Zea mays
  Peptide Sequence Number=SeqID_52262
atggggagggaagtatcagagcttgaagctttgaatactaaaaaggacaagcgaattgcatcgctcgaggctgagctaaaacgagcaaaagaggaatatgaagctgaaacgatgaagataatgcaagcatctgccgaactgccgaagcagcagttaaccttgacaccgctcagcacaagagtactattgcgcatggataggcgcccgaagcactgcttcagttttgctgaaagtcgggtgcaatcatctgaagccgaagcagcaactgtcagggctgtaaagaaagccatagatgacgttgtcctcaaaatgtgtgagcaaatctatggtgaagtgatgcaggtcaacaaagggaaatcatgtgaaaaacaatga

SEQ ID NO: 10484 - DNA, 591 bp, Zea mays
  Peptide Sequence Number=SeqID_52263
atggagggcgctcttgttcagtctgctattgttccagccgtttacagaagcagctcaggtcggttccgtgtgcgtgcaagggccagaacaaatgctacaatggtgcggaatacgccaacaaggactcttactcttggtggcttccaagggctgcgtcagacaaactttttggatacgaggtctgtaattaagcgtgactttggatcaatcgtggcaagccagattgcaaggccacgcgggtcagcctcaagaggggtggtccgtgccatgtttgagcgcttcactgagaaagcaatcaaggtgattatgcttgcacaggaagaggcaaggcgcctgggacacaacttcgttgggacagaacagattttgctggggcttattggtgagggcacaggaattgcagcgaaggttatgaagtctatgggaatcaatcttaaggatgcccgagtggaagtcgaaaagataattggacgtggcagtgggtttgtggctgttgaaatcccattcacacctcgagcaaaacgtgtattggaattgtcccttgaagaagctcgtcagcttggtattatcttcacctatctacacagttag

SEQ ID NO: 10485 - DNA, 252 bp, Zea mays
  Peptide Sequence Number=SeqID_52264
atgacccaatcctcgtggttgcatcttaacaacaaagactggagcatgcctcactttcaccacactcgcataagacttctgagatctcccccagaaatgccaacaaatctctcgatttgtggtttcggtgcgcacaacggagaggatttggggttctgtgatttagggtttgggaggcatcgagaatgcgctgattcggcgttcgcagtcctcaatatccctgattcaggtattttccccaaggccacttag

SEQ ID NO: 10486 - DNA, 624 bp, Zea mays
  Peptide Sequence Number=SeqID_52265
atggcgaggctcgctacatcgcggcgcaagatgatatctacttgggaggcaagtgacgacttcacggcgcggatcgtcgactacatggcagagctcatcaaggagaagcaccagtgggacatcaggcaggacgcggaggcgctgcgcaggctaagggtggcctacgagcacgccaagaaggcattgagcgaccaggaagagacgatggtgcagatacatgtcgccggcatcgagtcatcggcgcccctcacacgggccaagctggaggagctcaaccaggacctgttggacagggtcatgggacttgtggacggggcggtgatggggacggggagtgggtggctgacccagccccgcgacgagagtcgcaaggacatggtcgacgagatcgtcctcgtcggtggcggcacgaggatgcccaagctccgtcagctcgtcgaggactactttcatggcaggcggccaaacagccgcaagggagtggaaccagaggacgccatcgtccggggcaccgccattctttcctgtcctaaggcggcgcactacctagaggagtgctttgactatctttacggcaaggatggtaggggtcttccaagttttatattcagaacgccggattaa

SEQ ID NO: 10487 - DNA, 450 bp, Zea mays
  Peptide Sequence Number=SeqID_52266
atgtcaccggccaaccttggcccgcgtgaccggcagccgagcagggggcacgtcaagaagggggaagcgtggactggacccgcggttgtcgccacgttcccgatcgtgtcgtacagggaggtcgtggagcacaagtcgcgggccacgtgcctgctctgccgcgccaaggtaccggtgctgggcgcggcgggccgccacacgctctttgcggcggcggccggcggcaacgcgaaggaggagggcgaccacgagaggttcacgttgcgactgccggagcaagtgtgggatcaggtgctctggtctcgccgcctgtgccacgccactagcctcgtcaacctctcggacatgtgctccgagtccgaggaggggagctcccgaggtggacggcgtgtagcaggagcaggaagcgtcggcaacggcgggagcagccacagcgggcgccgatggtag

SEQ ID NO: 10488 - DNA, 318 bp, Zea mays
  Peptide Sequence Number=SeqID_52267
catggatgcatgtatatgatttggttgcaactttttgcggcgagagacaagatagagaagacggcagaggtggccatcgaggtggtcgacacggtggcggaggcggcggagaaggtcgccggcgaggtcgccggcgcgtttcccggcaacgacggtctcagggaagcggcctcgaagattaagacggtcgcggatgagatcgaggaagacgccgagaaagccgaggccctaatcgagaaggttgacgagatcaagaaagaggttgattcaattgtggatcctataatcgacaaggttgtcaaggacaaagaaatatag

SEQ ID NO: 10489 - DNA, 258 bp, Zea mays
  Peptide Sequence Number=SeqID_52268
atggacgagtctgaaaaggagatcggggattataataatccgtatcttccaatcaattattctgccatggatggtacattacagcctactgttggagctgacggaaggaaagtggaggctcaaggcaatgttcttcttgcatcaattgagaatatgcaatatgatgttactgtagatgttcttcatactgtgttctcatcatttggttcagtccaaaaattgctattttttagaagaatggggggacacaagctttga

SEQ ID NO: 10490 - DNA, 369 bp, Zea mays
  Peptide Sequence Number=SeqID_52269
atggcctcctcctccgtttcgctgctcgtcaccatcatgctgcttctgttgctgccgccgtcacctgcttgttcctcgctaagttgcaggcttgacttcaccagtctggcgctgctctcctaccaggagacggtaccacaaaaccctactacctcatgctgcgacaccctcctctgttccatcgacatctggccaattcatgaactggaaaaaggtttttgctgcctatgtgttggaatgccatcatccctcgcactacagactgcaatggcttcctcagatgatgtgtctactactcctggttttgcagttcagcggccaaaccacgagttagcatcctgcaggtccacccctcaatttctgaattaa

SEQ ID NO: 10491 - DNA, 696 bp, Zea mays
  Peptide Sequence Number=SeqID_52270
atgaatattgtagcaattggagtctacccaactaaagggaggctgacagttgaagtattcaaggacccagacagggagttcaccggacaaggtggaaagaggcgaccccaacccttggcagcgccccccgttccaacagtggccatccacggcggctgcgctacccccgctcgggtccacgacctcggtcaccaacccaccgcctcccccgttcccggcgcgtccgacattgttgccgccgacgaggtctgcaccatcttcatggacctgcctgcagatgtcaaggaaagggagctacacaacctattgtgctggctcttgggattcgagacgtctgagatgaacttcaagggcaaccagcccatgggctttgcgctcttctccactgtgcaccaggccatcactgcaaaggctatgttccaggatacagtgttcgatgctgagactaaggtggcgctgcaaactgatatggccaagaagaacctcttcgtcaagagatccagtgagaaagctaaggctgagaagatacaccagatcaagagagccgaaggagaggaagaatccaagcaccacgccaagggcatcatggacatgatcctggtcacccagtactttggcaccatgagattggggcctcctccaagtcatattttcatcccccatggtcttggagctgtcaaggatgtcttggcgtag

SEQ ID NO: 10492 - DNA, 486 bp, Zea mays
  Peptide Sequence Number=SeqID_52271
atggcgatctgtgataggtcatcgggccgccaagcaattcttcctgcgggagcagatcttccctgtgcgttgagcggacggtcttcgatggcgcagagggtcgtcttctccgcgaaagttcgtgaaagtagttcaatcttgattgccgcctcgccgaccctggggcggcggcggcagccggggcagggggtgggggcacgtcgagaagggggaagtgtgggttggaccccgcggttgtcgccatgttcccgatcgtgtcgtggggaggccatggagaacaaggtcggcaagggagtactggagtgcgtggtgtgcctcacggcgttcgaggacgacgacgacctccgcctgctgccgcactgctcccacgctttccacctagagtgcatcgacccctggctgcagtcgaggccatgtgcccgctctgccgcgccaaccttgagaagccggttccggtaccggtgctggtgccgccggtggcgctag

SEQ ID NO: 10493 - DNA, 837 bp, Zea mays
  Peptide Sequence Number=SeqID_52272
atggggcgtcgtcttcccgtgagccttgtaccactactcatggtggtcatggtggcggcggcggcgttcgacatctcaagagcctcggcggcggcggcgttcaacatctcaagagccccgccggcgttcggggtccgaagaggggctccgaaggagtactgcgagtggcgcggaccttggggcacggcgcccttcctgctggggtcagctgcggccatccacctcggcaacaccaactcgtgcatcgccgcctacgactttcgccctgggagccacgagtactaccagctctacatgccctcttgggtggccgtcacggacaatggcacggtcctctccgacgaagctgctatgaaccacgccaccgtcagccccgggacggccatctcgggcttcacgcacatcctcgaccaaaagctcaaggatgaagtggtgaagagcgagatgaagctttcgccgccgtacaagctctccgagagggacgggtcgccatccaatttaatcatccaagccggcgtggccagggtggaggctcacctgggccgtgagctctcggctgctgtcatcgctgtgtcgcgtcacctcaactacaacggaaggcaggacatcgtcaatgtgggacggtacgacgctggcttccgccgggccgccaaggccatcgaccggcagatcacggcggctgtggcgtatcaccaccacacggagcagggtgatggcaaggctatccttgtcttgcgtgttggtggccgcacgtccgacgccaccatcttcaagttcattgatggcgaggctcgctacgtcgctgcgcaggatgatatctacttgggaggcaagtag

SEQ ID NO: 10494 - DNA, 213 bp, Zea mays
  Peptide Sequence Number=SeqID_52273
atggcgactatggcaccagacccgagcccgccgggagctggcggtggcggttgggacacacccttctcctccaactctcaggagcatggatctgtaggagagagcagcgccacgccggtgaaatcaagcccgcaactcagcaaggagcaagcagatgacagcggcggcagcagcagcatcatcatgatggtgacgagcagcaaaacgaagtag

SEQ ID NO: 10495 - DNA, 400 bp, Zea mays
  Peptide Sequence Number=SeqID_52274
actcaaactcttcgccttcgggaattctcggaagccggcgcgttataattcaccggactgtccggtgtgcaccggacatgtccggtgctccaaggaagctcggcctcctgaactcgccagcctcgggttcgcgcggcagccgcttcgctataattcaccggactgtccggtgtgcaccggactgtccggtgtgcaccggactgtccggtgtgccagcggagcaacggctccctgcggcgccaacggctccctgcggtgcattaaatgcgcgcgcagcgcgcgcagaagtcagaatcgcccataccggggcaccggactgtccggtgtgcaccggactgtccggtgcgccatcgaacagacgcctccagccaacggtcaagtttggtggttggggctataa

SEQ ID NO: 10496 - DNA, 954 bp, Zea mays
  Peptide Sequence Number=SeqID_52275
atgtcgttgcgggcagaaggttcttgcccatggccgcatcgccctgacagcaaccatgtcgtcaaccctcagctaactctaaatacattcacactcccgcacctttcgtcaacggatccggaaggcgccctcgggacagcgcagacctgggtcgtcagagctcccagtagactccttcctcccctctgctacgctcccggcgcccctcccctcaccccgtgccgcccggctcggccccccccggctcggccgtcccggcgagctcggcccgggccccggccgccctctcctcgcccgcgcccggccgggctccgggcctcggccaccccggccgttcgcgcccccgaccccgtccggcccggccaccccgcgccgcccgcccctcgccgcggtgagcccaccccgcccccacgcccggccccgctccggcgagcccgtcccgcgccgaccccgcctcgcccccggcgagcccgcccccccgcctcgcccccgacgagccccgcgcccgcgcgcgcgccggcaagccgcccggccccgccctcgtccggcgagcccgcagcgccccgcccgctcggccggctccctggtcgccccagcaacccgcgccgccccgtgcccggccgccccccggcgagccgcgctcggccctgcccccggccgccctcggcccccgccgcgcccgtcctcggcaaaccccacccgcccacgtgcgcgcgcccccggctcggccgcccgcctcccggcgagctcggccgccccccccagttcaaccgccccgtgccccggctcggccgcccgtccccgcgctcggcctcgtccggccgtatcctcgctcgcctgcgctcgctttccccggcgtgcttgcccgctcgccccgtcgtgccttgctcgcgtcgtgtcggcccctgcgtggcctcgagcttggcccagcgtgcctatggcgcgcagctttga

SEQ ID NO: 10497 - DNA, 1617 bp, Zea mays
  Peptide Sequence Number=SeqID_52276
atggccgccctgttctccagcctcttagccctcgtcatgggcacggtgagtgccgcgaaggccgttgtcacggagataatcccaccggccgcggcattggtggccaacataatggcaatcgcaaccacaaccgcgtcggcgtcggtggcgtggttcatctattacgtctgtgcagtagccgctgccgcggtcgacgtggccaccgacaccctgccgtacgccgtggcggtggccaggacggcggcgtgttccgcggttcaatcctcgcggctggcgctgcaggtcctgctgagttatctctggagcctctcgtccgccgccgtcgctggagctgcgcgtctggcgacggtgatgctcccggcggccgtggcattggcggagtccctagtcggagccgcgtggagcctgctcgctgctgcggccgccgtggtcgtgcacacgctgccgtacgccgttcgagcctcgcagccgtggctggaaatgacgtcgaacctcctgcgtcaactctacgggtggtcgctcgccgcggctgctcaagaacctccggacatggcccaggccttcaaggacgtggtggagtccgccacccgattgtcgcagtcgttgcgccgtctgtatggatggctagtggcaactgctgcagagaagctcgagaccgacgcagcgtatgcatgtgccgcggcggcctccgagaagctgaaccctagtgacgctgacgcctcggccgtcgtgtcacgaatggaggcagaggcctccgccatgatccagcacggctggcggtcttggttcctgcatgaccgcggcgtcgcggtgtgtgtgctgctagccctcgcactcctcgcagttgccttcatatgcggcggcgtttgcgccctcactctgagctctcgccttgctggccgacaggatcacggcgatcgtcggcgttcgggtttcgcatcctcatcagcagcacacgagagcaagtcactagccatggccacccccattgccaacctctcggccgtcgtcacgggcgcgatcgcagcggcccgggccgttgccaccgagatgctcccggcggccgtgacgaggcacgccgtcgccgaggcgtcgagagcctgggtggcatggctcacgagccacctctgggcctggctcgctgcggcgagggccgtcgccgccgacaacatcccggtgggcgccgcagccgacgcttgggggccctgcctccaaacggcggccaaactctcccacgacctctacggctggctggccgccgcggtggtccagaagctccccgacgtcgccgccgagaagctgctggacgacgcggcggcgtggctcgtgcgcggccgcggcgtcgcggcgtactcgacgctggcgctcgcgctcctggccgtcgccttcctcgggggcgccgtgtgcgcgctcacctgccgctccatgaagggccccgcgctcggcggagcgcgcgtgccccgcgccgtcttcgaggccaaccccaagcgctactacgccaccgtgcgaacggcgcggaaggcgcggcgccgcgccggtggggctggatgcaagctgattccggccggccttctcgtcgcgttcgcggcctacttggctgcaaagatgctctactaa

SEQ ID NO: 10498 - DNA, 336 bp, Zea mays
  Peptide Sequence Number=SeqID_52277
atggctcgtgcggcggctgcaagaccatgtggcgaggcacaggggcctcctgcacgggagcgtggagccgccggtgtccaggggggagcactaccgcgggtgaggcagcggccgtgggggaagttcgcggcggggaggacgatggcttgtgcggcggctgcaagaccatgtggcgaggcacaggggcctcctgcacgggagcgtggagccaccggtgtccaggggggagcactaccgcgggtgaggcagcggccgtgggggaagttcgcggcggagaccatacagggaaacacggcaccctccccgacggcaccatacacggaaacacggaactaa

SEQ ID NO: 10499 - DNA, 156 bp, Zea mays
  Peptide Sequence Number=SeqID_52278
atggatgcaggacaccaggtcactgaccatgcagttcgaaaggccaagctcgatgagcttgctgcagctctcacagatggcgaacagtacgaggagggtaagactgtggacctctatgtccccaggaagtggtacgtttgcctcatcctcttgtag

SEQ ID NO: 10500 - DNA, 2517 bp, Zea mays
  Peptide Sequence Number=SeqID_52279
atggcaggcctgcaagttattggccttgctggccggcttctctcctggtcgtctattctcttcctcccttctccctctgttttgctcattttttggtctggtggctgggatgtccagaatgccagcgagcctcatcgcttagaggatcatccaagggatgttaacgcccaaatggaaaattttagcattgtctatggtgacgagtctgtgcctcgcttgtatgagaactctcgaatatcttcggatcaacttcctggccaatcaggtattgtgaagcgggctgtggcgcttggacgttaccttcagaacccgttggcaatgattgcaacactgtgtggacctgggaaagagatactttcttggaaactgcatgctctggaacagtttctaactcctgatgagaagtatgaaattgttgagcaagtaatggttgatgcaacaaatcagataggttttgatgtcaatcttgctgctagccatgagtggcatttttctactctacaatttattgctggtttgggtccgcgtaaagcttcagctttgcagaaagatctggtaagagagggatccatttttagtcgcaaagagcttgtaaaacctctaggcaggaaagtattcatgaatgcttctggatttttacgtgttcggcggagtggtgcagctgcagccagcgctcaactcattgatctgcttgaggatacaaggatccatcctgaatcatatgtattggcaaaaaatttagctaaggatgtctatgttgaggatgcacaacatgaaataaatgaaatggacgatgaggagcaagagatggctattgagcatgttagagaaaggccaagcatgcttcgaagtcttaaaattgtggaatatataaagagcattacagaagaataccgtaaactggaaactctgcgtgatataaagtttgagctgctgtgcggtttttctgactggaggattccctataccgagccaagcccagacgaggaattctggttgctttctggtgaaactgatgataccatatctgagggaaggattgttcaagttactgttcgcaatatacaagataacaaaataatttgcacctttgattcgggtttgaaagccatagttatggcagacaactattctgatgagggttttgatccagaatcatcacagttacgtgaaggcgatgtattaactggcaaaattcgaaacgtgaataaaaatagattcatggtttacctaacatgcaaggctagcgagatgaggagaaggccattctctagaggtgagcaggatccttactatcatgaacaagacatgacctcacaaactgtagaagataaggctcggaaacaaaaggaacttgcaaagaagcatttcaagccccgaatgattgttcatccccactttcagaacctgacagctgaagaagccatgcagtttttatcagataaagagcatggtgagaagttaatccgaccaagctccaggggaccatcatttttgacacttaccctgaaaatttttgatggcgtttacgcacataaggagatagctgaaagtggaaaggatcataaagatatcacaagtttgcttcgcctggggaaaacactaacaattgataatgaaacttttgaagacctcgatgaggttattgaccgatatgtggacccattggtaggacacctgaagagcatgctgtcgtaccgtaaattcagaaagggtttaaaaaatgaggttgatgagatgttaagggcagagaaagcagagaaccctatgagaatagtatatagttttggcatatctcacgaacatcctggcacctttatattgtcatatattaggagtacaaacccacatcacgagtacattgggttgtacccgaagggcttcaggttcaggaagagagacttcgacaacattgaccgtcttgtgtcgtatttccagaagaatattgacaaaccaccacctgatgctggaccatcaatgcggaatgttgctgcaatggtacctatgaaaaactcagcttggggttctggtggtggtggggatgcaaatggtggttggaggggagatggtagtaatgatagggatcgacctttctctggcagatcaggagggaggtttgattcaaggaatagctctggtggtcgtggacgaggacgggggcgtggccggggtaactttggcgatgacgataatgctggtggaggttggagtggaggaggtggtggtggcaacagtggaaggtggaccgataacattggcacaggtggcagtggtggttcttcctggggtggtggtggcggtggtgatgacagcaaccgtggcggtggaggagggggttggggatcagctggtggtggtgctgacaatgctggtggcggaaatggagcctggggagcagctgctggtggctctgatgacccagggttgggtagcgccaaaaaggtcgtcccagcacaggatggtggaaccggctgggggtcagaaggtggcggcggcggtggtggcggaggctggtaa

SEQ ID NO: 10501 - DNA, 729 bp, Zea mays
  Peptide Sequence Number=SeqID_52280
atggcgcccgcatggctctccgttcccagcgccgccctctccctcctcgacggccagcgtccccgcgagtgggagtggcttccgctccgaaccgcctgcccgagcggtggccgtcgtgtgcgtgtgccgtgccgccggcccaggacgaccgggttttctgtcgcggcgcagaggaggctggtcgtggcggcggcggcgatggagatgacccctgccgcgggagaaaaggaggcggacgccccgttcaccgaggagatgcgggcggcggccatgcggctgcactccagggaccaggccagggacggcaagaaggaggcgcccctggagccgcccgtcgccaagtggcagaccaccgtcgaggggtacctccgcttcctcgtcgacagcaagctcgtcttccagacgctcgaggccatcgtcgaccgcgccgtcgttccctggtatgccgagttcagggatactggtttagtggtttggagagatcggagccgctcggcagggatctggaatggttcaggcagcaaggttgctgagaagctcagtctgcagaaagagctagagttctacgaatgggagggcgatctgtcgcagctgcagcggaatgtccggtcgaggcttaaccgagtcgcttccggttggtctcgagtagagaaggaccgctgcctgggcgagatggagaaggcgtttacctgttcagttgacctccgccgccatatgtttccctgctga

SEQ ID NO: 10502 - DNA, 180 bp, Zea mays
  Peptide Sequence Number=SeqID_52281
atgacggacgacagcgacgcgggggcggggactgtggcggtggagtgcggtgttggtgttggtgtggcggcacagcggggggtgccggactgtgaaccatcgtcgcggctagagatggcaatggggttccgatcctcgattctctgcgaggaattcctctatcaggggacggggatgtga

SEQ ID NO: 10503 - DNA, 378 bp, Zea mays
  Peptide Sequence Number=SeqID_52282
atggcggctctcagcccccttacggaagcaagaggacgtcagcaaggactcgacagccccgacagttgtccttccgccaggctccagcgctccttcgacggccacgacaccacacgaaccgggtgccaaaacctctccggctgccatgatggcatggagccccgccaccgcccgccgacgaccactgcccgttttgtggccgccgtcgcgcccgtgccccgtccagtgccacgccagagccccaccgctgttgacccgaggttccaccgcacctttgtcgtcctccacgcgttctggagttcgcactcaagggggctcaggctgtttcctgagtccctctccgtaaggacctgtttgaggagtgacaacccaggataa

SEQ ID NO: 10504 - DNA, 258 bp, Zea mays
  Peptide Sequence Number=SeqID_52283
atggggtctagggagaggtattggtcccatctcttaaggaaggtgagggcatacttgttggcttacttacagcttcacatcaaaatcattgtcaccaatatacatccaagtgacaaggacttgctggtggagcaggagcaatcacctcttcaggatgtcagccagcaccatcatcatcatgatcttagtggccatgagctctccaattctcatcaacaccaggcaaacgttgggtctagctccagcaccgtctcctag

SEQ ID NO: 10505 - DNA, 363 bp, Zea mays
  Peptide Sequence Number=SeqID_52284
atggagctaggcatgatattcgatctcctctacaccaaggccaaccaatcactcacaaggatcaaggagatgtgggtgaggcttctcatgtatgctgctggcaaatacggcggagagccacatgcagagatgatgctctcgcgattggtcgcggcacggagtcttgtggcgttcgcggacttcgccgagggcagtgtgggtatgggcggtgtcgtcgagcatgggcggtcattgatgcactgccaatttgtcaccgtggtgctgctgtggggcatggtcaacttcaccggcgactcaatcgctggtaagaagtttccccagctgttcgcctctagtcctcgccatcctcctagctcaatgtag

SEQ ID NO: 10506 - DNA, 483 bp, Zea mays
  Peptide Sequence Number=SeqID_52285
atggcgcaaagggtcttcttattcgtagcaggcctagatctcgcctcccgggagagactccgtcagggaggagagatcctaggatcccgtctcctccgccatcaatggaaggtggccgaggatctcctctgcccctctgctccacgatccctatcatctgcgctgccatcaacgctccacccctgccgcaaatcgcctgccgccgctcgcgatgcgctcagccctaacaaattctctcacaagatctggcaaaacccatcacctccgctctcctcctctaccatcgggatcctggtggccaacgtcgtcctcgtcggtgagatgacctccaaactcctccaaacctcgcgctccatcgatgaccggaggcctccgcccctttgggatctccttattcacaaggcgtcgaggccgtcgtcgaccacgtcatgccgctacgctaggaggagacgccgacccaacgtcggcttcatggtggcctaa

SEQ ID NO: 10507 - DNA, 159 bp, Zea mays
  Peptide Sequence Number=SeqID_52286
atggaggcgatcagcaacaccaggttagccctcgggatcctggtggcccgacagcgtggtcctcgtcggcgagaagatcaactttatgcagagcttatggaacctgagaagcacatgcagatattctcttgtaggaaaatgagatgccaaacatactaa

SEQ ID NO: 10508 - DNA, 177 bp, Zea mays
  Peptide Sequence Number=SeqID_52287
atgaggagaggccgtgaaggttctgggagtgaagggattgggatcgggaactgctgctgcattaggcgtaacaaggcactgaggaggatgtgtttctgggcaagagatggtagcaatgctaaaatagttgacttctggggctatgctttcacctttagagtcttcagaggaatttag

SEQ ID NO: 10509 - DNA, 381 bp, Zea mays
  Peptide Sequence Number=SeqID_52288
atggcgcggagacacacgatggcgacgaagcacaccgacggcgacgagatactttccaccggcgagcaattgggtcctcaccaggtcctcaccggccgaattcccggtttccgcaggtccagtacaagtcccccaaggaccccagaccacttcactcgatggggtgcggcgcggaaaatggaatgcaccgacggcggcacttttctctccctcacaaatttaggcaacgttgatgagaagacgacaccaacgatgatgtggctggaggagaggaggtcgtggacgaggtccgcttttatctcccgggttcacgaacttggagacatggcccaacccgcgcgaaaccagggagaggtccgcgcatggcgctcggtccgttga

SEQ ID NO: 10510 - DNA, 253 bp, Zea mays
  Peptide Sequence Number=SeqID_52289
atggcgccgtccgggccggccctggtccccttccctccctcacgcgctgcccggggcgtccccgtccgcccatcggcgctcgtagccatggcgaggcggtccgggcatgccgtcccgacgtcccaacgtcccggtccctgccctgaagcagcgcccccgaccggtcgatccccgacctcgtgctcactccgacgactgtacccgcgcagccctaacttgggcgcaggtgaccggagatcagccaatgggacag

SEQ ID NO: 10511 - DNA, 1380 bp, Zea mays
  Peptide Sequence Number=SeqID_52290
atggcctcactgcctctgctcgtgtgtttcatcctttgcacctacaactccctcgctcatggaggcaacgaggaggagcacgtgcttgtagcggtgccaaccagcaggtactctgagccagcagcaacatgctccacgtcgcgagtgaggtggctggacgagggaagcaacactgtgtccgtgccactggtgcaccgccacggcccgtgcgcgccgtcgacgcggagctccgacgagccgtccttgagcgaaagactccgccgaagccgtgcccgctccaagtacatcatgagcagagcgtccaagtccaacgtgagcatcccgacacacctgggcggctccgtggactcgctggagtacgtggtcaccgtgggcttaggcacgccggccgtgtcgcaggtcctcctcatcgacacaggcagcgacctgtcgtgggtgcagtgcgcgccctgcaactcaaccacgtgctacccgcagaaggaccccctgtttgatccgagcaggtcttccacgtacgctcccatcccctgcaacaccgacgcgtgcagggacctcacccgcgacggctacggcagcgactgcaccagtggcagcggcggcggcgcccaatgtggatacgctatcacgtacggagacggctcgcagacgacgggcgtttacagcaacgagacactgacgatggcgcctggggtcaccgtcaaggatttccacttcgggtgtggccacgaccaggacggtcccaacgacaagtacgacggcctcctgggtctcggaggcgcaccggagtcgctcgtcgtgcagacatcctcggtctacggcggcgccttctcctactgtctccccgctgcaaacgaccaagcggggttccttgccctcggcgccccggtcaacgacgcatccggcttcgtgttcacgccgatggtccgagaacagcagacattctacgtggtgaatatgaccggcatcaccgtaggtggggagccgatcgacgtcccgccgtcggcgttctctgggggcatgatcatagactccggcacggtcgtcaccgagctccagcacactgcgtacgccgcgctgcaggccgcgttccggaaggccatggcggcgtacccgctgttgccgaacggagaactggacacctgctacaacttcaccggtcacagcaacgtcaccgtgccgagggttgcactcacgttcagcggtggcgccaccgtcgacctcgacgtccccgatggcattttattggataactgtctggctttccaggaggcaggaccggacaaccaacctggaatccttggcaacgtgaatcagcgcacactggaggtgttgtacgacgtcggtcatggtagagtcggattcggggctgatgcgtgctga

SEQ ID NO: 10512 - DNA, 258 bp, Zea mays
  Peptide Sequence Number=SeqID_52291
atggtgaggttgcggggagacttaaggcagcatgcggaggggctgctgtcgtgcctaggcgtgcgagggacttcagtgatgggcaccggtaggatcaacgaaggaggaggggagaagaagaggactcaccccggtcatgacgatcggaaaaagaaaggaaaatgcttgagaccgattgatgcaattcatgaggatctcttggacctgtgggttggacccacacacactttcgttgtgccacttgatcttgttagttga

SEQ ID NO: 10513 - DNA, 315 bp, Zea mays
  Peptide Sequence Number=SeqID_52292
atgacgcgctggccatcagcaaaccccggcgaggacctcaccagcggggaagacacagagcacgcacgcgtcggacgaccagaggaagaagggcgtgggcgaactcgtccgacggtgtccatatgggcaggggcggacccaggcctatggccgcctgggccacggcccggggcgcgggttcaaaaaaattttagaagagctcgtgttcgagtatggctggactgtgctgaaaagctgcaagcctgcatctactgtcgcgccgcctctgctggtctgccctctggcctctgccagtctgccctctggcctcgctga

SEQ ID NO: 10514 - DNA, 432 bp, Zea mays
  Peptide Sequence Number=SeqID_52293
atggcggccagcaaaggcggcgtcgagctccccacgaccccaccccacggtggtaagctcgccggcgcatggccaacccgcgaccccgcaccccaaactcatgaacaaccgattctacaccacactagtgacacagagaaacataacaggatgcccttacccgaaacggtggcgtctgtgttgctgcccacattgcggtgcgacacgatggtgatttccttgccccggcgaggacttcaggtcacacttcacgccatccggacacggcgagaccatggatgggtgcggtacccacaggcgatgcaccatgtgccgaggttgaagctacgacggatgcgcgggattgactacagcggcgatggggctctccctcccgacgcgagctcgacggtggatgcgatcttacgctgggtaccggattggatggcctaa

SEQ ID NO: 10515 - DNA, 510 bp, Zea mays
  Peptide Sequence Number=SeqID_52294
atgatgagcgcctcaaaaaagcgaaggaagcgggccccgagccctcgtactgatcaggggttcgaaggttacgccctgcggggtttggcaaccgccccagagcactcgggctctgagccctttactgatcaagggttagaaggctggcccctcggaaggcgggaacgatttgtaatggaatcccaccggagggaggcgccgagccctcggaccctatcaaatgggtctgggtccagcaaatcacctgcagcctcgggcgaaacagggagctccgcctcgcccgacctcaggcctcggccgcgggagaaggtctccgcctcgcccgaccccaggcctcggcctcagcctcggcctcgggagaaggtctccgcctcacccgacctcgggcctcggcctcggcctcggggaggagtcacatcctcgcccgacctcagcctcggcctcaggagaagtctccgcctcgcccggaccaactacgccactggggatacatcattaccctacccctag

SEQ ID NO: 10516 - DNA, 456 bp, Zea mays
  Peptide Sequence Number=SeqID_52295
atggcggccggtgctgcttccgtccgcggcggtggagtcactggagacgaggcaggcgcgggcttcgggggctctgaggtcgccggagcaggccaccaccggcggctcggggttactccggcgagcaatcccgactgcggggagggggaatcgggtgcgccgaggctggaacaagctctggtgaggggtgaaggacgcctaaggacaaaacacgggctcaaagtgggattaaatcggccggacaccgagcgggtgcggcggaccgatgaggcaatgctccgacgagcacaaattcactacggcgaggtagaatcgaggcaaacagtgcacggggaaaggttcctcacctcaggacggtgcttggggaggcttgatgcggcgtctggagcttcgacagacggcatggcgggcgcgcttctccggcgagctcgggcggctgagcgtgagagaggctaa

SEQ ID NO: 10517 - DNA, 399 bp, Zea mays
  Peptide Sequence Number=SeqID_52296
atggtcctgctgcaaaatcccctcccccaccacgacatagtgtcactcctcaaccccaccctcttaccccctgcctatgccaaccccatgagccatcccccaacaacccaaaaacctctgtgcaaagagaaaaatgctttgccttcccttacgagctcccgcttggctactcaatcctccgatagcttcaaacatgcgaccatcaaagccaccacctataaagctctaagggacgccctgctcccttgctcgcatgacgtcctgaaggtggtgcaccagaataagccgcttgagaagagcaagaagcctatatccatccccgtcctcaggaagctggtcaagattgttggcctgtgttgcaaggcaacatttgagatcggtgtggtgcccccattctag

SEQ ID NO: 10518 - DNA, 171 bp, Zea mays
  Peptide Sequence Number=SeqID_52297
atggccatgatgggttcaacatcagaaaagatgtacctctgccaggtaccagactttgggtttttaaatgataaagctaagaccgggcgggtgaggaaacaacagacttttgctgtttttgctctaaggtggtgctcaaagaagaacctcaacagtgcagccgtgggatga

SEQ ID NO: 10519 - DNA, 330 bp, Zea mays
  Peptide Sequence Number=SeqID_52298
atggaggaagtcatgtgctttatcttttctgggatactgaaggcaatggttaaaaagtgcatgatggagttggatcatttctatggatacatcaaagaacagattgaaagcagtgcaacctttacaaatactgaagagaaaaaagtcaatgtccattctgaattaaaatcatgctctggaattgggagtctagttatagcgaagtgctctcagatatctaagagaaatgaggacacctttgatggaaagtacagcttgcaagatgttcttaagcctggtttatggctctcaccggagacctccgctggttttgccgggcctatgggctga

SEQ ID NO: 10520 - DNA, 2406 bp, Zea mays
  Peptide Sequence Number=SeqID_52299
atgccaacggcggtgccgacgcccaaggcggtggtccaccagcggttcggcgccaaggcgcggtacacggtcgaggaggtgcgggaggacgtgggcggctgcccgggcctcgcgccgcagaccaggaacgtctaccgctgcgcgctcgacctcccgggcctctccgttgccacgcccggtaccttcctcaggaagaaggacgctgagcaggccgccgcgcagatcgcgctcgacaagaactttctgtcatctacccatcctcttattggccatttgtgtgtgtctctccggagaactggagacctcattgggaggttacctttgtcggctattgctgcatgtgatgtgaaggtcaatacattgtgtaaattgatcgaccatagggcagaatttgatcctctattggtcttgtcattattgtacaatgctgcaaaacaatctcctggagtctctgttagtgacagcaacttctggattcagagtgaaaagccttattctccggaggctgttgactcggcacttgagcgttggtctggtacaacagatcccgtagaagtagaggcagttcttgttccccacatgttggaggatgaactgaagacagtaagaattaatctacgagataatgaacattatatgagttatgttgcagcagagctctcagcaattgattcctctcatgttcttgtatcaagaacaattggaaaaacatcatccgagataagactgtattttgcagccgcaaatatacatgctgtttctgatatgtcaaaacacgcgcttgattctcttggagatggtgacatcaactggcaaagtgacacgctgacatgcttttgcctcaggatacttctgggcaagttacctgatggaaattgtaagatgtctagggattcgattcttgcagcggagcttccatctgcatactctcgttttagttggaaaggcctctctccacgagatcttctttgctcattttgtcgccttcagaggttgccagagccccattttgctgtcagtagggtctcttgtgatacattaatgtcagctgtgagctctgaagaaagaggagcaccagcaggcagcgcagaaaatcagtacaccaatgatgtcaggatcaacaaggaaaaaccagatctttttaaatgtgaagtgaacatacgttcacggaagcaagaagttttactagagtattctgcagctgacacttggagcaaggaatctgatgctattcagaattcttcattaaaggtcttgatttggttcaataattattttaagaaactaacctcaaaaacaggcaagctatatctttctgagtctactgctgcaatgtgcagtgcagttggaccattttctatggatacacaaaagaagcaccttgaaagcactgcaaagttaacacacattgaaggtccagactctggtgttttcccgtcccacggatcattgacttgtataagttatactgcttcccttgtgacgaaggataaagcaaaaacatatttgttggagagccacaacgagtttgagtttgagattgggacgggtgctgttagtaatcagcttgaatcatgtgtaactcagctgtcagtgaatcaaactgcacgttttgtagctgaactgcctcctagggatttaatcatggctgcatcttgtgagttctcacatgacctctccaatgtatctagcgagagctgcttcctggagttctctgtaaaggttctgcaggttgattttggctgtggatctggtagccttcttgattcgttgttagagcatccaaccacgctggaaaagcttgttggcgttgatatttctcgaaaaggcctcacacgtgcagcaaagagccttcatcagaagctgagcaaaaaatcaacgacgcagacaaatgttccaactgctgtgctgtatgacggatcaataacggactacgattctcgcttatatgggtttgatattggcacttgtcttgaggtgatcgagcacgtcgaggaggaccaggcgactttatttggcaacgtcgtcttgagctcattccgcccgaccgtgctcattgtttccacacccaactacgaatacaaccctatcctccaggggtctgctatgcccaacaaggacgacgaggcagacgaaagcgctggtccctgcaagttccgcaatcacgaccacaagttcgagtggaccaggctacagttccagtgctgggctactggcctcgcggtgaagcatagctacagcgtggaattctccggcgtcggtggctcaggcgaggagccaggctacgcttcccagatcgctgttttcagaagactggtgcagggccaggaagcgatgtgcctggacgaggatggcgatcagccttacgaggttctctgggagtggcctaacgcgtgtgtgaactag

SEQ ID NO: 10521 - DNA, 3384 bp, Zea mays
  Peptide Sequence Number=SeqID_52300
atgccgtgcgcatcccggccgtcaggcgcggcgggcgccgttgccctagggctctggggttggtttctgggttggagttctggcgtggcgtgtaggtctgggcgtgcccaccgcgcgcgccagcagcatgaggaagaggaggtgctggtgccgtatggcccgcacctggagttgcccaatggagcgcagccaatggaagttgtgcctgctgagccagctgctactgtggaaaaccaacagatagaggatccaccaatatcgagatttacttggaccattgagaacctatcaagagttagcacgaagaagctgtactccgaaatctttgttgtcggaggctacaagtggcgaatcttgattttcccaaggggaaataatgttgaattcttatctatgtatttggatgtggctgattctggggtattgccctatgggtggactagatatgcacaattcagcctctctgtggttaatcaaattcacaacaaattcacaataagaaaagaaacacaacatcagttctctgctcgagaaagtgattggggtttcacttcatttatgccgttgggtgaactctacaaccacagtagaggttatcttgtaaatgatacttgtatagtggaagctgaagttgctgtatgtaaagttgttgactattggagttatgactctaaaaaggaaactggctatgttggtcttaaaaatcaaggtgctacctgctatatgaattctcttcttcagacgctgtaccacatcccatatttcagaaagatgcagctaactacagatatttcttgccaggctgtttatcacatgcccaccactgagaatgatatgccctcaggaagcatccctttagctctacagtcactcttctataagttgcagtataatgacagcagtgtctctacaaaggagctcacaaaatcattcgggtgggacatgcatgattcatttatgcaacatgatgttcaagaattgaacagagttctttctgagaagttggaagataagatgaagggaactgttgtagagggcacaatacaacaattgtttgaagggcaccacatgaactacattgagtgcatcaatgtagatttcaaatcaacaagaaaggaatccttctatggcaattgtaattctaatgcagatctccagcttgatgtcaaaggttgtcaggatgtctacgcttcatttgacaagtacgtagaagtggagcaattggaaggtgacaacaagtatcatgccgataagcatggtctgcaggatgcaaagaaaggagttctttttatcgacttccctcctgttctgcagcttcagctaaaacgttttgaatatgatttcatgcgtgacacgatggtgaagcatgtcaaggtacttaccatccattgtgaaccacagataaatgatcgctatgaattcccacttcaattggaccttgatagagatgatggaaaatatttatctcctgatgctgacaggaatgtgcgtaacctttatacccttcacagttcatttgttcacttcaagtatttactggagcgaaaaattcccaggttcaagtttgatgatgagcgtgtgacaaaagaagatgcaaagagggcactggaagaacaatatggtggtgaggaggagctacctcagacaaatcctggcttgaacaacactcccttcaagtttactaaatattcaaatgcatacatgcttgtgtacattcgtgaaagcgacaaggacaaaattatttgtaatgtggatgagaaagatatagcagagcatcttcggattagattggaaaaggaccgtgaagagaaggaacgtcggaagaaggaaaaagctgaggcacacctctataccataatcaaggttgcaagggatgatgacttaaaaactcagatagggaaagacatatattttgatcttgttgaccatgataaagtcccaagcttccgtatccaaaagcagatggcctttgctcaattcaaggaggaggtagcaaaagagtttggtattcccacacagttccaacgattttggctgtgggccaagcgacaaaaccatacttaccgacctaacaggccattgtgtcctcaagacgaagcgcatactagggtgttcagctgcaagccaaaatttgccactcctctgttaggcaactttgatcatagtagtaaggtgtttgcttttgctaatcataaattaggcatgcttcacttgtttccagcttggctttacatgacccttaaacctcttcctcttccagacaagactagagaagatatatttcttctcttcaaactctatgaacctgaaaaggaacagctacggtatgttggtaggctctttgtaaaggcttcaggaagaccacaggacattctgccgaagctaaagatgttggcaggtttttcacaagatgatgatattgaactttatgaggaaattaagttcgaacccaatgtgatgtgtgaatacattgataacaggcttctgttccgatcttgccagcttgaagatggggacataatctgttttcaaaaatcttcaaaggcagatagtgctgaccgatatcgatttcctgacgtaccatcctttttgacgtatatacgtaaccgacaggtggtccactttcgttcactggagaagcccaaggaggacgattttttcctcgagatgtcaaagattttcacatatgatcaagtcgtggaaaaagtagctgaaaaacttggcgtggatgacccatcgaaaattcggcttacatcacataattgttattcgcagcagcctaagcctcagccaataaagtacagaggcgttgaacgtctactggacatgctgattcattataaccagacttctgatattctgtactatgaagtattggacataccacttccagaattacaagcgctgaagacattaaaagttacataccatcatgccacaaaagatgaggtgtcagttcacagtataagattgccaaaaaacagcactgttggcgatgtgctaaacgatatcaaaacaaaggttgagttatctcatcccaatgctgaactgagattacttgaggtcttttatcacaagatatacaaggtgtttgcaccaaatgaaaagattgaaaacattaatgatcagtactggacactgcgtgcggaggaggttccagatgaggaaaaaaaccttggtccctttgatcgattgattcatgtatatcattttacaaagatactcaaaaccaaacgcaagttcagaactttggagaacctttttttatggttattcgtgaggatgagaccctatcttctatcaaagagcgtatacagagaaagcttaagggttccagatgaggatttctcaaaggttcctgacttccaaatgttttgttcttaa

SEQ ID NO: 10522 - DNA, 325 bp, Zea mays
  Peptide Sequence Number=SeqID_52301
atggggggctcccgattgggtcgggtggctctgccttggacttctccgatggtcttcgatttcagtaatggatctttaacaagtacaactgccccgatcaactttctcccgggtgccaaaggttcacacttagccaataaaagaccaaaaattgggttcaacaaagagagcaaagggataaccgaagtgtgccctggggcgctccgctataattcaccggactgtccggtgtacaccggacagtgtctggtgccccaagggagagcaactctggaactcgccagcttcgggaatttgctccgctataattcaccggacgtgtccg

SEQ ID NO: 10523 - DNA, 201 bp, Zea mays
  Peptide Sequence Number=SeqID_52302
atgggagagcgccggacctctggatatgcagtccggacctccaagatcgtcgagcaccgtggcgtgacttctgaagacttcctgatgaagaaagaagctgcatcgtccatgccacgaagctccaaccaccctgcgcctggtgctgctgttgtgcgcgctgcgcagcagcacacgcctgcacagacgtcccgagctccgtaa

SEQ ID NO: 10524 - DNA, 456 bp, Zea mays
  Peptide Sequence Number=SeqID_52303
atggttgaaactgaagttagaaggagcgccaggcttcaggagaaggctaggggcttcaaggactggaaaaaatgttcttgttgtgctcgtgtctccccaccttctatctctcacaaaattattaagaagcttggcgctgagttctgcaaagtggacccatcgtcccttaacctcgactccctgaacagctccgagactacaagcaacactatccagagactaagttcttccaccagcagcagaaatgaagaacccaggctgccagaagaacagttggaagataccaatgttgatgatgtggggtctagcgccccagctgggaagttatctatgtataagcacaagatgtccgctcttggtggtgcgcatgttgcgcaaattttgtttgtcacaacgaactttggaagagtctatgactctttggttattggcatgaaacttgcgatgtttggataa

SEQ ID NO: 10525 - DNA, 294 bp, Zea mays
  Peptide Sequence Number=SeqID_52304
atggctgcctccatggccgtcgctttcactcgctatctctcctctcccttccttctactgcatccaccggatctagaagcaaggcgtcgcgtggaagctcgtgcccacgccggcggcctcgcacaagccgccactgcgctccctccgatggttttctttgagccttcggaggtgacctatcagaccttcaacgactgctatgtctccggttgcgaaacagttcttgcttgcacattttttcacactggggaatacttgttcaccgaccttatcggcaacagtggtgttagctaa

SEQ ID NO: 10526 - DNA, 267 bp, Zea mays
  Peptide Sequence Number=SeqID_52305
atggagtatagtatgcttgacatctatgactacatatataagctattggatcctaggttctcacttggtgctatgctttgctgtaagcatgtgtttgcactagacaagcttctgctttatatgttgccatttgacctcggggtgaaggaaggggatgaactgcgtacgaattcttacgttctggaaatcttaagagagaccaggttcccacgggttcgtggtgccggtgaagttacgtcacctaaaacaatccttcagcacgagtaa

SEQ ID NO: 10527 - DNA, 810 bp, Zea mays
  Peptide Sequence Number=SeqID_52306
atggcatccgccgccggcgccgccttgtgcccatgctctttctccaccgtactctcctcctccccctcaactcccttccgtcccgcaaggacgacgcctcgcccttctctccgcccgctgccgcgccgcgccaggctaccgctgcggccgggccactcggtactgaggtgcctcccgaaatgcgactcggggaagccggacggaggaggagatgctgggttatcgggtcggaaggcggcccggccagcgggtcagggaggacccaggcggcccgcacagttcggcgcgtcgtcgtgcggactcgcattcacgacggtggcgggggtgataatgctccaggcatcgcagcaggcgcttgccgccacgcagttcgctggcctgcagcctgcggacgtgctgggggatctcggggacgctttcctgttgatcttcttttctgagctaggggacagaacgttcttcattgcggcactgttagcagctagaagttctggagctgtcatttttctaggcacatttggagctcttgcggtaatgaccattatatctgtagttcttggtcgagcattccactatgttgatggcatcattccgttcagctttggtggtactgatttcccagttgatgacattgctgcggcatgtctcttggtttattatggggttactacattacttgatgcagcctcaggtgatgatgaaaagatcaatgaggagcaagaggagcttaatgctttcagtgctcaatggctggaagccttgggccttgccatggccaacgcatgggaattctccctggctgtcggctag

SEQ ID NO: 10528 - DNA, 183 bp, Zea mays
  Peptide Sequence Number=SeqID_52307
atggcgagctgcgcagtagcagagagaggcgcggtacagggagcagtatggcgcgacgagagaacggagtggacgagaactgctccacgtgtccgttatgggagagggagagagtgggcatcggttaccggagtagagagtggagagaggagaaacgacagccgggaaaggcgcttcgcgtga

SEQ ID NO: 10529 - DNA, 159 bp, Zea mays
  Peptide Sequence Number=SeqID_52308
atgccggggccacaggctgcaggtctggccggcagcgactcggtggtgctcacgcaggctgtgcggatccagcgcagggtaaccggtgcggccgcgtgcagcccccaccacaccggcgggcggcctccgcgcatcgcggctggcatcgccagcagatga

SEQ ID NO: 10530 - DNA, 1029 bp, Zea mays
  Peptide Sequence Number=SeqID_52309
atggctgcctaccaacaagctcccgctctcctgtgcgcctgcctgatgctcgtgctcatggcgggcgcggcatccggcggccgcgtagacgtggaagacatgctgatgatggaccggttccgcgggtggcaagccacgtacaaccgctcgtacctgaccgccgcggagcgtctgcgccggttcgaggtgtaccgccagaacatggagctcatcgaggccacgaaccggcgcgccgggctctcgtaccagctcggcgagaccccgttcacggacctcaccagcgaggagttcctcgccacacacaccatgtccacgcgcctgcatgcgtccgaggccgcgcggcggcaccgggagctcatcacgacgcacgcaggccccgtcagcgacggcggtcgccagtggaaccggaactacacgacggacctcgacgtccccgaaagcgtggactggaggaccaagggcgcggtgacgccggtcaaggaccaaggagcttgtggcagttgctggtcattcgtgacggtggcggcaatcgaaggcctgcacaagataaggacgggccagctcgtctccctgtcggagcaggcggttctggactgctcttccccgcccaaccatggctgcaaccgcggtgaccccgcggctgccatagactgggtgtccgctaacggcggcctcaccaccgagtcggactacccgtatgtgggacggcagggcaaatgcaagctcgacaaggcacgcaaccacgtcgccaagatcaaaggcaggaagttggtggatcaaaacaacgaagccgcgctggaggtcgccgtggcgcagcaacctgttgccgtggacatgaataggatcgtcaaccacggcgtcaccatggtggggtacggtgttgaatctggcggccgcaagtactggatcgccaagaactcgtggggcaatgagtggggcgagaagggatactttcgcctcgagaggcgcatcaaggacgccaggggcacgtgtggtatagccgtgtgggcaaactacccggtgatgtga

SEQ ID NO: 10531 - DNA, 1158 bp, Zea mays
  Peptide Sequence Number=SeqID_52310
atggttcaggcttttgtagaagacccagaacttcgtcagggactccggcaacaacttaaaaggatatcagatattgatcgtctaacacatagtctccgaaagaaatcagctaatctgcagcctgttgttaagctttatcagtcctgtagcagaatcccatacatcaagggcattcttcagcaatataatggccaattttcaacattgataaggtcaaagtttcttgaaccgttagaagaatggatggcaaagaatcgatttggtcggttttcttctcttgttgagacagctattgatcttgctcagctggagaatggagagtacagaatatctcctctatattcttctgacttgggtgtactaaaggatgagctttctgtggttgaaaaccacataaacaatctgcacgtggatacagctagtgatctggatctttctgttgataagcaactgaagctagaaaaaggatcccttggacatgtgttcagaatgtcaaagaaagaggaacagaaagtcaggaagaaactcactggcagctacttaatcatagaaactcgtaaagatggtgtaaagttcacaaattctaagctgaaaaatctaagtgatcaataccaggcattgtttggtgagtacacaagttgtcagaaaaaggtggttggtgatgtagtgagggtttcaggcacattctcagaggtatttgaaaattttgctgcagttctgtcggagttggatgttttacaaagttttgctgatttggcaactagttgcccagttccttatgttaggccagacatcactgcgtcggttgaacctggtgcatgcgaccaaagttttggtattcatgttgcagaatttgctaattttccagaagctgttgttgcccttgcgaaaagcaaagcagcagagttagaagacttttctactacacctaccttttccgatgatttgaaagacgaggttggatcaaagcgcaagagggtatttagcccagatgacatcaccagaggagctgcacgggctcggcttttccttgaggaattcgccgcattgcctatggatgagatggatgggagcaagatcttggagatggccaccaagatgaaagctgacttgcagaaagatgcagctgacaatccttggctccagcagttcttctga

SEQ ID NO: 10532 - DNA, 503 bp, Zea mays
  Peptide Sequence Number=SeqID_52311
agtcggagcttgtcgtcgaagccgccacccttcaccatgggtttctcgacgcgctctaccatgtggtgatgcgccgcaacgccgtctatgtcaccttcgtcgtcatcgatgcttccgcaggcgagcaagacagcagaagaagattcagaacacaccagcttagctccagtcctcgcacgcacactgtccactctctctgccccccctccacctccacctccacctccatctccatgcatgggatgggcagtcaaagaaggcttctcctcctcctggctctcctcctgctgacgctggtcgccggagaaggcgacggcgcactgtccggcgccggcagcacggccacggacgacggggccaatgccaccgacgcgagcccaccggccggcgcgccgctcgacgtgcgggcaaggaagtggtggcggttcccggcgacggaaggcctcgtcacgggcagcgagcggagggtgcccaactcgtcggaccccctccacaaccgctga

SEQ ID NO: 10533 - DNA, 261 bp, Zea mays
  Peptide Sequence Number=SeqID_52312
atgcatggagatggaggtggaggtggaggtggagggggggcagagagagtggacagtgtgcgtgcgaggactggagctaagctgagcaacaggacacggcgagtcaaagctgaagcaaaagttggaaaggactttttgtggcctaaacaaggtagggcgctgctggctggcacacaatcatttgcagctaacctttttactgctatggggatcaaaatcctcctaaaccctgacctgaagcgtttgcagcagcaattttaa

SEQ ID NO: 10534 - DNA, 522 bp, Zea mays
  Peptide Sequence Number=SeqID_52313
atgactcgcaaccgctgctcacgcttgttgggagtcccacacaagcaagcagcgacacctgaaggagctccgcgggagcacaggcctgcgccgcgctcgcccggcctgcacgccgaggctggcacgctcgcccgtcgcctcgccaccgcccgccgcatcctagtgctacgctcgcctctactctcagtggagacccggggcggcgtcggacgctccccttcaatagaggttggggcgcgcagatccgaggcaacgtcggattctccttccatggacgacgcggacgcgtcgattctggagatctccagccggagagagcagacgatcacaacagcagagagagcggacgactggggcgcgcagatccagggcagacgcggcgattctggagattctccttccatgtggtacatcgccgtccatggaagtccaggacagacgcgcacagatccagggcagacacggctagggcgcgcagatccatggacaaccgatggtgggcgcagacagccggatcgagag

SEQ ID NO: 10535 - DNA, 1068 bp, Zea mays
  Peptide Sequence Number=SeqID_52314
atggctgcctaccaacaagctcccgctctcctgtgcgcctgcctgatgctcgtgctcatggcgggcgcggcatccggcggccgcgtagacgtggaagacatgctgatgatggaccggttccgcgcgtggcaagccacgtacaaccgctcgtacctgaccgccgcggagcgtctgcgccggttcgaggtgtaccgccagaacatggagctcatcgaggccacgaaccgccgcgccgagctctcgtaccagctcagcgagaccccgttcaccgacctcaccagcgaggagttcctcgccacacacaccatgtccacgcgcctgcatgcgtccgaggccgcgcggcggcaccgggagctcatcacgacgcacgcaggccccgtcagcgacggcggtcgccagtggaaccggcggaactacacgacggacctcgacgtccccgaaagcgtggactggaggaccaagggcgcggtgacgacggtcaaggaccaaggagcttgtggcggttgttggtcattcgcgacggtggcggcgatcgaaggcctgcacaagataaggacgggccagcttgtctccctgtcggagcaggaggttctggactgctcttccccgcccaacaatggctgccacggcggcaaccccgcggctgccatagactgggtgtccgctaacggcggcctcaccaccgagtcggactacccgtacgaggggcggcagggcaaatgcaagctcgacaaggcacgcaaccacgtcgccaagatcagaggcaggaagttggtggatcaaaacaacgaagccgcgctggaggtcgccgtggcgcaacagcctgttgccgtgggcatgaatgtacatccgatccaacagcactacaagagcggggtgttccatggcccctgcgacccagaggatctcaaccacgccgtcaccatggtggggtatggtgccgaatccggtggccgcaaatactggatcgtcaagaactcgtggggcgagaagtggggcgagaagggatactttcgcggtttcgcctcgagaggcgcgtcaaggacgtcaggggcacctgcggtatag

SEQ ID NO: 10536 - DNA, 312 bp, Zea mays
  Peptide Sequence Number=SeqID_52315
atgggcacctgggccgagctcgaggccatgccggggccgtcacgacacgagcaaggtacggcggggcgagcaggcaagcacggacggggcgaggacacggccgggcgcgaggggctgagcggggcggccggggctcgcagagcatcggccgaggcggcaagccggacgaggcgaggggcgcggcgagcggggctcgctggagggggaggcggcgggggtagccgagccggggcgaccgagcacgggaccggcgtggggaggggctgggcgtcgcggcgagccgagcccgccggagtcgatactagcggctag

SEQ ID NO: 10537 - DNA, 264 bp, Zea mays
  Peptide Sequence Number=SeqID_52316
atgtcgggagaacacgccaagagggagatcgtgaccggcgacaagcccgcaagctcgaggagaactctttcgagagagtccgaccagaagcataaggaggaatcctcttcctccaacaagatgcatcagaagggtgacaagaagaagaagaagatgaagaaggtggtctactacgagaccgactcttcgtcgccctctatgtcttcaagcttcgactcgtctatcgcttcaatgctccatgagcgcaagaagtatagtgcataa

SEQ ID NO: 10538 - DNA, 624 bp, Zea mays
  Peptide Sequence Number=SeqID_52317
atgccggggccgtcacgacgcgagcaaggcacggcggggcgagcgggcaagcacggacggggcaaggacacggccgggcgaggccaggcgcggggctcgccgaaggcgaggcggccgagggtggccaagccgggggtggggccgaggggcgtggccgagcgcgggacggggcgggggctcgccggagcagccgggcacgggctcgccggaggcgaggcggggcggccgagcacgggaccggcgcggggaggggctgggcgggcgcggccggggtcggggacgagcggcgcggccgggcacgggaggccggggccggaaccggggtggccgagggcggcagggcgcggggccgagcggggctcgcgcaggggcgggggacgccggcgcgggacggggggcgccggggcggccgagccgagcggccgggcgggcgaggtcggggccggggccgagctcgccggggccggagacgagtgcgcccatggcgcgtggagggcgccgacgggagggaaggaggagggaggggagagagagggagaggggggggagagcctcacggagggagacgcgcgcgacggcacagagggcggcgacagcgcggggttgggagaggcgcagcgctag

SEQ ID NO: 10539 - DNA, 285 bp, Zea mays
  Peptide Sequence Number=SeqID_52318
atgaagctgtggaaggagacttccaggagttccaagactacgacgagttctaggcgtgggttagcggcaacccccagtcggctgcctgtgaaggccgcggttatctacgtttctttttcgcactttgatttatttgcattcatcatcctttgcatgaaagtttcatcgcgatcttatggtccgaccgtaccggtacaatacgcatcatatgttgcccgagaaggggcatttgatccttgcttttgggaaaggagggtagtagcagcacggccactacacacttaa

SEQ ID NO: 10540 - DNA, 240 bp, Zea mays
  Peptide Sequence Number=SeqID_52319
atggtgaactgcccgactcgcgaggagatcggccacgggatggcggaggaagtctggcaacacagccatgttgggcgccttcgtcttttgaaggtcctcaaaaacacgttcaaccactggttactaagtattgcaggagcttcggcaccagaacaccttcgatgcagaacattggaggggcaacgaagctacctttgtcatagcaacacagggagacaatgcaaagaggagtcatcataa

SEQ ID NO: 10541 - DNA, 837 bp, Zea mays
  Peptide Sequence Number=SeqID_52320
atggaattaccacaagacgtgcaggacaacgaaagccatcttgatcacctccaaggtatccacatgtataggaaggaagcatcgcgtaccgacctgttaggtttgcgacggaggcttggcgagggcgagatgggcgcgactgctggtttgctggtgcccaatccattcaccctgtaccggtcgcgcgggtgtctctctactgggctggcccacgcgtcggtcgtccaaatgtccccactcgcctgcccatgcactggtgttcggtcactgcgcgtggggctgatttggcagaatcatctccctcccgagaacctcgcaaggttgttgcaaatgctgcgtgcggatctcgccttcttccccttttatcgcgattatccagccacgtgcagatcacaaactgcacatcgcctatgtgggcccaggataccgagccaaaactacctcctacggtgcgttgccgcgcgcgtgtactatattaccggaggtgacgctgggattttcgttcccacctcgtcgggtcctggcgggcaaataaataccgagccctcctcttggatcgaccaccgtgcgcgcagccgtgctctctgcctaaagccaatcgtccgtgtgcgagtgagatcggtcaggggtgagaacctgggtgcgtgtgggtcgccgaaatgggctctcggagttcatcgtagtcccgccctcaagatacatctgggtgattcgcttgggtccgttgagtgcgtggtgacctcggcgctcaggaaatttctgccaacgccattgggattgtccatcgtcatcgggggctcatcgcaggccgcctggcgccgtgtcttggaccgctaa

SEQ ID NO: 10542 - DNA, 1398 bp, Zea mays
  Peptide Sequence Number=SeqID_52321
atgagtcattggaagcagccgtcgaaactcgccatgcttgtagtactgctgctgctgctatgtcatgcagtggacaaagtccattgctcgacgcaccataacaacagccaagattttcattccctgcttgagtttcacaagggcatcaccagtgatccgaacgaagccttgagcaattggaaccccagcatccacttctgccattggcatggtgtgaactgcagtttcactcgaccatatcgagtcacggagctcaatctcaccggccaaaacttggctggccaaatcagctcctctcttggaaacctgaccttccttcatacccttgatcttagctacaatagcttcagtggccccctacctcttcttaacaagctccgaaacctggacgtactctttctgggaagcaaccatttgggggatgttattcccgattggcttacaaactcttccaacttagttgatctagatctctctgaaaacaatctcaccggccatattccttcaaacataggcttcctaacgaagctagaaggtatagccctttacaataataatctcaccggtgtcatcccaccaaccttgggaaacatctccacactagaggtagttgatttttcagcgaatcaactaagcggaagcattcctaataaagtttggcaaatctcaaacataacaatgttaaatctaggacaaaataacctatcaggtggaatcccagatactctctctaacttctcttctcttacagcattaggcttgaacaacaataagctaggcagcgcattgccatcaaacattggcgatgtgttccgtcatctaaatgaactatacttagataacaacatttttgtgggtacaattccaacttccctaggtaatccttcgagtctagaagccctagacctatcaaacaatcatttcagtggcaaaatcccaagttcttttggaagactttcaaagttacagattttaaaccttgagctaaacatgcttgaagcaagggatagtgaaggctggcaattctttgatgccctggcaaactgtagttccctgaatatactttcagtgtctcaaaatcttctacatggacctataccaaattcgatttcaaatctgtccaccactcttcaatacctaatgatggcttcgaacaacctatcaggaaccgttcccccaactattggaaaatttagtggcttgattaaattatcacttgcaaacaacaaccttacaggtaccattgaggaatgggtcggaaacatgacaaaactacaaatcttaggactacaatcgaacaactttgcaggggaaattcctccttcaattggcaatcttacacagttgatacacttctctatagccaggaacaatttcttcggctctgtacccatctaa

SEQ ID NO: 10543 - DNA, 282 bp, Zea mays
  Peptide Sequence Number=SeqID_52322
atgggatacacgacttgtgggtacagggtacaacctctgcagagtgtaaaactggaagggaagattatcaaacaacagcaaagagaaatgaatcctccaaatcctccacctgttggaatcgatcaattggttgtcgcccaaatgctggtaatacaactaatgtcagacatggttaccgaaatgcaaaatcagaaaagacaagaacatgaggaaatacgtcaggaccggctagagatacgtcgagaaataaggcaagcacagtcgaaaagacaacaacaataa

SEQ ID NO: 10544 - DNA, 312 bp, Zea mays
  Peptide Sequence Number=SeqID_52323
atggccgagaaatccggcgacgtgcgcaagtgcgcacgcgcccggtttacggcgagcgtggagggggcggaactgacagggcaggcctacggcgcagagagagaagaaaggggcacgcggggcaacggctcgacgactagcgatccgggcccacgagacagagagagagggagcacgcgggtgaaggaaactggcgccgacagatcggccccactgggcagcgagcgagggagggagggcgcgcgcaagggagaactgccattgacaggcggggtccacctgtcagacgacgtgggcgcgtggcctggctag

SEQ ID NO: 10545 - DNA, 273 bp, Zea mays
  Peptide Sequence Number=SeqID_52324
atggtgagctctgcactgaggtactgtctcccgtgctgtgcctctctccatcatgccttccctccccatccactgtggccactgccggcgccttctgtcgatcattccaatctgaatgaagaattgactcttctcaatcaagccgatgttgatatgcctatctggtttgactatttctatgcaggggatggcgagatcgtggatgaattcgaagaacggttgttttggaacaagagcacagacaaaggatcactctacgagaagcttgattga

SEQ ID NO: 10546 - DNA, 315 bp, Zea mays
  Peptide Sequence Number=SeqID_52325
atggcgctgccatggtccactcggacacggttgctggcgcagggtggaagaagacgacacgggagccctcgatctacgaatgaacggctcagattgatgcattcctaccgcagcgcgtcagccataggatctgaatccgtgggtccgggcttcataaaatctgggacgcagattgataatccaacggctgtgggcgtaccggtatcttcggactcgaatcggcaccacagccgaagcccaaagaatacgaaggttgatacagcgccgaagatgtatgtccttcataaccttcgtctgaagatcattatatcctaa

SEQ ID NO: 10547 - DNA, 1107 bp, Zea mays
  Peptide Sequence Number=SeqID_52326
atggggtacatggacccggagtgcatggtcaccggcagggccaacgccgagtcggacgtctacagcttcggcgtcgtccttctggagatcgcgtgcggccggcgccccctggtgcctcgccacggcgtgggaatggtacgccccgcgggcgccaagccctacggcggtgccatcccactctgtatgctggacgagttcaccatcccgcgggacctcattgaccgccgcatcacccggatgcgcgtgctctccccctccaacctcgctgccgacttctcccgcgcgctgcccctgggtcgcacatccccatgctccaccgcgaggtgctcgactccttcctccgccgccgcgccgtcgaggccggggccgagctcgtcccgggcctcgtcacctcgctctcgctccccgtgggggcccgccgaccccaatctcgtccactacatctcgtcctccccggagggcgtgagagcgggatggagcgtgctggaggtggacgccatcgtcggcgcgaacggcgctaacagccgcgtggcgcgcgaggagcgcatccgcctccccgacgccggcatagcgtactacgacgacctcgccgagatgtatgtgggcggggacgtgtccccagacttctatggctgggtgttccccaagtgcgaccacgtagccgtcgggaccagcaccgtcgccgccaagccggagatcaagcacctccagtccggcatccgggcgcgcgtgagccccaagattgccggtggccgcgtagtcaaggtggaggcccaaccgatcccagagcacccgcgccgtgtcgtggggcgcgtggccctagtcggcgacgcggcggggtacgtcacgcggtgctccggtgagggcatctacttcgcggcaaagtcggtgcgggaatggtacggcagaggagccatcctcgacgccgccgacgcacggctcaatggcgagctcgacgcccgggaggtggagacggtggctgctagggtgcgtgcctgcgaatccctcgcctacgcctccaaatcgtcgaagccgcatctgaggacctccataatggcaaatttctccttacaaagaatctcatcctcgagatttaggaaggactag

SEQ ID NO: 10548 - DNA, 450 bp, Zea mays
  Peptide Sequence Number=SeqID_52327
atggctccggctgaggagaggggcccgcgattcagcccaccaccaccatggcctctcatttcccctgcccacgcctccggctggcgcgtgccgcccccgtgctggacgaccgacgagaccctcgcgctcgcgcgggcctacaccgcgcgtcgcctcgccgtcggctgggagcacctgacctctgctgactgggccgccgtcgccgcggccgccccgtccaagacggacaggcagtgccgccacaaggtcgagaagctctgccgatgcctccgatccaaccgccgccgcccatgcccgctcctcgacgccatcgacctccttgacgtcccttccccgcccttcttctccaagtcccagtcccgatccacgtcccggtcctcgtcgccgccgcttcaggcggcagtggtcggatgtgttgtttcccccttcccctcccgcatcctcgcctag

SEQ ID NO: 10549 - DNA, 279 bp, Zea mays
  Peptide Sequence Number=SeqID_52328
atgggtcgggcaacccatccctctggctcctgctactatgaaagggtctcatccagaagccactctagcggtcgggacacccagtggtggtgcaggggcacctccagcggggcacaggagagcagcgcctcacagactctacctcctcctgaggcgaggaagaagagccctgctgctccagctcctgtcaccgatgctcctgctcctcgtgttagcgatcctacagtcagcatagctctgataccatttatgatgcgtcacgatgcccgatcttcatga

SEQ ID NO: 10550 - DNA, 309 bp, Zea mays
  Peptide Sequence Number=SeqID_52329
atggactggataggttcagtgaaccttgccctggccttgttcccttatttaagtgctgctcctggctgtgcatgccagcaccccagagtggtggccacagcaaccgaattcctcgaagatttcctcgaagatttcctcgaccgtgtggcgctcattctgtgctcacttaagcgacacagccaacagtgggccggtactcgaactcatttaggcgatgtagcgaggggctcttgtgcaaaggtgccgggtggacgcggggccgtcgacccgtgggctggcttcaccctgtgcgcagcctgtttgggctag

SEQ ID NO: 10551 - DNA, 729 bp, Zea mays
  Peptide Sequence Number=SeqID_52330
atggaggcacaaatgtgcaatccagtggcaattgcaacctcaaagtcctcattacaatccactagtcagttgttttctgaagctttgagcgacaagctaaagagacagtcgatgaaactgagacagtgccatcaaattcgagttttaacgaggcagttccctccaggaaatggtgaagaaaaacataaaaggctttcaagcagtgcaaacgcagatgaccctgaaacatgtacatcaaataaagtaccaaacaatagagtccgtacggtcgtagccaaaaggaagctatctgatgtccaaagccacaaatctggtagtgagccttgcaagactgcgaaggtattggtatctgaagttaaagttgtgtcaccagccagagttgcgcagagttctagaaatgctaacaaggtaacagtggatcaagacctgcagaacaccaatactggtaggacgaacgatacagttggatcattttgcaaagatgtcatggaagactgctcaaaagacatgcagagctctaaaactagaagcagcaggagacaaaagattgcagatctagtggatggttcaacggaccatgacaaagagaacatactagtcgatagtaattttacttccaatacaaaacgtggaaataacaggaactccgcacatgtccagaaacaaaagcaactcaacctcgttgacaggacccaagatgatccggttggcgggtggacgagacgttag

SEQ ID NO: 10552 - DNA, 1434 bp, Zea mays
  Peptide Sequence Number=SeqID_52331
atggcggcgctgcagagttggcgcaaggcgtacggcgcgcttaaggacaccaccaccgtcagcctcgccaatctcaactccgacttcaaggatctggatgtcgcgatcgtgagggccaccaaccacgtggagagcccgcccaaggagcgccacctgcgcaagattgtggcggcgacgtccatcgcgaggccacaggcggacgtcacttactgcatccatgcgcttgcccgacgactcgccaaaaccaggaactggatcggccacagtagaactacggaattgaattctcaggacttgctggagcaattgccagcactgcagcaattgttatatcgacttattggctgtcgagcagaaggagctgcaaaaaacaattatctggtgcaatatgctctagcccaggttcttaaagaaagcttcaaaatttattgtgcaataaatgatggaattatcaaccttattgacaagttctttgagatgccaaagcatgaagcactaaaagcccttgacgtttacaagagggctgtccaccaggctgggaacctatctgacttctatgaaagttgtcagggtttagagcttgcaagaaatttccagtttcccactttgagggagccaccacaaacattcctttcaaccatggaggagtatgtgaaggaggctccgcgtatgatgccagttgtagagccactggttatttcctgggctctagagcttcctgagcggcttcttctgacatacaaaccagaagaagaagttcatgataccgttccaattgtagcggagaaactgcaagttgttgaagaaattgctccagttccttcttcccaaatagctttgcctcccaagcctgagattgcagatactggtgatttactggggttaggtgattcaacccctactgtgttggcgatagaggagagcagtgctttggccttggccattcttccgacaggtattgataactcaacaacaactacacagcaagatagtggatttgatccaacaggatgggaacttgctcttgttactacaagcagcaatgcgactccactgtctatggagagtaatttgggtggtggatttgacaagctcacattggacagcctatacgatgatggaacctacaggcagatgcagcaacaacagctatacggatcagcccctcccaatccattcatggcaagcgatcccttcgccgtatcaaatcaagtagctcccccaccatcagttcaaatggcggccatggctccacagccccagcatttgcccatgatgattgaaccaaatcccttcggaccaccacagcagcatcacgcgggcgtcgctcctgcagcaaaccccttcctcgacgccgggttcggtgcgttcccggcagtaaatggaatgcatccacagaccaaccccttcggaggcgccgcacaacttctctag

SEQ ID NO: 10553 - DNA, 450 bp, Zea mays
  Peptide Sequence Number=SeqID_52332
atgcaaatgtggtgggagatgatgagatggaggaaagagtttggtgccgacacggtcttggaggactttgagtttgacgagctcgacgatgtgctccagtactatcctcagggctaccatggcatcgaccgtgaaggggttcgagaatttctcaaagactgcaagggagattgtccaatacatcgctacaattgcaatggcacagatgtgctcaatttacacacacatatgtgttttattatggtcaaagccacaaagatcttctcgaagggtggggccattgggaaggaggcggggtcaggcgacctctccaacagagagtcggcgctcgctagtttgctaagcccgccgtctgtcggcgatgggttgcatcttcgtgacgagcgatatcgggcttgccggacgggccgatgtcgcaacaaggacgagcagggtgggggtgtcaagtag

SEQ ID NO: 10554 - DNA, 156 bp, Zea mays
  Peptide Sequence Number=SeqID_52333
atggagtcacggtggcagacgatgcatcgacgtatgatgtacaacatcgccttctgctccttcagcatcttggcaaggtcgcaggcgttcttcaacgtcttgcttctaccagcgtacatacgtttagcaagcttttgtgtcctccaaggtttttag

SEQ ID NO: 10555 - DNA, 339 bp, Zea mays
  Peptide Sequence Number=SeqID_52334
atgacatttttgtcgttgcacatcaagtcgagcaggatgaatcgtaagtttatggcagtcgtgagccaggcaaacaaggcgagcaagaacctttttggcgggcatccttccaacatagctcatcgagaggctttactattatgtaggcgactaggcgagaaccactggaaagagcacatgatgaagatggcagagatggtggagatggcgaagagctacaacatgatggtggagatgggggagaacagtggtaccaggatggaggtggtggagatgagggagagcagcagtacccaggtggatagatggtggagatgggggagagcaacaatactatga

SEQ ID NO: 10556 - DNA, 1665 bp, Zea mays
  Peptide Sequence Number=SeqID_52335
atgaatagccttacccgaagggctggtcggcataagatagaggaagtcaccccaaagccgcatctgccaccgcagttcaatccctttaccccgctcgccgtcaccgatcctccgggctggatgacccggattaagatgaaacggctggccggcgatcccgatgcctgccttgccgtgatgcgccgcgctcagcaggccggttgggtgacgttcagcgaacgaccggcagtgacgggcaactgtcccctcagcgacccgctgcgcattcagcgatttggtccggtgagcctcagcagcagctttctggcgagctgtccgatggcggttgccagtacgatgtatgccctgcgcagtcgtcaacagaccgccagggatatgcagagtccactggtacggattacgcatgttggcagctacgcctgccgtaacatttatcatcgcgcgcaggggcgattgagtgaacatgccaccgccgatgcctgggatgtgaccggcttccagctggcggatggtcagcggcttgaggctgtcaggatgataaacagcaaaaagccgccgggtggcagaagaaaaatagagggtggtcaggagccgcggcacccggtgccatttacccgaccgcgcattcatttatacagcacctatcccacattatgggttaagcgctatgagaagcagaattattacgcggtggacccggtgctcagcttgtgtcagcgaccagggagggggatggcatggacggaggcgcagtttgctgacgcaggcaacctgtggcgggagtcgcgggaatatgggcttcagagcggtttttcttgctctgcaatggcaccaaatcgcgtcattggtatattatctatatcgtcccaacagcccatttctgtccagctctgccatgctgagctggaggtgaaactccaccttttagcggaactaagcctggatacgctggaacgctttagcgatgatgcgatgatgttgtctaccctgcgccggaactttgccaggctggcgcaaaaaatcattgcaacatggggatgtcagaggcgcatgatgaaaatagtgcaaacgcagttaaaggatatgccatcctctttgctcgccgagctgggcagctaccgttacagcgtctttgcgcgcggcgaagggtggtctattcccccgcgcctgagcacgccaggacaggagtatgatcgcttcgatcgttcagatgtgacctggctgatcgcatggaatgcccgtgcagggatctgcggctgtgcccgcctgatgccctggtttgagcctgagcagagtgaaggcatcgtgctgcctttcagccatgagaaagtctgggaaatgtcgcgcttctctgcacgcctggatgtggatgctgaactgccgctgaacatactctggcacgcggtacagctggcggaactgcacggcatggagtacatcatcagttcggcaacgccaatgctggaaaagatgtttgagcagcatcaggtggtctatgagccgctcacacccggcctgattctgtcagaagataatctgtttgcgatccgtattccggtgactcagcctgcgctggcagagaagtatcggggcacccgacgcttcagcccggaagaggtgctgccgacgctgggtgtgtcggtcaactggcagtcgcataattag

SEQ ID NO: 10557 - DNA, 1536 bp, Zea mays
  Peptide Sequence Number=SeqID_52336
atgggggaaaggtgtttcacgcgcggcactgcatcctgcctcatcccttttggtattcatggcaccagcctcgataaggtggccgaactggcagacgtttccaaaaccaatctgctctactattttccctcgaaagaggcgctctatgtggcggtgctgaaacagattctggatgtctggctggcgccgctgcgcgcgctggcgcacgatcaggatccgctgatggccatccggcgctatatccggctgaagctggaggtgtcgcgcgatcatcctcaggcctcccggctgttctgcctggagatgctgcagggcgcaccgctgctgaaaggggaactggcgggcgacctcaagcaactggtggatgataaggcggcgataattgagcgctggattgatgaagggcgtctggctggcgtccagccgcagcatctgatctttatgctttgggccacaacgcagcactatgccgatttcgccacgcaggtggaggcggtgaccggacagaccctcagcgacgccgcgttctttgagcagactgtcgagaacgttcagcgcatgatcattgaaggcatccgctgggtactgggcgcctccgtcagcgtcgcggtgatggggcgtcgggttccgatctggcaggcggcactggttgggggtgtctgcggcaccctgcccgatctggatgtctttatcgatcatggcgatgcaatacgcaacatgacgctgcatcgcaccgaaagtcatgcgctgctctggctcacgctgatctccccgctggttgcctggctggtggcggggctatgtcgtcaacgggtggcatggcgggcgtggtggcccgccatctggctggcactgatcacgcacccgctgctcgacctgatgacggtgtatggcacccagcttggcctgccgctcactgactttccctatgcgattggcagcatctacattatcgatcccctctatacgctgccgctgctggtagggctggctgtggcgctctggcgtggcggcgaacgggggctgcgcggcaaccggctgggattaacgctgagctcgctttatctggtctggagcgtggtgattcagggcgtggcaggctggcagatccggcagtcgctgaccgggcaggggattccgaccgataaggtactggtgacgccaacggcgttcaatacgctggtctggcgcagcgtgatcctgaccggcgaccgttatggcgaagcttactggtcgttactgtcgccttcgcgtccgctacaggtgacgtggtatccgcgtcatcccgaactttacaaagggtttcgtggcagctggtatgcagagcgcgtcgcctggttcagccacggtttttatgccctgcgtgagcaggatgggcagacgacgatagctgacctgcgtatgggcgaaggggaaaactatacctttacctttggtctcggcacgcctcagcagcccgatccccggccgcagcgcttaccttctgaacggccttcgttgtccgccagcttttctgcgctgggcgaacgcctgtaa

SEQ ID NO: 10558 - DNA, 459 bp, Zea mays
  Peptide Sequence Number=SeqID_52337
atgtcgcgcctgggcgcggcggtcaacatcattaccacggaaggtcctgccggacgcgcaggcttcaccgcctctgcggtgtgcagtgtcacggatgcgccccctacactgctggtctgcctgaaccgttcggcctcggtttatccggtgttccgcgaaaacatgcagctctgcgtcaacaccctggcggcgggccatgaagcgctctccacgctgtttggtggtaaaaccccgatggctgagcggtttgtggctgcagagtggtcgacggctgttaccggctcgccggtgctgagcggcgcggtcgcctcctttgactgccggatcactcagattgtcagcgtcggcacccatgacaccctgttctgtgaagtcctggccgtggtgcgcaacgacgattctcacggcctggcctggtttgaccggggataccatcccctgatgcggcaggaagcctga

SEQ ID NO: 10559 - DNA, 699 bp, Zea mays
  Peptide Sequence Number=SeqID_52338
atgcagcactcgggaccgttctttttcgtcggtctgcgttttgccaccgccgcactgctgctggcgctctttttccggcgctatctcaaaggaataacctggctggaagtgaaagccgggacgctgattggcctgtcgattgccggcggttacggtctgcagacctggggaatgcagaccatctccagcagtcagtccgcgtttctcactgcgctctacgtgccggtggtgccgctgctgcaatggctgtttttacgacgtccgccgggcatcatgtcatggctggggattgtgctggccttcaccggtctgctgctggtggccgggccgcaggatggccgtatcagtctgaatgccggggagatagccaccctgttcagtacgctggcgattgccgctgagattatcttaatcagccgctttgccagtcgggtcgatgtgcgtcgcgtgacgctgatccagctcgcggtggcgtcgctgtgcgcctttgcgctgatgatccccaatggggagacggtacctgtgatttccatgccgttgctgttcagtgcgctgggactgggcgccgccagcgcactgattcaggtcacgatgaactgggcgcagcgcagcgtgtcacccacgcgtgccacggttatttacgccggtgagccggtctgggcgggtgtggtcggacgtatcgccgtgaactgcggctga

SEQ ID NO: 10560 - DNA, 914 bp, Zea mays
  Peptide Sequence Number=SeqID_52339
tgctcgcagcattgccggtcggaaccgtcgcgctggcggctgaaggtgatatgagtccggatatctcgcgcgaagtggccgccccgctggtggattacatccgcagtcagctggtcgatcaggataaagccagtgcaccagctattacgctgatggtggggcacgattcaaacattgcctcgctgctgagcgcgttgcaggtgaagccatatgagctgcctgatacctgggaaaaaacgccgattggtggtcaggttgtctttgaacgctggcacgacgcgaaaaatgacaaagacctgctcaaagtcgaatatgtctatcagagcgccgatcagctgcgcaatgcggacgtgctgagtctgaaaaacccgccaaaacgtgtgacgctgcaactggcgggctgcccgacggatgctaacggctattgcagctgggatcagttctctcaggcgctgaacgcggcgctgcagggcacgccaatgcagccagccgctgcaccacagccagccgccgcgacgccatctgatgacgacagtgcgaaagccgctgcgacgcaggatgctgccgctgacaaagcggaagccgataaggcgaccgcagacaaagcgcagtcggatgcggataaggctgccgcagataaagccgccgccgacaaagccgcagcagagaaggccagagcggagaaagctgccgctgacaaagccgcagcggagaaggctaaagcggataaagctgccgcggataaagcggcggctgagaaggccaaagcggagaacgcggctgctgccaaagcggataacgcagcggcgaaatcagccggtgacaacgccacggctgacaaggctgatagtgcaacaccgtctgccagcgcgcagaacgataaaacaaagtcagcggctgaagcgacaccgtaa

SEQ ID NO: 10561 - DNA, 1638 bp, Zea mays
  Peptide Sequence Number=SeqID_52340
atggaggccagtcgctttgcggaggtgggcggcaaaaccgatcagctggcggcagaggcaacgccggatgtgctgccgcagtatgacgccattatcgtcggcaccccgacccgcttcggcaacatgtccggtcagatgcgcaccttctgggatcgcaccggcggcctgtgggcatcaggtgccctgtttggcaaggtcgccagcgtcttcacctcaaccggcaccggcggcggtcaggaacagacgattacctcggtctggaccactctggcgcatcacggcatggtgatcgtgcccatcggctatggcaccaaagagttgtttgatatctctcaggggcgggatcttcccgccctcattttttcgctcaccaaggagaacgctatgtcttcctatcaaagcattaatcccgccaacaaccagttgctgaagagctggccatcccatgatgatgccgccgtcagccatgccctgaaggtcgcggaccagctgttccactcatcctggagcaaaggggatattcagccgcgcctgcagattgcccgctactacgcggagaatgctgagcgcattctgcagccgcacacctaccccagtgagctgggcgaagcctgggttgagtatcacccgattggtgttctggtggccgttgagccgtggaacttcccctactatcagctgatgcgcgtgctggcgcctaacctcgcgctgggtaacccggtgctggcaaaacatgccaatatcgtgccgcactgtgccgatgtctttgaaaaactggttcgcgaagcaggtgcgcctgaaggcgcctggacgaacctgtttatctctacggaacaggtcgcggatctgattgctgacgaccgggttcagggagttgccctgaccggttccgagcgcgccggtagcgccgtggccgaacaggccggtaagcacctgaagaaatcgacgctggagctgggcggcaacgacgtctttgtcgtactggatgatgccgatcttgatgaggccgtgcgtcagggtgtgcaggcgcgcctgagcaactgcggtcaggtctgtacggcggcaaaacggtttattctgcatgagaaaattgccgatcgctttatcagccagttcagcgcggcgctgagcgcggcgacgctgggcgatccgctggatgagaagaccacgctgggtccgctttcctccgcagatgcgcgcgaccgtctggttaaacaggttgatgaagctgtcgccagcggcgcaaaactgctgactggcggtaaagccgttgacggcgtgggctgctattaccagcccacgattctgactggcatcacacccgataatccggcttactatcaggagttctttggcccggtggcacaggtctatgtggtggcagacgaccaggccgcggtggcgctggccaacgactctcactatggtcttggcggctccgtctggacccgggatattgcccgtggccgcaggctcgcttctgccattgaaaccggcatggtgtttattaactcgcagagcgatacctccgcagagctgcctttcggcggcgtgaaacgttccggctatggtcgtgaactttccgatctgggtatcaaagagtttgctaaccagaaactggttgttgtggcgggatag

SEQ ID NO: 10562 - DNA, 2616 bp, Zea mays
  Peptide Sequence Number=SeqID_52341
atgcacaacagcagcgtgcagcctaccggcagcataaggcctcagccccagccagagcggcaaccagcaccgcaaagcccgccgcagagaagagcgaggcgaagcccacacgatcagacgcaaccggtgctggataaccttgctcaggccgagcaggagctggaaaccgcgtttgcgcgctgggaagagcttgagtcactgaaaaacggcgcccgggcatcatgcccgcgctgccacactgctctgacggcgaactggcatgaaccgcgtaaacgaccaacgggctatgcgctggctgcgctgtttatgctggtgctggcgaacctgtttccattcgtctccatgaaggtggccgggctgaccagtcagatcaccctgatgcagatacccagagtgatggtgtcggaagattacagcagtctcgccacgctgtttctgctgttcgtgcaggcggttcccgccttctgcatgataaccatccttttactggtcaatccgataccgttacccacgccgctcagagtcggtctcgcccgaatcctgtttcatctgcgcaactggggcatgtcagaaatcttcatggctggcgtgctggtcagcttcgtcaagctgatggcctatggtgaaatcggactggaaaccagcttctggccctgggttctgttctgtctgctgcagttgcgtgcctttcagtgcgtcgatcggcgtgcgctgtgggatcgcctctcaccccgacccgcactgccgcatgcgcccgaggtgggcgtcagtggcctggcgcagggcctgcgatcctgtccctgctgcaccgccattctgcctgcggatgagcccgcctgtccgcgttgtggcgtccaggcacaggcccggcgtaaacacagcctgcagtggacgctggcgctgctgctcacctcggtgctgctctacattccggctaacctgatgccgattatggtcacggagacgctgggcagcgcctatccctccaatatcatggcgggggtgattgtgctgtgggctgatggctcctatccggtggcgctggtgatctttatcgccagcatcatggtgccgacgctgaaaatgctggcaattggctggctctgctgggatgccagcggacgcggacggcgggacagccacaaaatgcataagatttatgaagtggtcgagtttgttggccgctggtcgatgatcgacgtgtttgtgattgctgtgctctctgcgctgattaagcgctggtcgccggtctggattgtccccatcgtcacgctgcttatcggcggatggatcctcttctatcacttcagccatcaggggccggaagtgacattaattaccgaaaacgctgagggcattgtggcaggtaaaaccaccattaaaagccgcagcgtggatgtcggtgtggtggaaagcgcggtgctaagcgacgatctccatcatgtggaaattaaagcgcgcctgaacgcgggcatggacaagctgctgcacagcgacagcgtgttctgggtcgtgaaaccgcaggtgggccgtgaaggtatcagcggccttggcacgctgttgtcaggcgcctacatcgaactgcagcccggcacgaaaaaccaggcacctgagcagtacaagctgctggatgctccgccgctggcgccaccggatgctaaagggatccgcatcatactggacagcaaaaaagccggtcagcttaatccgggcgatccggttctgttccgcggctaccgggtcggtacagtggaaaccagttcatttgacaccgataaacgcatgatgacctatcagttgtttattgccgcgccttacgaccgcctggtgaccaccaacgtgcgtttctggaaagacagcggcatcgccgtggatatgtccgcgtcaggcatgcgggtcgaaatgggatcgctgaccacgctgttcagtggcggcgtcagtttcgatgtgccggatggctgggatctgggtgaagcggcgacaaatcatgccgactatcatctgtttgacgatcagcgcagcatccaggattcgctctacaccaatcacgtcgactatgatggcaagaaacgtggcctgcgtgccacgctgaaaaccggcaatctgctgtcgggtgcgctctatgtcgatctcgacttctatgacaatgcgccagcctacaaaggcccgcagaaagtctcaggctatgaagtgatcccaaccgtcagcggcggactgagccagattcagcagaaactgatggcggccctggataagatcaacagcctgcctctgaacggcatggtcaatgaagcgaccggtacgctgaaagagagtcagaagacgatgcgcgatctgcagcgcactatcgacaatatcaacaaagtgaccgccagtccggcaatgaagaccctgccggaagatctgcagcagacgctgcgtgagctgaatcgcagcatgaaaggactgcagcccggttcgcctgcttacagtaagctggtcggggatatgcaacgactggatcaggtgctgcgtgaacttcagccggtgctgaggacactcaacaccaagagcaatgcgctggtatttgaggcgaaaccgggacaggatccccagccgaagagggcgaaacagtga

SEQ ID NO: 10563 - DNA, 2172 bp, Zea mays
  Peptide Sequence Number=SeqID_52342
atgacgcaacagccccaaatcaagtatcgccacgactaccgtgcgcctgattacaccatcaccgacatcgatttaacctttgaactggatgcgtcgaccacccgcgtaacggccatcagccaggttaaacggctgggcgacagccaggctgagctgcgcctggacggagaggcgttaacgctgattgcgctggaaatcaacgggcagccctggacggcgttccgtcttaatatgcacgctctgccagagaggcctgtaattcaggctgtcggtcataatgaaccacctgatgatcccgctgaggccaggtcctcgccgtcagcagggaagctgagcgggagggaaaccgtgggctgcctgccagccagagaattgcctatgtctgacatcctgttatccgtaattattccaacctacaacgttgagaaatatattgtcgagtgcgttgattccttattgcgccaggttaaatctcccaatgaaattctcattgtgaatgatggctccaccgacggaacgctggccttacttgaacagaattacgcgcatctttctcaggtgaaaataattaccacggaaaacggcggcgccggtcgtgctcgcgatgtgggtattgagcaggccagaggccagttcctctttttctgcgacccggatgatgtcgtggttgatggcctggtggcggaactcgcgacggttgcggaacagcacccggaaaccgacctgttctgtttcaactcctgcgtttttcgggatgggcagattgatgtcacttcacctaaagtcagacacgaaatttttggccagcagaaatcgcaggaggtctttttgcatctgctgcgaaacggcagatatacctcggcggcctggagttatattgtcagtaagcgaattgtcgagcagcataaattacgctttgttggacgcgttcatgaagatcacaacttcacgctctccgtgtttgtaaaaagtcagcaggcatgggtcagccgtcagatgggtacgctggcgctggcgatcgcctgcgtgctctattgcagcaccatttccgactggggattcaatgtctttaccaccaaagatattgctcaccatcgtgacgacaaggagcgtgtcagtcagctcttctggtccacttttaacgccaagctgatgctgctgctgctgaccagtggcacgctgctcaccgccacctggtttaatcccgcctggcactcactgttctttattgtgctggcgaactgcacgacgctggttggctcgctgttttcctttggctggctgatgcagggctttgagaagctgggcaaaaccgcagttatcgccaccttcggtaatttctgcgccattccgctgacctttttgctggtgaaatctccgcaggacacctggctggctgcgctgatccctggcgtcgtctctatgattagtgcggcgataacgctgaagtttgtgctggagatgaaagtcattggccattaccgctttgaaccgcgtgaaattaaacagcgcatcaccgacagcatggatgtctttattgccattgccggggccaacctgtttaacagcgtcaacgtggtgatcctggcgacctttacctctacctatatggtggggatctataacggtgccgatcgcctgcgtaaagcggcaaactccgtgccggagcagatcgggagcgccttctttccgcgcgtcagccacctgttcggccgggataaacgcgccgcgattgccgcaacacgcaaaagtctgctgctctcattctctctgagtctgtcgattgtcatctttacctggttttttgctgacctggtcgtctcgattttactgggtaaagactttattccgtcggcggatgtgctgcgcgtctttgtactctgcttcctgtttggcaacatcgcctatccggccggattacagatcctgatcccacacggcctggcgcgccagcgtatgtgggtcatgatggcggcgggggtgattaacgtaccgctctgctgtttcctggcctggaagtttggcgcaatcggcgcggcatggtcgatggtgggcgcggaagcgtttgtctgcctcggcatttttggcatcatgcatcgtcacggtatcctgcgggaatatctctttccctctcaggtggaaaatcgccccgtaaacgattccgctgcgtaa

SEQ ID NO: 10564 - DNA, 1650 bp, Zea mays
  Peptide Sequence Number=SeqID_52343
atggcgtcggtgctggcgcggctggctccctttaacctgccgatcatcgtggtggatgatggcagcgatgcggcgacccagctgcagctggcgacgctgcacgccccgcatctcagcctgctgcggctcgacaccaatcagggcaaaggggcggcggtgatccacggcctgcgggccgcggcggcgcgcggtttcacccacgcggttcagctcgacgcggacggtcagcatcaggcggaagatctaccgttaatgctggcggaagcggcgcgttatcccgatgcgctgatctccggtcagccgctctacgatgactccatccccaaatcacgcctgtatggccgctacattacccatttctgggtctggattgagacgctgtcgctgtcgatccgcgacagcatgtgcggcttccgcgtctatccgctggccgccacgctggcactgtgcgaccgccggcctgtcggacagcgcatggatttcgacactgaaatcatggtgcggctctactggcagggcacccgcagtcgctttatcccgacccgcgtcacctatccggtcagcgggctgtcgcacttcgatgccctctatgacaacctgcgcatctcctggatgcacacccggctctttttcggcatgctgccgcgcatcccccgcctgctggcgatgcgcagaccgcagacgcactggtctgtggaaacggaacggcgcgggcagtggggattgcgctttatgctggccgtctatcgctacggtggacgcctgccttttaccctgctgctctggccggtggtggcggtttactggctgagtggccagcgtgcgcgcagcgcctctcggcagtggctggcgcaggtcagccacgccgcgcagcagcggcagattgcgctgccggcccggcttaacagctatcgccatttcctgcgatttggcggcgcgatgctggataaagtggccagctggcgtggcgatctgcgctgggggcgtgatatcgattttgccccgggtgcggaagcggtgatccgcacgcccgcaccgcaggggaagctgattctggcctcccacctgggggatatcgaagcctgccgcgccatggcgcagcaggtcagcggtctggtgattaacgcgctggtctttaccgacaacgcccgccgtttccgcgcggtgctggagaccattgccccgcaggccggggtgaatctgatgccggtcagcgacatcgggccggagacggcgatcctgctgcaacagaaactggatgcgggcgaatgggtcgcgatcgtcggggatcgcacagcggtcaatccgcagcgtggcggcgagcgacgggtgatctggagcgactttctcggccgtcccgccccctttccgcaggggccctttgtgctggcggccgcgctgcgctgtccggtgctgctgatgtttgccctgcagcaacagggtaaactgcgcattcactgtgagcgctttgccgatccgctgctgttgccgcgtgcgcaacgtcagcaggcgctgcaggcggcggtggatcgctatgcggcgcggctggcccattacgcgctgctggcaccactcgactggtttaactttttcgatttctggacgctgcctgatccgcaggcgcaccacaaggagtctgaccatgactga

SEQ ID NO: 10565 - DNA, 618 bp, Zea mays
  Peptide Sequence Number=SeqID_52344
atggcgaaaccgcagtttttaccgatgatgaccgcgcgtcgtctgagcggcggcagtcgtgcggcggttgagtgcgggctggcactgctggcccggcagcgggtggacgcgatcgtcttcaccagccgtcacggcgaactggagcgtaatctgcgcatcctcaccacgctggccgatcagcagatgatgtcacccactgattttgccatgtcggttcacaactcggcggtgggcagcctgactattgcggccaaagcgccgctggtctccacctccatcgccgccggcatcgactctttccagcagggattaattgaagtcagcgccctgcatcaggcgggttatcagcaggtgctgctggtcgatttcgacggctgcgtgcccgattattatcaacactggctgccggaacagggcatgaatgtgccttatgcggtggcgctgctgctgggtaaaggcgaggcattgcgctgcagcggtcgccctgagccggcgcagacccacgcgccgctgtggccgcagagcctgcgttttctgcagcagtggctggcggcgtcgcccgcgttcagcctgccgggtgaacgcctgacatggcactgggagagagaacatggctga

SEQ ID NO: 10566 - DNA, 3666 bp, Zea mays
  Peptide Sequence Number=SeqID_52345
atgcccaaacgcctagcgtttggcctgatcggtctgctgatttccctgaccggtgcgctgagtaacgcgctggtcacagcaaatctggtcaatctgcagggcacctttggtgcctggtcgaatgaaattgcctggctgcctgcggtctatgtgatgggcaatatctcgatcaacctgctgctggtgaagttccgccagcagtttggactgcgggtctttaccgaggcgttcctggtgctctatgtgctggtggcgttctttcatctgtttgccaacgacctcagttccgcaattattgtgcgcaccgcgcacggcatggtggcggccgccctcagctcactcggcatctactatcaggtgcaggcctggcccgcaaaacatcgcctgaaagcgctggttatcggcctgacggtgtcgcagctcgccattccgctggcccgactcttctcctctgaactgctgcagctcaacgagtggcgcggtctctatctgtttgaactcggtctggcgatgattgcgctgggcggggtgctgatggtgaaactgccgccgggtgaccgcatcaaaacttttgagaaaatggatttcgttactttcattctgctggcacccggcatggcgctgctgtgcggcgtgctgtcgctggggcggattgagtggtggttcaccacgccctggctcggtatctgtaccgcgatagcgctgacgctgattgtcgcggcgatggtgatcgaacataaccggcgcaatccgctgattaatacccgctggctcagcagcggcaacatggtgcggctgggcatcgtgatgatcatgatccgtatcgtcctggccgagcagaacaccggcgcggtcggcttcttacagcagctcggcctgcagaacgatcagatgcgtggtctggcgctggccattatcgccggggtcattgtcggcattgctgccagcgcgctgaccattaaacccactcatctgaactggccgattgtcgcctcgctggtggtgatgattatcgcttcactgatggattcgcaatccagcccgctgacccggggtcccgaaatgtatttcagccagttcctgctgggtttcagcagcgctttttttatggcgcccgccatgctgatggggattggcagcgtcgtgacccagccgaagaatctggtcagttttgtggtgctgtttggtatgagccagaacctcggcggtctgatcggttccgccattctgggcacctttcaggtctggcgcgaaaaatatcactccagcctgctgggcgatcagctttccctgctcgatcccaatgtcaccgagcggctcagccagtacaatgcgctgtttaacccgctggtgggtgacagcgtgctgcgcggtgcgcagagcaccagccagcttcagacggtcgccacactgcaggcgaacgtgctcgcctataacgacacctatctgctcaccgccgcgctggcgctggcgacgctgatcgcggtgcagagcaccgaaaatgcctatgtgcgcggtcaggtgacctttatcagcccgcagccagtgaaaaaagggcagttactgatgacgattgacgatcggatctatcgtcagcgggtgcaccaggcgcaggcgcagctggcgatgaagcaggcggcgctgaacaataacctgcagcagcgtcgcagcgcagaagcgacgattcagagcaacaaagcggcactggagaatgccaaagcccaggcgttaaaaagcggcttcgatctgaagcgggttgagaaccttgcggcggacggatcgctgtcggtgcgtgagcgtgatgccgcccgtgccgccagcgctcaggcgcaggcgcaggtgcgtcaggcggcggcgcagatcgccgtggcacagcagaatctgcaaacggtcattgtaaaccgtgatgcgctgaagggagatgtcgccagcgcgcgtgccgctctggaactggcggagatcgatctggcgaatacccggattaccgcaccggatgacggccagctcggtcagctgtcggtccgcaccggcgcctatgtcactgccggaacccgcctgacgtcggtggtgcccaatcataaatggattatcgccaatctgaaagagacccagctggcccatattcgtcccggcctgccggtgacgattcgggtcgatgcgctggatggcaagcgctttaacggcgaggtggagtttatctccccggctgccggctcagagttcagtgccatttcacccgacaacgccaccggcaactttgtcaaaatcgcacagcgcattccggttcgcatccgcctgaaggagcaggatatggcacagctgcgtcccggcatgtccgtggaggttgaaaaggcaccggcctcgctgccgatcccggcggcctggcgggagagtgtcggcccgggcgccgcgccggaggcagagtggtggcgtgcctttcatgatgagtatctcaaccggctggtcagccaggcgctgcgcaacaatcccgatattcttacggcgcgatcccgggtcgatcagtatcgcgcccagctgcgcgccacgcagggtgataactttcccaccgtcagcgccggtgtggccgcaacccgtgaacgcacgctctcgtcagtgacggggcagccttatgagaccgatgtgtttcagggtgtgttacagggcagctacgaggttgatctgtggggcgcgcgcagcagcagtatcacggcggcgcaggcgaccttagcggcgcagcaggcggcggcgtctgccgctgagctgaccatcgccagctcggttgcgtcgggttacctcaacctgtgtgcgctggatgagcagctgcgggtcaccgaggcgacgctcgccacccgaaataattcgctgaagctggcccggcgtcagtttgaaaccggctacacctcccggctggagtggatgcaggcggcctcagaatatcagtcggccaaagcgcagataccgcagctgcagcatcagatcgcccagcaggagaatgcgctgagcattctggtgggaatgaacccgcgtacccttgcccggcgtcagcagtttgaccagattctgccgcagcagatgccgtcgctgctgccttctgcgttactcaaccgccgtcccgacatcgtgcaggcgcagcgtcagctgctggcggccgatgccagcctggcgtcgtcacaggcgaagctgctgccgtcgcttaacctcaccgccagcggcaccctgcagagttcggtgctgcatcagttagcggataatccgttccggctctggagcgtgggcggcagcattctggcgcccttgctgaaccgtgaagcgctgacggcgcaggtcgatgtctcaatggccacgcggaaccaggcgctttacagctatgaaaaagtggtgcgcaacgccttctcggaagtcaacgatgcggttgacgccatcaggcagagagaggcccagcttcaggagctgcaaaagcaggaggcctacgtgaccgaggcgctgcgcattgcccgcaaccgctatcagaacggttatgcctcttatctggatgagctggatgcgcagcgcaccctgttttccacccagcttaatcgggtcaccgtcaaaaataacctcctgctggcacagatcgatctctatcgtgcgctggggggaggctggacgcccgccgcaatgccgtag

SEQ ID NO: 10567 - DNA, 882 bp, Zea mays
  Peptide Sequence Number=SeqID_52346
atgtccagagtccgctatcgggagcccgataatatgaaacagccagcagcaaactgggtggatctccgccgtgacgccatcagcggtattgaggcgctgcgcgctcattttaccggtcacgcctatgatccgcactggcatgacagctatctgatcggtgtgactgagcagggagtacagcagtttcactcgcggcgcagacagcaccggagccgacccggcacggtgtttatgctggaaccggaagagctgcatgatggggatgccatcaacgaacagggtttcacctaccgtatgctctacctttctccacagcagattgcacagcacctcaacccggccgggcgtgacgcgccgccctcccccgcattacagtttgctgcaacgctgcgcgacgatcggtcgctggcctatgccgtctggcatgtattcgaggcactgtggcacaaccatcccgccctgatcaaagaggcggttctggatcggctattctctcagctcacgccgcaccagcagatcttcctgcccgatcgccacccggataaagatacggtgctggcattacaggcgcgtgactggctgatcgcccatcatgcggaaaatcccggcctggcgcagatggcgcagcagctgcaggtggaccgcttccggttatcacgcctgtttcaggcgcactggggcctgccgcctcacgcctggctggtgcagtggcggctgagccaggcgcgccggcagctggcgcagggccagccggttgccgacgtggccgccgcgctgggttttgccgaccagagccatctggggcgctggtttaaacgcgcctgccagctcacgccgtcacgctatcagcacgcctgcacaaatcttccagacccgaactga

SEQ ID NO: 10568 - DNA, 1230 bp, Zea mays
  Peptide Sequence Number=SeqID_52347
atgctggaggcggcgcgccgcggcgtgaaggtacgcctgctgctggatgataacaatacgcctggcctggatgacacccttgctcagctcaaccgccaccccaatattgaggtgcggctcttcaatcctttctcttttcgcaccctgcgcgcactgggctatctcactgacttcgcccgtcttaaccggcggatgcacaacaaaagcttcaccgtggatggtgttaccaccattgtgggcgggcgcaacattggcgatgaatatttcggcaccggtaatgagccgctgtttgccgatctcgacgtcatggcgattgggccggtagtcagcgaggtggccggggattttgaacgctactggcacagtaagccggtcgcgccgctgcagcaggtgctggatgatgatgaaccggacgaggatagcgtgagcctgcccgccgaatggcgtcacagtgagccggtgcagcgctatcttcagcggctggaaaatgcgtcgctgctgcaggagatggcgcagggcacgctggatctgacctgggcaaaagcgcgcctgctgagtgatgacccgcgcaaggggctgggtaaagcgcgcgcgaaaagcctgctgccgcagcgtatgctggaggtgattggcacgccacaagagcagttcgatattatctcagcttactttgtgccgacccgcgcgggcgtcgctcagctgctggcgctgaaacgcaaaggggtgaagatcgccattctgaccaattcgctggcggccaatgacgtgtcgattgttcatgccggttacgcccggtggcgcaaaaagctgctgcgtcacggcattgcgctttatgagctgaaaccgcaggcggccatgcaggatgcgccgcacgaccgggggttaaccggtaactcgggctccagcctgcacgcaaaaacgttctcggtggatcaaaagacgttgtttatcggctcctttaacttcgatccgcgctcagcggtgctgaatactgaaatggggctggtgattgagagtgcggcactggccggagaaacgcaccagcgcttcagtcagtcgatgcgtgatcgggcctggacactgcggctggataagtgggggcgggtgaactggctggagtatccggacgagccgcagcagattgtgcataagcacgaaccggactgctcctggtggcaacgactgcaggtgcggctggtgtggcgactgccgattgagtggctgctgtaa

SEQ ID NO: 10569 - DNA, 1158 bp, Zea mays
  Peptide Sequence Number=SeqID_52348
atggcgctgacactgaggggccagctttgtttccagccagctggcaggctccgttttttccagggcagcttcccctgctccacggcctgccgcacgcccggaaaacggctcgatatggtcatcagcagcgggcatgacatgctgctggaaaaggattatgcggccctggctgagcagcatctgctgaccgcccgcgacggcgcacgctggcacctgattgagaaggtgccgggtcactatgactggcagagctttctgccgatggttgaggcggcgcggcgtcagcaggtagagatcatctgggagctggctcactttggctatccggatcatcttaatatctggaaagcggaatttgttgaccattttagccgtttcgccggcgcaatggcgcagctgatgcgcgatgaaggcattgaaaatcccttctttacgccggttaaccaaatctcattctggtcatgggccggggcggaggtggcctggttcaatccgcatgccgcagggcgcggcaaagagctgaagcgccagctggtgcgtgcatctctggcggcgatccatgccatccgggaggtctatccgggggcgcggtttgtgctgaccgacccgctggtgcagatcgcccatcatcccactaatccggacagcaaaccctacgccgatgcccagcatcaggcgcagttcgaagcctgggatatgctggccggtcgcgtggataaagagctgggcggcagcgaagattgcctggatattctcggcctcaactactatcccgataaccactggtttttccccgatcagccgatgtcgctggaggagccggagcgggtgccgctgcacattctgctggcgcagtgctggcagcgcttccagcgcccgatgctgattgccgaaaccggcgcggagggcgaggcccgtgccccctggctgcaggaggtcagtgagaacgtggcggtggcgctggatcaggggattgccgtagagggcatttcgctctatcccgtggtggagtatcccgcgtgggcggatgaccgccgttcgcctggcccgctgctgggattagcggaccccaatggcaaccgtaatctgcatgaagccctggcgctgatactgcgcagccagcagatcaggttcacggcacgcgatcagacgtgctga

SEQ ID NO: 10570 - DNA, 2763 bp, Zea mays
  Peptide Sequence Number=SeqID_52349
atgctgaaaatcatgctaaccggcctgctgctgtgggccagtgccgccagcgcggtcacgctggatcagctgcagcagcgttttgccagccagccggtgatccgggcagactttacccagacgcgcaccattgccgggatgcgtcagccgctggtgtcacacgggcagatgctgatcgcgcgtcagcagggactgtggtggcatcagcagaccccctttgtgatgacgctgctgctggatgataagcgcatggtgcagagcctgagcgggcagaagccgcaggtgatcactgccgacagtaacccgcagatgttccagttcaaccatctgctgcgggcgctgttccaggccgatcagcaggtgctgaatcagaacttcacggtggccttcagcgatcgcggcaacggtgcctgggcgctggagctgaccccgaaagcggcgccgcttaacagaatctttaaccgtatctcgctggcgggcaatgcgtttctggacagcatccggctggacgataagcagggtgataaaacgctgattcagctcagcaatacccgtactgaaccgccgcagctgagcgacgaggagcaggcgcgttttgccgggccccagctcaacagcagcgtactggcactgctgccgcagcagaatctgggggctgcgccgcccgcgctgcagcaggcctttatgcagcggctggatcgccagctggtgtggctggtttcacccggtgaagaggacgatcccggcatcgcggcctggtggcaggcgcagctgcgcgcgctgcctgacctcaggcaggtgcagggcgatctcgatgccgggcagcaggaggcgtggggccggtttgcctggcaacaccgtaatggcctgatcgacgaggcgacgcgcagccgcttgcagaacggcggcggggcgcaggcggagtggctgctggcgcagctcttctcggcattttcgggtgtcagcagcaaagagctgcagggggatccgctgatgctggtgcggggggcgcagctggcgctggcgcagaatgccggacgtctgacgctgcacaacggctggctgacggtgcgcgatgcgcagggccggcagtggtatttcctgcacgctgaactggcgaataacgctttcagtatgcagcaaagtcatgcgctggtgacacggctcagcgcgctggagcagcagctgaaagcccgctggccgcaggcgaaactgctgacgcgcggcacggtgctgttcagcgacaacgccagccagcgggcgcagcatgatgtcagaacgctgggcagcgtaacgctggggggcgttatcctgctggtgctgctggtcttccgctcactgcgaccactgctgctcgcggtgacctccgtagcggtgggagccatgaccggcacggtggtgacgctgctctgcttcggggaactgcatctgatgacgctggtgatgagcctgagcattgtcggcatctccgccgactacaccctctattatctcaccgagcggatggttcacggcgatcagcagacgccgtgggagagtctgcgtaaagtgcgcggcacgctgctgctggcgctgggcaccacggcgatcgcctggctgctgatgctgctggctccgttccccggactgcgtcagctggcggtgtttgccgccagcggcttaacggcctcctgcctgacggtgattctgctctatccatggctggtgcgcggtctgccggtgcgtccggtgccgctgatggtgccgctggctcgctggctcgccgcctggcgacggcagcgcgggctgcgcgtcagcttaccgctggcgctggcgatgttcgccgccaccggtatcgcccggctgaatgtggatgatgatatcgcccatctgcagagtgcgccggcctcgctgctggcacaggatcgccagctggctgccctgacggggcagcgagccgatcagacctggtttgtggtctggggcgatgacgcgcagcagaccctgcagcggctggaaaaactggcaccggatcttcgcagggcagagcagcagggctggctgcagggctatcgtctgctgccgctgcgatcgctggcgcagcagcagcaggatcgccagctgttgcaacaggccgtgcccaccgtgacgagccgcctgcagcaggcggggattgccctggctgcgcccgatctctccccgatgccggtgacgcccgcggtgtggctggccagtccgctgagtgaggggtggcgactgctgtggctgacgctgccggatggccgcagcggcgtactgatccccaccagcggcgtcagaaacagcgccgccctggcggcgctcgcggcgcagcatagcggcgtcagctggattgaccgcaaggcgggttacgacaggctgttcagtttctggcgcaccctgctgaccggcctgctggcgctggcgctgctgttcatcacgctgacgtttgtgctgcgtctgggcctgcgcgcgggcttacgcagcgcgctgccgtcggcgctgtcgctggcggtggcgctggccacgctgggctggatcggcgcgtcactgaatctctttgcgctgctggcgctgattctggtgctgggcatcggcattaactacacgctctttttcagcaatccgcaggggacgcccctgacgtcgttgctggcggtgtcgctggcgatgatcacgacgttactgacgctgggcatgctgcggcattttcagcgctttcctgctgtcgccgctggcgatgcgacccacccgatcaaggagtaa

SEQ ID NO: 10571 - DNA, 2055 bp, Zea mays
  Peptide Sequence Number=SeqID_52350
atgaacaaagaagagatttatcaggaagtgtcggccctgctgaccagcctgtttgaaattgcgccggaggatatccatcctgaggcccgcctgtatgaagatctcgaactcgacagcatcgatgccgtcgatatggtgggacttttctggctgctggcgctgctgtttgggctgcgctggctgcagctgcgtcgtcagcatacggccatgggggcggtgatgggctggctggccctgctcggcgcgctgctctgtatcagcagccagctgctacgttcgcagcatctgctgttgtggtatccggtggcggtcaatctggcgatgctgctgctgtttggcgcctcgctctggagcgcgatgccgctggtggaacgtatcgcccgactgcgtgagcccgtgcttccgcctgctgcggtgcgctacacccgccgcgtcacccaaatctggtgcctgttctttatcggcaatggcagcatggcgctcttcacctgcctgctggggaatctgcgactctggacgttgtggaacggcgcgatcagctatctgctcatcgccgcgctgatgggcgcggagtgcaccatgcgccgtcaggtgctggcgctcagtcggcgcttagcggcagaggcgggcacacactgggcactctgttttgacgacagctaccgcttctgcgtggcgctgctggcgagctggtatgccggtaaaacgccggtgatgccgggtcatgcccgcgccgcgctgctcgatgagatgcaggatcggctggatggcgtgctgtgcgacatgccgctggcggtcagcctgccacggctggcgtgggatgaggccgaagcgcagggcgcgctgccgccgctgccggagagggctgagctggtgctgttcacatcgggttcaaccggcacgccacgtcaggtggtaaagtccctggcggtgatggagcaggagagccgctggctctgcgccctgtggggtgaacagctccgggcgtgccgggtgattgcttcggtcagccatcagcacctgtacggtttatcgttccggatctttctgccgatgacgctggcgcgcccgttcgccgcccagccgctgttttacggcgaacagctggctcagcttccgcgtcactggcgctatgcctttatcagcagtcccgcttttttatcgcggctggacaggtcgctgcagacgcccgcctgtgaactgattgtctccgccggtggcgcgctgcgcgcatcggatgctgagcaggtctggcagcgctttggctgtcgggtcagtgaaatctatggcagcaccgaaaccggcaccctggcctggcgtcagtgggcgcggcccggggaggcgtggcgctgtttccccggcgtccggctggaggaggtgagtcccgatcgctggcaggtctggtcgccgctgattgccgcagcggacggcatcccgctggacgatcgcctgcacaaacagccggatggcggttttcagctggcaggccgccatgaccgcattgtcaaaatcgcggacaagcgcatctctctcagtgagattgagcgccgtctgcgggatctgccggagatagaggatgccgtggcgctggtggtgacccgccatgaacggcaggcgataggcgtcgtgctttcgcccacccgaccgctggatgaggcggcgctgcatcagcgccgtcagcagtggaaacagcagctgcaacgctggctggagccgctggccatgccacgctactggcgggttgtggccaccattccggtcaccgcccagaagccggaactgttctggtttcagggtcacttcccgaccctgcccattctgcccggcgtggcacagctggattgggtgatgcactatggtctgctgctgcttgctcccggcaggcagtttgcggccatcgataacatcaaattccagcagccggtgccccccggcgcgctgctgcaactgcaccttgagtggcacgccgaaaaatcgcgcctgagttttcgctacagcctgctgagtgaagcgggcgagcagagtgccagcagcgggaagatcgcgctgtgttaa

SEQ ID NO: 10572 - DNA, 717 bp, Zea mays
  Peptide Sequence Number=SeqID_52351
atgaaaaaggtgaatccggttgtagagcgctccagagcgcatctggccccactgggagccattgagtcccgtacccagttcggcgggtatgcactggcggtggagagtgtggttttcgcgttaattaatcagggtgagctctacctgcgcgccagtgaacccctgcaggcgtacatcaccgatcgtcctctgcagccgctggtgtttcgcaagcggggcaagctggtcagtctcaattactaccgcgtcgatgagacgttatggcgcgatcctgagcacctgctggcgctctccgccgcctcactggaaacggcgcagctggagctgcaggacaggcagggttcaccgcgcctcaaagatctgcccaacctcagtgtccgtctggagatgatgttcgcccggaagcagcaaaagggtctgttcagattcaatcgaggcgagttgagcgtcaatggcgcgcagattacgcagcagccagaagagcgcacgcgtatgggcggcttccggttcacgctgctccagacgctcaatggctttctgcagacgttcaaacgcgcgctcaaaacggctgtcatgcacccatctttcgcgcatcaggatgcaatgcgccagctgccgacacgcctgagcctgcatattcagcagtcgctggaagcgaaacagtatttcgttatagcgccagtcaccccgcagcaggtgatattgcaggtgagatga

SEQ ID NO: 10573 - DNA, 1701 bp, Zea mays
  Peptide Sequence Number=SeqID_52352
atggaaaagaaagaaaacgttgttgagtttgaaaccccgctgctgcgcggcgaaaccgaaatcaaaagcgtggagctggttaagccgaccgccggaagcctgcgcggcgtacgcctggccgacctgtgccagtcggatgttgacgcactgctgaccgtgctgccgcgcattaccctgccagcgctgacaaaggctgaatgtaatgccctcgatccggttgacctgattacgctgggcggaaaggtgctgctgaacgcggtagacaaagcctcgcgccccttcaaagccgttcagactgccgctaaaaatctgtcgtctgacattcgccagacgcaatcaacgattaaggagctggacgcgcagtccgggaaaattgacggcttccgtaaggccagcgcgcagctggccgtcacgcagcagagcctcaaatacgcaaagcaggaggctgcagcgctggccgtgcagtttaaaaacacggagcgccccacgacgcagcaggcccgcgcactggaaaaggcccggcaggctgcggcagagctacagacgaaaaccaacagcctgcgcctgtcggtgcagcagcagcgcgaggcgcttaacgcggcggggatttccactaaaagcctgagcagcgagcagcagcgcctgcgaaccgcatcagcgcaggcaaccgtcagcctgggccgtcagaaaatggagctgcagcggctgaatgcacagcaggagcgtctgaaccagaccagtgagcgctaccgcaaaggccaggagctatcgggcaaggtgcgcaatatggcggcgctgctgctcaaggttgacggctggattaaagctaatcctgagctggcaggcggtattgctaaggtggtaatgggcgggctgatgttagccggggcgctgggcgctatcgggctggtagcctggccggtgattgcaggcgttaataccctgattgccggagcgggcttcctcggcacggcattcagcatcgcgggtggagcgattacggcggcgctcggtgctatcacgctgccggttctggccgtcgcggcggcaatcgtggccggggcgctactggtgcgcaaatactgggaacccatcagcgcctttatcgcgggcatggccgaaggcttcacagctgcgatggggccgatcagtgattccttcggctcgctgaagcccgcttttgagtgggtaggcggtaaggttaaagagctttgggactggttcggcaaactgctggagccggtcaaatccacgcaggccgaacttgccgccgccggagacatgggtaagaagttcggcaacatgctggccgtggcactgaaaattccggggcatgcgctcgatcagcttatgggtggcatcaactgggtgctggataagctcggcattatcgacacgaaatccgacgggctgaaagacaaagtgccgtcgcccgatccaatagcaaccggcggcgcgggcgcagataccggcgggctggaatacaacctcgcctatggtggcgcggcgtaccgtccggtttcagcgccgtcagcaggcggcggatttaccgaccgcagccagaatacttatcagtatgaaatcaacatgcacgagggcatgaccaaagacgacgcaatggcactgatggcgcagcaccaggccagagaacagcgcaaccggcaggcgcagaaccgcagcaaaatgggctgggaggactaa

SEQ ID NO: 10574 - DNA, 282 bp, Zea mays
  Peptide Sequence Number=SeqID_52353
atggggcgatttttctttcacgtcatgggcgcgctggctgaaatggagtgcgagctgataatagagcgcacccgcgcggtgctggcggctacacgggataaagggcgcatcggcggcagacgtcgcgtaatgaccccggacgttatcggccgcgctgaaagaatgctggcgaacggcgcgacgctgcagcagattgcgcttgtgctggaggtgtcagtaaaaaccctttaccggtacattccggccgacaggcagcgccagattactaattctgtctgctga

SEQ ID NO: 10575 - DNA, 1932 bp, Zea mays
  Peptide Sequence Number=SeqID_52354
atgggcaaacgacttgcccggcatccctataatcgtgtccgtctgatggcagcgggcgtcgaagtcagtggcgataagcatgagtacctgatcccttttaatcagttgctggatatcgcctgcaagcgcggcgtggtgtggggcgaactggaatttttgctggctgatgaaaaagtggtgcggctgcatggcacggaatggcaggaaacgcagcgcttttatcactacctgctgcaggcctggcagagctggagcctggagatgagtgcggtgtgccgcgacgtgctgcagaccctgcgtgatgacattgaggcattcagtgcgcaggatcgctggctgaaccggcatgaactgcaggcgctgaaaaacaccattattcagcagttcgatgcgttgccgctgccgctctcccgcctgaaggattttgctgactgtcgtgaaaaccaggctttctgtcagcgctggctggagcagggcgaggcggccctgcggcagcgaaaccgtgactggaccgccgcaatgctgacccgctaccgggcattcttcgacacggtcgagagtacacctctcaatcaatcgcaatgcgaggcggtagtcaacggcgaagattcactgctggtgctggcgggcgccgggagcgaagagatgaacgcccgtatccagtcgcggctgtcagccagtgatattcaggcgcgaaccttccattctctggccctgcatattattcgtgaaggcagcaacaaacagccggtcatcagcaagctggagagcgatgccgatgcgcgtcgtgcactgctgattcaggaatggcggcagcagtgtcatgaaaaaaaggcccaggccaatggctggcgccaatggctgcgtgacgagctggagtgggaggtgccggaggggccattctgggaggatgacaaactggctaagcgcctggcgtcgcggctcgaacgctggctgggtctgatgcgcatgcatggcggcgcgcaggccgcgatgatcgcagaggtgcctgaagaggtgcgcgatctgttcagcaaacgtatcaagctgatggctccactgctgaaagcgtggaagagtgcgttaaaagaggagggcgcggtcgatttttcggggctgattcatcaggcgattgctctgctggaaaaagggcgctttatcagcccctggaaacacattcttgtggatgagtttcaggatatctcaccgcagcgcgccgccttgctcagcgctttacgccagcagaacaggcgcaccgccctgtttgccgttggcgatgactggcaggccatctaccgcttcagcggtgcagagatgacgctgacgacggcgtttcatcactactttggtgagggtgaccgttgtgtgctggataccacttaccgctttaacgatcgcatcggcgacattgcgaaccgttttatccagcagaatccgcagcagctggcgaagccgcttaacagcatcaccaaagggaataaaaagtcgatttcactgctggcggacgatcagctggagccgttgctgaataaactcagcggctatgtaaagcctgatgagcgcatcctgctgctggcgcgctatcactacctgcgaccggatgtgctggacaaagccagaacccgctggccgaaactcaatctggaattcatgaccatccatgccagtaaaggccagcaggcggacttcgtcattctgctgggtttgcagcagggcaaagagggctttccggcgaacgtgcgcgaatcgattatcgaacagggcctgttaccgcagccggaagcgttcccggatgcagaagagcgccgcctggcctacgtcgccctgacacgggcgcgccagcaggtttttctgctgtttgataaaagcgcgccgtcaccttttgtcgggcacttccgtgagctgggtgtaccggtgttgcgtaaagcctga

SEQ ID NO: 10576 - DNA, 222 bp, Zea mays
  Peptide Sequence Number=SeqID_52355
atgtttgattttaagacttccacccataaccactatgacgacgcctgccgcaagtttgcgctgacacatagcatggctaagctggcgcagcgagcaggcatgaaagcacagaccctgcgcaacaagctgaacccggatcaggcccgcgttcactctaacccgaccttagcctcaaccgttgacgctatcagcgggctgggtgcttcgattggcattagctga

SEQ ID NO: 10577 - DNA, 2964 bp, Zea mays
  Peptide Sequence Number=SeqID_52356
atggccgactcaatggacatggcgcaggctcgcgccgacgagctgctggcgcgcaacatcgccagcgtggttaaccgcccggtcagcgtgggggcttcattctgtgaagactgcgacgcgccgatcccggaacagcgccgccgcgccgtgcgtggcgttacccgctgcgtcagctgtcaggacacggcggaacggtacgcgaaagtttcaaaaggcggtgatcgcctggtcgaacccttcgccggttcctgcgcggtgatgatgagcaccgattacccctcctatctggtagcggatattaaccccgacctgatcaacttgtaccgccagataaaggagcacacccgcccctttatcgttgtggcggccagcctgttcaatcagaacaccacaggcgaaagttattattctgtccgggaggcgtttaatcacaacccggcgctgcccctgctggagcgcgccgcgcacttcctgtacctgaaccgcaacggctatcgcggcctttgccgctataaccgtcgcggcgagttcaatatcccttttggtaattactcaaaaccctatttcccgctggcagaaattgaggcattcgcgataaaggcgcagcgtgcgacgtttatctgcgccgacttccgcgagacgctgcgcctgactaaatctggcgatgtggtgtattgcgatccgccttatgacgggactttcgcggactatcactctgcaggttttggcaaagatgagcatcacgatctggtcagcatgttgctcgacgtctcggagcgttgcccggttgtagtttcaaacagcgacaccctctatacccgcagcattcttagcgatttcagtattaccagcattagcgtagcccgttcggttggcgttgccgcaggtgaaggaaagcgcgcatcagaaatcattgcggtacggcagcctaaagccgccctcatttttactggcttcgatatggcagctgggccgaaccgctctgtgatagtggagtggctgctggctatcgaggcaggagtgacatttgaggcggctgtcgccgatacaggacatgaacaccctgaaaccgtcaaatatctggaataccttgaaactaaactcggtccattgcgccgcgtcagggctgacttcacacagcgtatagctgacaagagaacgttcgtaaaagataagtggccagttaccctggtcagagatttaagattcacagaggaagaggctgcaaagatagtgcgtcgtgcactgaatgcccttaaacctaccggcattccctttcttgatatgtgtatctggaaaggcacattcccttccactcagcgtaagttctgctctttcgagcttaaacagatcccgatgcaggagcaggttgttgacccgctggttgcagagggtaagcacgtcattacatggcagggagttcgcgcccaggaatccgcaaaacggtcagagctgcctgagtgggaagcagggtttgacctcgggccgggcctgtcgatttaccggccgatccttaaatggacgcatgatgaagtttttgcgctggccaggcgtcacggcatcaagccaaaccctctttatcagcaggggtgcagccgtgtcggttgtatgccatgcgttaacgtaaacaaagctgaactcggggaaatctttacccgctggcctgaagaaataagccgggttgctgagtgggagcggattgtagcgctgtgctcgcgtcgggggaacgcagcatttttccattcaggaatggatcccgttaaggcagaaacagacggcagtaagcagcgtctatctgggggtttgcgagtgattcaggaatacgcctacccgtggaacgctccacgggaagccatcgccagcccttatcccacttatgaggaaatgcacagccgcagtcagatgattgcggctttagtgcgtgcgcaagagctactcgaaaagcagccgacgctgattcagtttgatgtgaagcgtcgagttagcgagttggaaaaaacacagggtattgatcgtgccaatgcgtacttagcgaaaactttcgttgagcgcacattgccacgcgttgaaaccgttaacgctcaatatcgcctcggtgaaatgagtcacggcacgtttaacctgctggcaggcaatgctactaaacaggcaggcgcagcaagtgcgggcggcacactttgggagctgatgtgccgttttaaccgtctgccggatatggcacgcgccgacgtcgatttgctggccggggatgtagctaatttcattctcgccgagctggtacaggcccacgcgcaggccagcgacgagtcggattacaaatacacgcaccgcgtttacatgaccgccgccactattacccgcgagctgagtcagacgccgccattatgggataaagtcacgtcacggctgtttgacccggaggaagttaccccggcgatcatgcgtatgcagacggaaaaatggtggaagggccgactgcgccgcgtggacgcatcatggcgtgaacatcttcagatcgccctggctaacgtcagcaaaaagcatgccccttacgccagcagcatgaccgtttcagagggtttgagatctggggattcgaaaccgccggaaagttacgaaaaaatcgacctggacggcatgagcaggaaggaacggcggcggcttttaagtcggataagatcggaaaaaccagaaaagcggcatctgaggctgaggcggtcggacaaaatcgaatctgcgtgcgaaaaactaataggccaggtgagagatttaagcggtgaaaccatcagccgcgggctggccgtgcgtctgattggtggcacgcagactaaaattggcggtcattttttccgcagcctgcctgatggtgaactggcccgcccaatactggagccgaaaagtactttcgtattagaacgatttaaccgtttagccgaaaagcaacgttcaaaaagcaaacattga

SEQ ID NO: 10578 - DNA, 723 bp, Zea mays
  Peptide Sequence Number=SeqID_52357
atggataagcgcgacattctggattacgccgagtgcatcggtaacgggcgctggtttgagccgccggtcagttttagcgggctggctaaaagcctgcgctcggccgtgcatcacagctcgccaatttacgtgaagcgcaacattctggcctcgacctttatcccgcacccgatgatgagtcagcaggagttcagcaagtttgcgctggattatctggtcttcggcaatgcttttgccgagctgcgccgcaacagcctgggtaagccgctgcgtcttgaaaccactccggccaaattcacccgcaggggcgtgaaggacggcgtttactggtttgtaaatgactggaaggagccgcatgagttttcggccggcagcgtatttcacctgctggagccggatatcaatcaggagctgtacggcctgccggaatacctcagcgcgcttaactccgcttggctgaatgaggcggcgacgctgttccgccgcaagtattaccagaacggcgcgcacgccggttacatcctgtatatgaccgatgcagcgcagccacctcagatgatggggattatcccggacaactccggcggattcggtgatgcggtgaaagcgtctcaggtatttgtgcgtaatgaactgacccctttacaagagaggatgaaagaaatgaatgaatgggttggcagtcaagttattgacttcaaagcttacttgttggaaatgtag

SEQ ID NO: 10579 - DNA, 2274 bp, Zea mays
  Peptide Sequence Number=SeqID_52358
atggaaaaaatcagctctgcgatcaactacctggttggcctcatcctgatgtggctcggccgtcatacgccgcaggatatcgcctttatgaccgttaaacgctgcgccgtggtggccgtgctggcgattgctgcgctgctgccacagtttaaaaccctgaaaacgtccgaggccgggcttgcgcttatcgccaacgctgaggggtgccgcacctcgccctatcagtgcagcgccggagtctggactaacggcataggtcacacagagggcgtgacgccgcaaagccaggtcagcgagcggcaggcggcggttaatctggtgtatgacgtgatgcgcgtcgagcgcgggatcgatgcctgtatggcggtggaaatgccgcagcgggtttatgacgcgaccgtttcttttgcctttaatgtcggcgtgcgcgcggcctgcagctcgacctttgcccgttacatcaggctgcagcactggtttgctgcctgcagcgagctgcggcgctggcgcattatcggcacgctgtcggccggtatcgagagccgggataaagcgatagccaggcttgatgccgatgcgaaagccagccagaagcgcgaggccgagctgcggctgatgcaggggcgcgccagcacggccgcgcttaaccgtgaaatgaccatacagagagaaaccgatgcgaatccgatactgcgtgactggtctgctgctgctctgcctgacgatgttatccggctgcacgcccgtccggccttcgccagcgccagagattatctggattgggtgtcgaaatcatcaaagactgccaggaacaacacgatgctgaaacctcaacagctgcgccaggcactgaccgacagcgtaccggagctgcagcgaaaccctgatgcactgaacgtgtttatcgacagcgggcgcatcgtctcgacgcttgccagctcgctgtcgtttgaataccagtaccggcttaacatggtcattaccgactacaccggtaacattgacctgctgatcgtgcctctgctggcatggctgcgcacgaatgaacccgacattatggcaaccgaggaaaagcgccgcacgggctttaccttccaggcggatgtgatcagcgatactgccagcgatatcagcattgagctgcagctgagcgagcgcgtgatcgtgaagcgggccgatgacgggctgcacgtgacgcacgtcggcgagaatccgctgccggaggatgacgcgctgccgctgcagctttatgttcacggcgagctgctggtaaatgaacggctggaagcgcttatcagcagcctgtcagccccggcgcgcaaagagatggcgcgaaccatcgcgaagaagctgcgcgagagtcagcagcagaacatcaagcgccagcaggctcctgacggcacgccgtttaagccccgaaaaacgcagccggtgcgcagcaaaaaaggccggataaagcgcgagatgttcgcaaagctgcgcaccgctaagtacatgaaaacgcaggccacccccaatgaagccgtgatcgagtttgcgggaaacgtgcgacgcatggcccgcgtgcatcattacgggctgcgcgacaggccatcacgaaaagaggagttaattgcttctgctaatccctcacaaaactcactgacctctgttccgttcaataaaacgccgataatactggatatgaatgaacaactctctgaaattttgcggttaatgcgcaacctgatccgcatcggaaccgtctcggccgttaatctcgacggcgggctgtgccgtgtcgatacgggaaaaaacacaaccggctggctgcactggctgagtgcccgcgcgggtaaaacccgctcctggaatgcgccgtcagtgggtgaacaggttcttgttctgtgcctgggcggcgaactcgataccggttttgtgctgcctggtattttctccgatgacaatccggctccgtcagcctcggccgatgcactgcactggtcatttcctgacggcgcggtgatcgagtacgagccggaaagcggcgcgctgatcgcaaccggcatacagaccgcaactattaaagcggcggtaaaaatcctgtttgactcgccggaagtggaatgcacaacgctgctcaaaactgcgcaactggaagtcacaaagggcgcaacgatgaaaggcaatgttatgcatagcggtggcaaattgagttctaacggtgtcgtcgtggatgaccacgatcatggcggcgtgcagcgcggcggtagcagaacggatggcccacaatga

SEQ ID NO: 10580 - DNA, 2046 bp, Zea mays
  Peptide Sequence Number=SeqID_52359
atgatcagcttgattcgttatcgggctgttatgaagggcttacacatgcaaaatacacttccccggactgaccaggaaattgccgactatttcaaccccgcagcgaataaacccgccagcgagatggaaatgctgggtgtcctgatcgcagaaatcctgcaatcgggtatgcctgtcagtaataaggccattatttcaaagctgatccaccggctggaactggaaagcgacagggattcgctggatatctaccgtcagctgcttgacctggtgactaatgatgttaccgcaactgacgttgtggcgggcgatatcagcacggggcgcgtactgcgttcgcctgcgctgctgacccgcgaatgcctggccggtgtgattaccgcgctggccctgatccctgaagtgatctccttttccgtgattgccggtgtcgacccgaaagtcagcctggtggcttcggtggtactctgtctgaccctgtcgattctgggcggtcgcccggccatggtcacggctgccgccggttccgtggcgctggtcatcgggccgatggtgcatctgcatggcgtggaatatattctgcccgccgttgtgctgggcggcatcatccagattctgtttggcctggccggtctggcgcgcatgatgcgttacattccgcgctcggtaatgctggggttcgtgaatgcgcttggggtcctgattttctttgcgcaggtgccgcacgtctggggtcagtcacccctggtgtggatcttctttgccgtcaccctggccattgtgctgctgctgccgcgcctgataaaaagtgtgccctccccgctggtcgccattgtggtggtgacggcggtggcactgctgatgggctatcgcatgccgaacgtgggtgacgaggggccgatgagccctggcctgcccgggttgaatacgctgctggtgcccctgaacctgcagacgctgcagattatctggcccacggcactgagtatcgcgtttgtcgggctaatggagtcgctgctgaccgccaaactggtcgatgatctgacggataccccctccagtaagcgccgtgaatcctggggcctgggcgtggcgaatatcctggcgggcttctatggcggtattgcgggctgtgcgatgatcggacagaccatcgtcaacgtggaactgggtcgggcacgcagccgggtctctaccgtcgcggccggtctggtgctgctgttactggtgaccggattaagccagattatggcgcagatcccgatggtggttctggcgggcatcatgatggtcgtcgcagtgaaaaccgttaactggcacagcctgcagcccgccaccctgaagcgtatgccgtggtcagaaacgctgattatggtgctgacggtggcggtcacggtctggacgggcaatctggcgctgggtgtgcttgcgggggtgatccttgccatgctgctcttcgcccgccgcattgcgcatgttatccatgcagagcgtcagctgagcgatgatggtcagtcggtgcgctatgtcgtgcgcggcccgctcttcttcgccagcagcaacgacctgtttgagcatttcgattacgctcacgatcccaaaaaggtcacgatcgatttaacccatgcgcagatctgggatgcatccagcgtcgcggcgctggatggcattgagtatcgctatcagagatatggtgccgaagtgacgattgaggggctggattcacgcagtaccgacttccatcaacgtctgaccgggaattacgatgaaacgtactgcttatctgttatcgacgctgaccatccttgctacgctgaccgcctgcgcaccgaccccaccgcccagacatgcaccgccgccgcctccgccagcctgccccgcaggctggctgatgccgcccccgcatgggacgttacccattctgccggcaggcaacgacgctattctcccatcctgcccctgttcacgctcattacccgacggctgatccggcagcgaaagcgttacctgctgtccgccagggtcgcagagagcaaaaaccattaa

SEQ ID NO: 10581 - DNA, 258 bp, Zea mays
  Peptide Sequence Number=SeqID_52360
atgccttcaggacaattctacgtggttgatcaacccgagctgagttttacggcgaattatcatcttgatacggtcaatgaccaaccctttccctcacggctggtgctggagatccagaagtcggttcagcccaccgacgcctttgcggctttcagcatcggacatgaagtgacgtttgtgtcatccagtggtgaggcacagcggatggtgctgatcagtgacacgccggatgaactggtgttcagctcgcgtggctga

SEQ ID NO: 10582 - DNA, 681 bp, Zea mays
  Peptide Sequence Number=SeqID_52361
atggtgtactgtagaagggttcacctgccagtaggtatcaccgtgctggaaaacaaccggctaaaaatagctatatcatctctaaagggctcggaagtaagtggagttaccaagaacccaggcatcactttctccacgttgagaacaagcaaccgccttctctgtgttcgacaaagtgacatggtacaaggtgaaggaaacgacgacaatgacaatgctgctgctcaccccactgtgtctctcctcgcttcttcgataataactcggttacattatgcagccagggttcatggtgcacgcaacgcggctgtccagcttcaggggcaccgcttcgccggcctcttcgggctgcctccgtcggtgcccatcgccaactacgccgagtttgtccactcccaggggagcaaagatctgtatgccaaggtaggggaccatatgtatctgggtgccaagaggtgcaaggcggagggaggcgaggggaacctaaaccgaaaacccacactagagcagaccgacagcgatagctccgacgagaacgacgggcagaaccagaagccaccgggcaaggggaagaatatgacaccggcggagaccccccaaggactatgccatgtccatgacaggagagggcaggctactgacagcacaaatcacttctatgttatgctctgcaccacttag

SEQ ID NO: 10583 - DNA, 282 bp, Zea mays
  Peptide Sequence Number=SeqID_52362
atgaacatcaagtggacattatcctgtatagcctctcggcaactccgcacgtcgacgtcgcgatgcttccagaggccgagcgcgttcggatcaatagctgcagggccgttcctgacttttcaggggcccagcatcgccttctccacgttgagaaaaagcaaccgccttctctgcgttcgacaaagtgacatggggcaccgcttcgtcggcctctttggactgccgccgtcggtgcccatcgccaactgcgccgagggtaggcatctggtattggcaacataa

SEQ ID NO: 10584 - DNA, 258 bp, Zea mays
  Peptide Sequence Number=SeqID_52363
atggcgttgaggtatcaacttcattggcatttggatgctacgctggcgcttacgtggcgtgacctcggtatcatagatcatggcgccgaggaagaagagccccttgccagtttggtaaaggagatcatgggaggtaggaggattttttttatcacgaatatgtatctagaggaagaagctccaatagagaacaccgacatcactgtttttgaaatagacatttcttttagaatacctcttcgaatagatatcttttaa

SEQ ID NO: 10585 - DNA, 681 bp, Zea mays
  Peptide Sequence Number=SeqID_52364
atggtgtactgtagaagggttcacctgccagtaggtatcaccgtgctggaaaacaaccggctaaaaatagctatatcatctctaaagggctcggaagtaagtggagttaccaagaacccaggcatcactttctccacgttgagaacaagcaaccgccttctctgcgttcgacaaagtgacatggtacaaggtgaaggaaacgacgacaatgacagtgctgctgctcaccccactgtgtctctcctcgcttcttcgataataactcggttacattatgcagccagggtgcatggtgcacgctacgcggctgtccagcttcaggggcaccgcttcgccggcctcttcgggctgcctccgtcggtgcccatcgccaactgcaccgagtttgtccactcccaggggagcagagatctgtatgccaaggtaggggaccagatgtatctgggtgccaagaggtgcaaggcggagggaggcgaggggaacctaaaccgaaaacccacactagagcagaccgacagcgatagcttcgacgagaacgacgggcagaaccagaagccaccgggcaaggggaagaatatgacaccggcggagaccccccaaggactatgccatgtccatgacaggagagggcaggctactgacagcacaaatcacttctatgttatgctctgcaccacttag

SEQ ID NO: 10586 - DNA, 171 bp, Zea mays
  Peptide Sequence Number=SeqID_52365
atggcagagcggcgacggaaggtcgacggcggcaagatgggcgtggcggtcttcggggcgcggtgcaccctgcggtatgagatggacctgcagttcttcaacatccctggcaacagcaagatgctgtccctacgtgtgatagaatactatggcatggagatggcactatag

SEQ ID NO: 10587 - DNA, 1077 bp, Zea mays
  Peptide Sequence Number=SeqID_52366
atggcgctccacaagctctgtgacgacgacgactctcagctcccttacggaagcaaggcgacccacgacatcacgccagcaaggtgccaagacctctccggctgccacattggcatggccttcttagagaaggttggccgcgcgggaccgaggacgggacaggcgctctcttggggccgctcgcttccctcacccgcgtggacgcttgtaacccccctactgcaagcgcacccgacctgggcgcgggacgaacacgaaggccgcgggacttccacctctctcacgcccgtctccggccacctcgcctctccccccttcgcgctcgcccacgcgctcgacccatctgggctggggcacgcagcacactcactcgtcggcttagggacccccctgtctcgaaacgccgacaagcagaaacccccgtgcgtcgtgccctcgcgaaccccaccccagccgcaaacgccacagacacctgtacgcacgcgcgcgattcgccccaatctacaacaagaagggcggcgggctggagaaggcgccggcggcgaccacaagcctgtgttcgccacggtggcggtgagctccccgccggagcagaagccgttcgtggcggcgggcgggctacccccggcgttcccggagctggcggcgtactacgaccggccgtcggactcgatgccgcggctgcacgcggactactccagctgctcggagcaggtgctgtccccgaagcagctggcgtgcgaccgggaggtgcagagccagcccaagatcagcaaatgggagcggaccttcgcctccgatcccgtgaaccccgcaggctccatgctcgaccccgtcagcggatctctgggagtgggcatccctggtgtcgcccttcttcgcccgttgttgacaacggacacgctggagcgacagagctgcggtatcaggacgtggaggtggacacgaggcggtgcgagcgccggcattgcgagcctgcgaggcactggtgccacgtgcgcgctgcgggagaaggaggcggagctagaggcggcccgagcccgactgcatgttgtggagctagaggagtggctgtag

SEQ ID NO: 10588 - DNA, 519 bp, Zea mays
  Peptide Sequence Number=SeqID_52367
atgcctcacatggtaggaggagaggatagggatctcgacacctctcccccacccccatcctcctcccctcagcccctccggcggccgggcgggcaattcggccatggatcccccacgcggaggggcaaggccgattgggccgctgcggagcaggattctccgtccgcgtcccctacgcgtcgaggttccatggcgctctccgtccttcgtccccccctcccccgtgccaaggaaggtctgggtctcgggcagagacggtgccactccatggggtcctacgagtacgtcatggacgaccgcgcctcgctccgcgtggcgatcaagccgcccaagaagaagcccgcggcctccaagtcgcgccgccgcggcgccatgtcggagtgcgagttcggcgcatccacgcgcgaggagacctcgctccgcctgccattcccagcaacggccctagaccatgacgggatttgggcgcgcgggcttgcgggtcgcggcgggctgtgcaggcggttcccaagcgcgtag

SEQ ID NO: 10589 - DNA, 402 bp, Zea mays
  Peptide Sequence Number=SeqID_52368
atggcgatggaccctgacgcggtagcgaaggccttcgtggagcattactaccgaacgttcgacaccaaccgcgcggcgctggttgggctgtaccaggagacctccatgctcaccttcgagggccagaagttccagggcccctccgccattgccggcaagctcggatctctccctttccaggcctgcgagcatcagatcgtcaccgtagactgccagccatcgggtccccagggaggcatgctcgtcttcgtctccggttccatacgcaccggccccgaggagcaccccatcaagttctcccagttttgttttgatttatgggacatgctggcattccatttgctgccggccgctgggtccttcttcgtgcagaatgacatgttccgcctgaactatggctaa

SEQ ID NO: 10590 - DNA, 399 bp, Zea mays
  Peptide Sequence Number=SeqID_52369
atggaggcattaggtcttcgaggtactagagcaacagagaaggtaaaggtgactgaggtacctaaagccaaggtgaagaagaggctctgtagaagtcaaggaaggtgcccaagaatgttcaagtcaatcaaagaaagattcgaagaaaaaggacttagagagctgttgtctgggtgcatcagacctccatcaggaactgtacgacctcaggatttttggctaaaaacaccagaccgtgaacaatgtcgatccaattatgcaccggacctcggccaacagttagttcgtgggcgtgctggctcagcccaacgactaggtgacgtggcccggtccggtggtgcactagatcagtctggcgaccaccagaaggggaaggcaatcaatcagatcccagactag

SEQ ID NO: 10591 - DNA, 160 bp, Zea mays
  Peptide Sequence Number=SeqID_52370
atggaagttgtggcccctggaggatctgatggcacagcacctactggtgcgcttgagagggtgggtataccatggcttggctccccgcctcactgctcgaccaacagctacaagataaaggagtgggatggcatcaagatgacaaagattggagcccaag

SEQ ID NO: 10592 - DNA, 1077 bp, Zea mays
  Peptide Sequence Number=SeqID_52371
atgacgaccggatctggtaagagcaaggatgcaatcgacgcctactacttccagatgaggttagacccgtcgacattctacatccctgccctcgccgatgggaagatccagtgcggggccgacgcagatctaaccttggaggccctggagttcatggtgcacgggatgactcgtgaggccgtcattaccaaacacctgatcctacccctgaacatcgctgcactctgcgacaaccagaacctaaggacggcaatcacggcgacccttctggccctcaacgaatgtgttctagcgatccgacagataggaggcaaccccaatcatgggatccggatcccaggcgtatcagaagggcccatagcgtgcgggtgcctgccggctcaccgcctccgtcactgccacctgggcgcgctaaaaggtccaagaatccgagccaccaccgaggatgttgccagggtatcgacccctatcaagatcggcacgatgcccccgaccactgaggtaccagcgggggatttggcggtggaggccacgacaatggcgagcgttgtagacacaactaaggccttcaagcttcaaaacgaccgtgaggcctacaagaaggaccgttggaagcgcgccaccctcgaccagtgcgaggaggggttgaatcagtgtgaggaggccgtctcccaaaaggaggccaacctggcagggctgcagtccgtgcttgaaactagaggcaaggagcttgaagaccagtgcgtccagcaggaggagaccattgagactttgcgcaaatggcaccaggatgtaaaggacaacgccaacatggttgccatctttgagaaagagatcaaggaggagaagctatccctcaccatgcgagataacaacgtcaccctcctagaaaatgccctcaatcagcacaatgattcattcgctcagcgcgaggagtggctagtgaagaaggaggttgacctcatggagagggtctgccagctagaagcggcacaggcggcgctggacacccaggagctggaggctacgcaaaatgctcttgaagatctctacgtggagcagcgcacgggatcctga

SEQ ID NO: 10593 - DNA, 150 bp, Zea mays
  Peptide Sequence Number=SeqID_52372
atggctctgtcagatgggtccagtctcttgggcccagttgctcagttccttagcatgtggttttgggtaaccatgcagttgtgcgatcttggctatcaatgcctattcatggagattgaggttgttgtatctaaaaaggatgataattaa

SEQ ID NO: 10594 - DNA, 294 bp, Zea mays
  Peptide Sequence Number=SeqID_52373
atggcgcttgggattggccgctgggcgcctgcctgggcggctgggcgtgcgcggtgcatggccgctagcatgcatggccgctggccgctgggaccgctggagtcgctggacgccgtgcctgggagtgggcgcgtggccgcaggaccgctggacgccacgcctgggagtgggcgtgcgcggtgcatggccgctggtggcggctggcggagaagacgagcggcggccgacgccttgggagtcgaggcgagaattggagacgggctgacgcgtgggaaaacgagtaaacctaattaa

SEQ ID NO: 10595 - DNA, 480 bp, Zea mays
  Peptide Sequence Number=SeqID_52374
atggggagtagggtgttacgcattcaaagtggcccaaacttgtataaaccctcgtgcaagtccgatgtgcccctacactaccatcgagtcgtagtcaatggcaccgtcctactcaaaagcatcatgtgggtaatcccgtggtgctcggtcgggtcacaaacactaacagctagcgcgccagatcaggaatgcatcctacacaacattatggacccatccgggaagaggtcttccccgatggtgccaaaggcatcggcaggattgcctcacccagcaccagcaagaactacgctgatgaactccaaggcgcgagaacctcgacatacttccaccccacatagaattgcgcctgcatcgggtgggcccagggttgttgtgatgcatgtggctcgaccgactgaggctgcacctctatcgcggcggacccccttgtccacgtcacccactcgggaatggactcagatcactcagcgaagataa

SEQ ID NO: 10596 - DNA, 225 bp, Zea mays
  Peptide Sequence Number=SeqID_52375
atggcgccccgcaagctccgtgacgacggcggctctcagctctcttacggaagcaggaggactcgcttgagtatggcgtccgtggactaccttctggcgcccgagcaccgcctccccgcgacgttcgaggacgccgccgacgccgtgattaggggaagcgagacgcgcgtgatgcgggacaggggggcgacaactactgatcggcgggacagggggcgtgattag

SEQ ID NO: 10597 - DNA, 285 bp, Zea mays
  Peptide Sequence Number=SeqID_52376
atgtcgggctcgccctcaacggctcgccgcaacgaacgcgcgcggactccgaagctcgccggtaatctcggcgtccgtgcaacggccgcgggttgctccttgggtataaagccgaagctccgcgaccccttccctcatccacccccacaatgggtggccggggcggtggaatttgatggcgccggcgagggctccgctgtggccggggcatctctgctcggctgccgtcgggaggttgggggcgatcctcggatcgttggttggcgcgtggacggtcccgattag

SEQ ID NO: 10598 - DNA, 216 bp, Zea mays
  Peptide Sequence Number=SeqID_52377
atggcggtatttgtgggcaccatgctgcctcaaggagcctcgtggggaacgccttctgacagggattctactggcccaccgtggtgtttgatgcatatcagatggcgagaacctgcgaagggtgtcagtactacacgcgacaaacccatttacccacacagacactccaaaccaaccctgtcacctggccgtttgctgtctggggacttgatctag

SEQ ID NO: 10599 - DNA, 384 bp, Zea mays
  Peptide Sequence Number=SeqID_52378
atggcggacggcgaggcaagtcgacgacgtgttgcgcgtacgacgtacagcacgagcgacggtgaggctgcagctacgccacgcagactgcgtcagggttgccgcgggcacgtcgcgcaggctacgtcgggccacgtcggggctgatgcgggctgccacgggcaagccgcgagaacgccgccgcgcaaggctgcgaacagccgcaccgggagcacagggctgcaccgtgggtggccaggctgcatcgactggacatggccgctcggctgcagggaacggaaggggagggaggaaaaaaaggtagacggcgaggtgcaggcgcaggtcgacggccgcgatggcgagcagtggaggatgagcgccaggcgctggggcatgggatga

SEQ ID NO: 10600 - DNA, 552 bp, Zea mays
  Peptide Sequence Number=SeqID_52379
atgggggtaatcttaccggtggttgatcggtgcagagagccgacgacggggtttggcggcagtagcggcctccgtcgagcaattatggaggtccaggggcccttctcgtccagcgatgtgatgagcggctccagtggtgtcaggcgaaactccctgcactccaattcggctacaggtggcgcggtggtctgggaacaagcatggcggctactttctttcgcaatggcgcacggtggcaatggggaaagggagaggaaaggagggggtcggtccgcagatttagaaggtgaggatcacgacgctcagagttcggtcaggtcatgggccagcgcagattgtggcatgcgcggttgcggcggcttagctctgaactcggcggagttaggcgacgacgcgcgggttccgcatgccagagatcgcgctcggggtggtcaacagtcttcgcgacgcgcccggggtctttgtacccaggttgagggggcaaatctcgacctgatcctcctatcaacgcggtggctgttacaactacgcgcgcgattcatcggcgagtaa

SEQ ID NO: 10601 - DNA, 372 bp, Zea mays
  Peptide Sequence Number=SeqID_52380
atgccactttgcggcgctctcttttcggttgggcgaggatgcaaaagtctggtcatcttccccgctgaacaacggtatgattgcaccgatcttcactgcgatgtgacgcccacatcacgcgagagattagacaattccaagtcttctcttagcgacacgagccctgccgctctctctctagtcaaagaacgccctgcactcgcgacagtgcctgatcgcacctcacagttcgaccaagcacgctgttacgagctccggatcgcctacctgctcgtccacgaagcgacgctagatctgagcatatcatctagcagagcgctgcagccagctgctgatgcaagactggacgtcgtcgcaggttcaaagccctaa

SEQ ID NO: 10602 - DNA, 141 bp, Zea mays
  Peptide Sequence Number=SeqID_52381
atgtggtacatctacagggaagttcatgaggaagtaactgaggcaaggcagaaggcctcaacgaacatggaggtggcggttgagaggagcttgtggaacctgtcaagtggtagggaccgatggatgggctggaggcgctag

SEQ ID NO: 10603 - DNA, 411 bp, Zea mays
  Peptide Sequence Number=SeqID_52382
atgggggcgcggataggggatgggttcatgccatggccgcctagtatggaagaggatgcctaccatggaagctcgacggtgggggcgagatccacggctgcctgcgtgggcgcggcgtgtgctatgcgagatacaggggcatggcggggggcgctgatgtggaggaggttttcgggagagcttcacgcggcagatggaggagagcgggggcgcgcgggggacgcggccgcaggcgaggtggaagatgctgatggcggcgggcgaccgggggggctgatgtggaggaggttttcgggggatcttcacgtggccgatggcggagagcgcgtgagggaccgggggagcactgatggcggagagcgggcgctgatggcggagagcggtggcgcgcgggtgaccggggattgctga

SEQ ID NO: 10604 - DNA, 504 bp, Zea mays
  Peptide Sequence Number=SeqID_52383
atgaaaaatcaagacacaacacctagtgtacaagtccctacaggtatcgcgaaccatccagcttcagcagtcatactgtttggctccaaggaagacaatccaccgtcaacatccagtccgtctgtaatccgccaggaagcttcccaggatgtactcatcgccacgggccaggataacgacggagatgacctgctgggggaagaaatggtggactacgaggcatcgccaaagcacctaggtatggaagttaatacggtccggtccctgaggccggacggtctggagtccaacagagaggactacaatttagtccctcttgagaacagtctggagtccagaagagaagactgtagttcacaacccctcttgcggatgatccggcccgtgaggctgtacggtccggagtccaacagagaggtctgcagtgtgcagcccctctcatgggcagtccgcccccatgaccgaacggttcgcagcaacgtagagggcagcaatcccctctaa

SEQ ID NO: 10605 - DNA, 396 bp, Zea mays
  Peptide Sequence Number=SeqID_52384
atgaaggggaagggtgacgggggcggatccagtcgggtaggggcttgcgttgggcctagcaaggggtgtcgacgccagcgacagaaaaagctcaaaagattggcgctgctgggtgtcaacgcaggcagtgaggaggtcgccagcgcgatgacgaggggctgcacgggcggagatgccggcggcgcagaggagaggcatgcagggcagccacaccatggaagaggtggtcggcgctggagaggacggcacgaaggggtgagcgcggccgagggaaaggagccccctacggcatgggaggcggcggcgcgggcaaccggcatgaggaccggcaacgacggatctggaccagcggcggcgttctgggtcgcggcggccagccctaggggcggcgggtag

SEQ ID NO: 10606 - DNA, 1668 bp, Zea mays
  Peptide Sequence Number=SeqID_52385
atggaccggctcccagacatcaattggtgccagctagtatttagctatttgtgtgaggctgctgcaaaatggcataaaaggaacactaatcatgtcacagttatgatatatgggtgctccaaagtcattgtgatatatgatctagaccatcttcattacgaggaagctctagagaacaaatatgacactccacgtattaaatactttgacaaagagacaattgatgcactgaccaaggctgataggaggaagcctcgtcatgctggcgaaacgtatggtcattgtcatttccatagcaggacaaacacatgctacgttgctgctcctaaacaaccaacaaatgatacgttccatattcatgttcctcgcattaaagacttgacaccatcataccgctctagttttgactctttgttgaaagctcatgacgaagaggttgacaagtaccgtgcaacgcttgaatgggctcaccgcaaattagtatcaaaacaactccagttagttgagaccttcgtagacatgattgatgatatcattcgactcgggtcacaggttcaaggatcacaacaacgagacactcaaatagaacaacctacccagtctgatgccaacattcccaatgacctgcacacgggtgcagctggtgatgtgatgccagaagcatttacgcaatctgaaaattttgaggtgcagacagatgaccttaatgtaactaatcattccagtgatgagatgcacaacatgtatgaagacatctctatcaaaatcgatcaaactcatgttcctccgctgcccgactcacctatcaaacccaaggaatacccaatggaagccgatggtgacctagtatcgaccatcaataagatggttgatctgcttggccaagacaaagttcaagagacaataaatatggtagcccacaatttgatgcaaccccaaaatcaactccatccacagaacatccctccccaaccttcttttgataagatacatgttgcacaggttttaaccacggaagtctcgattgaagtcccaccgaaggaccaccctgttttgacaagacacctgtcatgtcaacgagagtttgataagagaaggaccatcctgcacattggaccatttccctcctcatgccatgacatttatcaatcattctccgaaaggatgcgcttggacaattacttcatgcagggtttcatcgactgtattcagtcagagcatgcttcgcacactcctgatcctatcacggacgttgtaattctcgatgtcaacattgggatcgatcctgataaagactgtccaactatgccagtaggctcaaatgattgtggcttctttgtcaccagattcattatcttgtatgaatatgcagaagggtatatgcctgatgagattgacacggacctatcccttgagaaccgtgctactcttctacactacttgacattccatagtctgaacaagatcaaaccacttccagctgatattagaaggttcagctatgatcgtcataatgaagcctctgagtatactgaattcagttgtactatttatgcttttaggcagctgaaacactacaatgtgtatcatttgtcacaactcatcgtttataaaatatttatacatgtcataaacagctactacactgtctatgcaacatcccaataa

SEQ ID NO: 10607 - DNA, 531 bp, Zea mays
  Peptide Sequence Number=SeqID_52386
atggagctcggcgccgagctcggtgccaagacctacggtccggagatccatggtgccgagctcggcgccatcacctttggcgttgatctccctaccatcgcccacgagcacgaggtgctcggtgctctgatccggcgatccgccgtccgcgcccgcccctgctcgcatgctgggcggtccaacgcgccgggctgggcggctgggcacatggcggtgccgcggtggcggcctggcggctgggccgcgagcgcgctgcggcacgacgctgcagactggaaaggaagcgcgggcgagcgcgctgcggcgctggagaggaggtgcggccgtgtggctgcagcccaggcagccccgggtggaccgtgggtgcagcggggaggggcgcgtctgagccacaccggaggagcggaagcgatcagccaaggcgagctcgtggtgatcaagcacgcgggcatgatagagctagaggaggcatgccatgcggttgttgtggaagacggcacgatcgaggtggccatcggggtcgcagcctag

SEQ ID NO: 10608 - DNA, 2073 bp, Zea mays
  Peptide Sequence Number=SeqID_52387
atggacgtcctgagattcgtgcccggagtcaggccgccgctgccaaccttcgccacgccggtatcccccgcgactgctccctcgccgcacgccgccgccgccgccgccgccccaggccccgggttccactccgggatgctgggcctgtggccgcgccgcgcgggagagaatgccctgggagccgcggctgaggcggcgggcgtcgaggaggcgagggaacgccgtcgcaggcgggcggtggaggcggaggacggcaggggaggcaactgggtgctgcagatactgcgcgtgcagtcatcgccgccgccgtcgccgtcgcgcgacgatggccgctgcggcgtcgacgacggcggctcggtgcctggttccggcgagggagacgggagtagccagcggtgcgtggagaggggcggcgtcggaccggacagcgaggaaggctgctcggtggctgacggtgaggagctcgatcgggccgccttctcgaggttgctgcggaaggtgtcgctcgcggaggccaagttgttctccgagatgtccggcctctgcaacctcgcctacatggttccccggatcaagccaaggtatctccacaagtacaacatgacgtttgtgacatcatcagttgaagagagggccaaacttccaaacccttgtaaccaggaggaccaaaatctcaatggcaggaagaatgcaaacataagcacgtcatccagacattctgatgaacaagagtcaacatatggcgctacctctgaacatgagagaatgcaggagaaccaaagtggccaagggataaatccattggcagcttatcgaattgctgcatctgctgcttcctacatgcaatctcgagccatggaagttcttccctttggttctcagaatgaggctaggcgagatcgaactatccaggccattgtaaatgcacaaactgaaggtctgactatggacgaggcttcgtttgtggccacaacgaattcaatgacctcaatggttgctgcaaaggaggaaacaaagcaggcagttgcagatgacctgaactcttcaagatcttgcccttgtgaatggttcatttgtgatggaaatcggaacagcacaagatattttgtgattcagggctcagagacaattgcttcatggcaggcaaaccttctatttgaaccaattaaatttgagggtcttgacgtgctcgttcacaggggaatatatgaggctgccaaaggaatataccagcaaatgttgccatatgtcaaatctcacttcatagttcatggcgaatctgcaagattacgattcactgggcattctcttggcggaagcctggctttgcttgtgaacctgatgttcctaataagaggagtagctcccgctgcttctctgttacctgtcataacatttggttcaccatctgtcatgtgtggtggtgattacttgcttcaaaagcttggtttgccaaaaagtcacgtgcagtctgtgaccttgcaccgggacattgttcctcgagcgttttcttgtcactacccggatcatattgctagcattctgaaacttgtcaatggaaacttccgcagtcacccttgcctgacgaaccagaagctgttgtatgcgcctatgggtgaggtgttcatattacaaccagatgagaagttgtctccccatcaccaccttcttccagcaggcagtggcctgtacctcattggcggacagacagtggattcaggcacttcgtccacagcactgcggtctgcattgtctgccttcttcaactccccgcatcccctcgagatcctcagggacgctggtgcctatggtcccaagggcactgtctacagagaccacgacgtgcactcgtatctaaggtcgatacgagctgtggtgcggaaggagatgagggccgagaaggagaggcgccggctcctgcggtggcccatcgaggtgtatggtgcgctcgccaccatagaccggaggcaagtgctgaggcagctccggaggcatgcgcacttgctggtcgttttcttgttgccggcaaagctgctcttcctgggcgtcctgtcactcatccgacccacctga

SEQ ID NO: 10609 - DNA, 297 bp, Zea mays
  Peptide Sequence Number=SeqID_52388
atggacccctgtatcggcgccatcatcattggcgctgagaacttgctgaaatttaggaagggtcctttgaccggaactgccttcgacccactgcctttgccaactggtgacaaggagaggatagagaaaagacgagaggagcttgcggccgagcaacaatgggtagacgtgcaagaaatgaggcgtgttgctgaatgcagggagaaggagaagaagcatgagctgcagaaggtggaggaccaacattcttgctatgacaagaacagcagcaatatggatatgagcatacttgcacct

SEQ ID NO: 10610 - DNA, 306 bp, Zea mays
  Peptide Sequence Number=SeqID_52389
atggctggtaaccaccatcagcgcaagctacagagactgatgggcgcagttcaggaggaggtctccaccttgcccgaccctaggactcggcccccgcctcggcctcggaaggtggtctccgcctcgcctgaccccaaggctcggcccccgcctcgacctcaggaggaggtctccgcctcgcccgaccccagggctcggcctcaacctcgacctcgggaggaatcgcgtcctcgcccgaccccggcctcggcctcaggaggagtctccgcctcgcccgaccttgggctcggatcgaccacaccatag

SEQ ID NO: 10611 - DNA, 543 bp, Zea mays
  Peptide Sequence Number=SeqID_52390
atggtgccacaccactttgtggtatttccccaatttagggtgaagaaaggtgattttgatgtggttgcatttaagcggaaggcccttgttagtagtgatcatgatttggttgaggagtttattgcctatagtgcttggcctctcagccatagatggtctgttgggcagattgtgcgaaggtctatgccgctgaaagagggcatggagatgattagtcatgtcttcgccatcgagttgggtggtagagatggtccaacatttgttggtgaagttgaaacagaaacatgtaaagttattaggaaacatgtgaggaaaacagagctatcgaagaacatggacattcagggatgtaatgtcctgatcaaccgggtgtttgagctgaatcattttccatatgggttgtaccttgaagacactgcaaaagatacagatgatactttgaataaagggaaaacagaaaaaggcgaagtctatgaagggtgggagaaggacgagcctttgaagcgaaaagctgggtcgctagaatcagggaagaagtcataa

SEQ ID NO: 10612 - DNA, 675 bp, Zea mays
  Peptide Sequence Number=SeqID_52391
atggaggagacctacgttcctccgtctctggacctgcaggtcggggacacgcggtacgtgttcgaggcgaagacggtgcagaggatggagctactggtcctcagcacgctcagatggaggatgcgagcggtcacccccttctcatacatcgactacttcctccaccggctcaaagacggcggtgcgccgagcagacgcgtcgtcctccgatccgcggagctcatcctgcgcgtcgcgagaggaacgtgctacttgggtttcaggccctcggagatcgccgcggctgtcgacgccgccgtggccggcgaggagcacgccgtggatatcgacaaggcttgcacccaccacgtgcacgaggagagggtgtcacgatgcctcgaagcaatccaggccaccgtggccctgctggcgctgggcaccgtgcctgcacagccgctgaaagctgaaggcccgagcagcggccacagcagagcatcttcctcctctgccactgtgccgcggagcccgaccggggtgctggacgctggctgcctcagctacaggagcgacgacgtggatggaaggtccgcgtcctgcgccctgcgccccctgccatcgccacgctctgccctgtctgccatcgccagagcctcctcatccgcatcaatggaaggtccacgcgtccgcagcccctaa

SEQ ID NO: 10613 - DNA, 1011 bp, Zea mays
  Peptide Sequence Number=SeqID_52392
atggattttgtcgaagcgttggctactacctatgcggagttgggtcaggttgtgacggaggccaagctcaagagtgcctcagcatgggctgcaccgctgcagaagttatttaagggctgccatggagaaatctcagaaggttgtggcaaagaagaggatatgatggccccttcgtgtcttgtggacccgatgaagctagttcatgagaagctggcgaagatagaagcatccgtcaagacaaatgcatcggtggagtctttgcacgccaccaaaactgctcccgtggtagggttggatatctcgctgctggactatcatgccgaggagccatttgattttatgctatgtgacttgcttgctattgatgtgctggagtttggtaagatcaagatgaccaagttctttttcgaccatctttacggccctgccatggcccctttgctcggcgcaatgagccgtggcgccgaggtaacacgtctcggcgccacagatcttgacgccgagcctcataacaacatcgatctcttccattgtgcaagaaggaacattaatgatcttgtacaaatagttatgtctgtaagggtttggttttgtgatacaactgcttctcctacttatgataatggttatgtaaacatcacgacccaactgtctgggctgaggaccaagatgcctccacttactgtggcaatagatgaaaatcttgctagcttcatgtttcctggcattacaatgtttctgcaagcgacaacagtgtcaccagcaagcgcaccatttcctaagatctatatcacagacctcgacgctaagatctatggcaccaaagtctgtcaccagcgagcgctggaatttggtccaatcgtgttcagcgcgctaggtggggtggggcgttcagcatggcagcctagccggctgatcggctgcacgaggcaaccccatgacgagggcgccggtggaaggaggccgaggagttggctcgcgcgggagttagcccatgcggctcggagctga

SEQ ID NO: 10614 - DNA, 1107 bp, Zea mays
  Peptide Sequence Number=SeqID_52393
atggctgtgcccccgaatcgcacgccgtccctccacggctcctcccgcccatcatcagatgccatgctgccgccgccggcgctcgcgaagaaagatgcacaagatacgctgttcgcggaggaggaatcccaagccttacagagcggccagcgcgagtcaccgtccttctccgcgaacaatctccagaagtcgtcactactgttccgccagatacaagcgcatctgctgtgcatggacgatctcgacgatcccatctccgatgaccacatcgagcggactgcggagcagttctcgagtccacgcacgaacgaccaggccggcaagaaaagcatgtcgtccccgccgtggccgtcttgcatagcagatgacgacgacgaggatcccaggccacgctgggacgaccaggccggcaagaaaaggatgtcgtccccgccgtggccgtcttgcatagcagatgacgacgacgaggatccaaggcctcgctcggacgaccaggccggcaagaaaaggatgtcgtccccgccgtggccgtcttgcatagcagatgacgacgacgaggatcctccacctcctatcaagaaggcaagaacgaaaccgaagagcagaagcaagcgcaaacatgctgctgcccgtgcgacccggctgcggctccggcgcgagcaccgtctccaaaggtggcacaatacgatcgcgactctcatcctgaagcgccggttccgggcgccggagctctcgcacggccggacggccttgaggtgcctgtgcccggacctcaagctggcggacgacgaccctcgcggcttcggctgctgcgcgctgcaccaggacgcgctgccggggcacagggcatggatgtactcggatgagggcgacgccccgccgctcatcggcggcctcggtgaggtcctggttcccagattgtccgcaggctacagcaaggaggaggtgcggcagtacgcgcggtggcgaggcagcgtctcgatgccgagccgcttctacgtgcagcagcgcgccgcggagaagcgggcgcgttcagtagcccgacgacgactggacgatgcctggaataccgagtcaccgtcgacactcgatcgagttgatagatag

SEQ ID NO: 10615 - DNA, 1215 bp, Zea mays
  Peptide Sequence Number=SeqID_52394
atgcatatcgatccagagcatcagaaacacaccgcgatcgcattctacttccgccgcgatacacctccagccttgcggcccatggccgtgcccccgaatcgcacgccgtccctccacggctcctcccgcccatcatcagatgccatgctgccgccgccggcgctcgcgaagaaagatgcacaggatacgctgttcgcggaggaggaattcaaagccttacagaacggccagcgcgagtcaccgtccttctccgcgaacaatctcctgcagtcgtcactactgttccgccagatacaagcgcatctgctgtgcatggacgatctcgacgatcccatctccgatgaccacatcgagcggcctgcggagcagttctcgagtccacgcacgaacgaccaggccggcaagaaaagcatgtcgtccccgccgtggccgtcttgcatagcagatgacgacgacgaggatcccaggccacactgggatgaccaggccggcaagaaaaggatgtcgtccccgccgtggccgtcttgcatagcagatgacgacgacgaggatcccaagccacgctgggacgaccaggccggcaagaaaaggatgtcgtccccgccgtggccgtcttgcatagcagatgacgacgacgaggatccaaggcctcgctcggacgaccaggccagcaagaaaaggatgtcgtcaccgccgtggccgtcttgcatagcagatgacgacgacgaggatactccacctcctatcaagaaggcaagaacgaaaccgaagagcagaagcaagcgcaaacatgctgctgcccgtgcgacccggctgcagctccggcgcgagcaccgtctccaaaggtggcacaatacgatcgcgactctcatcctgaagcgccggttccgagcgccggagctctcgcacggccggacggccttgaggtgcctgtgcccggacctcaagctggcggacgacgaccctcgcggcttcggctgctgcgcgctgcaccaggacgcgctgccggggcacagggcatggatgtactcggatgagggcgacgccccgccgctcatcggcggcctcggtgaggtcctggttcccagattgtccgcaggctacagcaaggaggaggtgcggcagtacgcgcggtggcgaggcagcgtctcgatgccgagccgcttctacgtgcagcagcgcgccatggagaagggggcgcgttcagtagcctga

SEQ ID NO: 10616 - DNA, 291 bp, Zea mays
  Peptide Sequence Number=SeqID_52395
atgccaccgcgcccaagcccgcgccgcgcgctcctcgccgtcgccgcggccgccgccaagaagttgtggatccccgccttcaagagcgacgccgagttcatcaacccgccctggctcgacggatcgctccctggcgacttcgggttcgatccgctggggctgggtaaggacccggcgttcctcaagtggtaccgggaggcggagctgatccacgggcggtgggcgatgggccgccgtgctgggcatcttcatgggcccagccgcgagcgaagtaggaggcttatttattga

SEQ ID NO: 10617 - DNA, 246 bp, Zea mays
  Peptide Sequence Number=SeqID_52396
atgggagaacggtggaggggaaagctccgagcgggtcagggtaactccggcgaagaatcccggtcgcggggaggggcgataaggcgcgataaggctcggactagctccgacaagggtaggggagtgccatgggccaacacaggggcacgagacgaggctgaattggctagtcaccgagcggggcgcggcaaaccaacgcggataaacttcgacaaggctgaattggctaaggtgaggcgcgaataa

SEQ ID NO: 10618 - DNA, 453 bp, Zea mays
  Peptide Sequence Number=SeqID_52397
atggcgcagccgaagggcaagagaggggttcaaggtatgaggtggatgcggaaggtgctcagtgatgcagcggccagttttataggggcgagcaaggcggacctggcggaatcccaaagctctcagcggttgttgagcgactcgcaacaaccatgggatgatgggaaggggaagccaccggtgtcgtgggcccacctgccagcgcttgagcgcgtccgcgcgtggagtgtcacaacgttgaaggtccacctggcaggctgtgtgagggcgcacgcgagatggccacaagagcccgacatgtggggtccacccgccagtgccgggctccaagcagtagaccacatcaataagtatcaggccgaaacaataaaatggcgtgatcggaagatacagtgggaaagcttcagctcaaatgggagggtccttttcggtggtgtcttcgtcaagacctag

SEQ ID NO: 10619 - DNA, 1566 bp, Zea mays
  Peptide Sequence Number=SeqID_52398
atggcgctcgcaaaaaccctcctactcgtgcttgtcgtcgccgccgcatggacggcggcggcggccgcgcggcaccgcaggagccacgaggattactatgagaatgtgtttgatcgtcagcaagctgaccgggtggagtccctgccggggcagccatcggaggtcgggttccggcatttcgccggctacgtgacggccaacgagtcccacggccgcgcgctcttctactggttcttcgaggcggcgcacgacgtggcgaagaagcccctcgtgctctggctcaacggaggaccgggatgctcgtcggtgggatatggagcactggaggagctgggtccgttcttggtgcagaaggggaagccagagatcagcctcaaccctaattcatggaacaaagaggcaaacctgttgttcgtcgagtctcctgcaggcgttggattctcctacactaacaccaccaaggatctcacccaatttggcgatgagctcactgccacggacgctcatgccttcctcttgaactggtttaagaggttcccgcagttcaggcaccacgatttctacctcgccggggagagctacgcggggcactacgttcctcagcttggcgtgaagatcttggagggcaacaagaaggcgcacaggaaggatcggatcaagctcaagggcatcatgatcggcaacgcggccatcgactcgagctccgacgaccgcggcctcgcggagtacgcgtgggaccacgcagtcatctcggacgaggtgtacggtgccatcaagaaggagtgcaccttctccgacgacggcgacgagagcgacaagtgcggccaggcctggaacgacttcttcaacgtcatgcgggacatcgacctctacagcctctacacaccggcgtgcacggacgccatggccaacgccagccgcagcaactcctcctcggcatcccgacgccgctcatggaacctcgccgacacgccgctcgctgtaagatcgacgactattttgtccgatccatggcctacatctacatacaaggagctgatgactggtattttatgtatgtatatgtacatgcagaaggttcaccgggggatgccgtacaacacgtacgacccgtgcgtggacaaccacgtgttcgactacctgaaccgcgccgacgtgcagaaggcgctgcacgccaacgtgaccggcatcccctacagctgggagccctgcagcgacgcgctgagcaactggacggactcgccggcgtccacgctgccggccatcaagcagctggtggacgccaagctccgcgtgtgggtactgagcggcgacacggacgaccgcgtgccggtgacgtcgacgcggtactcgctgcgcaagcttgggctggccaccgccaaggagtggcgcgagtggttcaccaccgaccaggtcggcggctacacgctcgtctacgacggcctcaccctcgtcaccgtccgcggcgccggccacatggtgcccatgatcacccccgtccaggccagccaagtcttcgcgcacttcctccacgggagcgagatgccggccaagcctgtcgtctag

SEQ ID NO: 10620 - DNA, 183 bp, Zea mays
  Peptide Sequence Number=SeqID_52399
atgttgattgtgaggcgttcactcctacttcaccggaacgtcaaatgtgacgctagtggaatcgagttaaaactatctattcatccccctctagccggtgtcctagatcctacaagtggtatcagagccaaggactccattgtttatggatcgaaccattccggagttggacaaaatggctag

SEQ ID NO: 10621 - DNA, 339 bp, Zea mays
  Peptide Sequence Number=SeqID_52400
atggtctggcgcactggactgtccagtgtgccaccagacagtgtccggtgcacctggggcgatcgactcaaactcttcaccttcgggtttctggagaggcgctccgctataattcaccagactgtccggtgggccaccggactgtccggtgtgccagcggagcaacggctatcgagcgcaacggtcaactccaacggtcgcctccaacatgaacaatgcgtggacagttcacgcagagtcagagcagcgccagaaggcacaccggacagcgaacagtgcctgtccgatgctgcaccggactatccgatgccccaagaagtcagagctccaacggtctaa

SEQ ID NO: 10622 - DNA, 270 bp, Zea mays
  Peptide Sequence Number=SeqID_52401
atggaggttgtaggaggccgagatcacacgacgacgccgatgatgacaaaggccgagaggagagaaggatctatagagaaacagggagcggaagttggaggagccttgcctcggaggaaagaggaaggaactcggaacagagatgctctagctccaagccccctcaaagcggccgcgacggccgcgcgcaagccgtgcccaccgggggtggccgctgctagggccgcgccaccaggggatctcacgcccgcccacgccggaggagtctag

SEQ ID NO: 10623 - DNA, 315 bp, Zea mays
  Peptide Sequence Number=SeqID_52402
atggccgacgcacatcagagccgcagcgatgcacatgaatatgcatctaatgggtccaagattaacagaacgttgggtattacaccgaccctggccaaccccgatgacctcggaacccctgtagcccacacccgccccagctttggcgacttcatcaccgaggagcaggagtggcaccgcggcagccgcaaaccccctggcattgatctcaaccgtcggttctcgatcgcacgacccagatcttgggataccgcttcgcgcacgcgcgcccagcgcccggacccatatgttggccgcatgtgcccctggcactag

SEQ ID NO: 10624 - DNA, 864 bp, Zea mays
  Peptide Sequence Number=SeqID_52403
atggcgatcgtcaacaagaagcagggcggcgcggcggcgtcggggctgaagcacatcctgaagcggtgctcgagcctgggacggcgccagcagcagcatcagcgcagcgttggggaggatgagaaggaggaggaggaggccacggggctgccgtccgacgtgccgcgcggccacttcgcggtgtacgtgggcgagcggcggcgccggttcgtggtgcccatcgcgctactggaccgccccgagttccggaccctgctgcggcgcgccgaggaggagtttgggttcgcgggcgccggcggcgccggcggcgccctcgtcctcccctgcgaggaggtcgccttccgctccctcacctccgcgctcgcctgcgcccggtcacgggcgttgccgttggctggctccgatccgcatgtcgcgcggcgcacagcacatacgtcctggccgaggcttcccgcggcggcgaactggaggacctgcttgcagcgggctggagccgcaggaggtgaattgaattccggccaggccagagaacatggcatggcgccagggggcagcccatgtgcggtgcgggcgctcgtgtggccgcggcggacgcccaaccgcctgggcctgaacaccgcccagagtaacagagccgatcgagccaacagcgggggagggggcgccggcagcaggcgggtggcccgggcatctcagctcaaggagcgggatcctttgctgctgctggcctggacaacgctccggcgcattttcaccatcgcaataagaacctcctcctgcgtgtcagacgagcgagggccccccacattcctgtgccatcacagacagtttgccagagacaatgcgggtgccacggaggattag

SEQ ID NO: 10625 - DNA, 240 bp, Zea mays
  Peptide Sequence Number=SeqID_52404
atggcacaaccaccatcctacctccgtgagatgcttctctgttgttacctccgcgtcgcgctggagtttgtgcacacgctggaggcgcacccacatcggcagctcgcagccgcgctgcgccagaagtcgcgccgcgctgaggtcacgcccgtgccggagaagcttgctagagcgcggccacggcggagtctgcgcgtccgcgagaggcgacgatcaacgcaaatccgtggtctggcatag

SEQ ID NO: 10626 - DNA, 1509 bp, Zea mays
  Peptide Sequence Number=SeqID_52405
atggcgagcagcggggtgaggaacggggtggggtccaggatgagcgcgaagccggaccggcagggcgccggcgccacgcccaagacggccgcggggaagcaccgcctctcctcggcggcggcggggggcggcgcgtaccggcggaccagctcgggcccgctccacgcggcggcgggcggccgcgcggcgtcggatggagtttctagtagagtaagggttgctgtaaggcttaggcctaggaatgcagaagagttggtggcagatgcagattttggtgattgtgttgaacttcagccagagctcaaaaggttaaagcttcgtaaaaataattgggagtcagaaacatacgaattcgatgaactgctcactgagttttcttcacaaaagcgagtgtatgaagttgttgcaaaaccagttgtggagagtgttatggagggatataatggtacagttatggcatatggccagactggtactgggaaaacttttactctgggaagacttggtgaagaagacaccgctgctaggggaatcatggttcgtgcaatggaggatattctagcagacataacacctgggactgattctgtctcagtatcatatcttcagttgtacatggagatgatacaagatctccttgatcctgtaaatgataatatagccattgtagaagacccaaggactggggatgtttcattgcctggagccacagtagttgaagttagagatcaaaaaagctttgtggaccttctaagggtgggtgaggctcaccgtgttgctgcaaatacaaagttaaacactgagtcatctcgaagtcatgcgatcctcatggtgaatgtcaggaggtctgtaaaaggtagaactgaaatggatgtcagcatttctggtgaaaatgggcattcattgtccatgatggggtctttgagaccacctgttgttaggaaaagtaagcttgtagttgtcgacttggctggatcagagcgcatagacaagtcaggaagcgagggtcatacgttagaagaggcaaagtctatcaacttgtccttaagtgctctgggaaaatgcatcaatgcgcttgctgaaagcagtcctcatgtacctgttcgtgattctaagcttacaagattgcttaaagattcatttggaggctgtcaccgtctggttcacgcacaggcacagccgcacagcagcagcgagtcagcgcccgcccaggcttccttcctggcttcctcaacggtcgccgacgccagtcgcggtcggagcagcaaaagcccaaagcaggagctggcgagcgacgagctgatgtcgagcgcccgcacgcgcgatggagagccctgtcggctgtcgcggtgtcgtcgtgccgcgagtggccaagcagcggcgggagtgcttgagcgtagaccaaggacgcatgcggtgcggcggccgagaggtgctgaccggctgaggagtgggcgatgccgtgagcacaattacctgtataccctaagtgtaatgggcttggcctaa

SEQ ID NO: 10627 - DNA, 282 bp, Zea mays
  Peptide Sequence Number=SeqID_52406
atggaagagcggcctccggaactcgccagcctcgggaaaacgcagcggctgctccgctatagatcaccggactgtccggtgaaccagcagagcaacgactacttcgcgccaacggtcacctgcgggccgagaagacagaagctccaacggtcggaatccaacggcattggtgacgtggctggcgcaccggacatgtccggcgtccccgagaatagatcaaatgccaataagtcaaatgtggatattgaaagggaattaggcttacacctagttcctatataa

SEQ ID NO: 10628 - DNA, 165 bp, Zea mays
  Peptide Sequence Number=SeqID_52407
atgcacctgaggagcataggatcacgttcacggggatgggataccaaggcctacaacaaggctattggacccccgcttcaagcaatgatagataaggagcctgagtactaccaaaagttggtggactcgtggagtatgacttctgtgtggaccagacagacttag

SEQ ID NO: 10629 - DNA, 481 bp, Zea mays
  Peptide Sequence Number=SeqID_52408
atgggcgtgcctgacctctgcacgcgctggcgcgcaataaatgcgctgcagatgcctctggaaattcccgagggcgacgagtttgagttggagtcctctagtacaccggacatgtccgctcggaaggcacaggcgcgtcagcgcgtggcccgtggccggaaggctgggcgcctgggcacagcagcggacgctggctcgccggctcggcacagaaggccggaaggttggggccgctgggcagtgggcatagtggcggccggtggctcggcacagcggcggaccgcggacggcgtcagtgcgtggccggaaggctgggcacagcgggcagcggcggaaggctcggtctcccctcggcggcttggcggacggttgaagtctgggcacagcggcgggcgcggctgtgttcgtgagcgccgggcggtgagggttagcgctaggctgccagcgcgaatgcgtgatatggaagctgggccggcgtccg

SEQ ID NO: 10630 - DNA, 288 bp, Zea mays
  Peptide Sequence Number=SeqID_52409
atgtccggttgtgtgcgacctcgatatactaacacttgttggtgtgtgatccaatttgatgtcaacatactttttggtgaatcttctcagaaagaaggtcaatatgtgttcaagatgcataaagataatgacaataatgggatcggtgatttcatcgatgcctccaatgggaagaacataatccatcctacaactattgatcaacttctaaaggagctccacaagatggtggaggagaagaacactactaatgcggtggatgctctagtgggttgcccaatggagtaa

SEQ ID NO: 10631 - DNA, 234 bp, Zea mays
  Peptide Sequence Number=SeqID_52410
atggaatgggagaaaacccaacgtcaaatttttgacgacttggtgctgtctggcaaagaatacagggtggagaaatctgaacctgctgctctggaaggttgcgataacagtggagaattggaagattctgtgtccagctggaaatcacatgaacctggaaaacatggtgaggagcttgaagaactctgcaaaggcaccttgcaggctgctgtggagctgatagtctgttcgtga

SEQ ID NO: 10632 - DNA, 1389 bp, Zea mays
  Peptide Sequence Number=SeqID_52411
atgggcaaggcggcgcgctggttccgcagcttcctgggcaagaaggaccaggcaaccaccaaaggccagaggcggcagcaggaccaggctctgcctcctccggccagcgccaagcgctggagcttcggcaagtcgtcgcgggactcggcggaagcggcggcggcggcgacagccgccgccgcggtcgtctcgcccgacgcaggcaacgcggcgatcgcgcgcgccgcggaggccgcgtggctcaggtccgccgcgtgcgccgagacggaccgggaccgggagcagagcaagcacgccatcgccgtggccgccgccaccgccgccgcggcggacgcggcggtggccgcggctcaggcggccgtcgccgtcgtgcgcctcaccagcaagggacgcccgccgtctcccgtcgtcctcgccgccgtcaggatccagacggtgttccggggattcttggcgaagaaggcgttgcgcgcgctcaaggcgctcgtgaagctgcaggcgctggtgcgtggctacctcgtgcgcaggcaggcggccgccacgctgcagagcatgcaggctctcgtccgcgcgcaggcggccgtgcgcgagaggcgcgccgccctccaccaccagcccgtccggccgcgctactcgctgcaagagcggtacgcggacgacacgcggagcgagcacggggtggcggcgtacagcagccgccggctgtcggcgagcgtcgagtccccgtcgtacggctacgaccggagccccaagatcgtggaggtggaccccggccgccccaagtcgcggtcgtcctcgcgccgcgccagcgccccgctgctggacgcccgcagcagcggcagcggcggcggcgaggagtggtgcgccaacaaccccgcgtcctcgccgctgccgtgctacctgccctccgggccgcggcgcatcgccgtgccgacctcgcgccagttcccggactacgactggtgcgtgctggagaaggcacggccggccacggcgcagagcacgccgcggtacctgcaagcgcacgcgccggccaccccgaccaagtccgtcgcgggctactcgccgtcgctcaacgcctgcccgaactacatgtcgagcacgcaggcgtccgaggccaaggtgcggtctcagagcgcgcccaagcagcgccccgagctcgcctgctgcggcggcggaccgcggaagcgggtgccgctcagcgaagtagttgtcgtggagtcgtcccgcgccagcctgagcgccgtcatgggcatgcagcgcgggtgcggcccccgggcgcaggaggccttcagcttcaggacggccgtcgttggccgcatggaccgctcgttggaggttgcaggcagtgagaacgacaggctggcgttcttgcagaggaggtggtga

SEQ ID NO: 10633 - DNA, 288 bp, Zea mays
  Peptide Sequence Number=SeqID_52412
atggcatgtgtgacaactgacaatagagttgtcatcaagaaagagactgatggtccagagctgggtctgaagcgagtaagagcaggggtcgcaactggagcatcgattccggaaactaatagaaaatcagttcatccaggaacccagttcaggagaggcccccaacatgagcaaagtagcagtggtgaacatatgagatggtatctacaggccatgcacggcccgtcgatcgcccagtggctctgtgctgtgctctgtgctagcaggagctacactacatactcgtga

SEQ ID NO: 10634 - DNA, 297 bp, Zea mays
  Peptide Sequence Number=SeqID_52413
atgcccgcgccccctccccctccccccagcgtgatgcccgcagctcccggtgccatggtgccctcgcctccgcccccgtccacaaccgcgccccacctgccctcgcccacgctctccagcgatctcttctgccgcgtcttcaccaccctcgctcgtgatctccgccgtcgtccgcacttggttcagaggccgccgccgccggagatgagggaggaggcgctggagcggctgtgcgaggtggtgtgggacagccctgggaggcgagaaacacctctacacgtccgtagccagagatga

SEQ ID NO: 10635 - DNA, 327 bp, Zea mays
  Peptide Sequence Number=SeqID_52414
atgaaccagttgcgcataggcatcctaatgaacttacagaaggttgagcagagacataccgatgtggatgtcgaagtttgctgccgagatgatcggttgttgaaggggatctatgtcgacggcgtgccctatgcccactgccgctggtttgagttggatatgctgttggaatcagttaatgcagcgactaagcgtgttgaagagctgatagaaaagatgcaagacaactcagtcaaacctgagagtccaatacgcatggatgagcatttaactccgttgaacctgaagtgcattgagcgactgtaccgtgatcatgttcttaattaa

SEQ ID NO: 10636 - DNA, 387 bp, Zea mays
  Peptide Sequence Number=SeqID_52415
atggtggcctcggcctcggtcgcgagccccactagccaccgctgcttcgacgaggaggtgctggagggcatccgtcgcgccgttgttgatagcgcctacgaggtcatcagcctcaagggctacacctcctgggccatcggctactccgtcgccagcctcgccgcgtcgctgctctgcgaccagcgccgcatccacccggtctccgtcctcgccagggggttccacgacatccccgatgggaacgacgtcttcctcagcctgcccgccaggctcggccgcgttggcatccagggcgtcaccgagatggagctcaccgaggaggaggccaagcgactacgccgctccgccaagaccatctgggagaactgccaactccttggcctctga

SEQ ID NO: 10637 - DNA, 156 bp, Zea mays
  Peptide Sequence Number=SeqID_52416
atgggggttgctcggcttctccctgcgaccgtgggcacgttccggggatggccaattggatctcggtcgtgcctccgccgtgtagccatggcggcggcgccgctgcctgggaagggcccctcggttagtttaaaattgaacccgccgtccacctag

SEQ ID NO: 10638 - DNA, 114 bp, Zea mays
  Peptide Sequence Number=SeqID_52417
atggggggtgctcggtctctctctgcgaccgcgagcacgtttccgactattaaaatcatcgggctcgtctctccttctgtattcgcctacctccgcaacgcaaatactcttctg

SEQ ID NO: 10639 - DNA, 306 bp, Zea mays
  Peptide Sequence Number=SeqID_52418
atgattgttgcattgtactggtgggcggggatgttccccgccgcgtcggtggccaacgccctgccgttcagcagcacgacctggctcgtcaggtcgccatccttggggggtgaggtggtactcgtgtctcacggcgcccgccgccgcctcgccgagcagcaggccgacgaggaagacgaagaggacgaggtcgaggtcgtggagaacgcgacggcggagcccggctgccgcgcgaaggagaacacgacggagatggaggagaaagcgacggagatggagaacgcgacggggatggaggagaactga

SEQ ID NO: 10640 - DNA, 690 bp, Zea mays
  Peptide Sequence Number=SeqID_52419
atggcggccatcaagaagaccaagatcgtcttggcgcagccagcggttggggctcagccgtcgcggccgccgttcttttctcgcgcgcccggctcggtgcgaggcgccggggacgaggcggcttacagggccagcctcaggtaccgggccctccaccaggactaccaggacctcatcaaggaaatccaagcaaagaagaaaaggctgcacatgaagaggctcaagaagcagaggcttttggctgaagtcaagttcctgcggaagagatacaaatccatgtctgagaacccttctcagacaattgtctgtagagtgaggaatccagcaatgtcgtctgcatcctggacagctggttcggcaggtgatacctggcaccagtcggttcgtgctgccgggagctccagtagaagccagctggtgcagagaacacacggtggttctccaagggcatctccagtgattgacctcaatgaggcctgtgagccgggttatgaggagatggaaatcgaagggcaacatggttacatgtctcctctaggcgtaaacaagtcaaagaggtaccctatggaaggtgctgctgccagcccaagccagatgagaatgcatgtgttctgggatgtccagaatccagcagggcgatctggaaagaggaagatctcatggcaggatcagttggccctgagagtatag

SEQ ID NO: 10641 - DNA, 207 bp, Zea mays
  Peptide Sequence Number=SeqID_52420
atgcggcggagcttgagccaagtcttccacgtcgagcaggcgaccgaggcaacgttagaggtaccacatacaagggagcatcttccttcacattttgaagagaccaggcataccaaaggattgacaaagtacaccttcattaggaaacaacactcgagtagtgtgcacatgaagacgaagctgagaagtttcggctctgcagtttga

SEQ ID NO: 10642 - DNA, 618 bp, Zea mays
  Peptide Sequence Number=SeqID_52421
atggctgaacctacaggtgagcttgctggtgcgaacccaaggtccgaggcgaggcctagcattgttctgttgacagatctcgccatggcatcgatgaaggatcatatggcgcgaaatccgaatggagcaaggtccggcggcctgcagggagctcggccatggagaactccaaccctggcgagtagagcgcgcagcacagggagggtagagggaggcggcgccatggacatggagctggccgagggtcgcgtgccactgagctcggccatgggaaatggcacctgcgccatggctagagagcatctgctcaaggccggaccagaggaggtctcgctgggggaagcgccgacctgctcaatccagggcagaggcatggagcgcccaaggaaaaccaggaaagagggagcgcgtggggagatatactacgccatgggaagagagggaaacgctagggagctcgaccaacgaggttgctggccgaccatggagacctcctgttgccgagcaccatggagggagctggagatggcgtggggaacagtgggagtttcctgcgcgcaggggaagaaggcagtgctccacgggagagacggcttgaagaaaaagagtggcggctag

SEQ ID NO: 10643 - DNA, 411 bp, Zea mays
  Peptide Sequence Number=SeqID_52422
atgaggggagagaagcaagggagagaagcaggggtccggcgtccggcgtcagccgtgcaggagagaagctacagtcgcgtctccggcatcccgcgaagctacaaccgcgtgacgcataagcccttccccatgccaccatcgcaggcacttaccgatgctgccatcgattatggcgggatgtcaatatgtatggccatgagttggaatggaaggtggtgcctgacttcggtgcatctgcaagctaaaggatactgcaacgtcttcgacaatcacacgctcgacaaccaggcgcaggacagtgtcatcaggactcaaagcctagaaggtgaagactaccgcaacgacatcaccgtcctgtatggtgttgccgtgatggtatggagtcagacgaagaattcaattagtttgtaa

SEQ ID NO: 10644 - DNA, 213 bp, Zea mays
  Peptide Sequence Number=SeqID_52423
atggcggtcagacgggggattcctgcattgctcttcctagaaactgtagcgatggtcgataccaggaagggaggcggaattgatctacctaccaacccgttgaaccggagggtgcttagacaaaagcaagccaagatgaatcctttgaatcctctaaatcctccaccaattgggattgatccagtggttgcggctcaaatgcagatgctgtaa

SEQ ID NO: 10645 - DNA, 504 bp, Zea mays
  Peptide Sequence Number=SeqID_52424
atgggggttttcaacccttgctgctggaggtacaagaagaagggggcactggagcattgggcttcatcctcaaagcaggggagggcgctacttgggtgccaaggctgctggccgagtagaggcatcggggccagtgcgacctcggccatggagctccttctggaatttctgggcgcctgctggtttgaggaagaaggagggggaggaggggtgcgcgcccagggaaagagagttggggaggggcgctcgttagagagaggagaagccatggatggagctcggaaggggggaggaagaagacctgctcaccggcctggggaaggaggaccctgctgcatgggtgccgagtgccatggctggccgaggggaggaagtggaggagctgagctctctgctggctgctcgtcgtggacagcagagggagggaggaagggcgccatgggagaggagccgagctccctgcatgctgctgtggggaagaggaggaagaaacgtgctggctga

SEQ ID NO: 10646 - DNA, 231 bp, Zea mays
  Peptide Sequence Number=SeqID_52425
atggagctcggatggggggaggaagaagacctgctcaccggcctgggaaggaggaccctgctgcatgggtgccgagtgccatggctttcgaggggaggaagtggaggaactgagctctctgctggctgctcgccgtggacagcagagggagggaggaagggcgccatgggagaggagccgagctccctgcgtgctgccgtggggaagaggaggaagaaacgtgctggctga

SEQ ID NO: 10647 - DNA, 1155 bp, Zea mays
  Peptide Sequence Number=SeqID_52426
atgtttttcgatgggtcgctgatgaaaacaggagcgggcgcgggcctgctcttcatctcgcccctcgggaagcacctccgctacgtgttgcgcctccatttcccggcgtccaacaacgtggccgtgtacgaggctctggttaacggtttgcgtatcgccatcgagctaggggtccgacgcctcgacgctcgtggcgactcgcggcttgtcatcgaccaagtcatgaagaactcccactgtcgcgacccgaagatggaagcatactacgatgaggttcggcgcctggaggacaagttctacgggctcgagctcaaccacatcgcccgacgatacaacgagactgcggacgagctggataagatagcctcggggcggacaacggttcctccggacgtcttctcccgagacctacatcaaccctccttcaagatcgacgacacgcccgagcccgagaaggtctcggccctgcccgaggcgcccttggctcagcccgaggcgccctcggctcagcccgaggcaccctcggcccccgaggcgcctcgagcccttgttggaaatgccttccgacagggtttctactggccaatagcggtggccgacgccactaggattaaggcacccgggggctacacgcacctgctggtcgctgtcgacaaattctccaagtggatcgaggtccgacccctaaacagcatcaggtccgaacaggcggtggcgttcttcaccaacatcattcatcgctttggggtcccgaactctatcatcaccgacaacggcacccagttcaccggcagaaagttcctggacttctgcgaggaccaccacatccgagtggactgggccgccgtagctcaccccatgacgaatgggcaggaactcccctcgatggtctggagcctgaggacgacgccaagccatgccacgggcttcatgctgttctttctagtctatggggccgaggctatcttgcccacagacttagaatacggatccccgaggaggaaggcacacgatgaccgaagcaatcgaaccaaccgagaagactcactggaccagctggaagaggctcgggacatggccttactacactcggcgcggtaccagcagtctctgcgacgctaccacgccagaggggttcggtcccgagacctctag

SEQ ID NO: 10648 - DNA, 555 bp, Zea mays
  Peptide Sequence Number=SeqID_52427
atgtcttgtcttcaattgtccactaacgcccgtcaattgcttagtttccccaatccgtgtttccgccaccgcaaaagagacctcaccgtggtcagcttgctccaggaagctccgcctcgcccgaccccagagctcgggctcaacctcgacgccggacgacgaactccgcctcgcccgaccctagggctcggactcagcctcgaccacggaagacggactccgcctcgcccgaccccagggctcggactcaaccccaacctcggacgacggtctccacctcgcccgaccccagagctcgggctcaacctcgacgtcgaacgacaaactccgcctcgcccgaccccagggctcggactcaacctcgacctcggacgacggtctccgcctcacccgacccccggggctcggactcaacctcgacctcggatgatggtctccgcctcgcccgacccccgggcccagactcgacctcgacctcggaggagcctccgcctcgcccgacctcgggctcggaccgaccacgtcacaggggggccatcattaccctacccctag

SEQ ID NO: 10649 - DNA, 264 bp, Zea mays
  Peptide Sequence Number=SeqID_52428
atgaacgaaggccttaagccgaagacaagtgtttgttccatatctgaagagatatctgaggagaagaagatatccgaggaggagaagatgtatgaggagaagaaggttgcagatccttttattgctgggttttatgaatccatgacaaaaacaaatacagagaaaatcacaaaggagataatggcagatttatctgaagattctgatgacagtgatgaatttgatgtggaaagtggagatgaagattctgaggatcggccctag

SEQ ID NO: 10650 - DNA, 321 bp, Zea mays
  Peptide Sequence Number=SeqID_52429
atgggcggggtggcgactgtgatgacgaaggcagatggagtagtgttatcacgtcgtggtacgccgatgccccaccgaatgatgtgttggcccaagcacgagaaggataggcacatttccaccagctctggtggtgtgaggcaccgaaatgggcgcacggttgttggtgcaggcgcaccaacaggctgtgatgagggtgtcatgggcgtgctcggagttctagacgtgggcgcagcctgtgaaaggagagatggggagcggtattgccggggttggtttgcccctggcgcattgttggggacctgggcgcgaggctcataa

SEQ ID NO: 10651 - DNA, 1305 bp, Zea mays
  Peptide Sequence Number=SeqID_52430
atgccggagcactggagtactggacgccgctggacggctggagcacttggaggctggagcagagacgtcggcagaaaccagagaggacagaggagaggagtagggtttttggcggctgggagggtttctgctataaatggactttatgttgcacttggatcaccaaagctgccaggatggtctgctagtgctggagatccctgtggtgagagctggcagggtgtcacatgtaccggctcaagtataacctcaatagttttcaatgctgcaaatctgggaggacagctaggcagcctggggaacttcacttcaataactgaaataaatcttagcaacaacaatatcggtggaaccataccagaagatctacctgtcacactgcagaatctgtttctctcagataaccaactaactggaagcattccaatgtcattatcagaactccatagtctaacagccatgtcactgaatgataaccatctagatggaaagctaccagatgcatttgattccctcacgggacttggatatttcttccaacaacttcagtggtccattaccaccttcattgggaagcttgacatcactgactacattgatgttctattgcacaggcacatgcaagataatcaactatctggtacccttaatgtcttgcaggatctccccctcaaagacttatgtcgatgttaccctagagacgtgatacttagaagggcaccatccgaacgatgtagttgcatgtgtactattatggatgaagataaaatggatcaataccccaagtcgcatcagaataagcagagagctggtgctagaaaagaagaaacgacgatcaatggtgccacgaaggtaccgaagaacacgaagacggtgaccatagtggatagtagtgggtgcagacatgaactgactcagaatgtgaacaacataggagatgtcaggacgagttatgccaaggtagataagactgccaacaagatgatgatagcgagtgggatcaacaacatgaacaccatcagtgacacgaagatgaaggtgacgatccatgagagtgtccacagaacgatgatcagtaagactagcacaatcaaggatgtcctgaatgtatttgcgctgacagaggtaatagccatcaggtgtggaggtgacctcaatcccaaggaagaagctaagaggacccaagtcagacatgtggaactgcgcactgagtcgtgccttgacgaaggcaatgtaatcaatatcatcaccagtgatcaacatatcatcaacatagagaagaatgagggtgcgacctcgagatga

SEQ ID NO: 10652 - DNA, 219 bp, Zea mays
  Peptide Sequence Number=SeqID_52431
atgggtgccagggggctcaccatatctcatgtcaagagtcatctccagttggtggacattgataaaaaggagatggagatgatcaaggacctgcctgaagaactcaagcaggacatcaagcgctacctctgcctcgagctgttgacagaagctctcacttcttcacttctagatggagtccttttgatacttggggtgttcgatgtgaagaccaagtag

SEQ ID NO: 10653 - DNA, 213 bp, Zea mays
  Peptide Sequence Number=SeqID_52432
atgtcttggacacgtgtcccgccagtcctcgaccacatcggcaacacggcccgctccaccacgttcttgtgcgagtgcgtgttccaggtatcagctaccacgactgctccggcctttgagctgttcgacacgctgcatgtcgaggcagctgctgatccacaaattgctcagctgaaggcgcaattagctgcagggacagccagggaaggatga

SEQ ID NO: 10654 - DNA, 478 bp, Zea mays
  Peptide Sequence Number=SeqID_52433
atggaggcgcgcggcggcgcggggacagggaggcacgcgacggcgcggggacagggaggcgctcggcggcggtggggaagagggtggcgctcggcggcggtgggggagagggtggcactcggcggcggtgggggagagggtggcgcggggacagggaggcgcgcggcggcgggggcaggaaggcgcgcatacaggaggccgaggcgtgctcgaggtgttattgcagtttatgcaaatatactctgcgcatattacgtgaatcgggcccacgatcctgcccacgccgtcactataaaaacacccccacgccgccagggattaggttttagcgggggcggcggttccctcgggcgtgcgagcaggcgccagagagcgagagagccccggccatcgcggcgctctccaaccgttttgattggcggtcgtggagggggcacgaagaggaccctcagcgtctgcttctgtacagcttcaggag

SEQ ID NO: 10655 - DNA, 1140 bp, Zea mays
  Peptide Sequence Number=SeqID_52434
atgacagaacaaaacatagagatcgatcggttcttcatcaaggagaagctagacaatggtactttagagctgggtcatctgcgagggataccacagtatgcagaaggaagccgcgtagaggtgatgtgtgataaacagggcagagtttggaggccggctactatcaagaacatggtcggcggtaccaactatgttgttagctatggaaatgggcagagctcgattgaggtcctccacacaatgttcattcggcggccagaacccatccaaatggaagttgaagcccctaatgatagcaataaaggtttcacctggaaacctgtacgaacttgcattcatacgctgacaggaccaaaactgtttccagcagccaatgatattacaattgtatcatcacaacatccttgggctgaacctctacaacctgtttctgagaaatcacctggaccatcttcattgcttcatcctgttgtgatggcggatacatcagcattcatggcattggcagtgcctaacagtagtgatctttcaacggcgttctcgacaacttccttgctgctgatgcccaatgacaaaatggaggtcttccagaagctaccacagattccacacttccgcgaggcatggaattgccctccagaacttcgtgaaggaagagccctaggacttatggtctgttttgcaaacatggccaaaagcataaaagacatgcgaattcaggaggaaccacgactttatcaagagaagatgaacatcctgttagagatggaagagaatgggtttgaaactgggcccctgaaggttcgtctccataatcttctttgtacaaggaatcaccatatgaatctcaagagcaggaaagtaagattagagaaggagatacttgagatagaagcaataaactgtggattagagcagcgactcaagttccttgacatgtgcatcatggggatggaggagaagaaataccaagagatgaaaggttcacttgacatccaaaaaacagaaaattgttcacttatttcaaagctccaagtatatttgtgtcaagttgaggaatcactcaagtatgctgaagccgatttttgtagtattgctactgcaccgtggcaaccacatgttgtgccttcgataccgtaa

SEQ ID NO: 10656 - DNA, 1845 bp, Zea mays
  Peptide Sequence Number=SeqID_52435
atgtcgaagagtggtaggcaggcagaggaagacgatggatcaaagcattggtccaggagcgtcacatgtgtcgacgggaagaaggtgcaggagagggcggcatggggagccagcgacggcggcggcaacctggtgcaggacgccgtcgactacaggggctgtcgggcggacaagtcgagcacgggcggctgggtggcggcggcgctcgccctggggatcgagctgtgcgagcgcctcgccaccatgggcatcgccgtcaacctggtcacgtacctcacggataccatgcacctgcccagcgccgcagctgccaacgtggtcaccgacttcatgggcacctccttcctcctctgcctcctcggtgggttcctcgccgactccttcctcggacggtacctcaccatcgccatcttcgccctcatccaagccatcggcacggggctcctggcagtgtccacggaggtgcggcagctgcggccgccgccgtgcggacccggcgcggctgggccgtgcgagcaggccacggggttccagatgggcgtgctgtacgtgtgcctctacctcatcgcgctgggcaccggcggactcaagtccagcgtctcgggcttcggcaccgaccagttcgacgagcgcgacgcgcgcgagcgcgccgccatgggcctcttcttcaaccgcttcttcttcttcatcagcgtcggcacgctcctcgccgtcaccgtcctcgtctacgtccaggaccacgtcggccggagctgggcctacggcatctgcgccgccgccatgctcgccgccatcgccgtcttcctgtctggcaccaggcggtaccgctacaggcgcagctccgggagccccatcgtgcacatcctccaggtcctcgtcgctgccgcccggaagcggaacatcgccaagcacccgctcgccgtctccgcgctctacgaggaccgccccgagcacgcgcgcatcccccacaccgcccagttcccgtgcctcgacagggcggcggtgatggcaggggacgacgacaacgaggtggggcacgacgggcggccgacgccgaacccgtggaagctgtgctccgtgtcccgcgtcgaggaggttaagatggtggcccgcctgatgccggtgtgggcgacgaccatcctgttctggaccatctacgcgcagatgatcaccttctccgtggagcaggccaccaccatggaccgccgcatgggcggcttcgagatcccagccgcctcgctcaccgtcttcttcgtcggcgctatcatgctcaccctcgccttctacgaccgcgtcttcgtcccgctctgccggagcctcatgaccggccggcaggggctcacgaacctggagaagatcggcatcggcctggtcctctccatcgtcggcatggccgccgcggccatatccgagaagaagcgcctcgccgtcgccgccacaagtggcgtagcagggcatgggtcgctgcccatcagcgtgttcatgctgacgccgcagttcctgctggtgggcgcaggcgaggcgttcatctacacggggcagctggacttcttcatcacgaggtcgcccaagagcatgaagaccatgagcacgggcctcttcctcaccacgctctcgctcggcttcttcctcagcagcgcgctcgtctcgctcgtcaagagctgcacccggtggctcggcgacacaatcaaccacagccgcctcgactacttctactggctgctggccgtgctcagcgttgtcaacctcgtcgcctaccttgtctgcgccatgtgggccacggcaccgaccagcagccaggcggagcagccgcagcccgcgatggtcgccgacgagaaatgctag

SEQ ID NO: 10657 - DNA, 603 bp, Zea mays
  Peptide Sequence Number=SeqID_52436
atgggacgaccatggtacgagaatttcatggccatccctaattgcacctacctcaagctcaagttatcgggaccacacggtgtcatcaccattgtgtccttattcgggcacgcctatgagtgcgcagtggaaagctacgagctcaccttggagatcatcacatccaaggagctcacaatcatccgagagcagttggtcgagaacgcaccaaactctatgaaatcagccagatccttcaatcaacgaaggacgtcaaagaaatcctcactaaccatgaagactcccacaaaaaggtggtgcgcatcagcgcatcgcttttcgacaagcgcgcccgtcaactttctttacgtgaataaggacatatttgtgtggaaaccctcaaatatgctaggcatcctgagggaagtcgtcgagcattctttgaagattagggtcgactccaagccagtcaaggaactcatgcaccacttcaacgaggagaaatatagggcgatcagcgaggatatcacaaagcttttggtggccagattcatcaaggaggtgtatcatcctaactggttagccaatcttgttgttgtacaaaaaatgaatgtgaaatggtga

SEQ ID NO: 10658 - DNA, 1986 bp, Zea mays
  Peptide Sequence Number=SeqID_52437
atggcacaaatattgtcagaacctttccttcgccgaacaatgttgactgaatggtttgtctgcaacttaaataattcaaatgctagagacttgacttattttgagtttccatcgaaatggagatgggatgaaaaaacgcggagttggaggccaagactagcaagagagagcaaaatagggcgcttatattatgtccatccatcagcaggcgagagatattatctaagaatgttgttacttacagttaaaggtgcatgtagctacgaagctcttcgaacttttaacaataatgtatatccaagttttaaagaggcatgtcaagcatgtggccttcttggtgatgataatgaatggttacatgcttttgaagaagcagcaacttgggccacagctctgcaactacgccaactatttgttacaattcttctatattgtcaaatcagcaacgagcattcattctttgaaaaggtttggaagctaatgactgatgatattgaatataacatacaaagagcacttagttgccctaaatttcaaatgacagataatgaacttaaagatgaattactaactattctctttaacatggtgggaatatacatgactttaacctacctcaaaagtgaatcccaaagtctcttctcacagcttaatgctgatcaattaagtgcattcaatacaattgtggaatgtgtcctttctggtcgacctggtttgtactttgtttctggatatggtggcacaggaaaaacattcttatggaatgcaattgtattatacttacgatctgaaggaaaaattgttttaattgttgcctcttctgttgttgcttcctttctacttcctgctggccgcacagcacactcacgtttcaaaatttcatgtgatctagattctaacagcacttgcaatatcaagaaaggaacgatgcttgctgacttaatcaaacgtacctcattggtcatttgggatgaagcttttatggctcataggatgacgtttgaggcgttggatagaagcttccgtgatatactgtcgtctgaatcatctaatagtcaaaatatgccttttggtggtaaagtaattgttttaggaggtgatgcaagacaaattctacctgtcattgaaggtggcactaaatcacaggttcttggtgcagttataactaattcatatttatggcactctatcaccatgttatacctaacacaaaatatgagattatcttcaactgaccttagtattgatgctaaaaaagaggtcgagtcattcagtaaatggattttagcaattggtgaaggaaaagtaccagcaagagcaaaagagaatgaaacagagaaatgttggataaaattacctcctgaaatacttcttatgcccatcaaagacaatctatcatgcattgtccaaactgcatatccaaatatagaaacaatgtatgataacattgaatatctaaaggaacgtgccatattagctccaacaaatgaagttgtcgacattgtcaataactatatggtctcaaccctacctggtgacacaaaggaatacctaagctttgatagcattgcaaaaggacccaatatgcatgcatcctatgatatgctatatccaatagattttttaaactccatcaacggtaacaactttccttcacatagcctgattttgaagaaaggaacaccaattatgctcctacgcaacattaatcaatctcaaggtctttgcaatggtacaagattgattataacaactttgggagatttagttatagaagcgaagattatgaccggaaagcataaaggaaaaagtgttgtcatacctcgaataagcttaactttgaaaaatccaagatatatgtttgttttagagagaagacaatatcctataaaagtatgctatgcaatgacaattaataagagtcaagggcagtctctatcagaagtggttgtatatttgaaaaatccagtgttcacacatggttag

SEQ ID NO: 10659 - DNA, 339 bp, Zea mays
  Peptide Sequence Number=SeqID_52438
atgaagtgcgtcgaagggctactccagctccactaccgcggcgtcgcgcacctcgacgtaaaacctgacaacatcctcgccaactcccgtggggaaatcaagatgggcgacttcaacatttcgcgggtcctctacgtcgttccttaccacgctagggtcggtcggccggaggaggaggacaagccgggagagcaggaacgacggggagactggaatgcagggactcaccagaaggagaagaaccggagccgccgccacgctagggttgaaccggagccactagaagctcgccgtcgactagcgcacaggccaaatccgaagccgccgccgccacgctag

SEQ ID NO: 10660 - DNA, 258 bp, Zea mays
  Peptide Sequence Number=SeqID_52439
atggccccctgcaaagtagcagcagccttactcctgttgatcacaacaatttccgtcaacaccgtaaccgggtcgcgatgtaacgctcaggagaagaaccagattgtgagcttgtgccaaatgtacatccagagaggaaccctcgttcagctcccatcccaaactgggccatgctgtgcggcagtgagagagctggagagggtacacaggggtcatgctgtgaagggcgcgatggcgtggaatggatggtggtggtag

SEQ ID NO: 10661 - DNA, 615 bp, Zea mays
  Peptide Sequence Number=SeqID_52440
atggccggctgttacaccccgggggttttcaccccggggcccccggggagccaggggcaagggccccggggccccggcccccgggcccccggccccttaaccaaaaaggaaaaaggtgcggctggtaacccgggcggacccacactccccccggaggggctagtggggggccaatccccccgggctgggcggggacggttcccccccgacaagggggggacgggggtccccccccggaaggggggggagtattcccccccccccagggagggtttaagccgggggcccccccctttaaaccaatcccaaaaccccccctccgggaacccggaaagggtcaaccggggaaaacccggggatgggaacccgggccccccccggaggaagctggggggggaacaagggcggggtttaacggggcggcagggggccccccccgggaaggggccgaacgggccgggcaggggccccgcccgcgctgggcagggacggagtcgggcgcgggcagggggaagagggagggcgcgcgcgcgggggagaagaggagggagagggagagagagagaagagaaggggaggggaggcgagctcacctcggggtccaaaatccggtga

SEQ ID NO: 10662 - DNA, 813 bp, Zea mays
  Peptide Sequence Number=SeqID_52441
atggcattcgtgtccacggcgcggcgtccaggtgcgtcccgccacggccgacgaccccgcctcgcccatgtccggcggtgctcagccccggccgtggcggcgtcccggcgcgaccccgacgggctcccccgcccctcccctcggcgtggccagccgtggcggcgcggcgagccccgcccccgcgcgcgcgcccccagccagccctcggcccgccggcctcgcccgctctcgatgccccgccctccccggccaaggccgccggtcccgctcgcccgctcgcggccccgtgcccgcgacggcgcgctcgcccgcccgtggccatggcgcggtggcccgacgcggccccgtctcgcccgtcggcgcccggcgcgccctccccggccggtcatggcacggcgacccgcggcctcggcggtgcgtgcggagccccggcgcggcccgtgcacgcacggtgcccccggcgagctcgccgcacccgcggcttgcggccacggcggctcggtcccgcccgcattggcgtgtcccgcccctgcgcagcgcggccccggcccgacgcagcttcagctcgcgcggccgtggtgcccctgcgtagcgcgtgcgcggttcggccccggcgtgtgcgcgactcgttcgcgacacgtcagcgcggccttgcgcgtacgtgctcgcgtggtgcacggtgcgtttgcgtggctcgtcgtgcccgcgacgcaacacatagcgtcctgtcgagtccgcgacacgaccgtctaccccgagccacccgtctacccccccgtgcattctatgcgtgtgaccgcgttatttaattaa

SEQ ID NO: 10663 - DNA, 1878 bp, Zea mays
  Peptide Sequence Number=SeqID_52442
atgatgaacccagtggtgacagcggcgctgtacaggctggtgaaggagagcgcggcgatgtactgcgagctcacggaggtgatggtcgtgctcttggaccgcttcgccgacctgggcactcctgcctgcgtgcgcgtccactccatcttcaccagtactgcttggaatttgggtatgctgagttcacgcttcacagacagaactgcttggaatttggatagtgcactaaccacagttgagacattagcatcagcggctatttgtggcatcgtacattcaataataggtggacaaccactattgatcgtgggtgttgcagaaccgacaattatcatgtacacttatatctacaattttgccaaaaatcagccaaacctgggagaaaaaatgtttctgccatgggctacctgggtttacatctggacagctgttatgctgttcctcatggcaattttcaacgttgcagctattctaaacaaatttaccaggtgtactatatactgcattagccagcaggagcgcaaggtcatcgctggcactgcatggcaaaggagcttaattgcggactacggtgttccactaatggtgatactttggacatcattgtcatattcattgccaagcaggatcccttcaggggtccctaggaggctcttcaccccacttccttgggaacccaagtcgctccagcattggacagtagcaaaagatctgttttcagtccctacagtacatatattcctggctattgtgcctgccaccatggtcgcagggctctatttctttgaccacactgtagcttcccagatgagtcagcagaaggaatttaatttgaagaacccatcagcctaccattatgacattttggtcctaagcttgacaaccttgatctgtggtcttcttggcattcctccatctaatggagtactcccccagtctccgatgcatacaagaagcctagcggtcctcaagaggcagttgcttcgcaagaagatggtccaaactgccaaggagggcatgatgaataatgctaccagttccgaagtttatgtcaaaatgcaagatgttttcataaaaatggaccacggaggcgacactgtttctgctcacaaagaaccgaaggacctgaaggatgcaattattccagaagggaatggatcaggaacagtgcctgaagtatttgatcctgaaaagcatgtagatgcttacttgcctgtccgggtgaatgagcagagagtaagcaatctgttgcagtccctgttgattgctggttgtattagagttacaccgctcattcagaagataccaacatcagtcctttggggttacttcgcctatatgtccatcgacagccttcctagaaaccagttctgggagaggatacaacttcttttcatcacgcctcaaagacgctacaaggttcttgaaggagcacatgcatccttcatggagtcagtgcctttcaacacaatatgcaccttcacactcttccagctaatctatctgttgatcgtctttgggatgacatggataccagtagcaggaatcctcttaccactgctcttcttcttcttcctcattatcatcaggcagcacttcatcccgaaatattttgatccgagccacctgagggaattagatgcagccgagtacgaagaactgaaaggttttacacctgatccatcagtgtgtgaggacgagtctgttcgcagcggagatgctcagcctggatatgcttccgaaatactcgaggaattcacgactcaccgtggagagctgaagcgcaggaactctaccttccatgatgggagactacttcagcttaactctgtcaagatgacgagagagctttctcgggttccttcttggcttacatga

SEQ ID NO: 10664 - DNA, 654 bp, Zea mays
  Peptide Sequence Number=SeqID_52443
atgggaaccaatgggcatctcgacctcgacgagggagcccatcgcgcccgcagtccgccctcccctcgccgcctccccagaccgcagtctctcctcaacctccctccccaaggagctggcggcagcgcggctgcgtcgggaggaggaggacgcagaggacgccgcgcgggggctgcggcaggagctcgactccgagcgggcctccccggagatggcagccagatccggccattgagccccctaaccgagcggatccaaggtactacacggtcttgccctcgcccttttgcttgctttgtcgtcctctcctcaccgcggggggacccgacgtacgagcaggaggtgttcctcgccacgcggtgcggcaggcgcatgctcgacctgtcccggttccgcgaccgcgaccgcgcgcggtgccgcgactggtgcttcgccgcgttcgtgctcgcctacgccacgtacctcgacgaccggctcaaagaacggatgcaggaccgcggagcaggcggggccagcccgggcaaatggcacgtcgacggcgaccctgtcgggatggcgtgccaggtggccgaggcctgggagctcgtgccgcggggaaggtcggcgtcggcgacggagacgacgacgacagaggatgtcatcgggaaggcatag

SEQ ID NO: 10665 - DNA, 654 bp, Zea mays
  Peptide Sequence Number=SeqID_52444
atgcccgacgaccaactcatgatcggcgacgacgcggcgcacggcgaggaggcctacgcgctctggggcgattgcgagagaaagcagcaaaaatctggaggaaatgggaagaaaggtggaggaaatgaaaagaaaggaataacactacagcagagagaacagcgtgccgtgtcccgtgggtcaccacagcacccgcgctcctacagaaggtggacgacacactcactgtcttccacagtccacacgtacgccgtcgccgggctccacctccacgtcgtcgtcgatgtcctcgagggcctcctccgcacactgggttttcttcatggccctccacctccaccttccgggtgcgtgtgcgccctcttcatcgtcgcttggaacgtcgtggtcaccacgggtatcatcctcgtcgttggcatcttcgtgccgctgcccgctgcgcatgcccgactaccagctcaagatccgcgagcgacgacgcggcgcacgggaagggctctctggggcgacggcgagaagttcgaggtgacacgcaatgaggcggcgagggcctgcgcgtggggcgactgcatcagggaggagacagcggaacagcggagcaccggctgcggctggccggaatgggaggcagaggcatcccccatccagttgtag

SEQ ID NO: 10666 - DNA, 348 bp, Zea mays
  Peptide Sequence Number=SeqID_52445
atgtcgagagattacgccaagaaggagattatgaccgacgaaaaggccgcaagctcgaggaggactctttcaagagagtccggcaacaagaacaaggaggaatcctcttccttcatcaagtcgcttcagagaggtgacaagaagaagaagatgaagaaggtcgtctactacgagactgactcttcgtcaccctccacatcaagctctgagtcgtccgtcgcttctaagcgccatgagcgcaagaagtataaaacagggccaagagaagaagaaatgcaatggaaaagtcttggttgtgtgcagccaaactccagctcagtgtttggtgcccaggctgaccgacgatga

SEQ ID NO: 10667 - DNA, 423 bp, Zea mays
  Peptide Sequence Number=SeqID_52446
atgtccggtgagcccaccccgccctaccgcgccgacctccgccgccccggcccccggcgagcccgcgcccgctcccgcctcggcgagccgccccagccccgacccctcgttcggccgccccgccccgccgcgccgacctccacagccccgcctcgcccccggcgagcccgccccaccccttccccgcgctcggccgcccgccccgtgccccggctcggccgccccccgtcgcgccccggctcggccgcctgcccccgcgcccggccgtgtcctcgcccgtccgcgtcctcgctcgctcgtgctcgcttgccccggcgtgcttgcccgctcgccccgccgtgccttgctcgcgttgtgacggccccgacgtggcctcgagttcggcccagcgtgcctatggcgcgcggccttgagctcggctag

SEQ ID NO: 10668 - DNA, 1641 bp, Zea mays
  Peptide Sequence Number=SeqID_52447
atgggtgaggttgcgactatgtctctggaggtgatgaagttggctgctgtacctaaggccaacgttgacatgttcgttgctcataggagcaaaagaagggtggtgtctagtgctggtgactcaattgagaaggctaccaagctcaaagctgccagaaacctcgatagttcttttgctgaagtccgacgaggaagaagagattcgattcgagggagggagggagggagctcgttgtctcagttggccatggcacccgcgccgcacaacggactgaacaacaaccacccggtcgcgcccatggatgtgtcggtggaggccgggaacgccggagccgccgagtggctagacgacgacggccggccgcgccgcagtggcacgttctggacggccagcgcgcacatcatcaccgccgtcatcggctcgggagtcctctccctggcgtgggccatcgcgcagctgggctgggtggccggccccgccgccatgctcctcttcgccttcgtcacctactacacggcggcgctgctcgccgagtgctaccgcacgggccacccggagacgggcaagcgcaactacacctacatggacgccgtgcgctccaacctcggcggcgtcaaggtcgtcttctgcggcgtcatacagtacgccaacctcgtcggcgtcgccatcggctacaccatcgcgtcggccatcagcatgaaggccgtcaggagggccgggtgcttccacgcccacgggcatgcggacccctgcaagagctccagcaccccgtacatggtcctgttcggcggtgtccagattctcttctcgcagataccggacttcgatcagatttggtggctctccattgtcgccgccgtcatgtccttcacttactcttccatcggactctccctcggcatcgcacagaccgtctccaatggtgggttcaagggcagcctcactggcatcagtattggcgccggcgtcacctccacgcagaagatctggcacacgctccaggcgttcggcgacatcgcgttcgcctactccttctccaacatcctcatcgagatccaagatacgatcaaggcgccgccaccgtcggagtcgaaggtgatgcagaaggcgacgcggctgagcgtggcgaccacgacagtattctacatgctgtgcgggtgcatggggtacgcggcgttcggcgacaacgcgccggacaacctcctcaccggcttcggcttctacgagcccttctggctgctcgacgtcgccaacgtggccatcgtcgtgcacctggtcggcgcctaccaggtgttctgccagcccatcttcgccttcgtggagcgccgcgccgccgcggcctggccggacagcgccttcgtctcccgggagctccgcgtgggtcccttctccctcagcgtgttccgcctgacgtggcggtccgcgttcgtgtgcgtcaccaccgtcgtcgccatgctgctgccgttcttcggcgacgtggtgggggctcctcggcgccgtctccttctggccgctcaccgtctacttccccgtcgaaatacgctcagcgtcagctgtctccttgtctccgtcgccgctgcagcaggatccattgccgatgtcatcgccgccctcaaggtctacaagccgttcagcggttag

SEQ ID NO: 10669 - DNA, 372 bp, Zea mays
  Peptide Sequence Number=SeqID_52448
atggccaagaaggctaggcctgccccggtccggcgcaaggtgggcacgtcgatcctggcccccgcgaaggccgtgaagacggacgcaggttcatcggctggggctgtggctcacccaattctttgggttgctgccgcctgggatgttctccaacggtgggcggaggcggcgaggtttgccctggaagggcagaccgggcaagagatggctgatgtagagactgccgtgacgcccccagcaatgcctgctgaggccatccccggcccatccacaacggggttggggcaggcagacgcgacatcggcggtggtgtcaccgaccttgtcgacaccagcgatctcccatctcgattccccggtgaaagtcgcctag

SEQ ID NO: 10670 - DNA, 756 bp, Zea mays
  Peptide Sequence Number=SeqID_52449
atggccattcttgagcaccctttgcagctcgacacggtgatctggttcgaaagtctcgagttcatgtcccttggctttggctatgacatgggacgtctagaactccgccgctgtcctcctcgccgaaggagacagagacggaacaacgctccatgcctagtcaatgctcccaggaaggccgacgacgtagactcccttacgagggacatatcatgcgttagcttcatgcccaaagcatcaacatacgtcgctccaacaccgacaccaccagctcccctcctgcaggttgggagacgccagcttcaccggctcctcctcctacgggtcaggaggtgtgagctccaccatttgactgggggaccatcagtattcaatcccatcttctttcaaatgagcttcgatcttccaagctacccctatacgacaagcacctacaccagcatgtatgtggacctcccagaaatcttggggtacatagacttcgaggcagaaaatgatctgggtctaggcctaggcttctctaggctccgtggtcctagggccatgcgatatttcttgtccacatgcaaccacttcccctccgatggctccaacgactacagcttcgatgatgagggttacgacctgactcaggagtgcttccacacggggcacgaggagcatgatgaaggaaaccaacttggcatgcctcgggaggccaacgcgttgacaccatccccacacgccagagagccaagggagcagggtgcagtttag

SEQ ID NO: 10671 - DNA, 180 bp, Zea mays
  Peptide Sequence Number=SeqID_52450
atggaaagtacatttgttagaaatattgccagagacacctcagatcatgttccatgtgttatcacagtgaagactgatatcgccaagagtaaggcctttagtttgaaaactactggcttctacatgaagacttcaaacccattttccatggctgctagaacaagccttgtcctatattag

SEQ ID NO: 10672 - DNA, 165 bp, Zea mays
  Peptide Sequence Number=SeqID_52451
atggcgcggttaggacacgcggtggccaacggcgagggcacgtcggcgggtgcactcacaaatagtcactggatcatgcttaaactcaagtccaaagttagctctgtttcactaaagttctggatttcagcatggaccagcctgacagccaaacttgaggcttaa

SEQ ID NO: 10673 - DNA, 378 bp, Zea mays
  Peptide Sequence Number=SeqID_52452
atgggcagaggcaagagaggcaggggatggcctcaccgtgctgaccggaagcgcaagcgtcctctgagtcctccctcggaggactttggggactcggagtactcggaggagccgagctcgcccttctctcactccctcctagttctcttcctcgccactgaagcccaaagtcgtcgccgtcgtgcctcgccggagttcgtctacgctgtcgctgtccgccctgccgttcgtggagcctcaccggagcagtcgtgcccgtcgccgtcgaatgccctcaccggagccccgcacgacatcaagaacccctgccacgtacctctgctgcttgccaccatgtcgcgcaacccctcgccgaacaccttccctgcacgtgattaa

SEQ ID NO: 10674 - DNA, 453 bp, Zea mays
  Peptide Sequence Number=SeqID_52453
atgaccgagtcgcatatccctagtggcggcggcgctctattcggtcttcaacccacggcgaggcatccaccgcccccagctgccggtcgagtccacagcggcgcgcgcccaggcgaggggagggacgagctgggaaggtcgacggtgagctacaagcaggcagagctactacagggcgcaatccggaggagacacgcgcgaccggatttgagcaaagggcaggggcatggcggaggagcttttggccgtgggaatcacagggcgcctagaggtgtcttatacccaggtcaaagcggaccccaacccgaatcccgaagcctacggcggcgcgcggcgtgcacggagtccgagccacggagccaggagtccgcgtggcgtggggaaggagatgaagatggcactgaccgatgggtcccgcacggaaatgatcaaaagaaaagaaaaagggaatag

SEQ ID NO: 10675 - DNA, 519 bp, Zea mays
  Peptide Sequence Number=SeqID_52454
atggctgaacgcagagatccgagcagggacattcaccatgagctagcagagagggaaagaaaaacagggacacgacgcgagcagggagcaccagggacggccagcagaggaggttgcgcgtgcggggaaaaggagcggcgcgcgcagtggaggagcgagcagggaaggaaaagctccgcgcgcaggggaactcgacggctgggcacgcgacgaggaggctccagggagcttcacggcggccgccttgggagagctggaaggagcgccgacatggagataaagaggagggagcaactgggaagcagagaagctcggctgtcgcggctagcagggagatgggcgcacgtggccatgggagaaaagcagagccgagcggcaatggatggctgttccaggaagaaagaagcgcggccaggagatcaggccgcggccagcgcgcgtgggataggagagaagcggctcccgatttttcccagtgctgagcggtgggaagatagacgacggcttgaaaaaatctga

SEQ ID NO: 10676 - DNA, 840 bp, Zea mays
  Peptide Sequence Number=SeqID_52455
atggccacgtgcgcccatctccctgctagcttctctgcttcccagccgctccctcctctttatctccatggtcggcgctccttccagctctcccatggcggccgccgtgaagctccctggagcctcctcgccgcgtgcccagccgacgagttcccctgcgcgtggagcttttcacttcctgctcgctcctccactgcgcgcgccgctccttttccccgcgcgtgcaacctcctctactggccgtccctggtgctccctgctcgcgccgtgtccctgtttttctttccctctcggctcgtcctccacttagctagctcatggcgcatgtccctgctcggatctctgccttccgccatggccgcgtccaccactttcagctgccgctgtttttcctctggtgctcgcccctgcgttggtcatggcgcctggttgccgagtccctgcttcctgtgccctggcgcccagccccacgcggcctccctgctcggaccgcgttcttggctccagctcggctctgtcttgtgccggcatcctatactccatctttttccccagtgcgccctggtattcgctcgctgctgcgcgcgctctcccctgcctgctcgttatggacgcgggccgctacccatgccgagctccctcaacgttgttgattcctccatagtgcctgtcgacgaacttcgcttcttcggtttctcgccttcggttcggctcatactcgatctcgtcgtcgttatccagaaatcccaagagtcgggcaaagacgaagctagcagcgtggtgtttaccaagtgctcgacacaaaggctgaaccagaatccttaccgtgttcacgaatag

SEQ ID NO: 10677 - DNA, 1134 bp, Zea mays
  Peptide Sequence Number=SeqID_52456
atgagctcctcgccgttgatcaccgccgcggcgtcggctgccgtggtggcgctggctgtcgccaaccgcgtgctctacaagctcgcgcttgtgcctctcaaggcgtaccctttcttcctcgcccagctcaccaccttcgggtacgttgccgtgtacttctcgatgctctacacgaggtaccgcactgggttggtgactagagacatgctggcgctccccaagcaccggttcgtcgctatcggtttgctggaggcacttggagtctttgctggcatgtctgctggaggtagttttgttcatgttcactctgagaatgctatgctaccagggcctgcgattcctatactgtcccagtcattcttggtctggcagcttatcttctctgccctgcttttagggaggacatattcggccagacaagtcattggttgcttcctagtagtttctggtgtgattcttgctgttgcaagtggagcggatgatggccagcttctttcagatgtaaagttaatttggccagcactcatgatcgcttcatcagcatttcacgctggtgcatctattctgaaggaagctgttttcattgatggtgcaaaacgtcttaaggggaagcggccagacatatttgtggtcaattcatttggatctggatttcaggctgtttttgtctttcttcttcttccattcctttctaatttgaggggaattaagtttgctgagcttcctgcttatttaaatggtggtgctgagtgcttcttaaatgtcgcagaaagtccaatcggtcatgctttctctattgctttgggaaaaactgtttgtgtatgttgctcacttgctacttttcttacagactgcggaggagctccattcctgcctttgctgtttatagtggtgaatatggcattcaatgtctctctcctcaatttggtgaagatgtcatctgccattgtggcttcacttacagcaacatcagcagtgccaatatcgatctatattctttcacttcctttgccctacatccctcatggcacggaattaagcacgtctttcatcattggtgccgtgatattgctgatgggcctgattctgtataaccttcctcaatcgtcactgaaacaattgaaggctgattga

SEQ ID NO: 10678 - DNA, 474 bp, Zea mays
  Peptide Sequence Number=SeqID_52457
atggctggggcgaagattaaccgtggcggctccctccctctccgcttgggctctcaccacggtggcgttccgagacataatggaggggaagtggtgagagggtatggcttatgccccgaaggtaggactagtaggtcggttccgcgagattcattggccagctggatcacgacgaagtggttgcgatcgattctgttcgacgcgcactacagagatgcatgcgaggagaagtataggagcgctagagtctgtccacggggacccacccgtaagagaacaacccacggacgcgctcgcaagttcccgagaagtgaggggatgacgcctaggcccgaggtgtcggtgcaaggaggagcatgggcgagtggtgccgctggtgaacgggtcccacatggcagcgacgccgtgcatacacgagcagagcggaagtttaatgcacgtggggctgcttgtctgcgcactagggctttgtaa

SEQ ID NO: 10679 - DNA, 342 bp, Zea mays
  Peptide Sequence Number=SeqID_52458
atgggggaggtggcggctagggtttgcatgtggaggagggtgcagctgcttggagaggatgagggcgtggcggctgcaaagggtgatagagggagaggggtcggcttcaaggaggaccttcggcgaagaagcaggccgccaacagtgtcccatcacggtgctagatcgtttttcgtaacgagcttaatccgtgaaaaatcttcaaggcttcggaatgccgaaggtccgaaaaacaccttccctaagctcattgccgagaaacgattgaaatattttgagcgcgtggtggcccactacgcagcgggtacgaacgatttggtgattcacttcccaagcgcctag

SEQ ID NO: 10680 - DNA, 1218 bp, Zea mays
  Peptide Sequence Number=SeqID_52459
atggccaaagctcgggctacaaccccgaggtaccctaagacatatccgagacgcccggaagtgattcgttacagtatcccatcgaagggaggcatcgagcccttggaccccatcgaacgggaccaggaccaggccaatcacccgcaggtacttttggggcgcgtctttggttcactagccgactcctatcaaatggagcttgggcctccgctcggattacccattaatagctcatttgagatgtcatgctcgttgcccatcgagggtagcatggcgctttccccctcttcctccttacggaggggcgacaaagaggcgtataaccgaaaaattcaaggcacccctcgatcgtcctcttgcctcgtgcgggggctcacgggctacccttgcaactcatgctgcggaaacttgttggaaactctagcaatccaatgtagacgctcggggctccctttgcatccatgctttggccaggtgacggatgaagtgaaccacgtctatagaggggaagatagcacaccaagaacaaaagaacctccaaacaagtgtcaaaacacttctttggaaggcttgggggctactgttgggggtgcagaccagctctcggatgcaaactccatctcgcctgacgtagagctcggccacgactacccgctcccccacgaatcttgcagaaggccactccttcaactatggcacatgtcatcgaatctcaagacgggttcagtcgcaacctcaggcgtacctccgccttgcctgtgcccagttctgccctcgatatctatgatggaggacgcccccaacatcatcaaatacagtggagctgtcacatcccttaagaagctttttcccacgctaagcactgtgtcaaccactacagtatgggaaaaccctctccagggggctcgggtatgtgaccgagccctcggccttggcctcggctctaagcatgaaacaagcaggaaacatagtaggtgtaagataacttcatttagcattgaatatatattattcagtattagacaagagagaagactgcgcgtcaaattccagaaaggccaagggctttctcgaaagatttccccagacacagaaaaccccgagggtggaccgtgggttgatttgcactttggtcaaggactttttaacaaaatcgtcatcgcgaaagggtatcaggagattctgaccgtccgatccgaagcaaacgcgctagattag

SEQ ID NO: 10681 - DNA, 450 bp, Zea mays
  Peptide Sequence Number=SeqID_52460
atggcgcctcctgttgacatggtcggtccgtgccttgggtttggcgacgtggaggctcctccgaggtcgaggtcgagtctgtctttcgaggccgaggtcgagtccgagccctcgggtcgggcgaggcagagaccgtcggctgaggccagggctgagtccaagccctggggtcgggcgaagcggagtccgtcatcttccggggctgagcccgagtccgagccctgggtcgggcggagcggagttcgtcgtcttccggggctgagcccgagtccaagccctgggtcgggcggagcggagttcgtcgtcttccgagggagtcggagcggcgcaggcggcgctgtcctcttgtcagaccggtcagtggggcggcgaagtgactgcggtcacttcggctctatcgaccggagggcgcgcgtcaggataaagggtgtcaagccacctttgcattaa

SEQ ID NO: 10682 - DNA, 2235 bp, Zea mays
  Peptide Sequence Number=SeqID_52461
gtttatgcatccgggggttcaagctggattattgatagcggatgcacaaaccatatgacgggggagaagaagatgttcacctcctacgtcaagaataaggattcccaagattcaattatattcggtgatgggaatcaaggcaaggataagtctgaaacccaaaggaccctcaagcgcttcctcaggagagctcaaaatgagtttgagctcaaagtgaagaagataaggagcgacaacgggtccgagttcaagaaccttcaagtggaggagttccttgaggaggaagggatcaagcatgagttctccgctccctacacaccacagcaaaatggtgtggtagagaggaagaacaggacgctaatcgacatggcgaggactatgcttggagagttcaagacccccgagcgtttttggtcggaagccgtgaacacggcttgccacgccatcaacagggtctaccttcaccgcctcctcaagaagacgtcgtatgagcttctaaccggtaacaaacccaatgtatcgtactttcgtgtatttgggagcaagtgctacattctagtgaagaggggtagaaattctaagtttgctcccaaagcagtagaagggtttttgttaggttatgactcaaatacaaaggcgtatagagtcttcaacaaatcatcgggtttggttgaagtctctagcgacgttgtatttgatgagactaatggctctccaagagagcaagttgttgattgtgatgatgtagatgaagaagatgttccgacggcagctatacgaaccatggcgattggggaagtacggccacaggaacaagatgaacgagatcaaccatcttcctcaactacggtgctacccccaactcaagacgatgaacaggttcatcaacaggaggcggttgatcaagggggagcacaagatgatcatgtgatggaggaagatgcgcaaccggcacctccaacccaagttcgagcgatgattcaaagggatcatcccgtcgatcaaattctgggtgacattagcaagggagaggagctcaacaacttcaagcgcaatgaagtttggacactggtgcctcgtccgaagcaaaatgttgtgggaaccaagtgggtgttccgcaacaaacaggacgagcacggggtggtgacgaggaacaaggctcgacttgtggcaaaaggttatgcccaagtcgcaggtttggactttgaggagacgtttgctcctgtggctaggctagaatcaattcgtatcttgctagcatatgccactcaccattctttcaggttgtaccaaatggatgtgaagagcgctttcctcaatgggccaatcaaggaggaggtgtacgtggagcaaccccctggcttcgaggatgaacggtaccccgaccacgtgtgtaagctctctaaggcgctctatggacttaagcaagccccaagagcatggtatgaatgccttagagactttttaattgctaatgctttcaaggtcgggaaagccgatccaactctttttacaaagacatgtgatggtgacttgtttgtgtgccaaatttatgtcgatgacataatatttggttctactaaccaaaagtcttgtgaagagtttagcagggtgatgacgcagaagttcgagatgtcgatgatgggcgagttgaactacttccttgggttccaagtgaagcaactcaaggacggcaccttcatctcccaaacaaagtacacgcacgatttgctaaagcggtttgggatgaaggatgccaagcccgcaaagactccgatggggaccgacggacacaccgacctcaacaaaggagactccgactatactggatgtaaggtcgataggaagagtacatcagggacgtgccaattcctaggaaggtccctggtgtcgtggaactctaagaaacaaacctccgttgccctatccaccgctgaggccgagtatgttgccgcaggacagtgttgcgcgcaactactttggatgaggcaaaccctccgggactttggctacaatctgagcaaagtcccactcctatgtgataatgagagtgctatccgcatggcggaaaatcctgttgagcacagccgcacaaagcacatagacatccggcatcactttttgagagaccaccagcaaaagggagatatcgaagtgtttcattctcgaaagaggattgaaagggaaaaggtggacttggaccatgaaagacttccactgcacaccgatgagagg

SEQ ID NO: 10683 - DNA, 276 bp, Zea mays
  Peptide Sequence Number=SeqID_52462
atggggccaggattccctgcccccatatgtaaacatcgccgcatccctgggacaccatccatcgaagccagtcgtagaccccctaccaacgggagcaatcgtatctgcgcaccggatctcggtgagaactctttcccttggttcgttattgtttccgctaagtatagtccgcacccggtgaaagtctatggcgggatcgaggtttggggcatcgctagtgatggcgtccgcggttcgggcggtggcgccactctgcgagcgtggggtggaagatga

SEQ ID NO: 10684 - DNA, 444 bp, Zea mays
  Peptide Sequence Number=SeqID_52463
atggatttgtgcgagggagaaagaaagggaaggaaaggggataggacgggaggaggagcacgactgcttaccacgggtagatttctcttgctctatgtagtcgcagaggtagcaaggaagcttggaatactagtcatcgctgatgaagtgtatggaaacctggtgtttggggacaccccttacgtcccaatgggtgtctttggccacattgcccctgtcttgagcataggatcactatcgaagagatggatagtgcctgggtggcgacttggttgggtagctgtatgtgatcccaacaggattctgcaagaaaccaagatcattgcatcaataacaaacttccttaacgtttcaactgatccggcaacttttgttcagaactgggtgaaaaacgtgggagaaaaccgtcgaacttacgacaaattattatcgaacttacgataa

SEQ ID NO: 10685 - DNA, 420 bp, Zea mays
  Peptide Sequence Number=SeqID_52464
atggcgtgctccgttcctgctcctcgacctccctccgctcctcccagccatggccacccctctctgttcgctcgacttctagctccatggctgagctaccatctcccgtgcgcgtgcccctggcccctgctcggatttcgcctagccgagctccctcgctatggccatcgcgcccctgctccagatcggctcctcactggtgggttccctggtgccgctgcgagctcgctgtacctcctctccatgcccagcatcttccccgtcaagtccccctctgctctagcccttggccatggcgtctggcactctggcttctcccctccgctatctccctcctcaagccccgggcatcgatcccctgcgccacaacaaccgtctagtcgcgcctgtggcagaaccgcccgaattattccagcttaa

SEQ ID NO: 10686 - DNA, 180 bp, Zea mays
  Peptide Sequence Number=SeqID_52465
atggccaactccggccaaccttcccgtgcgccatgggcatggcgagaacctaaacgagtggatagggacgatgatgacgccacgaatgacggcatggagcggaggtacgacaagctcgtagtagcaccaaagaaactgctggtgaggagccgagctggagcaggggcgagacggccatag

SEQ ID NO: 10687 - DNA, 453 bp, Zea mays
  Peptide Sequence Number=SeqID_52466
atgctgcaagcagtgcttgaagtcgaaaatgcacgacaaaggagacggggacagccacgacacaatatcatggagggggggtgcgaccatagcgtggcgcacaaaaatagcagtgcccaaccaccatggccaaccttgaccagccttttcgtgcggccatggcacgacgagaacctaaacgagtggacagggatgatgatgatgccatgcacgacgttcgacagcgggattgacggcgatacaagatggtggcgtaaagagctgcaggctagcgagctgacgcaagtgacggagacagccgtgttcggcagcagcgcgtcgactgaggacaagcccgtagcgacgcacgatggtgaggagcttggcacggtggggagcagcgaccatctgcgtgaggagagcctggaaaacgatgcgcacaccaaaacgatcctgggcactgtgacaccctag

SEQ ID NO: 10688 - DNA, 615 bp, Zea mays
  Peptide Sequence Number=SeqID_52467
atggacaacctgtgtgcagccgtgaggcgacgatgtccacgcagcgagccgcatcctctgctcgctgcagctgtgcgtgggtccgcgcggagccgtggcccacaacagcagcgggtgaaggcgatgctgctctcgtgcgccccctacggcactatggaggaagcggacgcggggagggggcatctacagaccgcgaccgctggtctcaccggaggggtggccatgcccctgctccacgcaatgagccagtcgtggcactggtcagattcgaaggccaagctcaaacgatgggcggtgggttgcttgctgcagctgcacgtgggtccgcatggagtcgatcccaccacatcagcggtggcacctgctggtagctcgacggcgcacggaaatcgatggcccatgcaaggggagttcgacagcgcgcaaggggagatctccagcgcgcggaccaggcttgactttcgtgggggcacgaggcagttctcctccggaagggagaggctgagcggacaggtggcagctggctgtagggagattgactcctctggtgcgctctgcgttctcgacgtggggaggaacgacgacagggagggaggcggaggcatctcatcttag

SEQ ID NO: 10689 - DNA, 114 bp, Zea mays
  Peptide Sequence Number=SeqID_52468
atggcatggctgaatctcgttagctgcttacaggttagagccaagagtgaattgggccaacatattaagaaatacacgatcaacttcttattttcaggacagaggaagacctag

SEQ ID NO: 10690 - DNA, 1044 bp, Zea mays
  Peptide Sequence Number=SeqID_52469
atggactgctccaacgactgggacctgcaggcgctcgtgcggagctgcggcggcggtaaccgcagcgtgcagcattcgagggccggggccgacgctcctccaagggaggaagctgctatggtccgcggcggcggccgtgcggcggcccagctggagttgctcgggcaaccggtgggtgcggtgtcgtcgtggcggcgcggcctcgaccacttcgacgacctcgtggaccgcgaccgcgacccgcgccgcatgcccttctccgtctccgtcacgccttcatcatctcgcgagacgacggccacgtgtgggcccatggccagggccgggcaacagctccgccacgacgacgtgctcttctctttctcggctgccgctgcagcaggcgtcgtctccaggtccgggcatcagatggtccagcccaggaggcggcagcccggccgcaaggcgggaggtcgcactccccggcccaagagaagcaagaagaggcaggtgaagaaagtggtgtgcgaggtgccggcagccggcggcgtcgtctccacggacctctgggcgtggcgcaagtacggccagaagccgatcaagggctcaccctatccacggggatactacaagtgcagcagcctcaagagctgcacggcccggaagttggtggagcgcagcccggccaagcccggggtgctcgtcgtcacctacatcgctgaccactgccacgcggtgcccgcgatgctcaacgcgctggccggcacaacgcggaacaggccgtcgtcgtcgtcgtctgcgtcccccgacgacggcgaccacaaccaggaccaggagacgtcgtcggacggggcggcgccgtccgcggacaacaacagcaaggtcgacgacgacgacggcgccgccgccgtggccgtggccgtggacgagaacgacgcgtgcctgctggaggacgacggcaactgcccgttcgatggtttcttctggccgttcgacgacgacttggatcggtttttcgatgacgacggcggcggcgttcttggacgccgccggctgtcgctttag

SEQ ID NO: 10691 - DNA, 234 bp, Zea mays
  Peptide Sequence Number=SeqID_52470
atggcgtatgcagtgccgagcctctctcctctccactctcctggttgcggcttcccagggaaattggttgtcaaggggaaggcggggcatccgcttatatacaccgaagctagggggcgaccagctggcattcggttgcaaccacctccgggttcacaggtggggtttgttacgacggaggtgacgagtctgacgaacgggccccacgtgtcaggttttggatctgggttttga

SEQ ID NO: 10692 - DNA, 252 bp, Zea mays
  Peptide Sequence Number=SeqID_52471
atggcgctcgggtcgttgcaacgatctccgttcttcgcggttcgcgcggttgacggcacccaggtttacgccatggcatcgagcgcggatgaagtcaatgcgcagcgggtcccgaagtctgtgggagcgcgcaagcgcggcttggctggtgcgcatccgtgcggagcacgcgtggagccgcgcagccagcggagaccgcatcgcaggaagtggagaatctgttggggaggaagaagaagatcggacgactag

SEQ ID NO: 10693 - DNA, 228 bp, Zea mays
  Peptide Sequence Number=SeqID_52472
atgcagaggctcggcttggtggggtttatgccaggcttggcccgttggtttatgtgtcggcccacaagccacgcgacagcagtggtcagtgcaggacaaggtctggacacgtgccagtactggacccctacctatgccggggtcctcctcgtcccggaaccttgccaacgctggggccttccaggggatccagcataccttcttggggccctggacttgtatgtatag

SEQ ID NO: 10694 - DNA, 2313 bp, Zea mays
  Peptide Sequence Number=SeqID_52473
atgagcctcctgggggggctgagatggcggctgtccctgtgggatgctggcggctgctgcggggttgggcgagaaaacactaaccctaacctagtctggtgggctcttacccacccgtcaacagatttggaggatgagaaactgaagaggcatatgaaaccagattttctggacatggtaccttggtattcagggacatcagctgatttattcaagacagcatttgatcttatggtctctgtgactctttttgttgggcgatttgacatgcgcatgatgcaggctgcaatgaaaggaccaacaggcaacactccaaatgatgacctattgtatgaccacttcaatgaaagggaagacctttggtttgactttgttgcagacaccggtgatggagggaattcatcatatacagttgcccgactgttagcccaaccatctattaggactgttatcggtggctctatgcatactcttccacgtgggaacttacttattatcggcggagatcttgcgtacccaaacccttcatcatttacatacgagaggcgcttctttaggccttttgagtatgctctgcaacctccaccttggtacagagatgaacatatagctttggataagcctgagcttcctcctggtgtatcaaagatgactgaatatgatggaccacagtgtttcataattcctggaaatcatgactggtttgatgggcttcatacttttatgagatatatatgtcataaaagctggttaggtggatggtttctgcctcagaagaagagttattttgcattgcatcttcccaagggttggtggatatttggtcttgatttatctctccatggcgatgttgatgtataccaattcaagttctttgctgatgtttgtcagaataaggaatccctcttacggccttacctttccagaacatctcttggaacttggaagttgaaggttggagagaatgattctgtgattgtagtaacacatgagccaaactggcttcttgattggtactggaatgagactacaggcaagaatgtatcacacttaattcaggaatacctgaaaggaagatgtaaacttcgcatggcaggggatttacaccattttatgaggcactctgccactcgatcagaaaagaataattttgtgcaacacttgcttgttaatggatgtggtggtgcctttttgcacccaacacatgttttcagaaactttgagaggttctctggaaccacctatgaatgcaaggcagcttatccatcctatgatgagtctactgggattgcattgggtaacatattgaagttccgcaaaaagaattggcagtttgacatcattggcggttttatatacttcattttggtgttttcaatgttcccacagtgtaatcttgttcgtatcttaaatgaagaaacttggtctgggcgtctgaaaagcttctcaggcacaatatggagtgctttgctttatatttttgagcactcttatgtctcttcagtaggaagtcttactttattgacggcgtcatattcattcgtaccatccaaactatcaaggaggagaagagctattataggcggcctccatgttttggcccatttaactgcagcactacttttaatgttgctgctggagttgggcattgaaatttgtattcgtaaccatttattggcaacttcaggttatcacactctgtatgaatggtatcgatccatggaaagtgagcattttccagatcctactggtcttcgtgctcgtttggagcaatggactctgggactgtatccagcatgtataaaatatcttatggcagcctttgacgtccctgaggtcatggctgtgacaagaataaatatatgcaagaacggaatgatgtctctttcgcggagtgttctgatcatgtactacacttctgtgtttatctatttctggattttctcgactccagttgtttctctcatatttggtagttacctatacatctgcatcaattggttccacatacactttgatgaagccttctcgtcgctgcgcatcgcaaactacaaatccttcacaaggttccatgttaagaaggatggtgatctagaaatatttactcttgcagttgacaaggtcccaaaggactggaagttggatccgaggtgggaatcagagggacgagggcctcatcagctcagccatgaccggaagcatccaagcaagtggaggtcagcctcatcaactgaccctgtgagatctgtacgggttgttgatcatttcaccatcgaaagaacaagaaccccagatatggagccctcttcctga

SEQ ID NO: 10695 - DNA, 1971 bp, Zea mays
  Peptide Sequence Number=SeqID_52474
atgtccgcgcgaggggtgcgcccgggggtgctgcaccacaaggagaacaatccggcggacgcgcagcctggaaagcgccagcgcaccgccgctggggccgggaggcagccgctcgccgctgcaccgccgccgcaggaggagcccatggtgttctcgggcagggaggacgtcgacgctctcctcaacgagaaaatgaaggggaagaacaagatggactacaaggtcgcccctccatccctctctcccgtctctggatcttatgcttaccttactgtcgcttattcgtgtattcctccggctagcattcttgtggatgactcaattcaagttcgacaggggaagagcgagcaaatgatggaatacatcaagaagcttcgagcctgtaccaaatggcttcttgagcgggaagatgcaaatcttgttgaaatcgagaggatcactggtcagcttgacgcgacacacaagcaacactctgagatagtggctgtcttgaagaatactattgaagaaacaaaatcaatatgtgaggaacttcaaaaacaatgtgcatctctacaagaggctctaaagacagtggaggctgaaaaaatggatgccctgaggtctctaggagatgagagggaggccaggatgggtgtggaatctttgcggaatggacttctagaagatctgaacagggcaaagttggaggaaaaacgccttaatgatcagattaagatgcttcaggacacaaataaaaggcttcaagaatataacacaagcctgcaacaatacaattgcaaccttcaagcagatgcaacaaagaatgcggaaacaatagtaaagctgcaaaaggagaagaacactatgtctttgcaaaatgaagccacaaaacaaaagaccgatttattaaaggaagttgaaagtattagaatggagcttcaacgtgcaagggaggaccgtgacactaaatctgctcaagtagattctttgctggttgatattggaacatacaaagaaatgactggaaaatccgtcattgagttagatagcgccatggcaaaaacctctgccctagaggaaacatgttcgtctcaaaggaagatgatagagacattggaaattaagcttgcagctgccaatgaaaagttaaagaggtctaatatgacggcctcggaaaccatgaccgagtatgagaacatgaagaaaatgctggaaagtgttcagtctcgccttgaagaggccgagcaaacaattctggaaggagagaatttacgaaaaaagttacataatacaattcttgagttgaagggaaacatcagagtattttgtagagttaggcctttgctgccaaatgaatcaggagcagtatcatatccaaagaatggagaaaacttaggccgaggcattgagttgttacataatgcacagggatattcgtttacttttgataaagtatttgatcattcggcgtcacaagaacatgtgttcatagaaatatctcaacttgtccaaagtgccctagatggctataaggtctgcatatttgcctatgggcaaactggttctggtaaaacatatacaatgatgggcaaccctgagttagaagatcaaaaaggaatgataccacgatctctggagcaaatttttcaagctagccagacacttaactcacagggttggagatataagatgcaggcctcaatgttggagatttacaacgagactatacgcgacttgctagcaacgaatcgcatggctgttcaggatgttggtgcttcaaagtacagtatcaagcatgatactaatggtaacacgaatgtgtcggaccttacgatcattgacgtaactagtatcaacgaagtttcttctctccttaggcgggctgctcagagcagatcagttggtagaacacaaatgaatgaggaatcatcaagaagtcactgtgttttcactcttcggattttcggtgtaaatgaggtaatattctag

SEQ ID NO: 10696 - DNA, 1014 bp, Zea mays
  Peptide Sequence Number=SeqID_52475
atggcctcctgcgtgccgtcgtcgaccttgttccggaggctgctgctggtgctccagctcgcggtggcggcgctgacgaccctgggcgcgcaggcgcagctgcagtacgggtactacaacgagacgtgcccgggcgtggaggacctggtgcgcgacgccctgcttgccaagttcgccgacgacgtgacgctccccgcgggcctgctccggctccacttccacgactgtttcggcgccgggtgcgacgccaccatcatgctcaagtcccacaacgggacggcgcagcgggacgcggaccccaactcgacggtgcgcgggtacgaggccatcgaggacgtgaaggccaaggtggaggcggcgtgcccgctggtggtgtcctgcgccgacatcatggccatggccgcgcgcgacgccgtgaactacaccaagggccccgcgtaccaggtggagaccgggcggcgcgacggcaacgtgtcccgcaaggaggacgcgcagcggctcctgccccccgccgacggcaacgccaccgtgctgacgcgctatttcgccgcccagaatttgacgatgaaggacatggtggtgctgtcggcggcgcacaccctcggcgtcgcgcactgcccgtccttctccggacgcctgtacaactacaccggcgccggcgaccaggacccgtcgctggacgcggcgtacgccaagaacctgacggaggtgtgctcgtcgccgtccgacgtggccagcgtgcagccgctggacccggtgtcgccgaccaccttcgacatggggtacttcaaatccgtgtacaaccaccaggcgctgctggcctccgacgctgcgctgctggaggacagcctcaccggcgcctacgtcaggctcatggccaccaacgcctcctactacgccgacaccttcttcgccgacttcgccgtctccatgatcaacatgggcaggatcggcgtgcgcaccgccaccgacgacggcgagatcagggctacatgcgccgtctacgtcgactga

SEQ ID NO: 10697 - DNA, 783 bp, Zea mays
  Peptide Sequence Number=SeqID_52476
atggccacttatctcaacgcaccgccggcagccaccacgacgactgcaagctgccgccatgccttctccggtggcagcctccgtctactccggccgagccgaccgacgctgcacgtgacgtgccaagccgccgcctcctcccagcagccgtcgtccccgtccaggaggtcagcctgcctcctcggcatcgcgtgcgccgtcctgctccgcccacgtgccgcctccgccgccgaaaccgacgacgagccggccaacaacggctggtggctgaccgagttccccttgcccgtgcccaagatcgtcaacagtaagccgtcccgtccgtcctgctccatccaccacttaactttacttggttcactgacaattgtgtcggcgatgagtggcatggcagaggagatcaacaacgcggagacgggcacgcgctccttcctcaagaacggcatctacatggcggacatcgggcccagcttcgcggcgcacgcgtaccggctgcgcagcacggccttcgacctgctggcgctggaggacctgctgggcaaggacgcctccaactacgtcaacaagtacctccgcctcaagtccaccttcatgtactacgacttcgacaagctcatctccgccgccgaagacaagccgcccttcgtcgacctcgccaaccgcctcttcgacagcttcgagacgctccaggaggccgtcacagccaaggacgacgccaggatcggcgaccgctacgccgagacaaagctcatcctccaggagctcatggccaagatggcctag

SEQ ID NO: 10698 - DNA, 117 bp, Zea mays
  Peptide Sequence Number=SeqID_52477
atgtccctgctcgcggcaaaggcagatctgtgttggtgtgggatgatcggcagcgaggtgtccctgccgggtgggctccacgagcgagtgaagctgaagtgcggagtggtcgcgtga

SEQ ID NO: 10699 - DNA, 1008 bp, Zea mays
  Peptide Sequence Number=SeqID_52478
atggtgatggtgagagtagtctcactaagttgccaggtaggcattgtaaaggatataaaggaatcaatgcttgaggaagttgactttagaaaagaggctgcaaatattcaggcatttcagggatacattgatgcaatggggtttgacaggcaggcaaaagccccatttgtgtatcagcactgtagtacaaaacgtgtattgactatggaaagattgtatggagttccgcttactgatcttgattctataagatctcttgttcctgatcctgagttgactttagtcactgcccttaatgtctggtttggaagcttaatttcatgtgaatccttccatgctgatgtacatgctggaaacctatggttgctccgtgatgggcgaattggttttattgattttgtcggttacattgtaaatgtgatagaacatgaatcacatcacacaactaaggccgtgtttggtatggctctgtcactctatagtagctctactaaaaaaccttgggtggagctgctctactccagggttaaccagtgggattgttggtcgaatatctcccaagaacttgggcagctatggaggtcttttttggcttcttttgcaactgaggattatgatgctatggcctctgccctctctgaaatgggtgctacagggaatgatataaatactaatgaatttgcaaaggacctgcgaaagatattctcatcgatacaggacctggatactgaaatcatagtggcaacagcaaggacccctgatgctacagcagtatctgctaatgttgtccttgatgagaggcagatgaatgctctttttcttgatctggtcagggtgagcgagtcttacgggctgaaatttcctcgggagtttgctcttctcatgaagcagctgctgtattttgatcgctacacaagactgctggctcccagcatgaacatgctgcgagacgagaggatcaacatctccaccaatcgacaaccaagaagaactgatagatttcagtga

SEQ ID NO: 10700 - DNA, 417 bp, Zea mays
  Peptide Sequence Number=SeqID_52479
atggtggagggagcttcaccctcaacgttcgtggctatcattagccaccagccaacttctgtcattgaccttctcgaggatgactcgagccacgactcaactgagcaacccgactccaatgtcgctgaggtggtagaaagggcctacttcgtggcaacactaaacgagaatggtggggagtatgaggaacccccaaccaagaggagtgtcaacaccagtgctaggcgtggatcctcgctcggtaatgatgtatcccctgtggcgcggtcggtccgagcccaaggtcgggcgaggcggagacttctcctgaggccgaggccggggtcgggcgaggacgcgattcctcccgaggccgaggctgaggctgagccctggggtcgggcgaggcggagacctcctcccgaggtcgaggcctaa

SEQ ID NO: 10701 - DNA, 372 bp, Zea mays
  Peptide Sequence Number=SeqID_52480
atgtccagtgcaccaccagatagtgtccggtgcaccaagggactccaagccaaacttcgcaccttcgggaattttcagaggcgcttcgctataattcaccggactgtccggtgcaccacagtgtccggtgctccagaggagagcgactctgaactcgccagcttcgggaatccgctccgctataattcaccggacatgtccggtgtacaccagactgtccgaggagcagagcacgcgcgggtggcacaccggacagccaggcgggcccacacgtcagagctccaacggtcggaacccaacggcctggtgacgtggctggcgcaccggactgtccggtgcgccatgcgacaacagcctccaccaaacggctag

SEQ ID NO: 10702 - DNA, 1005 bp, Zea mays
  Peptide Sequence Number=SeqID_52481
atgtcaggcctctacagccagggcttctcccctgcaagaaccctctccccccagattaggagcaaccccgacgctgacagccagtacttggccgagcttctcgcggagcatcagaagctggggcccttcatgcagtttggtaacgagttcttagttgatccaccaccaatgatcaagatggctggaaacagcatattgatcagggaagaaatcatgcgggtatcaagcatggttcatgaccatggatttagtgatcttgacaggcgccggtttagaagtcctagccctatgtcctcaccaattgtccggcctaatctacatggcaatggatttggtccttggaatgggatgcaccaagagagattgggctttcctcctcctggaacaagtatggactggcaaggagcaccaccaagccctggctcttatattgtcaagaagatcgttcgcttggaagttcccgtcgactcttaccctaatttcaactttgtggggcgcattctagggccaaggggtaattctctaaagcgagttgaagcatcaactggctgccgtgtttttattagagggaagggttccatcaaagacacagaaaagaagggcagatctaatgtcagaggctcccacatgagtggggtctgggaaacggataaattgaggcaagccttccccggcaaatgcagagaagctgctttgaacccacgacctggtgatgcagaggagaagcttaaaggaaaacctggctatgaacatctgaatgagccactgcatatattgatcgaggctgaattaccagcgaatatcgttgacacaagactgagacaggcacaagaagtcatggaagaattgctaaagccagtggacgagtcacaagatttctacaagaggcaacagctgagggaactggctatgctgaactcaaccctgagagaagacagtcctcatcctggaagcgtatcccccttcagtaacggcagcatgaagcgcgcgaagccaagccagtag

SEQ ID NO: 10703 - DNA, 846 bp, Zea mays
  Peptide Sequence Number=SeqID_52482
atggtgaggggtgagatgaagccgatcgagaacgaggagacacggcagatatgcttcaccaagcgtcggcagagcctgttcaacaaggccagcgagctctccatcctgtgcggagcgatggttggctccgtcgtcttctcaaccttcggcacgccgttttccttcgggcacccatccatcgacgacgtcgcaaaccggttcctcagccctcctcctcctcctccgtctgatgctcccgctgcttcgtcgggtggtggtgctggtgctggtgcaagtggaagcagcagcaacgacggcagctgcagctgggctgtgacggacacgatccgtaggctgaactcggacaagaagagggagacgctgcaggaggctacaggcaaggagatgggtgcgcgtatgatgcagctactgaacgccaacgtctcggaattaggccttgccgagctgctggagttcctcgagtgtctggaggcagtggatggtgtcgtcaacaacgagacagcaaacaagacgacgacgacgcttgatcttgaagccaccaccaccaccagcggcggcagcagccaaactcgtcaagggttagtgccacagccacctatggagacggtggtagcaccggcaccggcagcggcagacctgcagtaccagctgcttggtggtgagcacagcggtgccgccgatcctatggcgttcgcagctcctactactagttggagcagtgaattcgtcgttgatggattcgaagtcgacgaccccatgcatggtggtggtggtggtggtgatgatctccatgatgtttattatgcccttggggatttcccgggcgatgaccagaatcatggttga

SEQ ID NO: 10704 - DNA, 669 bp, Zea mays
  Peptide Sequence Number=SeqID_52483
atggagatgaagcccatcgagaacgaggaggcacgtcaggtttgcttctccaagcgccgccagggcctgttcaagaaggccagtgagctctccatcctgtgtggagcgacggttggctctgtcgtcttctcgacctccggcaggtcctactctttcggccatccgtccatcaacgacgtcgcggaccggttcctcagttccgttgctcctggtggccttgcttcgggtggcgcaagcgcaagccatggtggtagtggtactaccagcggagcagtgacagacactgtccacaggctgaacatggagtacctggagctgcagcagtctctagactctgaaaagaagaaaaaggagaggttgcaggaggctgctgcgaaggaaatgggcggacgcgtgatgcagtgtctgaatgccaatgtctttgagttgggcttagccgagctgcaagagctgcagaagtggctggaagccgtggatggcgcagtcaaagagaaggccaacaggatactagctgaagcgagggcaaggcaaaccgctcgaggcccgtcgctggtgccacagccacctatggagatggacatagcatccacttcgcggcacctgcagtctgatggtaccattggagttctatgtaaaacctcatgggtggctgccgatgagcccgcctga

SEQ ID NO: 10705 - DNA, 572 bp, Zea mays
  Peptide Sequence Number=SeqID_52484
atggcgccccacacgctctatgacgacggcggctcccagctctcttacggaagcaggatcggtgacgtgcaaatgcggccacggggaacctctctgcaacaaagctccgcatctgctctcggcgacggcgatgcggcgctaccgaagaagaagaggaaccggccaggcaatccgaaacctgatgcggaggtgatcgcgctgtcgcctcgaacgctgctggcgacgaaccggttcgtgtgcgaggtgtgcagcaagggcttccagcgggaccagaacctgcagctgcacctgcggggccacaacatgccgtggaagctgaagcagaaggaccccaaggacgcgcgccggcgggtgtacctgtgcccggagccgacgtgcgtgcaccacagcccgtcccgggcgctgggcgacctcacggggatcaagaagcactactgccgcaagcacggcgagaagaagttcaggtgcgacaggtgcagcaagcgctacgccgtcgagtccgactggaaggcgcacggcaagacctgcggcgcccgcgagtatcgctgccactgcaacgccctcttctccag

SEQ ID NO: 10706 - DNA, 564 bp, Zea mays
  Peptide Sequence Number=SeqID_52485
atggcgtccatcggaagccacttcggcggaggcttcgtcccttccctgcacaactcatctccgtcggccgggctctcagcgacggcgctcctgatgaaggcggctcagatgggctcgacgacgtcgagcaccacccacaaccccaacggccccagcgcgctgctccgcgcagccggcttcgcaggcactgccagcgtccgggagactagtagcagggcagcggaagaagagaagtctcacgaggcatatttccatgatctcatcatgaactcactgccattaacgggaggaggcaccggcggcctctcagggttggcgggcgtggacgacggcaatgtgagcacaagggacttccttggcgtcggcagggacgacgcgacggcaccgcagggcctccacggcatgggcgccccgaatccgacccagatgaaatgggctccgactcgggctaagccccggaagacggcgaactccgctccgcccgacccagggctcggactcgggctaagccccggaagacggcgaactccgctccgcccgatccagggctcggactcgggctaa

SEQ ID NO: 10707 - DNA, 2133 bp, Zea mays
  Peptide Sequence Number=SeqID_52486
atgtctactatcgcgaccccgccgccgccatcggcggcgcaagagaaggccgccagccggaataagcgaaagtaccgtgccgagacaccatccacggagttgggcccattcgggctggagtacccactgacgacggactgcgtgggattcgagtttatgtcgcccgagaaggttgccatggcagccgcggtagccgccgctgagggtgtcagccttgacctcctccagaactcgtgcgaaaactgcaaggatctccaccctactgcggaggacttgttggagtgccagcgatatgtgaattggggtgacccaaatgagatgcagctggaggagatccttctcaagagtctggacaccacctttgacaatagtgtgagtctgatcaccacaatgggctactctgaggcggccgcacgtgctgctattatgcggacagctgcgcaatacgactggagggagagccttgctgggtttggagaggcggcggttgaggttctcaagacggaaggggacatgttgccaagggagggtgcctctgttgaagacatgaggaagattgaggaggctgtgcttggcagtatggttacgttggtaactgaggctcagccattcaacaccccaggcgatgtaatgtattgcttgcttatgtcggatatgaatgtggcaaatgcatgtgccatggactataacagtttctccctcccagctgtgtctgctcaagttattgcccaaccagtcgcgggaaactacgaacccggttcaggttcaaatttgtcagtttctattaccaacccgcagactggcgttactttccgtggaaaacttaccccagtgccacctggctcgtatggtgctataaaagctgattcatcaacggcacaagcaagcccgaatgtatcaaataccgaaccctcggtatcggacaagactcagtgtgtcatcccgaatattgagccaaaaaaacaccatgttcctatatgtgatcattcagaggaccaaccatttgttgctgctgcgacacaatctgtgaaaaatgacaagtcgtccccaagcaagagggggggctctaagagggactcctttcatcggcagaagttgacgaactatgataaaagttcccgagcattgggttccaaaggctctcttaggtctggcaagcaaagctcttcagccagtgcagtattggagaggaagtgcaggtcattttccgattctactactagcaacttgaagggctcatcaagagttgctaaagggtttgctgcaagcatatctggatcagaagtatcagttgacctttcctttactggtaccctttccccttctccatcatttgatgccaaggtagttagtaactcaaactcagcacctgctgctagcacagatctttcattggcattgtcctcaagtgatagtttaacaccatctttgagtcatgattccaatactgaggtagtggactctagtagcaaaattaatttttcatatgatgaagaacagaaggtctggatcccacaagataaaaaggatgaaattgtcttgattcttgtccagaggcagaaagaactgcaagcacatacacgtgactggacagactgggctcaacagaaagtgatgcaggtcgcacaccgacttgcaaaggagaaggatgaacttcagtcactcaggaaagagaaggaagaggcagaccgtctgcaagaagagaggcatcatttggaagagagtactcggaaaaagcttctagagatggagtctgcaatttctagggcaaatgctcagttggagaaggcagaagcttctgctcgcagacgtgaggttgagaatgcacaacttacgttacagatggaagctgcaaagcgacatgcagcagagtcagcaacaaacatttcagagcttgtaaagaaggatgagaacagtcgcaaaaggtctcagcgttggcaatctgacagagccctgttacaagaggatcttgcagcacaaaagagcaggttatctcgggtccaagaacaccttcagcatgctaaagagctaaaggatcaagtgcaggtactaacagttctatttttacctcattttcatggaaatttctttactgttattgtatttgactctattaggctgcgtgctgaatag

SEQ ID NO: 10708 - DNA, 726 bp, Zea mays
  Peptide Sequence Number=SeqID_52487
atggcgtgccaagtcacttgggtccctgaatttagtctcttgtgtcacttaggtcctagaaaatttttattagttttctctaacctgattttgactcatccatccatgtacgcaagcaggaaagacaacttcatcacccaccgcgctacctgcgacgcagcagttcgtgggaccgcccagaagccaccgctggtcgccggcctctacgtcggctcaggcagcgatgataggctcgggctctccgacgccgccgcccagatgcatggcttcgcagatcaaggccagtcctcttcagcagcagaagcctcacagtttgaccatgtcatgccatcgtactcgggctcctccatgttccgttctcaggcgtcagacttctcgttgtctttcttcctcggcggcggcactcctcttatcgaacaagacctgtccgacaacggtggtgatctctccgaaggcagccagggccctctgctccatggcaaggcgcccttgcatgggcgtgatgacgcatctccccgagcagcagtatcagccaaaacagcgggcaaacgccaaacgttaacctcctggacattgggttcttctctggcaacagtggtggcacgtctggcagccaggggccctctgctccacggcaaggagcccttccatagccatgacctgacgcaacttcccgagcagcagcaccagccaggcagcagcaacgcccgcgtcaaacctccctaa

SEQ ID NO: 10709 - DNA, 261 bp, Zea mays
  Peptide Sequence Number=SeqID_52488
atgcagccgtcgagtggggatgcagcccttcctggtgatgaggcccaggtgacgaaggggcccaacactggtcgagacgggccgaggagccaatgtggggggtcggacaacttagaagatggggtggccactagaccaagcggagaggagtccccaagcggcccagctagcgaggctggggacgaggtagtgaaagggaaatgtgcccctgggccatttctaagtattttaatgattaagtgcccaacacaaaaggtttaa

SEQ ID NO: 10710 - DNA, 456 bp, Zea mays
  Peptide Sequence Number=SeqID_52489
atggcgtggaggtcgccgccatgtcgtgctctagcgggcacgagttctcggtggtgtcttcatggaggtcgatttcatgtcttctatcccacggcggaggcagcgtgcgacaacaacactagaggatgtgtgatctgcttggagggctttgaggacgacgtggaagtcgttgtcatgtcgtgctctagtgggcacgagttccaccctggacttggacattgccacgtccagaagaggtgtagactatggtggacatttgattggttggctttagcaatttttgaagtgaaaattggaacaaagactgccgacataactactttaaatggtctcaatgtgataaagagagcattgagaaatcatcaacatcaagaagtaggattatttgggccagttattgacgtggtctggaccacactagcaacaaacaaaggacctccttgtgttgggtcctaa

SEQ ID NO: 10711 - DNA, 1932 bp, Zea mays
  Peptide Sequence Number=SeqID_52490
atggcctcgacgttcggtgccacttctacagttggccttatggctgctccaacggggaagaatgtgcgccttcagaggagggctaacttcagagtaaaagcggctaaggagctgtacttcaacaaggatgggtcagctatcaagaagctccagactggagtcaataagcttgcagacctagttggagttacactcggaccgaagggaaggaatgtcgttttggagagcaagtacggctctcccaagattgttaacgatggcgttacagttgcaagagaggttgagctggaggaccctgtggaaaacattggagctaaattggtcaggcaagctgcagctaagaccaacgatcttgctggagatgggacaaccacctctgtggtccttgctcaggggctgattgctgagggtgttaaggtcgtggcagctggtgctaatcctgttcagattactcgtggtattgagaaaacagctaaagcactagttgaagaactaaggaagttgtctaaggaggttgaagatagtgagcttgcagatgttgctgcagttagtgctggcaacaactatgaaattggtaacatgatagcagaggccatgagcaaggtcggtcggaagggcgttgtcacccttgaagaggggaagagttctgagaactttctctatgttgtggagggaatgcaatttgaccgtggttacatctctccgtactttgtaacagacagtgagaaaatgactgcagagtacgagaactgcaagctgcttttggttgataagaaaatcaccaacgcaagggatcttatcaacgttttggaagaagccatcagaggtgcatacccaatcctgataattgcagaggatattgagcaggaggctcttgctacccttgtcgtcaacaagctcagaggatcactgaagatcgctgccatcaaagcccctggttttggagagcgcaagactcagtacttggatgatattgccatccttactggagcaactgtaatcagagatgaagttgggctgtcacttgacaaggccgacaaatcagttcttggaacagctgcaaaggttgtccttacgaaagagtcgacaacaattgttggtgatggcagcacccaggaagaagttactaagagggttgcacagattaaaaatctcattgaggcagcagaacaagaatatgaaaaggaaaagctcaatgagaggatagcgaagcttgctggcggtgttgctgtcattcaggtgggagcacaaacagaaactgaactaaaagagaagaagttgagagttgaggatgccctaaatgcaactaaggctgccgttgaggaaggtattgttgttggtggagggtgcactcttttgcggcttgcagctaaagtcgacgccatcaaggatacactggagaacgacgagcagaaggttggagctgaaatagtaaggagggccctgagctacccacttaaattgattgctaaaaacgccggtgtcaatggcagtgttgtcactgagaaggtcctttctaatgataacttcaagtatggttacaatgctgctactggacagtacgaggacctgatggctgctggtatcattgaccccaccaaggtggtgagatgctgcttggagcacgccgcgtcggtggccaagaccttcctgacatcagatgttgtggtcgtcgatatcaaggagccggaggctgcacctgtcgcaaacccgatggacaactctgctaatgttgaatgcagtttgcacacgaccaattcaaatggctccggcaacgtcagattatgctgcgtcgaaactgatttgaaactgatacaccggagcggtctcctctctgggagcgatccatatttttgtgtactttctgatttgatgaacgactccatctgtttgtttctagaagataatgtatttgagggcgtctgtttttaa

SEQ ID NO: 10712 - DNA, 381 bp, Zea mays
  Peptide Sequence Number=SeqID_52491
atgggagctgaccaagagcaggccatggtcctggcgcagcagcggcgaaggccacagacagcccagcttggcgagatggcccagagcctgcaggggacggggcggagtgcccagcgacgagggcagagggcggggcgcagattggcctgtggtggttgtggcgagggccgttggaggagcagtggacgatgttggcaccaggagcagtttggagcggatctcgatgaaagaggggaagggccgctgctgcttgaggagaaggtggagggagttgaaccgatggagaggccacggaggacgttcatggcgagggcgcggtcggtgacgatctcgccgagctcggtgagggagtccgccaagatcttcatccagcggcagtag

SEQ ID NO: 10713 - DNA, 192 bp, Zea mays
  Peptide Sequence Number=SeqID_52492
atggaggagacggctaggggcgtgccgagcctgctcttgcttgtgtggcgtctggaggcgaaggaaggccgcacgtcggagaaccgaaaatgggagaaatatctcatttctcttttactgatcatcagccttatctccagctgcttggggcttctagccttttctatagccggcattatcctcttcacttga

SEQ ID NO: 10714 - DNA, 516 bp, Zea mays
  Peptide Sequence Number=SeqID_52493
atggccggacaagagcatcactgccggagaattgttctgtttccattgccgctccagggccacatcagtcctatgctccagctcgccgcgctgctccatgcgcgggtcctcgccgtgacggtcctccacaccggcttgaacgcccccgacgccttgcgccacccggagctcacctgctgctccatgcgtggggcctctgcacctgctgtcccaggcaccggcggagcagagcctgcacacgcccgaccgcgactgcctggcttggctggacgaccacccgtcgtgctccgtgctgtacgtgagcttgggaagtgtggcctacgtcgaccgcggcgcgttcgtggagatggcgtgggggctggcccgcagcggggtgtcgttcctctgggttgtccggccgggcttggtcggcggcgtggcgagagcaaggccgacgcaaactgggcgggcgggcggccggagctcgagcagggcctgctgcgacggtccggggccgaacgccgggcgggcgggtga

SEQ ID NO: 10715 - DNA, 411 bp, Zea mays
  Peptide Sequence Number=SeqID_52494
atgaagggaaatgacgatgctgtcgcacacagcgtgaaggcgaatgacaatgacatggatagtgttggacgggaccaaatcagttcagagcttcaaatcgacgaccaacagatcgacatcgggactcaacggcagcacaacaccaccacgagacggaggcgaactggcaacgacggccttggactgggtcacggccacgcgcgcagcagggagaagcttggaggcgacaaccatggtgagcactggggagaagcatctcctactgccggtgtccatgggaagggaggcagggacggcggcacaagagagaaggaacagggagccgagagggcggggatgctcgaccatggggagcaagcagcgggcgcgactgtgagagagatggagggagaggagggtgctggagactga

SEQ ID NO: 10716 - DNA, 1308 bp, Zea mays
  Peptide Sequence Number=SeqID_52495
atgcaaacgtcaccaggctactgcatcgaggtgttcgacgcggtcatgagcaagatgccatatccggtgagctacgagtacgtgccgttcccctacagctccagttcctacgacagcctcgtgtcgctggtgccgagacagatagccgacatcgtcgtcggcgacgtgacaatcacggcgagcaggatgggcagcgcggacttcagcatgccgttcacggactcggggtggtcgatggtggtggcggatcaacccgagttccgcggcacgccgtggcagcagttcggcctcatcttctacttcgccttctccaccctcgtcttctcgcacaaggagaagctggagagcaacctgtcgaggttcgtggtgatcatctgggtgttcgtcgtcctgatcctgacgtcgagctacacggcgagcctgacgtcgatgctgacagtgcagaagctccagccggcggtgaccgacgtgagagagctccaacggaccggcgcctacatcgggtaccaggagggctccttcatcaagaattcgctcaagaaactaggcttccacgaggccaagatgaggagctacagcacggcgggggagtacgccgacgcgctgtccaaggggccggccaacggcgggtactgcgacggctacaccatgtttgggccggtctacaagaccgacggcttcgggttcgtcttcccgataggcagcccgctgacgccggacgcgagaagatggcgcagatcgaaaagaagtggttcggcgagcccgggagcgtgcccgagccagggcgccgccgccctcggctcctccaacctcagcttccggagcttcggcggtctgttcctcatcaccggcgtcgtgtccagcctcatgctgctcgtctacctcgccaccttcatttaccaggagcgcggcgaggtccggccagagccggaggaggaaggctcggggagctcgtcgtcggtgcgccggctgcgcgcgtggctgcggcacttcgaccagaaggacctcaagtgcgccacgttcagaacgggggaccacgactccgtcagggatggtgggaaccagactcagaggtgggcggagtccgtcaggtatggccgtggcggaaacgggtcggtgcaggcggcaatcgaggaggaagccgtagcaatgggcatgagccctctcaggttcggcacctccaccccgtcggagacgatgaacgccggctcgtccccggcgtcagagttcgggacctcgttcgagcagaggatgcaggaggcgccacactctgtgtcggtggagatgccaagatcgacgccctcttaa

SEQ ID NO: 10717 - DNA, 324 bp, Zea mays
  Peptide Sequence Number=SeqID_52496
atggcctcctggacgcaccacagggcccgaggtcggccgcgacaccgcggccctgggcggcgaaccgtgccgtgctggggcttgggcgggctggccggggatggctgccgcgccgcgcgcgaggctacaggggcgcgcacgggcgctgcgcggggctgccggggacaaggccagggcgtgcacactaagctgccgcggccctgcgccgtctggtcgcgcgaggaagagagggagaaggagagggatcctgcgtacctggtaaacgctgcccttcacgcctgtggtctggatccggggcgagatgaggaattttgcgatgcctag

SEQ ID NO: 10718 - DNA, 1269 bp, Zea mays
  Peptide Sequence Number=SeqID_52497
atggcgcctcctgttgacgtggtcgatccgcgccctaggttgggcgatgtggaggctcctccgaggtcgaggtcgagtcggtcttccgtggccgaggtcgagtccgagcccctgggtcgggcgaggcggagactgtcggctgaggccagggctgagtctgagccctggggttgggcgaagcggagggctgagcctgagtccgagccctgggtcgggcggagcggagttcgtcgtcttcaggggctgagcccgagtctgagccctgggtcgggcggagcggagttcgccgtcttccggggcttagcccgagtccgagccctgggtcgggcggagcggagggctgagcccgagtccgagccctgggtcgggcggagcggagttcgccgtcttccggggctgagccccgagttcgagccctgggtcgggcggagcggagttttcctatggtgcctgaggccgggcctgactgcctgtcggcctcactctaccgagtggcacagcagtcagagcggcgcaggcggcgctgtccttctgtcaggccggtcagtggagcggcgaagtgactgcgggttgcttcttggcgaagactgggcctcgggcgagccggaactttgtgctgatgggggttaccagctgaaaattaggagccttgagggagtcacagcctgcatgggtgaatacactactggacccgcgttcggacaagaccattttacactcggcaacaaatactcgacaaatattttatcgggtaccgtcggcaataaggctatttccgacggcccacggccagccgtcggaaataagtggacgccccctaacggccgtcccccgcgcggccccccggccgcgcacacagccaacgcacacacgcacgcacacaccttcgtcaggacccgcgccgccgccgctaggacccgacggcgaaggcaccttcgccggccacctgcccggaccgccggacgccccgacgcacagggcgccgccgccccgacgcccgacggcgaaggcaccttcgccggccaccttcaccggccacctgcccggaccgccggacgccccgacgcacagggcgccgccgccccgacgcccgcgctcacagcgcgccgccgccccgacggccgcacacctgccccgaccccgcacagcgcgccgccgccgccgcgcctcgagccgcccgtgcccggctttgctcaccgccgccgcccggggctcgccagagccgtcaccatccgtcgccgtccgggtaatggcatcactgtcgtttag

SEQ ID NO: 10719 - DNA, 945 bp, Zea mays
  Peptide Sequence Number=SeqID_52498
atggacagcaacgcgctgcggcagatcgaggaggggttccgcctggccagggagctaatggaggagctcccggcggcccagaacgagccggcgtacctcgccgaccgctgccacggcattgcccaggcctacgtcgcggccatacgcatgcttcacccgcctgctaatcctcctactcacttcggcggcagcagccagcacgaccgcgtcatccctcagctggacctcctccgcccgttcctcagcgctccttcggcgccgtcgtcgtcgtcgacggcgttcccgcataacctcgggcgccaccagctgctagctgcggacccgtcgtcgttcgtcgtcaacgcctcgccagtcgtcgccggcacgtcgtcgggcgggccagtgcggcggcatgcctcgtcgtcgtcgcggtcttcgccgccggtccagccgcggcagcagcagcacaggaggaggagggagggtggtgagaggatgacaataatggttccaacacaggcgacggcgggcaacgctgatcagccaccggacgatggctacacgtggcgcaagtacggccagaaggatatactgggctccagatatccaaggagctactacaggtgcactcacaagaactactacgggtgcgaggcgaagaagaagatgcagcgcctagacgacgacccgtttcacgacctcttcatggcggcggccgctgagcattctgcaccggcgctgtccacggccatccagctcggcatcagctggatgccatcagccctcgtgggctccagtgccggcgagggaagcagcgctcaggtgaacgtgccggccgcctcaggaagggacacggccgaatacccggtgatggacctcgccgacgccatgttcaactctaccagcagcggagggagcagcatggacgccatcttccctgctcatcacgatcgacgtgatagctag

SEQ ID NO: 10720 - DNA, 648 bp, Zea mays
  Peptide Sequence Number=SeqID_52499
atgaccgactcgccccgtacacacgtcgatgagcgtcggttggctcacggctgcgatcgtgggcgggggcagcaggttgggaggaagaacagcgcgaaggcctgcgatcgtgggcgggggcagcaggttgggaggaagaacagcgcgaaggccgaaaagacgaatggggcgtccgacaacggctcctctgaggtcgaggtcgagtccgagcccctgggtcgggcgaggcagagaccgtcggctgaggccagggctgagtccgagccctggggtcgggcgaagcggagttcgtcgtcttccggggctgagcccgagtccgagccctggggtcgggcggatcgaagttcgtcgtcttcaggggctgagcccgagtccgagccctgggtcgggcggagcggagttcgtcgtcttcaggggctgagcccgagtccgagccctaggtcgggcggagcggagttcgccgtcttccggggcttagcccgagtccgagccctgggtcgggcggagcggagttcgccgtcttccggggctgagcccgagtccgagccctgggtcgggcggagcggagttcgccgtcttcagggggctgagccccgagtccgagccctaggtcgggcggagcggaagttcgccgtcttccggggctga

SEQ ID NO: 10721 - DNA, 405 bp, Zea mays
  Peptide Sequence Number=SeqID_52500
atggaaaaaggccatgggtcgcgcggcgagatgatggtcacccggacaggcggcgcctctggcaggagaagtgggcgacgcttcgccttcgccataataaccacgccaaaaaagggaccgggaaagggggataccccgaaaaggatccttccccgtgaaggaaccaggctccgagcctccctactgatcagaggttcgaaggctggccccccggaagggttcgacagccgcctcagatcgtgtgggccctacacccactactggtcagaggttcgaaggtcgacccctcggaagggttccacggtcgcctcaggctactcgggctccacgcccattactgatcaggggttcgaaggctggcccccgaagggttcacagccgcctcagacgccgagcgagggatga

SEQ ID NO: 10722 - DNA, 624 bp, Zea mays
  Peptide Sequence Number=SeqID_52501
atgaggacgcgggactggcatacttcgtcggagtctgaccttcgtcttgcaatggataggacgaagggcaaccgtgccgatcatctcgccttcgttggtgtagcgaggcgacgaaggcttcgtgcgaagagtagcgtcttcgccttcgccccaacacacacctctgtgacccaaacccgtataaatctctgtgttccgttgtgctcagatactaagtgggacattttagtgcaggcggctaaacaaccgaaccgaggaatgggtttcacaagcaagctaaagcgctcgaggcatggtgtgtccatgaagctccgagtccgtgatccgaggccaacgcagacagtccaagatggactcagtttcgtggcgagcttgaagcgcgtgttcgcctgcgagcctgacaagtacgacgagatcatcgccaccatgcgccagttcaagtccgggaggtcgatcgattctttattcgtcttgtctgtgaattgcagcattcgtagtgcggttgtggttgagcgtgtgaaggtgcttctggaaggtcaccctggtctcctccgccacttcaaccagttcctgccatggggttacataagggctcatggaccagtcgggaggatcagcgtctga

SEQ ID NO: 10723 - DNA, 282 bp, Zea mays
  Peptide Sequence Number=SeqID_52502
atggctataattcaccggatgttctgggccgatggctgcaacggtcggcttcgccaaaaaaggaaggaaatcgcgcactgtacactgtctgatggtgtaccggactgttcgatgcgtccatggacagaaggcaactatggccttccaaatagagctctaacagctcctagctgcattggggctataaaagggacccctaggcacatgaagcggtacaccaaggcaccgattgaacattctaagacgccgagacttcgcatacacacatctggttcatcgtga

SEQ ID NO: 10724 - DNA, 1062 bp, Zea mays
  Peptide Sequence Number=SeqID_52503
atgtcatcattgacagtatcctcgttcaccccagagataatgtacagtgcagaagttaaattcagagttgacaagtacaacgagcgcaaaaaccttggctacgccacattcatcaggtcgccaaccttcaccgtcggcggttacgagtggacactcaactattacccagacggccgctccgaacaaacagagggccatgtgtctgtcgctcttgaactcacgggcactgagaatgtctgggccattctaagcttaacatttgcaggcgaagtcgacaggtcggcatgggcaggttgggcaacagcagcgttcctgaacaggaacaacaatttcctcttttcctggcctgaagtcaggagcggggttctggaacagatggggctcgtgcgagatgactgcctcgaaatccagtgccagatctgcgtccacagaccaaaccagctgttgaaacccggatcgcttcctgaggttgaggttccggcatctgatacgctgcagaacctaggaaggtttcttgtcgatcatgtgacggccgacgtgacgttcaaggtacagcaagaaactttcctggctcataggatcatgctagctgcgtgctcgcctgtgtttgatcggcagctgctcagcggtgaaatgagggagaaggacatgggctgtgtactggtgcatgacatgcagcctgttgtcttcaaggctcttctgcacttcgtgtatacggattcactggttggtatcggtgacatggttgttgttggtgaccagattgagctgattcggcatttgcttgtggccgctgatcgatactgtgtggacaggctgaagagtatctgtgaagccatcttgtgcaagtgtgtggatatggagagcctgctgacaaccgtagcgttagcagaccagtgtcattgcatgaagcttcttgctgcttgtgtggagttcctcaaatattcagcgcagacggatatggttgaaagtcagtggtataaggtgctaagggataaccatcctgatgttgcagatgaaatctgcaagggagtgaaggatgtccgaaaattaataaactaa

SEQ ID NO: 10725 - DNA, 312 bp, Zea mays
  Peptide Sequence Number=SeqID_52504
atggccggcgggaagaggagtaagctgctgcagggtgctccgccgccgccgccgccgccgcaatggtctgacgtccgtggcctgctccacatgcggttgacggacgccgccgcggagctcaacgtctcaatcacctacctcaggcgcctctgccgccagaacggcttcgctcagtggccaggaaagaaggccatgagcgcggaaacccggaacgaggaagaggacgacgaaccagttgcgaatcaggaactcaccactttaaacttgatagacaagctttgttggttaataagtcacttgcgttgcaactga

SEQ ID NO: 10726 - DNA, 171 bp, Zea mays
  Peptide Sequence Number=SeqID_52505
atgaagtgcaattatcaacaagggggagaattcagttcaagggggacattttcacccacacacacatctgcaaacttttctatgaggtgtgcagtcaggagacgatggtcgatagcgaaagtgaaggtcatgcgggtttatgccaatggaccggatgtggcgaaggactag

SEQ ID NO: 10727 - DNA, 405 bp, Zea mays
  Peptide Sequence Number=SeqID_52506
atggaggacagcaagggagaggtggtgagagctatcatcgaagtggagaaggacaagatgctttggataggttttttgcttccggaattaacaccaacatcaataaattttacggatcatatcacctcagacaaagaacgtagcaaaaactggaagattaagcaggggatgacgcgcagggttcctcttacattaagcaggggtagaatgtgttggatcctggactcggcagctggctttgcagacgacggtgctgggcggcgagtcgggcttctgggcgcggtcgccgtggtggagcgagcgccgccagagaaaaccccaggtatgagaacacaagcacagagggaaaatgagatgggtctgcgcaactgccgcagcgcaaccttttgcttttctgttatttaa

SEQ ID NO: 10728 - DNA, 255 bp, Zea mays
  Peptide Sequence Number=SeqID_52507
atgcactctttctacagtcatgttgtgcgccttcagggtctaagggaaaggttttcacattgcaactcaaacatggacgcgagccaggaatccactggtgtatcagatggtgattttgtttcttatgtaaatgaatggtgcatagatggggctacgcttatcgggagctgctacaggacaactccaaacactatcagagccatacacaggactctaaaccaaggctccaacgagcagcagttacctctagcatag

SEQ ID NO: 10729 - DNA, 888 bp, Zea mays
  Peptide Sequence Number=SeqID_52508
atgtccccagccaccatgctattgctcccctccaccgatctcgtcctcaacctcaccctgcgcctcatcgtgatatggacccgcggagccgcggaggctgtggcgtccgtgctacggagagcggacagggaggccacggaggcgacgtgcgggtgctcacgttgttcgactgcatcaaggaggaaagcaagggggaggctcgtgaagtcagtagtcgtatctggcagtggcagcacagcgcaccatggaatggctgagctggagaacgaagagtgcttctcgcataacgtggagtatgagggggatactgtccatgtatccttcgtcgtcatcaaggctgacaccccgtggcattacagcgaagaaggcgttgatcttgtggttaaggatcctaatggcgctcaagtccgtgattctcgagataagactagtgataagtttgagttcatagttcagaagagaggcgtccatcgcttctgcttcacgaataaatccccgtaccacgaaactatagacttcgacgtgcatgttggccatttttcatacttcgagcagcatgccaaagatgagcattttgcaccacttttcgagcaaatagccaagttagatgaggcactttacaatatccagtttgaacagcactggctagaggcccaaactgaccgtcaagcaatatgtgtggaatttaaggtaaaagctgtactgaatttctgttgtggtgagctaaacaagccccatgcttttgtgggacctgtgaacgagaacatgagcaggagggcagtccacaaggcactcttcgagtcggcggcactgatcgtggccagcgtcatccaggtctatctcctgcgccggctcttcgagctcaagctggggacgtctagggtataa

SEQ ID NO: 10730 - DNA, 240 bp, Zea mays
  Peptide Sequence Number=SeqID_52509
atggcgcggccctggctcctctgtttgccgcgcgccctccctgtcctctgctcgcgcgctgctccagtcggccgcgcgtccagctcgcccagtctgcgcgccgagcttcctcgtcgcgacttcctgcttagggctagtttggcagtccatttccacgtagggaatttacctttttccctgtgccagcggcccacgcgagaatctaccacggggtatggctccggcatgtttgggagttag

SEQ ID NO: 10731 - DNA, 321 bp, Zea mays
  Peptide Sequence Number=SeqID_52510
atgaggaactttggcccagcagcagggaatcggatgccgaccaaggagaagcgttctgccatggacgacctgcaggccgcggcagggcggcacgagaccgcgcgccagtcaaggagcaggcacggctgccatgggcgagcacagggagctgcgtggcggcgcgagcagggaaggagcagaggccgagcagaggaactcacgacggcgcagaggagctggagcgggaggagggagctccggccaggcgccggagagaagaccgagctggggcgccatgagcccatgagggagcaggagtgttgggagccgagcgtgcgtgag

SEQ ID NO: 10732 - DNA, 612 bp, Zea mays
  Peptide Sequence Number=SeqID_52511
atgcaggcggcatgcaaccgcgccaagtggacgcaccccttcgactccaacgcacccaacatggaggcccaggcccacacgtcatgcaaccggcgcgccggttgctgcgtgcgagcaactgcaccgccattcgcgccactaccgcgactcctcgactgcggaaccagtaccacgactcggggcaaccctgcgtgtgacccaacagtgccagccaggcgcgtcggtcatgggtcagtcagctgcgggagaaggacaggcggcaccgttggcaggagaagcgggcaacgcttcgccttcgccataatgaccgcgtcaagaaagggaccgggaaagggggataccccgaaagggatccttctccgcgaaggaaacgggccccgagcccccctactgatcagaggttcaaaggttggcccctcggaggggttcaacagccgcctcagagtgctcgggctccgcgcccactactggtcagaggttcgaaggccggccccttggaagggttcaatggccgcctcaggccactcgggctccgcgcccactactgatcaggggttcgtaggctggccctcgaagggttcacagccgcctcagacacagagcgagggatga

SEQ ID NO: 10733 - DNA, 447 bp, Zea mays
  Peptide Sequence Number=SeqID_52512
atggccggacctgggcgaggccacaggcagcaggggaagcgacggtccggagagcagctcgctggagaggtagaaatggcgcgtggaacagagaggcgagggcctgggcgtttcctggccgtggcagggaagagaaaaagggggcgccatggccatggaggaaaggagctgctgctccctgcgctgagaagggggtgctgctgctcgcctatagggagcgagcgccagggggaaagcttgcctgggcacctgtgggccagtgttgagggaggagggatggacgccatggctgctggcttgctccctgctggccgccgtggggaaccagggaggaagaagctgacgcctgctgttctatcgtgtaggagaaggaggaaagaagagggctggtttgggcggctaggggtgggagtgcaaaagttgccaagtgagcacctctatttatag

SEQ ID NO: 10734 - DNA, 255 bp, Zea mays
  Peptide Sequence Number=SeqID_52513
atggcgtgctccctccaccgcgccctacttcctctccttcacctgtgtgtcatcgtcgttgcagtcaccaggaatttctcgccggagacccttttcgtcgcgacaccgcgggcagccgtgcacaacccctcgcacctgattatcactgtgtattttgtttacatgtttgtagaagagcccgtgaccgaggatcctggtgagcagcaggttgaagtagctgagcaggagctcattgaaggcaagttgtgcccttga

SEQ ID NO: 10735 - DNA, 420 bp, Zea mays
  Peptide Sequence Number=SeqID_52514
atgggtcaaaaggagccaacttcttcaaggccatatgtttttgcatgtgatgaaaagaaaggcaagaagaaggctcccactccaagctcctcaagtgaagaagaggaagaagaagaatgtgatgatggtggatatgatcaaccctcaacatcatcctccaaggacgaagaaacagtccgacgcgtcggaaaggttgaggatcttctctttaacattgacaggaaaaagaaaagaaagagaggatgcttcgcatgcagggaaaagggccactttagggacaactatccaaatatggctgaacccacaaagaggaggagcaaaggcaaggcgcttacaagtttcaaaacttgggatgactcttcaagtgaagatgaacctccaaggacacgcaaccaccgctcttcatcacactcttcatga

SEQ ID NO: 10736 - DNA, 183 bp, Zea mays
  Peptide Sequence Number=SeqID_52515
atgcggggagggagcagagagcgatgcgagcagccaggggaaggaaatctgatgaaggcgagccaaatcggcgacgacgccgacaatagagaggtgacgcacgcagcagacaacaacaggaggggtgttacacctggtcgtcgaggtggccttgaagtttgtgtcctgctgacgtttctttga

SEQ ID NO: 10737 - DNA, 936 bp, Zea mays
  Peptide Sequence Number=SeqID_52516
atggggatcgtggaggaggcgcacaacctgcgcgtggtgggcgaggggaagcgcggggtcatcgtgctggcgcacggcttcggcaccgaccagtccgtctggaagcatctggtgccgcacctcgtcgccgactaccgcgtcgtgctcttcgacaccatgggcgccggccccaccaacccggactacttcgacttctcccgctactccacgctcgagggctacgcgctcgacctcctcgccatcctccaggagctcggcgtccaatcctgcatctacgtcggccactccgtctccgccatcatcggcgcgctcgcgtccatctccaggcctgacctcttcaccaagctcgtgctcctctccgcgtccccaagctatgagcattttcttcaaatagaaacaaaaatggtaaaatcatatggattggatctgagatttaagttcgacttgtactcacttgcaggcaaggaaagtgcaagtgtgtacacttcttggtacctcaacgatgtggactactatggcgggttcgagcaagatgagctggatgagctgtttgaggcgatgcaatcaaactacaaggcctggtgcttaggttttgcacccctgtgtgttggaggagatatggaatcagtggcagttcaggagtttagcaggacactcttcaatatacgtccggacattgcactaaatgttgcccagacgatcttccagagcgatgtgcgcagcctcctcccgcacgttagtgtcccatgccacattgttcagagcaccaaggatctcgcggtgccagttgtggtgtctgagtacctgcacaggcaccttggtggcgactccatcgtggaggtgatgccctctgaaggccatcttccccagcttagctctccagacatcgtaacccctgtcttactccggcacatccagcatgacatcgcagtctag

SEQ ID NO: 10738 - DNA, 150 bp, Zea mays
  Peptide Sequence Number=SeqID_52517
atggagcagcaagatggaactatcacaaaagcacggctgagggggagctacaaagaagggaaacagactcaaccccttagccttgctctatggatagaacttacagagatgtttgccatcgggataaggtgctcctccagtcgtagctag

SEQ ID NO: 10739 - DNA, 414 bp, Zea mays
  Peptide Sequence Number=SeqID_52518
atggatccaacggtccgggtcaggataaccaaaggggaagagttgagtctaatcgtaaccgtccacgtcgagctcaacggccacggtgagccccagcccaatcgctacgtcagattcgatctgaaccgcacatcgcgcatcgacggagaagaggtgatcgcccatgaccccgacaatggcggcgaactccgcgccgttcgctacggagtggaagaggggcgacgcatggatgttgagcgacaattcaggtctagctccatagtctgttttcctgattttccaaattctctggactgcgcctcaattccaggagacaccagggggtctcgggatttcgcacacagagcaccggccgcagcacctagtggcaacacggcggcgcccatgaccggaacacaccacgccggtccctaa

SEQ ID NO: 10740 - DNA, 201 bp, Zea mays
  Peptide Sequence Number=SeqID_52519
atgcggatcaactccagcaaggaattgcgcaagcacaaggacagtaacggacgaattaagggcatgggagggttgcttaccacaagcgcgaactcaggagcgcctagaggacggcggggaggcagggaagtctcaggtcgatggcggcgggcttcggctacgcaagaagtgctccgggttttcaattcaaattcaaactaa

SEQ ID NO: 10741 - DNA, 282 bp, Zea mays
  Peptide Sequence Number=SeqID_52520
atggccgaaggcacttcgcgcggcatgccggggacaccgtgggctggccgcgccgcggacgccgcgagccagcgcgtcgggtctggtcggggcgggctgccgcgcccgggccgccacgccggggtttttcgcgctggagccgcatgccccgcgcccgtgcccgcacccggggccgcgccccgcgacgaggcctcgcccacgcccggggtcggttcgagcgagagaaaaagagaagtaaatccaagaaaggagagggtaacacctgaatttggtggatattag

SEQ ID NO: 10742 - DNA, 1215 bp, Zea mays
  Peptide Sequence Number=SeqID_52521
atgccaacggcgatctcgtcgccgtcggcgtctcctgcccggctgatcctgttctacgtcgcgctctacctgctggctctggcgcaaggcttctacgggccatgtggggaagccttcggcgcggaccagttcacgcctagcgacgacgccaaccccagcgcgcccgcgttccggagctcctacttcaactggttccacttctccatatcctggggctacgccatcgcgtcggctgggctgagctacgtccaggacaacgcgggctggaccttggggttcggcgcgtgctggaccgcgatgctgctatgccttgccgtcttcttacttggcacgcggacataccgtgccaagcaacccgccgatggcggcacgttcgctgtgaccgtgcgggcgtgggccgccagggtcttccgtcgcaaggacgccactccaactgaaaggcttgttctaactccacagcctgagggcggcgggctcatagtcatagctaaactgctcccgatatggctgacgagcttagtcttcgcggccatcttctcgcaagtgtccactctgttcaccaagcaggccagcatattggacaggcaccttggcacggcgacgggcatcgttgtgccgcctgctgcgctccagtgcttgagcaacgtcaccttcatcgtcatgctccccttgtacgaccgcgtcatcgtgccgctcgccaggcgcctcaccgggcacgcctcgggcatcacgatgctccagcgcatcggcgccagcatggccacgtcctgcgtcgccatggccgtcgcggcgctcgtggaagtcaggcggctccgcgtggccagagacgcgggcctggtcgaccggccggacgaggctgtgccgatgagtttgtggtggatgattccgcagtatgttctcatcggcctcgccggtgtgctgggtcaggttgggctcgaggagttcttctacgaccaggtgcctgacactctccgcagcgtcgggctcgcgttgtgcctgagcatctttggggtgggaagctacgccagcagcatccttgtgtccgtcatcgactgggcgacgagaaggagaggcgacagctggttctctgacaatctcaaccgagcgcacctcgactacttctacgggctcctcgccgggctcgcggctctggaggtagccgcgttcttgcattttgcaaatcgatacgtctacacaaagaaagaagagctgtga

SEQ ID NO: 10743 - DNA, 221 bp, Zea mays
  Peptide Sequence Number=SeqID_52522
cattagtcgccgagagcgccgtccgcgccgaatggtactcgccgtcgaactccgtcatggtggtgccgtgctaccccatgcctccgtcgaccatgtgcggcgagcccccaccggccacggatgctgctgtcgcgtcaacgtctagccccgccagagtccgactagagccgtcgatgtccggccatggccaccgggccgctgccacccgcctcgcctgctag

SEQ ID NO: 10744 - DNA, 381 bp, Zea mays
  Peptide Sequence Number=SeqID_52523
atggccggaccaaccgtgctgcaccagccggggtgggtgggccgcgccgacgcgctgaccgtgctgctgcgagcatgccgcacgcaggaggaagcgggggtggctgggccacgccgtgggctgccatggccgccggttggctgccgcgctggctggctgagggccaccgagccgggcgagcacgcgggcagaggcccggacatgaagcaggcgcgcaggggtcgacgagcaggatttcccggccgcgcgaacgccatgggcgagattcgctggggatcaggcaccggccgtccatcggaggcatacatggcgaccgtcgacgatgggacgtgctcggcaccgtggaactccggacgcaggttcctagtgcagtgcccgtga

SEQ ID NO: 10745 - DNA, 420 bp, Zea mays
  Peptide Sequence Number=SeqID_52524
atgggttttccagggtcctttttagggtttttggtatttcaagggtgtgaatgtaacgtgtatcaaacatatgaaatgctgatgcttatgatgttatgctcaagttttagtaacagtaacaccaagggtgttacacgaaccctctgggactttggctacaatcggagcaaagtaccactcctatgtgacaatgagagtgcaatctgcatggcggataatcctattgaacacagccgcactaagcacatagacatccggcatcactttctgagggaccaccagcaaaagggagatatcgaggtgtaccacattagcaccgagaaccagctagtcgatatctttaccaagccattagatgagaaaaccttttgcaggttgcgtagtgagctaaatgtcttatattcgcgtaacttcgattga

SEQ ID NO: 10746 - DNA, 604 bp, Zea mays
  Peptide Sequence Number=SeqID_52525
atggccatgatgggttcaacatcggaaaagatgtacctctgccaggaccgtctcgatgtaggcttgctgaccgaggaccctttaactggtcacatgcctcgtcatggaggactcccactcgaacttgtcaccttcgggaatttctcaggccggcgcgctataattcaccggactgtccggtgtacaccggacagtgtccggtgctccaaggaagcgcggcctccggaactcgccagcctcgggatttcacttcagccgctccgctataattcactggactgtccggtgtgcaccggactgtctggtgtaccagcggagcaacggctatttcggcgccaacggctacctgcggcgcatttaatgcgcgctctgcgcgcgcagatggcaggcgcgcccatactggcgcaccggacaaggaaaagtgcatgtccggtgtgcaccggacatccaggcgggcccagaagtcagaagctccaacggtcagaatccaacggcagtgatgacgtggcgggggcaccggacatgtccggaagcaaaattattggccaatggagacaggaccatcactacgcaaagagactagccctgaggttttacaaaggag

SEQ ID NO: 10747 - DNA, 465 bp, Zea mays
  Peptide Sequence Number=SeqID_52526
atgattatgttactacatgaaattgggagtaaatctccctgcaaattgctctgtcagttgtctgaacccagctcaccatggtacagtactctgaataggatcagatcaacagctcagctcgacgccgacgagccgcgcgcaattcgtgcagtcgtcgccgcgattcatgctcggattttgcttagggtcacacaaatatcatcgtcgtggataactccggccagtaaactattccggccatcatgcccacttgccacgcggtcggtcgaaattatcctcactggagttggctgcccgatgaccgaacgccacgtcgcaaccctggtaacatactggtccgatgatcgccgggagggccgccacgaacccaaaacccccaccccctgctctttgaacttcactgttgactccggaaaccctaagttctcggagttccgtgaaggaaagttgtattcaagattttaa

SEQ ID NO: 10748 - DNA, 198 bp, Zea mays
  Peptide Sequence Number=SeqID_52527
atggcgaaggacgatcccgtggcgatgaggaggggtggcgagaaaacggcggtgacccggtggtccgcccccaggatgcggccagggcgatttatatacctcggagcgagtctaaagggtgaagagagaagcgccaaggatcccgagaagctagcatggagattccgttcgatctgccccagatgcggcgttggttga

SEQ ID NO: 10749 - DNA, 228 bp, Zea mays
  Peptide Sequence Number=SeqID_52528
atggggttggtcttcgaagcacaagcgatgggtgccaaatgttgggacctgacacgtgggcctaagcacttgagagtgcaggagtcgaagggggacatgggccagaaggccttcgacccctttccgtttgtcttcatcgggggaggtcgagcccccgttttccgtcgagggcgaccaagtctaaggggtgccttcgcgaatgaaggaactttgatcctctcgatgtag

SEQ ID NO: 10750 - DNA, 459 bp, Zea mays
  Peptide Sequence Number=SeqID_52529
atggtggcgcggatgatgcggtggcctcggccgccgccggcgcggaatatccgcgtccgcctggtggtgcggcgggcggagggcctgcccccgcctcctgcgcccctctcgcctgacgggtcccccggccccgaggccgaggcgaaggcgtttgtggaggtgagctggaagggcccgaagatgtcgccgctctcctcgctgcggcgcgcgcagcggcctcccaggaaccagacgcggaaggaggcgctgccggccgtcgccgcggccgctctcgaggatggcgccgccgccgcccctgctctagcggtgtcggcggtggcctgggacgaggagttcgagagggatgcggcgctcacggcgacgtcgcaccgtgagcccgctgcgttccacccctgggacgtcaccttctccgttgtcagcgtgagcatctcttccttctcccgccttcgtctcgcctga

SEQ ID NO: 10751 - DNA, 150 bp, Zea mays
  Peptide Sequence Number=SeqID_52530
atggaggaaagtagaaatccgagcaggggaagcaggaagggcgcacagggggagagaaccgctcggctgggagctgcgggagatttttggatcggggtgagacgtaatcggaacaaatcagaacagtattttggactgtgttccaattga

SEQ ID NO: 10752 - DNA, 879 bp, Zea mays
  Peptide Sequence Number=SeqID_52531
gaatcaaataaaatatcaaagagcaaacttgttttggggaccgcttcactgaacctagcagattatgcatctgctgctgaagaggaaatcgagataatcctaccattgtctgtgcctagtagtgcaacagacctggtcccatcactccatcttactttaagcctggcggaagtaagaacatctcaacaatcacctggcgcttcacaacgttctgttattgccccattgtcaccttcctctggtgactctcttgcttctggaaaagatgaggtttctgtcattaaggtgggtctgagaaatctgaaaatgctaagagatctagtgtctacacggaggttcaaaaagactaaccaagactttgacggcagtgagaagtattatgtccacagcgatggtgcagaattttcttgtgatactgactctcttgacgatgatctggatgatagagagcatgacgatgagtttgggggttcagccgttaggaagtccttcagctacggctcactgcagactatgaatgttggtgccctactttatgcgcctaggattgatggagacgatgagggttgggtacattacagtcaccgcaactctgatgttggttatcatgttgagcaagtgccaccccccacagctgaggagcatgcttccatccctttgcggcggaagaggagcatacttccagctcggtttggaatcgccgctttgcgagctgacttgaggaacctctgtttagaccttggtggcgagggtgtggatgattatggttgcaaaaaaccccaccctttgggggctccctcatcggggaggagagacaccattgtggtgtcgccggatctcgggataaaatctgtgtctgtgtccttgcttgatctgtga

SEQ ID NO: 10753 - DNA, 273 bp, Zea mays
  Peptide Sequence Number=SeqID_52532
atggccgagcagacggggagcgccgtgagcagagaagcttcgtgcaggagctgggaggagggacggctggtcgaaacctcgacagggaaatggatggccggtagaggaacacggctgcgcatagaggagcagggcgcaccatgggagcttcgcggctgtacaatggatcaagcagtctcattagctgcgagaagcagacgattcaaatcgaattttaaaccttgcaaggtctctgtgccaaaaatcacagaaagtgacttaatggttatttag

SEQ ID NO: 10754 - DNA, 645 bp, Zea mays
  Peptide Sequence Number=SeqID_52533
atgtcattcgataacatctgggacgagataagccgagcagcggagtgctcctccggaaagcctgccctctacattgtcagttggaacgaccacttctttgtcctcaaggttgacgccaatgctatttacatcattgacacgctcggtgagaggctgtctgaaggctgcaaccaggcatacatcttgaagtttgatgacaccaccaccatccacaaaacacctgctgaaaagaaggaaccaagtcctgatcaccgtggacgccgcaaggattcctcagagacctgctcaaccgagcagggcagcggatcggacactgaagagtgcgagcctgtgttgaagggcaaggatgcatgcaaggagtacatcaagagcttcttggccgccatcccgatccgggagctgcaggctgacatcaagaaaggtctcatggcatcaacgcccctgcaccaccgcctccagatcgagttccactacacggaaccccgccccgccgagatcgcggcgccttctccactgcccccattcgaagcccccttcgagttctgctggcccgagccaccgtcaccgccagctgccactgaatccaccgtgacccatccacctgccatggaggccggcataacccaggctgtcgccgttgtatag

SEQ ID NO: 10755 - DNA, 532 bp, Zea mays
  Peptide Sequence Number=SeqID_52534
atgggagaagctggagccggggcgagctcggacgcgcgtgggagctggagcaaggagccggtgcgcagaaagctggatgccaagcgccatggcgagcaggaagcagaggctggtgcgagctcgtgtgaaggaagacgagggagaaagatccgagttggagcttggagctcggcagcgtacggccatggcaagggagatccaagcgagcaagcgcaggggcgccgagcagacaagaagcaggcgtccaggggtgtggcgagcttgcgatgggaggaactgacggcggccatggcagagaaggagctcgacggaaatgagcgcaccagccacggtgagcagaggctgcgcgcgacgggattttatccccgagctaaagcagcacggcgtggaagaagcaagggtagaggagcagggagaaggaacggctgtagcccgcggccctgggctggggagctgcaggccggaaccagagtacggcgagctattgaaagaatcaaagaggcggcagataagaacgccaggatgagccaag

SEQ ID NO: 10756 - DNA, 468 bp, Zea mays
  Peptide Sequence Number=SeqID_52535
atgggcaagagcaagaaaggtggtatctcttcacatcactcgggcgacaagcgcaagcgcgagccgactcctccctcggaggacttcggcgactcggaatactcggaggaggagttctcctccgagtccgagggctctctggctcctacctctcccccggcgtcgtctgatgattcagacgactcccaggggatcgacgcggaggtatggacctacatccgggccatcgagcgcgccgggcttgagggctcggatgagtcggagtactcctcggacgaggaggattcctccgactcgtccaaggagggcagtggcggtgacggcgacgacgacgacgacgacggaggcgacggtggcggtggccgcggcagcggcaagggcggtgacggcagcggcaagggcggcggcggcgacggcggcagcggcagcaagggcagcagcaagggcagcaacaaggccagtggctag

SEQ ID NO: 10757 - DNA, 231 bp, Zea mays
  Peptide Sequence Number=SeqID_52536
atgtccgatcgaagattttattcggagactgttgacactctcgcaagctttaagtcggaattaatggacggtacgataattgatcgcgtgatgcggaagacgagccaagtcgaccccaaacacgggctaatccacaagatggtactgatgaacgaaactgaagatggacagacggagcaagtatcagaacaaaagatgatcgtcaagtggacgtcgtctaacaaacactaa

SEQ ID NO: 10758 - DNA, 315 bp, Zea mays
  Peptide Sequence Number=SeqID_52537
atggcagagaaggagctcgacggaaatgagcgcaccagccacggtgagcagaggctgcgcgcgacgggattttatccccgagctaaagcagcacggcgtggaagaagcaagggtagaggagcagggagaaggaacggctgtagcccgcggccctgggctggggatctgcaggccggaaccagaaacccagaatttctagcgatagcaaaagagtcgacggtaattgtgacagttgattcgattcaaaaatctgataaatttaactgcgatctgaacatctggttccacagacagagaatagaagctcaattataa

SEQ ID NO: 10759 - DNA, 231 bp, Zea mays
  Peptide Sequence Number=SeqID_52538
atgtccgatcgaagattttattcggagactgttgacactctcgcaagctttaagtcggaattaatggacggtacgataattgatcgcgtgatgcggaagacgagccaagtcgaccccaagcacgggctaatccacaagatggtactgatgaacgaaactgaagatggacagacggagcaagtatcagaacaaaagatgatcatcaagtggacgtcgtctaacaaacactaa

SEQ ID NO: 10760 - DNA, 246 bp, Zea mays
  Peptide Sequence Number=SeqID_52539
atggagaagctcgccgatcaagggagctggtatggaggcgaggcctcaccgaattttggagcagggaagcgcttggaggagggagatgaggagtcccgctggggaaggcgcatgctcacgctgctaggatccgagagaataagggaaccgacctggaggggagtcggagaaggcgaatcatgtcattttaaaatcactgccgatatgggttttgagtctgtttcggacatagagatattaggctga

SEQ ID NO: 10761 - DNA, 264 bp, Zea mays
  Peptide Sequence Number=SeqID_52540
atggcggcgacttttacgcccgtcgttgcgaaggagacgaacgcgctgacatgcgggacccattctctagtgggcacgacccacgcgtggaatcggttacagacaggtgggcgccacctagtcagcgatggtgatgagaagctgatccatgggccccaggcgtcagccgactgcgtgcgcgcggttgagaagctgggccgaggtggttgggctgtgagtgggagaagggagtgggccgaccaaggtttccttgattcaaattaa

SEQ ID NO: 10762 - DNA, 234 bp, Zea mays
  Peptide Sequence Number=SeqID_52541
atggcgttgacgatgaggttgccggcgtcgaagagcgagtttcccaagctgaagatggcccgtgtacaacttcttgctcctagccgtgtcacaggtggcaggccgcgccaccacgcgcaatgggatagtgacggcggcggagacatggggaccggggagaggagtagaggagtctggaagtcttgcgatgttaggagacgccggaagctcgattcaagtgtgtccgttggataa

SEQ ID NO: 10763 - DNA, 783 bp, Zea mays
  Peptide Sequence Number=SeqID_52542
atgtgcaaactgacaataaacatttctccaaatgtttctgaaagggagttcactcaggaccaagcctgtgctggtattcaagaggttcatttccttccatttaatcctaccgacaaaagaactgccttgacatacactgatagtgatgggaagatgtgctatgttagtaaaagtgtgctagagcagcaagtgccagatggaaagaaagagtgtcctggtaggccatggtttggttgggccgctcaggaggtacaaggcatcagacccctttggttacctgcattcagtcgcaagatgatgtgcgattttttaaatgtctacatgcagaatacatcacaactcagaagaaagcatacttcaaaagcgagagaggatatttactttgagaactatacgagttatgagattatttatgccataataacaataaatcaaagggacatgacaatgaagatcagcaaaggagatgcctgtgagaagtgggaatttttaaaaaaatggttaacaaagaaattcgtttctgcaatgaaatctcaacatgttattagcgatataagggatgccatttttctgcagttaacagtgcgagatgtaaagaacatcagtgaggacactgaaatgattcgtgttgttaaaactgaagatccgaatgatgcatctggtgtggtttctgcagtgattacaaatgctggtgttgcttcctatattacaggcgaagctctcttggttaatatgcatttagaggacattgcgactgaaacaaaggactcagagattcaatag

SEQ ID NO: 10764 - DNA, 219 bp, Zea mays
  Peptide Sequence Number=SeqID_52543
atgacggagaagcaacgtctcaagaggttcacaatcaacctcagacggtgtctcaataggcacacaaccgccatcaagcggaaggcgatgggagcctcacccacaacaaagaagtctaccgctgccaccttcccaccaatctccataatgcctgaggtcacctctgtctacccccagcctgagttaacaaggcttgaggctcacactatcggccaatag

SEQ ID NO: 10765 - DNA, 309 bp, Zea mays
  Peptide Sequence Number=SeqID_52544
atgcagcaatcaccagatctccgcccgcccatgacaatcataacggacaaattagtaaagcttgtcgaatcaacaggtcttcaaaagattagcacaacacgccacttggagattgatgctcaggatccctctttcataacaactcgaccttattttgagccgtcctctactgtcgatggcactccaagtatctcgagttctcaaccgtcgtcgcacctctttctgcatttcttatcatgccaattggtgatggtcaaagctgctgtgatgcaacgctctgactaccatggacgactggaatacaggtag

SEQ ID NO: 10766 - DNA, 294 bp, Zea mays
  Peptide Sequence Number=SeqID_52545
atggcctcgctagtccatcccgagcacttccagtccgagggggcactctacctgatgcacaacctgctcggatgggggacaccgacgttcgccggcatgatccgcgccagcgcctctcccctcggcgatctcggcgccgtggagttcgtgctcattatctcctatctcttctgcgggttagcgctgtcatctcgccctttcttcctgctgctgatggaggagctcggcatccaactttcagcaacttcacgtccccactccatcctacaaggcgggccatcttcgcccaactct

SEQ ID NO: 10767 - DNA, 324 bp, Zea mays
  Peptide Sequence Number=SeqID_52546
atgggcaaggacaagaagggtcaaggttcgccacgtcgctctagcgacaagcaaaagcgcgagccaagtcctacctcggaggatttcggtgactccgccggtctatgcttccccccggcgtcgtccgactactcggacgactccaaggggatagccaccgaggtgtggacgtacatccggtccgtcgagcgcgtcgggcttgagggctcggatgagtcggaggtctcctcggatgaggagaatgtggcagaaccacccgaattattccaactcaagtgcccaagtcgcacccttaaaggcagcaacacacttaaaccagaataa

SEQ ID NO: 10768 - DNA, 306 bp, Zea mays
  Peptide Sequence Number=SeqID_52547
atgccgagaagtaaaagttttaataggctccaaagccggccttctgtgagactgaataactccgaattcggtgaaatgtacgcctggggtgtcacagagaactcttccggctcgtccgaggaagggagcggcgacgatggcgacgacgaaggcgacggtagtggcgacgacagcggtggaggtggcagcgacgacggcaacgacggcggcaagggcggtggtggaggcagaggcggcggcaggagcgacgacggcggcaagggcggcagcagcagcaaggctagtggcaaagcaccactagcttaa

SEQ ID NO: 10769 - DNA, 585 bp, Zea mays
  Peptide Sequence Number=SeqID_52548
atggggctgcgcagcgagcacaagagcaatgtcacgcgacgaggggagaggctgctcgccatggacgacggtggctcgctgcggctgctgttttgtgggggggaatcggctgggtggaaaaaaaacaggcagggcgctgcagggagatgggagcggctggaggttgaagacaacggagaatcgctgctcgcagggggaaatgccatgggtgatgactggaaaaaaaattctgggcgccattgttggacttggcagccaagggagatgagaaagcagaaaggggcttcgggttccatggggaagaagggggcgaccacagggcaccatgggaagctctgcgcatcccgcagcaagggtgccatgccatggccgccgacgagctcactgcttgagctcggaccagaggagatgccgtgcccatggagaagaggagctcggctgttgggctgctcgccggccatggagaagtccctgcacgcaggggagaaaggttccctgctgccggacgccgcggagaagagggaaagctccctgcgccatggagagaggagagctggggggctgctgctcggccgcaccatttga

SEQ ID NO: 10770 - DNA, 621 bp, Zea mays
  Peptide Sequence Number=SeqID_52549
atggcgcttcctgtcgacatggtctgtccgcgccctaggttgggcgatgtggaggctcctccgaggtcgaggtcgagtctgtcttccgtggccgtggtcgagtccgagcccctgggtcgggcgaggcggagaccgtcggctgaggccagggctgagtccgagccctggggtcgggcgaagcggagttcgtcgtcttctggggctgagcccaacccgagttcgagccctgggtcgggcggagcggagttcaccgtcttccggggcttagcccgagtccgagccctgaatcgggcggagcggatcggtgcggcgcaggcggcgctgtccttctgtcaggtcggtcagtggagcggcgaagtgactgcggtcacttcggctctgtcgactgaagggcgcgcgtcaggggcctcgggcaagccggaagtatgttcgtcgctggaggtcggagatccaccggggcctttgcagctttgtgccgatgggggttaccagctgagaattaggagccttgagggttctttggaggacatggttgctggagtgacttggccgtccatcttgccactgtgttggactgtcgagtgggaccccgcctcggctgaggaggagcatgaggagtga

SEQ ID NO: 10771 - DNA, 585 bp, Zea mays
  Peptide Sequence Number=SeqID_52550
atgcaggcggcatgcaaccgcgccaagtgggctcacttctccgacttccaacacgcccagcatggaggcccaggcccacgcgtcatgcaaccggcgcgctggatgctgcgtgcgagcaactgcaccgccgcccgcgccactgccacgcctcctcgactgcggaaccagtaccgcgactcgaggcaaccctacgcacgacccagcagcgccagcctggcgcgatggaaaggcggcgcctctggtaggggaagcgagcggcgcttcgccttcgccataatgaccgcgtcaaaaaagggaccaggaaagggggataccccgaaaaggatccttctccgtgaaggaaccaggctccgagcctccctactgatcagaggttcgaaggctggcccctcagaggggttcaacagccgcctcagagcgcgtgggctccagacccactactggtcagaggttcgaaggccggcccctcagaagggttcaacgaccgcctcaggctactcgggctccgtgcccactactgatcaggggttcgaaggctggccctcgaagggttcacagccgcctcagacgcagagcgagggatga

SEQ ID NO: 10772 - DNA, 372 bp, Zea mays
  Peptide Sequence Number=SeqID_52551
atggacgcggtggcctgtaggatgctaagccgctcaaccccagctcgtcgaaggagtggagatcccggaactgttggacgggagatggtggaggagcgggtgtggggtgtggctgcggctgcgggcaggtcggggtgcgaggagcccgaggggagagcaagcggtggtgatggtgaactccccaccagctgctccatttcctccagtgggaagagggaggagggagggaggagggggccggcgcccggcggcgtacctggcgtcctggcggctctggactctggccggagtctggagtctgggcaccatcgtaggggctgccggctgaggacggctaggcggctggcggggctgaggacgtgtagggtttga

SEQ ID NO: 10773 - DNA, 801 bp, Zea mays
  Peptide Sequence Number=SeqID_52552
atggaccctccatcgtcgtcgggccgccccaccacgccgcgccggcagctgcagggcccgcgcccgcccaagctcaacgtcagggcggagtcgcacgccatcaagaagcactcggggtcgggggttccggcccccgggcgggcgcccgtcatcatctacgacgcgtcgcccaaggtcatccacgtcaagcccagcgacttcatggcgctcgtgcagcacctcacgggccccggtgggtccggcacgccgcctccgccgccgcagcagcacgagggccacatggtggacgacgacggcggcggcggcgtcccgctggggcaggcgttcctgccccccgagctgctgctgtcgccgtccgccgccatgtccccggccgcgcgcctggccaccatcgagcgctccgtgcgccccatgcccgcggcggcgccggcctacggcgccgacgacggcaccctggcggcggctctcggccccgcgcgccacccgggcatcctgtccccggtgccgtcctcgctgccgccggccgccgcgtgcgggctgttctcgccgctgcccttcgacgaccccggcagcatcagctggctcaacgagctcagccccatcctccgggcagcagcgtccgcggccaacgccggcgcctcttcgtccggcaccggcccgggcaacggcccgccgcctccgccgccgccggcctactactgcgacccgttcgtccccagcccccgcaacctcctcgccacgcccaccgttccctcgccggccacgtgcgcggagttcttcggcagcctaccggatctttag

SEQ ID NO: 10774 - DNA, 2004 bp, Zea mays
  Peptide Sequence Number=SeqID_52553
atggcgcgtggcggcgagagaagatcggcgtcgtcgtcgtcggctgcggcggcggcgggggtggcttggggagtggccgtcgagggctctcgcagggaaccttcgttttcagaggattgcagcacaagtgatgaagtttcagggccaatgaaattagagtatgagatttgggcaaacgaaccaattagtgttcaagaaaggcgccaaaggttcctgaagggaatgagactcgatgatttcgtgtctacgaggataggttcttttcaatgccatggtgaaatcacagccgtcgagtcttccactgacatggaggagagaactgtcagtggcctttcttccggggattcatctgtttgtgacaatgagtcagattttgacggtgcctgttgcataagggatacggatactggaaagagatatattgtccacaatggtgcacacagcagtataactggcatgcccaaggaggttggatcagataaggtgatgactcttctggagtttgagagtttgcttggcctctctaggtctgttcaaaagttattgcggaggggatgtggtaacagtcctgcaaaagaaacaaaaagtgctaaggaaaaggacggcaaaagctcgtcaaggaaattcgttacaaagagaagctttggtggcatttgcaagtacgatgtccatgtgaaaaattgcacaaacagtataccaaccagaacaagagttcagcaccggaagaaaaaatttcttgaattctctgctgtgtacatggatcaagaaatcagagctcacaagggttcaattagggtcatgaaattcagcccatctggctggtatttagcaagtggcggtgaggattgtgctgtacggatatggcaaatcatagaagtagaagcatctcctaagttatacaggggagaggatccgcatgaaaaggtggaaaaagttcaggtctttaagacaaatataggaaagaagcacaaccctgcacttgcagttatacccaagaaggtttttcgtatatcagagactccattacatgaatttcgtggccatgcaagtgatatccttgatatggcatggtccaaatcagatataagacagtgcgcttatggaaaccgggctgcgacggttgtctcgcagttttcaaacacaaagactatgttcaaccctatcgacgagaaatacttcatgagcggttcattagatggtaaagtgcgcatttgggatgtgttggacaaacgagtaactggctggacttatacgcgaactatcataactgctttgagttaccagtcagatggaaagggttttgttgttggcactattgcaggcgcatgtcgtttctatgatcaatctggtgaaaacatccagctagagaaagaattgtttgtgcaagggaagaagaagtcagccgccagtcggatcaacaatctaaagttatgtacaagtgattccaatagggttgtagttacatcaggagattccaaaatccgagtcgtcaatggtgataccatccaaaagtttgaagggccttggaagtcgaaggctctgtcatcgccgtcattaacatcagacggcagataccttatatctgtgggcaaagattccaacgtctacatttggaacttggcgaactctagagatgcaagatcggttcattcgtgcgagctgttcttctccaaagctgtaactaccgcagtaccatggccgggagtgtaccaagatgggcacacgaagccttcctatctgactgagaaatactgcagcatgcccattttgcgccaccacggggagtgccagtccgctgagccgtggtcgttcgtggacggcagcaagggattggcgacatggcctgaagagaagttgccttctacagcaaagcctggaagcagcccgcagctgggcgactgtctctccatgatatccgccgcgtggagcacggtcatcgtgaccgccagccgcgatggcgtgatccgatcttttcacaactacggcttgcccgttagattgtga

SEQ ID NO: 10775 - DNA, 873 bp, Zea mays
  Peptide Sequence Number=SeqID_52554
atggccgcgtcaaaaaagggaccgggaaagggggataccccgaaaaagacccttctccgtgaaggaactaggctccgagcctccctactgatcagaggttcgaaggctggcccctcggaggggttcaacagccgcctcagagcacgtgggctccacacccactactggtcagaggttcgaaggccggcccctcggaagggttcaacggctgcctcaggccactcaggctccgcgcccactactgatcagggcgggaacgatcttgtaacggaatcccatcaaagggcaaagggaggcatcgagccctcggaccccgtcgacaggggaccgggtccggcagatcacccgcaggcagtcaggcccgacctcaggcaccataggaagctccgctccgcccgacccagggctcggactcgggctcagccccggaagacggcgaactccgctccgcccgacccagggctcggactcgggctcagccctggaagacggcgaactccgctccgcccgacccagggctcggacttgggctcagccccagaagacgacgaactccgctccgcccgacctagggctcggacttgggctcagccctggaagacggcgaactccgctccgcccgacccaggggctcggacttgggctcagccccagaagacgacgaactccgctccgctcgacccagggctcggacttgggctcagccccagaagacgacgaactccgcttcgccccgaccagggctcggactcagccctggcctcagccgacgatctccgcctcgcccgacccagggggctcggactcgaccacggccacggaagtcagactcgacccccgacctcggaggagcctccacatcgcccaacctag

SEQ ID NO: 10776 - DNA, 618 bp, Zea mays
  Peptide Sequence Number=SeqID_52555
atgggggtagtggagcgtagaaaccagactgtagtggaaatggcaaggtgcatgatgaagagtaaaggggtgccatcaagattctggggtgaggctatgacaacagcagtctacttgttgaatagatcccctaccaagagtgtacagggaagaacaccatatgaagctaggtttggcaagaaacccagtgttcaacaccttaaaacatttggttgtattgctcatgtgaagaaaaatggcccaggggtaaacaaattgtcagataggtccactaagatggtcctgttgggttatgagtcaggtacaaaagggtatagattgtttgatcctaccactgagaagctgtgtatcagcagagatgtagtgtttgaagaaagtgaaagatgggactgggagagtgcagaaaagaatcagcagactgaaactacaattcctttcactacacagtttcagtttagtgtgccagatcagacaatacaagcaccagctggttcaggtgatacgagtgagtcttcaggggggtgctgctgcatcaccaccctcaccacaaacacctatgacaccttcagtgtcccagaatcaatcccaagctacatctgctgcctcaggttcaaataa

SEQ ID NO: 10777 - DNA, 927 bp, Zea mays
  Peptide Sequence Number=SeqID_52556
atgcaggggcttgacatgggtatcagccatattcgcttgatgtcgctgcgcataaggagcgagtgtcgcgcctgggctactggctacgacgatggttcgacgggcggggagctggacgtcgacgaggggagtgggcgggctgcgcatgttggccgagcagggtcgccatggccggccatagggggcgtgcacgaggctgggagtcgtgggctggctgcgccaaatggctgtgccgccacactggctagccttggccgccgcgctgggctggccgcgagctgccgcgagcaggggctagggaaggggaggggagagggaggggcggttggccagctcggccgagccatggccatggcaggcgcaacaatgggacaggaggaggggatagagaggggaagggcaggggctcatcacagcgatgaacctcgacaacgacggcaaggcacggcgggcgtggatgaccaggctctggcgaacagcatgacaacggcggcagcgacactccgagcagttggtacggctccggtggcgcgcaagagccccccgagtcctccctcggaggacttcggggactcggagtacccggaggaagcctcctccaagtatgatcgctcgctcactccggcgtacgcacgatccatcgagcgtgcggggctcggtgggtcgggcgactcggaggaggccccctcaaaggaggtggaggattcctcgaactccaaggaggggagcgacagcgagggcggcggcaacgacgacgagggcaacaacggtggcgacgacgacagcagcagggtcggcgacggcagcggcgatgatggcggcgatggcagcgacgatggtgacggcggtgaaggcagcagcagaggcagcaatggcggtaacaagggtggcgacggcaacgccggtggcatagtgttgtcggcttaa

SEQ ID NO: 10778 - DNA, 573 bp, Zea mays
  Peptide Sequence Number=SeqID_52557
atgtcggaggcaagactttggtgggttagtgactgcccagccgcgaagggttcggccaagaatgcgacccatgggctaggttctgcaccctctagtggtggctggggtggctttgctgatctggccatctctagcgagatcgagcaggctgtggcgggggtgctgaagaggtatgcggagtttgcgaaggctactgcggatgcatcatgcactgttgccgaggtggctgatgcggtgcggacaggggcggacccaggcccatggccacctgggccacggcccggggcgcaggcccaaaaattttttagaagagctcgtgtccaactaccacctctggagtctggctggactgtgctgaagagctgcaagcctgcatctgctgtggtcatgatacatcgcctctgtaggtctgccctctggcctcgcccagtctaccgcccagtctgctgtccagtccgccactgcctctacgccgcctctgctggcttgcccagtccgccgccgagctcacgcgccctcctccgcctagtccgccactacctctatgccctctgttgtcgcaccgtccgttga

SEQ ID NO: 10779 - DNA, 948 bp, Zea mays
  Peptide Sequence Number=SeqID_52558
atgctgccgttcgtggaaagggacgccaatgccagtagcctcagggacggcagtggcaatctcaactggcagggcggcggcgccgttaccgcctccacgccgccgaagctaaaggcagcgcccaagaagaggttccaggaggacagcgagaaccaggacccttcgctggccacgccgcccccacggcaggggccaagtaggccgccgttcggtgcccctcggtggaacaagcatgccaaggagaccattaagtccagtgcggagaagcggccggacaacgctgagaaggaggcgctgctcaataagcacgccccgccgaggcagctcaagagcactctctcagcgaggaatctcttctctggaaaggatatacttggacagatttcggagttctacgatgagctgaagcggatggttggcggcagccggcccgttacagacacacaggaggtttacagcttaaacccgatgaatccgagcgatttgatggagaaggtggttcctgatgcccctgacagtttcatcagcaatccagttcccgcagagatcgtgaaggaggtggcgacgcaagaaagagtgaaaaagagtccaagcccaatgaagggaaagaaggtggggttgaaggtggaagcagggaagccaaggtctccctctgtgctcaaggaggtgaaggcaacaccgccgactccgcagcggtttccatccccatcgccgaaccgcattaagaatgttaagcttggaggggcggccatagcaggatcgccactcaagaacccactgaaggagaaggggacccctagtaacagtaaggatccggagagcaaaaaatatgctgtgaggcaaccctttggggttaaggatatgaataatacaagagcatgtgatgcagaagggagctccagcagcatgttttggttcttgaagccctgcactttccttgtggagtag

SEQ ID NO: 10780 - DNA, 945 bp, Zea mays
  Peptide Sequence Number=SeqID_52559
atgcaggcggcatgcaaccgcacccagggggcgcaccctttcgacttcaacgcgtccaacatggaggtccaggcccacacgtcatgcgggcggaagcggcagtcaagtcgtcagcaagctcacatcccctcctgggatagcgagaggaccctctcccacgacgacaggcgacacctttggcaggcgaagcaggcgacgcttcacctccgccataatgaccgcgtcaaaaaagggatcgggaaaggggatactccgaaagggatccttctctgtgaaggaagcgggccccgagcccccctactgatcagaggttcgaaggctggcccctcagaagggttcaacagccgccttagagcactcgggctccgcgcccactactggtcagaggttcgaaggccggcccctcggaagggttcaacggccgcctcaggccactcgggctccgcgcccactactgatcaggggttcataggctggcccccgaagggttcgacagccacctcagacgcagagcgagggatgacacagggtacgttcgatacataccaaggctcgggctacgctcccgaggtaccctacgacatttccgagaccaatgggaacgattttgtaacggaatcccaccagagggaggcatcgagccctcggaccccgtcaaaaggggaccgcgccgcctgcgtcgctccgactgctgtgccactcgacagagtgaggctgacagcagccaagtccgacctcgggcgccataggaaactccgcctcgcccgaccccagggctcggactcgggctcggccccgggagacgacgaactccgcctcgtccgaccccagggctcggactcggcctcggctccgaaagacgacgaactccgcctcgcccgaccccagggctcagactcgggctcggccccggaagacgacgaactctgcctcgcccgaccctag

SEQ ID NO: 10781 - DNA, 711 bp, Zea mays
  Peptide Sequence Number=SeqID_52560
atgcaggcggcatgcaaccgtaccaagggggcgcaccctttcgactccgacgcgtccagcatgggggcccaggcccacacgtcatgcacaacggctaccccgcgaaccacacgtcacgtcgcattgactttgtggcagggcaagcggcacctttggcaggagaagcaggcgacgcttcacctccgccataatgaccgcgtcaaaaaagggaccgggaaaggggatactccgaaagggatccttctccacgaaggaagcgggccccgagcccccctactgatcagaggatcgaaggctggcccctcggaagggttcgacagttgcctcagagcactcgggatccgagccctcatactgatcagaggttcgaaggctggcccctcggaagggttcgacagccgcctcagagcactcgggctctgcgcccaccgctggtcagtggttcgaaggctggcccctcggatgggttcgacagccgcctcaagccactcgggctccgcgcccactactgatcaggggttcgtaggctggccccccgaagggttcgacagccgcctcagagcacacagagcgagggatgaccctgggtacgtccgatacatggtcgaggctcgggatacgctcccgaggctcgggggctgctctcgcaaatccggctccggccaaaccgttgacaacgtcaacataccagcccgagaacttggaacctga

SEQ ID NO: 10782 - DNA, 513 bp, Zea mays
  Peptide Sequence Number=SeqID_52561
atggagaacaaccccaacctccgagacttcttctcccaatcctcctcggctaggatcccccatggtcgtgaagctcctgaagaagacatgggcgtcttctaccagacacagttgtctcggccaccgtctatcagtgccccagccactcgtctacacattgaagatctggatctcaactcccttggtaacttcccaaatttattcgcctaccaagaagtactccagtccgatggtgctacaccctacctagggttgcctccctcaggtcgtggaattagaacagggcgcacaccctgtcaatttccccgatccagtgcgggagccatgagatccagaggtggccacaagtttttcgtggtcgaggtggatctagaggatgtcgtggaggtcgaggaagggccacagttactcgtggtggacgctctggtgtcaacccaaccactgaccatgcccttgttcaagatctggaacatgaagaagaaaatgaattggacactcgatctccagtggtaa

SEQ ID NO: 10783 - DNA, 900 bp, Zea mays
  Peptide Sequence Number=SeqID_52562
atggccaccctgaaggcatcgatcttggccatgcttggtttcgccttcttctgcggtgctgccttggctgctcgcgacctgagcgacgactctgccatggtggcgaggcatgagcagtggatggcgcagtacagagccgcgtctacaaagacgcctccgagaaggctcggcggttcgaggtgttcaaggctaacgttaagttcatcgagtcgttcaacgctgttcgccgatctcaccaaccacgagttcaggtctatcaagactaataagggcttcaaatctagcaacatgaggatccctacaggatttaggtatgagaatgttagtgccgatgcgcttccgacgaccatcgattggaggaccaagggtgccgtcactcccatcaaggatcaaggtcaatgtggttgctgctgggcgttctcagccgtggccgccacagaaggcatcgtgaaaatcagtaccgggaagctcgtctctcttgcagaacaagagttagtggattgcgatgtccatgacgaggatcaaggttatggcaagtgcaagagtggatcaaatagtgccgcaaccataaagggctatgaggatgtgccggcaaatgatgaggctgccttgatgaaggccgtggcaaaccagcctgtgtcggtggcagtggacggtggagacatgacgttccaattctactctggtggtgtgatgactggctcatgcggtactgacttagaccatgggattgctgccattggttatggaaagactagcgatggtactaagtactggctaatgaagaactcatggggaacgacttggggcgagaatggatacctaagaatggagaaggatatttcagataagaggggcatgtgtggtctagccatggaaccttcataccccactaagtag

SEQ ID NO: 10784 - DNA, 186 bp, Zea mays
  Peptide Sequence Number=SeqID_52563
atgggcattctacctgctgttggagctgacagaaggaaaggggaggctcaaggcaatgttcttcttgcatcaattgagaatatgcaatatgcggttactgtagatgttcttcatactgtgttctcatcatttggttcagtccaaaaaattgctatttttagaagaatggggggacataagctttga

SEQ ID NO: 10785 - DNA, 258 bp, Zea mays
  Peptide Sequence Number=SeqID_52564
atggcgatggcctccctaaggcgcgcacggcggcgaggtgggagcggcagcggcatcggatcccgaaggcatgcacgcgatggtggcccccatgaggtttttacgacctatatttcagttcatggctctgcttccatctatttgtctgtttatggtatttctattcacattttacgcaaacggtttattgattttatgctttatcttgtttacttaatccagtgtattgggttcctaccatttatgccatatgtataa

SEQ ID NO: 10786 - DNA, 282 bp, Zea mays
  Peptide Sequence Number=SeqID_52565
atggcgaacacaacaaagggattcttaccgatggtggggatggagagaaggttaggcatggtgattggcggcacccaggctacagcgagtgattcaccacgaatctgtaatgccccgagtcctgatgcccacgtttacgtgaaatacacctatcgctatagaagtcagtttgacgagccaaatcatgattggcttgaagccattcaggcgaccagtgatgagctgctgggggcttatatgaaggcaaaggacgaagctatgaacactgcctgcggtgattga

SEQ ID NO: 10787 - DNA, 777 bp, Zea mays
  Peptide Sequence Number=SeqID_52566
atggcagtaagaaccggcgacgcccaccgtgaacggcgtcggtggccatgtttggcgctggtgatgtactggtggcgacaggaggcccgacgtggcagtcgggcagagatgaggggtaccctcaaggctcctaaatctcagttggtaacccccatcagcacaaagctgcaaaggaaactccgcctcgcccgacccaaggctcggactcgggctcagccccggaagacggcaaactccgctccgcccgatcccagggctcggactcgggctcagccccggaagacggcgaactccgctccgcccgaccccagggctcgaactcgggctcagccccggaagacggcgaactccgctccgcccgaccccagggctccggaagacagcgaactccgctacgcccgaccccagggctcggactcgggctcagccccggaagacggcgaactccgctccgcccgaacccagggctcggacttgggctcagccccggaagacggcgaactccgcctcgcccgaccccagggctcggactcaggctcagccccgaaggatgacgaactccgcctcgcccgacccccagggctcggacttgggctcagccccggaagacggcgaactccgcctcgcctgacccccagggctcggactcaggctcagccccgaaggacgacgaactccgcctcgcccgactccagggctcgaactcaggctcagccccgaaggacgacgaactccgcttcgccccgaccccagggctcgaactcaaccctggcctga

SEQ ID NO: 10788 - DNA, 241 bp, Zea mays
  Peptide Sequence Number=SeqID_52567
ccggcgtcgtaccttcctggtgcccgcccttggtgctggcgggccgtgctgtgcagcaacacggtggtggaagcaatctgagaccgaggctgtcatcgctcccggagttcctgcggtgcggccgtgtgcgggtggtcgtgccggctcgccggcgtgggccacggaagctccagggagcttcgtcttcagaatggaagttcttctcctatatgaaggcatacaggatgaagatgtgatctga

SEQ ID NO: 10789 - DNA, 426 bp, Zea mays
  Peptide Sequence Number=SeqID_52568
atgggcaagagcaacaaacgcaagcgcgagccgactcctccatcggaggacttcggcgactcggaatactcggtggaggagttctcctccgagtccgaggggtctccggctcccgtctctcccccggcgtcgtctgacgattcagacgactcccaggggcttgccacggaggtctggacttatatccgggtcgtcgagcgctccgggctcgagggctcggatgaatcggagtactcctcggacgaggaagactcatccgaggagggcggtggcggcgatggcggagacgacgacgacgacgacggaggcgacggtgacgacggcgacgatgacggtgatggcggcagcaagggcggcaacggcggcagcagcaggggcagcaacggcggcggcagcagcaagggcagcaacaaggccagtggctag

SEQ ID NO: 10790 - DNA, 339 bp, Zea mays
  Peptide Sequence Number=SeqID_52569
atggcgcacgtcttcgaatctcaggacgggttcggtcgctacctcgggcggatttccgcctcgctcgagcccggctttgatctcaatatccatgacggaggatgcccaacgtcgttagatactgtggagctgacgcaccccttaagaagcttttccccatacttagcactatgtcaacctctacggtatgggcgacccctcgcaggggggctcaggaggcagagatggggcaaccgtaaccgtgccacccgtgacaccccatgccctgatgaagctcatgggctggctgatgacgcagactcccttgcgaggcatcatcagcgaaacgcgcatccctag

SEQ ID NO: 10791 - DNA, 183 bp, Zea mays
  Peptide Sequence Number=SeqID_52570
atggcgaagctaaccgagtggctagcacggcttggaagcaactggggtgggctggccacggtggccgaggctctggtggcaatggcgggcggaaaagagttaaggacgggcgtctggccggtgaagagatttggagccctgaaatccggtctatctctctgctcgaacccgaggcaaatctag

SEQ ID NO: 10792 - DNA, 453 bp, Zea mays
  Peptide Sequence Number=SeqID_52571
atggccaaggattgggctacaatctcaaggtaccctaagacatatccgagacccacgggagcgattcaagacggtaccccatcgaagggaggcatcgagccctcagaccccatcaaacggaaaggcagcgaagaggcgtataaccaaaaaagtcaaggcgaccctcgatcaacctctcgccttgtgcagaggctcaggggctacccttgcacccttgctacgacaaacgtgttggaaactccatcaatccaacataggcgctcaggggctcccttcgcacccaagctacggatgaagtcaacagcgccaacagaggtgaaaattaagaccccgaaggagtcaacctgtccttcaggcctctggggctacacccgacgagtgcaatctcgcgcacccatcagaaacaaaaacttccacttcttatggaagatagcgtacccactcaaagaatag

SEQ ID NO: 10793 - DNA, 798 bp, Zea mays
  Peptide Sequence Number=SeqID_52572
atggggccgagaggcctaaggagccaggggtcgaggctggcggttatagcccggtccagcctaaagcgcaaggctaacgagccaacttttaccgccaccaaggctgtgaagtctagtggagccgtggagggacatcagccgaggcaggctaggaaggatgctactgtcaccgaggtggccacggtgcctccagcgacattagttgaggctatcccggggcttatcgcaaagtccgcatccaagtccatcttcatctgtcgtgagcgcgttgtctgggtcatgctgcagcgccaacagggcttgatgtatcatttaaacaagcaactagcccagaagagtgatgaggatgtgcacctgacatcgctgtgcgcagagctgaaggatgaggtcatggctgcgcgtggaaaggtggcaccactggaggaggaggtgcggctcctaaaggaaagccttcagatgatgaccggcgagcgagatgagtctctacgccaagcctccgaggcttcctcccgagccgactccctcgcgaaggatctggagggcgagcggccgtggtctagaagatcgccgagcttaaggatctatctaacacggtggcagacttcggtcgaggcctcggagtcgagggcgtcccctcggcgggtgtgcgaaggctatattctgtcggacgaggatgacctcgctgaggcagaggtgcaacggctcaccgatgttgtcaaggggctgggctcgatgctagagcaccacttcaaggaggaggtggttccgcaaatgtcgcctcctggtgttgggtcctaa

SEQ ID NO: 10794 - DNA, 552 bp, Zea mays
  Peptide Sequence Number=SeqID_52573
atgtctatcgttgtgaaagaaagtttaaaatcttcatgcacacacattggcccccacgtcgatcactccacgggcggcgacaccgcgaccgccaccacacccgccactttctccttccttcctctcgcctcgccaccgccagagcagaatgctggaagaccacgcggatgcaaggatggcggtggcgaggccacggccacgggacctcgcctcctgcgtcccctgcttggcttggccaccggtggcgactatggaggcagcgacgcgcttggaaccagatctgccatagaaatgtgtcgatccggtgggctagaggtcattgctggccatccctcagcccatggtcgcgcgattgggttctctggtggcagcacgatctccgtggctctgctacgggccacgcttgcgtgggagttctaccgcgtggtggagctgcctctatttggagggtgtggtgtagcatggagaagaccttggttggtggcctggctcggggtggttggtgtccgtaacaggctggccttggggcaacagatagatctggaggtctga

SEQ ID NO: 10795 - DNA, 474 bp, Zea mays
  Peptide Sequence Number=SeqID_52574
atggccctggtctctctctcactcacctgttggccgttctaccacattctacccggctggtccgcaccacctgaggcacgtactgagggcgtgtttggatgcagcggctatggaggcaacgactatggaggcagcgacacgcttggaaccagatccgccacagaaatgtgtcgatccggtgggctagaggtcatagctggccatccctcagcccatggtcgcgcggttgggtgctctggtggcagcatgagctccgtggctctgctacgggccacgcttgcgtgggagttctaccgcgtggtggagctgcctctatttggagggtgtggtgtagcatggagaagaccatggtcggtggcctggctcggggcggttggtgtccgtaacacgctggcgttggggcaacagatagatctggagatctggtggtcggatttcccatccctaaggccgatgccagttgtggagcactag

SEQ ID NO: 10796 - DNA, 541 bp, Zea mays
  Peptide Sequence Number=SeqID_52575
atgtggtatggagttccaggaaaggatgctgtaaatttggaggcagcaatgaggaaacacctacctgacttgtttgaggaacaacctgatttgcttcacaacctggccgcactatcaccagcccaattaggaactcgcgttctcaccagccgccgcactccagggcgcgctccagcctccaggccgccgctgccgctgctccaaccctcctgcgccgcccgtccggtgccgccaggcccgcctctgcgtgccgctgctccaggccgccgccgctccaggcagctgctctccaggccgtcctccctccaggccgctgctctccaggccgtcctccagccccgcctcagagcctctgtgtgccgccgctccaggccgtcctccctcctgcgccgcccgtccggcgctgccagccccgcctctgctgtcccactgcggcaggactacagagtacagagactgactatcccactgtccgctggcgtatgctccactgttgtcgacttgctattatttgaaccttgtgttattgtgggtaaacctg

SEQ ID NO: 10797 - DNA, 1921 bp, Zea mays
  Peptide Sequence Number=SeqID_52576
atgcggtgtgcgctgtgcgctgtgccgagacagatgcgtgcgacggtgcgagggagactcagcactccactcacctggcgccacgtcgccctcccgttgggcctctttgcctcgcgggccgactgggccggctattgtgaagagagaaagggtcttgtgtgggctggctattccaggccatctggcccgtccatctacgtgacggatacttctcgtttcccctcctcacgcggccgcttctgctcggtgccccctctcctctacagctctactctcccctcccgcggaggcgtggacggcatggagttgggggagcccggggcccgtggatgccgtggtcccgtgcgattactcggatctctcggtttgctgatcaaagcgtcgtcctccgatgcagcaatgatgggaacagagtgcatcatggccacactcggcggggatcctgaaccctcaattccacctggattcggaccttttgttgccctcgcgctacagggcatccaaaacaatgccaaatcagctgatgctcattctagttctgctcaagcagcacactgcatggagaaagatgttgaagttctggaacacggttcggcgcatggttggagtgacactcctgctagtacttcagggacccatagttgcaggaggtcacttcgtaacaggcctccaatagactatagccagttcgaccttatctcggacgaagaatctgatgttgaatcagcagaaaagggagtgggattagtgagacgcagacgacaattaccgaaaggagtacttcggggatgcgcacaatgtgctgattgtcaaaaggttgttgcaaggtggaatccatctggtgcaaggaggcctgttcttgaggaagctcctgttttctatccatccgaagaggaattcaaggacaccttaaaatacattgagagtatacggtctactgcagaaccatatggaatttgtcaaggtgacaagctccaaaaccgtaaatcatccaagaagggcagaagaggtgggatgatgaagaagcggaggaagcttttagagctggaagataacaataatattaatctcaatcaaactggggtgcagcaaaaccaagagaggtttggatttgaacctggacctgagttcacacttcagacatttaagaagtatgcagatgatttccgtgaacaatattttaagaaagaagtgcccgcggactcaccaccatcagtagaagacattgaaggcgagtattggcgtatagtcgaaaagcctactgaagagatagaggtagtatatggtgctgatttggagactggaacttttggtagcggcttcccaaagtcttctcccgaagtaaaatatgatgttgagcataagtacttagagtctggttggaacctaaacaacttgcctagactacaaggttcagtactatcttttgagggcggtgacatctctggaaaggatgctgtaaatttggaggcagcaatgaggaaacacctacctgacttgtttgaggaacaacctgatttgcttcacaacctggccgcactatcaccagcccaattaggaactcgcgttctcaccagccgccgcactccagggcgcgctccagcctccaggccgccgctgccgctgctccaaccctcctgcgccgcccgtccggtgccgccaggcccgcctctgcgtgccgctgctccaggccgccgccgctccaggcagctgctctccaggccgtcctccctccaggccgctgctctccaggccgtcctccagccccgcctcagagcctctgtgtgccgccgctccaggccgtcctccctcctgcgccgcccgtccggcgctgccagccccgcctctgctgtcccactgcggcaggactacagagtacagagactgactatcccactgtccgctggcgtatgctccactg

SEQ ID NO: 10798 - DNA, 273 bp, Zea mays
  Peptide Sequence Number=SeqID_52577
atggctggaccggcctgctctgctcctgagcaacatcgtcaaggcggaggcggacctctggactctggaggcaagcgggagctagccatcaaaactcactgtactacactaactacaaaatacctgcccaacaccaactgtgacgacgactttgcaactgttgatgatgactatggctaccctgaaggcgatggctgcattggaggcgtgatgacgatggcagcatacaccaaagagatgaacactctaatgacctcgacggtgcatgcatga

SEQ ID NO: 10799 - DNA, 861 bp, Zea mays
  Peptide Sequence Number=SeqID_52578
atggggctgcgggacatcgagctcacgctgccgccggggttccggttctaccccagcgacgaggagctggtgtgccactacctgcacggcaaggtggccaacgagcagctcgcaggcgccggcgcagccatggtggagacgtgggcgaagctgagcaccaacgactggtacttcttcagcttccgcgaccgcaagtacgcgacggggcagcgcgccaaccgcgccaccaggtcgggctactggaaggccaccggcaaggaccgcgccatccacgaccccaggtccgccatcgtcgtcggcatgcgcaagaccctcgtcttctaccgcggccgcgcgcccaacggcgtcaagaccagctgggtgatgcacgagttccggatggtggaggacccccacgccccgcccaaggaggactgggttctatgcagggttttctacaagacgaaggccgacgacgccacggccgacagcgagcaagacgccgtgcgtatgcctcgcggcggcggcggcagcgctgatccgagctgctactcgcctcctccgttccccgcggcgctcggcggcagccaccaccaccaccaccatctgccgccgccgccgccgtcttcagaccgccgccacggcgccggctcccccgacgacgacttccccggaggcatggcgctgctgcagcacagcagcggcatgttcgacttccacggcggccagcctcgccctcacgacggcgtcgtcctcgctgggccggctgctgcagcggcggcgccggcgtcaagagacggcggcgatcagtgtggcagcggcgcgctcattgacctaggactggacgagcactacacctacaacagcctgctgcagatgtga

SEQ ID NO: 10800 - DNA, 3972 bp, Zea mays
  Peptide Sequence Number=SeqID_52579
atgatgggaacagagtgcatcatggccacactcggcggggatcctgaaccctcaattccacctggattcggaccttttgttgccctcgcgctacagggcatccaaaacaatgccaaatcagctgatgctcattctagttctgctcaagcagcacactgcatggagaaagatgttgaagttctggaacacggttcggcgcatggttggagtgacactcctgctagtacttcagggacccatagttgcaggaggtcacttcgtaacaggcctccaatagactatagccagttcgaccttatctcggacgaagaatctgatgttgaatcagcagaaaagggagtgggattagtgagacacagacgacaattaccgaaaggagtacttcggggatgcgcacaatgtgctgattgtcaaaaggttgttgcaaggtggaatccatctggtgcaaggaggcctgttcttgaggaagctcctgttttctatccatccgaagaggaattcaaggacaccttaaaatacattgagagtatacggtctacagcagaaccatatggaatttgtcgtattgtcccgccgccttcatggaaacctccatgccttcttaaagagaagaacatatgggaatgctcaaaattttgtactcgggtacagaaggttgacaagctccaaaaccgtaaatcatccaagaagggcagaagaggtgggcaaaaccaagagaggtttggatttgaacctggacctgagttcacacttcagacatttaagaagtatgcagatgatttccgtgaacaatattttaagaaagaagtgcccgcggactcaccaccatcagtagaagacattgaaggcgagtattggcgtatagtcgaaaagcctactgaagagatagaggtagtatatggtgctgatttggagactggaacttttggtagcggcttcccaaagtcttctcccgaagtaaaatctgatgttgagcataagtacttagagtctggttggaacctaaacaacttgcctagactacaaggttcagtactatcttttgagggcggtgacatctctggtgttttggtcccttggatgtatgtcggaatgtgcttttcatcattctgctggcatgttgaagaccatcatttgtactcactgaactacatgcattggggtgctccaaagatgtggtatggagttccaggaaaggatgctgtaaatttggaggcagcaatgaggaaacacctacctgacttgtttgaggaacaacctgatttgcttcacaacctgattcaccaaaggatatctccagcaccaatgatcaataagttcctaaggtttttattgaaacccagagccatctgccaaagaggtcaaccagcttcccggccgccgccgctccaggcagctgctctccaggccgtcctccctccaggccgctgctctccaggccgtcctccagccccgcctcagagcctctgtgtgccgccgctccaggccgtcctccctcctgcgccgcccgtccggcgctgccagccccgcctctgctgtcccactgcggcaggactacagagtacagagactgactgtcccactgtccgctggcgtatgctccactgttccatccaaaagccactaaaagcaggtccagaggttactcaattttcaacatcattgcttaaatctgaaggagtaccagtctaccgatgtgttcagcatgagggagagtttgtcctaacgttccctcgggcataccatgctggtttcaactgtggcttcaattgtgcagaagctgttaatgtggcaccaattgattggttaccaattggacaggatgcagtcgagctttatcgtaagcaagctcggaaaattactgtttcccatgataagctgttgctaggggctgctagagaagcaataagagctcattgggatattctgttccttaagagaaatactgctgataacttgaggtggaaaagcatgtgtggacttgacagcactatatgcaaatcgcttaaggcaagaatcgatttggagttggcgcaaagacaaaatatatgctctccatctcaatctagaaaaatggatgctgaatttgattctactgatagagagtgtgcattgtgctattatgatctgcatctttctgcttctggctgtccatgttgcccagggaaatatacctgccttgtacatgcaaagcagctttgctcatgtgactgggacaaaagatttttccttttccgttatgatatcaatgagttaaatatgttggctgatgctttaggtgggaagttaagtgcaattcacagatggggtgtctctcatcttggattaagtttgagatcatgtgtcaaaagagaaaaagaccaagattcgaagactcctcgcagagtagctgatggccccagaaggtcctacatgtctcaggcgtcaacagtatcattggcaccttcgttggtttgcaatgaacagaacaacaatggtaataagatgctggacaaagctagtttggaaacggatacttgtccttttacagagcaaataaaatctggaactatttcactacaggaggcacacatgaagactgaggtatcctgtacactaaacagcagtgtcattcctgaaggccataaaagctcactaagcttgccagttccttctggccactcactttcttccaattttgcgacaaggtctttaagtactgcaggagaatctgtgaaaaacacatatgacttggtagtatttaaagggagtagagaatcttcgcgggctggagactgtatctcttcgcctggtgtgcatcataacataccgccaataatgattgatcaaggaagcaacatgaatcctagtatggagagctcaaacaattcacataggctgatggcatctaacactaatgcaactcagttttactcttacaaggaccaaatgcatgtaacaccagagactagggcctcagtgatgacagaaaaagatagcagtcaagcttctgctgcatcaagtcagccctttgcgggaactgttttaagagcacaaagtgtatctcaggaagcttcacctagcgtctttacttcaaagcctctcatagattcttcacttgtgaaaaatacatatgttggtttaagttcaggcggtgcccatattggacatccaaattttggtaaccagcaaccaagtgacgaatgccttaaaagaaaatctgaatctctatctggttcagaagcaaggggtcattcagctgcattggtgcaacctgctctaggaaatcataatgggagtggaggtgcacacaagggccttcggatggctaacgttgtacatcgattcaagagcttagttgaatctttggaaattggtgttgtgctatctgggaggttgtggtcctcaagccaagcaatcttcccaaaagggttcaggagcagagtaaaatacttcagcatcgtggatccaacacaaatggcatactacatatctgaaatattagacgccggaccacagggacctctgtttatggtgactctggaaaactgtccaggcgaactttttatcaacgtctctcctgccaagtgctggagcatggtccgtgagaggctgaatatggaaatacggaggcaactcagtacgggaagagctaatcttcctgcactacagccaccgggatcagttgatggttttgaaatgttcgggttgctgtcaccggcaatagttcaggcaatcgaggcacgggatagagatcgcatctgcacagagtactggagatccaggcctcatgttgtcactgaagatcgtgcgacggcgccacctcaggctcagggtcctctgcatgcgctgaggggtctattccagcgagccaaccgcaatgagctgctagccctacggagtctactggtgagcaacatcagcccggacgacttctccaggcggcaggctacccaaatcctcgacgaggagatcgccaagcagtggcgctga

SEQ ID NO: 10801 - DNA, 657 bp, Zea mays
  Peptide Sequence Number=SeqID_52580
atgccgtcccacgcctccgcgggaggggagagtagagctgtagaggagagggggcaccgagcagaagcggccgcatcgaggacgagacggctccaccagatccagaagacggaagtaaagaagagaagcgaaccaaagcaagcaagcttcaagaacaaggggagggggaggaggaggaggccacggggctgccgtccgacgtgccgcgcggccacttccgcggtgtacgtgggcgagcgacggcgccggttcgtggtgcccatcgcgctgctggaccgcaccgagttccggtccctgctgcggcgcgccgaggaggagttcgggttcacgggcgccgccggcggcggcggcctcgtcctcccctgcgaggatgtcgccttccgctccctcaccttcgtgctcgcctgcacccggaggaggcccacggggctgccgtccgacgtgccgcgcggccacttcgcagtgtacgtgggcgagcggcggcgccggttcgtggtgcccatcgcgctgctggaccgccccgagttccggtccctgctgcggcgcgccgaggaggagttcgggttcgcgggcgccgccgccggcggcgccctcgtcctcccctgcgaggaggtcgccttccgctccctcacctccgtgctcgcctgcacccggtga

SEQ ID NO: 10802 - DNA, 708 bp, Zea mays
  Peptide Sequence Number=SeqID_52581
cttgattcgttggcggtgaagcgaattcttagatatttggttgctacgccaaaggtcgggctctggtatccaaaggggtctacctttgacttagttggatactcagactccgactatgctggatgtaaggtcgataggaagagtacatcggggacgtgccaattcttaggaaggtccctggtgtcgtggaactctaagaaacaaacatccgttgccctatccaccgctgaggccgagtatgttgccgcaggtcagtgttgcgcgcaactactttggatgaggcaaaccctccgggactttggctacaatctgagcaaagtcccactcctatgtgacaatgagagtgctatccgcatggcggagaatcctgttgagcacagccgcacaaagcacatagacatccggcatcactttttgagagaccaccagcaaaagggagatatcgaagtgtttcattctcgaaggaggattgaaagggaaaaggtggacttggaccatgaaagacttccactgcactccgatgagaggaaagaagaagagaagagagacttggctgtgtacagccaaggggctgtttcggtctggggcaccggactgtccggtggtgcaccggacagtgtccggtggtgcaccggacagtgtccggtgcaccaggctgccttggccgaagaggccactctcgggtttttctccggcgacttcggctaa

SEQ ID NO: 10803 - DNA, 1872 bp, Zea mays
  Peptide Sequence Number=SeqID_52582
atgtttttcgacgggtcgttgatgaagacaggagccggcgcaggcctactcttcatctcgcccctcgggaaacacctacgctatgtgctacgcctccacttcccggcgtccaacaatgtggctgagtacgaggctctggtcaacgggttgcggatcgccatcgagctaggggtccggcgcttggacgcccgcggtgactcgcagctcatcatcgaccaagtcatgaagaactcccactgccgcgacccgaagatggaggcctactgcgatgaggttcggcgcctggaagacaagttctacgggctcgagcttaaccacatcgctcggtgctacaacgagactgcggacgagctggctaaaatagccttggggcgaacgacggttcccccagacgtcttctcccgggacctgcatcaaccctccgtcaagatcgacgacacgcccgagcctgaggcgacctcggcccagtccgaggtaccctcggcccagcccgaggtaccatcggcacggcccgaggcaacctcagctcaacccgaggcgacctcggttcagcccgaggtaccctcggcccccgagggtgaggcactgcgcatcgaggaggagcgaatcggggccacgcctgatcggaactggcagaccccgtacctgcaatatctcgaccaaggagagctacccctcgaccgagccgaggctcggcgggtggcgcggagcgccaagtcattcgtcttgctgggagatgagaaggagctctaccaccgcagcccctcaggcatcctccagcgatgcatctccatcgctgaaggtcaggaactcctgcgagagatacactcgggggcttgcggccatcacgcagcgcctcgagcccttgtcgggaatgccttccgacaaggcttctactggccgacggcggtggccgacgccacaagaattgtccgcatctgcgaaggatgtcaattctatgcgaagcagacccacctgcccgctcaggctctgcagacaatacccatcacctggccctttgctgtgtggggtctggacctcgtcggccccttgcagaaggcacccgggggctacacgcaccagctggttgccatcgacaaattctccaagtggatcgaggtccgacctctgaacagcatcaggtccgagcaggcggtggcattcttcaccaacatcatccatcgcttcggggtcccgaactccatcatcaccgacaatggcacccagttcaccggcaaaaagttcttggacttctgcgaggatcaccacatccgggtggactgggccgccgtggctcatcccatgtcaaatggacaagtagagcgtgccaacggcatgatcctacaagggctcaagccccggatctacaacgacctcaacaatttcggcaagcgatggatgaaggaactcccctcggtggtctggagcctgaggacgacgccgagccgagccacgggtttcacgccgttcttcctagtctacggggccgaggctgtcctgcccacagacctggaatacggctccccgaggacgagggcctacaccgaccaaagcaaccaagccagccgagaagactcgctggaccagctggaagaggctcgggacaaggccttactacactcggcacggtaccagcagtccctgcgacgctaccacgcccgaggggtccggtcccgagacctccagatgggcgacctggtgcttcggttgcgacaagacgcccgagggaggcacaagctcacgcccccctgggaggggccattcgtcatcgccaaagttctaaagcccggaacgtacaagctggccaacagtcaaggcgaagtctacggcaacgcttggaacatccaagagctacgtcgcttctacccttaa

SEQ ID NO: 10804 - DNA, 281 bp, Zea mays
  Peptide Sequence Number=SeqID_52583
atgaagctcttgttccagtgtccctgctgctcctgcttctgcttcatgaagacggccagcagcaagacccaacacggcggcggcagcggcaacaaggagggagcagcagcccaccaccagcgcaccgtgaaattcactgcgtttcaaagggtcctcagtcaaaatcttgggaaaatgtttttttccctagagaagcgtgtggacaatggaggtgacaccggcagcagcggccatgctccaccaacaccaagccaggacgcgtcaacacaacaacaacaaag

SEQ ID NO: 10805 - DNA, 285 bp, Zea mays
  Peptide Sequence Number=SeqID_52584
atgggcttcggctcgccggcccaagagatcgtactcatcaacctgtcagaagacaacgggctcccccgtcgcgactcaagggctcgatcttcaacctcgacgccggtcgacgaactccgcccacgcgactctagggctcggagacagatgggcccggaagacggctccgctctgccggaccgggactcggactggccctcgcctcggaggagtctccaaatcgaccgacctagggctcggaccggcacgtcacaggggggccatcattaccctacccctagctag

SEQ ID NO: 10806 - DNA, 600 bp, Zea mays
  Peptide Sequence Number=SeqID_52585
atgtctttggttgttgatgtgaaaacacgtttgacaaatttaagaagtgaagactctattacaacagaatttgatcatcgcttcaatgaggtatccacagaattgcttacttgctttgcttgccttgatccaagagagtcattttctaagtttgatgtgaataagcttgctcacctcacgaagatatatttggatgatttttctcttgatgatcgagaagcaataaaatatcaattagcaaccttcattattcatgtaagaagacttgaggagtttagagtttgtcatgactttgcaagcctagcaataaaaatggttgaacttaagaggcatatagtgtttccattggtttatcgcctaattgagttggcaatgctattactggtagcgaccgcatcagttgaaagagctttttcggccatcaagattattaaaaccgagttacggaacaagatatccgatggttggcttaatgatttaatggtggtgtatattgagagggagatattcaaaggaattgatcttgaatctattaaaaaagcatttcaaaagaagaatgataggaatatgcaactgtcaaagtctcctagacgtaactaa

SEQ ID NO: 10807 - DNA, 759 bp, Zea mays
  Peptide Sequence Number=SeqID_52586
atggggtatggttggttttcccttgttgagcttggagcaggagatgatcagggaatgaattgtgtggcaatatctgaagtagagtgggcagatacccttacagatatcagtgttgagcacttactgacagaagcatccaaagatttagattgcgtggggactagtgtaaaagatcctttgtttcttgagaatccatgcagctatgactcgtttgatgctgttgttgcccttcatgcttgtcgttatcacgcatcagaacagccagcccatgctccccattcaatcatatggggagcagaagatacatgtgatgagttcagttttaatttgtcagcttccaggaagcaagaagggtcaaacacttctagcagctctcctgatactgacaatgaagttcatccttcaaattcagaaggatttcgaggttttcttcaggacttgactggacgagagactgatgctgataatccttgtaatgatgacgccaaagacgaagaggagttttatgctaaatcaccacctcgaaatgacaaaactaatgagttgaaggatcaacctttagctgacatatattggcctgattcactcggaccactggacttggacataccggccgtgagatatcaaaccgatgacatactgataggggacagtcaaagtagttggaattggaaccgcctgatggcaaatagcctcgatgcatttcgaaacctgtcattcttctcggataagaatgactcgattccgtcgatcatgtag

SEQ ID NO: 10808 - DNA, 174 bp, Zea mays
  Peptide Sequence Number=SeqID_52587
atggaggtgcccgtccatttcaaggttctcatgtgcattctcctcttcctcagatgcgtgttggagggcgtggcagagccaggcaacccaactctacgggaaatggattttttgtggaaggtgcggatgaggatgacgatgagaacccctcacatatgttttgataatgagtaa

SEQ ID NO: 10809 - DNA, 414 bp, Zea mays
  Peptide Sequence Number=SeqID_52588
atggtcacccaggatggtgaccacaagttcgatggtggggagaagcaagccgggctgcggcctctgccccgccctcagcttcaaggatcttcatcatccttgctggggagaagggcgaggacgggagtgaggacctgccggtgcgctttggggcggccggtgctcgctggtgggcaggtggctgccgtcgtcggtgctgaagtggtggtagccggagaaggtttctccgccgacgagaccgtcggcgccaccctcggtcggacctccggctcttcgaccttggcggcttgtcctcgcccctcgagtggggacgtgggcgagggccttgtcgtagcagcgtctgccctgaggtcatcgctactgctgtttagccacccggagcggaggtcgttatcgttcccacaggccctctga

SEQ ID NO: 10810 - DNA, 3063 bp, Zea mays
  Peptide Sequence Number=SeqID_52589
atgtcctcccgcctcaaggatcgcggcggcggcagggccacggccgcggccacccgcccgctcaccccgaagcccttctccatttcgtcatccgcccggcagacgaccgccgccgccgggaaggagaacacggcgtccaagccgtccaagcccacctccgccgtgcggtggtccacgtcgtcgctcccgcgggccagcaggatccaaagctcggtggactcctccaagctcgcctccaccctcagggctcccgtgctgccggggaggacttccatcagtaaggatcccgtggtggaggcaggcttgcggcggagcgtcagtggtgggatcagggcttcttctgtagagaaagggaggaggtcgattagtgttgttggatccagggcctccgaggctaggagagggagtgctggcgctggtagtgatgacactggtagaagggcgaggtttgatgcgaaggcgaaggggtcggatgagatcagcaggaaaagaggtgaccttgatgccaaggggaagcagactgatgagattggcaggaaaagggagagctttgatgcaaaggccaagcagatcggtgggaaaagagatagcttttgtgtgaatgtgttgaagcaatgtgatgagaacaaagggaaaacaaatgcattcgtgactaatatgaagaagcaatgtgaagatgttggtgggcaaataaagggctctgattcaaaggtaaaggcagctgaagaaatcaatatgaagaaagaggggcccaataaattgatgaaggagatgaataccaaaaaggctgatccaggagaggctgcttccaaatctgtggaatgttgtgccatccagaaggatgacgatataggcaagacttctgtcatccctgttttcactgtccatgtggtgaattcaaatgatgtccctgatccaataaggaaacagcaaaagaataatgaagagggcaggaagcaggaagaaaaggtaaaattggcagacaggataggagtttttgagaaagtggctgcaggtggggagggagggtcagcaaaacccgtgtctgctatgaacaggtacccaagcaaattacatgagaaactagccgcgctggaagggagggttcagaagattgctaccgatatcaagaaaaccaaagaaatgcttgatgagaacaacccgaatgagccaaaacagatcttgtcaaatatccagaaggaaatcactgccattgagaaggcaatttctcatgtaaaggatgataataagatacagctgggtactgcagatagcagtgaatgtgagagctctcaccctgaaacagctgaaaaatgtaccataacaaagccaggtaacctgaagcaagctggaaaaggcttgaatgctgatgagctggaggcaaggttctttccacaccacaaattgttgaggggtcgcatatcttcaacttctactcaacaggagttatctgtggatgcaaaaaaagattgtagtggaaaaacaagacctgccgcatctgatcctggcgatgatgagaacagtatagccatggagtttctggcttctttagatggggaagaaaatgatttcttcaaggatcgtcgagctaagaaattggaaaagaataaaatatgtgaagtagcagatgctaccagcaagacatcaagtcaaggtagcacaaagaatccagttgctcccaatcataaggatgaagttgaattgcttgctacagaggagctagaagaatttgatgatcaggaaaacaagtcatccatgatgttacaggaagaaactgaggagtcatgcaatagtcagttatcgggtataggaaacaagtcttcaactggtggatggtttgtttcagagggggaagctgtgcttcttgctcatggagatggcacatgctcctattatgacattgcaaaccatgagttcaaatctgagtacaagcctcccagcttggtatcaaataatacgtggggcgattgctggttgattcgtgccccaggcgtagatggatgttctggtagatttgttgttgctgcatcggctgggaatgcattggagcctgggttttgcagctgggattactataccagagaagtaaaatcatttcatgtcgaggaggaagcttctcaaacttttgctccaacatccagggctattcttggtgctctctctaatgtaggctcatcaagatccagctctgcgctgtcaaatacagagaggcagcaatggtggtataaaccatgcggacctctcctgctatctactgctagcaagcaaaagatggtcacagcttatgatatacgtgacggtgatgttgtgatgaaatgggaagttagcaatctagtaatgggaatggaatactccagcccactacaatggcgtagcagggggaaagtagtaattgctgggagtgaatcaatagggctgtgggatgtgaattcacttaacccacaacccttgttgtctgttgcttctggtaagaaagtgtactgccttcacgtgaataacactgatgctgaggtgggcggcggagtgcgtcaaagggttagttcatctgaggtggaaggaaatgatggtgttttcagcacacaggaaagtgtcaatgtatttgattttcgtgtacctgctggcattgggcttaaaatagcaagacatggcggcacagcaaactcaatcttttcacgtggggactcggtatttattggtagcacagaaggaaggctgcaaataaaaggagggtcaagatcacgagttcagcaatactcgttgagaaaggggaaacttgtcgccacctatgagttacccgaattcaacgctcatatccatcactctgcgataacccaagtatggggcgactcaaaccttgtcttggctgcatgtggtatggggctgttcgcctttgacacgtttaaggaagacacgcagccaacctacagctttgaccgtggaaacaccattgcagcgagagaagctattggccctgatgatctgtactgtcctacatttgactactcatcatcaagggttcttctcgtctcaagagaccgcccggcacattggaggtacttgtag

SEQ ID NO: 10811 - DNA, 2238 bp, Zea mays
  Peptide Sequence Number=SeqID_52590
atggtgaagttctcgcgggagtacgaggccagcatcatccccgagtggaaggccgccttcgtcgactacaggtgcctcaagaagctcgtcaagaggatcaagatcgcccgccgcgacgccaccagggaagctgggggaggtagcagcagcgacgccaccagcagctacggcttctccgtcctcgaccccgtccgcgccctcgccgcccacttcgcctccgcaacgccgccggcggtctcaccagcgaacggcgacgaggaggaggaggacgacgacgcggagagcttggaaccggattcaggggagctcgtggtggtggccacggccaagcatgagcgagagtttttggagaaggcgggcgaggagctggagaaggtgaacaagttctacgcggcgcaggaggcggacatgctggcgcgcggcgccgcgctcgtcgagcagctccgcatcctggccgacgtcaagcgcatcctcgccaaccacgcggtggcgtcccggcgcagccggcccgccggagactcgccgccgcccccgccgtccgcggacgggcggtccaacagcggccgccacctcctctcctcctcctccccattcctgcaggcctcgccgcagtccatgttagatgggagcgcggagctgccgcaggcgcgcgtggcggaggaggtgatggcggcgctggagcgcaacggcgtgagcttcgtgggcagcgggctgggcagcaaggccaagaaggacggcggcgggaagcagctcacggggcgcgcggccgcgctgccggccacggtgcgcatcgacgtcccgcccaccagccccggccgggcggcgctcaaggtgtgggaggagctcgtcaacgtgctccgcaaggacggcgccgaccccgccgccgccttcgtccaccgcaagaaggtccagcacgccgagaagagcatccgcgacgccttcctcgccctctaccgcggcctcgacctcctcaacaagttcagctccctcaatgtgaaggctttcaccaaaatattgaagaaattcgtcaaggtgtcggagcagcagcggaagactgacctgttctcggagaaggtgaagaggtcgccgttcagcagctctgacaaggtgcttcagctggcagacgaggtggagtgcatcttctcgaggcacttcgcgggcaacgacaggaaggtggccatgaacatgtttgcactcatcagcctgcacgtcttcctgtacgggtgcaacctcctggcgtggaagagcagcaggattagccacaacttcatattcgacttctcccccagcaccgccctgacgcaccgcgacgccttcctcttgtcggcgtccatcatgtgcaccgtcgtcgcggcgctggtcgtcaacctcttcctcagcaacgccggggcgacctacgccaacgcgttgcccggcgcacttctgcttctgtcagcagcggctctcttctgcccattcaacgtcttctaccgctccacgcgctactgcttcatgcgcgtcatgcgcaacatcatgctgtcgccgttctacaaggttctgatggcggatttcttcatggctgaccagctaacaagccagatcgcactgctaagacacctcgagttcacggggtgctacttcatggctggaaccttcacgactcacgcgtatgggagctgcaccagcagctcccagtacaagaacctggcgtacgtgctttccttcctgccttactactggagagcaatgcagtgtctgagaaggtacctggaagaaggccatgacatcgaccagctcgccaacgcgggcaagtacatatcggcgatggtagcagctgctgtcaggttcaagtacgccgcggcaccgacgccgttctggatgtggatggtcatagtgtcgtccacaggcgccaccatctaccagctctactgggatttcgtcatggactggggcttcttagacctcagatctaagaaccgttggctccgagaccagctcatcctcaagaacaagccgatctactatgcttccatgatgctcaaccttgtgctgcgcctggcctgggccgagagcgtgatgaagctccgtctcggtatggtggagtctcgcctgctggatttctcactcgcttcactggaaatcatccggcgagggcactggaacttctacaggctggagaatgaacacttgaacaacgctggaaagttcagggcagtgaagaccgtcccgttaccattccgtgaacttgaaactgattga

SEQ ID NO: 10812 - DNA, 171 bp, Zea mays
  Peptide Sequence Number=SeqID_52591
atgaacctcttcgtgaggcagatcaccatcaaggacggtgaccagttctcacggcatgcaagcaacatggacaacaaatcaaaggactgcatttgcattgctcgtggtgggcagcacgtggagcccggctgcaggcgggagcaggttgccaacagcgctgagggcggctag

SEQ ID NO: 10813 - DNA, 369 bp, Zea mays
  Peptide Sequence Number=SeqID_52592
atggcttgttccatcgtcatcatcgctactgctgctccaacaccagagggagctcaatgcgccgccacagctgggccgcgcgccgccgcgccgccgccgctcctcctcgccctactcctgctgtgcgccttcctctgcgccgtgctcgtgctgctcgcgccggcggctcggcagcacggggacgacagcgacgagacggaggagctccacgccgcgtcttctccgtggggccgccgcgacctcccgcgcccggcagccgcggcggcgtggcggccccggccgcgcgggaggtggaactccgcggggcaggggctccgggacggcaagcacgaggtccccagcggccccaacccggactccaatcggtag

SEQ ID NO: 10814 - DNA, 429 bp, Zea mays
  Peptide Sequence Number=SeqID_52593
atggctgggaaaaaaggcaacagggggcttagcgcaagtaaaccccagactcaggcagaccacccggtggactgcgggttaatacctaattacttcgggggcttttctgctattctgactcgcgaaggggtatcaaaggtttctggccttcggattcaaattctacggttacgattagatcgtcaaagcggccaaacggtgcaaaacgatgcgaacgaccagacgaacgaggtgaggaagtgttcaccttggattatggcggcagcggttctggccacgcggagacgaagatccgcggtggagcttgactacggcgaggaattgctcgccaccgggggaagttttgcccaatgcggtatgggccgaagcttcgtctcgcctagcaggtacccaggttccagcgcagaggaccagtcgcggtgttggtga

SEQ ID NO: 10815 - DNA, 177 bp, Zea mays
  Peptide Sequence Number=SeqID_52594
atggagggcgcgcgaccagagcgttgtgtcggtgtgcaccaggaagctgatgccgagtgcacagtgaagaaggggacggtggccttcaccgagcaaaccttggtcgaaaacacacagaccaaaagttataatgctacaaaacgagatgaaacactgaatttcagcaccactaactga

SEQ ID NO: 10816 - DNA, 188 bp, Zea mays
  Peptide Sequence Number=SeqID_52595
atgccggaaatgccgctgctactccaccagccgttgctgctccagaactcagtgccgacaggggcgggcccaggggtggcgcttctgagtgccgaccaccatctcccatggcacaggagctccccatcctcctcttgccagggcgccgttgctgagctcgccctgcccccattcatggacgccgtcgg

SEQ ID NO: 10817 - DNA, 303 bp, Zea mays
  Peptide Sequence Number=SeqID_52596
atggcggcgctcctacgtctctttctctctcccatctctcactctgttctctcgtctaccttcacaccagccatgaagcccggtggccagggagcccagaaattcaggggagagcgtggtgctctcggcattgatgttcctcggtaccgcccaggcaccacaggcggtggcctgggctgcctcggctgcgacaatggacagaagcaagcaaacatcatacccacaagaaaggagaagcaaccaccagcaaggtgggtcacgcaagaggtggaaattggagatgggctaggccaatccgactag

SEQ ID NO: 10818 - DNA, 174 bp, Zea mays
  Peptide Sequence Number=SeqID_52597
atgcagccaaaaacatacgagctcgtcttcctacttggcggtgaggctggagctgatgatcgccatcttgcgttcgtcagagaagccaaggttggctctcttggtttcttcagccggccacatggtggtagtggtagatgcttcattcattgggattgtgaggtcatcccctag

SEQ ID NO: 10819 - DNA, 234 bp, Zea mays
  Peptide Sequence Number=SeqID_52598
atggcgcagtgggttcgtgtcctcagtcgtggcgagctcaccggcgacgatttgacggctgtcaagagtcatggcgacgcgatagcggtgtttggatacgtggcacaagggcaagaggcggcggtttcaccggcgagcatatctgctcaagccgccgagcaaggggggctgctcgccaacgccgtcgtccgcgccctgtcgagtcacgccctcgccatcttcgtcgagctctga

SEQ ID NO: 10820 - DNA, 1059 bp, Zea mays
  Peptide Sequence Number=SeqID_52599
atggataatgttctgacatttggatcttctgatctgaaggtacaactgtacctttctgaagttctagactggtacaagattctgaaggaagagggaaactggacagagaagacatattccccaacacggaagaagttaatatctacgttggagagcaattcaggttacaatacagacgcacttcttaagcgccttccccaggacgctctttttgaggagcgagctatattgtatgggaaaataaatcaacacctcagagctctctctctctatgttcacaagcttcagatgccagagcgagcagttgcatattgtgaccgtgtttatgaagaaagagaacaacaaccgtccaaatcaaatatctattttaatcttctacagattcatctgaacccaagaaaagctgaaaaggaatttgagcagaaaattattccagttgcatcacaatactctggaatccaaaaggctagtgctactaagcccaaagggggtcgcgtaggtaaaaaggttgtagagattgagggggctgatgacatacgctttagccccagcggaacagatagtggccgaagtgatggtgatggagatgatgtaaatgaccgaggccctataatgttaaatgaagcactggaactgttgagccaacggtgggacaggataaatggtgctcaggctcttaggctgttaccaagagatactaaactccagctcacgcctcggtctaggcggcttgactgcatcgactttggcatcgacacttccgttcctgccttgtttgcctcgattgcatcgtcgccttttgtttacgacggccttgattgtgtcgaccttagcgtcacctccttccgtgacgacagcttcgacatcacgacttcgtcgaccatggtagttgcgcccttaagctcagctatctcaacatcagtacaaagggctatcatttgcatgggctctttgttggttcctactccagtcgcaacatttgcattgcgacgtcactacgactacgggggaatgtcgggcgaccagctggtcattccagaggaccgaccaggcgcctaa

SEQ ID NO: 10821 - DNA, 312 bp, Zea mays
  Peptide Sequence Number=SeqID_52600
atggcgaagatcccagaggacctggctctgaatgttgcatgtaccctgagatacgagatcaacatggggtttggtaccttaagggagatcggtcaaggccatgacctgaagaaatttctgattgtaattgcagaacttttttatggtattgtacactgtgccagtcaagtcctgtacgacaagcatgaggataaggttgatgcttttggtgagaaggccatggtcgagctaaagaattactacaccatctttggtgagaaatgcctatcaaagattccgaagggcccattaaaagacaagaagcaacattag

SEQ ID NO: 10822 - DNA, 1428 bp, Zea mays
  Peptide Sequence Number=SeqID_52601
atggtaggtgggcgagaatttgttgaagtgaaggaatttggagtgccagatattctgaaatcaatggcctggtgtggtgataacatatgtcttggaatcaggcgggaatatatgataataaatagcatgaccggggcactaacagaagtgttttcttctgggaggatcgctcctcctttagttgtgcctctccttactggggaactgatccttggcaaggataacattggggtattcgttgatcaaaatggtaaacttattcaagacggcagaattatttggtcagacacaccagcttctgttgttatacataaaccatatgccgtggcccgcctgccacgacatgtcgagatacgctctcttaggccccccaatgcattggttcagacagttgtgctccgtgatgttcaaaagcttgtccaaactgaccactgtatacttgctgctctatctaactctgttcatggtttgttgcctgttcctattggagctcagatagtgcaattgaccgcttctggagaatttgaggaggcgctagcattgtgtaagctacttccaccagaggattcaaatttacgggcagcaaaggaaagctcaatacacataagaggagtcaagggcctgggccttagcccattagagttaattagtcgcttgcttaggggccatgagatgccaggtttcgacgacgtgccgccaggatcaacaccacccaccacctccactgtcgccacaactattgatgcaagggctgctgccaccaaccctatttcacaggcagacttcatggcattccagcagctggtgattcagctgttcgtcgccctcaccagcatgttcaacaggccattcaccaccaccgccatcgttcccttcccatctgccacgacacccctttcatcaccgatctcctccttggtgccaccatcgtcaaccatacctgtacccatccaccagatcgccttcccacactccccatccctgatccccagcttccccgaggatgctcttcgtgcacatcatcaccctactgcaggcgccatcaccatgtcatatggtcccgtgaggaaggtgattgcgcgggcgagtgcctgcaaggtgtctgcggcggtgcggctccaggctgccgcacgtgacctcctagtgtgtcggcggctgcaagaggtgcaccgacagatgctcgagacagccttggtggcggtcgacctcagcacaaggggacgcggcctcaccctgtcggatggccatcagcaaccgctttgggccgttgtctccaagcgcgagcatggtgcgtgtcccgcgggcgacgaactccaattctacggcaacggcggtagggaaggcgctcccctccttgtcatcgacgagggcgcactgcctagcgccaccacattcctctaccggccgccacgagggcacctccgctag

SEQ ID NO: 10823 - DNA, 192 bp, Zea mays
  Peptide Sequence Number=SeqID_52602
atgaacgtaagctttgttagactgagaccatcgtctgtcaacgtttggcgattcaaggtggtggagatgacgaccgaaggcggcagcaccggtggtgaggttgatcctaccacacatggcttcatccggtctaaagtcgagtatgaagccttagaagctcgtgaacgatgcttgcagatcaaggatgcatga

SEQ ID NO: 10824 - DNA, 261 bp, Zea mays
  Peptide Sequence Number=SeqID_52603
atgaccgggcccgctctccccacgcttcagctaattagcctaacaatattgcgctgggccgcccgacaggcggtggccacgctggttcggatactgatcaaagcaaagcagattagagtaataatagtatcgaggacaggtaaaaatatgtggtttaaatcctgcgagaagtcttggatcaagaagattgcggatgactcaacactccttccatcaacagcatctttgttgcccacgtctgcaaagagtaatgactcataa

SEQ ID NO: 10825 - DNA, 367 bp, Zea mays
  Peptide Sequence Number=SeqID_52604
atggagctgctcaggaaagtgaaggcgaaggtttctgctaatattgttgatatactgacagagcagtgcttcaacattcaattggacaattcactcactcctgagaaacttacaatgcttcattggctcttagcagaaacttatgaacctgagaagttgcagactaggagctttctggaggatgaagtatctagaaattcttgtactgtcattgttgaggttggtccccggatgacattttcaacggcgttctcgaccaatgctgtctcaatctgtaaatctctctcattagtagaagtgacacgattggagagatcaagaagataccttttgtgcctagagcctggtagtgacccacttgatgaag

SEQ ID NO: 10826 - DNA, 2889 bp, Zea mays
  Peptide Sequence Number=SeqID_52605
atgccgttccccaccgccttcaccgcgcggcggcggcggcacgagggcgccgcgggtcgttggtgcgggctcgtggtcctggttctgatggcgctcgaggctggcgcggcggcggagacgtcgccgtcggacgtggcggcgatgcgggctgtggcgaaggcgcttggcgcggacaagacgctgggatgggacgtcgccggcgacccctgctcgccgaagcggtgggacggggtgtcatgcgactcgtcgggccgcgtcaccgcgatccaggtcggtgcgcgcggcctcacggggaccctgcctccggaggtgggcgacctcaccgagctcacccgcctcgaggttttcgacaacaagctctccggcccgctgcccttgctcccggggctctcctcgcttcaggttttacttgcccataacaatagcttcgcctccatccccgccgacttcttcaaaggcctcaccgggctcaccgccgtcgccatcgactacaacccgttcgcgtcgtggacgctccccgcctccctcgccgcctgcgcctccctcgccaacttctcggccatcagtgccaacgtctctggcacgctcccggacttcttgggtgcgatgccggcgctccagcggctgtcgctttcctttaaccagctgtcaggacccgtaccggcgtcgctggccggcgcgccgctggtgcagctctggctcaacggcgcgcacctcaatgggtcgattagctttgtcagcaacatgacgtctctggagcaactgtggctgcattctaacgaattcactgggcccttgccggacttcgcggggtttgatgatctatgggatttgcaacttcgcgacaacatgctcacagggccggtgcctgagagtcttttcaagctgaaggctctgaagaacgtgaccctgacgaataatttgctgcagggtccgatgcctcagattcccaatggacttcatgctgatatcgaagcagatacagagcggttctgtgtgcaggaagccgggaagccgtgcaatccccttgtgagcctgctgcttgaggttgcggctgggttcatgtacccaaaggcacttgctgaggattggagggggaatgatccatgtatgtttccgggtgttacttgcatccaaggtaacattactgggctgacttttgccaacaagggtctcagtggtagtatctcaccggccattgggaagattagctcacttaaggtgctagatcttgctaacaataacatcactggtactgtgcctgaggaggttgccgtgttgcctttgctgacaaaaattgatttgtcaaacaacaatctctatgggaaacttcctacctttgcttccaagaatgtggcggtgaatactgctggtaaccctaacataggcaaggatgctcctgcaccaactgcaggaccaggtagtagcaacaacagtccatcgggaggaagcagtagcggaagcagtggtaacaatgggaatgggggctcctcttcatcttctgttggagtcattgctggctcagtggctggtacagttgctggactaggccttgttgctgcattaggattctattgttacaagagaaaacagaagcctttcggaagggtgcagagtccacatgccatggttatccatccgaggcactcaggttcagatgacatggttaaaatcacagttgcagggggaaatgctaatggtggtgctcgcgcaagtgagacatatagccaagcgagcagtggtccacgggacatccatgttgttgaaagtggaaatatggtcatttcaatccaagttctccgcaatgtgaccaacaacttcagcgaggacaacatccttggtcgaggagggtttggcactgtttacaagggtgaacttcatgatggcacgaaaattgctgtaaagcggatggaggctggtgtgatgggtaacaaggggctaaatgagtttaaatcagagattgctgttttgaccaaggttcgtcaccggaaccttgtttcgctgctgggctactgccttgatggcaatgagaggattcttgtgtatgagtacatgccacaggggacactgagccaacacctgtttgagtggtcagagaacaatttgcgaccattggaatggaaaaagcggcttagtattgcacttgatgttgcaaggggcgttgagtaccttcacagccttgcccagcagacctttatccacagagacttgaagccatcaaacatacttcttggtgatgacatgaaggccaaggtggcagactttggattggtcaggcttgcaccagatgatgggaagtgcgtctccatagagacaagacttgctggcacttttgggtaccttgcaccagagtatgcagttactggacgagtgaccacaaaagctgatgtcttcagctttggtgtcatcttgatggaactgattacagggcgcaaggcacttgatgagactcggccagaggatagcatgcatctagttacatggttccggagaatgcagctgaacaaggaaacattccgcaaagcaatcgaccctgttattgaccttgatgaggagacatatgctagcgttagtactgtctcagagcttgctggtcactgctgcgctagggaagcacaccagaggcctgacatgggccatgctgttaatgtgctctctaccctttcagaagtttggaaaccaactgatccagactcggacgacagctacggtattgacctgaacatgaccctccctcaggctctgaagagatggcaggcttttgaagatagcagccactttgacggcgcaacctcttcattcgttgcaagtttggataacactcagacgagcatccctacaaggcctcctggattcgcggagtcgttcacctctgctgacggaagatag

SEQ ID NO: 10827 - DNA, 306 bp, Zea mays
  Peptide Sequence Number=SeqID_52606
atggatttcagttggttattggcacctgaggctgaaggcagccatactataccaggtggtatccagctcaagggtatactttacaatgaggactcgtattttgccgaggtggagtttggcctcctgctcccgatcggcggaagagtagaggacgcacctgtctccggcgacgaggccgccgtactgggggaggagccccccagcgtgacgcacgccgacgtcggaacatgtgccataacatatagcgtcaccatgaggccagggaacgatatcctgctaacctgtctcccgggacgaagcctctag

SEQ ID NO: 10828 - DNA, 471 bp, Zea mays
  Peptide Sequence Number=SeqID_52607
atggcgagctcgccgcgatctccgccggcgcctacgccggaattcgagatctctcggcagtcccgcctctttgcggcgggggtcggggctggacgcttgcagttgtccaagaagctgctactgggctatctgcccaatgaccgcgcgctgtggcctgtggctgtgggagcagaggagctggcaaagaagagaggacagtacgctgctttcaaaggcgagttccttagaaaccctgtcagagtaacccgagaggagcaccctttaagccttgggaagaccagtgcttggaatcagttttttgagtactcggagattatggagcagattgaccgcgatgtaaagcgcgcccaccctgacatgcatttcttctgtagcgactcgtcttttgcaaagtccaatcaggaatctttgaaaaatgcactgttaatctttgccaagctgaatgctggaataggatatgtacaaggatga

SEQ ID NO: 10829 - DNA, 1095 bp, Zea mays
  Peptide Sequence Number=SeqID_52608
atgtgcgaggcaccgcggctcggcaaccgcgccggcgccggcgacccggccgccgccgacgtcgacgtcgtcacgacgggcgggcgccggaggatccccgcgcattcctctgtcctggcctcggcgtcgccggtgctcggcagcatcctggagcgtcgcctgcggaaggacagggagagcggcaagcccgggcggtccgtcgtccggatccgcggcgtcaccgacgacgccgccgcggccttcgtccgcctcctctacgccggcagattttggatgatgacgaacgatcatgtgcttaacacgacagcaaaaacccgtctgggcaggtgcggcgaggatgaggatgacgacatggaggagcacgcggtgcaggtgctggtgctggcgcacgcgtaccaggtgccgtggctgaagcgggcgtgcgagggcgccatcggcgcgcgcctcaccgcggactcggtggtggacgtgctgcagctggccggcctctgcgacgcgccgcgcctgcacctgcgctgcgccaggctgctggccaaggagttcgcggccgtggagcgcaccgaggcctggcgcttcctgcaggagaacgacccctggcaggagctccacgtcctgcagcgcctgcacgaggccgacatgcggcggcgcaagtggcggcggaagcgcgcggagcagcgcgtgtacatggagctgagcgaggccatggactgcctggaccacatctgcacggagggatgcacggaggtcggcccggcggggcgggcgccggcgccggcgccgtgcgcgcgctacgccacgtgccggggcctgcagctgctcatccgccacttctcccagtgccaccgcaagagctgcgcgcggtgccagcgcatgtggcagctgctccgcctccactccgcgctctgcgaccgtaccgaccgctgcaacaccccgctctgcatgaggtttaagcagcaggagcaggataaggcggctgccaagggcggcgatgatggcgacaaatgggggcttctggtgaagaaggtgaagactgccagggtcttctcttctctggccaacaggaagcagatgagcaccaccaccacccagtgctga

SEQ ID NO: 10830 - DNA, 198 bp, Zea mays
  Peptide Sequence Number=SeqID_52609
atggagaaggtgacgggagggatcgggagcggttgctcgggaggtggggctagttgggttcgtcttgtgctcgaacaacaacatgcatattgccctcttaggggccttgatgctatcggtgtcctaagggccatgcgagtcctatgcgagcttcttgcactatcaagggccccatatcccaatagtgatagaacttga

SEQ ID NO: 10831 - DNA, 147 bp, Zea mays
  Peptide Sequence Number=SeqID_52610
atggcggagaatcctgttgagcacagcccgcacaaaagcacattgacatccggcaatcactttttgagagaccaccaagcaaaaaggggagatatcgaaagtgtttcatattttggtgaggcaatggggttaaagggccaagattga

SEQ ID NO: 10832 - DNA, 1836 bp, Zea mays
  Peptide Sequence Number=SeqID_52611
atgagatctggccatggacaggcccttttcactgcagagtgttcccacatgttccattttcagtgtatctcgtctaatgtaaaacatggaaactatgtctgtccggtttgtcgagcgaaatggaaagagataccctatcgctcactatcttctactagccctcatggaagaattggaggtgaccatactcgatcaccccaacaagatcctcatttggctcttcaccagcaagtttcgaaccgtcggcgggaggtccgtcggttacgtacttctgagccagcagactacaatgatgatgaacctttgcagcgcatggaggcttttgacgatcttaactttggatctagtaaaactgctgagatcagctcatacccagaattccaagctgtcccacagtcaacatgtctagatggatttgatattctgatccatgtgaaggccccaacttctagctcagatgatgctacaggaagtttggtcaatggaagctctttgaggttgtcaagacgagttcctattgatattgttactgtccttgatgttagtggcagtatggcaggcacaaaaatggcactcctgaagcaagcaatgggttttgttattcagcaccttcggccatctgaccgactttcagtcattgccttttcatctactgctcgacgactgttccccctccaacggatgtcacatcatggcaggcagcaggccttgcaggcaatcaactcacttggcgctggtggtggcacgaacattgctgatgcgctaaagaaagctgtgaaggtgattgcggaccgcagctataagaattctgtgtgcagtatcattcttctgtcagatggccaagatacttacaacatttcctcaaatttccaaggcacatcagcaggtcgtaggtcacttgttccatctgctaatccaaatgagctccatatggtacccctgcacacttttggatttggagcagaccacgattcagatacgctgcattcgatttctgaagcttctggtggcaccttttcttttattgaggatgaaggtgtgatgcaagatgcgtttgctcaatgtattggtgggcttcttagtgttgctgtccgtgagatgcgtctcagtatggagtgcgttgatcctggtgttctgctctgttccatcaaaagtggcagctatccaagtaaggtagcaagagatggacgaaatggatttgttgatatcgctcacttgtatgctgatgaggagaaagacattttgctttcagtgaccattccaaaatcttgtgaacagacttcactgttaagagttgcttgtgcttacaaagatccggtgagcaatgagactatcaagattcaaggtgacgaggtgaagatcaagaggccagcatctactgtatctgtaccagtttctattgaagttgatcgagagaggaaccgtatacgagctaccaattctatggagtctgcatgggctgctgccgagagaggcgctctctcggaggccgtcaccattcttgaggactgccggagggcactatcacagtgtgttgcaagccagaatggggaccgtctatgcatgggccttgtcgcagagctacgagagatgcaggagaggatggggaaacgccaacttttacgaggcttcagggagggcgtatatgctatctggattgagctctcattcatggcagaaaaaaacagcacgcggaggactctacagatagcaccactcttggtcattcctatcaaacgccgtccatggtcagatgctgggagcattcccagaatttttggctccctgcctcaggggccgaaggccacaagtccagggagcggggatcagtcttag

SEQ ID NO: 10833 - DNA, 477 bp, Zea mays
  Peptide Sequence Number=SeqID_52612
atgatcccgcctcgcccgagcccagcctcgggcaaaggcagccgacccaggaggattcacgtcttgcccgaggcctcgggcgccataggaagctccgcctcgcccgaccccagagctcgggctcaacctcgacgccggacaacggactccgtctcgcccgaccccagggctcggactcaacctcgacctcagaagacggactccgcctcgcccgacctcagggctcggactcaacctcgacctcggaagatggactctgccttgcccgaccccagggctcggattcaacctcgacctcgaaagacggactccgcctcgcctgaccccagggctcggactcgacctcggaagacggactctgcctcgcccgaccctagggctcggactcgacctcgacctcggaggagcctccgcctcgcccgagctcgtgctcggaccgaccacgtcacaggggggccatcattaccctactcctag

SEQ ID NO: 10834 - DNA, 1207 bp, Zea mays
  Peptide Sequence Number=SeqID_52613
atgcagctcgatagattcatggccgcctccgtagtggtcctcgccgtcgttgtttccctcgccgccgtccttccgatcgctcgcgctgagatcaagacgacacccattgtctccgactcgcgctccgtcatcctatttgaggagttcggcttcaggcgcggcggccacgccactgtctcggccaccggcatcacatggagggtccccgaggattcccagctgcaggccgtggacacgacactgatgggcttcttcctcatctccaattccctcttctacaagatcaacaacgagtccgactacgccgaggccaccggcggcgccttctgcccgctgacaagcaagtacgtgcagcggctcttcctgttcaaggaggtcgcgcccgacggcacggggaggggctccctgaccatcgactccgacgaccagtacacggtgctgttcagcagctgccaggagggcgtggaggtcaccatggaggtgcgcaccgagatgtacaacctgcggcggtccggcgccagggagacggcggagcgcatccacgccgtgatgggcgcgctgctgctgttcaaggcgctcaagatcgcgtgcgcccccgaggcccagtgcttcgtggagcgcccggcacgccgcacgggtgggacgtctcctttctacgtgttcggcttcttcaagggcatcctcctcttcaccgtcatcgtgctcatcggcaccggctggtccttcttgaacccttacctccaggagcgcgagaagaacgtgctgatgatcatcatacccctacaagtgatcgagaacatcgcatcggcggtgatcggggagacggggccggcggggagggactggctagcgtggaaccagatcttcctcctggtggacgtcatctgctgctgcgcggtcttcttccccatcatatggtccattcgcaacctgcgggaggcgtccaagaccgacggcaaggcggcgcggaacctccagaagctcacgctcttcaagcagttctacctcgtggtggtgtgctacctctacttcacgcggatcgccgcgtcagccgtcgccgccgtgctcagttacaagtaccagtgggccgtcaatgtctccatcgagacggccagccttgccttctatgtgttcgtgttctataatttcaagcccgaggagaagaatccttacctttacgtcggagacgatgaagaggaagccgcgg

SEQ ID NO: 10835 - DNA, 1335 bp, Zea mays
  Peptide Sequence Number=SeqID_52614
atggccgcctccgtagtggtcctcgccgtcgttgtttccctcgccgccgtccttccgatcgctcgcgctgagatcaagacgacacacattgtctccgactcgcgctccgtcatcctatttgaggagttcggcttcaggcgcggcggccacgccactgtctcggccaccggcatcacatggagggtccccgaggattcccagctgcaggccgtggacacgacactgatgggcttcttcctcatctccaattccctcttctacaagatcaacaacgagtccgactacgccgaggccaccggcggcgccttctgcccgctgacaagcaagtacgtgcagcggctcttcctgttcaaggaggtcgcgcccgacggcacggggaggggctccctgaccatcgactccgacgaccagtacacggtgctgttcagcagctgccaggagggcgtggaggtcaccatggaggtgcgcaccgagatgtacaacctgcggcggtccggcgccagggagtacctccccgtcggactgctgccgctgccgtggatcttcgcggcggcggccgcggtgcacttcgcgttcctgggcacctgggtgctcgtctgcgttaagcaccgcaggacggcggagcgcatccacgccgtgatgggcgcgctgctgctgttcaaggcgctcaagctcgcgtgcgccgccgaggaccagtggttcgtggagcgcaccggcacgccgcacgggtgggacgtcgccttctacgtgttcggcttcttcaagggcatcctcctcttcaccgtcatcgtgctcatcggcaccggctggtccttcttgaaaccttacctccaggagcgcgagaagaacgtgctgatgatcatcatacccctacaagtgatcgagaacatcgcatcggcggtgatcggggagacggggccggcggggagggactggctagcgtggaaccagatcttcctcctggtggacgtcatctgctgctgcgcggtcttcttccccatcatatggtccattcgcaacctgcgggaggcgtccaagaccgacggcaaggcggcgcggaacctccagaagctcacgctcttcaagcagttctacctcgtggtggtgtgctacctctacttcacgcggatcgccgcgtcagccgtcgccgccgtgctcagttacaagtaccagtgggccgtcaatgtctccatcgagacggccagccttgccttctatgtgttcgtgttctataatttcaagcccgtggagaagaatccttacctttacgtcggagacgatgaagaggaagccgcgggtgggcagcttgagatggagagcacatttgagatctga

SEQ ID NO: 10836 - DNA, 801 bp, Zea mays
  Peptide Sequence Number=SeqID_52615
atgaacccccaacgaactggagaactagggcagcaggtcagagctttttggaaccaagtcgctgttacggcggtccatctcactgtcacgtttcttagaacggatcggttgtcgagctggagttcgtacaacttcacctccaactgggcgggccccaacgtgtgcgcgtacaacggcatctactgcgcgccgcggccctccgacggggcgttggtcgtggccggcatcgacctcaaccacgccgacatcgcaggccccatccccgccgacctccccctcggcgtgcccgacctggcgctgctccacctcaactccaaccgcttctgcggggtgctgccggacacgctgctccacctgcgactcctccacgagctcgacctcagcaacaaccgcttcgtcggcgccttccccgccgtcgtgctcgcgctcccctcgctccgctacctcgacctccgcttcaacgacttcgagggccccatctcgccgccgctcttcgaccgcccgctcgacgccatcctcctcaactccaaccgcctccgcgggcccatcccggccaacctcggcaactcgccggcctcggtgcttgtgctcgcgcacaaccgcctcggcggttgcatcccaccgtcgatagggaggatggcggccacgctcaacgagatcgccctcatcgacgacgacctcaccggctgcgtcccgccgcaagtcggcctgctcaggaaggtcacggtgttcgatgtcagcggcaaccacctccagggcccgctcccgtgtggcggaactgcccgaattattccgacttaa

SEQ ID NO: 10837 - DNA, 924 bp, Zea mays
  Peptide Sequence Number=SeqID_52616
atgtcaggcaagtcccggccactgcccaagagtgggcgcctcacgacggtcgcatccaagcgaggaggaggaggagcagcagcagcagccagcaagcagatgcataggcagaaaatcgagcaccatttggatgacgacatctcgattgaccagcttcacaagctcagccaaaagaacatctccgcgtggagcatgaagaggccgatgaagatcgtctggtacggggcgctgacaaccatggacgagcagctcaagcatgcaacgggcgaggatgagctggcgacagagatacacagcgagtacaaggccaaggttgcggccaagaggatcttccagaatgtcgccaagcctggatccaagcacatatacctgtcagatttgatgtgtttcatgaggcaggaagaagctctaaaggcgacgaatctcttcgaaggagcacaggagcacaacagggtcagcaagaggtcgctcaagaactgggtgagtgtggactttgccttgccttttcataacggcgaatccctctccttatcctctatttcgtcgaagccgcccccgtggtgtttcataatggcagatttctcgtctgcggtctgcctgcaaccacacacactggaagaatcgtgcgggtgcggcgcaacgagcgagaggaggaggatgacggcgcccaagcccggcgggggagcggtggcagcggcgcgggcggcggcggcggggcccaggacggtgctcatcacgggggtgagcagggggctgggccaggccctggcgctcgagctggcgcgtcgcgggcacgcggtggtcggttgtggccgttccgccgagcagctccgctccctcgaggtagagatcacatcaccatcgcgccacttccttactgttgccgatgtcgtaaggctccagtgcacgttcaagtacttatag

SEQ ID NO: 10838 - DNA, 372 bp, Zea mays
  Peptide Sequence Number=SeqID_52617
atggccgacctccagcagctcaacgtcgccgggaacctgcccaggggccccgtgctgccggcggtgtgcggcctgcaggggacgctcgggaacttcatctacgaggacaacttcttcacctcgcgccctgggtgcgcggtcgccacggcagacgggcgctgcaactgcatccctggcgctcctgcgcatcgcccaccgccacattgcgccgccgcggccgcgtcgttcgactgcaggacggcgcaatgccaggcacctccgatgtccggcccgcctaggtcgggccccggtggaccttcacagccactgtccccgccaggaaactcgaatacgccatcgcacccatccccgccaggacaagacgaactctag

SEQ ID NO: 10839 - DNA, 261 bp, Zea mays
  Peptide Sequence Number=SeqID_52618
atggtggggctcactggtggtcctggcaaacccgtcgatggtcggatggcggttggaggtggtcggagtcgctctggccacgcgctgcggcggaagagctcatcagcggcgaggagtccggcctacacaaggcggtttagttcgattggatggctcggggagcggattctagagagggtgatccgacgcttccggatgaggtcgtgcttggtacgggggcttgggaagcttaccgagactctggggaggctagccaagtag

SEQ ID NO: 10840 - DNA, 336 bp, Zea mays
  Peptide Sequence Number=SeqID_52619
atggcgtgtaggcggattgccatgcgcgggggcgagtgcgcgcgcgggttgggcaagcaccggcttgccgaccagggccgaacacgtaagctgaggttggatctattggtttctttagccagccacatggtggtagcagtagatgcttcattcatggggattgtgaggtcatcccctgttgatgcatcggtgttcgtcattggaggtactaccgagggtccgacgttcacaggatgtgaagaggattggactaaggaactgaggatgcaacacctcaaaggaatacataaaagaagcgtagaagtccaagactcaagaacaaaagaagcccaatga

SEQ ID NO: 10841 - DNA, 249 bp, Zea mays
  Peptide Sequence Number=SeqID_52620
atggaggcaagcttatgggtggatggcaggggcgggcgcacatgggcagtggcgggcctaggatttgaaagatgggtattcaaatttgctaagagacggaggcgacgcacgacaaggtgtgacttgcgagctaagagggcgacatcatggcagtcagatagtagagtagtggctgcggatggcagggcgctgtcgtgcagccacgcgaggccgagggcgaggggccaagggtgcgggccgagggaatga

SEQ ID NO: 10842 - DNA, 258 bp, Zea mays
  Peptide Sequence Number=SeqID_52621
atggtgtggatcgtggtgctagctatcgacggtcgtgggcggaacggtgggcgcgggcagcgtggcggcgagaagctggccgggccggagcaatcggaggaggggcggggcagagccggggccaaagcgccggatgcacagccgagtgggccgagcgacggagtgccggcggcacggcgcgtgtattctgagaagcggctgaatgataagctgctgcagaagctagctgtttggcagaacttcggcttaaacttgtga

SEQ ID NO: 10843 - DNA, 324 bp, Zea mays
  Peptide Sequence Number=SeqID_52622
atgacgacggcggttctcagccccttacggaagcaacgagacatcagcaaggtcccgacaaccccgacagttgtgcttctacagggctcaagcactactccgacggccacaacatcatatgaacagggcactaacacctctccgacagccacgtcgacattttcatttcaaaaaatggaccataacctcggcgccgtcatcattggcgccgtggtaacacatagtggcgccgacataattggcgtcaacttttcgtacaaatttctatctctaagtcaaacatacttgttaaaacatgaagagagtcattacaagagaaattga

SEQ ID NO: 10844 - DNA, 378 bp, Zea mays
  Peptide Sequence Number=SeqID_52623
atgagcagcagcgatgacaggacaacgagcacgtcttttcttgctgtaaccaggcttccaaggctccagatttgttttggcgagtggtgtggtgactgcctctgcctatgtactgcccatcggtttcgttcacatcaaagtgagagatcattagatgatggcgtccgcccacgagcaggcgagagggtgcagaagtccaggaagtgcggcgcttccataagactgaaaaagactagttcatcaacaccgtatgtgagtgaaaaccagataaacatgacagaatcactcaccacttcaactggtaggtatgccagtatgccacacaggaacagccacaaaggcatgtcacagattgaagattatgacaagataaaatga

SEQ ID NO: 10845 - DNA, 552 bp, Zea mays
  Peptide Sequence Number=SeqID_52624
atgacgacggcgaggagcatgaccgcgtcgatcacggccatcggggtgttgtcgcagaaggagccaccggcggcggacgcccgcctggatcgggagcacgcggaggcggagctgtcggccgccctgcggtggtgctcgaacgcgcggaggaactcgatgaggctgcggcactccgccatcgtggcgtggcgacggggggcaggagcagctccgctccgcggccgggcagacgggaattgggaagcagggaggcgcgagcgctgtgtggtgggggcgccgggatctggtgggggattttgccgatccgatcggtggggctggggaatgcgaatggggggttactcgacagtcggcaccgcgccgtgcgtggtgtacatttgggtcgggcctaatgggcggacacgaagcacgaaagaaaaagcacggcccaagcacggcacggcacgaaattatttcgggccgggccgggccggcccgttgcatcgggccgtgcttgggccgacgccgaggcccacgggcgggcacgagcccggcccgtttaagcagacctga

SEQ ID NO: 10846 - DNA, 393 bp, Zea mays
  Peptide Sequence Number=SeqID_52625
atgcggccgcaccagcgcgcgtcatggtctatcttctacggcgacacgacggcacaacctctccgccttatcctctatgacagtggcccccttatctccaacgtccaatggcaagggtggaggacggcaggacgcacaccaacgcactgcccttccctttcctactcttctctctcctctaaagggaaggataccagtgaggcgaatgagatcaattgtgcaaaagatgttcagacaactacaaaattgaaggatccggcatggctccctaggccgaggtcggagagatcaaagacggtgaacgggtcacagtcacagcccaggccgagggtcgacagcagggcaagcggaggccgactggatagacgacgcgccattcatgaagagcattaa

SEQ ID NO: 10847 - DNA, 648 bp, Zea mays
  Peptide Sequence Number=SeqID_52626
atgatcgagaggtacaagaaggcacacgccgttggctcttcctctggccccccactcttagagcacaatgcccagcaattctaccagcaagaatccgcaaaaccgcgcaaccagatccagatgctgcaaaacactaacaggcacttggtcagtgactctgtgggaaacttgtcactcaaagagctgaagaagctggagagccgccttgagaaaggcatctctaagatcaggttgacgttgcttagttcaaatttaaactgtataatgtcaaatattaacaaacagagggagtatttgattatttatacaactctgattgctgaattcttgtttcagagtgagctgctggctgccgagatcaattacatggccaaaagggagactgagcttcagaatgaccacatgaacctcaggaccaaggacccaagaacatgccctacaggccaccgaccagaagatcaacctgcaggacaccaagaagatgccctacaggccgctcaagtgccagtcctgctgcccaggattcttctgcccaggaccactaaattcttggcaattttaaatcgcctaatctatcgcacagcggcatccaagaacaataaagaacacggaatgagctactgggcttcagatctgatgatccattag

SEQ ID NO: 10848 - DNA, 1848 bp, Zea mays
  Peptide Sequence Number=SeqID_52627
atggccgtggcctcggccgcgcggacggcaacaccggcgtcgccggcgcgactggggtcgctgtggtcgacgctggaggaccagcgcggggcggcggtgccgctgctctcctcggcctggaccctgccgacgacctcccagggcggcatcgccggggacggggagcagctgcccaaggagggcctgctccggcgggctggcggcgttgttgcccgctggtggggggcggcgtgcggcgcggtggcggagctgtgggccttcgcgcgggccgatccgcggaagcccgtgttcgcggggaaggttgcgctcgcgctcgccctcatctcgctgctcgtcttcctccgggagccgcgcgacatcgtcagccactccgtctgggcaatcctcaccgtcgtcgtcgtcttcgagttcagcatcggtgcaaccttaagcaaagggtttaatcggggattggggacactaaccgcaggagcttttgctctagtagttgcagaattgtccaaacacctgggaaaactggaggaagttattcttataacaagcatccttattgttgcctttttcacaacattgacaaagctacatccgaagatgaagccgtatgagtatggattccgtgtgttcttgttgacattctgttacgttatggtctctgggtacaacactgggaaattcactgatacagctacaagcagatttatattgattgctattggtgctgctgtcagtcttggaatcaatgtaggcatctacccaatctgggcgggagaggatttgcataacttgatagcaaagaatttcactggtgttgcaaaatccttggaaggttgtgttgatggatatctgagatgcatggaatatgaaaggattccttcaaaaatacttgtgtatcaagcatctgatgatcctgtatatagtgggtacagggcagctgttgaggcatcagcacaggaagaaaccctgcttggctttgctatatgggagccaccccatgggccttacaaaacaatgaactatccttggaggagcttcaccaaagttagtggagcattgaggcactgttcctttgcagtaatggcattacatggttgcattctttcagaaattcaggcaccaccagaaagcagaagagtattttctgcagagattcaaagagtgggacaggaaggagctaaagtattgcgcgagctcggaagcagagttaagacaatgaccaagctgagttcttcaggtattctgttcgaagtgcacatggcagctgaagagctgcaaaaaaagattgatgagaagtcatatcttctggtgaacactgaacgatgggatgctagcaagcaagctcaaggaatcaaagaagttgtaaatggtacccgtgctgtggaaacggaaaacaagaacaaagaaaacaaggatgatggcaccagtgctgtcgaaaaagaaaacaaatccaaagaaaacaacaatggagggctggaacctaccatagttgatcaaactttagtgcatcagtcaaagagctttcttgcaaattcatttctgagcagatatgattcagcgtcaacaattgacggttttaagccagcactttcttggcctgctcgtaaatcattccatccaaacataccacttgaagatgaggattcccaaacatatgaaagcgcgagtgccttgtccttggctacatttgcatcactcctgattgagtttgttgccagactacagaatgttgttaacgcatttgaagagttgagtgagaaggctaactttaaggatcctgtggtggagcctactgcagttagcacaagtaatgttaggtttctcgataaactgtgcaaatttgtaggtttctag

SEQ ID NO: 10849 - DNA, 1596 bp, Zea mays
  Peptide Sequence Number=SeqID_52628
atggaggacgacgaggggaagaagcagcaccaacggatcatccccaacgccaacggccacgtcatgatcgtggtccccgacgacgcgcacgcgcacgcgctgcccgcctccgcctccgctcctcctcgtgacgccgacggcccagacgaggagagcggggacgaggaggagcggacgccggcgggggccacgtcctcgctgtggcgagcagcggtgctggcgctcgcggcgctggcgctggcggcggcggcctacgcctgcctgtacgcgggtggggacgacgacgccggcgcggcctggcgcctcttggaggcgcggcggcaggaggacggcggcgacgacgagcacccgggcggccgcacgtccttcctgctgccgctctacccgaagccaccacgccgcggcggcgacgactggccgcagaattccacgttattcccgcactcgctcgccggcaacctcttcccggaagggctatactacaccgctatctctttgggcagtcctccaaggccttattttcttgacgtcgacactgggagccacacaacatgggtccagtgcgacgcgccgccatgcgcgagctgtgcaaagggagctcaccctttatataggcccgcaaggacggcggatgcacttcctgccagcgacccactttgtgaaggagcccagcatgagaacccaaaccagtgcgactatgagatcagctatgccgacggaagctcctccatgggcgtttatgtaagggacagtatgcaattcgtcggcgaagatggtgaaagggagaatgcagacattgtgtttgggtgcgggtacgaccagcagggagttcttttgaacgcactagaaaccaccgacggagttctcggcctgaccaacaaggcactgagccttcctacacagctagccagcagaggtatcatttccaatgcgttcggccactgcatgtcgacagatcccagcggtgctggtggttacttgtttcttggcgacgattacattcccaggtggggaatgacttgggtccctatccgcgatggtccagcagaagcccaagtcaagcagataaaccatggggatcaacagctcaatgcgcaagggaagttgactcaagtggtctttgacactgggtccacatacacatatttcccagacgaggcgcttacaagattgatatcttcgctgaaggaggctgcatccccaaggttcgtacaagatgactcggacaaaacacttcctttctgcatgaaatctgattttccagtgaggtctgtggaggatgtgaagcattttttcaagcccttgagtctgcaattcgagaaacggtttttcttctccaggaccttcaacatccgccccgaacattacttggtcatcagtgacaagggcaatgtctgcctcggggtgctcaatgggacaacgatcggttacgattcagtagtaatagtcggagatgtttctcttcgtgggaaattggttgcttacgacaacgataagaatgaggtcgggtgggttgatttcgactgcaccaaccctcgcaaacgaagcaggattccttccttcctgcgacgagcgttgcgcaaccaacttctgtaa

SEQ ID NO: 10850 - DNA, 728 bp, Zea mays
  Peptide Sequence Number=SeqID_52629
ttgaacatctaatgataggaaaggtgatggaaacattggattactgcgcaaaatgggaaattgatcaagatgctaaacctatggacttcccgcctcaagtggacatgctgcctaaaaagtggatgcagaacttgaagacgataatgcagtttgggtccttcacctcgtacatggagagggacacatggcgcctggtggtgggtcgcggtggagattgggtgctggatcttgggacaggggtggagggggtttcgttctcaccgttgctttcgccgaagagagggcagcaccgaccttcggattgccagcggtcacgaccgccccatggacccctcctccgtgtcatcccctccatcgaggaacgccgcgtcacaggacttggagaggatccctcctccgcggtgtccccagccatcacagcactgtgggaggtccacgtgctccgatctgggtgggaggtaggggaggttttggggcgggggcgcggcgagatttccgaggacggggacgactcgtggggcggggatggcggaggctggggcatggagcacgacggggatggaagggcgcgagaggagcatggaaggggcggggaggcagcgcaacgcacgggcacagcttccattgatgcgatgcgagatttcggagcggggcggggcggagggccgcagacgcgcggcagaaccgtgcaccgtccagcggtgtggacgcctacagtgctcacataa

SEQ ID NO: 10851 - DNA, 138 bp, Zea mays
  Peptide Sequence Number=SeqID_52630
atgtccgcgcgggtctgcgaagctgctgagtggcaaaacgaactttggccgcatctgaacaattgctgcaagacttacccgactaaagaaaagactctcaaggatatgctggatttgggaatcaaggagaggctttag

SEQ ID NO: 10852 - DNA, 2892 bp, Zea mays
  Peptide Sequence Number=SeqID_52631
atggctccatctcaagcggcggcagcggctggccccacctttgaggacctcgagcgcgacctgcaggcagttctcatggaccaaaaccacatgtccccagtggacgacctcggcatgtttcgcagcggcagcgctccccccaccgtcgagggatctcgcacggccattggcgcactcttctctggtccaccgcttcacgccaacagccttggcgccggcggcggcagcggtgggactgcttctggccttgacgtgctcactgatgaggagatacggtcacacccagcgtatctgtcgtactactattctaatgagcacctcaacccaaggcttccgccaccaatggtttccaaagaggactggcgtgcagcgcagtggttccaggctgtgtctggaggtattggggataggaggaggaggcctgcggaggtcgggagtggaaactccctgttctcggtgcagccaggggcaaacgaggttggtggagagaaggcgctgctgagtgatagaatggagaggagtggaaggaatgggctcgcacgacagcagtcttcagagtggcttgggagaggctccgatgggctcatcggcttgtcagatgccagtgcccttgggtctccgcgcaagagctttgctgatgcattgcaggaaaatattagccgtcctgctgttatagccggtcatctttcacgttctaatagccgtaatgttcttgagggcccaactccaatcaggtcatctgattcacgcaagccacaactgcagaataggtcagaatccatgaatggcctgcgatctggatccacttcaccgagtctggtcagggtccaaagtcttggttcttcgatgtctcataccttcgcttctgctgttggttcatctatctcaagaagcaccacccctgacccccagctgatacggagaactcctagtccttgccttcctccagttggagttcggatggggagttctgataaaaaagttgaagcttctgtttcttcacttaatcatgatggtgctgacattgtggcaactctgtctagcttaagcctatctggaaataagatgtcgaatgtggaaaatgaagttcagactcatgcttaccagaactttggtgatcaggctgatgtgttgtttaatgtaccaaaggaacataggcaattttcaccacggaatttaactcaaaaaactgatgaagacttgcttaatgcccctgaatatgcagttttcccaaatggggggagtaacttcagtaatttgcatgctagtaaggtggcatctcatagcaatagcaagttccctatgcaatcaccacacggtaatgccaacaagaaaggatctttgatgagctcagctggatcagtttctcagtaccagcacttgaatggtgatagccatgacattgatgtatctggatggcatactcatacaggtggttttacttcatccatgctgaacaatcaactgaatcctgatggtgactatggcaatgttctttcgaatcatggtggatcgagttatcagggccaaccaacagagacgatgtacgcacaatgcttgcaggcaaaccctgattcaccccttggcgcagctgcaagcatgagccctttccaagggaggggttttactggttcaggacacttggatagtcctggataccaaaaagcttaccttgggtcattatttggccagcaaaagctacaatatgggatgccatacctgggcaattctggtgctcttaatcaaaatatctatggcaatgattctgcctttggcattggaatgacttatctaacaagcccgccatctactccatatatctcatctccccaaggccatgttgggcaaggaaaccgtctgactcgacttccagcagtggtgaggaacaccgctggaggatccatgggatcgtggaattcagagaatggtctgatggataatggttatgggtcctccttgctggaggaattcaaaagtaacaaaactagatcttttgagctgttagatattgtaggccatgtggtagagttcagttcggatcagtatgggagtcgctttatacagcagaaactagaaactgcttctactgaacagaagaatatgatttttcctgagatccttccccaggcacgtactttgatgactgatgtttttggaaactatgttatacagaagttctttgaatacggaactgaaacgcaaacgaagcaactggcaaccctgcttaagggttttgtgttacagctgagtcttcaaatgtatggctgccgggtgattcagaaggctttggaagttgttgaagtggaacaacaaacacaaatggctttggagcttgatggatctatcatgagatgtgttcgtgatcagaatggcaaccataggatcttggagcattgtgacgatgaaagcactcaaaatgccatgatggaagagatcatgcagtccgtggttactttaacggaggaccagtatggtaattatgtaatccagcatgtcctgcaatatgggaaaccagaagagcgttctactataattgcacaactcgctggacagatagtgaagatgagccagcagaaatttgcatccaatgttgttgagaagtgtcttacttttggttctcctgagcaacggcagattctaatcaatgaaatgcttggcacaactgatgagaacgagccgttacaggcaatgatgaaagaccagttcgcaaactatgttgtgcagaaggttctggagacatgtgatgaccagaaccgtgaattgattctttcccgtatcaaggtccacttgaatgcactgaaaaggtacacctatgggaagcatattgtgacacgtgttgagaagcttattgccgcaggagaacggcgcattggcgcactaccctcctgctga

SEQ ID NO: 10853 - DNA, 1299 bp, Zea mays
  Peptide Sequence Number=SeqID_52632
atgaggtgcctgcctttcttgcatggagacgtcagtgagaaggatcctgtcactaagtcggcctctgtacggtccatgagcacaacatcgcgctcccgctccggttcagacttcacctccttgaatgtttccgacatgagcgccgagtcaataaggaggacacagtaccccagcttcactgactgcccgtctaacctgagggtgttctcctttgctgaattgaagagtgccacacgcaacttcagccgatctctcatgcttggcgagggtggctttggctgtgtgttcagcggcatcatcaagacctctgacaaacctaatgaacgaattgagattgctgttaagcaattgaaccgtaaaggacttcaggcaagtgattctcgccatgggcagaaggagtggttgacagagatgaatgtgcttggaattgtggaccatccaaacctagttaaactaataggctactgtgctgaagatgatgagaggggagtacaacgccttctagtgtatgaatatatgcctaatggaagtgtggatgatcacttatcaagtaggtcaactactctgtcatggccaatgagactaaaagtagctcttgattctgctcggggactgaagtatctgcatgaagaaatggaattccaggttattttccgagacctaaaaacatccaacattctgctggatgaaaactggaatgctaagttgtcagactttggtttggctaggcatgggccaacagaaggtctcacccatgtctccaccgcggtggttggaactctaggctacacagctccagaatacatgcagactggacacctcacggcgaagagcgacatatggagctacggagtcgtcctgtacgagctcatcacaggccgccgccccatcgaccagaaccgtccaaagagcgagcagaagcttctggactgggtgaagccatacatctcggacgtgaagcggttccccgtgatcatcgacccgcggctggaggggcactacaacctcaagtccgcgacgaagctggcgagcgtcgcgaaccggtgcatggtccggctgcccaagtcccgccccaagatgagcgaggtgtacggcatggtccagaggatcgtggacggcgtcgggaccggcccgccgcagcccccgctgctgcactaccaccatggctcggcctccgagccgggtgccaagcgcgccgagaaagggtcgctgaggaggaggttccgggaattcaggtccggctgccggcacgttgtcctgcggcggggcaggaagcctgaggtcgtgaaggacctctga

SEQ ID NO: 10854 - DNA, 1719 bp, Zea mays
  Peptide Sequence Number=SeqID_52633
atgccaccgggcgccgcggctgtcgccgccacctcgcaacaggccgactgctgcggacacgggcccgggcccgggcccagctggcgcggtggcggcggctgcgatgtccccggcggcgcgtcctgcagctacctgccgctgcgcaagcggctgtccgttgacggcaagttcccggcgccgcggatatgcatctgggagtgcgacggcgaggccggggacatcacctgcgatatcgtcgccgctccgatccgccgcagctgcagcgcgagggcaatgccgccgccgccggcggcctcgctcttccgccggatgatgaccccgccgccctcgcggcccaggccgccgcagagggaggtggaggatgctgtggcggctaggaggcccggggagaccatctccaagggccaccggagctacggtctcatgcttaacctgcagcttggcgtaagctattcggtggggaagtcatcggcgctgccgttcaggaagctctcgtcatcagacttcgacccgcgggagaaggtgtggacgcggttcccgccagaggggtccaagctcacgccgccgcatcactccgtggatttccggtggaaggactactgccccgcagtattcaggcacctgaggaagctgttcggggtggatcctgcggactacatgctcgccatctgcgggagcgacacgcttcgcgagctggcgtcaccaggcaagagtgggagctgcttcttcgttacacaggacgatagattcatgattaaaaccgtgaagaaggcagaaatgaaggtcctaattaggatgctgaggagttactatgaacatgtttgtcggtacaagtccactttgttgacaaggttctatggcacacattgcatcaagcaagctggatgtcccaaggtccggttcattataatgggcaatttttgctgctcggagtataagatccatagacgttttgatttgaaaggctcatcacatggtcgtactattgataaggcggaagagaagatcgatgaagcaactactctaaaggacctggaccttgattatgcattccacctacagagattttggtatgacgagctgatgaggcaaattcagatggactgcacattcttagagacacaaggaattatggactacagcttgttgctaggagttcactttcgtgatgatttctcaatgtctaaaataggtgtatctcagtttattggtttgccaaaatccacaggcaaaagaaaatcatttgaaggtggaggcgatgtttgtgagctttgctttacggaatctggatgcaaggacagagatttcattgttgactctcgtgtaaccccctgtgtctgcacttatcaggaaaccactggtccagttaggcaagaacatgcctgcccaggcagagcggagacccaaagttgtactcgagaagattccaagagttcagtcgcagagtgttcatcagagaacattaaagaacaatttgtccagcgggtgactgctccactggcattttacatcatgggatccattggtgaagtcctggggtatgatggtttcaccgatcccgagcgtgccctggaacagtggaaaggatggtcggtttacccgacgcatagttttctgaataattggcgtcgagggaggaggagcactgccgacacgcatgctaatgctgaaaggatgcgagctaaaactgtagagctttgccttttcaaggacttgtaa

SEQ ID NO: 10855 - DNA, 429 bp, Zea mays
  Peptide Sequence Number=SeqID_52634
atggcggtggcatcacagtcaactggccgctcgcgcgcgctcgactcatgcgtgatcaggcgaccgttgcagccgaccgttgcgctgtctagccgttgctctgctggtgcaccggacagtccgatgaattatagcggagcggctcttgtgaaacccgaaggtggcaagtttgaagtcgtagggccctgggcaccggacactgtccggtgtcacaccggacagtccgataacttccaacaaaccattggtcaatacttgtcggggaccataattaggggtacccccaagactcctaatctcagctgtcgacagagccaaagtgaccgcagtcacttcgccgcttcactgaccaacctgataggaaaacagtgccgcctgcgccgcttcgactgctgcgccactcgacagagtgaggctgacaacagctaa

SEQ ID NO: 10856 - DNA, 258 bp, Zea mays
  Peptide Sequence Number=SeqID_52635
atggctaggaagcttccctggtgcactagcaatccttatgccccccgatctagtaaaacgaatgcggagcactccccaaggccaccacaaaaggcacccaagtcgctcgtgggcgatgacgccttcgccgcccacgtaggcaactcacgtgccccgaatcgagcaccacaccagagcggagacgaggtggtcgccggcggtccctcaccaagcgctagcgatggttcctacaacctcaacgcacggcgcaaacgctaa

SEQ ID NO: 10857 - DNA, 144 bp, Zea mays
  Peptide Sequence Number=SeqID_52636
atggcccgattctccccatgtgccctgctcctcctctcttccccaccaaaacagcaagcctccgccgcgcccagcattgtcgacgctcaccggatgtttgatgttttacgcagccccaacatcgacgtcgttcacccccggtga

SEQ ID NO: 10858 - DNA, 471 bp, Zea mays
  Peptide Sequence Number=SeqID_52637
atgtggctgcatgaactggcgtcgcggctgctgcgcaaggtcgacgacgttgacgaccgtgaaggcacgagcaggggcagcgccatgggagtgggagcttctgctactgggaaaaggaagcgtctgctcctgctgctagacgccgtggagaatgggggcacggtagagaggagcagggagtgttggagcatcgggcttcgtcctcagagcagggaagggcgctgcttgggcgcctgcaccagaggagcccgaccatggatgcttctgcccccatgcgctagggtggaaggcgccgagcgctgtggagaaggagggtgtggcttcctgcgcttgagctcaaggaaaacagagaagagggagggcgatgttcctgttggatgggtgtcgagcaccatgggtagaaggtgcatgcgccgacccgccgccatggaggagcaggggacgcatcgacgagatggaggatgggactag

SEQ ID NO: 10859 - DNA, 318 bp, Zea mays
  Peptide Sequence Number=SeqID_52638
atggcgaagctgtgcctgacggtggcggagcacggtcgtggatggtggtcgagctctgctgggggtggattcgggcgtaggaggcctggcgatggggaagctccggcgagcttgaagaacggacgtgcgcagctcgggttagtgtgcaggggcgaaattagtgaggcagggggaggtgggagtatgcgaagacttgaggatggagtcgggataccagtttggcgcggggaggcgacgtgggagcggcgatctgcacgtggagaagatgaagtcgtggtggaggacttccaggagttccaagagtatgatgagttctag

SEQ ID NO: 10860 - DNA, 333 bp, Zea mays
  Peptide Sequence Number=SeqID_52639
atggttaggatcgccagatgttttatttttccactgcgccgtaggggtgccggcgttccaacattctatgccaacttctatgacaaagaattagagtttatttttgtttgtgaaggtctactcccatgggatgccgacacaatcaatgagctgtataaccttactgtcgatgtcgacgaacactctgatttctttacggaagtgacggacgagaaaagagacctgctcaaaggcattgtaccccgagaagatgaagaattcatggagaataagggtgcaattaatgaagcctctgtcgggaggatgaatcgtggcaagaaacatcgatactga

SEQ ID NO: 10861 - DNA, 297 bp, Zea mays
  Peptide Sequence Number=SeqID_52640
atgacaataaagaccattgatgtgagaaaaatcattctgagagaaattcgaaattgtgtcgccagacattctggtctagcatactttccctttatgataacagttttgcacttgaaagctaaaattcttgcaaacatcacgattgagtggaaaatcgaggagaatggaaaattaccaaaaagcccctatactttgacatttttgcgatttggccaggtttgtatcaagcttgtggttatggttgatgtttatgtttatgtcttgtgttatgcaaatgaaacgagtgagaaaaagtaa

SEQ ID NO: 10862 - DNA, 924 bp, Zea mays
  Peptide Sequence Number=SeqID_52641
atggagcaacaccagcaattcaggagttttgttgctgccatacaaggatggcaaactcatccgtcgcttgtagaatttgaaaatttgctagctggtcaagaagccttagctaagcaaatgggaggagtctcgttgaagaagaaagaagaggcactctatgccaatagaggcaagtggaactccaagatacataccaccggtagatccagaaagaataatgacaaggcaaaaagtcatcaaggtgaagagagcattcgtgtagggggagcttcaatgaatcaagacaacgacaaaaagtttgaagggaactgctataattgcgggaagaagggtcacatggagaaagcttattggtcgaagaaaaaatcggtagagagtaatgtagctgcttccaaaagcgaagatgaatgggatgctgaggcactatttacagcaacaacatctgaaaagattgattacaagaaagattggatcgtcaactcgggatgctcaaatcatatgacggacaagaaagtattgccagactcagatggttttaaatatgtggtgcaatcttctcaaatccaattgggtttagatgaagctaaagatgtagatgacgaaggcaatggcaaagaaggtgtagctcaaagtccttggcaaactagtgtgtatcaacaaccaagcgaacaagatgagcctagtgtagttgaaacaccaacttcactaagaaggtcaacaagaattagaaagccaaatctaaagtatgccaattccgccatagtggaagaagcagatgcaaaagagtcagagacattcgaggaagcgttccaaaatccagaatggattaaagctatggaagaagaaattgctgcgctagacagaaatcagatttgggagctcgtgccaatgcaaaaatatgttaagcctatttcttgcaaatag

SEQ ID NO: 10863 - DNA, 282 bp, Zea mays
  Peptide Sequence Number=SeqID_52642
atggttggcgccgagatcggcgacgtagatcttggtgtctacccttttgccacgtgggcgccacaccgtcgccacgtcctcggcctaggcgccaatagcattgggccggttcaaccacctgggggtcagactggcagtcagtctgccagtcaggaggtcagaccggtcagtttgaactttccctggaccccggttggacctgcctggaccccggttgaacttgaagttcagctggagttgagaaagctcaactcagctgaagttcagctcagctacagctaa

SEQ ID NO: 10864 - DNA, 276 bp, Zea mays
  Peptide Sequence Number=SeqID_52643
atgtgtgcattggctgcaattgtgatttctgctgttactggcctggtagattatgaagaggccatcttcttgtgggctattgataagaaagatttctttttatgggcaatcacatttatcacaacattagtttttggcattgagattggcgtccttgttggggttgcattctcattggcctttgtgattcatgagtcagcaaatccacatataggtatgagagttggttctagtcagctaaattgtgccatacctcccttgatcacaaatcattag

SEQ ID NO: 10865 - DNA, 654 bp, Zea mays
  Peptide Sequence Number=SeqID_52644
atgacggcaacttcgcacgaagacaagggctatgactcgttcccgctcttgggcagcagccacagtagccttagcagtcatgagggtcacagccattgtgaagtggatagtcgcaacgttgggatggcgaggatcaaccagcgaggtgcaaaaggggaagcaggcctgacgcgccagtacgaggcgccaagggctaggggctgtacccaggccgccagcaccagaggtggcgcccaggacaacagggcccaggctaacagcggtaggcccccgacggtgcccaagcagccaaccctagggatgacgctgagtctcatgcctaggttggtggcggttaggtcggtggtgcctaggcccacaccaagactggcatggcctaggctagcggcgcccaggaaggcgtggcctaggccaccgcctgcagggtcaaggtcgccaggcctaggggcaggaggggccggtggaggcgacttgaaggtggtgaagacaagggtggcggcgagggagagggcaggtccaacagccaccgaagcccaggcccaggggcaagggggaggaaaactgagtggcaaaatagctaatttctcgagggaagagccagcaggaggggaggcgtcgagtgttcagccaacagccctaggtcctcgtcagtga

SEQ ID NO: 10866 - DNA, 339 bp, Zea mays
  Peptide Sequence Number=SeqID_52645
atggccggaggtagaccagcaggtgtccaggcacccggcctagtcaacgttggtgtagacaatcggctcatcgatggagcgccgaaagtggaggtcgtagttgacattgccccaaagataccgaaggatctgcttgaccgcacccaagtgcagctcatagggatcatgcatatagaggtagacctgctgaatagcgcatgtgatgtcgagtctggtgaaggtgagatgctcaagagcaccggtgaggctgtggtagacaatggggtcactgacaggagcgccatcgccaaagagcttggtttgtgtgtccaccggggtcacacagggcttgcagtttag

SEQ ID NO: 10867 - DNA, 267 bp, Zea mays
  Peptide Sequence Number=SeqID_52646
atggagcaggggcttgcccagaggacgctcgccatgggaggagcagagagctcgcaggaagaaacggcgaccgcaagggagttcgtccacgccatggagggcagagacatggcgcagaacgccagggacagaggagcagggagaagcgacgaccgatgggaggagcttcggcgcgccggggaagaaaggggacgctgggcagaggagggcggctgggagtgtggaggcgcatgggagaaggagctgagctccctgctgcaaccgtga

SEQ ID NO: 10868 - DNA, 246 bp, Zea mays
  Peptide Sequence Number=SeqID_52647
atggacgaagagcgagtgtgtcgcagtgacgacgagcaggcatgcgagtgccaatgcgagccgagggcaagcacgagcgccaggaccagggagcaggggcgcgcgctcagagaggcacaagagctggcgatgtcggatggctggagcagagtgggtctaaggacctggcaggacagacagtgtgatgatgccgagcacaacgagcacgacatccggggcacgaccgagtggcgcacaacacgctag

SEQ ID NO: 10869 - DNA, 510 bp, Zea mays
  Peptide Sequence Number=SeqID_52648
atgggcaaaggcaggaaaggtcgaggctcgccccgtcgtgctggagacaagcggaagcgtgccccaagtcctccctcggaggacttcggtgattcaaagtactcgaaggaagtttcctctgggtctgagggatcgtcgactcccgcttctccctcggcgtcgtccgatgactcggacgactcccaggggttgtctgctgcagtctggacatacatctgtgccgtcgagcgctccgggctcgaaggatcagatgagtcagaggtctccttggatgaggagaactcctctggctcgtctgaggagcagagcagcgacgacagtgatgatgagggcgacggcagcgacgacgacagtggtggaggcgacagtgatgaaggcagcgacgacgacaacagcggtggaggcgttggtggcgatggtggcagcaaaggcgacggcggcagcaagggcgacagcggcgtcggcgacagtggtgagggcaaggccagtggcacagctccactggtctaa

SEQ ID NO: 10870 - DNA, 561 bp, Zea mays
  Peptide Sequence Number=SeqID_52649
atgggcgcggcttctggcgcggctccggcgcgggcgtggctgccggcacagcacgacctctggcacgacgtggttcatctcgacgagggagcgactgacggcgcgggtgtcgctgccgacgtgagtgcggctttcgacatggtgttcctgctggcatggtgcaagccaccatcgcgtgatacagagtcaatagacgagcaggagccttcgcccggagttgcgctcaagctgagctcatctcgccgccttgccatcgtcgtgcgtgtttctcctagcaaggtttttccagtgagccctctcctctcttcctctccccctaccatgaacctctccctgtacgtgagcccctcgtccccgcagcccctggcgcggcgtgccctggcagccctgcgcacgagcggccgggttcccatctgtggcagttcgtccagcctccgcggccagatgcacgccgacgagttccgctaccctgtgcgcggcatgcgtgcccccctgcctggccgaagccggccacccacccgtgtagcccctgaccgcagtcggcatggcatgcttgcctag

SEQ ID NO: 10871 - DNA, 696 bp, Zea mays
  Peptide Sequence Number=SeqID_52650
atgggggtgacagagggtgtgcagggaggcccatccacacgcgaagtgtcagagctcgatatcgacaccacactcaaggatggcatcctcgggggcgcgctggagcctgtgggtgcgacggcggggaacgatggcaagcagtccatggagctatgcaggatgatggacgagctggacgcggcggctggggacgacggcggcggggacgaggcggtgccggtggtcttcatctgcccgatctcgctcgagcccatggtggatccggtgacgctctgcatggggcagatgtacgagcgggccaacatctcgcggtggctagccctgggccaccggacctgcccgaccacgatgcaggagctctgggacgatgcgctcaccacccaacgccaccctccggcagctcatcgccgcttggttctcccgccgcctccgcggcacgacaatgcccaaaaggcagccctgaagggccaggcccgtgtcgcggcgctacgggagctgcgcaccctcgccgcctcccaccagtccgtcatcaaggccatcgctaaggccggttgcgtggccctgctaatgtcgctactcggacccttcacgtccctcgccgtggggaccgaggttgtcgcgatatcgtcagcggggtgctgcttgacactgacacaaaggccacgctccatgcagccgtggtggcagcgagattag

SEQ ID NO: 10872 - DNA, 525 bp, Zea mays
  Peptide Sequence Number=SeqID_52651
atgaggacttcaaatccgactccggcaatttggatttggagctcacagaaggggctgattatgacgtcatcgagattaagtccttctccgcccagagggctttctctagagacgattagaatctacaagttggttgggggtgccgctgccgccgcatggaacccctcgctggcggggctggtcgagttcggtgggcagagcgctcttgctctccgtctgctcctcgttgtttttccttctaaaatttctaccggtgcgaaccagccgtttggagaggagggagccggggaagacgatggcaacgatttgcttgagatgcaggcatctgaccctgaggcgtacaatgacaatgtcataagagcgctatgcgtggaattagagatgagtgtgtcgtacgtcatagtttgttttcaactagcagcatgttcttactttgttattgtcatgagctttgtaggatttgtgcttggagattggccaccaaggcctcaggctcagtcgctcagctcttgtttgaagacctaa

SEQ ID NO: 10873 - DNA, 924 bp, Zea mays
  Peptide Sequence Number=SeqID_52652
atgtcttcctcgtgttccgacgcgtccagggacgatgccgtctcatctcccgacctcccccctctggctgcacccgtcgccgcggcggctgctgcggccgcggcagcggcctcctcggggggcggcataggactcgggggcgtgggctccggccggaggctgccgccgccgtgctggacacacgaggagactctcgcgctcatcgaggcgtaccgcgacaggtgggaggcgctgcagaagggcaacctgagggccgcggactgggacgacgtggccaacgccgtcaccgcgcgctgcggggcgtgccgccacaaggtcgagaagcttcggaagcgataccgcgctgagcggtcacgctctgcggggcggtctaaggggcccaaatggccgttcttcccgctgctccacgacctcgctggtggcggcgtgccggacccgagtccgaacgccatcgtcaagatcaagaccaagggccccgccccgccggcgtcctcgccttccccggtgtcctcgccttcctccgaggtggaggctgtgcggagcaggagcctgcacgggctcatctccaacggcggtgccgggagcgggctgcgcttcaccatccccaaggcctcgcgcacgaagcccgtcgcggcggcagctgtgaagtcagagaggagcggcagcgaggacgacgccgagtcagaggcaatggcggaggtggctgccgcactccgggctgtcggggaggggttcctgcgtatggaggagcgcaggctggagctatcgctgcagatggagaaggaacgtatggaatcggagatgaaacgcacccagacgatgctggacgcccagcagctcttcctcgaggccttcctcggtaagcaactgcagcacaagaaggcccatgtctccccttcctctgccgcaatggaagaggactga

SEQ ID NO: 10874 - DNA, 288 bp, Zea mays
  Peptide Sequence Number=SeqID_52653
atggtggtggagatgcggaacggaggcggaggtggggaaccggtcataaaaggaggaggcggtgcggtggtgggccgcgggcgtgggccgcgcctccgcggtgaaatgaccggctgcggagggcatcgcccaccgcggcggcccgcgtgggtggttttgcgggattggtcgcagtcgctccgtgaaggaaggaaggtaatccagtcctttggcagcacctgctgcaattttcatcctggtgttccagtccaaggcctctttatcaagaggtatatctacatcaagtga

SEQ ID NO: 10875 - DNA, 438 bp, Zea mays
  Peptide Sequence Number=SeqID_52654
atgggcaagagcaacaaacgcaagcgcgagccgactcctccctcggaggatttcggcgactcggaatactcggaggaggagttctcctccgagtccgaggggtcttcggctcccgtctctcccccagtgtcgtctgacgattcagatgactcccaggggcttgccacggaggtctggacttatatccgggccgtcgagcgttccgggctcgagggctcggatgagtcggagtactcctcggacgaggaggactcgtccgaggaggacggtggcggcgatggcgaagacgacgacgacgacgatgacaacgacggaggcgatgacggtgatggcgacgacaggggcggcaacggcggcagcaagggtggcaacggcggcagcagcaggggcagcaacggcggcggcagcagcaagggcagcaacaaggccagtggctag

SEQ ID NO: 10876 - DNA, 549 bp, Zea mays
  Peptide Sequence Number=SeqID_52655
atgggggcgagatccacgtttggcctgctagtcatgggggtggagcatgagttgctaacgcgggcggacctgctggtcgtgggggcgaagcacgggttgctgatgcgggcggatggggccgccatcagcggccgcagtggtgtagcacggctcgtatgggggctggggcgcaacgatgccggcgagaatggcagtggggtggcggacgcggacgcggacgggtcgcgggggacgggggagtcgcggacggaggtggaggcgtgccaagactctgctcagtctgggagcaccggacagtgtccggtgcgccagactggctcgggcgaactggccgctctcgggaaatcgtcggcgacgtacggctataattcaccgaacggtccggtgtacaccggactgtccggtgagccaacggtcggccgcgcgatctacgcgggacacgtggccgagccaacggctagaagggggcaccggaccgtccggtgtgcaccggacatgtccggtgcgccaacggctctcaagctgccaacggtcggcttcgccatttaa

SEQ ID NO: 10877 - DNA, 966 bp, Zea mays
  Peptide Sequence Number=SeqID_52656
atgggcccgtgccgggtcggcccggcccggcccaacttgcaggactactccggccgagaagatacgccaaagccactaggcaggctcccgccacgcgcccgggacgccgagcggatccacaaaacagcctcgggcgccataggaagctccgtctcgcccaacctcagggctcggcccccgtctcgacctcggacgacggactccgcctcgcccgaccccaggaaacggactcaacctcgacgccggaagacggtctcagcctcgcccgacctcagggctcggactcaacctcgacgccggaagacggtctccgcctcgcccgaccctagggctcggactcaacctcgacgccggaagacggtctccgcctcgcccgaccctagggctcggactcaacctcgacctcggacgactgtctccacctcgcccgaccccagggctcagactcaacctcgacctaggacgacggtctccgcctcgcccgaccccagggctcggactcagcctcgactccggaagacggtctccgcctcgcccgaccccagggttcggactcagcctcgacctcagaggagtcaccacatcgcccgacctcgggctcggaccgaccacgtcatagggggggccatcattaccctacccctagctagctcaggctatgtggaacaagaccggcgtcccatctggctcgccccggtaaaacaagtaatgatggcaccccgcgtgatccatgacgatggcggttctcagccccttacggaagcaagcagacgtcagcaaggatccaacagccccgatagctgtcttccacagggctcaagcgctcctccgacggccacgacatcacatgaacagggcagcaacacctctccgacagccacgacgacatggctctcgtacgagaaggtggccgcgcgggagaacgggctgatggacagtctctctctccctcgcgaacgcttgtaa

SEQ ID NO: 10878 - DNA, 387 bp, Zea mays
  Peptide Sequence Number=SeqID_52657
atggctaatgtcgcgcgttgtcgaggtggcctcctagcagcggcccatctagagcacatggtgccatggttattcgcgttcatcgggcatcgctactctcaaggagtcgagcgcatcttgcgtcacttaggggcgagcatgatctccgccacgctttgtcttcctcgtctgtgggtgaggcttcccatggccgcgtggattggtcaaagaaggactagaagactaccaacaaggaaagagaactcaaaaatggaagagaactacaacgattacttctctagtgaagagatgagacctgtcaaagaaggactagaagactaccaacaaggaaagagaactcaaaaatggaagagaactacgacgattacttctctagtgaagagatga

SEQ ID NO: 10879 - DNA, 534 bp, Zea mays
  Peptide Sequence Number=SeqID_52658
atgggcggcatcaggcttactcatgcgatattagcccggtcacgagactcagcagtcagcagccgcagccgttgcatcacacttagcgccaccccatgccatgagaagaagctcttagaagaccagcgttgtcgctcgccaggagaggaggaggaggaggccgctctacggaagaagaagacgacgctgcgctgcgcggcgacggacgactggtcggtgggtgtcatgagaaggtcggccgtgtccgtgaggcgggcggcgccagcggcattggccatcttgttcggagcgctccttctggtgtcgttcgtcgtggacggcgtcaggaaagcggctccgccggcggcgatcggcgggaggaggatgatgctgggcggaggcgccggagggctgaggaccctggaggatttcaaggctcatgatcccttccaggacagcaagagaagggtgcccaatggccctgatcctatccacaacaggtactttgatctacgtacagcttactgcgctgcaagctttggttttggtgtttga

SEQ ID NO: 10880 - DNA, 1605 bp, Zea mays
  Peptide Sequence Number=SeqID_52659
atgggtgagattgataccaaacctattgaacctgttaaagttgcaatatctttatttggtgaaaaaagtgatcagttgagacgccggtcaagcagcagcgatcattggtttagggatataattctcgaaagattctttaaatacatgaaaaacctttcaaaccatattagacactcacaccccgagtgcgagtaccatatagatattcaactcttgtcagtgaatatgctttttcttacgtctttcttcctcttttgccagtcagatatggaaaaagagaaaaacaccgaagggttagagaaggaattggccaactacaggctgcaaatagaagcaaaggactctgcatacatgcaggctcttcttcaactagaacactacaagaaaacagcagaagaacttgctgtcctactaaggaactccgagcacgagagagatagatatatagaagaatgcaatgaattcaagaatcgggtcgatgaactcgaatcgaagacgaaagggatggtagatcagttgtctgaaacagcaaaggtgcgcgagcagctttcgtgtgttttaaatgagctgaaggttacacaagctgatgtacttaatatggaatcacaacttgctgctgcaaaagatttagagatcaaggcaattacgcaagctgaaattatggaagtctccgctaacatggaaatggaaagatctgaaaaacttttagggcgcattgcggagcttcacgatgctgttcttatttcgcagctttctgccactgaagctgagaatgaaaagtgcagagttgtgtctgagaaagatgctgaaatggaggcaatgaaggcgacagcatttcaagcacaagaagagatggaagatctgagaaaacagttggaaacaattcgagaactcgagaataagctcgtagccaagaccgcatatatcgagtcattgcaggcaaagcttgagcaggtaagtaatgtactcaattcaatggagaatgctagtttggacggcggaattgatctaaaccaaataaaacaagacttggagttcaaggaaagaaagatatcagatcaagcattttatattgaggcgttggaaacggaacttaaacgattaaaacttgaactggaaaatgctaatcaagtggcaaagaacctgaagaatgatgcacaagtttcacaccattttgttcaaacagagaagtgtgttgatcatataatgatctcggtcgaagaatacaactctttgatccgaaaagttgagaaggcagatgaattttcaaggtcttcagcagaaggttttgatcagttaaccacagagtcagtaagcaagaaccaagttgaagctttgaagaaacaattggaagttgcaatggcgaaaatcgggttgttccggaaccgagcagaacaagcggctacgagggcagaagcagcggagaaagccaaagcaacagcagaggaacagctgaggaagtggcaattacaaaagcagagaagaagagctgctttagctgccttaagagaggagtctgcacctaaagagttctgtctgcccaccattgaaaagttacccacaaaacatcagccattgggtaaagttcttaacatgaacttctag

SEQ ID NO: 10881 - DNA, 117 bp, Zea mays
  Peptide Sequence Number=SeqID_52660
atgaggagaatgcatattggagagaacctaaagagcaccacgatcaacccatttgagagagcttatttgaggatgtgtttcgactcgaagctcaccttcagcaaccttggattctga

SEQ ID NO: 10882 - DNA, 426 bp, Zea mays
  Peptide Sequence Number=SeqID_52661
atggggcatgaaaatgcaactgctgagaatggaccatggatgattacattggatgctccaagttttatttttgttatgcaacatgctcgtaattgtgcctttcatgaggaagtctaccgtgcttatataaccccggcatcaagtggtgatttggataatacaccaatcatcaaccagatattgaaacttcggttgaaaaaggctaagcttctcaattacaataattatgctgaggaaatctaccaaacaacagaaaatattttacatagattcatccaaacaccagaaaatattatcttttctaaaaaagcgcagcctcctaactacaatgctaccctgaaacaaaatttccccaatattcagcaaatcgattctgagtatgctaacggtaaacatctccagtcccttgttgtctggagcttgtga

SEQ ID NO: 10883 - DNA, 504 bp, Zea mays
  Peptide Sequence Number=SeqID_52662
atggaaaaagctttgaccaaagttggtagcttctggatttccaagaaagccaaggaagaactctatgccgtctcaaacaccgttgaagagaaggccaaatggatactcaataagctcaaaggtaaacatgtaaagcctttggcggatgtcctccgagaacacaaccttccgccgggactttttccgagaaacataacatgttacgagatggacgaatcgaaatcaaagctgagcgtgtatatgccggcggcatgcgaagtgaggttcaaggacggatcggcggtgagatacggaaggcgggtgaaaggcacgttatcgaaggggaagttgagcgggatggaagggatgaaaacgaaggtggtggtgtgggttaaagtgacggaagtgtgcgtggagagttgtaaatctgataaagtatggttcatggcttcgggagtgaagaaatcaaggcctagagatgcttatgaattgcctcatgattcggttagagttgaagaaatttga

SEQ ID NO: 10884 - DNA, 264 bp, Zea mays
  Peptide Sequence Number=SeqID_52663
atggctagactttctgcatcaagtggggaccaatcttgggctgaatatggggggaaactggactatgatattagtggatcagagaatattgatccaaatagggactcgataaaggaagattggcccatagagattgggaaagggaagaagtgtcctcggcagggcagggcagccgaatgcaatgaaaatcttatactagaatgtctggagaatggggaacccccgggcatgacgtcgcctttggcatgtgctgagggagactaa

SEQ ID NO: 10885 - DNA, 354 bp, Zea mays
  Peptide Sequence Number=SeqID_52664
atggctggagctaggccgctcgacgctggacctcgtcgacgacagcgacttgggcactcggctacgacggacggcgactcggcgagcgggcgaggggccgacggccgaggcccgagggcgactggccgcaagacgggagtgacggctgtgcggcacggcgggcctacgacggctgcggactgcggtgcgccggtgcggctccaaactctagcatgttgcggtgctgctgtcgcccgtctggtcgtctggccgtctgtgactggtgtgaggtgtctggttagggcgagtgccgagtgccgtcgtggtgggctgttggccttggtgggtcacggtcaggcccatctgcgtttctga

SEQ ID NO: 10886 - DNA, 342 bp, Zea mays
  Peptide Sequence Number=SeqID_52665
atggttcgtgccgatcgcacgagggacaatggacaagtgatcaactgggcaaattggttagcccacaaggtttgtgatggtcgtcaaacaccaaaatcgattataggaaatattgagagtatttctctttcagagggcgaccgcgatattatgaaggcattgtgcgacaaaacgatggacaaggttgttcgtaccggccggatcctgatgaagagatctagcgtcgtggtgcctgatgacattgcagctgacgtgcttgctgcgtctgttgataagagtaaatcttcttcctctggtgatcctgcagataaggttccttgcggggatgctcctacacaataa

SEQ ID NO: 10887 - DNA, 120 bp, Zea mays
  Peptide Sequence Number=SeqID_52666
atggcacaaggtgctactgttccccaaggcgagctgggtatgcagtgcaacgttccactttacatagtaaacatcaagctactcactgtatattataggtatggacaggtgtacagttga

SEQ ID NO: 10888 - DNA, 246 bp, Zea mays
  Peptide Sequence Number=SeqID_52667
atgagcgaggagaggccggtgccgcggcgggagagcccgtggggtctgcctgagggcgacacgcggcagcccaaggctcaccgctgtaacgaccgcgccgaggacgtcgtccaggcttgctttgaagggaacccattcaagacagttccaggcccatttaagctcttctggcaatgcatgcgctcaaaacctgggtatgtgtaccttgttattatttacgcgcttaccttctggcatatctcatga

SEQ ID NO: 10889 - DNA, 2055 bp, Zea mays
  Peptide Sequence Number=SeqID_52668
atggaggggtcagaagcggcggcgcgtgaggcgctgtcgacggagaaggcgttcgagggggagcggctgccggcgtggtcggagcagatcactgtgcgctccgtggtggtgagcacggcgctgggcctgttcctgagcttcatcgtgatgaagctgaacctcacctccgggatcgtgccgtcgctcaacatgtcggcgggcctgctcgccttcttcctgatgaagacgtggaccagcgcgctggagcgctgcggcgtcttccccaagcccttcacccggcaggagaacaccgtggtgcagacgtgcgtcatctcctgctccagcatcgccttcagcggcggcttcggcacctacatcctgggcatgagcaagaagatcgccgagggcttcgacgaggccaagaccagcatcaacgtggaggagccgtcgctgggccggatcatcgccttcctcttcctcgtcagcttcgtgggcctcttctccatcgtgccgctgcgcaagatcatgatcatcagctacaagctcacgtacccgagcggctccgccacggcgcacctcatcaacagcttccacacgccgcagggcgccatccaggccaagcagcaggtctccatcctcttcaagtccttcgtcggcagcttcctctggtccctcttccagtggttctactccgcggggccaggctgcggcttcagctccttccccacgttcggcatggaggcctaccgccgccgcttcttcttcgacttctccgccacctacgtcggcgtcggcatgatctgcccctacatcatcaacttctcgctgctgctgggctccgtcgtctcctggggcctcatgtggccctacatcgagagcaagcgcggcctctggtacgacgccgagctgccgcggagcagcctccacggcctcaacggctaccagatcttcatctccatcgccatgatcatcggcgacggcctcttcaacttcctctccatcctcgtccgcacctcctacgacatgtacctcaagcgcacccgccccgccgaggccgccgccaagcccttcgcgggcgtcgacgtcaccgagcgccaggcgctcagcttcgacgaccgccgcaggacgcaggtgttcctcaaggaccagatccctacgtccatcgccgccggcgcctacgtgctgctggcggccatctcggtggtggccatcccgcacatcttccgccagctgcagccgaggcacgtggtgtgggcctacgtcgtggcgcccgtcttcgccttctgcaacgcctacgggacggggctcaccgactggtccctctccagcagctacggcaagctggccatcttcatcttcggcgccaacgtgggcgccgcggacggcggcgtggtggcggggctggcggcgtgcggactcatgatgggcatcgtctccacggcgtccgacctcatccaggacttcaagacggggtacctcacgctgacctcgccgcgctccatgttcgtgagccaggtcatgggcacggggctgggctgcgtcatcagccccgtcgtcttctggatcttctacaaggcgtacgacatcgggatggaggaaggctacccggcgccgtacgccaagatctaccggggcatcgcgctgctaggcgtcaacggctggaaccagctgcccaagtactgcctccgcttctgcctcgccttcttcctgctcgccgtcgccatctgcgcgctcaaggaggtggccaaggcgcggcggtggtgggtgcaggactacatcccgagcgcgctgggaatggcggtgcccttcttcctcggctcgttcttcaccatcgacatgtgcgtcggaagcatcgtgctgtacctgtggagcaagtcggaccgggtgagggcgcacatgttcgcgccggccgtcgcgtcggggctcatctgcggcgacgggatctggtcgctgccgtcgtccatcctctccctgatcaacgtcaacccgcccatgtgcctcagggtcttctccgccgacacaaactaccaggttgaggagttcctctggacgctgcgaaacccagccgccacataa

SEQ ID NO: 10890 - DNA, 2034 bp, Zea mays
  Peptide Sequence Number=SeqID_52669
atggagcaagtggacgacgggcagcatacgcaggaaggcgtgtcgacggagcgcgcgttcgaggcagacccgatcccatccttgtcggagacgatcacggcacgggcgatagcggccagcttcatcctgggcgtcgccctctgcgccgtcgccatgaagatcagcctcaactcgggcttcctcccgtcgctcaccgtcccggctggcctcgtcggcttctacctcgtccgggcgtggatccgtgccctcgactgctgcttccaggtgccacaccagctgccattcacgcgccaggagaacaccgtcatccagacgtgcgttgtcgcctgctctgcaataacattcagcggagggtttggcacgtacatcctcgccatgggcaagaacgcggccggaggagacgtcagggacggcaagaacatcgtggagccgagcattggccgaacggttgctttcctcttcctcgtcagtttctccggcatgttcgtcctcatgccgttcaggaaggtcatgatcatccggcaccgcctcacacagcaagtggagatgctgtttaggtcactgggaggaaccatgctgtggaacatgttccagtggtttttcgctgctgcaaagggctgtggcttcggagtgttccctatctttggcctcgaggcatataaacacggattctacttcgacttctccatgtccaacatcggcatcggcatgctgtgcccgtacaccatcaccgtgtccatgttcatcgggagcgtcgtctcgtgggggctcgtctcgccgtacctcgcgaccaaggcgggcgtctggtactcttcgcacctcagccccagcagcctcagcggcatcaggggctacaaggtgttcatcggcgtctccatgatactcgccgacggcctcttcaacttcctgtccatcgtggcgtacacgctgcacaccatgcgcaagaggcgcagcaggcagcagccgataataatccaaggcggcggctgcggtggcggtagtgaagccgacgacggtgacacgcagccgctaccgttccactgcctcaacgctgctgccgagcaaccgaagaagagcttcgatgatcgccgccgggcgcaggtgtttctgcgggaccatatatccaactcggtcaacatcgcgtgctacgtcctcctgtcgatggtctccgtcgccgccataccgtacctctacccgcagatgcggcgcgcgcacgtcgccctcatctacctcgccgcgccggtcgtcgcgttctgcgacgcgtacgccttcggcgtgacggacatgaacctgtcgagcacctacggcaagctcgccatggtgctcgtgggctccagcgtggggcgcaacgacggcggcgtcgtcgccggcctcgtggcctgtgggatcgtgatggggaccatgtccaacgccaacaacctgatgcaggacctcaagacggggtacctgacgctgacctcgccgcacaccgtgttcatcagccaggccatcggcacggcgctcgggtgcgtcgtcaacccggtcatgttctgggccttctacagggtggtgcagaacggcgacaccgacgtcttcgacgcgccctacgcccgagtgtaccgcagcatcgccatgctgagcgccgggcaggacgggatacccatgcacagcctctggctctgcaagctcttcttcgcgctggcgctcgcgctcagcgtgttcagggaggtggccatgtggaagcgctggcgtgtggcacgctacattccgagcatcatctgtgtggccatcgcctttgtggtgccggcgcgcatacccatcgacatgttcgtcgggagcttggtgctgtacctgtggaggcgtgccgaccctagcaaggcgccgacgttctcgatggcggtggcgtcagggatgatctgtggggacgggctagggatgctcttgtcatccacgatggcactcatgcatgcgcgggcgcccatctgcatcaagttcatgtctcgtaccgataatgtaaagctagatgccttcttagctacactgcctgtgacatag

SEQ ID NO: 10891 - DNA, 168 bp, Zea mays
  Peptide Sequence Number=SeqID_52670
atgcgcgacgaggtgtgcctggggcacgagcgccacacaggccgcgaagaggaagaccatgaggcgctcgccgctggagcgaagctacaccattttagatttttataccttgtctcggatagctctaactttaacaaatttagtagagttagtggagtaggttattag

SEQ ID NO: 10892 - DNA, 1902 bp, Zea mays
  Peptide Sequence Number=SeqID_52671
atgctggctgttggtaaaaagtcaagtcaaccaccagagtgctttgagattggagatcgaaggttgaaggctgaggacgggtcgcttgccgggccttctaggacggaaggctccggccactcactgtcgctgcccctctccgtcccgtcggctccgtgttcttcccaccgggtggacattgatacgagatcatgtgctaggcttcagagaaccgcggcacatttcgcggcgcatgcttactggctcacatgggtggaagatgagcttatggagaatggggatattataaatattgatgtaaatgtgttccagaatggataccatgggggtaccttcagaacatttgcatgtggacaggtgaatgattctatcaagcattttctcaatgagcaggcgcagcagggcacactaccaaatcccaatggggagcaggagcggaggagggagtgcccatcggcggtgctggtgtcggcggcggggtccggcgagccgtacgtgggcgtgacgatcggcacgcaggtgacgaacctgctgtcgccgtcggacctggcgtcgttcctgcgcgcgcagcgcatcacccgcgtgcggctgtacgacgcggacccgcggctgctgtcggcgctagcggcctccggcgtgcgtgccatcgtgggggtccccaacgacgagctcctggcgctggggtcctccccggcgacggccgcctcctgggtgtcccgccgcgtggtccccttcgcgggcgtgaactccagcaccccgaacgtcgtctccgccatcgccgtcggggacgaggtcccgaccgcgctcccgtcggcgctgcccgtgctgctcccggccatccggtccctggcggccgcgctcgccgccgccaacctctcgtccatcccggtgtcgacgccgctgcccttctccgtggtggtggacccgttcccgccgtcgcaggccttcttcaaccagtccctggacaagtcgttcgtggcgccgctgctggcgcacctcgccaacacgtcggcgccgctgatgctgaacctgtacccctactactcgctgatgcagagcaagggcgtgatcccgctggacaacgcgctgttccggccgctgccgccgtcgatggagatggtggacccgaacacgctgctccggtacacgaacgtgttcgacgcgatgctggacgcggtgcgcgtggccgtgcggaacctgaacgcgacgggcggcgcgggcgtgccgatcctggtgacggagacggggtggccgtcgtacggggaccggcgcgcggagccgtacgcgggaagggacaacgcggacgcgtacaactcgaacctgatcaagcacgtgctggaggagaaggccggcacgcccatggcgcccggcgccggcgcgcagtccagcgcctacatctacgagctcttcaacgaggacctccgggcgggccccgtgtcggaggcgaactggggcctgttctacgggaacggcaccccggtgtacctcctgcacgtgtccggcgcggacgggttcctggggaacgacacgacggaccggaccttctgcgtggccgccgacgacgcggaccagaaggcggtgcaggcggccatggactgggcgtgcgggcccgggcgcgccgactgcacggcgatacagcccgggcaggcgtgctaccagcccgacgacgtgcgcagccacgcgtcgttcgcgttcgacgcctactaccagtcccagggccgcgccgccggctcgtgctacttccagggcgccggcatggtcaccaccgtggatccgaaaaacaacttcccgttcttcaggcatggtttcccagacctgctggcaaagctctcggtttactttgcaacatgtggccctgaggtctctgagcaccatgtgaacggcaatattgtacccgtttga

SEQ ID NO: 10893 - DNA, 492 bp, Zea mays
  Peptide Sequence Number=SeqID_52672
atgaccgcccgtagaggcctgtcgatctcccacccctcatcccctcgccccctcgccctcagtcgtcgatctccagtcttccactcggtcactcgcactcgacccgacctaaaccctctctccccgactcaacgattcccatctcggctcctccgccgcggcaccggcccgatatggcgacctcagcgcccttggttcccgtccccgacgccggtcgccatggcggatgatgatgatgtctatccgctcaccgggaacgacgaccttcgcgtggcagggcttgtcccagatgacgaagacgacatccaggcagatgctgctgccttgcttggtaccgatctaacctctgctcctgacgatataagctctgctccgggcgatggtgggggagggcctgtgacagccaccgacacttcggccggctccaccagcaccgatggtggtactggtacctcattggttgatgaaagtcgcctagaggggggtgaatag

SEQ ID NO: 10894 - DNA, 820 bp, Zea mays
  Peptide Sequence Number=SeqID_52673
atgacacgattgggaattaaagccgagcgagccgagagggcgcgctggcgaacaggaaacaggacacgcgatgccgcgacggggctgtccacacacaaagacgacgacgtgggacgagtagcgcacactcgtcgcaacaaattgatggttgttcaaggcttaatatttcctggagcagaggcaagggtgctgggagtttacagcggtgctccacgacggccatcaccggcgtcgagcaaggggcgatttagcgaggtcgacggcaaacaacgcgacgacgagctagaataccagggtgacccgagcgccgtagccaagcagtgggatgcagctgcgcgcagaggagtaacagaagtaacagaggccgagcagagaaacacaggggacacgcgcgggatgaaagaatcgagcccgcggcgcgcagagacttcacggcgctcggcgcggcgaggacgcacgcgcacgagaagatggagcagggagcgctgggcacagggagcttctttcactagagccgagcggcagcgggagttccggccgtgggagttgagggagatgaagctggacgtcgctgaaaaagaggtagcgccggctgaagacaagggcgcggcgcagaggagcaggggagcagagctccggtcgagcgctccatggagagaagcgcgcgcagagagacaacccgatcaagccaaggatggaggcaagaagagcttcgaggtaccgagtgcacgggagaaggtcaaggagaccaggaacccaaagccaggggtgaagaagaagacttgcaaagtcaaggttgatcgagttaagaagagttatg

SEQ ID NO: 10895 - DNA, 240 bp, Zea mays
  Peptide Sequence Number=SeqID_52674
atggatgatggacaataccgaccacacttggactaccgggcgacagtgtacgcgagaggggattctcagccgaggttcgcctcttatacacccggttacgacgccacgacactagcggacacccgagaatcggaggccgtttgcatgctgcgctcgcgcggattcagtttcctagagcgtgcacacgcggagacgatagctccgaccacgggggcccacacggtgatgtttgaaatatga

SEQ ID NO: 10896 - DNA, 408 bp, Zea mays
  Peptide Sequence Number=SeqID_52675
atgacaactgttggtgggcctaatgacttgggaggttctgtcacattgggtgaccgtccaagggatatattcatggcagaagttgaaaaggaagcgaaagatttggttggtccagtgtcagaacatgaggttgagaagggcattgagctacgcggaggcaaagtcagcctaaattgtgttcttagtcaaatggggttggtgtatgaggagcataaggtgcacctcaagaggaggacaagtaaaatgttgattgggttcctgcctagtctaagatgtcgatggatactgcgtcagtcggctcgagagaggtggatgcagggttcgcatccgcagccttcaccaccgtttttgtctagacttgtgatctacccatgggctcgatgtctgacgtacgaattcaaagcttga

SEQ ID NO: 10897 - DNA, 489 bp, Zea mays
  Peptide Sequence Number=SeqID_52676
atggcggtggcaggcgggcaggagcagcggccccgtcgtcagccaagctcacgtcccatccggggacagcaagagaaccctctctcacggcgtgaagacaacgcgcccgtgctccgttcctcgaacggctcgcgcacgcgcaacggccgccccgccaaccactcgccccgtcgcattaactccgcggcgggacaggcgggaccgggaaagggggataccccgaaaaggatccttccccgtgaaggaaccaggctccgagcccccctactgatcagaggttcgaaggctggccccccggaagggttcgacagccgcctcagatcgcgtgggccctacacccactactggtcagaggttagaaggccggcccctcggaagggttccacggccacctcaggctactcgggctccgcgcccattactgatcaggggttcgaaggctggcccccgaagggttcacagccgcctcagacgccgagcgagggatga

SEQ ID NO: 10898 - DNA, 2043 bp, Zea mays
  Peptide Sequence Number=SeqID_52677
atgtcgttcggcttgaggaatgcgggcgcgacgtaccagcggtgcatgaaccatgtgttcggcgaacacattggccgcacagtcgaggcctacgtcgatgacattgtagtcaagacgaggaaagcctccgacctcctttccgaccttgaagtgacattccgatgtctcgaggcgaaaggcgtcaagctcaatcccgagaagtgtgtcttcggggtgccccgaggcatgctcttgggcttcatcgtctccgagcggggcatcgaagccaacccggagaagatcgcagccattaccagcatggggcccatcaaggacttgaaaggcgtacagagggtcatgggatgcctcgcggctctgagccgcttcatctcacgcctcggcgaaagaggtctacctctgtaccgcctcttaaggaaggccgagtgcttcacttggacccctgaggctgaggaagccctcgggaacctgaaggcgctcctcacgaaggcgcctatcttggtacccccagctgctggagaagccctcttggcctacgtcgccgcgaccactcaggtggttagcgccgcgattgtggtcgagaggcaagaagaggggcatgcattgcccgttcagaggccagtctacttcgtcagcgaggtactgtccgaaaccaagatccgctacccacaagttcagaagctgctgtacgcggtgatcctaacgcggcggaagctgcgacactacttcgagtctcatccggtaactgtggtgtcatccttccccctgggggagatcatccagtgccgagaggcctcgggtagaattgcaaagtgggaggtggaaatcatgggcgagacaatctcgttcgctcctcgaaaggccatcaagtcccaggtcttggcggacttcgtagctaaatgggtcgacacccagctaccgacggctccgatccaaccggagctctggaccatgttcttcgacgggtcgctgatgaagacaggagccggcgcaggcctactcttcatctcgcccctcgggaagcacatacgctatgtgctacgcctccatttcccggcatccaacaatgtggctgagtatgaagctctggtcaacgggttgcggatcgccatcgagctaggggtccgacgcctcgacgctcgcggtgactcgcagctcgtcatcgaccaagtcatgaagaactcccactaccgcgacccaaagatggaggcctactacgatgaggttcggcacctggaagacaagttctacgggctcgagctcaaccacatcgctcggcgctacaacgagactgcggacgagctggctaaagtagcctcagggcgaacgacggttcccccggacgtcttctcccgggatctgcatcaaccctccgtcaagatcgatgacacgcccgagcccgaggcaccctcggcccagcccgaggcaccctcggcccagcccgaggtaccctcggctcagtccgaggcaccctcggctcggcccgaggcatcctcggttcagcccgagaaggcacccgggggctacacgcacctgctggtcaccatcgacaaattctccaagtggatcgaggtccgacccctaaacagcatcaggtccgaacaggcggtggcgttcttcaccaacatcatccatcgctttggggtcccgaactccatcatcaccgacaacggcacccagttcaccggcagaaagttcctggacttctgcgaggatcaccatatccgggtggactgggccaccgtggctcaccccatgacgaatgggcaggtagaacgtgccaacgacatgattctgcaaggactcaagccgaggatctacaacgacctccacaagttcggcagtccctgcgacgctaccacgcccgaggggttcggtcccgagacctccaggtgggcaacttggtgcttcggctgtgacaatatgcctgagggcggcataagttcacgcctccctgggaagggcccgttcgtcatcgccaaggttttgaagcccgggacgtacaagctggccaacagtcaaggcgaggtctacagcaacgcttga

SEQ ID NO: 10899 - DNA, 2448 bp, Zea mays
  Peptide Sequence Number=SeqID_52678
atgtcagcactctgtgatccagagacaggagagtgccctgtacgctatgatgttgaatcagaggatctgccggtgctggaagacaaggttgctgccgtccttggctgcatgctggcgttgctgaaccggggaaggaatgaggtgctctcagggagatcaggtgttgcaagtgccttccagggatctgaggacagcactgctgataggatcccaccgctcgccttgttccgtggagacatgaagcgttgctgtgagagtatgcaggtggcgcttgcaagctaccttgtgccaagtgaacctagggggttggacatatggaggaagctgcagagattaaagaacacttgttatgatgcaggtttcccgagggctgatggttatccatgtccgacattgtttgcaaattggtttccagtgtacctttcgattgtgtcagatgattcaggaatggatgagctagaggttgcattttggaggggaggacaagtcagtgaggagggactggcatggctacttggaaagggattcaaaactattgttgatctccgggaagaagatgttaaagatgatttgtacctttcagcagttcaggaagctgtctcatctgggaagatagaggtggtgaatatgccagttgagattggaactgcaccatcagctgaacaggttcagcaatttgcagctcttgtgtcagatggcgcaaagaagcccatttatctctacagcaaagaaggtgtttctaggacgtctgcaatggtctcaagatggaaacagtatgttactcgttcagagagattggctgtccaaaatcactctctaaatgggaatggtaacatcctgacaaatcacaagaccatgcagcacactggcataccaagttcctctccgaatggagctgaaaatggtatgataacagaatctgataggaccatgaacaatggggaatcaagtgagatagacatagatacagctcgtcataatctggaggtcactaatgccctttgtaatgatcaaagcactcaacaaggtgaaatgcctgacaccgtggcagaactcttgtcaaactttaaactggagagtaacccccttaaagcacaatttcctacttgcgatgttttctctagaaaagagatgaccaagttttttagaagcaaaacagtttatccaaaatctgttctgaactctaggagacgatcaagtagcttggttataaggagaaaacaaaatctctgcacggagcgtagtggaaccaatgactatgaagcagcagagtttgcagttctcagaagttcaaatggaaaatcatttgacagtgattatattctatcagttgcttcaggtatcactgatggaaaaccttcaaacaatgaagcctcattaattgaggaaaaggaaagggaagtttcagttgccactattgacactagagcatctgccaacagttctaatagaaaggttcaggttggatcacaagaatctgctgaaaagaatagtaccccttatcttgagagaaacaaatcagataatgttgatagaaatatgtgtgcatctgcaactggtgttgttagactccagtcaagaagaaaagcagagatgtttctagtacgtactgatggattttcttgtactagagaaaaagtaacagaatcatctctggcttttacgcatcctagtacccagcaacagatgcttatgtggaaatcacctccaaagactgtcttacttttgaagaaattaggagatgagctcatggaagaagctaaagagaaacccacacaggttgtattcatttcttgtatctggtatcaatggattactcatctcaaggaagctttagggtctttgacatatataatgaatatgctacttgagaaattcgtatgtgaaaatggtctcatgttctggagcaagatgcatggcagttggcatgctaaacttcaatcatttccttctcaggttgcttcatttctgcatcatcaagaaaagatgaatgttcttgtggaacctgatgttcatgatacatttgctagaattccaggttatggttttgtgcaaaccttctatactcaagataccagtgaccttcatgagcgaattgattttgttacatgcttgggtggtgatggactcattttgcatgcatcaaacttatttagaacttctgtaccacctgttgtctccttcaatctcggatctcttgggttcttaacttcacataatttcgaaggtttcagacaagatttgagagatttaatccatgggaacaacacacttggaatttatataactcttagaatgcgtctaagatgtgagatctttcgcaaaggaaaatcaatgcctggtaaagtgtttgatgtgctgaatgaagttgttgttgatcgaggttccaatccatacctatcaaaaattgagtgttatgagcataaccaccttatcactaaggtatga

SEQ ID NO: 10900 - DNA, 114 bp, Zea mays
  Peptide Sequence Number=SeqID_52679
atggaccacaatatgtggttgagtttccagaatggtgtgggttgtggtaaaatggatgtcgtagagaaccgcccttatgaatttttcatcacctctaactctgaaatccagtaa

SEQ ID NO: 10901 - DNA, 399 bp, Zea mays
  Peptide Sequence Number=SeqID_52680
atggctcgagttgtctataaaagctacccgagaccaccaccaattagggtttcagcggcagcagcggttgtgcgacggttggccaaaaggcagaacacgatggcgcatccaacacgcgtgggcgggtctaggcacacgcggcgctggtcaatggacgaaccacgacagagtgggtgggcagatccgaagcgtgcgagcgcggtgatggctgacatgcgagtgcaccgatggccaacgtgcaagcgcgcggtcaggcgggatccagtgcagacggggcgtggctctggccgacaagtggccgagtgggactggcgtagacagaaggggtccacagcatgcggatggacgcgacatcggcggttcaccgtagatggatggatgacgaggacaattagttag

SEQ ID NO: 10902 - DNA, 234 bp, Zea mays
  Peptide Sequence Number=SeqID_52681
atgaaccactgcgaggcactcacaacttcaccacctcgacgtgacctcccaattccaccagagcccgtcgcggcaccgatttttcccttctcagactccggtgagcagaatcctccacgctccgtggccagtcgctcccagccaccgccggtcatggtcggtccgagcaacggggtgatcgacggcgtgcgcatcgtggccagggtctgttctggagaagaaatagaaagttaa

SEQ ID NO: 10903 - DNA, 354 bp, Zea mays
  Peptide Sequence Number=SeqID_52682
atggagtggaatgggagcctcgctagtttggcgagactattgctgcggatggttgggccaaaccgcagatggcaaaaatccttgaatcgctcccacgatgacatgccccctcatcttgctccatggcagagtaccaagtaccatgtcggggtcgtgcccatgagaaaagcagccactgcagaaacattggtgcgggttctagcggatgggaaggggtacggacagggtaggggtggctattgcgatgtgcaaaagggtggcaagcagcacgacgagcagggtgtggagggcagcatagtggttatggtggagaaggaagggaacattgttgccccgtaccccaacatatcgtaa

SEQ ID NO: 10904 - DNA, 966 bp, Zea mays
  Peptide Sequence Number=SeqID_52683
atgacaggtctaaatgacagaggttgtcgaatacagactggaaacgagttgaggaacgctttgaaaaaagattcagtagttggaaagttaaaaatgggcaacaaattcaattttgagaggacatttggcttggcggttgtcttcaaaattgttcattggctccgttcatgggctattttgcagcaaccaacttcacaggacatggttgttgcaacatctaaacacttgatgctagtggccaagggtactattcttgccgggtcgaactcagggtacctcttgcctcggccctcgaggctcctcttgtattggctcccaaggcacctcaagcattggcccctggatctggtgggcatagaagatatcggtcataacatctctccccgcctcttcgagcaactcgttgttgagttggatgttggggaaaatagcgtcgcctgccctgctccgactgctgtgccactcgccaaagtgaggccgacagcagctaagtccagcctcgggcgccataggaagctccgcctcgcccgacctcagggctcagcccccgtctcggcctcggaagacggcctccgcctcgcccgacccaagagctcggactcaacctcgacctcggaagacggactccgccttgcccgaccccagggctcgggactcagcctcgactccggaagacggtctccgcctcgcccgaccccagggctcggactcagcctcgactccggaagacggtcttctgcctcgccgaccccagggctcggactcagcctcgactccggaagacggtctccgcctcgcccgaccccagggctcggactcagcatcgacctcggaagacggactccgcctcgcccggccccagggctcggactcagcctcgacctcggaggagtcaccgcctcgcccgacctcgggctcggaccgaccacgtcacaggggggccatcattaccctacccctagctag

SEQ ID NO: 10905 - DNA, 480 bp, Zea mays
  Peptide Sequence Number=SeqID_52684
atgggcaaacaacgtacgaggggtaccgccgcggtggttctgctcgccgtcgccatggtagagaaatctgccgccgttggtgtgcgcatactccaacggcatgacccctacgacaaccagaagtgctccctatggcgcctggggaatggccgagatctctgtgggtggcttcaacggtgggagatcacagaactgctcgccggagtacctactctaccgcgggatccgccgccaccattgagctcgggtgtgggttgtcgcggagtcctaggtggtcggctaggtgtggccggtctcctcgctcggtcatggccatggcgcgccgtcgcctaccacttcgccctcgtctctggccatcgggaggatggaaaagacgctcggatcattggatctcatccaacggccgaaattagacgaaaggtactagttcgtgctgatgcaatcatggccgttgatctaaccagggacgattacgattag

SEQ ID NO: 10906 - DNA, 243 bp, Zea mays
  Peptide Sequence Number=SeqID_52685
atggtgggtacaagtgcggtcactgcacgacggccagtcggggtcagtgaggcattgtacgccaaggcggttccctggaggacatggttgctggagtggcttggccgtccaccttaccaccgggttggactgttgagtgggaccctgcctcggctgaggaggagcatgaggagtgatgggacaggcttccccatctctctatttatttaccgtagtttatttccgctgcacttagaacaatga

SEQ ID NO: 10907 - DNA, 393 bp, Zea mays
  Peptide Sequence Number=SeqID_52686
atggcgcctcctgttgacgtggccggtccgcaccctaggttgggcgatgtggaggcttctccgaggtcgaggtcgagtccgtcttctgtggccgaggccgagtctgagcctcggggtcgggcgaggcggaggccgttggctgaggccagggcggaatttgagtcccggggtcgggcgaagcggagttcgtcgtcttctggggctgagcccaagtccgagccctgggtcgggcggagcggagttcgtcgtcttccggggctttgcccgagtctgagccctgggtcgggcggagcggagttcgccgtcttcccgggctttgcccgagtccgagcccttggtcgggcggagcggagttcaccgtcttcccggggcttagcgagagtccgagcctag

SEQ ID NO: 10908 - DNA, 624 bp, Zea mays
  Peptide Sequence Number=SeqID_52687
atggagaatctactggcatctgtggacaagaacgaggcggagatctcgccatcaacactatatgccattgcctgtgtcacagagggggtgtcgttcatcaatgggagcccccagaacacttttgtgcctgagtggcagaccaagatgaaatcagtcctggttgatttccttgttggtgctagaataaagcccacctcgattgtgagctacaaccacttgggaaacaacaacggcatgaacctgtctgcccctcaaacattcaggtccaaggagatctccaagagcaacgtggtggatgacattgtctcaagcaatgccattctctatgggcccggcgagcatcccgatcatgttgttgtcatcaagtatgtgccgtacgtgggagatagtaagagggctatggacgagtacacatcagagatctttatgggcagcaagaacaccatcatgctgcacaacacctgcgaggactcgctcctcaccgcaccgatcatccttgatctggttccgcccggcacaccggtggtgaacgctctggcaaagcagagggcgatgctggagaacatcatgagggcctgcgttggcttggccccagagaacaacatgatcctggagtacaagtga

SEQ ID NO: 10909 - DNA, 582 bp, Zea mays
  Peptide Sequence Number=SeqID_52688
atgcttgatggcttgccagcgatggtacaggtcgtcctctccaacgagcccactgtgcagctcaaggccaccacacagtttaggaagctgctctccataggcgaggtgcgacatagccctgaatttcatgattgcactttggtaaatgagggtaccgaagaaaatggggatgctttggtggttattgaccttcaggcatatgttgttaagggagttggaaaggttcaagcaaagtggtctccagttggtacaattgatatagaatgctccatgaggggagtcgatggtgaggttcgcaatgacgtccttctagggcagaccgtggcttcaccttcctacactaacctcactgtggcatatcacaggacaaatatcttggtacgctattgtaggtggtcaaggaatccaaatggaggcaatctagaatctctcagatataagcaaggttacagatttgatgtggatattcctgaccaaacatggaatgccgaccattgctgcaattacttcacccttggctcccgcactaactttgacggccgactgcagatcttcttcgacatatacgtcatcagtgattga

SEQ ID NO: 10910 - DNA, 357 bp, Zea mays
  Peptide Sequence Number=SeqID_52689
atggagaaggtggtcatggagctatcctccgtcgtcggtgtagagcgtcacgctgtgggtcgtgaagacccgggaatcgagggggtcatcgcgagcggcgtcaggcaggtggatgacggcagctgtctcgcaggcggacggagcgaatgcgagatctcgggggcacaggggttggcgggtgtgtgggctgcgggcaggattcccggcggtgatggctggcgcgcgtccggcatgttggatgcgaggaaggaagacaacgcgggtgggggcgggattgcaggaaggaagacggcgtgggcaggggcgggattgcaggaaggaagacggcgcggcgcggggggctggagcgggggcacg

SEQ ID NO: 10911 - DNA, 219 bp, Zea mays
  Peptide Sequence Number=SeqID_52690
atggagaagaactcgttgtcatcatcgtctgacagcgatggtccgtcggtgcctccaaggatgctgagaactgtcggggttggacgagaagggagccagccagtggcgaacctacagggtatgccgggtccgccactggagctagctacagcgggtgcaagttaccaagcaggacgggtagtgcacggcgaagaggacgacaagcgcgagtgtggatag

SEQ ID NO: 10912 - DNA, 363 bp, Zea mays
  Peptide Sequence Number=SeqID_52691
atggtggacgacgacgcgcagagctccgacgagctcgcgtactggccaattcgctcaacgactggcgtcctactttggccgaagccaaattcaagacctaccaatggtttcccctcacataatttcacaaatggctacccggcaatacttggtggtttagtgcgtgattatcctatggacctgacggcgcgctcaatttatagaaggcaagagtggtggccggtgaatttgggagagacgcgtggcggtcggaggaagagaaggtcactggcgcacgggattagtggatgtaaccgtggcaactccccgacgatcaccgggcatgcacgatgtggttcactgcgacgtggtcaagcgctttag

SEQ ID NO: 10913 - DNA, 525 bp, Zea mays
  Peptide Sequence Number=SeqID_52692
atgcaggcggcatgcaaccgcaccaagggggcgcaccctttcgacttcgacgcgtccagcatggaggcccaggcccacacgtcatgtaaccggcgcgccggttactacgtgcgagaaactgcaccgccacttgcgccagtaccacgccttctcgactgtggaaccggtgccatgactcgaggcaaccctgcgcatggcccaacagtgccaaccgagcacatcgatcacgggacaggcggcacctttagcaggcgaagcaggcaacgcttcacctccgccatgatgaccgcgtcaaaaagggaccgggaaaggggatactctgaaagggatccttctccgcgaaggaagcgggccccgagccctcctactgatcaaaggttcgaaggctggcccctcggaagggttcgacagccgcctcagagcactcgggctccgcgcccactactggtcgaaggttcgaaggctggcccctcggaagggttcgacagccgcctcaggccactcgggctccgcgcccactactga

SEQ ID NO: 10914 - DNA, 453 bp, Zea mays
  Peptide Sequence Number=SeqID_52693
atggcgcctcctgttgacgtggcaggtctgcgccctaggttgggcgatgtggaagctcctccgaagccgaggtcgagtctgtctaccgtggccgaggtcgagtccgagcccctgggtcgggcgaggcggagttcgtcgtcttctggggctaagcccaagtccgagccctgggtcgggcggagcggagttcgccgtcttccgggacttagcccgagtctgagccctgggtcgggcggagcggagttcgccgtcttccgggacttagcccgggtccgagccctgggtcgggcgaagcggagcttcctatggtgcctgcggccgggcctgactgcctgtcagcctcactctgtcaggtggcaccgcagtcggagcggcgcaggcggcgctgtctttctgtcaggccggtcagtggagcggcgaagtgacggcggtcacttcggctctgtcggctga

SEQ ID NO: 10915 - DNA, 564 bp, Zea mays
  Peptide Sequence Number=SeqID_52694
atggcgccggcggctaacgattccttggtcacagctcatgtgataggagatgtcctggaccccttctacacagccgttgacatgatgatcctgttcggtggtgctcccatcatcagcggcatggagctgcgcgctcaggcagtctctgataggccaagggttgagatcggaggagaagattatcgagatgcatataccctggtgatggtcgatcctgatgctcctaacccaagcaacccaaccttgagggagtacttgcactggatggtgactgacatccccgcatcaactgacaatacacacggccgtgagatgatgtgctacgagcccccagccccgtcgacgggcatccaccggatggtgctggtgctgttccagcagcttgggcgggacacggtgttcgcggcgccgtcgaggcgccacaacttcagcacccgtggcttcgcccgccgctacaacctcggcgcgcccgtcgccgccatgtacttcaactgccagcgccagaccggctccggcggccccaggttcaccgggccctacaccagccgccgtcgtgcgggctga

SEQ ID NO: 10916 - DNA, 207 bp, Zea mays
  Peptide Sequence Number=SeqID_52695
atggaaggtatccggtggaagtctcatatttcaggacaggacagggacaggatgagttcacatccttatggaattggaggccagatcggcatgatatcggtatcgaaactctactcggatctggagaaaagggccctgctttcgaaagtgaggggagtcaagctattcgaagaacgggaacaggactactttcggatcggaaagtga

SEQ ID NO: 10917 - DNA, 312 bp, Zea mays
  Peptide Sequence Number=SeqID_52696
atggggtggggcaaatatctttcctggtgtaggtttctcataggaaaccgaggcccctactttccttctaagggactagactgtcatcgaattggaagtgtaggaagcattcttgtgcgggttgttttgagcttccttgctttctggggagtgcaggtccagttgatgctggatagtagtggtatgcatgtgaacactcgagcttctatcgatactggaagcagttcctcgggaaacatttcagagcaggggcgggtgcagatagatctgatctatactagtgagcttgtgaaggtctccggcgcgaggtag

SEQ ID NO: 10918 - DNA, 264 bp, Zea mays
  Peptide Sequence Number=SeqID_52697
atggcgagtcaagtattgcacgccggatggcaaaccaaccagaaaatggatttgaaccagtgcagctcgccatgggacaaaagtacgcaacccaatggcaccctcgaaacgagtacgaagataagaaaacttgctctcgccaagtggcaaaagaaggccagttaccattccattaccagatctatgcccagccctggccctgaaaccagacgacaagagcttgactccgttcttcgtgtacccttccttctgttcttcgtgtag

SEQ ID NO: 10919 - DNA, 303 bp, Zea mays
  Peptide Sequence Number=SeqID_52698
atggagctctcgaagcaggcgcggggcagcgggccggcttcacgtccgttgccctcggcggcccgcggccctcaactccaagcagcctgcgaaccacgccatggttggccttggcaaatggcaattggggggcgcaggaagaagtgcattggcatgaagtatacagagaatcttccagaaattatgcttctgaatgatttcgtggaggcccctgatcctgatataccctcggaatgctactccactgaaactgcacaagatgctcgcgctttccacacgttgaagccagagaaaatcatgtag

SEQ ID NO: 10920 - DNA, 435 bp, Zea mays
  Peptide Sequence Number=SeqID_52699
atgaggagaaaactccaacatcaacgacaacaatctgtagaatctgcatcaagttcgaaggagaaaactccaacatcaactccaacacgatgtttctcgaagaagcgcctcttcttcttggttaggatccaggggagtgaggacaaccccaaatgtttcctttggaggcatgatgaagcctcttgtggtcgttgtgagttcacagtaggtgggcgccaatgttggttactcgtttctgatctcttcgactttatgcgaatgagagctcgaagggtgaggctgacaacagctaagttcagcctcaggcgcaacaggaagctccgcctcacccgaccttgggcctcggcctcaggaggaggtctccgcctcgcccgacctcagggctcggcccccgcctcggcctcggaaggtggtctccgcctcgcccgaccctag

SEQ ID NO: 10921 - DNA, 615 bp, Zea mays
  Peptide Sequence Number=SeqID_52700
atgtcccatcgaaaccattgttttttctctgaaaaaatcgaactagagattgatgcaagcaccagacagggatcaaagcgcgatagatacatcaggtccgaaggcaacctactcctgaacgactcaaagcaacacgctgctgatgctccagaaccagatgctgctggagaagagtcgtgggacttcgagagtagttcaactatgcctagccatcagccgttccatggaggagcatttgcgaccggacagtggagtatcggaggacagaggttggagctggtgagccgccgcagcggcgctgtgcccgtatcagggagtggccggctcggcgacggcgtgggtggaggcaaagatggatcgccgctagcgttgtcgtcagagatggatcggctgctagctgcctgcttttccctgttactggtggcaatggatcaccgccgcaagcatctcgctaaacccgatctacctggcgggctaaacagaaaggcatgtgtgctccatctgcttcctcccgtgacagcgtgtgctcgtggcttccctgcggcgctcggcgggccgccgctggctgccaacggcgtgcaccagacgctagatcgggctgcccagggcagttaa

SEQ ID NO: 10922 - DNA, 465 bp, Zea mays
  Peptide Sequence Number=SeqID_52701
atggactactctgcaccagcaggatcgcgttggaagctagctccaggaagcctcaccagcggcggcgaccacctctactccgagtggctcgccagcgaaggcggccacgtctgcaccaatggctcgccagcggcggcggccacctttgcactggtgggcttgccagcgacggcggccacctcagcgcgtgcgaagaggtcctcgcccccgtcctcctacgagggtgaggacaagaccatccaagaacgcggccgccacccccacggcgtatggcatcttgtacgaccccctgagcagcgtcggagcagtgcgaccggcgggcaggggacacctcggatacggtggacctgcgcacagcgcgaccgtcgcccatgcggtggacagacagccacgccccgcttggcggcgggaggcagtgttggaggcggcaccaaagccatcaaagccaaaaagatagagccgtag

SEQ ID NO: 10923 - DNA, 303 bp, Zea mays
  Peptide Sequence Number=SeqID_52702
atgggggcacatcgcaagtgggccatggatctcgcctaccatggaaggtcgcccctgtgccggaccatcgcctccgagtttggaaggagatcctcggcctgtgctaaaggttcaacacaaaccaataaaaagatcaacttagggttcaaaagaagggagcaaaagaaatcgaagagaaccctgaagtcagagcaggcgttagaggcgcaccggatagtgaacagtgtctgtccggtgtggcacctgactgtccagtgccccaagatgtcagagctccaacggtcgaaaccgttggcaccctaa

SEQ ID NO: 10924 - DNA, 528 bp, Zea mays
  Peptide Sequence Number=SeqID_52703
atgaacaacaacagtggcgatgacgtaggaggccctggttggggcatgggtctgggagtgccagatgtgccattggggtcgataattaagtcaaaaggggtcacaatgacagtgttgttggctaaggcgatagcaatggctttgcttcagcatcctatggtgaacttgcagctgcagggatggaaagagcttcacataaacagtagtatcaacattgctatagcagtggccatagatggtgggttgattacattggctcttcaagatgctgagaaagaggtcgaactgatcaatgagcctcagattcaagagagcccttcagctcctgcattgttggatgatgaggtggattttgatgaatcggtcaaaatgaagggaatacatatggaagtatccaatgccagtgtcgcccagaagatctccgagtgccataatggcacatttaatgctgaggcagcacatcgttcgtcagcggagtggcagggctcattaaatgccgagggggcacatcacctgccagtggaatag

SEQ ID NO: 10925 - DNA, 789 bp, Zea mays
  Peptide Sequence Number=SeqID_52704
atggtgagcacagtgtatgctgcagcacgggcgtactgcctgccaatagaatggacagacacatacgccgcctgcaggatgaatcccgggaccctgctgagagtggcccggaccccacatagagaggtccgggacccgtcccagggggctctgactcgggctaagtcccggaagacggcgaactccgctccgcccgaccccagggcttggactcgggctaagtcccggaagacggcgaactccgctccgcccgaccccagggctcggactcgggctaagtcccggaagacggcgaactccgctccgcccgaccccagggctcggactcgggctaagtcccgaaagacggcgaactccgctccgcccgaccccagggctcggactagagctcagccccagaagacgacaaactccgctccgcccgaccccagggctcggactcgggctcagccccagaagacgacgaactccgcttcgcccgaccccagggctcggactccgccctggcctctgccgaacgacctctgcctcgcccgacccaggggctcagactcggcctcggccacggaagacagactcgacctcggcttcggaggagcctccacgtcgcccaacctagggcgcaagccagccacgtcaacaggaagtgccatcatcaccctaccccgagccgactcgggccgcagagaacaagaccggctccgtcgctcctccgacggccacgacatcacaccagctgggtgccaagatctctccggctgccacatcggcatgtacttagggcgctag

SEQ ID NO: 10926 - DNA, 774 bp, Zea mays
  Peptide Sequence Number=SeqID_52705
atggaccttcacctcagctcccacgtccacgcggcggcggcggcgcaggcgacagcctcggccttcccgaatggtaagaaagcggagagtactgacgtgctgccaccgagggctgtcgtcaccatcgacgtcgaggcgggcgcgccgacgaacgcggccggggacgatccgcgcgacgccgacggggacgccggcggcgtcgactacatggcccgcgcgcagtggctccgggcggccgtcctgggcgcgaacgacggcctcgtgtccgtggcgtccctcatgatcggcgtcggcgccgtgagcgccacgcccaaggccatgctggtgtccggcacggcggggctcgtggcgggcgcctgcagcatggccatcggcgagttcgtctccgtgtacgcgcagtacgacatggaggtctcgcagatcaagcgcggcgatggcggcgaggaggaggaggaaggcgccgctagggacggcctgccgagcccgacgcaggccgcgctcgcgtcggcgctggcgttcgcgttcggcgcgctcctgccgctgctggcgggggtgttcgtgccgtcgtgggccgccagggtggccgcggtgtgcgccgcgactagcgtcggcctggccgcgttcggcgtggccggcgcgtacctgggcggcgccagcatgttgaggtccggcctgagggtgctcctcggcggctggttcgccatgctcctcacgttcgccgtgctccggctgttcgggacggtcttccacatacaagtctcgtcgtcggtgtga

SEQ ID NO: 10927 - DNA, 771 bp, Zea mays
  Peptide Sequence Number=SeqID_52706
atgaactgtcagcatccatctgtcgccgacccgtctcgcttgatccagctcatcagcgggagcgccagaatttccaccggggacgtggacgttgatgtggcagttgggtcccggccccaagaagagccaggccaaaccgtgtccctcgcgcacgccgcccccagcgcccagcggtggaccaaggactcaacgaaaggagagacctttccgcggtctcttgcgatcctcctcctcgccatcgccatgctaaggaggtcccgccacggcggggtccgtctcggccggaagctgctcggcctgtggcgtcgggcgctgtgcggcgggcgccggcgccggcgccggggaggctaccgccgcctgaagcagcagcagcagcagccctgcgccggcacgcccgagcgcgccgcgaggaagctcgcgccggcgctgctgcggtggggccggtcgctggcgcggcgtctgcgcctcgggtggagggccggcggcgggcgccggatgctggccggcgccgaggctgaggtggccacgacgcccaaggggcaggttgccgtgtacgtcggcggcggcggcggggaggcggcgcagtctctgcggtacgtggtgccggtggtgtacctgaaccacccgacgttcggcgagctgctcagggaggccgaggaggagttcggcttccagcaccccggcgtcatcaccatcccctgccccgccgcgcggttcgagcaggccgccgccctggcagccgcggggaagaagggcttcgccaggtggtag

SEQ ID NO: 10928 - DNA, 612 bp, Zea mays
  Peptide Sequence Number=SeqID_52707
atggtgaaggccgcctctcaggctgatgttgttgaggcgaccaacggaggtgttgcacccctcacagttaaggacttcgatcttgacgatgtggagatggttacgaagtatcccctgatggagtggtgttcggtgccgcggggtctccgtgtgtctccgcatcaggagctagggaggttgatatctcaaagatcaatgaggggctttgaaggaggccgctacacaccttcattcgatgagggttgtttcaacgtgcataaaggttcaacacaaaccaataaaatattgaagaaagggttcaaaaagaaaggagcaaagaaaccgagtgtaccctggtctggtgcactggactgtccgttgtgccatcggacagtgtccggtgcaccagactgtccggtgcaccagcggagcaacggctccttcgcgcaacggtcaactgcaaaagctgaaattcagatgaacagtgcacaaacagtgcgggcagaagtcagagcagtcgccagaggcacaccggacagtgaacagtacctgtccggtgcggcacctgactgtctggtgccactagaagacaaagccaccaacagtcgacaacacccaaatcctaacggttag

SEQ ID NO: 10929 - DNA, 360 bp, Zea mays
  Peptide Sequence Number=SeqID_52708
atggcgggagagaacgagaagggagggaagacggaagaggatgcgtgtgccagcgtggaccgcggaaggttgaaggccgggaggcggagtgcgtacgtacccagaccagagagtggacttgggccaagaataaaagaagcagaaaaccaagggccagaaagcgaacctgcatgggaactttggaaattcggtggcgtgcgcctcgacgtttcagcgtgcgcctcgacggagccgaagcgggtgcggtggctgggaatacaagaagagcacccacgcgctaggctacgcagacaaaaggaagaagcggcggatgttccgaggttgacgtcgttctccgctgtggggagaatctggctgtag

SEQ ID NO: 10930 - DNA, 165 bp, Zea mays
  Peptide Sequence Number=SeqID_52709
atggagtaccagacgcagcaagctgagtaccacaggcagaagggcgagtactatacgaacctattggccctacagcaagctttcctctcgggctttgagacacctccctcttcgtttgtcgcacgtggagatggatctggtcaagacgacgcctcggtgtcttag

SEQ ID NO: 10931 - DNA, 273 bp, Zea mays
  Peptide Sequence Number=SeqID_52710
atggtgcacgcgcggctggctcgcggcggcaggggctcccgctcttacccccgctcctcccgcgcctgcgtgggggtgctcgcgtggccaacccacggcgacggcggcgacggcgaccgtgcctgttcgcatggccggcccgcagcagcgacaatgcgcgtggtgggctggggcaaggctggctggaggcggctctgctgctgcctcgcccgtctggtgaagtcgaagctgctcgtaccttatgttgagctcggtaacgatggctctggatga

SEQ ID NO: 10932 - DNA, 318 bp, Zea mays
  Peptide Sequence Number=SeqID_52711
atgagcaagagagtactgatgatgttgctggcggcgacagtgatcctcctgtgcctgccgttggtgctgccaccccttccgccaccaccgctgtttcttctcttcgtccctgtggtgatgatgctcctgctcttctccctgtctggtggccctcaggagaacttctgctccaacctttcgaacccagatggcgcaccatcttggagtgaagggctgtatagtagtaagccggtggtgagtaccgctgcacccgcaacaaagccaggtggcagagatgacgccgcaccgatatacggcagtggcagagtgaaagcgtag

SEQ ID NO: 10933 - DNA, 1062 bp, Zea mays
  Peptide Sequence Number=SeqID_52712
atggcgccgtcccccgtcacgtgcagcccctccgcggcgcggcaccgcccgctgcagctccgctcccccgcgccgcgcgctgctgtcgtggcggcgctgccgctgcggaggagggaggcgctgccgcacgcgctgtggatcgcggcggacccgtgggcgtcggcgcgcgcgtggacgagtctgggcctgggcacgggcaggagggacgcggcgaggtgcgcggcggcggggcaggtcgcggggactagcagcgcgggcgtagggaggagcgccgggatggaggtggtcgtcgccgcggctgcggtcgtcgccatgggcacggggaaccgtgtcctctacaagctcgcgctcgtgccgctccggaagtacccgttcttcctggcgcagttcgccacgtttggatatgtagttgtctatttctcgatcctgtatcttcgatatcgagcgggcattgtcaccgatgagatgctgtctctaccacagaaaccttttctagctgtaggactcttagaggcctttggagcagcagcagggatggcagctggagataatggaaaccaggtcccggctttgtcctctatgaaaggagctgttctttctggagcttcaataccaatactgtcacagacctatcttgtctggcagcttcttctatctgctatattcttgaagaggcgttatagaattaatgagatagcaggatgttttctagtggcaattggtgtcataataactgtagcaagaaatcctcaatatatcacaaaccatgcagcaggtgttcatgtgccatattgggcatggttagaaatgatagcatctagggttaaggaattgtgttatggcttacaatatttcagcataggtggatctggtactagcgcttcatttaaaagtagtggaattttatggccgctgctaatgataatatcgttctttttccaagctgccgatacaatattgaaggaaataatatttatagatgcttctaagaaattgaagtgtggctcggttgatctttttgttgtcaattcatatggctctgcttatcaagtaagaatatga

SEQ ID NO: 10934 - DNA, 222 bp, Zea mays
  Peptide Sequence Number=SeqID_52713
atggctccggtgatcaacggagagcaagggagcttcgtcataagtaaaggttcattatgggaatcttcttctccgccgaaggtccttaagacgaagatacagctgaaaatgacaatgatgaataccgaagctatagccgaagagcaacaactttggcttagtttggcgacgaagatcaagcatgaagctgagccgaagaggaaaaggctagctagtccctaa

SEQ ID NO: 10935 - DNA, 129 bp, Zea mays
  Peptide Sequence Number=SeqID_52714
atggtgggtcgtcctcgggtggccttttgggccttctcgccgaactgcctgacaggcgggccgtttttggggcgtcttggggccctctttgggtaccctgttcccaggaatttcaatgagaaaagatga

SEQ ID NO: 10936 - DNA, 402 bp, Zea mays
  Peptide Sequence Number=SeqID_52715
atggagcccatggcgattgtgacggtgaccgggggtgtgttgggcccggtcttcgtgctcctgtcgcgcatccagcctgtggtcgacttcttccggcgtctctgcgactgcctccgccacccccagcgtcgccctgccaggccgctcagggcgccatgcctgaggcctctatggagtcgtctgtcgaggcgtgcgccgctgtacctcaagtatgtcaatctgtcgaggcgtgcgccgctgtacctcaaagaccccgatgctgaggttctacagtcggggttgtccggtcccatcggtcgacagggatacatgttcggcgtcatgcttgacagatgcccctcggcaccgcttccacggtccgggcatggctcgatgatgtctcgccatgttgatgaggcttga

SEQ ID NO: 10937 - DNA, 210 bp, Zea mays
  Peptide Sequence Number=SeqID_52716
atggcctccccagaatccattggtagggccccgtgggccaagagcaaggccagcgcaatccactacgcagacctgcgtcctagtcccccgacgcatgcggtggccacgcccttccactgcacaaaatcatggcatgctcagtttccaccgatgcacaagcttgagaggatggagtcccaaattcgatggcgcaccggtggagaccagtaa

SEQ ID NO: 10938 - DNA, 291 bp, Zea mays
  Peptide Sequence Number=SeqID_52717
atgacgaaggactttgccatgacggcagcattacccccatatgaagatattggtgcttctggctgcagtgcagcccctagcgctgatgtcttcttcggcggcatgatgaaggttgatgctttaccaaaggttgtggaagtcgaagctctttcagccatagcttcagcgttcatccatatcaccttcgggttgtatcttcatatcgcacatgcctttatcataagagaagaccttcatccaaagccgaagtcttctgtaacagtctatgccatactgaaaacatatgattag

SEQ ID NO: 10939 - DNA, 411 bp, Zea mays
  Peptide Sequence Number=SeqID_52718
atgggggccatgatggcaggcgcccacgaggcacagagagtcaacggtcctgccttggtaacgcgcgagccactatgtggtgcatgcatttctgtggcagcgctcgcctctcaaatgggcaggatacgtgacaacgtcgagctgtccctaatgaggagggcagcggtcagcattgctctacctggtgtcagctccttttcgacccttgctcgcattttatttcggagcctcgccgagaagggtctcagtacttgttccttggccaggatgaggtctagggcttttggggccagccctaggttccacaacagccatcctaggatggtggagtgtgcaagcttaggttgctggaccaggctaagcggttacacggctccggccaccactgagaatgtgctcctctccccctga

SEQ ID NO: 10940 - DNA, 315 bp, Zea mays
  Peptide Sequence Number=SeqID_52719
atgaaggtgctttctcaagctgttgtcgaaggtggtcgtttgagttcaccggatgtgggtgccaatgttggcggaattcctcgtcggccgtcttcctcggccgccgtgccacgcgggaccgtgggcagtgttgcctccgccaccatatctggtaagaattgcatccccgagttcacccgtttatcctcttcgcataggatctatctgagccgagaatcgcgtatcagggcttgggcaaggggatcaccggcgtgctccgctgtgggtgagaacgacacagcgttcggtcgctacgaggttgaagataatgtctag

SEQ ID NO: 10941 - DNA, 318 bp, Zea mays
  Peptide Sequence Number=SeqID_52720
atgaagtccatcaagagaagcaaaagtttgttgaaggagaaaagaaagaagtccgagaccgccgtgtctgtcatatgcagtgacaactacctctgcgatgcaaaccgtagtggcgagctaccaaacaatctttacttgctagtggcgcatttctttctggtggagatgactacaacaagccacttagctggaactctcacttcaagatggcactcggctctgctcgtgcactcaattatgcaaccaggaccaactactgctgcatcagggtttgcctatgcaaaatttgggaagacaaaggtcattgtatctgtgtaa

SEQ ID NO: 10942 - DNA, 1032 bp, Zea mays
  Peptide Sequence Number=SeqID_52721
atggagcaggcgtacatttggtctgtcgagcgagcggggctcggtgggtcagatgactcggaggaggaggtctccacggaggaggtggaggacttctcaaactttgaggagagtagcgacagcaaggacgacagcaacaagggtggtggcggcagcaacgacggcgtcgagggcagcgacaatggtgatggtggcgacggcaacagtgacaacggcaaagtaggcgacgacggtgacgcctttgaagatagaatgtaccctgcttatctgtacaccgatgttaatgacccatctcgaattaccaacaagcagatatctaaggaggacatgctgagtcgagttgactcaatgctgaggggaaaagcttcgaatgctgaggatattgaagccttcattgctacgtaccgggttcttcctgaagagggaaaacagactaatctctggatgcaagcaatcgttgacgaggccgaagtaaatgatgttcttagtatgctggctgatgagtcgttcgtatctgctcgcactgagtcgccgagtgctgctgctgggcgtgcatttggtggggaggagggagcttgcagccccggcggtgtttgtcacaaacggacacgccgagcaggttatccagctatgtctgccgagacaaagaagaggaaaagaaagcttcggcactcgtctggcctagaggtggagggtgactctgccgctccagaccttggtggtgacccagcgagtgctgatctcaaagatgatattgagagttgcggtggcatcagagatggtgggcatgtttcggaggaggaagtagatgtggatgaattccctcttttggtttgcaggaatcgtcgtagcaaagccagcaacgatgtcccaattctgcctctatcagggctagttaacctccagggtatgacgatgtccgctattgatcatgcactggagggagatgatcccagaaggaaggtgactggcgcatcgttagactcaaaactcatcaacgtcatctgcgaagtcttcgtcatcaccctctga

SEQ ID NO: 10943 - DNA, 156 bp, Zea mays
  Peptide Sequence Number=SeqID_52722
atgtgccgcccctgctacgagtacaatcgcaaggatgacacccaggcgtgcccgcagtgcaagaccaacaagcgccaccaaggtctcgaggtcaagcctggacccactgtcaagtgtgtgcttggacatgactttatcctgcactttccagtgtaa

SEQ ID NO: 10944 - DNA, 363 bp, Zea mays
  Peptide Sequence Number=SeqID_52723
atggccctaatggtggcggagacggtttcttcaataatggcgagaagaagtgggggagggagaggaggaggtggcgcggtggtttctggtgcagaggaaaccgaggggacgcgggccagggcgcggggtcgacgtctagatggctcggccggggtgtggaaacagcggcgcagcggcgcgtatgggtgctcctgcgcgggcgcaggcgaggaggaagaaagggcgcctggcgggtggggcccgcagaatattatcatgcattctattatgatatttggtgtgatgttaatttctcctataacatgtttgtttgtattgttgcgagtagacgagcaagcgattgagggccctagtactcagtag

SEQ ID NO: 10945 - DNA, 278 bp, Zea mays
  Peptide Sequence Number=SeqID_52724
ggggcttgcgggcggaggtctggacgtccatccggggccgtcgagcgctccggggctcgaggagctcggaagagtttgagttttcctcggacgaagaggactcggacggcggcgagggcgaggatgacgacgacgacaatgacggcgacgacgacgacggtgatggcggcaacggcggcggaggcagcggcggcaagggcggcaccaagggcggcagcagcgtgggcagcaccggaggcggcggcggcaagggcagcggcagcagggccagtggctaa

SEQ ID NO: 10946 - DNA, 258 bp, Zea mays
  Peptide Sequence Number=SeqID_52725
atggcgccctcgtacgccagcgccatgttccacgctcaggcactccaggaggacggccgctccacgcacgccctccgcctttgcaccttcttctctaacccagggctagtgccctccccatccacgacctcgccatccacatgttcgacagggaatgggcctaggctggtggtagtaacggatacccgctctacgactcctaggactacccattcctcgacgtcggcacaaaaaggcatatttgagaaactattgtga

SEQ ID NO: 10947 - DNA, 471 bp, Zea mays
  Peptide Sequence Number=SeqID_52726
atggaagcactgctgtttccattctacggtctagtgaaaaggatcactgtctttgcttgtgactgtaatccaagtcaccatggaattagagaagagcacccagtcttccttggagagaaccaatgttgtgctggtggcatggattttattaccatgatattcacactgtcagccatacccttcgacataatgccaactaccatagaacaatgtgtttctgttctgaaaccaggcggccttcttctttttagggattacggtctttatgacatgacaatgcttcggtttttacctcatcaaagagtagggtttcgggaatatatgcgatcagatggtaccttttcatacttcttctcattggatactgtgagagaactctttcgtgctgctgggctagtagagttggagctggaatattgctgtgtcaagtccgtgaaccgaaagaatgggaagacgatgcggcgggtttaa

SEQ ID NO: 10948 - DNA, 147 bp, Zea mays
  Peptide Sequence Number=SeqID_52727
atggccggaccgtccatgacctggcaacttgaagcacccggacttctgaccaagagcgggactgtcccaaaagcagacttctctggtcaggactgcggacggtccggccccaaggcccggatggtccgcagtgcaaaggaacagtaa

SEQ ID NO: 10949 - DNA, 240 bp, Zea mays
  Peptide Sequence Number=SeqID_52728
atggcgctggcgtacgagggcgccatggctgctcgttggcaccaccagatcttccaccttgggcttggccctagcatcgtcgatggagccctcgatgtggccatgcaggcagaggcgcttcacactgaaaggcgcccatggaccagggtggatggcgaggtggatggggagggcaccagccctgggttagagaagaaggcgcaaaggaagagggcgtgcgtggagcggccgtcctcctag

SEQ ID NO: 10950 - DNA, 906 bp, Zea mays
  Peptide Sequence Number=SeqID_52729
atggagcctggtccggacgcgcctgccggtggtggtggcggaggaggaaccagtgagccagcagaggccgggccgtcgccgtcgtcgtcctcggccgccgcagcagcctcctcgtcgagccggcagcaggcagagcaggaagcacagcagcaacaaggagcacagcagagggaacagccagcagtaagggcccaggcgcagccgcagccgcagccgctaacgcagcagcctccggcggggctcagccggtacgagtcgcagaagcgccgggactggaacacgttcctgcagtacctgcggaaccacaagccgccgctgacgctggcacgctgcagcggcgcacacgtcatcgagttcctccgctacctggaccagttcggcaagacgaaggtgcacgctgagggctgcgcctacttcgggcagccgaacccgccggcgccctgcacgtgcccgctgcgccaggcctggggtagcctcgacgcgctcatcggccgcctccgcgccgcgtacgaggagtccggcggccgccccgagtccaacccgttcgcggccaaggccgtgcgcatctacctccgcgacgtgcgggaggcgcaggccaaggcccgcggcatcccgtacgagaagaagaagcggaagcgcgggagcgccgccgcgcctccggtcgcgccgcctcctgttgtaactgcagaggccgccgggacgtcgtcaggggccggcggtggtgatgacgaggacgacgacgaaccatcgccatctgcagatgaaccacaacgacagcagaccgccacgccggctcctcctgcaagtattatttccagtgctagtgcaagtagtagcagtgtcgccccagccacgacgacgacgacaagcaagaaggagaaagaaggatccgcgccaagctcgtga

SEQ ID NO: 10951 - DNA, 696 bp, Zea mays
  Peptide Sequence Number=SeqID_52730
atgtctttggttgttgatgtgagaacacgtttgattaatttaagaaacgatggttgggagccattgttggaagaaaccacaataatctgccttgcaaatgatatcccaataccaaatatgagtgatgttgtatcacagtttggtcgatcaaggaaaggtgggagaaacaatattaccacaaagcatttttatcgtgttgatactttctatgctgttatagattctatcaccatagagttcaataatcgctttaatgagctatctttagagttgcttgtgtgtttttcttgtcttgacccaagaaactcgttttataagtttgatgtggataagctggctcggctagcggatatctattttgatgatttttgttttgttggctgcaagactataaaagatcaactaagaacttttattatccatgtgcgaagacttgaagagtttaaagcttgtcatgatcttgtgagtttatcaaagacaactgttcaacttgagaggcatattgtgtttccattggtatatcgacttattgagttagccttgttgttaccggtggcgactgcaacagttgaaagggccttctatactatgaagattattaagactgagttgcgcaacaagatgtccgatggttggttaaatgacttgatggtgtgctacattgaaagagaaacttttaaagggctcgatctttag

SEQ ID NO: 10952 - DNA, 465 bp, Zea mays
  Peptide Sequence Number=SeqID_52731
atggagtgcgagattcgtcgccatagaaggaagcctccgcgggccggattcgtcgccatagaaggaagcctccgcgggtgggaagcggcgctgcagctgcggggctggccaacgaaggaagccgcgggattcaaggatggagcgcagagggaggcggatggaacgcgcagggtcgacgacatcggtgacatgctcgacgagaagaacgcgagcagtcgcgtgaagacgcttcccaaaaccttatttgctccctccatgtgcaagatctcaaagatgcacgtcagcgttcaggatgaagaagactgcaacggcagcgcagcttccatcggacgcccaaattcttccaagcttttctcatctgggctcaatgggattgcaacgcgcacggcccaatgcgggcgtgtttggattgcgccctaccaaacaggagcttgccagacacatctccagcatgaagccaactaa

SEQ ID NO: 10953 - DNA, 450 bp, Zea mays
  Peptide Sequence Number=SeqID_52732
atggaactaaacttaaacttaaaccaggggagctttgccactggccttgccgccgccactgccgtccttgccgccaccatcgccttcactgccctagccgccatcgtcgttgccttcgccgccgtcatcgtcgtcgctgtcgtcgccatcgccctcgtcatcgctgtcgtcgccgctctgctcctcggacgagtcgaaggagtcctcctcatccgaggagacatccgactcatccgacccctcgagcccggcgtgctcgacagagcggatgtacgttcacacctcagcagcagcccatgggagtcatctgaatcatcagacgacgtcgaaggagaggcgagagctagcgacccttcaaactcagaggaaacctcctcctccgagtactcagagtcgccaaagtcctctgagggaggacttggatcacacttccacttgtcgtcggcatga

SEQ ID NO: 10954 - DNA, 276 bp, Zea mays
  Peptide Sequence Number=SeqID_52733
atgggcggagcggaaatgggagcgggaggggggaaaatggaagctagagtggtggaggtggtgggtatagcagaagtggtggatggcttcgaagcgacaggagctggtgaagtggaaagtgtagtagacacagtggcggaaggcgtgaaagttggtgtgagggttactggaggtggcatgagggtgcagggaaaaactgggatcgatttgagcaaatttgagtggtttgggcatttcaccgaacacatggcgtgcgggtttgaggaataccggtga

SEQ ID NO: 10955 - DNA, 654 bp, Zea mays
  Peptide Sequence Number=SeqID_52734
atgcgcgcgttcatcaccctggagggcgccggcgcggacaagacggtcgtgcagtggggcgacaccgcggactcgccgaccgggcccaagggccggcccctcggcacgttcaactcggcgtccttcgccgtgaacgcgcagtacttcctggcaaggaacatcactttcaaggacacgctgtacgaccactcgggccgccactactacaaggactgctacatccaagggtccgtggacttcatcttcggcaacgcgctgtcgctgtacgaggactgccacgtgcacgcgatcgcgcgggactacggggcgctgacggcgcagaaccggcagagcatgctggaggacacggggttctcgttcgtcaactgccgggtgacggggtccggcgcgctctacctgggccgcgcctggggcaccttctcccgcgtcgtcttcgcctacacccacatggacgacatcatcgtccccaacgggtggttcaactggggcgaccccaaccgcgagctgacggtgttctacgggcagtacaagtgcacgggcccgggcgcgacctatgccggccgggtggcgtggtcgcacgagctcaccgacgacgaggccaagcccttcatctcgctcagcttcatcgatggcaccgagtgggtcaggctgtag

SEQ ID NO: 10956 - DNA, 996 bp, Zea mays
  Peptide Sequence Number=SeqID_52735
atggcggagcgagaccgggtcttggagagagagcgaaggcagatggagcagatcctagagctggatatggaggagctccaggtagaggaggtcgacgacgacggctcatcctcctcctccgacgtcgacaccttccttagaaatactcatggagatggagggattaacacttatgaggagctttcaatcgatacatctactgtttccttgcaggatcacacctatcttggggcaaaggttgatggtgcccgaggcaaatttgctttcctgcatggagacagagtcctcaatctgccaatgttttatctccaaggagttgttttgtttcctgaagcttccctacatcttcgagtattccagcctagattagtggaagctattgacaaggctattaatcatgttgatgctccatgcatgataggtgtggtttatgtttatcgacacacaaatgatggacattatactattgcttctgtcgggacaatggcagagatactgaaaattcaacagctgtatgatggttcatcatgtattttctcccatggtcagcagcggtttcgtcttttgcgccattggttggatgtcgacggagtaccatggggtgaagtccaaattattgaagaagatacacctcaaagaactccaagagatgcttttgcacaattagctgcacctaacagtttcaggcaatgtgcttcatcgataatgcccagtttgcatgtgtattgttctacacaacttgatcatgtggattctgatatggacagggattcactatcacccactagcacttcaagcgatcactcaataacagataaaagaatataccttttaggttcccgctccagtggtttgatttgtggagacaaagtaattttaaacccaagcatggatgatcatgtgagaaaaccaaattatttgtcatattgcattggaagcaaacttcctatctcagaatctctgaggcaagaattgcttgagattgatggagtctaa

SEQ ID NO: 10957 - DNA, 435 bp, Zea mays
  Peptide Sequence Number=SeqID_52736
atggagttcgaaatgccacgagccctcccgttgcttttctttttaaatctgctgggccaaaatgggaaatttccgcaacaacctgaaaaggaagaacttcatatcgggtttatcctgggctcggaaagctctcccctttcagcccaactgtacgtctgtacttaccaagcagccgagcaggaggaaaacgaactaggcttggagccctgcgactgcgagcaaccgggaaccgagggagtcgtgtctgtgcgagtgtgccatggcgggcgaggggtcagagtcagaccctgcctgcctccccggtgccgccgccgtcgaagcggagaaagatcgagccgcccaggaggtaccagttttgcccaccctcccaaattctgcgagattcctagcaatattcgttgcgactgctaccgctacgtgttcccaacgctctga

SEQ ID NO: 10958 - DNA, 354 bp, Zea mays
  Peptide Sequence Number=SeqID_52737
atggctcctatcctgtatgcaacactgaaactgcttgctgctctggcacaaggccttgttcgtttgtgtcggattgcacccggaatcgttccacctaatcaaagtttatataaattagagaagcaatccggttcggaatcgttccgacccatccatccggtagaaacgaacaaggccttaaccagaacgattctggttgcaatccgatttaaccgaataaggcctaaggccgcggccgacgcgccgccggacgccgagtggcacagggcagggcgtgtgcacatggagagcatgtggcgcgcggtgctcgcgccgtctgtggccatcctgtccgctgccgctccggcgtcctag

SEQ ID NO: 10959 - DNA, 1203 bp, Zea mays
  Peptide Sequence Number=SeqID_52738
atggcaaaggtgcagcaggacaaggcggcgtccggcgggaacggcggcggcgatggggcggcggcgccggctggggagcagctggtgataagggcgccggtgcactgcgatggctgcggcaggaagctgcgccgctcactccagcgcctcgagggtaagaaagagcaagcaagcaaacgaccggccgcgtgcgcgcagctatactttgtgcctagctatctccttgtctctgagctatgttactgcactgaacgagtcgtcgagaggaagaccggggagaaggcggtgctggtcagcccgtcgccgccggagaagctgctgctgccggcgcggtcgtcagcgcccaaggccaagggtggagagaccaacaccaacaaagacatagggaacgagctaccggaactggacatgaaaatggttaccgttcttaagataaacctgcactgcgacgcctgcagcgaggagatcaaaaggcggatacttaagattacaggcgtggaggaagccatgccgcacctcaagtcttcacaggtggcggtgaagggaaaggtggagccggcaacactggtgggcttcatccacaagtgcacggggaggagagccgccatcatcagggcggagccactggatgatgttctcctgccgcaaccaccaaacccgccggcggcgccaccggcgtctaaagccgagagcaagaaagatgagccacctgctgagaatccgccggccaaggtggaggagccaaacgaggagaacagaggagggggagagaaggacaacgcggatgacgacaaccccaagacggagaagccggctagcgacggccacggcgccggcgccgccgaggagcatggagcccatgcaacaaccgaaggtccagaccgtgacaacgacgacgacgccggcgatgggctcgtgctggagaaccataccaaggcggcggtggaccgcctgttcgccgttccgacgccggccggagtcgtgacggtcgttgcgcctgagatggccctcggcagccgcagctactgctacccggcgtatccttgcgcgcagtactactacccctaccagccgcacctgtacccgccgcagccgtacccggcggcgtctgcttatagccctgttgccatgtatggctatccagcaagctatccacccgaagctttcagtgaggagaacccaaatgcatgcaccatcgtgtga

SEQ ID NO: 10960 - DNA, 315 bp, Zea mays
  Peptide Sequence Number=SeqID_52739
atgacgaagatcaaagcttgccgaaggtggtcaagcacaggacgcagcctgggcaaaattacatttatgtcgctgacatttactgttagcaaaaggtcggtttcatccttcaccatcgtcctcgtgctaagccgaagcttctcaagccacagctttggagtcggtccatccttcttccagatcacactctttcttaccatgcgcaccttcattttaaagctgaagcttcctgtgacagtatactatactgggaaacatgttagttgtgtttttgaggaccttcggaagatgaagacccccaacatcggattttga

SEQ ID NO: 10961 - DNA, 3810 bp, Zea mays
  Peptide Sequence Number=SeqID_52740
atgccgcggacgccgtcgctatcgccatcgccgtcgccgtcgccggagaggcaccagcaccagcccgcgcgccggaggggcggcgcagccccgtcgcagctggcactccaccaccaccaccaccaccgcggcggacactcgccgtcgccgccgccccgccgctcgctccgcccgcgccgcgccgccgcgccctcctcccgcccgctcgtcgacgacttcttccccttcccctcctcgccgtcgtcctcgcccttccgctcccgccagcgggggccgtcgccggagccgtccagctccgactccggcgctgacggtggcgccgcgggctcctcggtctccgaccggcgccggcgcaagctcaagctcgtcgtcaagctctcccagctgcccccggaccagctccaacgccgggccccacctcccccgtcgtactctgacgactccgatgggaccgaggacctggccggggacggaagcggcgacgaggagcaggtcaagccgcccaagaagcgccggatcgagccgcgcgccgacagatctcgccatcgcgagtttggtggtggtgggaggagcgaccccacgagcgcgccgcggacgaagcggccttcggtgccagggactgcgaggacgacgccgctgccagaccagaaggcgctggagatgattcttgagaagcttcaaaagaaggatacctatggagtgtttgctgagccagtggatccagaggagcacccaatggacttcggcaccgtcaggaagaagcttgccaggaatgcatatcgctcgtttgagcaatttgaggacgatgtgttcttaatttgcagcaatgcgatgcagtacaatgcacctgatacaatttacttcagacaggctcattccatacaggagctggcacgaaagaagtttcaggaactgagggatgagggcataccaacagaaaacccgattaagattggacagaaaattagaccaaatttctgcactggagcactggttaagaaacctgttttgaggtatccagatgatgatatagatttgtcccacaaagagaaagttaagagacccaattcaaataatgtggatgatgacatgagcttcaaaaatcaagttaaaaaaaccatgtccaagaattcacaggatcgaagttgcttattacagaaagagcgaattaagaaacccattcccaggaattcagaggacaatttaagttcctcattccacaaagagcgacctaagaaactgatctccagacattcgaaggacgacccagactccccatctggcaaagagcaagttaggaaagtcatttcaaaaaatttagaaaatgatgaaagctccccgttccacaaacatcaagtcaagaagtccactccacagagttcaaaggacgacttcttatcccagaaaaaacacattaagccaattggcagaaatggagaagatccaggtttttcatcccgcaaaaagcccattgaggatccagttcgcacaaatgttgaagatgcaggcttctcatctacgaaaaggctgtctgagaagcccatcagtgtaaacggagaagaggatcgtgaccattgtcatcaggagtcatctaaggaaccgagttgcggagttgagcaggatggtcaaggttactcatgcgatgaagaggctgtgaaaaagccagtttgtatggatagccacgatgcccaaggttcagatatctctgctgccactattgcttctgtgggagatggctctaatggtttaagcatgtcacagcctaatgccactgaacctactggttgtcctcttaccaatggggttatagacaaagacatcagctctccactagatgaaataagatctgagaagactgacgatattttggccaaacctagctacaagccaattgtggtagacgaaacgagacggaaaacttatgatgcatctgaagaacagcctctgatgaaatctgatccagtttttgatgttttctctgcggaaccaaaagagctcgtgaatgttgggctcgatgctgaacactcatatgcatatgtaaggagtctggctcgttttgctggttcgcttggtactcaaggctggagaattgcttctgaccgcattcggcaagcattacctgctgatgtaaactatggtcgtggttgggttggagaatatgagcctccattaccgtctattcttgttgtgaatgatcaacctagatacccgaagagctctgagacaaatagacgaaggaatgctcctctgcctagggataatgaaaggttcagatcaacagaaactaataatccaaaggatatgagacgggtagccacttgcaataatgtagttggagtggctggaccactagagagtccagaaattaagccaagattatttggtgttaccactgagcctcaacacaggagcacagacgcgttatcactgcacgagaaccacagagtgtctggtaatgtcgcaaagaccaaaagaacaacgaatgagcaaacaagaaaaggcaattcatcttctagtgcccgacctcttgaaatgcagctacagaaaggagcttcttctggcgcgcttgatatccctgccccaaataaaatggctggccagcctagaccgtttttgcaaccaccagaatcaactagagctcagcaaatgaaaaagattgactcatcaaaaagcaaaattccaattgaaatggcaccacagcaagttgagtgtgcaaaagatgctgattctagtgtgcatgatactccttcctcaaatgggcagcctaaacacttcttccagtcacaagcagcagcttcctctggtgtgcatgatatgcattcctctaacgggcagtctaaacactaccaatcacaagcagcagcttcctctggtatgcatgctatgtcttcctctaatgggcatcctaaacactacttcaagtcacaagcagcaccttcgtcgggtgtgcatgatatgtcttcctccaatgggcagcctaaacattttttccaatcacaagcagtagcttctggtgtgcatgatatggcctcaaacgggcagtctaaacccttgttccagtcccaagaagcaactgtactacagcccaaaaatgaagcaacatgggtgtaccatggacgacctggtgatggaaaggttggaacatcaaaaaaaagcagaccatcgacaagtattgggttcatcactaaaaatcaatcaataaatgctgcaaaatttgccatgaatttgaatggccaaagtattgtcagtgaccatacaaaatcagcaggcgcaaccgctatgcctgcccaagcaaatataccaaacagaggtcttgatgctcctcggaacatattctcagcatttccagctaatgttagggagaaccagagcattccatcagctccagtggctcaatcttggatctcgtttggtgctgctacagagaacaaaccaaccattgtcagcccagctttcgttgacaataattgtggctggaaaatgccatttgctaatgtccaaccttgtgatgataccaaattaagcgttgttcctcagttctttagacatcctgttcaggtagttagagagaactcggttcaaaacaaggggctggtaatatttccccagttggtgcagccagatttcgcaagatcacaagggcaaccacagtggcaggggctgtttccccacatgcaacagaagccaggcaaggatgtactccgcccggacttgaacatcgggttcccatctccaggttcaccaccagctcgacaatcgtccggcatcaatttggaagcacagcagccagacctcgctttgcagttatga

SEQ ID NO: 10962 - DNA, 450 bp, Zea mays
  Peptide Sequence Number=SeqID_52741
atggtgaaagaagcaaccaacgttcgggtgtccgatgacctagtgaagaagcaaccggcgtctagtgctggcaccgccaccgaggacaaggagactagagaatggtgtctggtcactaggttttgcatcatcgtgctcgggcactggattagaacaaggcaacaagctgaaccgctgaaggctaaagcgggtgcgccttggcttgatgccttgatgggctcatctgctcatgggtcgttgcatagttggacttcaccttcacgtatcacgtccgacgtctccactctagcactctccatgcctccacagtccgcactccgcagaataaaacaggactccctcaagctcacgctctgccaactactgtatggggctcgggaccctttgttcatgggctccgagaggcccggcctattgcgaggtctagagatgccacatgtccggtcaaag

SEQ ID NO: 10963 - DNA, 417 bp, Zea mays
  Peptide Sequence Number=SeqID_52742
atggctgtcgccggcttgccgtgcttcccgctctctgccgccgccgccgccccagctgtgcggctggccgcgaggccaaaccggcagcgaccaccccgacgatggacgggtgccgcaccgtcagcagaccgtggggagatgggcaacgacgacggtggtggtgaggcgttgccgccaggtcggtccgtcgtcgtgacgactacaaagcccgccgcagcagaactttctgtgaagggtgacagtcacagatacatggagtataccccatatagattcggcagggattttggtgtatcaccctattgcttagacgaccgattaggcccaacccgattaactgggaggaggaacatgacaaacatacatagaaccgcgaggcagacaagggttataaaggttcggatcaccagagcgtaa

SEQ ID NO: 10964 - DNA, 525 bp, Zea mays
  Peptide Sequence Number=SeqID_52743
atggagtctttagcaaaggcgacgctatgttcttcaaaatgtcacattggccgatggaagatgtgggaagaaacatcagaacatagaatgaggaatggcggaatatgttgttggctttctctattcgtgggcttgccatggctaggaccctgcggcgggtacaccaggaggcacgcacagcaggcggtgctgccagtgcgtagaggcagcttgggcacggagagcctcgtggccacctcgggagcgaatagcagcacgtcccgatggcggccacagggaacggagtatgaaggcacgaacgacggtgggggtagagatgaggtcagacgcgaggaagatgacgagcgaactggttccttacggagtgagaggatgcgcaatatggctgaatgcaccgtcactgaagaagcaatagaggcagctaggatgcggcggcccgaggggggaggtggagctgggatgtggtggcccgacgcggattcgaacgggaggtgggaggaggataaaaatgcaaggcgtggatga

SEQ ID NO: 10965 - DNA, 2424 bp, Zea mays
  Peptide Sequence Number=SeqID_52744
atggactgcagtcaagatccccaagaagaaagccatcaaagaagggagaatggtgaagaagcagaaaagacggctgactatggaaatgctttgagtcgtaaggaggtaacagaagagcttcttggttgtgtggttcatagtgaggaagaggcgtacaggttgtactgtgattatgggcatcgaatcggttttagcgtgcggaagggcaaacagtcttactttattggtaccaagaatattcgaacaaaggattactactgctcaaaggaagggcttaaatacgatgagcctgttacagaagcaaattttaatcgaccagacacaagaactaattgcaaagcaatgatccgctttagagttgacgagaaggggcggtggacagttatacgctttgttcctgtacataatcaccagttggcaaaacctggagaaagacacatgctgagatcagccaaatcgcttgctgttggcaaatcaggtgttatagatccattagcatctacagaggcacatccaattaatggtttctctgatatgacaggtgatatagttgagaattcagggtatactataagggaatgttacaatcaagtgggcatgcagagtataacagtaattgaggcaggggatagccaaagtcttgtcagctatttcaagcataaaactaatgaggaaggcatgttctattgggacgtccaagttgatcaagaagggcgcatgacgaacttcttctacagggatggtaaaagtagaaatgattatggctgctttggagatgccattatatttgatacaacctaccgcacaaacaaatataacttgatatgcgccccatttgttggtgttgaccaccattggcaaaatgttgtttttggctgcgcgttcttgttagacgagtctgtaacttcctatgcctgggtatttaaatcattcttggagtcaatgggagggcgatcaccaaaatcaatattcactgatcaggatgaagctattatgcaggcagtcaaacaggttttccctaatacgcaacattgtttttcctactggcatattctgaagaatgctcaatctcatttaggctcactaaatacgtctcaagcatttcaaagtatgtttaccaagtgtatgcaaggatctgactcagaagaggattttaaggaatcatggactgcaatgatccaggaatacaagctacaggataataattggttgattgacctttatacattccatcataaatggtgctcggcgtttaacaaagatacatttgatggtggaattaattcttctcagtggggggaggtttcaagtaatattctcaatggaatttctgatgaaaatacctctcttacacgttttgcccttttgctagaaaaggttgtcaaggatctacgtagaaatgaatctgaagaggattttcgatgtagccaaactgctccagtccgtgcaattaagcatagtaccgttttgaagcaagctgcagaatcatatacacataggatctataaattatttgaagcagaatttctggatgggtgtggagcaacttcatgccatgaaacttcgagtggtggaaatttattgaggtttggaattacaatgcaggggaggggttcaaaagtatgggatgttgttcttgacacttccaccatggagatcagttgtggttgtagaaagtttgaaaggatgggtcttctttgttcgcatgccctcaaagtcttcaccctgcagaatgttgacacaattccagaaaagtatgttttgaaacgctggacaaaagatgccaggagaagcatgtatacacttgctcaggatgattcaacccaacaggaatgcacagaggctgaacttgcatatcgcaatcgggcaatgcagtatgcatataacctaattataaagagccaggaactggaagaatcacgaaaaatattctgggactcccttgaaactggagagaaggcactggaagtgttctttgaaatgagaaacatgcgcactcaagcagccaaggatgctgataagaatgtaaagaagaagaaaaaaacatcaaaaggaacaaacccaaaaaaagctaaacaagccccaggagtttcctcaactggtccagagctgatagtccatactaatgagcatcaatttcaatcttcacaagatgctcagggtaatgcaaccattggaagaccatattactatcagcaggcttttccaaatgcccctatacaaccaaaccagatgtacatgcatacaaatatgcacacaatgcccctttgcacaccgcagttgaggaaatccatatacatggccacaaaggccaaccaacagaaagcagcagcaacacccttcacacaatgtaacacaatggcagtggccagtggggttctgggagacatacaacaacatagtgttaactctgaactgaactga

SEQ ID NO: 10966 - DNA, 381 bp, Zea mays
  Peptide Sequence Number=SeqID_52745
atgaccgaaccgtgggaacagtaccgaagggcctctgacaaacacgacaccagatacgttctggagagtatccccgctgatcggtgggaccagtcaacctcagtcacgggggacctcaacatcgaggtctttacagtgacccatacgccagaagggacaagacaatatgtcgtacctggcatacgccaacgcatgatagaaggtgacatagaggagatgacagaagataaagctgtactgaagacgtccctaaacctcaccacgagccagctcagtgggatccaccaagcaccactatgtctgtatcagaaaagctacaagaacccatatggcaaacgaacaagatccgacgcaacaggggtacggcagagcacgacctag

SEQ ID NO: 10967 - DNA, 649 bp, Zea mays
  Peptide Sequence Number=SeqID_52746
ggaagcgtcgccgtctgcccacacccgcaccgcacccaaccgcagcggagcccgggagccgaaggccgagggagggggagccattgccggtgttctgattgctgctggaggtcgagggatggtaggggtgctgtcgaatcgcgtggatcgggacgacctcaaggccggggatcacatctacacttggcgggccgcctacatctacgcccaccacggaatatatgctggagatggcatggttatccattttacaagggcagctggacatgagattggaacaggaacattcttggactggttcctttatagctcctctccggcagcaactgagggtcctccctgccagaaatgtgggcacctagtcaagtccgatggggtcatcacctcttgcctcgattgcttcttagatgggggcagcctgtacctctttgactacgctgtgtcgcctgctttcttcctcgccaaagcacggggaggaacgtgcaccctggctgcctctgaccccagtgacgttgtgatccaccgtgcacggtacctcctggacaatgggtttggcatgtactccctgttcaagaacaactgcgaggacttcgccatatactgcaagactgggctgcttgtggagaccgctttcagtgttgggccgtag

SEQ ID NO: 10968 - DNA, 1146 bp, Zea mays
  Peptide Sequence Number=SeqID_52747
atgggcggcgaactgctgcttgcgctcctcctcgtctctgctgctgccgcccctcaggtacttggagttggcaatggagacaatcacatgagaatcatccaggaggacatcattgagacagtcaacaaccatcccagtgctgggtggacagcctcacgtaatccttacttttcaaactataccattgcgcaatttaagcacatacttggagtgaaaccagcaccacagaatgcactaagcaatgttcctgtcaaaacttattcaagatcactggaacttccaaaagagtttgacgctagatctgcatggtcccgttgcagcacaattgggaacatacttgttgcccgatggatactcatttcttgtttgaatttttcaatcctggataaccctgatcttcatgagcagatcaaggtcactgtggctcttgttgggcttttggtgctgtggagtgcctccaggaccgtttttgcattcacctcaacatggcgagtggatacagaagacattgctgttctcataagcattttactttcagtcaatgacctactggcatgctgcggttttatgtgcggcgatgggtgtgatggaggctatcctatagaggcatggcgctactttgttcaaaatggtgttgttacggatgagtgtgatccatacttcgacccggtcggttgcaagcatcctggatgcgaacctgcttatcctacaccaaagtgtgaaaagaaatgcaaggagcagaaccaagtttggcaggaaaagaagcatttcagcattgatgcgtacagaataaattcagatccacatgacataatggcagaggtctacaaaaatggtcctgtagaagttgctttcacagtttacgaggatttcgcacactacaaatctggagtgtacaagcacatcaccggtggcattatgggtggccatgccgtcaagttgattggatggggaaccagtgatgctggagaggattactggcttctggcaaatcagtggaatagaggctggggcgatgatggatacttcaagatcataaggggcaaaaatgaatgtggcatcgaggagggcgttgttgctggaatgccatcgacaaagaatatggttccaaacttcggcggtgccgttggaagagctatagtttaa

SEQ ID NO: 10969 - DNA, 867 bp, Zea mays
  Peptide Sequence Number=SeqID_52748
atggagaatttatacaggttcgagtcgtgcgagtgcgtaataccctacgtcctgtgtggtgctgagtgttggattgctctgagtttgcggattaaaggttaccttctgagtccttcggtgttcgatcagcacgagacacatcttcaaagctcaagtgattcctctgcgggacatgcgcacgaccgtgggtatgggaacccgttgggtactcgaaacccgcatgggtatgagtttgagcaaaattttataaccgtcatgggacatcgccttcgcttattcggtcattggatactaaaatgtgtgatgtttgtgtggcatatcagggatcacctggctgtcgagtcttcacttgctgacatagctattcttcctatcgaaaatgcatacaccggaagcttccataagagctatgacatacttcttagtcatgatttgcaaattgtgcaagaagtacaaatggatgtagagctatgtcttcttgctttacctggagtgcataaggatgatttgaagacaattttcagccatccacagtatcttgctcaatgcgaacattccatttctggtttgagtgtttcaaagaaaaacgtggatcatggagttgttggtgctgagattatatcaaagcagaatttaagggattctggagttatatgcagtgctcgagcagcagaattgtatgggcttaacatcttagaatgcaactttcagctcaatttcattcagaaatatgacactgtcaagaccaaaatgttgcaggatgaatcacccaatgtcacaaggtacctagtattggcaaaaactgctaaccttcccaaagaacacgaccaatacaaggtgttcagtgatgaaacttatataggttaa

SEQ ID NO: 10970 - DNA, 363 bp, Zea mays
  Peptide Sequence Number=SeqID_52749
atggttggaaacaacgccggtgaacttgatgaagagatcgaaacggcaatcgaagaaggactccacaacgtcgtggaggcgctcgtggacgggcacgaacgggagcaggagagtactgttccctcagcagtatcagcgtcagcaccaatagagaggcagttccctcaacagcaacagcatcagcatcgccagaacaaccaacaagaagaaatcagtaccatcgccagaacaaccatacacttcgccttcccgccacagcaaccaaccagaacaaccagacagcgccagtgcaaggaggaggcagttaatgtttccattgtggggaacaaggtcactgcgcgaatcactgcccgaagaaagtag

SEQ ID NO: 10971 - DNA, 1347 bp, Zea mays
  Peptide Sequence Number=SeqID_52750
atggcgcacaagaccgtgatcctctacccttcgctgggagtcggccacctgaaccccatggtggagctggccaaggtcttcctccgccgcggcatggccgtcgtcatggccatcgtcgactcgcccgacaaggactctgtgtcggccgaggcgctggcccgcctcgccgccgccaacccggacatcgcgttccgccacctccccgtcccgtcccgcggcacggaacgttgctctactaacccggtcatgcgcgccatcgacgtgctccgcgccgccaaccccgcgctcctgggcttcctgcgcgcgctacccgccgtcgacgccctcgtgctcgacatgttctgcacggacgcgctcgacgtcgcccgccgagctcggcgtcccggcgacacgccggagacggtgctgcacttccccggcgtgccaccgatccgcgcgctcgacatgggtgcgacgatgcaggaccgggacagcgacgtcgccaaggcacgcctgtcccagtgcgcgcgcatgctcgaagcgaggggcattctcgtgaacagcttcgactggctggaggcacgggccctggaagcgctcagccgtggcctctgcacgccggggcgctcagctccgccagtccactgcatcgggccgctggtcctcgctggaaacaagggaggggccagcgagaggcacgcttgtctggaatggctggacgcccagccggaccggagcgttgttttcctcagcttcggcagcctggggaggttctcgatgccgcagctgagagagatagcacgtggactggagaactccgggcagaggttcctgtgggtcgtccggagcccgcctgagcaccggagcaactccgtggagccggacctggacctggagccgttgcttcccgagggtttcttggagcgtactagggaaaggggcttcgcggtgaagaactgggcgccgcagagcgaggtgctacggcacctttccatcggtgccttcgtgacgcactgcgggtggaactcggcgctagagggaattgcgtctggcgtgccgatgatctgctggccgttgtacgcggagcagaagatgaataaggtgcacatggtggaggagttgaaggttggcgtggtgatggaggggtacgaggaggagctggtaaaggcggaggaggtggaagcaaaggtgaggctggtgatggcgcccggatctggcgacggagaggagcttaggcagaggctcgtgacggccaaggatatggctgtggaggttctcaaggaaggcggctcatctcacgtggcgtttgacgcgttcttgacagacttgctgaagaacacccgtacggagaaaagtggcttcttgtga

SEQ ID NO: 10972 - DNA, 228 bp, Zea mays
  Peptide Sequence Number=SeqID_52751
atggcggcgtacgactataattcaccggactgtccggtgagccaacagtcggacgggccaatggtcggcagcccccttcgcttcgttccatccggcttctcggcagcggcggagaggagggggatagtgcaccggctgctgcgggacgcgcaagcggacaggtgggagcggttggactttcccatcatctgcgagtcatgcctcggcgacaacccctacgtccggatg

SEQ ID NO: 10973 - DNA, 297 bp, Zea mays
  Peptide Sequence Number=SeqID_52752
atgggtagaggcaagaggggtcgcagctggcctcgccgtggcgacaacaagcataagcgtgccccgagtcctccctcagaggactttggggatttagagtactcagaggaggcgtactggcgttccatcgagcgtgccgggctcggtgggtcggacgagttgggggtctccttggatgaggcagactccgccgactcttccgaggagtggagcggcgacgacggtgacgacgagggtgacgacagtggcgacgacagaggtgagggcgatggcggcaagggcggcggtgaaggctga

SEQ ID NO: 10974 - DNA, 225 bp, Zea mays
  Peptide Sequence Number=SeqID_52753
atgctggcgttcctgatccaagtggatcaatatattgggatttcaacttgggagcaagaatgtgcctttgctcgagagaggaagcggaatattgcgctagcttgggagcaagaatgtgtcgttgttaatgctcttgcttgccagcttgcggaggccgagcaacagctcgggggtgctgcgatcgttgaccccgtcctcgagtacgatgatgttggtgtcccctag

SEQ ID NO: 10975 - DNA, 501 bp, Zea mays
  Peptide Sequence Number=SeqID_52754
atggaccgggctttcacccatagaagacgccaagacgatacttgggaatgcgacaccctcaacaggcggcacccacgagaaccactgtatgttcatcggatgacctgctacctttttggaagagaaaggaaagttgcagatgtccccacagatcatccctcctgcagcaagcaacatgcagttcttcaatacagacttgtggagaaggagcaactagatggcatgatgacaaagaaaataaggccttatctgatggatcttgatagtacaaatggaactttcatcaatggaaatcgcattgagcctcggcgatattatgagttatttgaaaaggacacaatcaagtttggcaatagtagattgtattccattgtttatagtgtgaagtttgaaataggtgatgagatagaatatactgagatagaatggccgggagtatgttttgctccacgaaaattcaacagaatgagttttgagaaaattcaacagaatgaggattga

SEQ ID NO: 10976 - DNA, 387 bp, Zea mays
  Peptide Sequence Number=SeqID_52755
atggggggcgatgtcaaggcggagggcatgggcctcacagttgccaaggaactggtcctcaatgacaacctaggcctagcgagcaatgtcgtcaagctagcgaacgatctccaacagctcgacggtgacagtgccaaggatccaagagagggcgactttgtccatttagtgccaagacgggaccgtcaagcatacaatgtcagtgatgacatgatcatcgaggggcgtagcgctacagagttagcgatgatatcatgcctaggggacaccaacatcatcgtactcgaggacggggtcaacgatcgcagcacccccgagctgttgctcggcctccgcaagctggcaagcaagagcattaacaacgacacattcttgctcccaagctag

SEQ ID NO: 10977 - DNA, 1761 bp, Zea mays
  Peptide Sequence Number=SeqID_52756
atggtcacagccgccgccagtgctggtcttctggactgcagctggacagtagccgagaaggcagaggcgccggtggagcaggccagcagggggcgaaggctccttactgctacggtggcttggcctgctcctgcagtgatttacattggtattattctgtccaccttaggtgcagcactgcagagtttgactggggctccaaggttgcttgcagcaattgctaatgatgacattcttcctgttcttaattacttcaaagtttctgagggatctgagccgcatgcggccactttattcacggccttcatctgtatttgctgtgttgttattggaaacttggatttgattacacccacgatcacaatgtttttccttctgtgctatgctggcgtgaacctgtcatgctttctgcttgatctccttgatgctcctagttggcgccccagatggaaatttcaccattggagcctttcacttgttggggcattgttctgtgttgtgattatgtttctgatctcctggtctttcactgttgtctcccttgcccttgcaagcctcatctattactatgtgagcataaaagggaaggctggagactggggagatgggttcaaaagtgcatactttcaattggcactccgaagtctcagatcactcggagcaaaccaagtccatcctaagaattggtaccccattcctctgatattctgccgtccatggggcaaactgccggaaaatgttccttgtcatccaaaacttgcagactttgctaattgtatgaagaagaaaggccgtggtatgtccatttttgtctctataattgatggtgattatcatgaactagctgaggatgcaaagactgcctgccgccaattggatgcttacattgactacaagcgctgtgagggtgttgcggagatcattgtagctcctactatgtctgacggcttccgcagcatcgtgcagacaatgggcctaggaaacttgaagccaaacattgttgtgatgcggtaccctgagatctggaggcgtgagaatttgacacagataccgtcaacatttgtcagcataataaatgattgcattattgctaacaaggcagtagtcattgtgaagggactcgatgagtggcctaatgagtaccagcgtcagtatgggactattgacctctactggattgtaagggatggaggattgatgcttcttctgtcccaactcctgctgacaaaggagagctttgagagctgtaagatccaagtcttctgcatatctgaagaggataccgacgcagaggagctgaaagctgatgtcaaaaagttcttgtatgatcttaggatgcaagctgaggtcattgttgtcactatgaaatcatgggagtcacacatggagagcagcagtagcggtgttcagcaggataactcccatgaggcttacacaagtgcacagcaaaggatcgaaacataccttgacgagatgaaggaaactgctcaaagagaaaggcagccactaaaggagaatgggaggcaagttgttgtgaatgaacagaaggttgataaattcctttacacaatgttgaaattgaactccacgatactcaggtactccagaatggcagctgtagttcttgtgagccttccaccaccaccactaaatcatcctgcatatttctacatggagtacatggatttgcttgtagagaatgtcccacgcatgttaatagttaggggatatacgagagatgttgtcacatttttcacatga

SEQ ID NO: 10978 - DNA, 2577 bp, Zea mays
  Peptide Sequence Number=SeqID_52757
atggcggctctcgctctcgcccttgccctcgccagcatcaccctctccacgcttgctccacgacccctgcccctgatgaccagcgccttctcctataccgcaccgcatgacactataccacggaaatcccggctcatcgtcgaggagtacaagacccgaatcctgcggtcgtcaccggacggcaccttctcctgcggcttccaccagatctacgacggcgccttcaccttctcggtatggtacaccaactcctcgaccgacggcgacgacacggccgccatcgtgtggagcgccaaccgcggccgcccggtgcacgcctggggcgcggccgtcgccctgcgcaaggacgggagcatggtgctcaccgactacgacggcacggtcgtgtggcaggcccaggagagcagttcgtccccggacgcgggcgcggcccagtacgcgcagctgctggacaccgggaacctggtcctcaagaactccagcggcgccatcgtgtggcagagcttcgactcgccgaccgacaccttcctccccacgcagcgcatcgcggagacgtccaggctagtctccaccaccgagctgcagctccccggccactacgccttccgcttcagcgaccagtccatcctgtcgctcatatacgacgacaccaacgtcaccagcgtgtactggccggaccccgacttccagtactacgagaacagcaggaacctgtacaacagcaccaggatcgcgagccttggcccatccggggacatcttctcgagcgacttcgcgaacagccagcatgagctcgccgccgctgacagaggcgccgctggtatcctgagaaggcttaggctggaccgcgacgggaacctcaggctctacagtctcaacagctcggacgggaccgggacgtggtcggtctcatgggttgccgagtcccagccatgcaagacccacggcctctgtggcccgtacgggatatgccactactcgcctgcgccggtgtgttcttgcccgcctggctaccagatgacgaacccgggcaactggacgcaaggttgccggcctgctgtggacataccttgcgacgacgacggggagcaaaacctgacctttctggagctacggaacaccgattactggggatctgatcaggaacgcatcgagaaggtgtcactggaaacctgcaaggatacgtgcttaagagactgctcctgcaagggggttcagtaccaggaagggaacggtacgtgctacccgaagtctctcctcttcaacgggaggtccttcccgacgcccaccgtgcgcaccatgtacatcaaactcccatcgttaagtctgaaggcatcaaagctccccattccgcagtccaacgtgcttgattcttcggtaccgcaccggctcaggtgtgatccagtaacaagcacgacgatcatggaaaaggactcccataggaggactgatcaggaggagccaagatggatctactacttctacgggttcgtcggcgccttcttcgttatcgaggtcttcttcttcgcgttcgcgtggttcttcgtcctgaggagggagctgaggtcgtcgcaggtatgggcagctgaggaaggctacaagatgatgacgaaccatttccggatgtacagctacagggagctggccaaggcgaccgaaaagttcacgcatgagctcggatggggaggcactacctacaagggggtcctggacgacggccgagcggtggccgtcaagagactgggaaacataaggcagcacagcagagaggagttccacgacgagctgcacgtcatcgcaaggatcaaccacatgaacctggtaaggatgtacggcttctgctcggagaggtcccacaggatgctggtcctcgagtacgcggacagagggtccttggccgacgtgctgttcagaggcagaggcagaggcggcaacaacaacaacagcaaaacctcctcctccctagactggaagcagagattcagcgtggccctgggcgtcgccaagggcctggcctacctccaccacgagtgcctggagtggatcgtccactgcaacctgaagcccgagaacatcctgctggaccaggacctggagcccaagatcgccgacttcgggctggcgaagctgctcagcaggtccgggtccgggccggcccggaacgtgacgccgacgcgggcgcgaggcaccgtgggctacatcgccccggagtgggtgtccggcctgcctatcacggccaaggccgacgtgtacagctacggcgtcgtgctccttgagctggtgtcggggacgcgggtcttcgacctggtactcaagggcgaggaggacgacagggcgcatgcgcatgcggtgctgaagaagttcgtcaggatggtctcgtacaggctggacaaggatgagccgttctgggtagcggagttcgtggacttgaggctgggtggtgagttcgactgctcgcaggtgaaggggatgctcaggctggccgtctcgtgcttggaggaagagaggaaaaagcggcccaccatggaatcggtagtccagagcctcctctcggttaattcagctggaagccaatag

SEQ ID NO: 10979 - DNA, 300 bp, Zea mays
  Peptide Sequence Number=SeqID_52758
atggccaagtcgaagaaccacacggcgcataaccagtcgttcaaggcgcacaagaacggcatcaagaagcccaagcgccaccgccagacctccaccaaggggaaactctctagttgcttttttgaggaagatggacccgaagtttctgaggaacttgaggtactcaaggaagggcaacaagaagagtgggcgaggctgagtccgaggagtaagatgatggtgattgagtttgtggcgacaaatgcatctcttgtatcgctaagagtcttagctgtgaacttagttctcacttctgtgtga

SEQ ID NO: 10980 - DNA, 180 bp, Zea mays
  Peptide Sequence Number=SeqID_52759
atggagactatatctactttcatgttgatcgtggtccgagccacacagtgcaaacacaaggttgacttgtcccttgtggctcaggtgtggagcacaagaaataaggcggctgatggcgaaggcgaaggtcatatgcgggtttgtgtcgatggactgggagcggtgaaggacgaacgctag

SEQ ID NO: 10981 - DNA, 282 bp, Zea mays
  Peptide Sequence Number=SeqID_52760
atggagtctccttgtggatgctccggctctctcaagtacgctcacaggggatgtgtgcagagatggtgtgacgagaaggggagcaccctctgtgagatctgccttcagaatttcaagccaggctacacaatgcctcccaagaaaaccccggtggttgaaacggcggtcactatcaggaggatcccctccgatcccactcgatccacctctaaccgaataaggcctgagatggtaccagagcctaatagatccattatgcttatgttgcctctaactttctag

SEQ ID NO: 10982 - DNA, 285 bp, Zea mays
  Peptide Sequence Number=SeqID_52761
atggtggatggcaacatagggaggaagaagacaggatggagggatggcgccaacgtcggttgcgcggggaggaagagaccgaagtggggcggccacacggggagaaagacgatgtgggtggtggtgcatggaagacatgtggggaccttggcgcgcttcaggggctatgacgacgtgacatcgtcacctgctcctagacccatcgtggtgcaggcgatgccgctaccacccttatcctcctcccccgtcgtcgagcgcaggacaaaatatggcttagccccctaa

SEQ ID NO: 10983 - DNA, 252 bp, Zea mays
  Peptide Sequence Number=SeqID_52762
atgacggtcatgatgataagcgccgcagggggacaggaggcggtgggggaggaggtggaaggtgccacgggaggagcaactcggttcggtcctcggtcggatcgttttgataacgatcgcagccgcaccgccactacatgggaaatgaggaggatgcgggagaggaggtggaaggcgtcacaagaggagttgctcgattcggtccttggccagatcttatcaatcgacggctacagccgcaccgctggtgca

SEQ ID NO: 10984 - DNA, 459 bp, Zea mays
  Peptide Sequence Number=SeqID_52763
atggcgagcaaccaaggagttggacgccgagtggacagggaactccggtcgggcgcgcacatcaggaagctcgacggcggcgcgagcaggaaacgtgaggagggaactgcagggagatgggcgcgccatggctggaatcaggggtgtggtgagcttgcaggggagggcgcggctggaggagaaagctgggcacgagctgaactgttggcaggcgacccggagtgcggcgagcagggagcacggagccggcgagccagcaggggaaaacgccatgggggcgagctcgaggcatggagatccggcgagctgaagccgcgcgcaggagcacgagaccacgcggcaagcacaaacgagcagcaggggcgcgggagcaagagtcgctcgacagggaggaagaagctacgccggcaaagggaggagaagacaggtccacggcggcttgattttcatggaagctga

SEQ ID NO: 10985 - DNA, 114 bp, Zea mays
  Peptide Sequence Number=SeqID_52764
atgtcgtcgatcgctatcctcgtctatgccaaaaatccgagaagattagacgcggaaggaaacaaattagtatgcgacgggaaaattctcgatgtggaagaaaagataggttaa

SEQ ID NO: 10986 - DNA, 1200 bp, Zea mays
  Peptide Sequence Number=SeqID_52765
atgccgcggtactcctctctcccccagctgcagcgcgcgctcccccttccactgttcctgtgggcccgccttcaattaatagtagaagaaaaattgatagtagatgaaaaagtaagcgtggcgtcgtcgtcggggcggcgcttcccgtcggacaccacggccatcgcaggctggcttccatcgcccgccggcgccgggcgggcggaggacctctcgctgagtttcaatgccggcgccatttccgcctcgtctggcgcctcgctagcggcagggctctgggggcccgcggcgtcgcgccaggccgccggctacggggcgataggcgccaccggtgacgtcgggatgctcgtcgtcgcccccgcgggctcgttccaccaccagcgagcggccgccgacgaccccgtgctcccgctcatcaccgcggcgcagcgtacccttgtcggcgcggacggcccctccggcaacgccaagctgcccgtgtcgtccgctggcgccatccagttttggcagcaggagccggcggcgggtgggtccctcggcaagaaggccctcgccatgctggaccatggccgcggcgggtccgggtccggaggagctacgtgccaggactgcggcaaccaggcgaagaagggctgcgcgcacagccgctgccgcacgtgctgcaacagccgtggcttcgagtgtgacacccatgtcaagagcacctgggtgcccgccgcgcgccgctgggagcgcctgcagctcgcgggtggcgccggcgccggcgccactgcctcccctccttcactcgcgccgaccacgaccaagagaccccgcctcgcgtgcccgacccccacgaggacgaccaactctcgcgcttccacctccaacgccaccacgcctcgcagcttcgacacatcctcgagccaccaagacgcgtcgttcaaggacagccttccgcggcaggtgcgcgggccggcggtgttccggtgcgtgcgggtaacgtccgtggacgacggcggcggcggcggcaccaacggcgaggtcgcgtaccaggcggcggtgaccatcaacgggcacctgttcaggggcctcctgtacgaccacggcgccgaagacgccgtaatgcccaccgcgtccgacctcaacctcaggagcaccagggccccccgctcatcctcggcggcctgggctacggtaacacaccatgaactgatctga

SEQ ID NO: 10987 - DNA, 969 bp, Zea mays
  Peptide Sequence Number=SeqID_52766
atggccacagccgccgcggccaccgcctcctcctccctcctcgcgccggcggccagcagcacggcgccggcctcgtcaaacgcgctgctgttcccctcctccgtgccgtcgctgcgtgcgtacccgcggctcctcctcgcgttccgccgccccgccgcggccgccatcgccgacccgcagggggccgtgctcgaagaggaggcggaggtcgaccagcagggccagtacgacgacgacgacggttttgatggtgcgcagacgaggtcgaagaggttcctcgagatacagaagctgagggagagcaagaaggactacgacgtgcccaccgccatctcgttgatgaagcagatgtccagtgccaagtttgttgagtcagcggaggcgcacttccgcatgaatctcgaccccaagtacaatgaccagcagctccgggccacggtgaatttgcccaagggaacaggccagtcggtgaagattgcggttctcacacaaggtgagaagatagatgaagctagagctgccggagctgatatcgtaggtggagaagatttgattgaacaaataaaaggaggatttatggagtttgacaaattgattgcatcacctgatatgatgcctaaggttgcgggcttaggtaagattctaggaccaagaggactgatgcctaaccccaaagctggcactgtttcttcaaatattactcaggctatagaagagttcaagaaagggaaggttgaatacagggttgataaatcaggaattgttcatattccatttggcaaggttgactttccagaggaagatctcattgcaaacttcatgtctgttgttcgctctgttgagaggaacaagccatctggtgctaaggggatatactggaaaacggcgtacttgtgctcatccatgggaccttctatcaagctaaacataaaagaaatgcttgactatggtttggaatcatctgactag

SEQ ID NO: 10988 - DNA, 276 bp, Zea mays
  Peptide Sequence Number=SeqID_52767
atgacgggcgccgcgcctggaaaactcctcccccctgattccagtgattttggctcaaccgagacgcccggtcacctgcctgatcttggttgggagttgggacgagcgggtgtacgagtgtgcgatcgtgtcgtgtccgcgcgggcgacgggtaaggagaaacacggcgagttggctgggccgagacgcgcgcaggtgttcggagctcctgatttggctcagccccgaggaccgagagccatgcggatgcgcgcgaggcagccggacagactttag

SEQ ID NO: 10989 - DNA, 1317 bp, Zea mays
  Peptide Sequence Number=SeqID_52768
atgagcgggaggaagaatgcgggcaaggtttccccctggttgctcgtcctcatctgtttagggtgcttctttgtgacctacaacctcctgacgatgcccagccggggacgggatgggccgcgcaagttcctcggcggcggcggggatcgccactcaactgcctcgttggggtcaggctctgattcggaccccgcgaagcggttccacgtcgcgcttacggcgacggacgcactgtacagtcagtggcagtcgcggataatgcactactggtataaggagatgagggaccgacctggttccgacatgggtggcttcactaggatccttcactcgggcaagcctgatggattgatggatgagatacccaccatggtggttgatccccttcctgaaggcaaggatcagggatatattgtcttaaataggccttgggcttttgtccagtggatccagaaagcaaagatcgtagaagagtatatattaatggcagagccagatcatgtctttgtgaagcctttgccaaacttatctcatggtgatgagccagcggcatttccgtttttctacatcaaaccgactgagaatgagaagatattgaggaagtttttcccagaagaaaaagggcctatttcaaatattgatcctattggcaactctccggttataatcaagaaggtcaagaaaactctagaaccattgctttttttcgaaaaacgcaggagaactgcgcctcattatattaagaaggaaaaacagggtctaaggagaccagataccgtctggggcaatactgaaaacatgtttgtcttcaatagaaggctgcaacactacctcagaaataaggttccaaagctgaaggctcagcttgagaagattgctccaacctggatgaatgtttcattaaaaatgaaagaggatcaggagacagacaaagcattcggatgggtcttggaaatgtacgcatacgctgttgctagtgcactgcacggtgtgcaccatagtctccataaagattttatgattcagcctccttgggacctgaaaacggacaacacattcatcatccattatacgtatggatgcgattattcaatgaagagaaagatgatatgcttatgctattttgagctaactcagggtcagcttacttatgggaaaatcggtgaatggcgttttgacaaaagatcttaccttcaatctccaccaccaagaaatctttcactgccccctccaggagttcctgaaagtgtggtcacccttgtgaagatggtcaatgaggccaccgcaaacattccggggtgggaggacgatagatga

SEQ ID NO: 10990 - DNA, 210 bp, Zea mays
  Peptide Sequence Number=SeqID_52769
atgatgaaggtgccaaaggttcacaaaaagccaataaaaagaccaagaaaagggttcaataaaacggagcaagggataaccgaagtgctccctggtctggcgcactggactgtccggtgcaccaccggacaggctgaattcaacaccttcgggaattctcagaggcgctccgcgataattcaccggactgcccgatgtaccaccggatag

SEQ ID NO: 10991 - DNA, 1011 bp, Zea mays
  Peptide Sequence Number=SeqID_52770
atggcctcattggtccctctggttgttgcgctcctcttgtgcccgtcgtcgtcgctggcaatggcatccggcgccggccctgcgcagtgggggaagaagctggacccgcacttctacgaccagtcgtgccctcacgcgcagcacatcgtggcgtccatcgtggggaaggcgcaccaccaggacccccgcatggccgcctccctcctccgcctccacttccacgactgcttcgtcaagggctgcgacgcttcgctgctgctggacagcagcgggtccatcgtgagcgaaaagcggtccaaccccaaccgggactccgccaggggcttcgaggtcatcgacgagatcaaggccgcgctcgaggctgcctgcccggccaccgtctcctgcgccgacatcctggcgcttgcagcccgcgactccaccgtcatgactggcggccctgggtggatcgtgccgctggggcggagggactcccgtggcgctagcgtgcagggctccaacaacgacatccctgctcccaacaacactctccccaccatcatcacaaagttcaagctccagggcctcgacatcgtcgacctcgtcgcactcctcggtagccacaccatcggcgactcccggtgcacaagcttccggcagcgcctgtacaaccagacggggaacggcctcccggacttcaccctggacgcgtcctacgcggccgcgctacgcccgcgctgcccgcggtcggggggtgaccagaacctcttcttcctcgaccccgtcacgcccttcaagttcgacaaccagtactacaaaaacatcctcgcctaccgtggcctcctcagctccgacgaggtgctcctcaccggcagcggagccaccgctgaccttgtcaagctctacgccgccaaccaggatatcttcttccagcacttcgcgcgctccattgtcaagatgggcaacatctcgccgctcaccggggccaatggcgagatcaggaagaactgcaggagggtcaaccacgcctga

SEQ ID NO: 10992 - DNA, 618 bp, Zea mays
  Peptide Sequence Number=SeqID_52771
atgaagtgcgatatcgaaagggtactgagtgaggtgcagggaagcttgcgctggttctcggccgtggacagagccaatttgtcgattacagagacgtcgacgagtatgggagcgcttcgtggacgagcttcagaaggtgaaaggtgtgaggatcgtgcatgtgccaaagcaacacaaagtgcttatgattgtcgggtggaagtgtcaaagaggaaccaggaggttgttacccttgattgtctcgagcgtatgtgggtcacaatgcgcttccaagcatcaaagctgcggaggcagaatgttcaagcccaagttgtagttatgaatagggaggcggtctatcgtatcgaggaagaggatagactacacgatcgcattggagggactcaaaagggaacacaccagcacatgttgagggcagtggacgttgcacatgaacgattcgggacttcactccgctttgagcatttcgtggaccgtgttcgtgaactcgaagtggagacctttcgtcggggtgtcaaccagacctttgtcattgctagatcccatgagggagggatcaacctggaagctctgagcgaagattattgtgacaactggagtgtcgcggaactcacatag

SEQ ID NO: 10993 - DNA, 780 bp, Zea mays
  Peptide Sequence Number=SeqID_52772
atgacagttggcttgttgtattctgacttggcgtcagacatagttgatgtggcgaatgtgtcattgatgatgggacaaattcgatggttgcatggggtccactcaagcgatcccttggcagtccgtctagctcctcggcctagctccgcctcgctccaccccccaactcggagagcgggggtcatcgggaggatgacagttggcttgttgtattctgacttggcgtcagacatagttgatgtggcgaacgtgtcattgatgacgggacaaattcgatggtcgcatggggtccactcaagcgatcccttggcggaattgaactatcgcctcatatatgtccttggcgatgaggccttgcatgcggccttgttcttctacgcttcaacccctctacttgaaaaggggcaacttccttccccgtccttgtttcccatggatctaggcaagcgccaggcggatgacaatcccccagttatgaggcctctaaggcagcgcatggttgattcatggtatggacctcttcatcgtcagggtcttatattttctgtctttctctttaccttctgctcttttataggtgagtggtctcaatgggttcgtgaaaggatcctgggatgtcctttcatcaagagctggagacggaggtcccaggcatccgtgaaggcaccgacaaggccacatagttggtccgcgctcgtggcgctaaccgggaggaatgtctcttggatgtcccaaacggggctcatgacacagttcaccgtggtgttcatcggggcataa

SEQ ID NO: 10994 - DNA, 2295 bp, Zea mays
  Peptide Sequence Number=SeqID_52773
atggtgccccccgtcaactcccccaagtgggacgagtccttccgcatctactgcgcgcacgacgccagcgacatcatcttcaccgtcaaggccgacaacgccatcggcgccacgctcatcggccgcgcctacctgcccacggatagcgtcgtcgccggcaacaaggtgaacctgtggctccccatccgcgacgagaagcgccagccgctggaaggtggtgaccagatacacgtccagctccagttcaccgacgtcgccgcggacccgaccgccggctggggcgccggggtcggcagcgcggcgtacgacggcgtgccccacaccttcttcaagcagcggcgcggctgccgggtgcggctgtacgaggacgcgcatgtcgccgccgacttctcgccgcgcatccggctcgcggggggcaggttctacgagccgcgccggtgctgggtggacgtgttcgacgcgatcaacagggcccgcaggatggtgtacatcgccgggtggtccgtgaacaccgacgtcgtgctggtgcgcgacccacggaagcaggcggcggcggcgtccgagaaccttggcgagctgctcatccggaaggcaaacgagggcgtcacggtgctgatgctggtgtgggacgaccgcacgtcggtggggctcggccccatcaggcgcgacgggctgatggccacaggcgaccaggacacggcggccttcttccgtggcacgcgcgtgcagtgcgtgctgtgcccgcggaaccccgacaaggaccggagctacgtgcaggatatcgagacggacaccatgttcacgcaccaccagaagacggtgatcgtcgacggcggcggcaggccggcgccgtggtcgccgccgggcctcgtgggcttcctcggcggcatcgacatgtgcgacgggaggtacgacacgcaggaccacccgctgttccgcacgctgggcaccacgcacaacagggacttccaccagcccaacttccccggcgcgtccatcagcaagggcgggccgagggagccgtggcacgacatccactgccgcgtcgagggcccggcggcgtgggacgtgctggagaacttcgagcagaggtggaggaagcagggcaagggcgacaacctcctggtggcgctgaacaaggagtgggcggagcgcgaggcggccccgcggggcgacgccgagtcgtggaacgtgcaggtgttccggtccatcgacggcggcgcggcggcggggttccccgagccctccgcggacgcgccccgggaggccgcggcgctcgggctggtgaccggcaaggaccacgtgatggagcgcagcatccaggacgcgtacatccacgccatccggcgggcgcgggacttcgtgtacatcgagaaccagtacttcctggggagctcctacgcgtggcggcagaacgacggcgtgtcggtggaggacatcaacgcgctgcacctcatccctagggagctgtcgctcaagatcgtcagcaagatcgaggccggtgagcggttcgccgtgtacgtggtggtgcccctgtggccggagggcgtgccggagagcggctccgtgcaggccatcctggactggcagcgccgcaccatggagatgatgtacaaggacgtcctcatggccattcgcgccaagggactccaggccgaccccagggactacctcactttcttctgcctcggcaaccgcgaggcgccatgccccggcgagtacgtgccgccggagcacccggaccccaacaccgactacgagagggcgcagcgggcgaggcgcttcatgatctacgtccacgccaagaccatgatagtggatgacgagtacatcatcgtgggatcggcgaacatcaaccagcgctccatggacggcggccgcgacacggagatcgcgatcggcgcgtaccagccgggctacctggcgatcaggaacacctggggcaggcggcggcggcggcactgggcggcgagggggcaggtccatggcttccgggtctccctgtggaaggagcacctggggcaggcggcggcggcggcactgggcggcgatctcctccgtccgtcgagcctgacctgcgtgcgccggatgaaccaggtggcgaagcagcactgggacatgttcgcgagcgacgcgttccagggcaacctcccgggccacctcatggcgtacccggtcagcgtgctcgacgacggcggcggcaagatcgtggccacgacggaaaccttcccggacaccaacgccaaggtgctcggcatcaagtccgacatcctcccgcccatcctcaccacatga

SEQ ID NO: 10995 - DNA, 531 bp, Zea mays
  Peptide Sequence Number=SeqID_52774
atggatatggggtacttacaatgggagcctgaggcagagccgggagtgctccatggttggcttgatgatgttggtggtggagacatcgaggtgatctttggaaccagtcatatggggccattttttatagatctaaacaccctcttccccagcggagtcgccaaaaagtatgttgacgccgatctaggcgccaaacactggaacgaaccacctggtggtgctctctgtggaggcgcagacaatctacggcatagggtcggacggtccacgacttgggcgcaggagcggatcctcctctgcttgctttcgaacggttcgcatctggggctagtctgtccgcgatggcacagagggtattcttctccgcgaagaaccctagaacttgtccccgggagagattccgtcgagggggagagttccaaggcgttgctctatgtcagcaggccaccctcctcgaggccctatgagcaggggctttacgcgggagccctggttctccttagaacatcctacaagcaggatgacctttga

SEQ ID NO: 10996 - DNA, 216 bp, Zea mays
  Peptide Sequence Number=SeqID_52775
atggccatgatggattcaacatcagaaaagatgtacctctgccaggtaccaaactttgggtttgaaatgataaagctgagaccgggcagcgacacctctggccatgggcgaactatccgactaagtcagccagatcatctggatgagcatcgaactgttcgcgcgcagtctggaactttacgagcaatccctctttatgatatattcgacgtgtga

SEQ ID NO: 10997 - DNA, 327 bp, Zea mays
  Peptide Sequence Number=SeqID_52776
atggcctctcctgagttcagcctcgggcgcaacagggaactccgcctcgcccgaccccaggcctcggcctccgccccggccttgggagaaggtctccgcctcgcccgaccccaggcctcggctttagcctcgacctcgaggggaggtctccgcctcgcccgaccctatgcctcggcttcagcctcggcctcgggggaaggtctccgcctcgcccgactccaagcctcggcctcagtctcggccttgggtgaaggtccccgcctcgcccgacctcagcctcggcctcaggagaagtcgccgcctcgccctacctcggcctcggactga

SEQ ID NO: 10998 - DNA, 462 bp, Zea mays
  Peptide Sequence Number=SeqID_52777
atggcgcggagcatgctaaaagccatgaatctccctaactggttatggggggaggctgtggcaacggctgtatacatactgaacagatcacccactcaaggaaatgaagggagcactccatatgagactcctgagaggaaatttgtgacaaaaatatctgctctggaaatttgtaatgagattgtgaatggccttctacaatctgactctgctccccttcggttattagatgatcctgaggagaagcggaagctcgggtacggcacgcagcgggagcgcctgggaaaggactccatcaagcccttcgacgcctgctgcctctgcctcaagccgctcatcggcccgctctgctgccccaagggccacacattctgtaaggagtgcatcctcgagtgcctcctctaccagaaagaaggacatcaagcgggggtggttggttgggctattgggggagtagagtag

SEQ ID NO: 10999 - DNA, 582 bp, Zea mays
  Peptide Sequence Number=SeqID_52778
atggcgctcgtcgtgcatgtcgcacacgatgacaggaaaataggcatgtcgtgcaacagctactatggcggggaatctgcatggagtcaatatatttgtgcaatggaaaccagaaaatgcgctgcgccacgcggcaggtggggcggcaagacgttcctcgagagctcctaccgcctgagcggcttcttggcttacatagcggacaagttcgaggagatgcggcgggattcgacgaccccgccggtgcccggcagcgaacaaaggccgctcacgacgcacttcatggggtgcaagccgtgcggcaggaacgactcaatctacgatgcggtttggtgccggcgctcaatggagcgtgctctcaacttcggcgacgaccagatactcaacctttacgggttcgagcacaagtcattcaacaccaccaccgtgcggtgggtccggaacgacactggcgggccgctggacgccgtcgacgaggagctcggccggctcttgcatcccacgttcagggctgccaatttgttactactaattagcaggattattttaataacttgggacttcttaattagttcttattag

SEQ ID NO: 11000 - DNA, 321 bp, Zea mays
  Peptide Sequence Number=SeqID_52779
atgggcgacggaacggaacgcgacgacggcgtaaaaggaaaaggcagcagagcaacggaagcggacgacggcgacgcgaacgtgggctcggcggggccggggggtgggaactggggaaaggctggcgcgcgcggccggggctcggctcggctcggctgtaataataaagcggccggggacgacggtgacgtctcctcggcgcccggcggcgcccacgtgataaggcattcaatggcgatgggggtaaagctgggtaggggagacgcggaaaagggaaaggtattcaaagccgcgaggggcgtcgccgtgtaccgcggctag

SEQ ID NO: 11001 - DNA, 604 bp, Zea mays
  Peptide Sequence Number=SeqID_52780
caccatgaaacgtgcattacaatccgacgacctcagacttcgaaagtccaccctccataccatacacataacagtgcaggtccagtgcactgcaatgcagcaaattagcaactcaggtcccatggtgcagtgcactgcagtgcagcagggtgcagcgagctccttctattccatcgtcgacgatgatgaagcgacccgttgcggccgaccgacgagcccggcagcatcgtctgctcccccttctggtcttccccgccttcttcctcttcatcatcgcgccgtgcgccctcttcttgttcaggacatccgcatcgacgaccccaacggcaaacacatgctgctccgggcgttcaagaacaaggcggactactgtcgcgttcacggcttcgacatcttctacagcaccgtgttgctcgatgctgagctgtcggggttctggtccaagctgccgttgctacggacgctgatgctcgtgcacccggagacggagctcctatggtgggtggactccgacgtgatttttatcgacatgctcttcgagccgccgtgggacaagtacgctggccacaacctcgtgttccctggctcggaggagaaggtgtaa

SEQ ID NO: 11002 - DNA, 363 bp, Zea mays
  Peptide Sequence Number=SeqID_52781
atggaggacacgacggtggcaaggtggacggtgagggcgaggcctgggcatagtgggggcaccgccgggaattcgtgggagcgcccccatctcctccccttttctgcagcaagcagcgcccaactgagccccctccactcgcccagccctatctccctcacggcgccctcgctggtgctcgccccccctgctggacgccgctcctcaccctggtggccgagctcttccatggatgtcagccctcatcctcaggttgcccctcccatggcgtttgttcctgcccaaccatggacgtgcccctcccttttgctgctcgccgtggacaggcttggcgccctcatcctcaggttgcccctcccatga

SEQ ID NO: 11003 - DNA, 1098 bp, Zea mays
  Peptide Sequence Number=SeqID_52782
atggagagccggctagaagagcagcaggaggagtcgggcaatatgaaaggcaaggagaatggagagcattatgaattgtcacctcaggttttaaatgaatgggctcctgtgagtgggaagtggttaggggatgtgaagcaacaagggcaggataatgagaaggggaaacaattccagtggccaatagtttggatgccagcaggaaatggttctggagaccacaacaacggatcacctgtggttactggccatcaagacaacatgatactagaaggaaaccctaaaatcactccagttgtgcccaagagcatacacgatgggaagaaacctccaagggaaaactgcaagaccattccagttgtgccagagaaagagattaatgaaaagaaggccagtacttacagaaccattccggtcataaaggaaagtgatgagaagaagattggcatgagggaaaagagggagtcaaaggaggccaacagtgctgaaatggttgaagagaacaggaaaaaaaaacacaatgactcatcagtagttaagcattcaaaattgcccccagtatgcttacgtgtggatcccttgccaagaaagaaacctggaaatgattcttctaggtctcctagtccaccaaggaagaatactgacaacacgaagaaggacgtggaggaggcccagagccagatcctggagcctaaacagtctagtacaagtaaggatatcactgtgtctgaagaggaagaagctcccacaagtaaagatggccaaaaggtccaagctgctagcactacagttggtgatcaagaaaatgcagacctgaagagcatagaggaagatcatgtgcaagaaaatgctggtgcaggaagcttgaatggatgtgacaaaagaaaaaatgaagatgggacagtgattgaaagtgaaactgcgaaagatgatgccagaacatatggagttaatttgtcagaatcagatgttgcagttcgtattcaatctgcctacagaggtaagccaacacaaaaagagcaagtggccataggtgaaactattatgaatttactcctgaagcttgacgcaatccaggtatattttcataggcaatag

SEQ ID NO: 11004 - DNA, 618 bp, Zea mays
  Peptide Sequence Number=SeqID_52783
atggccggaatacccacaacgctccatggttccaaccaatctgaccgaactgcgacggtgcccattgccgccaccccaaatgcccagtccggccatcgaactccacccaggaacagcgctatacgaagcagagctcaaagaaatcaaagagggaggtaccataccgacaatggcgcggcgcagagcactgtcggcggaaggacgagcccacggcggtccctggcactccgacgaacaatcctccgaaattccgttgcacacgcgcccgatgctccgcacccgcacgattccaaaccactggcgagcccccgcgactctcccccgagcaccgaccagcggtcaggcgaggtgtcacgagcggcggaccacaggcgagtacggctccaggcatcaattcctcactctatcggcggccacaacctgagcaagatagtggcggcgcgtggagggatgtggaggagaggaagaaggaagcagatgaggattagtctgaccggaggggtccacacggcagtggagtgtgctagtggatgccaagtggggcccgagcggcaggagcgcggtgagcgtgcggctgggcgcgatgttgggctggcgcgggcgaagcaaatgggctga

SEQ ID NO: 11005 - DNA, 1294 bp, Zea mays
  Peptide Sequence Number=SeqID_52784
caccagccgccatccccgcccaccatctccgctgcgaggaatcctgctccgctatggaaagagattgcctccgctgcgccctgattccgagtcggcatcatcgtccgcgtcttggctctcggtccttcgcccacaatgtccatggaaggagatcgagaatcccggtcctcggccaggctctaaatggaaggagatcgaggaatccgcctctgctgcgccctggcaccctctacgaccgccgcctctcccccgcctgcccgcccgcgagacaatcgccatcgtccccctgccccgcgccgctcgcgatgaccccctcccccgcgattccgaggtcttcgcgacccatggcgtgtcgctctacgccgacctcctcctccatctggtaagcgaccacctcctctgtctggtaagcttcagagatccctgtgtgcccgagatccagacagtgctcttgttcaccgctgccttcatcgtctcctcgccgacggcctccgcggctccaatccgacctccctggaaccacatgatgagcttgtattggtcggtgtactacgccgaggggattgggaccggcagcggcagccaggagtggaaggccaacctgagctgggtgctcgccgccctcgccccccgccggagcagcagcaggtgcctcatgtcgtccgaggcgtcgaaggtggcggtgccggagtcggtgctccgcaagcggaagcgcgaggaacagtgggccaccgagaagaaggagaaggctctggtcgagaagaagaagtccatcgagagccgcaagctcatcttcacccgtgcaaagcaatgcttgatgaaagagaacccggatatgttatctgtgtgcttatggggatgcttggagcaggagaaggaactggtgcagcttaagcgcgaggcccgtttgaagggtggtttctatgtcagtcttgaggcaaagctgctctttgtggcgtccatagtaccgtgttctaccgcgaccgtcctgtcctccccacccgcccgcaatcagcgctccgtcgacaccgcgccgccacaatcaacgcggattcgcgggccctcctccccaccgccgcgcaacagatccgcgggcgttcctcccaccgccgccatccgcaacctcaaatcctcccagatctccttccgctctgggaccgtggcgttggggcgcgtgagccacgagctctcggtgccgccgtcgccgtccacgcggcagaggaaccctgccagggtctgcgcgaaccgctggcggtggagcgggtccgtgacgaggccgcaccaggccttgtga

SEQ ID NO: 11006 - DNA, 252 bp, Zea mays
  Peptide Sequence Number=SeqID_52785
atggcgctggacaagctcccgtgcgacgaaaacgctggtgggcggcgctgtcgtcctggcatacgtgcccgtcttggagcggcgacggaaggtgcacgaagacaacagcagcaccaccaccgtcacagacaccacgatttggaagttggaacatggccgttggcgagctctgcctcagtgccagtgcgggtgaccctaactgcatgcgggcggtcgagctcggtcatggttcatctgaactgtgctgaatga

SEQ ID NO: 11007 - DNA, 222 bp, Zea mays
  Peptide Sequence Number=SeqID_52786
atggcgggcggaattgagctcgccggagctaaggagaggtggctggccggtgaagggtacgtggccccaaaagatgatgttgacctccctgttgacattggggaaaggctaggcattgcccccttgctgctgaggtggcaggtcctagtctcatcgaggaggtggtggaggaagcacatggaatggttggccttggacgatcatgttagaaatatgccctag

SEQ ID NO: 11008 - DNA, 360 bp, Zea mays
  Peptide Sequence Number=SeqID_52787
atgtgggtcgacgaagagggtgtcacaacggcgttctacagagcaggtgcgtgttccggtgaaaggctttggccgaacttcaattggtcggtactgagagcaataggaggctacaaacgagcaagaacatggagcaattgggaagttactaacccgaagagcgttgaccacggtggagttcttcacggcggagttaagaacagggaggagggaatttgtgggctgcgtgagttctccggtgaaattgagctgattgctcagttactgaggagtaggacagtgtcgatgactgtagcaaaatggttcgtgccgatggcacgaggaacaatagacagggtttacaggttcgggccgctttga

SEQ ID NO: 11009 - DNA, 486 bp, Zea mays
  Peptide Sequence Number=SeqID_52788
atgggcaagaacaacaaacgcaaacgtgagccgactcctccgtcagaggactttggcgactcggaatactcagaggaggagttctcctctgagtccgaggggtctccggctcccgtctctcccccagcgtcgtccgatgactcggacgactctcaggggattgccgcgaaggtctggacgtacatccgggccgtcgagcgctccgggctcgagggctcggatgagtcggagtactcctcggatgaggaggactcggacggcgatggcgaggacgaggacgacgacgacgacgacggtgacgacgacgatggtggcgacggtgacggtgacggcagcggcagcagcaggggcagcggtggcggtagcagggacggtgacggcggcggcagcagcaggggcagcaaccggggtggcagcagcaagggcagcagcaagggcagcaccaggggcggcggcggcggcaacagcaacagggccagtggctag

SEQ ID NO: 11010 - DNA, 255 bp, Zea mays
  Peptide Sequence Number=SeqID_52789
atgggggcagcagagagggttgagttgaattcagagtttcagttgaacatggcctcaacgtcgcagaacgccgccgggaaccacctaatcatcgatcgctcgattcacgacttctccgatcaaaatttatgtgagcaccgtgtccttagtgctcccctggtgttttccaagtcctttgttagaacgctaccatcacggtttctcggttgtgggttcgctagatctagagcatcgtcgtggtcgcaggcaagataa

SEQ ID NO: 11011 - DNA, 153 bp, Zea mays
  Peptide Sequence Number=SeqID_52790
atgggacctcgagtggtggatgattgctcaccggaatcccaggggtatcaccggccgtaccatgccgttgccagacttcccctcgtctacaccaccgatcatgatccaacaactgagatgaatatgtaccccttcgtgtggcaaacttcataa

SEQ ID NO: 11012 - DNA, 498 bp, Zea mays
  Peptide Sequence Number=SeqID_52791
atgtcgaggagagccgcagcagcgctcgcgctcgcgtgcctcgccgtgatggcggcggcactggcggacggcgcgctgctcccgtggttcggcgaagggaggcgcgggggcgacgaggccgcggcggcggcggcgtctccgctgtccgggcccggggtgggcctcctggccgacccgttccggatcctggagcacgtccccttgggcttcgaccgggacgacgtggccatggtctccatggcgcgcgcggactggcgcgagactcccgacgcgcacgagatcgtgttccgcctccccgagaacgccgacctcgactccgtcggcgccagcctcgacaacggcgtcctcaccgtgcggttccggaagctggcccccgagcaggtcaagggcccgcgcgtcgttgggattgccgggggagacggtgacggcgacgcgaagaagagtattggcggcggcgccggggatggtcatcatcagaccaagaaggtggagctctga

SEQ ID NO: 11013 - DNA, 357 bp, Zea mays
  Peptide Sequence Number=SeqID_52792
atgaccataagaacccatggatatctcgaccttgacaaaggaggtacccaaagggtttcaaactttggtctcattggttattctaatgccgtttatgtcggatataaggttcataagaatcaaattgaggtttcaatgcaacaaatagctcgaatcaaggcttgcacgggatacaacacgtgtaaaattacatccatgccctttacatttgctaatgactttaaggaccttcaaaagacaaaggcccccaacaggaatgtacttgagcaccttagaaggactagaaatccagattttggaaaaggtgcatttggaaccaagtttgagccaaaacatgattctaagttgggggtttga

SEQ ID NO: 11014 - DNA, 546 bp, Zea mays
  Peptide Sequence Number=SeqID_52793
atggccatgtccttattggactccaacatgatacatggctcaaggagccaaaagatggtcagattgagaacgattttctatcaagatgaggaggaggatgacatgacacctctcaatacaacaattggttataagttgttaacacgtagggccttagcttccccaactatgcttgggtactcggagtcagccatcaagaatgccatgcatccatgcccaccgtctcaaagcgtccttggccacgatgatgaggcaaccatgaagacagaggatctacctcttgttagtgtttcgaacctctctccgacaagtaaatttattgtgcgcgttctgggcctcggagggtgtgcacggtgggcgcaagatttatactggttcaggcagaacatccctacttccagtcatcagcggcttgcgctaccggcaccattaatgatcaaaactcgtagtagggattacaagtgggcgagagagggaggagaggctaccaagtctcttatcgaggtggaagtggagctaagagctacagagtggagtcctagttaa

SEQ ID NO: 11015 - DNA, 471 bp, Zea mays
  Peptide Sequence Number=SeqID_52794
atggagagggggagcacagacatgggagagaagggaaggacgaactcaccaagggaaagctcgcagatgaagatggcggcagccggcggtggaaggagccctgcaaatccgtcatggatcgcgctgccgccatcgctgacagcctcacacccactcgcgtctggccactgggatgagttccataactatgaattcgtgggtcgattccaggccgggatcgaaaggtttcaaagggattgggccaggttcacatacacgtgtgggctaaacaaacacttcttttttggtgggctggtatttgatccatacctgaataatacccatggatcaggtcgtgatcccagccaattccagcccaaccaaacagggcctaaggtggagatttcgatgttgatgatccaaggcttcgaacaaatgagtcctcacaatcactatatcatgactctattggttatcacccatgtcatatag

SEQ ID NO: 11016 - DNA, 468 bp, Zea mays
  Peptide Sequence Number=SeqID_52795
atggaattgctagtcagaaatcagaatcacccaccgtggattcttgtcttccccaaggccacgccgagaaggactatcgtgaacctctgggcccccggacctccccaagccaccgcactggcacgccgctatgtcgacgtccactcgcacgggcagacgagagactgcgagggctcgaacgacgatttgagtggcggcgtggatcggagacggcggagtagccgcctaggatttggggtgggaggggccgaccgcttggctcgcatggaggcgggtactggaaagacgacacaaaaacaggcaaccagctatcgtgcccacggacacaggaattcggaaccggcgtcgtggacacacgtcaagagaaatggtcctgaaagtacacgtgaggccgtgaagcccgtagagggcgtgaaatcccttcaggttttaatagaaaagatgtggttttggctgaccaacaagtaa

SEQ ID NO: 11017 - DNA, 753 bp, Zea mays
  Peptide Sequence Number=SeqID_52796
atggaggcgttaccggagagaaatcagggagagggaaaaggaaacgggtgtccgtttgatgctaccattacgcaggggcgcgatacgtcaagggaaacggcggttggattgctcgagctcctggcgagtcgctcggtcgggcgcggctgggctcggttgatggcattttgtggtgttacatgcggtcaccacgcagcacctcgagccctcgttggaaacgccttccgacaaggtttctactggccaaccgcggtggctgacgccactaggattgtacgcacctgccaagggtgtcaattctacgcaaggcagacgcaccggcctgctcaggccctgcaaacaatacccatcacctggtcgtttgctgtatggggtctggacctcgttggtcccttgcagaaggcacccgggggcttcacgcacctgctggtcgctatcgacacattctccaagtggatcaaggtccgacccctaaacagcatcaggtccgagcaggcggtggcgttcttcaccaacatcatccatcgctttggggtcccgaactccatcatcaccgacaatggcacccagttcactggcaggaaattcctggacttctgcgaggaccaccacatccgtgtggactgggccgccgtagctcaccccatgacgaatgggcaggtagagcgtgccaacggtatgctcctgcaaggactaaagccgaggatctacaacgacctcaacaagttcggcaagcgatggatgaaggaatga

SEQ ID NO: 11018 - DNA, 228 bp, Zea mays
  Peptide Sequence Number=SeqID_52797
atgcctgtctccgccactgagcgctgcgtcgatagcctcaacaacaggttcaggccaatctgggggcttacggcggtcgccatcttctccgtcgacgacacctcatcgtccgctgctccacgctgcgctttgccttctttgtgtggaggaagcttctgctggaaggagcaggccgcggcgccacgccgtgtgactcggcctaacgtgagagttactcggccaaattga

SEQ ID NO: 11019 - DNA, 1338 bp, Zea mays
  Peptide Sequence Number=SeqID_52798
atgcctttccctccagtcgccgtcaaggagatgagcagagaagccaggaagacgaagtctcggtcctccccttcgccttcgtcctggctcgaccggtccatgaagttctactacccgtcttccacctcccgcaagagcagagcccaggcagcgccagccgcagcgacagaaggcaagagcactgacggcggcgacaagccgagcaacggcagcagcggcaagaagaagaagaagaagaagagaagcataagcatcggtcggagcatggcgtgcgggagctccatctgcagcacgagcaccaaggagagctcggtgatgagccgggacagcagcagcggcgcctccagcaggtcgctgaggtctcccaacgttgacgccgtgtacgcctcggccgccgccgccatctccgccacgtcatcattcagctcggtcaccaccacggcggcgaccaccgtcacgtcgtcgacgtcgtcgtcctcgccgctgtcgtccgcactctcgtcgccgctctcctccatcgggagatccttcaggggcgtgcagatcaggaggctctccggctgctacgaatgccgccactccgtcttcgaccccagtggcttcgccgccagcttcccctgcgccgactgcgacgaggtgttcagcaagccagagtcgcttgaactccacagagcaaccaggcatgcagtttcggagctggcacccgaggacacgagcaggaacgtggtggagatcatcttccagtccagctggctgaggaagcagacgccgccggtctgcaggatcgaacgggtactcaaggtgcagagcagcgacaggaccgtgaagaggttcgagcagtacagggagagcgtcagggagagggcgcgcagcgatgatcaggggcagggcaagaagaaccctcggtgcgtcgccgacggcaacgagctgctcaggttccactgcgccaccttcacctgctccctcggcctcgccggcagcaccgcgctgtgccgggcgccgtcggcccagtgcatgctgtgcagcatcatcaaggagggtttcagggtggacggtgatgggaagattgcgacaatggcgacgagcgggcgggcccacgacacggcccagctggtgctgccggacggcagtgacaagagagcgatgctcttgtgcagggtcgttgcagggagggtgaagaaggcgagtggcgagaagtgctcagaggactctactaacttcgactctgtcagtctcagtcccagcacggaaggggtctactcagatttagatgaactgtttgtgttcaaccctagagctatattgccctgctttgtggtcatatacagtggctattaa

SEQ ID NO: 11020 - DNA, 450 bp, Zea mays
  Peptide Sequence Number=SeqID_52799
atggacttcgccttgcccgaccccagggctcggactcaaccacgactcggaagacgatggactccgcctcgcccgaccccagggctcaggctcaacctcgacgctggacgaaggactccgcctcgcccgacccagggctcggacacagcctcggcctcggaagacggtctccgcctcgcccgacccagggctcgggctcaacctcgacgctggacgacggactccgcctcgcccgaccctagggctctgacacagcctcagcctcggaagatggtctccgcctcgcccgacctagggctcggactcaacctcgacctcggaagacggactccgcctcgcccgaccccagggctcggactcaacctcgacctcggaggaatcgccacctcgcccaaactcaggcccggaccagccacgtcgccaggggggccatcattactctgcccctag

SEQ ID NO: 11021 - DNA, 474 bp, Zea mays
  Peptide Sequence Number=SeqID_52800
atggacaagtacgaggctgttcgggacatcgggtcgggcaacttcggggtagcgcggttgatgcgcaaccgcgagacccgagaactcgtcgccgtcaagctcatcgaacgaggccaccggatcgacgagaatgtgtaccgcgagatcgtcaaccaccggtcgctgcggcaccctaacatcatccagttcatagaggtgatcctaactccaactcatcttgcaattgtgatggagtatgcggctggtggtgaactatttgatcgaatcgtagatcgtgggcgatttagcgaggatgagaccaggtatttcttccagcagttgatctgtggagtgagctattgccatcacatgcaaatatgtcatagagatttgaagctggagaatgttctcttggatggcagcccagctccacggcttaagatatgtgattttggctactccaaggttgtcactaatttctcgttgtattggtag

SEQ ID NO: 11022 - DNA, 597 bp, Zea mays
  Peptide Sequence Number=SeqID_52801
atgtccggtgcaccagaggactccaacgcaaactcgccaccttcgggaatttccagaggcgactccgctataattcaccggactgtccggtgtacaccggacagtgtccggtgcgccaaggaagagcggtctcaggaactcgccggcttcgggaatctccaacggctagtacgctataattcaccggacatgtccggtgtacaccggactgtccggtgcaactccggagcaacggctattcggcgccaacggctacctgcgacgcaattaatgcgcgcgcagcgcgcgcagaagtcaggcgcgcccatactggcgcaccggacaaggtacagtgcatgtccggtgtgcaccggacatccaggcgggcccacaagtcagaagctccaacggtcagaatccaaaggcagtgatgacgtggcgggggcaccggacatgtccgaccggggggtccctgggccgacgagtgaatgtcgccgcgtgccccagcccagatgggtcgagcgcgagggcgagcgcgaaggggggagagcgaggcggccggagaccgacgtgagagaggtgggaatcccgcggccttcgtgttcgtcccgcgcctag

SEQ ID NO: 11023 - DNA, 408 bp, Zea mays
  Peptide Sequence Number=SeqID_52802
atgaagaagaccagttcccctctcctgatcgtcctgttcctcacagcagcagccatggcggccgagccggagaagcaggcggcccccgcggcacaggagacggccgtgcacatcgtgtacgttgaccgccccgaggacgccgaccctgaggagttccacatccgcaccctcacccccgtcctcggcagcgaacagaaggccagggacgcagtgctctaccactacaagaacgccgccagcggcttctccgcgaagctcaccccccagcaggtcaaggatctcaaggcttttctaagaacctggttgtggggctgtgaggagaatccgagaaggataataattaatcaaagtgattacttctccacattattgtgtgcacacaaaagagtgaaggaattggagaactaa

SEQ ID NO: 11024 - DNA, 225 bp, Zea mays
  Peptide Sequence Number=SeqID_52803
atggcgccgggaggccctcacaccccctcatatgcaacaccgatggagataaaattgttcaccacgggggctcatcacctcaagaatgtaggccatatagaagaccaccatgcccacgctaatgttgactccccatctgtgctcgtcatgccagcgggaacatgcgaagactcccagatctcgaggccagcgatgatgaggacaggcgggggcctaacgcactag

SEQ ID NO: 11025 - DNA, 525 bp, Zea mays
  Peptide Sequence Number=SeqID_52804
atgcaggcggcatgcaaccgcaccaagggggtggaccctttcgacttcgacgcgtccagcatggaggctcaggcccacacgtcatgtaaccggcgcgccggttactacgtgcgggaaactgcaccgccacttgtgccagtaccgcgccttctcgactgcagaaccgatgccgcgactcgaggcaaccttgcgcatggcctgatagtgccaaccgagcacatcggtcacggggaccgggaaaggggatactccgaaagggatccttctccgcgaaggaagcgggccccgagcccccctactgatcagaggcgcccaggctccaccgctcggccgtccaccgccaagcgcccaggctcgctccccgctcggtcgtcctctggtccaccgctctacggctctacgcgactacgcgaccactggtccaccgctcggcctccagcagatccacggcgagcagatagcacaggcgcgcgcacagcagtgacggcgagcagtgacggcgcgcacagcacagccgccgcgtag

SEQ ID NO: 11026 - DNA, 342 bp, Zea mays
  Peptide Sequence Number=SeqID_52805
atgcaggtgcttgatgcttatcaagggccacttgctggggtatgttcggagactaagaaggcattgagtaccgcactagcacctgtcccatgcgacagcgaggaaaaggaggatgactctgaattttgtgtgattacgatagatgatctgttccctgaagatgcaaagcaaccagaaactgtggataccaaggcaaagcaaccacaaaccacgggtctgaaggcaaatctgccagaaaacgcagatcccaagttttatgtagagctcagagtcatgcggattgcaaattcattttttattcctcttatgtggcttgcaacagctgcaaatatgatgttatag

SEQ ID NO: 11027 - DNA, 1371 bp, Zea mays
  Peptide Sequence Number=SeqID_52806
atggcgagctcttcctcctgctgccaccacgcacctctcccgctccgcgccagcgaggcgagccgaccaccgttgcctccccaaagctattctttggatgacaagttacagggagagctagatgatacacagggagaacagagaaagctagaaacagttggtgcgtttcagaaaataccaatggtgatgcctgcaactgatatactaatgtcagcacaaaggaaatctagaaacgtgccaccaacaaagggtatagcaaatattgctaagcgtgaaaggaacaaaggtgcgaaacagcttgatgccttaatgaaagaactttctgtaccgctgagaacatacacagaaaacttcccaaagaggagagatttgcatccttatgagaggtctctcattgagttgacttttggcgagggttattatgagcaggttctaggacgtgtagatactctcaggaaaaggattacttctgttggaaagcaacatgcttcagtctgtgctaagtcaacaacaaaacgtgaagcagaggagcgcctcactgagggcagaaagaaactcgaagaggctttccagcatgggaagcacgccattgatgatttagtaaatgtagcaaaggctttgcgttctatgcctgttgttgatctacatattccaacactatgtctagttggatcacccaatgtagggaagtcatctttagtccggatattatcatctggaaaacctgaggtctgcagctacccattcacaacaagagggattctaatgggtcacattgtatctaatcaggaacgttttcagtggcacaacaatcaagtgaagcacaactcaagaggaggccaaggcgggcacaatactgctcatcgtctcgccccaagccttaggcgcttaaatggtaaaaaggttacataccatcgtagatcgccttaccgtcgtaacaaccatggtgtagctttcatgtatgacagaaataacatagagcgattgacactagctgtcctttcttatctacctatcgctgtcctgtatgtgcatgatctatccgaagactgtgggacctcagtggccgatcagtacatcacgtacaagcatattaaggacagattcggtgaccgcctatggcttgatgttatttccaaatgcgatcttttgggaaagaaagagcccataagttttcacgatgctgatgaagatgtagcacggtacagaagattggggccagaaggcgccctccaagtatctgtgcagaccgaaatcggcgtcaaacaggttagctattctcgtgctagcctgatactgagcagcgactgcttgttgagtctacttattgcttatcatagcgacttacaggcccttaagaatctaggctaa

SEQ ID NO: 11028 - DNA, 540 bp, Zea mays
  Peptide Sequence Number=SeqID_52807
atgaccgcgtcaaaaaaggtgcgccacgtcattcgatttcgtatccttttcctcttcctctttctctctcttacaacagggaccgggaaaggggataccccgaaagggatccttctccgcgaaggaaacgggcctcgagcccccctactgatcagaggttccaaggctggcccctcggaagggttcaacagccgcctcagagcactcgggctccgcgcccactactggtcagaggttcgaaggccggcccctcagaagggttcaacggccgcctcaagccactcgggctccgcgcccactactgatcaggggttcgtaggctggccctcgaagggttcgacagccgcctcagacgtagagcgagggataaccctggcttgggcaccagcagcagactacaccaccgcacggtcacagggcacagcgttgagtggtgctgaggtggtcgatgggggagggaccaaaggaggacgcgtcggcgcagggcatccgccctcgcctgtgttcgaagtccagagatggcggctgaaagggaaatag

SEQ ID NO: 11029 - DNA, 2931 bp, Zea mays
  Peptide Sequence Number=SeqID_52808
atggtccccgctgccggaggcggcagggtgtgggcgaacggcgccccccgcttcggcgacatggtctgggccaaggtgaagtcgcacccgtggtggccgggccacatctacagcgtcagcctcaccgacgacgaggaggtgcaccgcggctaccgctacgggctggtcctggtcgccttcttcggcgacaaaagctacgggtggttcgagcccagcgagctcgtccccttcgaggagcacttcaccgagaaggcggcccagggcggcagcacccgcagtagtttcgccggcgccgtggcggaggccgtcgacgaggtagcccgtcgcagcgcgctagcgctgctctgcccgtgcaagagccccgacgccttccgcccccaccccagcgacggcaacttcctcctggtcgatgtcccggcattcgacactgacgctgactaccaccccgaccagatccaggccgcacggcagcggttcgtgccgcggaaggcgctcgactacctgctggacgccgccgtgactcagcgggacgcggcggaaaaagcggcgcgcaccgtgcctgggatggagatggccgcgctgttctcggcgtaccgtcgcgcagtgttctcgccgatagacaacacctacgcccaagcgttcggggtggatcccgagctggcgcttgctgccgagcagaaagccgcggcagagcgagctcaacgagcgcggccgctcaaagggggccccaggaagacggcggaccaggccacaccggcggccggccgccggaggggaggcgccggcggcgccgccgccaggctcatggagaagatcgtgcccggagcgcccgccatgaagaccaagtccagcaagaaggaccagtacctgctcaagcgccgggacgcgcccgaggcctccgcacacagccagccgcagctcccagacgcgccgccgccggcacccacgctcgcggcggaggacggaccacctggcttcccggccagcggcgacccgcccacaccgccgctgcccgggagctccgtcgctgacgaggacttcatgctgcagaggcgcgtcccgctcgtcgatgtccctcccgccgtccaggcccagccgagcgagggccccgccgcgcccaagaacgcgaccaagctcaagaagccccgcaagcgcgagcgggaggaaggccccgatgcaacccccgactccgcggacgccgccggcgaccccaagaagaagaagaaaaagaagaagctttccgacgtggacggcgctggcggcaaggtcgccttcgtggttgagggccgcgacgtgcttgatctgacgcaggtactatcggacatccggaacctcccgctggctcccttccatggcgccgaacgtctcatctctgacgccgctcgctccttcgtcctcgcgttccgctcaaaatactacaagaagagctacgagaacgacccacccgaggagttgaagagcctggacaagcccagtgccgccgccactgacggccagtcgcccaagaagaagaagcctgccccgaggcctggcgcagggaacgaccccaccaaagccggcgtcaagcgcgggccatcggaccgccagggggagctggccatcaagaagaaagccaagctcgataagatcaaggtactgtccagtgagaagaaggccgccggtctggagcagaaagacacggcggcggcggcggcgcagcagcaggcacgggctgcaggcgccaaggacaaggccgagatgggcgcagccaagaagaaggagccggcgtcggctcgcacagtcaggaccccgtcgccgacagcgctgatgatgaagttcccgctgaacagcacgctgccgtcggtggcgtcgctcaaggcgcggttcgcgcgcttcggcccgctggacgtggacggcatccgcgtgtactggaagtcccacatgtgccgggtcgtgtacaggttcaagttcgacgcggaggccgcgctcaggtacgccaaggccaacgccatgttcgggcaggtggacacgcagtaccacctccgcgaggtcgaggcgggggcgggccgcgagccgctggcggcgccggaagcagccccgcagcagcgctccgagctgcggctcatggagaccgctgcgttcaggcccggcacctccggcaacggagctccgctgcccatgtccagggccggggccgcgccggcgcgtccggccgtgggggtggggcagccgcccaagtcgatcttgaagaagagcaccgacgagggaagctctgggaccaccagggaggtctcccgtgtgaagttcgtgctggacggcgcggacggtggcacgctcgcgccgccgccgagcgtcggcggcaatggcaatggcgcagacgggggctcatcaatggtggccaaggccgctaaatccgtcgggttcgctccttcccaggctctgcagccaccaccgcgcacgctgcagccgcccatgcgcccggcgcaccagcagcctccgcgcgccgccgtcacgcagcagctcccgccgccgccgctgcctcagcatctcccgtaccaccagcacccccgcggcgccgacgggactccgctggcccctcccccaggtcagctgctggcatacccgcctcgtggccacggcgagggcccctccgcgcttcctgggctaccgccgccgctgccgtaccagcctcgccccaccggcttccccggtggacagcagctggggtacccgcctcgctccggtgacaacctgccactcctcgctggacagccgcagttcccgcctcgtcccagcaacgccaaggctggcagtgagggtccagcgtggaggaggggggagaaggagttcaaggaggaggtgtggaggctgatgacggggatcgccaagatggtggagcctctcacggacaagaacggcttcttcccctaccacctgttccgagcgcagtga

SEQ ID NO: 11030 - DNA, 387 bp, Zea mays
  Peptide Sequence Number=SeqID_52809
atggccaaatccttcattatagcccttgaaggcccaaccctgacttggcagcaggagaaagagacccttgaactggcccctcggggggcaagtgttggggcgaaggcggattgccccatcgctcggtacatttataacaagagggataagtcaggacggagcggaagtgaaggccctaagacggagggagcaaaggccttaaggcggagggagcgttcaaggcaggcgaaggctctgccggttccttgcgcggtcaggaatgcgaaggtggcccttctcgctgagaagaagggcaagacagccctcgttgacgacatccctcataaggtcctcgaggatgaggcaatcatcagcaggagacatcaccaagagaatccacccacctag

SEQ ID NO: 11031 - DNA, 165 bp, Zea mays
  Peptide Sequence Number=SeqID_52810
atgtcgcgcgcgttcgacatctactatatcatggactgtggcgtcatctcggtgccagaggcgcgggacgtgctctccaatcatgagactatagaaattgtgtcatatatcgaagtctgcataaaagctgatggttgcaatgtagtggtgaaacaactaaattaa

SEQ ID NO: 11032 - DNA, 240 bp, Zea mays
  Peptide Sequence Number=SeqID_52811
atggagcagatggcgaatgatgaggaggtcgaagactttggggcttggagattggagagcatgaagcctttggcagagggtgcgggggcagggactgaggaccagccggtgccgctaactggtgttggcgaaggcgaccctgtggccactgtcgcgctgcctgaagacacttcggtggcggtcgcgccggctgccgaagaccctgcagtgacgtccgaccctgcgcaagtggcgggatag

SEQ ID NO: 11033 - DNA, 759 bp, Zea mays
  Peptide Sequence Number=SeqID_52812
atggaggattactgggcgaaagcttgcccagtacattcagaacttgcatattctgcggctcccatcctgaagcgcataataagacaagtaattgtcaagccaagaagctcatgtgttcataaagagagccgaagtgaccgcagtcacttcgccgctccactgactggcctgacagaaggacagcgccgcctgcgccgctccgattgctgtgtcgctcgacagagtgaggctgacaggcagtcaggcccagcctcaggcaccataggaagctccgcttcgcccgacccagggctcgactcgggctcagccccggaagacggcaaactccgctccgcccgacccagggctcggactcgggctcagccccggaagacggcgaactccgctccgcccgacccagggctcggacttgggctcagccccagaagacgacgaactctgctccgcccgacccagggctcggacttgggctcagccccagaagacgacgaactccgcttcgcccgaccccagggctcggactcagccctggcttcagccgacggtctccgcctcgcccgacccaggggctcggactcaacctcggccacagaagacagactcgacctcgacctcggaggagcctccacatcgcccgacctagggcgcgggccgaccacgtcaacaggaggcgccatcattaccctaccccaagctggctcaggctacgagaaacaagaccggcgtcccatctggctcgctccgccagataggcaatga

SEQ ID NO: 11034 - DNA, 1258 bp, Zea mays
  Peptide Sequence Number=SeqID_52813
gaaggatacatatggtgtattttcagagcctgttgatcctgaagaggacgatgtgttcctgataagcaccaacgcgatgtgctacaattcaccagatacaatatactatcgacaggcacgaggtattcaagagatcgctaaaaaggattttgagaatcttaggcaagatagtgatgccagtgatccagaaccggaaccagaattggagctggagccagaaccagaagaaccaaagccacagcctcgcaggggcaggcctccaaacaagaacaatgccaaacagaaagttgggaagccaccaacagaacgtgctactgcagatttttctggtgcaacgcttgctactgccgcaaatattggacgccatgcacaggcagatgttgatctgtcacgaagagcaatggataaagcgatgatggatatgctgagagcttcttttgccaatagaaggaatgagcataattggtctggcgagcggaaatttgaaagatttgaagagtgctcaggttttaagctatctcctttttctcgttctttcaaaaattgtcctttgaagggttataggggtacatggtccgcaaaaatggggaagaggccaattctgatggaagatagtcgccgaagcacatattgtgagactcaaccatccaattcaatatatgagctgccggttggggttcagttacagcagtcctattcccgcagcttggcacgatttgctgcacaacttggtcctgtgtgctgggagattgcatcaaggcgaattgaacgaagccttgctcctggaacaaagtttggtcgcgggtgggtaggagatggcgaaacaccaaactcttttcagccacccgtactagctgcattttcagaaacaacgacaccgcaagaccgtacagcagcttcaggtgagcagccatgcccatctatgagcagccctcctgccaccgaggcctgtgctggcaacgacagaagccatttggcgggatctcagccagatgctacgccatatgcttctaccagcacaacgcagaggatgagttccgaagcattagcaagccagcaatgtggatcactaccacaaatttcgataaaccgagctgaacgtacccttgagatgatgaagggcagccccaataatcttcacggacacccaggcatgcagcaaactgcgaatggtttcaatgctgttccaggaccaatgatgttcccacatgtggctcaactggtggtgaatcagatgcagacacatacggctgattga

SEQ ID NO: 11035 - DNA, 405 bp, Zea mays
  Peptide Sequence Number=SeqID_52814
atgggcgtgcctgacttctgcgcgcgctggcgcgcaattaatgcgcttgcagcacctcgagcccttgtcggaaacgccttccgacaagatttctactggtcgacggcggtggccgaagccactagaattgtccgcacctgcgaagggtgtcagttctacgcaaggcagacccacccgcccactcatgccctacagacgatacccatcacctggccttttgctgtgtggggtctggacctcgtcggccccttgcagaaggcacccgggagctacacgcacccctgggaagggccattcgtcatcgccgaagtcctgaagcctagaacgaacaagctggccgacagtcaagacgaggtctacagcaacgcttggaacatccaacagctacgtcgcttctacccttaa

SEQ ID NO: 11036 - DNA, 2040 bp, Zea mays
  Peptide Sequence Number=SeqID_52815
atgcccggcataccgagggatgtcgccgagcactcgctggatattcgggccggagcccgacccgtcaggcagcctctgcgccgattcgacgaggagaagcgcagagtgataggcgaggagatccacaagctaatggcagcagggttcatcaaagaggtattccatcccgaatggcttgccaaccctgtgcttgtgaggaagaaaggggggaaatggcggatgtgtgtagactacactggtctcaacaaagcatgtccgaaggttccctaccctctacctcgcatcgatcaaatcgtggattccactgctgggtgcgaaaccctgtccttcctcgatgcctactcagggtatcaccaaatccggatgaaagagtccgaccagctcgcgacttctttcatcacgcccttcggcatgtactgctatgtcaccatgtcgttcggtttgaggaatgcgggcgcgacgtaccagcggtgcatgaaccatgtgttcggcgaacacatcggtcgcacagtcgaggcctacgtcgatgacatcatagtcaagacaaggaaggcttccgacctcctctccgaccttgaagtgacattccgatgtctcaaggcgaaaggagtcaagctcaatcccgagaagtgtgtcttcggggtgccccggggcatgctcctggggttcattgtctccaagcgaggcatcgaagccaacccggagaagatcgcagccatcaccagcatggggcctatcaaggacttaaaaggcgtacagagggtcatgggatgtcttgctgccctgagccgcttcatctcacgcctcgacgaaagaggtctgcctctgtaccgcctcttaaggaaggccgagagtttcgcttggacccctgaggccgaggaagctctcgggaacctgaaggcgctccttacaaaggcgcctatcttggtgcccccagctgatggagaatccctcttggtctacgtcgccgcgaccactcaggtggttagcgccgcgattgtggtcgagaggcaagaagaagggcatgcattgcccgttcagaggccagcctacttcgtcagcgaggtattgtccgagaccaagatccgctacccacaagttcagaagctgttgtatgctatgatcctgacaaggcggaagttacgacattacttcgagtctcatccggtaactgtggtgtcatccttccccctgggggagatcatccagtgccgagaggcctcgggcaggatcgcaaagtgggcgatggaaatcatgggcgaaacaatctcgttcgcccctcggaaggccatcaagtcccaggtgttggcggacttcgtagccgaatgggtcgacacccagctaccgacggctccgatccaaccggagctctggaccatgtttttcgacgggtcgctgatgaagacgggagccggcgcgggcctgctcttcatctcgcccctcgggaagcacctacgctacgcgctacgcctccatttcccggcgtccaacaatgtggccgagtacgaggctctggacaacgggttgcggatcgccatcgagctaggggtcagacgcctcgacgcccgcggtgactcgcagctcgtcatcgaccaagtcatgaagaactcccactgccgcgacccgaagatggaggcctactgcgatgaagttcggcgcctggaagacaagttcttcgggctcgagcttaaccacatcgctcgacgctacaacgagactgcggacgggctggctaaaatagcctcggggcgaacgacggtccccccagacgtcttctcccgggatatgcatcaaccctccgtcaagatcgacgacacgcccgagcccgaggcaccctcggcacagcccaaggcaccctcggcacaccccgagggcgtctgcggttcagcccgaggtaccctcggcccccgaggggcgaggcactggacgtcgaggaggagcagagcggggccacgcctgatcgaaattggcaggccccgtacctgcaatatctccgccgaggagagctacccctcgaccaagccgaggctcggcgggtag

SEQ ID NO: 11037 - DNA, 258 bp, Zea mays
  Peptide Sequence Number=SeqID_52816
atggagcctggcggagggacagctgtcggagcggttgagtccttgctgacgtcctcttgcttccgtaagggggctgagagccgccgtcgtcacagagttgggcgatgtggaggctcctccgaagccgaggtcgagtctgtcttccatggccgaggccgagcccctgggtcgggcgaggcagaggtcgccggcagaggccggggcggagtccgagccctagggtcgggcgaagcggagttcgtcgtcttctggggctga

SEQ ID NO: 11038 - DNA, 2091 bp, Zea mays
  Peptide Sequence Number=SeqID_52817
atggagtggtcacgtcccgcctgcatcccagtcacagccgccgccgtcgtcctcctcctcctcctcctgccgcgcttctgctcaccggccggcgacaagttgacccccggggagtcgctgttgcccggtgagaccatcgtgtccgacggcggcgccttcgcgctgggcttcttcgcaccgtccaatgccacgccaggcaggcagtacgtcggcatatggtacaacaacatccccgtgcagacggtggtgtgggtcgccaaccgggacgcgccggtcaccgtcggcgacgcgcgctccggcaactcctcgtcgtcgtcgtcgtctgcgccgtcgcttgccctggctaacggctccgcctccaccgacctcgtcttgtccgacgccggcggcggtcgcgtcgtttggaccacgaacaccacgagctcgggtactggttcgaccgccgtgcttctcaactccggcaatttcgtcctccggtcgccgaacggcaccacgctctggcagagcttcgaccacccgacggacacgttcatcccggacatgaaggtgggcctgcgctaccggacgcacgacggcgcgcgcatcgtgtcgtggagggggcccggcgacccgtcgccgggtaccttctcgtacggcatggacccgcgcacgtcgctgcagatgctgatgtggaacgggacgcgcacctactggcgcagctctgcctggacggggtacatgaccgtcagcaggtaccacgccaccaccggcacggtcatctacgtggcggtggtcgacagcgaggacgagatatacatgaccttccacgtcaacgacggcgccccgcccacgcggtacgtggtcacgggcgccggcaggttccagctcctgagctggaaccgcgacgcgtccgcgtggaccacgctcgagtcctggccgtcgcgctcctgcagcccctacggcagctgcggcgcctacggctactgcgacaacacgctggccgtggcgacgtgcagatgcctcgacggcttcgagccggcgagcccggcggagtggagcggcggcgtgttctcgcgcggctgccgccggcggagccagcagcaggcgctggcgccgtgcggcggcgaggacgacggggacgcgttcttggacatgcccaacatgaaggtgccggacaggttcgtgctcctggggacgaacgtgagctccggcgacgagtgcgccgcggagtgccgccggaactgctcctgcgtggcgtacgcgtacgccaacctgcgccggagcagcgccaagggggacacggcgcggtgtctcgtctggaccgctgacctcgtggacgcgcagatggtcggcgcgctctggggcgtcaccgcagagacgctccacctccgcgttcctgcaggattcactggcagaaagacgaggaacaaaattgtaaaaattgtgctaccggtgttggcaagcatttctttgctctcgtgcattttccttgtttggttttgcaagaccagagataagacaagcagcagtgaaagtgacaagaagttagttcccggtagcgtgcagacttcaagcgacctcgcagaacgaaaccctaccgaagacctcgagttcgcttccatacggtctttcgaaaaggagctgccttccatacagttgagcgacatcgtcgcggcgacgaagaacttctcgagggaatgtatggtcgggcgcggaggcttcgggaaagtgtacaaggggacactgttgggtggccgtgaagtcgccgtcaagaggctgagcagggactccgagcaagggacggaggagttcaagaacgaggctaccttgatctccaagctgcagcaccggaacctggtccggcttctcggctgctgcacggagggagccgagaggctgctggtgtacgagtacctggccaacaaaggcctagacgctatcctcttcggtacgttaacgcgcttgctctcgtcagaactgacggagcttgctgaagcagtgtgtaatggtggtatgctttattatcgccgtgttcaccgcatgcgcagacagcgagaggaggtcgctgctggactggccgacgaggctggggataatcaagggggtggctag

SEQ ID NO: 11039 - DNA, 804 bp, Zea mays
  Peptide Sequence Number=SeqID_52818
atgtctcgccggcggcgaggaggctccgactccgacggcgaggacaacagcttcctctaccgctacccgctcccctccgccgccgcctcagcaggcgtctcagcgggaggcagcggcaagccccggggcgggggctcgggcggcctcgcgccgtccaaatccacagtctacgtgtccaacctggacttctcgctcaccaactccgacatccacctcctcttctcccgattcggacgcgtcgcgcgcgtcaccgtcctcaaggaccgtgaatcccgccgcagccgcggcgtcgccttcgtcctcttcgtcctccgggaggacgccgcggccgcggccgccgagatgcacggcaaggtgctcaacgggcgcacgctctccgcctccatcgccgacgacaacggccgcgccgcggagttcatccgacgccgcgtgtatcgggacaagtcacggtgctacgagtgcggcgaggagggccacctctcctacgagtgcccccgcaaccagctcgggccccgcgagaggcccgcaccgtctaagaagtcgcgccgcggtggtggtagtggtgggggcactggcgggcgtgggcgcggtcgcgggggagaggctgattggcattcagatgacgatgaagatgccgctgccgccgccgcgttcgaggacgacaggtgggcgtcggtggtggatacgaggggagaggaggagaagtcggctggcaaggaagagggaaaaaaaaagggaaaggcggcgaggaaggagaagaggaaaggctacttcagcgacgagagtgatgaggacgaggactaa

SEQ ID NO: 11040 - DNA, 123 bp, Zea mays
  Peptide Sequence Number=SeqID_52819
atgggcgtggccgcgttcaataagatcggcggccacctgttctacactgcgaccgctctgaacccagctcgaatgctcgatcaggggacaacgagcctgccgttatgcgaaagaaagaactaa

SEQ ID NO: 11041 - DNA, 255 bp, Zea mays
  Peptide Sequence Number=SeqID_52820
atgttcctcgggggcgcctaccaggaggccctcggcgggctgcacaaccttttcggcgggcccagcgtgaggaaagacggcgccacggccgccgccctcgcccgggccttcggcgcaatgccgtacctggtgttcgaccccgaggccgccgtgatgtccggcggcgagagcagcgactcggagcggtcggccgccggcgccgccgaggaggaagacgatgaggagtgggagttcatgcgcgggctcaccgtctga

SEQ ID NO: 11042 - DNA, 318 bp, Zea mays
  Peptide Sequence Number=SeqID_52821
atggttcttttaaattctaggattggttctcgtaggaaaaatgttaggaaaaggaaggttgcagaagaagatattggagatgatttcctatcagatagtagtgagggagcgggtagcccaacctatgacgagtcaggtgacagtggtggtgatgatgaagatggtgaccctagtggtccaagttctgcagctaggccaccaactcataatggtcctggtcaagatgaacaaccagccgctctccgtccaagttcaaaaaggcagaagaagctctctatcaagggcttgtacatgcttgagaaggttaagtacatctaa

SEQ ID NO: 11043 - DNA, 1455 bp, Zea mays
  Peptide Sequence Number=SeqID_52822
atggggggagctgctgctggtggaggcggctgccccggcggagagtggggcgcggcgcgcgcgaaggtggcgtcggtgctgggcgtggccgggtgcgcgctcaactgcgcggtgagcttcgtggtgttctcggcgctggacgtgctggacgtggtgctgtgcctggtgtacaagctggtggactacgcggcggaggcggagtggaagtcgtgctactgcgcggcggcgtcgggcccgcgggcggcgcagctgcccctcgccgccgcgccaccagcggcgggcgggcccaaggtggtgcggctgtcggcgtcgtccgcgaagctgcagctggaggacgtgtcggacacgctgtacgtgcggccgtcgctgctggccgacgcgacgcgggcgggcaacggcagcggcagcggcgtggcccccgcgctcaccgtgagccccgccatcgcggagctgatccgcgggaagatggaccgggccccgcggccgccgcggcaggcgccgtgctggtccgactgcgactgcaaggtgtgccacgcctggagcgggtccccggcgtcgtcgtcccacctgtacgtgcacgtccaggcgccggcgatggcggtggagacgggaggacgtggtgttcatccacggcttcatctcgtcgtccgtgttctggacggagacggtgttcccggcgttcagcccctcggcgcggtcccgggtaccgggatgttcgccgtggacctgctggggttcgggcgcagccccaagccggcggagtcgctgtacacgctgcgcgagcacgtggagatgatcgagcgctccgtgctccggcgctaccggatcgggtcgttccacgtggtggcgcactccctcgggtccgtgctggcgctcgccctcgccgtcaagtaccccgccgccgtcaggtcgctcacgctcctcgcgccgccctacttcccggtgccggagtcggagtcggagtcggcggcgcagtacgtgatgcggcgcgtggctccgcggcgggtgtggccgccgatcgcgttcggggcgtccatggcgtgctggtacgagcacgtgagccgcaccatctgcctcaccatctgccgccaccaccgcgtctgggaccgcctcttcaggatcttcaccaggaacagggtgcggacgttcctgatcgaggcgttcatgtgccacacgcacaacgcggcgtggcacacgctgcacaacatcatctgcggcagcgcggggcggatgggcgcgtacctggacgcggtggacagggggctgtcctgcaaggtggcgttcttccacggccgcgacgacgagctgctccccgtcgaatgcacgctggcggcgggcgccagggtgccccgcgcgcgcgtcaccgtctacgaccgcaaggaccacatcaccatcgtcgtcggacaggagcgactcttcgccgccgagctagaggccatctggagggccgactag

SEQ ID NO: 11044 - DNA, 537 bp, Zea mays
  Peptide Sequence Number=SeqID_52823
atgaggcgctacaggatccggactgggtgaatgccatgcatgaagaacttaacaacttcacccgtaacgaagtttggaccctggagaagcccccacaagatgcaagaatcattggaacaaagttgtccaaggcgctttatgggctaaagcaagctccaagggcttggtatgagcgtcttcgcgacttcctcatcgaaaagggcttcaaaattgggaccgtcgacacaactctcttcacaaagaaacataacggtgatattttcatttgtcaagtatatgttgatgatataatctttggctcgacaaatgactatcattgtaaggaatttggtgagttgatgtcgaaggagttcgagatgtcaatgattggtgagctaacatacttcctcggctttcaagtcaagcaaatgaaagatggcaactttctctcacaagagaagtataccaaagacttgttgaaaaggttcaacatggagaagtgcaaaccaatcaagacccccatgcctacaaatggacatctcgacttagatgagggag

SEQ ID NO: 11045 - DNA, 696 bp, Zea mays
  Peptide Sequence Number=SeqID_52824
atggaatctgagattgccaaactcaaaaaggccattgcttgcttaacttccatggtcgatgatacaagttcagaggtttgcgcaatctgccaagatgcttgcaaccctatgcctctcattgaagtgcaagatatgaatgtagcgttgctaactatccaagaactggtgagtgatctagagaattcaaccattgattatcgccttcgtttggaccctccactgtctaccgaagacgagggggctatggaaaacctgtggggtttctttgaacgctttggcgttatgcaacagggtggtcccatgacttttacaaatctgttgaacatgggagacgaccaacaacaaaacgcccatgttggagaaccactcgtttttgctcaatcacatggagaacaacattcagctagtcaacctgagaagccacatcagtgtgttaaacagttccacttcagcgttgaagaagataaagtcttggtttcttgctggcttaatattcagagcaaagtaatcggccatgatacactagtggccagtggcttggtccctgttgactacgacgcgaccgggaatggagcctcgacgcctacgaatcggcctttgggactcctcttcaagcatgttgtgctcagcagcttccatgtcgtcatcgaagagaaagtcgaggtcatcacccggacagctaagaacaagcgttag

SEQ ID NO: 11046 - DNA, 1053 bp, Zea mays
  Peptide Sequence Number=SeqID_52825
atgccgccgctcccgccgccggccaacaaggacgccgaggaggctgccgctcgctggcgccccgcttcgttcgaacagccgccgatccaggccatcaaggcggagcagaaggcgccgctgatcctcgcggagcatttcgcgaattcgacgagcggcgagagcaccgcgagcgaccagggcggcagcgatgcggaggttccagaggcggcgcggcgcgggtggggccggcggtacacgcgccgcgagatggaggaggccacgggcgggctcgccgccgccaacatggtgggcgaaggcgggtacggcgtcgtgttcaggggcgtgctccgcgacggcaccgccgtcgccatcaaaaacctccacaacaacaggggtcaggccgagaaagattttcgaatggaggttcagacaatcgggcgcgtccggcacaagaacctggtgagtttgctcggctactgcagcgagggagcttgcaggctggcctacctccacgagggtctggagcccaagatagttcaccgcgacatcaagtccagcaacatcctcctggaccggcagtggagcgccaaggtgtcggacttcgggctcgccaagctcctctgctcggagaggtcctacgtcaccacccgtgtcgtgggaacgttcgggtacgtggcgccggagtacgccgagaccgggatgttgaacgagaggagcgacgtctacagcttcggagtgctcgcgatggaggtcatgaccggcaggactccagtggactacactagaccagccgacgagatcgctgctgctcttctctcctcaggtgaacctggaggagtggctgagcgcatggtcgccgaccggagggtggaggaggtgctggacccgaggctgccggagccgccgccgtccaaggcgctgaagcgggcggtcctggccgcgctccggaattcaagctcgcgcgggatctgtctcctcgggagtcggatagctacgaacgcgaacacagcaggtgatggatgggaggcagggcagcagtctgggacagggacaggacactgggagggatgttaa

SEQ ID NO: 11047 - DNA, 261 bp, Zea mays
  Peptide Sequence Number=SeqID_52826
atgatctccggctcatttattttactgaacagggagctccaagggcgtacggccaacgagtacgttgaagcagggacaatggggatcgagtttacgataggaggtgatgatagcgcgacacgacatccctggacgcaagctaaagcagagcaagcggtctaccaaggaagatgcaagggaggcgaggagccgagcaatcacttgaacatggtcgacaacaaggttatcgcctgtggccaaggatgcccgacgcagcaatag

SEQ ID NO: 11048 - DNA, 423 bp, Zea mays
  Peptide Sequence Number=SeqID_52827
atggcgcagaacattgccatcttgctgctcgtgctgaatgtgatcaagaagaggtctgcaacgtgctctgtgatggctatagagaagataaaatctgccaggaataaatcatcgcaaggaagcgacattgagactaagcagcctaactctactatccgtaagtgcgctcgtgtccagctggtgaagaacgggaagaagattgctgcctttgtgccaaacgatggttgcctgaactacatcgaggagaacgaaggacattgcggggccgcccgcttcttcccctacgacaactgcgttgacatgaggtccacgggcaccaacaagggggagacagtgcgtagaacctattcttgctacatgaactcaacaggggttcttcacgggtggattttatttgttgcattcttggaaaatggaaagtga

SEQ ID NO: 11049 - DNA, 606 bp, Zea mays
  Peptide Sequence Number=SeqID_52828
atgtggaggagcgcgaggtatgacttcctgcagagcaaggaggaggtcatgttgggcatctctgttcctctgcgcgaacagcggtgccgccctagtaagaaagcggtgggccgaggcgacgagtcggaggcggtggaggggctcgtgaccgtcgttgtggcggaggttgttgagaggctcgtcgcggcggtgaagcaagtcaagggcttcgaagcaggcggaggcggcggcaagaagctaggaagggccgtcggacataacgttatctctgacagctgtcagatggacataagggattttaacccgtcagccgacgcccgcaccgtttcattacatcttgctcaagcccgccgccgcccacgagccgccgccgccaggggcctcctcgcgccgcccaagccgctgctggcgaccgcccgccccgcccccacccgcccgacgccaccggagcacgagcccgtggctgcctccgtgaccgtccacgacgccgccggagccaccccgatgcagcccacacccgccccagcctctgcccctgcccccgacgccaccgacgcccgccccgaccccgtcggtgctcgcttcaccagctctacgtccggataa

SEQ ID NO: 11050 - DNA, 180 bp, Zea mays
  Peptide Sequence Number=SeqID_52829
atggcagacaacctggaggtcatcagaccggtctattgccatgccattttcgaaggagccaatccaaatttaggagggaccattcctattctcaacccggtttgtcaccaggttatagatcgagtcttccactatgttgatgacggttatagtagagctgcaactgtttacaactgctaa

SEQ ID NO: 11051 - DNA, 1332 bp, Zea mays
  Peptide Sequence Number=SeqID_52830
atgcacggtgaagcaagcgcccagcgtaatgagtggactgctggtaccgtagtgatcaccaaggcctcaccggtggtggtccggccgtcggagttggagctgggacgaacgccaacgccgacgctgcccgccggtgactacaccaccgttcctctatcctctttcgacagacgcgtgcctcctatgccggccacctcgctgctggtgttcgagcgcaccatcaacgagcccatcgagacgataaagcgggccctgtcccgagtgctggctcactaccgccccatggccggccgcctcgacggtgccggcggcatcgcgtgcaccgatgagggcgtgacgttcgtaggcgcggcagccagctgtgctctcaaggaggccaccacgacggcgctgcaggagatggacctcgccgtgtgctatcccggcttgctctgccgtgatgcggaccccttgcttctggtgcaggtgacagagttcgcctgtggcggcttcgttgtcggggtgacgtcgaaccacgtcgccgcggatggcctcgggatggcacagttcctgcaggctctcggcgagctcgcgcgcgggacctggccgccgtcttgcatccctgtcaggagctgggacgagtcgctcccggtctcgtcagccatccctgctgccaaggggagcatggagcatcacgagccccagcatctggctaccctcgacatcgtcatcccgtcggacctgatcagccggatcaaagctgacgggtgctgctcggtgttagacgccgtcatggcggtgctctggcgctgccgcactcgcgcgaccatgtcgcccggcgacgccgaatctcccgcgccgctcaagttcgcctgcaacatgcgagcgcacgccggggcgccggccggatactacggcaactgcatccgcgtgcaggtcgtcccggcgacggccgtcgtggtggccagcagcggcatcggacaccttgttgggctcatcaggcgcgccaaggagaaggtgccggaccttctgtccacgcctggcagcggggcggcagcagatcatcagggacatcaggcggcgccgccgacgtcgtcgctctggtacgagacgttcactgtgacggactggaggaacctaggcttggacacggtcgacttcggcagcgggccaccagagcgggtgctgctgaggcacgacaggagggcaatggtgccgggctgtgtggtgtgcccgccgcgcagggcgaggaggcatggatgcgatggggtggtcgtgtcgtccaagttcgtcaagccacaacacgtcgatgctttgcttgccgagctcgcggcgctggcaacttcagggtag

SEQ ID NO: 11052 - DNA, 216 bp, Zea mays
  Peptide Sequence Number=SeqID_52831
atggtgacctccggcttgatggtgggggaaagcgagccgggctgcggcctctgcccctccctcagcctcaaggattttcatcaccagggctggggaggggagtgcgccgagttgagctgcagcgtgcccggtcttcagacgcgagtggcttcggagccgctcgcggcgccggcgcccgccacggcagccggaagagttcttccgccggcgcgatag

SEQ ID NO: 11053 - DNA, 607 bp, Zea mays
  Peptide Sequence Number=SeqID_52832
atgaaggtcagccttgagctatacggggagagcaggccgaggctcttcacgtactggacaagcgacacgtatgaggctactggttgctacaacacgctgtgcccgtggttcgtgcagatgagctcccgcatcgccatcggcgcgtccatctcgccggtgtcgtcggccggcggcgcgcagtacaacatgacactactggtgtggaaggacccgaagctgggcaactggtggctcagctacggggaccagctggtggggtactggccggcgcagctgttcacattgattaattccaacaacacaatatcatccccagatgtaggatgtggtcatccatcagtggcgagccaggtggaggtggggctcttatggctggaaggtagaggggacaagtggatcggccgatgggagggagttgtggccggagcggaggaagtcaaggaaggtcttgcgatcggggaggaatacgggtggaagacgatccggcccccaaacaatccggtacggccctggacgaacgccaacgccgtcgcccgccaccggtggctacaccaccgttcctttggcggcctcgatggtgtaggcagcatcgcgtgtgctgatgagg

SEQ ID NO: 11054 - DNA, 747 bp, Zea mays
  Peptide Sequence Number=SeqID_52833
atggaggctggccgggtgggacttgggactcggagcggtagcggggagagaagcttgagagagaataaacgggaggcggcggttgcggactgggagctccgtctggacgaagggaacccctgtccgacaccagacaaccccggtaagagtctcttagttgtctcctgtacttggagaaccgttttggtgtctctccactgtacatgccctaataatggaactgctcttaaggagagtgatattaagagtctttcttataagagatcattaaagcaatctttgagtcagaggcttggtttatctaggacagagtcaaatccttctccagttaaggtagttagtgtgaacaatgacacagaaaattcagtgagacggtgtcttctaaactcttatttgcataaagtagtacaatctagtgaagttattggaaaatttgaacaagataaatttcctatcgtgtcgattcacaaggagattgttctgagttttgaaaggtcatcacagctaaagattaaagcagacaatgagaatttaatagtaactccaccaagtgtggcaaagttcagtccacatataaattcaccggtgaagcataatgatgagagttcagcagaaagaacagacgcttgttgtagtggcaagaattctctagtgctttatacagctagggctggcaatgaacatgagaattgtcatgacaatgattctgaggacaagtattacttcaaattcatgtgtcgacgatga

SEQ ID NO: 11055 - DNA, 1332 bp, Zea mays
  Peptide Sequence Number=SeqID_52834
atggctgcgccgaggaaggggacggcgacgccgctgggcaccgtgttctcgccggaggagacgaagagggccgtggcgagggtggccgagtccgtcgctgggcgccgcgccgagctcgcccgcctccagggtttcgccgccgacaacgccgccctcgtctccctcgtcaacaggctccccgacgaactctctcacgatatcatggtgcttctgggtgaggggtactatgcagagaggtcggctaagcagacgactaatatattgcacaggagggggcaggaattggaagctcaagtcgaagcaatgaaggcaactatcgctgaccttgaagctgaggccaaattctttgaattcacggccaccgaggcttcagagggtcttgttgaaatcagggaagagtatgatgaggacttagagacgaattcatcaagatcagaggcttcagttgctactgtggttatgtccgataaagacagggaacatgctcgaatcatggcaaggttagatgaacttgaaagggaagaaaaggatgctggaagtgcctgtgaagatgataatgatggcgacgatgatgatggagatgctggaacaagtgatgatggcgaggaaaataaggaatctggaaatgctttaagtgatgtcaatgaagactacagttctggttttggcgcttcattttctggaagtggcggcaatgataggagtcatgggaatattaagagtgcactgaagaagcctggaggagatgaaatgctgataggcatttctcataagccatcatcccatacatctcatctagcatttcctggccaaacctctgcaacaaattctgatgtccgagttcacactaaagctgttacttttgaagacgacaaatatgtagttagttcgtcaaagtctcctcccttgctactggattctatacagtctgatcctgtgctcaagaattcttcagaccccgctctatctcgtgacagaaagataatatcaagtggacgaaaggcctttacaggatctatcattgagcacgacgacaatgtttccaccattgaaccttctgtggctagttcgttggcaaaacctggtacttgtgcttcttcaaggcccgtgtcaaggttcaagatgcagaaaggagggcgtatcacaggacgtccaagcatcgcattagttagccactgcacacagagcctgtcggccaataagcagagtgtcatgacatggtcagtagcagccgatgagcgccgcgaagtcagcagggcggctgctggtggtgtctcttctcgttccctgggcggcgccgtggagcaccagattgtctctctcactgggtaa

SEQ ID NO: 11056 - DNA, 876 bp, Zea mays
  Peptide Sequence Number=SeqID_52835
atgaccatggtcccaacaactaggaacctgttgcaccatgacggcgtcaagagcagccgcggcaggtcgtgctaccaccccggccagtactacgtcggcatcgccgcccagttggaggaccagagcagcaatccgtcaacaagattccctcggccgctggcgactatggtagtagacgatgacgaggctgctgcggcggggacgaggagctcgagctccccgggcgccgccgccgccgcaggaaacgacgacgaagaaggagactgctggctccagctaggcctcgccgccgcgtcgtcgtcggcctcctcctcctcctccggcgacaacaacatcacggctccggatccgggtccggcgcccccgcctcctgtggaggaggggctgtaccttttggcgtacgacaacaagcggaacgcgagtgcgaggccgccgccgttgttcccgctgccgcttcggagctaccacgtcgaccagtcctacggcggcgaccgcggacggtatcgaccggcggcggaagctagcgggtcggccatgtcggcgccgctggcgcctcctcctccgttcatcaggtgctccggcggcgctgccataagagtcgttagcccgccgcggcgaacggaggcgcccggcgggctgtggctgacgcttcgagcagctcccaaccaaatcagagagcctgttttgccccagatagcaaagagctacctacgaatcaacagtatcaatcggatattgaagccatatgcattatttggagtagcatgcatcgaacatcgtcccaccacaagaaacacgcatgacaacaattcatgtgaacctgagtacctgaccattaagggcttgtttgggagcgagtggaatgaaggggattga

SEQ ID NO: 11057 - DNA, 1578 bp, Zea mays
  Peptide Sequence Number=SeqID_52836
atgggtgagggctccccgtacgtgacccgcgctcaccacgcttcttcagctacggcctcctacttcgccttcgggccagctccgcgacttcttccgcaggatcctcgacgcccgcaagccccagcaacctcaagggctacgcgccgatctgcttgggactcgaggattttctacacgcgacgcctctacctccgcatccaggtttccttgttgacttataatctcaatttccatgataggactgctttggcccggccgattgctagtgcaccagatgcttggttcgatgtggttgagcgctactcaaatgactgcaacaagacactccatcgtaccacagcaacaaccaaatgccttaacttgggttcctataactaccttggttttgctgcggctgatgagtactgcacccctcgtgttattgagtcactgaagaaatattcggctagcacgtgcagtgttcgagttgatggaggcaatactaagttgcacacagagctcgaagagcttgttgcaagatttgttggtaagcctgcagctattctttttggcatgggctatgtgacaaactctgctatcattccagcgctggttgggaagggaagcctgattattagtgattcactgaaccataattctatagtcaacggagctaggggttcaggggccactgttcgggtttttcaacataacaatcctgctcacttggaagaggtattgagagagcagattgcaggaggccagcctcgcacacacaggccatggaagaagatcattgtaattgtcgagggaatttatagcatggagggggagctatgcaaactccctgaggttatttctgtctgcaagaaatacaagggcctaatatacctcacatatgaacaggcctacacatatctagacgaagcacacagtattggagctgttgggaaaacagggagaggtgtttgtgagctgctcggagtggatccagctgatgttgacattatgatgggtacattcacaaaatcatttggatcatgtggaggttacattgcagcatcaaatgagattattcaccatctaaagcatacatgcccagcccatatttatgcaacatccatgtcacctccagcagtccagcaggtcatttcagctataaaggtcatccttggggaagatggaactaacagaggggccaagaagctcgctcaaattcgagagaacagcaatttcttccgctcggagcttcagaaaatgggttttgaggttcttggagataatgattcacctgtcatgcctatcatgctttacaatcctgctaaaattcctgcattctcaagggagtgcctgaggcaagctgttgctgttgttactgttgcatttcctgccacgccacttctacttgcgagagctaggatatgtatctcagcttcccactccagggaagatctcataaaaggattggaggttatagaactaaacctcatgccaactttgcaggttatcagcaaagttggtgaccttgtgggtatcaaatacttcccggttgagcaagaaaagaccacggctgttgaaaatctgaagaaaattcaatga

SEQ ID NO: 11058 - DNA, 594 bp, Zea mays
  Peptide Sequence Number=SeqID_52837
atggcggccttctcccccggccggcggccttcaccgcctcttcgactagctggtcacttccccaaccgcttccccagcccggcggtcgacgacggctttctcccccggccagtagcctccaccgcctctctccctagctggcagcttccacagctccttccccagctcggcggccttcactgccccacccaaccaccccatgccgcagatccactcacaatcggagcaaccgctctcccacgaccacatttcccctggtcagcggattccgcccactcccacgcaccactcccacgacacaatcggctgcacgacttccacttcgcctgggacagcacacagtcgatgaagattattagtgagcatgtgcgatgcgtcaggccttctcctctgtgtacgagcacgcgtgtgtgccagagccggagtagttccccagagagcgtggacgatcgcgacacgctggatatccctaccacgactccaaggaagacgaggactacgcgcgtgacagagagcaaggacgactgcaaagcctctcaacgtgctgtcaggtccagtggtgttcagttctatggactgtatgatttatggtaa

SEQ ID NO: 11059 - DNA, 318 bp, Zea mays
  Peptide Sequence Number=SeqID_52838
atggcggctgatgttggagttgtgatgatctctgcgtggttcgtgtcgttccagatagcttcaaagggggctacggcagagggcgcagtcatcacgaaggcgcttgggtcagctgggcgcgtgctcgatgggccgcaggccgagttggtgcctggtgctgcagccacccgcctcgccgtggagaccaagcacgtcaagctcgtcgagtccgcgctcaactgcctccacgcttcggtcttaaagcttgcccagtccactaccttctctgttaattggcccctggcacacgagcaaaccggctgctttatgctctactga

SEQ ID NO: 11060 - DNA, 254 bp, Zea mays
  Peptide Sequence Number=SeqID_52839
atgcccctgcccgccccatcctccccgccctcgacccccagctgtgcgatgcccccagcctccgcccctgccatccgcactggaccattagcacatgatgttgaacaaatagcgacagttctgttccagaagaaacaaggtggcaccaaggagaacaacatcgtgaggctttggcggtgccacggcgacagcgaggggccggagcaggacggtgctgcgagcgtgatgaaagtcgtgaaaagcggtgtcacagg

SEQ ID NO: 11061 - DNA, 762 bp, Zea mays
  Peptide Sequence Number=SeqID_52840
atggcggcggcggcgggcatccggagcagggaggaacggtggagcctcgccggtaagacggcgctcgtcaccggaggaagcaaggggatcgggcgcgcgatcgtggaggagctcgcggggttcggggtgcgcgtgcacacgtgcgcccgcaccgcggccgacctggacgagcgcctgcgcgcgtgggccgcggacgcccgcctgccgggccgcgtcacggcgtccgtgtgcgacgtgtcggcgcggggcgaccgggaggcgctggtggcggcggcgcgggcggagctggggcccaggctggacatcctcgtcaacaacgccgggcagagcacgttccgcgcggccacggagacggcggccggcgactacgcgcgcctcatggccaccaacctcgagtcctgcttccacctcgcgcagctggcgcacccgctgctcctcgccgcgggcgcgggcgcgggcgcgggcgccgcggtgctcacgcgcagcctggccgccgagtgggccggcgacggcgtgcgcgtcaactgcgtcgcgccgggcggcgtccagacggacatgttcagcagcgtcgcgctggagatggacccggacccggagacgtcgctgaggatgatggaggcggagctggcgcgggtgccgttgcgccgattcggcgagaccgaggagatcgcgtccctcgtcgccttcctctgcatgcccgcctcgtcctacatcaccgggcaggtcatctgcgccgacggtggccgcaccattgctgcctag

SEQ ID NO: 11062 - DNA, 1110 bp, Zea mays
  Peptide Sequence Number=SeqID_52841
atggcactccgcgcgctcgacaatacgaagcccgccgccgtcgaggagcggcccaagaaggtggctaaggtgggcgtccccgccgccgccgccaaggccgccgcctcccccgggagtggcggcaagaagaagaaggggaacgacgagaactcggcgccaagggccacggccgcggcggcggagcaggccgtggagtacatctcgtcggaggagctggaggcggcggccagccccaaggccaaggccgcggggctggtcgcggacctggactccaaggactgggtcaggacctgcgaggcgctcaacgacgcgcgccgcctcgcgatccaccaccccgcgctgctgaacccgatcctcgagttgcccggtttcattcgcgtggctgatccgtccgtcggcagggagaaggtggtgctggcggttgtgaagacgatgaagagcccccgcagcgcggtgctcaagacgtccatcatggcctgcgccgacatcttcagctccttcggcaacctgctcgcctccgtctccgacgacgccttcgacaagctgctgctccagctcctgctgaaggcgtcccaggacaagcggttcgtgtgcgaggaggccgagaaggcgacgcgcgcgatggcggcgtcgatgccgccgctgccgctgctgaagaagctcaaggcgtacgtccaccacgccaacctcagggtcagggctaaggccgccgtcgccatctcccactgcgccgcccggatggtacggcacgccacgccacgccacgcccaggaaggcaggaacagctgctcatcagtctgcccatttcagagactcagattctcctttgttgctggcgcgcaggacatcggcgcgatgaaggagttcgggatgtcggcgctgctgcagctggcggtggagctgctgaacgaccggctgccggaggcgagggaggccgcccgcggcgtggtggcgtcgacgcacgcggccttcgtcaaggaggccgccgcgagcggccaggaggacgacgctgccgcgtcctgggagagcctctgcgcgctgagcctcccgcccatctccgcgcaggccgtcgccaagatcgctgccgccgccgccgcctcctcgcagtag

SEQ ID NO: 11063 - DNA, 1419 bp, Zea mays
  Peptide Sequence Number=SeqID_52842
atggcagccggcggcggggctccgtgggcggagcgcgcgcgggtggtggggacgcagatccgcaacaggttccgcgtggcgcccgtggaccaccggtcgctgtggctgcgggcggacggtcgtgtcgccactgaggcggtccggcggtggtcggatcgcgttcgggccctgctgcagaggggccggagcgcggatcggaactccacatcgacggatacatcacctgaggcggtggcaaagccttcgtccagcgtttttgagattctacagaaagagagttcaggtatcctagctaaaaagagaacacttgattactctgtcctactcgtgccgttttctctaaactctgaggatgtgcaggtttatggtgtagagaagcttcatcaggcattacatgggagacctaaaggcaaggctcttctaacggtcagcaatcatgtggcagcgatggatgaccctttcgtaattgcttcccttctcccaccatctgttatgctggaagcacaaaagctgagatggacactgtgtgccactgatcggtgctttacaaatccagttttgtctacattcttcaggtctgttaaggtgttacctgtttctcgtggtgatggcatctaccaaaagggaatggacatggcactttcaaagcttaacagtggtggatgggttcatatattccctgaaggaagccgttcaagggatggagggaaaaccattgctcctgccaagagaggtgttggaagattggtaatggatgctgacagccttccagttgtaataccctttgtccatactgggatgcaggatataatgcctgttggaaaacgaatccccagagcaggaaaaagggtgattgtggtcgtgggtgacccaatcaactttgatgacctgctcatcgacaactgtggtgacacccaagatatccctagagggatcttgtacgacaaagtgacacagagaattgggcagcgattgcaggaactcaaggtcgaagtcgacagactggctgcagagcaggaacctgaactccaaaaccacaacgtgggtgatgatggataccggctgtggcagcaggtcgattgggaaggatttgggatagggagttccatgttgccatcagaaccttcagctgctgcgcaagtgccatcaagggaagccgagcctgaaccgcacgtggaagtggagcaaagcgtgtctccagccccaagtgcagcgacctcatacaatgttgctgttccacactggttccagcgccatgcggacccttctgaactcatggggttcgcttcccgtggcctgatcaagcatggcaagttcttggaggaaggctacagggaattccaacagtcggctactactctgcacaccttttgggtttctcgtgctaacaatgctgcacaccgatggagcactgcttag

SEQ ID NO: 11064 - DNA, 813 bp, Zea mays
  Peptide Sequence Number=SeqID_52843
atggaggatgtgatgcttggggcagctccccttcctgttttggatatgaccaaaaagtgttctcgcagttcagcaataaggattattaaaagagtttctcgttctgtgaaactgagactaggcactggaggaactacagagaggatcatatctgcattgcacactgttcttagtgaacaaggagatgaggatgatgacctgaaaaaatgcaagacttctatgtgtcatgttggaaagatgcagaaggacgttgacagtgcctgtagcaaagacagtgaggaggctactaagaagtttgaacacatagttagactaatgaatgaagagctcgctcatttccaggagcaaaagacagctgatattggactcgcattccatgaatttgccaagggcgtcctcaacccagaatcaactgttgttgcgatctttccctctccaatgcattatgctgggccaactgaggtgcagtggcatgctaaggctcgtattaatgttggtgcaaatttctatattgttggaagggatcctgctggtatgagccatcccacggagaaaatggacctctatgatgctgaccacgggaagaaggttttgagcatggctcctggcctcgagaggctcaacatccttcctttcaaggtggctgcatatgacacaaagcaaaagaaaatggatttcttcgatccatcaaggaaagatgatttcctcttcatctctggcacaaagcttggtgccatccgagggcagcagcaagatgcgcgagccagttgcagcctgaaatatgggaagcgcaagcggttctttgcgacatag

SEQ ID NO: 11065 - DNA, 387 bp, Zea mays
  Peptide Sequence Number=SeqID_52844
atgccggcattgttatgcatgcagagcttttgcatgtttaggagatgggaagcttgccggtgcttagacgacgacggggaagacgcgaggccgtggttcagagtgcacaagacatggaagcatggctgcggcgccggcgccgccgccgacgtcgtgacgatgcacggcggcggaaggacgtacgagatcgaggggagctcgcgcaaatcggactacaggatccgcggcgcggacggcgcgatcatggcggccgtcggacggaagcggacggcgtccggggttgtgctgggggacgatgttctaacgctgacggttgggtcggggacggaccatttgctcgccctgagcttggtggtcgtgtgtggcattatgaaccgccgcttgtga

SEQ ID NO: 11066 - DNA, 510 bp, Zea mays
  Peptide Sequence Number=SeqID_52845
atgggcctgggccgctggggtaatttattaacagcaggagacgtggttgtccctgtcactggccaggtttgccaccgtcgcccgatccgaggcagatgtcacccacaacagccatggcgaagctgtctcaggccccgtctaactcaggtacgtgccctcctcgtctccctcctctccttcctgtcggaccacccgctccgcgaccacctcatcaccgtcgtttccgccttcgcctccgccctcaccgcgcccatctccagggaccacgagggcctgcacctcgctgcctcgtcgacgtgctcctcgtcaccgccaaccgccccaaccacacgttcgactacgtcgtgcgcgctcgcttgtgacgccctgcgcaccctcgacgccgcgctaccgggtctccttgccgaggtcctcgggcacctctccgcgctcgccggccaggcaatcctacctcctcctgctcgcctccggcgcacgccatgccgtgtgcctcaggaggctcgcctctag

SEQ ID NO: 11067 - DNA, 1572 bp, Zea mays
  Peptide Sequence Number=SeqID_52846
atggaggactggctcttctactccctcaccactctcctctgcctcctctgctcgctcattctgcgggcgcgcacaccaggcaagaaggcccggaatgccgactcctcctccccgctccctcccctgcccccgggcccgacgccgctgccggtgctgggcccgctgctcttcctcgcgcgccgcgacttcgacatcgagcccgtcctccgccgcatcgcgcgggaccacggcaaggtcttcacgttcgcgccgctggggcgggcgcgcccgggcatcttcgtggccgaccgcggcgcggcgcaccgcgcgctcgtgcagcgcggcgccgcgttcgcctcccgcccgccctccacggcctccagcgccgtgctcaccagcggcggccgcaacgtcagctcctccccctacggcgccacgtggcgggcgctgcgccggaacctcgcctccggggtgctcaacccggcgcggctccgggccttctcccccgcgcgccggtgggtgctcggcgtcctcgcccgccgcgtccgcgccgacggccgccacggggaggctcccgtcgccgtcatggagccgttccagtacgccatgttctgcctcctcgtccacatgtgcttcggtggcgaccgcctcggggacgacgcgcgcgtccgggacatcgaggccacgcagcgggagctcctcggcagcttcctcagcttccaggtcttctccttcctcccgtgggtgaccaagctcgtgttccgccgacgctgggagaagctcgtctcgctgcggcgtcggcaggaggagctcttcgtcccgctgatacaggccaggcgggaggccggcggcgacggggacagctacgtcgactccctggtgaagctgaccattcccgaggacggcgggaggccgctgacggacggcgagatcgtgagcctctgctccgagttcctcagcgccggcaccgacacgacggccaccgcgctgcagtggatcctggcgaacctggtgaagaacccggcgatgcaggacaggctccgggacgaggtgtccagcgccggcgccggcgccgacggcgaggtgctggaggaggagctgcaggcgatgccgtacctcaaggccgtggtgctggaggcgctccggcgccacccgccgggccactacgtgctcccgcacgccgtgcacgaggacacgacgctggacgggtaccgcgtgcccgccggcgcgcccgtcaacttcgcggtgggggacatcgggatggacgaggaggtgtggagggcccccgcggagttccggccggagcggttcctgcccggcggcgagggggacgacgtggacctcaccggcagcaaggagatcaagatgatgccgttcggcgccgggcgccgggtctgccccggcatggcgctggcgctgctgcacctcgagtacttcgtggccaacctcgtgagggagttcgactggcgccaggccgacggcgaggaggtggacctcaccgagaagctcgagttcaccgtcgtcatgaagcggccgctcagggccagggccgtgccgctgcggccgccgccgcccgccgtcgcagctgcttga

SEQ ID NO: 11068 - DNA, 270 bp, Zea mays
  Peptide Sequence Number=SeqID_52847
atgctgcgcgcctgcagcgtatacgaagagtacaccacgaacaacgacggcctgatgatcagcaacagcacgtgggactacaagatcccaagcgtggacatcatcccgaagcagttcaacgccgaggtgctgaacaccggataccacaagaaccacgtgctctcttcaaaaggaagctatccgagcggcgagggtggagtttgcggacagcagtcatctggacgctcgccgctggagttccagatggatgtccctgcaccgatgaaatag

SEQ ID NO: 11069 - DNA, 171 bp, Zea mays
  Peptide Sequence Number=SeqID_52848
atgaccgccgtctccgggtgggacgacgagtctgtcctcctcgatgtgatggtcgctgaggccaccctcgcctgtgagtcccatcgcaagaggcaggcctccacctgctccaacgatgacggcaccggatccaacaccaaatacggagatacagttgacaggtgtacttag

SEQ ID NO: 11070 - DNA, 1281 bp, Zea mays
  Peptide Sequence Number=SeqID_52849
atgcagccaaggtactcggtctcgcaccctcgggctcggccgctgcacggcgcccggctccctcctccgccccgccggcgcccccacgtggtggcgctggcgcagcccgacgccgcggcgcacgccagcatctccgtcgtgcacctgcccacgcactgcagctcctccgcctccccgtcaccggcgcttggcgccgcggcggctaccagaccgcggcaggccgccgttggcacccgcgtggccgcgatgaggacgacggcgagtgtcagccacgcccacgcggcgagcctcccggtggcaacggccattggtgatgggtcgcgtagcgaaaacgaaagtgccgtgaagaaaagggactacaacaccgtgataaaaggccagggcgatgctggccaagatctagagaccatgtgggtgggtagagagtgggacgggcgtgagatccaagcaggaaaaggaaagcaggtgaaaaaaaaaggaggggctcgcacgagagacgtggtccacctgcccaccgggcgcctactgggggcggttgttgttggtatatttgcggtggccggggacgggtcagcaccgccttcttctcaccagcccctctcgcctcacgaaaaggcgcaggccaaggccaaggccaagccgccccctccctcctctcctctcctctcctctcctttcctctccactctctggcagccaaaggcgaggccgagatcctgcgcgcggaggatgccttccaggtccatgagccggctgtccgtcgagtccgcctcgggcagcggcggcggcggctgccgggaggccgagccggtgctctgcgcgcctcggccgcgcagggcccagcagcagctggtccacgtccacccccgcggcgccgacctcatcctcggcccgccgcccttccttctcaacgagagcagcgaggagggtcggtgcagctgggcggcgttcggcggcgggtcgccgccggcgcgcgcgggcaacccgctggtgcacgaccccagcttcctgctgagccagcgccaccccgcggcggacccgccgctggagctcggcttcttcgaccacctgatccgcaccagcagctacgttcaccggccgacgccgacgacgtcgtataccagcaccagcagcagcggcagtagcagcaagagtagttttggcccgtcgtcgttcgcgcccgccgtgaggatccaggggttcgacgtcgccgcgtgccggagctcccacagcggcggcggcggcgcgggcggccgcgttctgtccgccgcccgcgcgtga

SEQ ID NO: 11071 - DNA, 552 bp, Zea mays
  Peptide Sequence Number=SeqID_52850
atggccgacgccactaggattaaggcacccgggggcttctcgcacctgctggtcgccatcgacaaattctccaagtggatcgaggtccgacccttgaccagcatcaggtccaagcaggcggtggcgttcttcaccaacatcatccatcgattcggggtcccaaactccatcatcaccgacaatggcacgcagttcattggaaaaaagttcctggacttctgcgacgaccaccacatccgtgtggactgggccgccgtagctcaccccatgacgaatgggcaggtggagcgtgccaacggtatgatcttgcagggactcaaaccgaggatttacaacaacctcaacaagttcggcaagcggtggatgaaagagctaccctcggtagtttggagtctgaggacgatgccgagccgagccacgggtttctcgccgttttttctagtctatggggccgaggccgtcctccccacggacttagaatacggctccccgaggaccagggcgtatgacgaccaaagcaaccagaccagccgagaggactcgctggactag

SEQ ID NO: 11072 - DNA, 420 bp, Zea mays
  Peptide Sequence Number=SeqID_52851
atgcggtcagcgctccacggaacagcgacatgggtcgagctctcgctggcgcgtggggccgccctggcggaagccttcctcccccgcggacttcgcgtaacagaagccgagattcctccgcatggtgacctcgtcgcgccgcgcattttggttggaccggcaattttgcgacggcataagtactgcgcggcggatccaccttgtgtcgtgagtggtgctcctctgcgcgtcgtccgtggtgagtctgcccccaatctattcgccctaatctccgctgcgaataacgttcttcggatcagaatttggggtgctgcgccatgggtggcgggcgcggtgggcggaacgccgctgtgcggtgtctctgtgccgtcggtcggtggggcgaaggtagcagataggttattaaccgtcgatgcgtga

SEQ ID NO: 11073 - DNA, 1317 bp, Zea mays
  Peptide Sequence Number=SeqID_52852
atgcaggaggaactcaacaacttcaagcgcaatgaagtttggacactggtgcctcatcccaagcaaaatgttgtgggaaccaaatgggtgttccgcaacaaacaggacgagcacggggtggtgacaaggaacaaggctcgacttgtggcaaaaggttatgcccaagtcgcagatttggactttgaggagacgtttgctcctgtggctaggctagaatcaattcgtatattgctagcatatgccgctcaccattctttcaggttgtaccaaatggatgtgaagagtgctttcctcaacgggccgatcaaggaggaggtgtacgtggagcaaccccctggcttcgaggatgaacggtaccccgaccacgtgtgtaagctctctaaggcgctctatggacttaagcaagccccaagagcatggtatgaatgccttagagactttttaattgctaatgctttcaaggttgggaaagccgatccaactcttttcactaagacttgcgatggtgatctttttgtgtgccaaatttatgtcgatgacataatatttggttctactaaccaaaagtcttgtgaagagtttagcagggtgatgacgcagaaattcgagatgtcgatgatgggtgagttgaactacttccttgggttccaagtgaagcaactcaaggatggcaccttcatctcccaaacgaagtacacacaagacttgctaaagcgggttgggatgaaggacgccaagcccgcaaagactccgatgggaaccgacggacacaccgacctcaacaaaggagtcgctacgccttgcttcgagatctggtatccaaaggggtctaactttgacttgattggttattcagattccaactatgctggatgtaaggtcgataggaagagtacatcggggacgtgccaattcttaggaaggtccctggtgtcgtggaattctaagaaacaaacttccgttgccctatccaccgctgaggctgagtacattgccgtaggacagtgttgcgcgcaactactttggatgaggcaaaccctcccggactttggctacaatctgagcaaagtcccacttctatgtgacaatgggagtgctatccgaatagcggaaaatcctattgagcacagccgcataaagcacattgacatccagcatcactttttgagagaccaccagcaaaagggagatatcgaagtgtttcatgttagcaccgagaaccagctagccgatatctttaccaagcctctagatgagaagaccttttgcaggctacgtagtgagctaaatgtcctagattcgcggaacctggattga

SEQ ID NO: 11074 - DNA, 264 bp, Zea mays
  Peptide Sequence Number=SeqID_52853
atggatcagatggtgcgtgacgaggaggttgatgaccttggtgacctagacagcacgctgcctgaggcctcgctgccggaggcctcgggggtggatctggcgccgccgtctgatccaggcaagggcccctcattaaccctcgcgccgactggagatggcgaagaccccgcgccagcccccacgccgacgggcgaggacgccttggagtggctgagtcggctgcggaagaccccgcggccgaggccgggccttcgcagtggctga

SEQ ID NO: 11075 - DNA, 387 bp, Zea mays
  Peptide Sequence Number=SeqID_52854
atggccggcgaaccaggaaatcagagagaagcaaccatgggagcaggcgcgcaggcagccagagaccgagctgggggaaagaaatctgcgcgcataggaaggaggccttggccatgggcgcgacaagctgacgccgttggggaggaacaaactcgcgagcagccatatgagagcagctcgacaagcatgagagggcagagggagcaggcgtgccaaggactgggaccaggggcgcggtgctgggagcttggccaggcgcggttggagaagggcaaggctaagcggacgccttgggagcaggggcgccgagggagcaaggacgcagaagcacgacatggggagctcggcatgacgcacagcgtggggaggaagaagagcgcgcgctag

SEQ ID NO: 11076 - DNA, 564 bp, Zea mays
  Peptide Sequence Number=SeqID_52855
atgaaaagggaccttcggccatctcttggagacgacttcagccgaagctgcttcttcgtggagcgagcagggctgagccagggacatggaggaaaatccctagagcttgacgccggacatggggatcaggggcgtgacgagcagagacggtcggccgagctgcacaagcagaggagcatggccagcaagctaggaaatcagagagaagcggccatgggagcaggcgtgcaggcagccagagaccgagctaggggaaagaaatctgtgcgcgtaggaaggaggcctcggccatgggcgcagcaagctgacggtgttggggaggaacaaactcgcgagcagccatctgagagcagctcggcaagcatgagagggcagagggagcaggcgcgccgaggaccgagaccaggggtgcggtgctgggagattgaccgagcgcggttggagaagggcaaggccaagcggatgccatgggagcaggggcgccgagggagcaaggacgtaggggcgcgacatggggagctcggcatgacgcatagcgcggggaggaagaagagcgcgcgctag

SEQ ID NO: 11077 - DNA, 369 bp, Zea mays
  Peptide Sequence Number=SeqID_52856
atgatggtgacagcactgccgaagctgccagctaccacaggaactccaaggaagaggaggatggctagtgtcttggaagctattctagaatctgggaaaacgctgcctccttcttctgctgaagtttctggcagcaaaactgaagatgtctcagagatgatcactgcccgtacttctactcatgccgaggcgggaccttcagaaactgcactagaaaatattgtgaaagaaagcattccagagaaacccttggcacctgctcccaaagcaccttccaggagtgatttgaattttattattcgacatggttcgggaaacaactatcagcagagcaagtcgccaaaacggaacattatgctaaagagctga

SEQ ID NO: 11078 - DNA, 821 bp, Zea mays
  Peptide Sequence Number=SeqID_52857
acctccatctccaccagcacgcgcgcgaccccgcccgtacctgcccaaagaacgtaaaagcggcggctccccgcccggcctccctccccggcggcgtgcggcccccgctcggccccctcagatccccagcggcgtgcggacccccgctcggaaccctgctcggaccctccccggcggcgcccggcctccccactcgacccaccccgcccggcctccctccacggcggcgtgcggcccacgctcagccccccgcggcggcgctcggcgcccgcccccggctcgcccgctcggcgaccgtccccggctcccccacccggcctacctcccgcggcctcgcccgcccaattccccgaccccggcggcctcgcccgcccctcaccccggcccgcggccggcgctcgcccgcccctacccggcccccggcggcatcccccttcccttccccgaccccggcggcctcgctcgccccccgcccgtcccccggccccgcggcggcgatcccgcccgcccctgctcgccggttcgagtaccaggcgcggccccggccggctcggccgctcctggccggttcaaccgcccctggaccggttcaaccgcccttccccccgttcggccgcccgttcccgtcccggcctcgcccgaccccgtcgtgccgtcaatggggctcggtgtatgcggctcgctctgccaaggttgatttgtcccttggggaggagtgcggtggttatgagatcgatggttctggttatgactatggtgctggcgaagatgaagccatggaaggagacttccaggagttccaagactacgacgagttctag

SEQ ID NO: 11079 - DNA, 396 bp, Zea mays
  Peptide Sequence Number=SeqID_52858
atgaacgtgagcactgatgttgctcgtctgaatcctcaaggatcatttcactatgggtctatcaatgtgagccaagtttacaagctgaggagtgaaccacctgttatcatcaatgggaagaaacggactacaaagagtggtatctcttattccccacccgacactcctttgaggcgcggatccgatttgggcgcaatccatgttcagcgtggatttgatttgggcgccgacttgcctttcatgttcagcgcgagagcagcggagaggcgcggcatcgatggcggggtcggggtcgccggtggcatcaaactcccagacctagcggctgacgtcgtcgttcttcttgcgaaggcaagggtcgccaccttctccgtgatccgcaagcgccacggctga

SEQ ID NO: 11080 - DNA, 285 bp, Zea mays
  Peptide Sequence Number=SeqID_52859
atggagccctatgatacacaaatggggctcatggcctctagggccttctctggggtccagaacatctgcactagaacacctaaaaagaagtcctacaaagatttgctggttatactaacaagggaccactgttttgatgcaaaggacgggaaggagacgaaaaagcaggagccagggctgttcaacaacgtgatcgagtcgctgaggcgaggaagatgctacgaaaaggaaagtctgtacaggttttgtgtctatgcaaggcttgagaagttggcattgtactga

SEQ ID NO: 11081 - DNA, 369 bp, Zea mays
  Peptide Sequence Number=SeqID_52860
atggctcgaggcaaccaaatagcagaaaagggttgtggcaaacacaaggtgacacagtttggcagttgcacacttacgccgaagacggggaaggcttcagttaaggatgaggatgtgaatgagactgctttgatgcatgtgagtctggagagcattgggtgtggcctcattgaggaatttcttgcttgtgaatgtgatcgctcgaccttgagtggaatgtgggcgaggtcgcctggaggtttatgcctcaaaagtgttgctttggggaaggatattaaggtgttgagcctggccttcgtcgtaaatctcaatggtcgagaggggtttgccttcgttagcgaggtagagaactgtcacacccggttttag

SEQ ID NO: 11082 - DNA, 408 bp, Zea mays
  Peptide Sequence Number=SeqID_52861
atggctgagggcgcgaaaatctgggtaccatccatgggagctgctgccgctgcttgtggtagctcggccaggggaggaagaagacagggagggcgctcggctactcgccatggacaacagagagagggaggaagggatgggcgcgatgggagcttggagctcggcttcctgcttgctgccgtgtgggaggactgctgcgcgagggagaagaagacagggaggagagaagggcaccatggaagggagcagaggtacccgtgcccatggcgaagcctctacgcgcaagggaacagcaggggaaaaggaagctcggccatggatgctggaggtgctcggctaggaatggagcatggagagggagccggcttccatggggaagaagggaggccgaccatgggagggagatga

SEQ ID NO: 11083 - DNA, 903 bp, Zea mays
  Peptide Sequence Number=SeqID_52862
atgcccgttttaaataaacgcgatccgatctcctccactgatctaaaaatcaacgacacggaaccattggtcgaaccggtatcatacgctctaatcacgaccgtcctctacgcgatcgacgacacatgttctttctcagtcgaacggatgtaccaaactactcccagccgtctatttcatgatctatggacatcctgctgtcttcaacctcacgacgttcagacccagccgactgcgccattctcaattctctctcatctaccaaccaatcggcgctcgccactatcccccaaaggtacaccgacgattctacggctccaggaccgccccaacctcgccattctcgcccgcacacgacaacccgaagcatcaaaggtcaccgcagaggggagaacggatctcgatgtgaagaggagggtgaaccgtaccgaagataactgggataatggccaccggtggacttgcggcggcgcgcaaaatcacccaggcgagttgtcgaggcgctgtctttcacccttccgcccccagaaccccatcgatgacttcatggctggggagtgctccctgagggtcacggctacaactgatgggttccctggtgtaaatcgtccgcacggcttggaaaaatggaggggaaggaaaggacggtgctcgtcttctaataacggtactagtgctcccgatgcacagcagagaagacgcggaggtagttgtagccaccccctggagtccgcgccgccattccgggcgaccgcaacagacctgtggagtgcaggtgggctccgagctagaggcagtgagatgcgcgcgcccccggcggatgcggccttcagttacgaggatgaagaagcttactgctggcgtgggacccatgcgatagtgcgtgcgtgcggtggggagtga

SEQ ID NO: 11084 - DNA, 993 bp, Zea mays
  Peptide Sequence Number=SeqID_52863
atggcccctcctgtggcgtggtcagtccgagccctgggtagggcgaggcggaggcccctccgaggtcagggtcgagtcagtcttccgaggtcgaggccgagtccgagcccttgggtcgggcaaggcggagatcgtcggctgaggccagggctgagtccgagccctggggtcgggcgaggcggagttcgtcgtcttccggggccgagcctgagtccgagccctagggtcgggcgaggcggagttcgtcgtcttccggggccgagcccgagtccgagccctggggtcgggcgaggcggagcttcctatggcgcccgaggccggacttggctgctgtcagcctcactctgtcgagtggcacaacagtcggagcggcgcaggcggtgctgtcctcttgtcaggccgtcggtcgtcgtggtgatttggccaaggttgcttcttggcgaagattgggcctcgggcgagccgaaggaagggaagtttatcaggcatcagcaaacagaaatgaatcctccaaatcctccactggttggaatcgatcaagtggttgccacccaaatgatggtaatacaacaaatggcaaacatggttaacgaaatgaaaaatcagataagacaagaacgccaggaaatacagcaggaccggctggagatacgtcaagaaataaggcaagcacggttggaaagacaacaacaacaacgcccactacctccaccaccaccaccagctccaccaagctacataaacatatatatatatatatatattactactattttcaatcaggtcatcacctgtgaacgccagatgccactttcttggggatcccacgggtcaggtgaggacttcttcttccccgcgtgggcaccagaaagcggagaatccgcggtattcgttgaatctgacagaaatttcgggatccagttggcctccgggagtatttacaagagcgcaggcctcatcctcgtcgacgcaattgggtcattagctgcctaa

SEQ ID NO: 11085 - DNA, 357 bp, Zea mays
  Peptide Sequence Number=SeqID_52864
atgccggtggccccgactcgtcccccgcccagccggaccagccccgcccacgccggtttccgccccgccgtcgtgccgctaagtaattattatgccctcaaaaataagacaaccaccgaccgtctaggagctaagacgccgtggacgacagtccacatcctcgtcttcgtagttgtctcgttctcgatcatccgcctaagagatagagattgcagtgttgcgtcaggaagcagagtatcatcaatcagtttgagggaacaaatggagtaccagaggcagcaagctgagtaccagaagaaggacgagtattgttcaaacctccaagcccataatcaagctatgctctcgttaagttga

SEQ ID NO: 11086 - DNA, 222 bp, Zea mays
  Peptide Sequence Number=SeqID_52865
atggcactcgccagcccactacgacgcacgacaagcacattgcccggggcacccagcccccacgccaactggtgcaacgagatccatgaagaacatcgaatcaacaagggtcatgttaccacgaatcctggagacaggagctcgacccacggtgcggcgtggtacggcgacagtagagaattcccgattttgggccttatagaaatgggccgcctttgttaa

SEQ ID NO: 11087 - DNA, 384 bp, Zea mays
  Peptide Sequence Number=SeqID_52866
atgcccgcgttgcatgcctcctcggtgggatatgaaggcctgctcctcccctcctccctcccattcaccaccaaagccgtacgagagaaacagagtgaacgccgggccgcctctactgcactcggaatttcgccggctccccgactctatgtctgcccgttaggttctcctcagcacctcgcgggtgggggcattggtgtcggccacaaggtgaagcatcaccggggcaattcctcgcagccatggactctcgccgtcatcctcatcgcgaccaacttcttccctcagttttggactctcgacgagtcagctactgaggacccaggtgttcaggaggtggagactgtagagcaggagctcgttgaaagcaagttgtgcccttga

SEQ ID NO: 11088 - DNA, 294 bp, Zea mays
  Peptide Sequence Number=SeqID_52867
atggagaagaggatggtggagatgtttcagtacatgcagatccttggcgccgcatccggttttgctcctccaccttcgttgtttcctgcagttgaccctcctcagttccatactcctttggggacaattggaggcatcaaacaaccctcaagaatcgtccagcccatcgccgaaccagtcaagccgtccacctcattgagatactttgtgcacgtgatcttatgtttgttagtgttgttaatactttatgagataacttggtctgaacttgttgatgttggtaatgctttgtga

SEQ ID NO: 11089 - DNA, 117 bp, Zea mays
  Peptide Sequence Number=SeqID_52868
atggggaggctagaaccccgggcagaatgggaatcacgacttgtgggtaaatgctcaggaggtgaagctggtaacatggatgacttcgaggagttcgaggaatacgacgagttctag

SEQ ID NO: 11090 - DNA, 345 bp, Zea mays
  Peptide Sequence Number=SeqID_52869
atggcggggatcgcggagcagaggggtagaacagcaatgatggcggccgcgcacatcctccccacgccctcaacacgtgtgccatcgattatggtaggcgcgattaagggtggaagcagggaggcgacgcgaggatggaaggagtcggtgctcggatccgcgcgaccgcgggatacgcgcgtgggcatggggcagcagcgggaaggcgcgatacggggtggaaggagggaggcgacgcgaggatggaaggagccggtgctcggatcctcgccttctcccgcgggatacgcgcgtgggcatggggcagcagcgggatttctgctaggagacgtgaggatggaatga

SEQ ID NO: 11091 - DNA, 453 bp, Zea mays
  Peptide Sequence Number=SeqID_52870
atgacgaggactccatcggggaactcagatgtcaagcggcagcctgaaatgcactttgtaaccaggcgcccatacactgcgtccaatggttcgtgcatagtagggagcccggtatcgaaccaagaaggggtccgcaatctctcccctagctgggaggagcccttcaagggtcgcgctggaagctcgcagacgttgtcctcgcggaattctcccgagcgacttgccagcaatagtggccacctcaacatgtgcgccatagcagagaggccctcgccccgtcttcctacagggggtgacgacgaggccattaaagccaaagagttgggtgcatggcggcaggcggcgctggtggtctggtcagcggccacgacacctctgcaccagcggcggcgaccacctcagcatgagcaccatggcaatgaggcccttgcccccgctctcctacgggggtga

SEQ ID NO: 11092 - DNA, 396 bp, Zea mays
  Peptide Sequence Number=SeqID_52871
accatcgcgttgctggtgtcgaaccttcgcgagggcgtggacggggtcatggtactcgtgcgggctcaggtcgttagccaggaggagcatcttcttgatgtgccaaaccagtttcatcaagccatggatcttggcgcttgtcgtggtgctacttgtgcactagcctttgttcaaattaggttgggttacgaactacgcgacgtcatcggcctatcagaagatgtcaccaacgatgctctagagggcctagaggatgactttggtgtagccactgaggccgcattcaatcttcttctgctgaaagacatttcaatggttccccttagccatggtgcgatcttaggttttcccttcctgcggttgcgggattaccaaggcacattcggctctcagtga

SEQ ID NO: 11093 - DNA, 363 bp, Zea mays
  Peptide Sequence Number=SeqID_52872
atggcgcctcctgttgacgtggctggtctgcgccctaggttaggcgacgtggaagctcctccgaagccgaggtcgagtatgtcttccgtggccgaggtcgagtccgagccctggggtcgggcggagcggagtttgtcgtcttctggggctgagcccgagtccgagccctgggtcgggcggagcggagttcgccgtcttctggggctgagcccgagtccgagccctgggtcgggcggagcggagttcgccgtcttccgggacttagcccgactttacgctgatgggggttaccagctgagaattaggagccttgagggtacccctaattatggtccccgacaggagcacctggactggaattga

SEQ ID NO: 11094 - DNA, 423 bp, Zea mays
  Peptide Sequence Number=SeqID_52873
atggatgccctgggcttcgagtaccttgactatgaaaaacttaatgaagaagccaaggggttgaaaagaaaaagggttattactcccactacagctgacgaaggtcctcaacaagctgaaaacagtggtggtcccctcgatacaaccttattagagattgatagacttattgctaatgttgtacctggaaaaaatactgagggggcgattgctgtggagatttccgcaccgaaggaaaaagaactaaagaaggcactttggaagacaaaagttttgatcttcgacacctgggcggccaacagcagcgtggatgaagagattctaggatgtatctgtggtcgcgctgaggcaaaaattgtgagcacgctgtcaaaggcaatgttgatgaaggctgatgagctcaagcttactctgacgctctga

SEQ ID NO: 11095 - DNA, 246 bp, Zea mays
  Peptide Sequence Number=SeqID_52874
atggagatgaagaaggtcgcctgcgccgtcctcgccgccgccgcctccgccaccgtggtcctcgccgccgaggccccggcgcccgcccccaccagcgcctcctcggccgcgttcccggccgtcggcgccgtgctgggcgcctccgtgctctccttcttcgcctactacctgcacttcatcttcatggctattgatttttttctttactctgattttcaaaatcgagggttatattggagaggatga

SEQ ID NO: 11096 - DNA, 252 bp, Zea mays
  Peptide Sequence Number=SeqID_52875
atgggcatcacagcggcgcgggagcaccagagggcgctgcacacggcgaggagggctaacagcggtgctgggcaactccggcgaacaatcggacgtgatggggtgacggtggcggagctccagctacgcaaggaccgctccggtgagcgcgggccaggcaatccagagagggggagggcacaccgaagggtgtcccgagcagctaacggcgaggcaaaactcaccgaggcaaaggacggggcgcgacggtga

SEQ ID NO: 11097 - DNA, 135 bp, Zea mays
  Peptide Sequence Number=SeqID_52876
atggcgctgaattttttcctcgtgtcatccctgctcctcgcgtgttgggcaccgggagactttccctgcttgatccgagtcgtttatggtgtggtgaactatttcactactcccgctagccgactcatgaagtag

SEQ ID NO: 11098 - DNA, 732 bp, Zea mays
  Peptide Sequence Number=SeqID_52877
atgacgcccccagaactccagcataattcagagatggaatcctatgctgaagccctcgtcggcaacatggatggtggaggacggtggagtggggaggatgaaactggacgtggttcgtctacgggcagtcgtggtggccgcaccaacgggcaaggcagtttgatgaaccacattggctttagaagaccgaactttgaggctcgtcgcgggggttacaaccgtttcgggcgaggtcaccgcaataatcacagagaaggcatggggagcaagaatgtagctggatcatcgggcaacaactttgttacaggcagattagcaagttgtcatggattccatggtacagtgactgaaagagatcgcatattcacccccctcgccgtcggtgatcttgcgcctagatccactttggcgtcgcgattcacgcccggtcgaacacagatagcgcttctcggtaagaagtatcgcgttgtagataacctccggccactgttctcaccggccatcgtgtcccgccgtggtcaatcacactggcatcaccggcgtccgctgttatccggccaggctacgtgcctcgccgctttaccacgtcgcgaaaacgaagaagaaatagaagttgaggaagcaagagctaccccaccaccaccacctgaagaacctcaagccggaaactgcttttattttgatatctctggagcagaacctgactcacaagtgataggagttgtgtgctaa

SEQ ID NO: 11099 - DNA, 255 bp, Zea mays
  Peptide Sequence Number=SeqID_52878
atgcaccaggggagtctttgtaaaggctacgtagtgtatccttggccattcacctcgatagtgaagatcgggtctgtacaacccaggctggaatgggatcacaactcatggaagaactttgattactttatgatgatggttaataatgttggttataattctaaactctggtatttcctcttagaggagtgctcaggaggagatgctggcaacatggaggactttgaggagttccaggactacgacgagttctag

SEQ ID NO: 11100 - DNA, 546 bp, Zea mays
  Peptide Sequence Number=SeqID_52879
atggaggagaggggtcggtcttcccttcttgaggaggaagaagggcgccgctgggcttctctggctggtgtgctgctggaaacgggcgtcagggaaggggaggaagggctactgctcttgggtgccgagctgaagaaagggaaagtgcagggaggctcgaccatggggaggtgctgcgaaggggagggacgttcagtccatgggagatgtaggggcgcgctggagaggggatggagcagaggggagaagggaggtcggccatggatggaacctgtgcatgggaaggctgcaacaaattccagcaatggggaaaaaacctcccagcaccatggatccacggggaatgaaagtgctgctgccctgtgcgccttggagcttggggagggaggcatccatggaagcttctgcccctgcgcgagggaagccagggaggagggcgccatggagaggtgctggacgtcaccacggagagaggagcagggaggtggagccgcaactgctccctgcgcttgtgaacatcgagaagtgactgtgtgcgtcggctga

SEQ ID NO: 11101 - DNA, 2634 bp, Zea mays
  Peptide Sequence Number=SeqID_52880
atgggcccgggccagcaggtgggcgcgtcgctgctccggactagctccagcctccttggcggcggcgccggcgccggcgccggtggccagccggggatggggatgggcgtcggggtgctcccgtcgcagtcgcccttctcgtccctcgtctcgccgcgcacgcagtatggcggtgttggcggcgggaacggcttgctggcgggcgcgtccagtgtcgcgtccatgctcagcagacagcagtcctatgggaatgggggaactggggtaatgccgggcagcggcgctgggctcccgatcggtgggctgcagcacagaggcggccttgatggcgttggtgacttggttggcactggagggccggattccatggcgttctcttcctcgggccctggtagcttgggcaatcaacttggcgtggacagcttgcagcagcagcagcagctggatgcaccacaagattcacaaaatcagcaagagcatcaacagcaaatgtcaatgacatataatcagcagcatatgatgtcacaaactcagcagcagcagcagcctgcagtgaagttggagaatggaggcgtccttggtggggtcaaactggagcagcagatggggcagcctgatcagagtgtttccgcacagatgctgcgcagttcgagtggtggtgtgaagctcgagccacagttgcaagcgttgaggagcttgggtgctatcaagatggagcaccaaagctcagacccatctgttttactacagcagcagcaacatatgttgcagctgtctaagcagaacccccaggctgcagctactcagttgagcctcctacaacaacagcagcgtttcttacaactgcagcagcagcaacaacagcagcagattctcaagaacctgcctttgcagagaaaccaattgcagcagcagcaacaacagcaacaacaacaacagcaacagcagttgcttcgtcaacaaagtctaaatatgagaaccggtaaatcagctgcttatgaaccaggaacctgtgcaaagaggttgacacattacatgtatcaccagcaaaacaggccacaggacaataacatcgagtactggagaaactttgtcaatgaatactttgccccaagtgccaagaagaggtggatgtttggcattgtgagatatgcaataggaagccagggcgaggttttggtggaaacaacggttgaggtcttgccacggttgtgccaaatcaaatatgccagtggtacactcgaggagcttctgtatgttgatatgccgagagagtcccagaattcatctggacagattgttttggactataccaaagcaatccaggagagtgtctttgagcaactgcgtgtagtccgtgaggggcatctaagaattgtattcaaccaagacttgaagattgcatcgtgggagttctgtgcccggcgtcacgaggaacttattcctcggagatcaatcataccacaggtcagtcaacttggtgctgtagtgcagaagtaccagtcttctgttcaaagttcagcatcactatcaagtcaggacttgcaaaacaattgtaactcgtttgtcgcatgtgctcgccagttggctaaggcactggaagtgccattggtaaatgatttaggatacacaaaaagatatgttcgctgcctccagattgcagaggtggttaattgtatgaaagatttgatcgatcatagcaggcagactgggtctggtccaatagagagcttacataaattccctaggagagggaattctggggttagttctgttcaagcccagcagcaatctgaggagcagaagcctgttccacagaattctaaccagagtggtcaaaattctgctcccgcaactggaatgcaagtctctgcctctggaaatggcgatgctacatcaaacaattcactcaattttgcaccatctacttcggcaccatcttcatctgttgttggtctccttcaaggctcagtaaattgcagacaagaccatccaacaagcagcggcaatggtctgtataatggtggaaacagtggtccggttgctaaggccaactcaacaaactccatgcaatcaaatgcaccagcatcgtttcctttgccagcaccctcggcatcaaatggcaatatgatgcctgctcctcagcactcaagccaaatgaattcaccaaccatgtcatcaaacctacctcctatgcaaacacctgcaagccgacctcaggaacccgagccaattgagtctcaaagctcggtccagaggatattgcaagacttgatgatgcaatcccatattaatggtgttggcccagttggcagcgatatgaggagagcaaacacaattactcctggtatgaacggtgtcaactccttagttggtaaccccatgacaaataaccctggaatcaatgggatgggatttgcggccatgggtggccttggtcaacaaatgagaacggcgatggggaacaacgcattggcaatgaatggaaggaccgtgatgaatcacagtgcgcatgacctgacacagttggcccaccagcagcaacagcgcgatttaggaaaccaattgcttgggggccttagagctgcaaacagcttcaataaccttcaatacgactggaagcctgctcagtag

SEQ ID NO: 11102 - DNA, 501 bp, Zea mays
  Peptide Sequence Number=SeqID_52881
atgaccgggcctctgctctcgttgggtggtcgtggggattcgttgatgcacgtggaggctggtcgtggtatcgtcgaagagaagggccttctgtgcggctgctattgctcgttggagacactcatccgccgagatgtagttgcgcgccgtggacaacacaggcatggtagtctaattgcctgtgagtgcccctgtaacttcacctatctcccctctgtttcacgcaccctagaacctaggatatggaagtatggcgccgaggcatcgatcatcatgtttattagaacatggagaaccacccaggaaaacagtgctattacaagcgtggaatgggacgcccttgaccaagtaattaggaaagctagggagagattgccttacctggatggggcaagcagggaggcgtcgctgctagagtatagggaggtcccccaggtcgaactatctgtaaagcttattggacggagggattcatatgcttccttcttcctaaatctgtag

SEQ ID NO: 11103 - DNA, 1353 bp, Zea mays
  Peptide Sequence Number=SeqID_52882
atggacccaacgaatcagcggtcctcaggagcagggcgccgcagctccgtcgcggctaccatgggacgtggtggtgcatgcgtccatggtcagcagcatgtgccggcacctacgtcactccgttcgccctctttacctgagttgcaacaagcacaatctgcaatgccaccaaatccctcatggaacttttatccaccaaatggttttctgaatctcattaaccaaccgtacatgccaatgtcgtcgcaaccacttggagagaatttccactttgttggtctcacccagaatttcaacacatctccaccaccgccaccaagtgctaaaaggactaaaaaagcatccagacttgctaaagaaactattcagattggtggtgatggtgatgcagcaactgaggaatctaaggcagtcaataaaaggtattgggcacatgacgaggaagtgaggctggctagttcttggttgaactgttctcatgatccaatacatggcaatgacaagaaaggagaaactttctggaaggaaattgcagaatactttaacaagcatgctccagcagatcgtcaaagggacgtcaatcaattaaagatacactggacacggttgaagacagtgaccaacaatttcaatgggtgttggagcgcagtatcaaaaatgcatacaagtgggtactctgatgatcagttaatggatgaggcacaaaagatgtatgcaaatggtagtaacggcaaacctttcacgttagttcattggtggaaagctctcagaaatgaacctaaattttgtgcacaaatctcacagatgattaaggaaaaaggtcagagccataccattgacatcactaaagacaaagatcagcttcccttacaacgtcctataggaagagatgcagccaaggctcaaaggaatggtaagcgcaaggcagaagaggttttggatggtattgctcgccttggtgatagcataaacaaaattattgaagtgcaacatgaccgtaagcaagagcgtaaaaaggtggctgaaactcaactagaaatctcaaggttacaactcaaagctgcacaggagcagaaggagcaagacactagccaattatctaatcaaggaaagataaaccgagagaaggcattgcaaaagatggagctgaaattatttggtgatagtgaaaatatgatggacgtgaaatcctttatcgagaatagcctaaaacccgcacgcgaacgccttgctccgtcgtttcgcgcggtcaatttcgacacgaagacagagtatgacatgatccagaactacatggttcttcaggatgtgttcaacaagctgcggataggcaaggtcggctatgtgcattag

SEQ ID NO: 11104 - DNA, 585 bp, Zea mays
  Peptide Sequence Number=SeqID_52883
atggcgctggcagaccaaagccgacctctgaggtgcagccgccggcggacgcaaggtccagtgggagcagatgacgaagccctggatcgagacgtgcagcggtcgtcggccggtcgccgcgcccagcgagagcaggtggcggcgctcgtccaggtctggctgtatagtggagcactgttgccactcgctcctgcattcatttcgttcctaggacagccttctgatgattggtacgcgatcgcgatgagcaacaacgtcgatgctcaagcaaggcactcgcgcgcagagttgcaggcagaggcagctgggctcgcgctgcacacgtgggaacgattccaaaccagcacagcactcgctgcaattcatgcatgggtcacaccgtcacaggattccgttccggcgctacctgatcggcggtccctcctgccctcctgggcacacgtccactcgcacagcacagcgagcaccgtgcacaccggcaggcaggcaggcaggctctggctctcgcgagcacggaacaggaacagtagaacagagcacaacaatcgccaggcgagcatccgggcagctgagctctcgccctag

SEQ ID NO: 11105 - DNA, 521 bp, Zea mays
  Peptide Sequence Number=SeqID_52884
gcgagcggaaggcggtggtgtacttcacgagcctccgcggcgtgcgcaagacgttcgtggactgctgcgccgcacgcagcaacctgcgcagctacggcgtgcgcctggacgagcgcgacgtctccatgcacgccgtcttcaaggccgagctcacggagctcctcgggcccaggttcgcagccgccgcgcttccgcgcgtgttcatcgactggcggtacctcggcggcgccgaggacgtgcacttcctgcacgaggcgggcgagctcaggcgcgcgctggaggggtgcgaggccgcgccctcgcagaagctcgggtacattgaagcatgcgccgcctgcggcgacatccgattcgtgccgtgcgagacgtgctacggcagctgcaagatcttcgtcgaggacgacgacttggacgacaggtataacgacgtcggcgagttccggcggtgtcccgattgtaatgagaatggcctcgtcagatactcagatgatcctcataataattacgtgcctagtacctaa

SEQ ID NO: 11106 - DNA, 120 bp, Zea mays
  Peptide Sequence Number=SeqID_52885
atggcgcgattgcgagtctctggaaatagcggcgcgtgcacgcaggttacagcagggggtgggggcgtggatccgtacgtggaagcatgggccaagcacgtagcagcacactatggataa

SEQ ID NO: 11107 - DNA, 492 bp, Zea mays
  Peptide Sequence Number=SeqID_52886
atgtcgaggaggcgcgtgaaccgagggtcggatggcacaaatgaagtaggctgttcaggcaggagttatcaatcatgccagtacaacactactccgcaggaagctcttacagtggctcaagatatcgtgaagacgatgctagcaaaggggtacgtgctcagcaaggacgctttggctaaggctagagcctttgatgagtcccgcggattaacagctgcagctgcagccaaggctgcagagctgagcaagagaattggtttaactgacagggtcagtgctggtgtcggtgcaatgcgatcggtcgatgagacatatcgcgtaacggagacgaccaagacggtagctactgccactggaagaactgcagctaaggtggtaaatggtatcgtcaccagcagctacttctctgcaggagccatgatgttgtctgatgctcttactagggctgccaaggccgcggctgatctggccgctcatggcagacagagttaa

SEQ ID NO: 11108 - DNA, 141 bp, Zea mays
  Peptide Sequence Number=SeqID_52887
atgggaacaaggaccgctcggctgggaggtcgagggcctgctcctggcgtgcagcaacggtcgaatcaaacaaaaccggcgataaaatttgaaccaggtttgattcgattcgaaatcctgataaatttacccgcggtttga

SEQ ID NO: 11109 - DNA, 435 bp, Zea mays
  Peptide Sequence Number=SeqID_52888
atgcacagcgtggcgcatagtagaacagtagaacacattcggcgttctgcggtgaacagcggcacggcaactaacagcaaggcacgcatgtggccagcaagcagagaagagcaggggcgaggagaaggaggtgagggaggagagtggcttgcggctagattcaatactccattgatgcggactgaagaagagcgttacctactcgaggaaacagtcgcggccattaatggagatggagcacggtggaagaaacggtcggcacaagtgggagagaggaggcaagtcacagcgcagcgcgaatgggaggggagaagtcacggtggtgttacaacggccagggagcacgagtacgcggctggggtggctggacaatgggcccagatggcagtgaccgcggtgcgcgtgtggggcatgggcttcacggaagtccgctag

SEQ ID NO: 11110 - DNA, 606 bp, Zea mays
  Peptide Sequence Number=SeqID_52889
atgcccaggcccccacccgccaggccgccaggcggcgaggcgcagcgcccatctccatctctccctactcagcctctcctgcacgccgccgcccatggtaccaaactcaaccgccaaagcccctggccgagctcccccatggcgtctcccccaaccatggtcgcccaggtcgtggcctcgccggatcccgcacgctcctgtgtcgtggcgctgtccccatgttttctccgcgccagcgcgccaccggctctgcttgagctcctccctcgtcgtagctcacaggtcgccacccccatggctgctgctcctctctccctcatctctgcaactccgcgcctcctctgctcctccacctgcagttcgccccatgttctggacgccaaccctcccatccccctaccctccagccatggatgccccagctcccttttgttgctcgctagggaccagctcggtgccctctcctcatttgaagccggcaacagcgccttggtagtggtcgagcagcacgtcgtcggctccgtgggttttttgggcagcccggttgcggtgtcgtcaaaccccggtgagacctcactgtccctgcatgccttgtgtttgatgtaa

SEQ ID NO: 11111 - DNA, 471 bp, Zea mays
  Peptide Sequence Number=SeqID_52890
atggctgaatttcagatgtgcacggttcacttattccagaagattgctagttgcctgaatagctcttattttcaattggtggtcactttcctatatgaggctttaggccatgcgacattcatttttaccatagaattgaaaatgccctacgatctgcctcatatcagtgttattatgtcgcagacgcagtcaaaagtatgtttctctgtcccttcctccctagaggcatcttcgttttcggatgaagaagctgaaggattgggaggctacgaagcctcctgtgccaaggatgaggaggtgatggggagccaacgccgccggccgcacgcgtgggggtggggctgcggccaggccgccgccgccgcctggatgacttgggttaggggttcggctgttctgtatcgggagtcagggctgtcaggtggtagctgggatggggattgggtgattggtgaagggattatgaattag

SEQ ID NO: 11112 - DNA, 606 bp, Zea mays
  Peptide Sequence Number=SeqID_52891
atggcgacacagaatggtgcagacatggatgggaaggcgtcgaggccagagcagaggaggacaagcgtgttgcgcgctgcaggtcaagatgtgacaagttggtatcggattcagtttgggcacgtgtggttcctccctgtctacaaggagttttcttgtgcctgtgtacctctccgacgagttcgtgctcttaccatcagttcatcgccacggcaggtgatggctggcatctcggagatggaacaatgtctggctgagaagttcgacgggaccatcaagttgtcggatacaacactcaaggaacatccaaaaaggatgactcgactagatgaggtcaccaacaagttggtcagcatcgagaagaagcaagatgaacaagacaagtcaatgggttgtattcaggccaaattcgacatctcgatgaaatcattggcgcagatgcagcaaaaacagtctaaagagtcgggtatgatgggtcatccttccgccactgttcgcatgccgagagatggattgatgggggccaggccacctcctattggggctcctctgaatggctcttctgttggaccttccattcccaaccaaatattgattctattctga

SEQ ID NO: 11113 - DNA, 333 bp, Zea mays
  Peptide Sequence Number=SeqID_52892
atgggggcggggcaggggcaggggcaggcatcgacgcacggggtggttgacgggggcgagggcacgatgcacagcgagtgggagcggtcgccgatagaagggcgcgaggggaggatgtcgggggcagggcatgcgcacgggcgcgggctgatgatggcgggggcggcgatggatagtgcgatgatggtgggggcggatggagggttcctgggattgcgcgaccaagagcggggcaaggggaggatgtcggaggcaggggcagggcagaaccgtgcgccacaccactgtggacgcctacggtatcttcttaagaatagtagagattacatctga

SEQ ID NO: 11114 - DNA, 318 bp, Zea mays
  Peptide Sequence Number=SeqID_52893
atgcaagagcaggagggagtggaggatggtctgagctctgaacagagcagaaggaagcctagagcagaggttgccgcgccctggatgctggagcagggacaggtcacaggtcgaagcagagatgagggcgacgggccgacgatagatgagggcggcagcgctcagcagtcagcagtccagctccaacaagtagatgagggcggcggcgctcagcagtccagctccagcaagcagatgagggcggcgacgctcagagcagtccagcaagcaaatgaaggcggcgacactcagctccagctagggcaaaagactgtataa

SEQ ID NO: 11115 - DNA, 924 bp, Zea mays
  Peptide Sequence Number=SeqID_52894
atggctacaccgccttcccttatgccagacagctgtggcatgctgcttcaagctatctgtgagacaggattccactaccgagacaagagcccccctatcaattatgttgtaaatatttcttctaacatgcagatttttccaccaaaagattggttgattgcgtcatctgtgccatcaaagttttcaccagatgctattcagaatgttttaaatgaactgactcctgagactgtaagaatattctgggaatcgaaaaagtttgaagggaaaacaaaattagcagagccatggtatggtacatcatattctgtcgaagttgtccctccatcaatcatacagaaatgggtagggaaagcccctgaggaagatctacacctgccaaagcgtaacatcttcattccaagtgatctttcactgagaagtgtagaggaaaaggtaagttttcctgccatgctgaggaagacacaattttcgagactctggtacaagcccgatacaatgtttttcacacccaaggcttatatcaagatggattttcactgtccactatctcaaagctcacctgagtcggcagttcttactgatgtattcacaaggttgcttatggattatttgaatgattatgcttatgacgcccaagttgctggcctctattatgttgttaagccaaatgacactggttttcaggtaactatggttggcttcaatgacaaaatgagaacccttttggagactgttattggaaaaattgcagaatttgaagttaaggctgaccgtttttctgtgataaaggagcccttaagagttgggactgggttcacattaaaataccccatattttttgaacgaagtgtcaggagccctgtttttcaattatgtaagaaaagagtatatgtacaagattgcggaccaaagccgagctaa

SEQ ID NO: 11116 - DNA, 774 bp, Zea mays
  Peptide Sequence Number=SeqID_52895
atggcaatggcacgcagagacttctctttccatggccgccacttccacgttaggcggtggcagttgccactaaaccgtgaccttgacgagctcaagtatcatgtgtgcatctgtctcgaagggatccgactccacgcctggaaggagagcatcgccaagcgcacagtagcgacgtcctgtgacatgaactacgtcgaggaacagtctctgcagcgggggacaccaggaccctcaacctttgggcatggacctcgaacccttcgagtacgaccaagtggagtaccactccctgcgggaagaggcctcaccttcaggaccattgtgcacctcgacctaatggagggaccgatgggcagggatgggtgcacggtaccgagggaggtcgagtggcgcttaggcgtcatggatagtgagagcacacgatcggtggatggccccaccaaacttcctgcaccctttgcactggcgctccagaaacgggacttcacttatgccttcactgccctttcgcccagttggtttggacacaggttacaacctaggaccaaagagcgactttcgatacctcacaacacacccccagcaaacttcgatagcatcagcaaccggtttgaagccaaactgatacacaaaaatcataagagggacttcaatggcatggtcatctacatcatgtggaacttatggaaggagcttaaccagagaatctttgaaaacaagagcctagccgcagaacaggtggcagagagaactgaagagtgtctagaaatttaa

SEQ ID NO: 11117 - DNA, 1101 bp, Zea mays
  Peptide Sequence Number=SeqID_52896
atggagaggcgctgccagagggagaggcgctgctccggccatggctgcgtagagggagctgcgcagagggagctgaacagagggagccgcagagggaggcgcagagggagctgcagagggagctgcgcagaaataggcggccatggctgctccggccagatctggccgtcgggacggcgcgcgaaccagcagagagatggccggccgttcgacggccagcagacggacgagcgcgagccaacagagggaaggtggcggccgggcgcgcgagctagcaggaagatgacggctgggcgcgcgagccagcagaggaggaaggtgacggccgggcgcgcgcgagctagcaggaaggtgatggacgggcgcgcgcgcgagccagcagaggagagggcggccagcagagggaggtggcggcggcggccagcagaggttgctgcactgagggagctcaagaaggaagagttggtaggcttcttcaatgatcatgtcaagctccaagcgttggcgaaaaaagtaagatatttctgcgaggcaaggaatccctcccccgcttctactctttcggttcgccggttcgccgtctcgcacacccacttcctacaccgccaccgagcactcgctcagtttcatacccatcctcgaagtcgcctctgtctagttcctgctcttccaccaccgcctgtgatgtatccccgaggcccggatgggggacgagatgcctcgtctcgccctatgcttgccactcccgccggcaacgacacgcgcgaggaggatgagatcaccaccgcggaggctcatgtggagaaagacgccgcgcggatggacgctgccctcctcatgcggactacgcccaagatggacgagtttcacaccgggggcgatctggactcaagtggaagtggaagcggcatctcggggccaagcgcctccaaaagacagctacaaagaaggggatcgtggcggcaacgagtcagcagcctgtactacacgttcatccacgtcgagctcgtcggctcccaacgcaaccccttcttctctcacgagatcagtggtgaggacgacactggggatagagacctagggttctccaagtgggcctag

SEQ ID NO: 11118 - DNA, 939 bp, Zea mays
  Peptide Sequence Number=SeqID_52897
atgggcacgccggagttccccaacctgggaaagcactgcagcgtcggcgactgcaaccagatcgacttcctccccttcacctgcgaccgctgcgaccatttcctagattatgtattgttactgagcttaatccctatttatctgatggaactctcaattgacaatgtcttttgccttgatcaccgaagttatacatcacaccaatgcccaaatgcaaacatgaaagacgtcactgtcctcatctgcccactctgtgctaaaggtgttcgcctcaatccaagtgaagacccaaatatcacctgggatactcatgttaacactgattgtgatccatcaaattaccaaaaagtgatgaagaaaaagaaatgccctgttcctgggtgcagagagacactgacattttccaacaccatcagatgcaaagattgcaccagagaacactgcctaaagcacagatttgggcctgatcataagtgcccaggaccaagaaaagtggattctggctttccctttgtaagcatgctaaggagaagtcagaaagcggagacacgctcaaatagcagtaacaacaatggttcttcgtggtggagctccagtcttgtgaatgcagcaacgaatttcaaatcatcagccgaagctggaatgcagaagctgagcaccgtgactagccaagccttccagaaggctaaggatgggatcgccccaaatagcagcagcagcagtggtgaccttgtggagcaatgtgttcactgcccagcaagattttccaccgtgggggccttaattgaacatgttgagaaatcccaccagatcaactcacaaccaagtcatggccgagtgacgattgatgtttgcccaaaatgcagcaaggcgttccgggatcctgtgttgcttgtggagcatgttgagaaggagcatggaggaacgtcaagagtgtag

SEQ ID NO: 11119 - DNA, 606 bp, Zea mays
  Peptide Sequence Number=SeqID_52898
atggcgagtcaggacatttggatggataaaacaagtgctactgcctatattcatgttcaatttctttttctttggcagggattggatgaatttactcaccaaaggcttattactctcttcggatccgattgggcgagtgatttagtggaaatgcctagccagctattccatggttcattgttgcttggacttattagtagagcaacatttgaatatagagtgggatggcatagaaggcttgtagagtccaccatcagctcgatgttaatccttttaaaagaagggataacaaaaatgtgcataaagttcaacacaaacatacaaagaaaaagacttgagagaattctacaaagtttggagcatacaagaattggcgcagccagtggcgcaccagacactatccggtgctcaggttgcagccctcctcgaactagccgctctcgggttttctcgacgctcatccgctataattcaccggactgtccgttctacacttataccaagcaaggctcagggcgcatcaagatcgccgtcaagctatgggacttctcccttgagcagacaaacaacatcgtttctaccttctctgattctcccctgagctga

SEQ ID NO: 11120 - DNA, 399 bp, Zea mays
  Peptide Sequence Number=SeqID_52899
atgacgggctggcggtggaggaggatagggccaccagatccgatattccctcggctggatccggtggccgtgcgacgagaggccgtggccggctgtggctgccgtggcttggttggctggggcagcgcacggacggcaggctttgtggtgaggcagttcttgcttctcggcggtgatgctgatggtgccgtggtggtgctttgggctgtgacgggcttcttccggtggagtcgatgcgggggcaagaggagcgggctgggctactggcttgggcaagaacatatggcaggtgctgagtcgggcgttttgggcctggttttccttaaaactggatcaattccattcttcttaaatgaaaggcaaagctcctgctattacgttaaaaaagatttgctctga

SEQ ID NO: 11121 - DNA, 1107 bp, Zea mays
  Peptide Sequence Number=SeqID_52900
atgcataatcaccgcagagtggctttaattcagtcgtgtgtcaatttgctcggatatgatatctccgcacactgcaccgccgctaccggaagcactggaatggtcgccaccaatgatacctgcccattgcacatcgataacgaaaacaacttgacgcgcgcccccgccaccatcctacccaccacacaccaccaccaccaccaccgcacacccggcggcgccaagcccttcgaccagacggcggctagcactagcagcagcggcggcggcgtcgagcgtcaggacaggtggctgcagccggtggcggagaacgaggaggaggaggaggagttcagggacatccacgcgctgagcccgccgccgagccagccgtcgtcgtaccgccgggcgcgcggcggcgagccgtgggggtccgccgcgggcgggagcaggcacacgtccgtccgctccgtggggagcgacaccgcgcccagcgagcccttcccgactatgaccagggagttctcggccatggtcgccgcagcagccagcgccgcagcagacagccgtgacgccggcagcgacgtcgtgggcagggccgaggaggaggaggaggaggagctggaggagaccaacccgctggccatcgtgccggacagcaaccccatcccgtcgccgcgccggggcccgccgcccgccgccccgggcgccgacgcggcggcgctggtggccgccgacgggcacggaagccgcgaaggcgggggggtgtccgtggggcaggtcaggaaggaggaggtggagtccaagatcgccgcgtggcaggtcgccgaggtggccaaggtcaacaaccgcttcaagcgcgaggaggtcgtcatcaacggctgggagggcgaccaggtcgagaaggccagcgcgtggctcaagaagtacgagaggaagcttgaggagaagcgtgccaaggcgatggagaaggcgcagaacgaggtggccaaggcgcggcggaaggcggaggagaagcgcgcgtccgcggaggccaagcggggcaccaaggtggcgcgagtgctggagctcgccaacttcatgagggccgtggggagggcgccctccaccaagcgctccttcttctga

SEQ ID NO: 11122 - DNA, 906 bp, Zea mays
  Peptide Sequence Number=SeqID_52901
atgcctgatgccccagacgtgactggccgcctggccgcgcatccacatcgcgatcgcctggacggctggctggatcgcaccggatggagcggagcctgcattgccctgcctcatcgactcgacgctgggtgttcggatgagacgacgacgatggactcggactccgacgacctacttctcccgaacctcctcccctccaccaccaccgcacccgcaccctcctccccatcgcgcgagcagctccaccacttccaaatcccctccctcccgtcccccatcaccgtccgcgcgctcccgtcacggggcctctcgtttcagctctggccctcggcctccaccctcctgcgagtcctccctgccaccccgtgcctcctcccgcgcccgcccgcgctggggagcccgctcagcgtcctcgagctcggctccggcaccggcgccgcggggctcgccctggccgcggcgctcccggcgcgcaccgtcctctccgacctccccgacgcgctccccaacctccgccacaacgtcgaactcaacgagcacctcctcggctccgccggtggcgcggcctccgtcgtgccgctccgatggggcgacgcctccgcgatggcggacgtggccgtggcgcagacggcgtccccgttcgacctcgtcgtggcgtcggacgtggtgtactacgaggagttggtggaccccttgatagagacgctgcggttctttgtgaagggggaggtggcattcgtgatggcgcacatgaggcggtggaagcgcacggacaagaagttcttcggcagggcgagaaagctgttcgacgttgaggtggttcacgaggatccaccgctcgagggctggcgccacgggccggtggtttaccggttcaccgccaagaagcagcacggcaagaagtga

SEQ ID NO: 11123 - DNA, 687 bp, Zea mays
  Peptide Sequence Number=SeqID_52902
atggcagtcgcccaggccgcaacggtggtggctgcggccgccgcgtgccggggcatttcgccgagcgggacgactggcgtgttcaggtggcgaccacgccggcgcgcgctggcacgggcacgcccggcgcggcgcgggagccgagccacgggccgcggccgggggctcgtcgtcgtggccgagttcggcgggacgtacgaggacggattcgaggacgtgcacaagaacatcatcaactacttcacttacaaggccacgcacacggtcctccatcagctgtacgagatgaatcccccagcctacacctggctctatagttacatttctgtcaacgatccattagatggcgattacttccttcgcttgctcgccaaggagaggcaagacctcgcagagagagtgatgatcacgcgcctccacctgtacggcaaatggatcaagatcccacagtccacagacgaagcccgcctgtttgtcgaaatctccccgaggatgatcctcccaattgactcaatcaaggtgccggtcgccttcggcactcgcgtgaacttccacgctgaatatgtggagttcaccgttgtcgagctccatcttccctacaacgcaaaccttgggcgccacatgctctacagggcatctagtcctcaagatgctggggcccaacaacgtcatcaccatcccctctaa

SEQ ID NO: 11124 - DNA, 900 bp, Zea mays
  Peptide Sequence Number=SeqID_52903
atgagggaggaggaggagcccagctggttcgcgcgcggcgaggagcaggagcagcagctcccgcggccggacgagctgatgccgctcacgcagacgctcatcacgcccgatctcgccgtggccttcgacatcacgacgcacggcgccggcggggcgggccccgtccccgacatcaacggcggcggcgcgtcgtcggccgcgggatccagcggcgggggcgggggcgggggcggcgacgagccggcgcggacgctcaagcgcccgcgcctcgtgtggacgccgcagctgcacaagcgcttcgtggacgccgtggcgcagctcggcatcaagaacgccgtgcccaagaccataatgcagctcatgagcgtcgacggcctcacgcgcgagaacgtcgcgtcccacctccagaagtaccgcctctacctcaagcgcatgcaggggctcggcggcggcgggggagggggcagccactcctccggctccggctccgccaccgacgccgccaccgagcacctcttcgccacggggcccgtccccttcctcccgccggcccaccgcgcgcccgccgccgacacctacccgcccttctcccccatgggctccggcgccgcgcaccaccaccaccgagcgccgcagatcggccacttccaccacccggccgcgcgcccgctcgcccactacgccgccgccgccgggcccggtttcgaccacggcttcctgagccgcgtcgcgccgcccgggatgcaccaccaccgcatggccagcgccgccgccgggatggggatggggatgatcgcgccctcctccttcgccgacgagatggaccgaggcgctggcggcagcggcggcggcggcggccgccgcgagctcacgctgttcccgacgtccggggaccactga

SEQ ID NO: 11125 - DNA, 171 bp, Zea mays
  Peptide Sequence Number=SeqID_52904
atggcgaagcatttgagaacaagtccccaacaacatagacatccaaacataacactacaccagacacaatacattcagttcaccattacatccacacatccagaattcaagttcacatacacatctaaaataggattacatccacacatccagaatttgagtacaccataa

SEQ ID NO: 11126 - DNA, 198 bp, Zea mays
  Peptide Sequence Number=SeqID_52905
atggaggtccttcttgggagtaaggatgggttcttgacgaagaggattaagagttatagcacaggccagagtgttcctacaaagccacatgcattgcaatgcctttcaccactgatagcaggatcaaatgctgttgcagaatgtttgttgactaattgcaagtcaaatgaattaaagggaaaaacagataagcactga

SEQ ID NO: 11127 - DNA, 2352 bp, Zea mays
  Peptide Sequence Number=SeqID_52906
atgtggggattcaccaaagtcatccacttcttcgtcatcattaggcatgttgctgtgagggcgagagaggaggagcaagactcactagagcttgctgtgagggcgtgcagaggggtgtgcagaggagcgacgcaggttcctgtcgggtttagggtcgggattggctggaggcggccagaggctgttgtcattgccactttctttatactttctgttgaaaatcctcatgcttgggtttctgtgaactggctacgggacgatgggagggaggccgtgggggcggaggagctggtcggcagcgtggcagcgaactggccggcaatgatggcaatatgctcaaagattggcatgactgttgaaagttcatctcagttagacagaagagcactgaactgtttcatcaactattatttgaatattgatatttcccccttcaaggaaacaccaactggatgccgaaaggaattgttcacctgtcaccaacttgatactatatcagatatcgctggctggccatccagcgagatggggaaagtactctccgatgttcttcaggcagttgatattccagctagtggcatcctagctgatggtgtattatttgatgagaggagtaccattcttttgctagcattcctatcttcgcatctgactaatgatgaaagattggatcaactaaagaatttgatcaacatgaggttgtacaagagtgcggatactaagattgcagcaagacgtatatctcgaggaaagattgatataaagtatcatccatctcagacagataaaaatgatggtgcatgcaccaaccaggagtgggctgcaactattatacagactcaggccagaagtcttattgcaaagaataaatattgtgagcgtaagaaggcaatatttatcctgcaaggtgctttaagggcatggtcagccatcatctcgaacaggaaccgtagttgtctaagtattgctgcctctattccctggcaagcacaaggtgcatttccctacaaattcctcatgatttctggattagttttccccagttacattgttcgcgtccatttcttttcaggaaacaacagatatttcatttttataatggaaaggcatcgatttgttcagatgagaaaatctgccattatgattcaactggctgtaaggatttggattagaggaagaaaaaaatttaagaacagtgattctttcaaaagctgtgagttccttgaaggtaaaactccacccaaaattagtagcattgctccttcccctcaggagcattgtagtggtggagataaaacaatagcttcgcccacagcatgcaagcactgtgagcatgtgctcacagtgagagcttctgctgctgctcctattctttattttgatggcatggacagtctagactcaacaactccactacagtttagcggcaatcaaagcaactttataacttctaccactcagctgtgcaaaagtgagcatgactgtcggtcgtgtgtggttgagaaatccaattcagtttccgtcagtaagcttgtgagtgcggatgacattcagtgcagcagcagtatttgtttccctgtctgcaaggaactagtggctgctcaaacgatacaaagtgcatacagaaggtttttgaacaacagaaacaggataactggtgcaattaaaatccagagccactggcgatgctattcaagatggtggcgaaaggttcttcaaacgaggaagcgagctgtgattgtcattcagactcgtttccgtggttgggttgcacgacaagatgctattagaactagaaactctatctgtaacatacagagatggtggagaaaggttttgttccttaaattgaggaagcaagcggcgttagttatacaggctcatttccgtggttggatagcacgacaagttgcttttagaactagaaaaagtattactataatacagtcctatgtcaaagcctaccttgtgaggaaggcttcgaagcaagaagttgcacatataagatctagactgcagaagtcatcttcacaggttgatgatagctcccagctgtctcgatttagccgtcaacttgccagtctaagcacttatgttgaagagctaagagagtattccaagaaatgctgcgagaagctggtcgctgctggtgctgtagatatattgctaaagcaaatatatttgctgaaccgtgggattgctgaccaggaggtcttgaagcaagtgttccttactctcaggaacattgctcgatattcaaatcttagacaggtgttagccagcactgcagaatctgttgaaatcatcttccaggaattactgagcttagctgtagttggtgccgccctctaa

SEQ ID NO: 11128 - DNA, 276 bp, Zea mays
  Peptide Sequence Number=SeqID_52907
atgcagtggtacagaacctttggcttgcggtcgcacgacgaggctgagttggcttcggatttcctaatgggctcccattcgctcgaagtttccgcccttgggggttttcttaggtgtgtcatagtggcctcaacgtttttggcgtccgagggaatcatggtaggtcgaccttgctacagattgggcgatagagggcatcaacttcttagatgcacgtttgccaagcgctccgttacagctgccccattcgccattgaggcaactcttgcttcctag

SEQ ID NO: 11129 - DNA, 1262 bp, Zea mays
  Peptide Sequence Number=SeqID_52908
ttcgacacgggctaagcgagaaccacctcttcgacgcggcgcgcgcgtacgtggccacccggatcgacccgcgcgccatgcgccggctctgcctcgcgcgctcccgcaccaaggagcccgacggcagcggcaggtggaacacgctcctgtgcatggagcccgggggctccaccgtcgacgtcttcggcggcgtcgagtttacgtggaactgcgtcgagaccggcgggcgacgacaagaagggcaagggcggcggcgggcggccccgcgagtccttggaagtgagcttggacgccgagcacaccgagacgacgttggagcgctgcagctgcgggaccgcgcgcttaggatcttcatgaacgaggggcgctcgtggcacggcatcaaccaccccccacccgccacgttcgatacgctcgccatggacccggtgctcaagcagtccgtcgtcgacgacctcgacaggttcctgaagcgcagggactactaccgccgcatcggcaaggcgtggaagcgcggttacctgctctatggcccgcccggcaccggcaaatccagcctcgtcgccgccatggccaactacctccgcttcaacctctacgacctcgacctctcggaggtgcgcctcaactcggcgctgcagaagctgctcatccacatgcccaacaagtcagtgctcgtcatcgaggacatcgactgctgcttcgacaacgctgccgcgtccaggaacggcctggacatggaccccaactactcatcgggatcgggatcgggatcgtattcctcggacgaaaactgggcccagccgcgacttgctcccccgaaggtcaggggcatcaccctctccggcctgctcaacttcatcgatgggctgtggtccacgtgcggcgaggagcacattatcgttttcaccaccaactacaaggaccgcctggactcggcgctgctgcggccgggccgcatggacatgcacgtctacatgggctactgcgggtgggaggccttcaaaactctggccagaaactacttcctcgttgacgaccacaagatgttcccggagatacaagaacttctctcggcggtggaggtgacgccggccgaggtctccgagatgctgctgcggagcgaaaacggtgacgtggccctcgggattcttgcagagttcctccgggagaagagacggagggggagaaaagaaacaaaggaggagaaggacgcaacagaggacaaggatgaggaggaggtagcagagaaagctgcgtag

SEQ ID NO: 11130 - DNA, 384 bp, Zea mays
  Peptide Sequence Number=SeqID_52909
atggggaagtttacaggtaaaattcttcccaaaggactagtttggaaactcaaatccccttcgggattgaaggggattagagaggaaattagttcatttccacctcaaccccctccaatcctgaaggggatttcaggttcccaaagtagccctgacggggatcccaatggctatgttggttgcatgtggtctatttgtggcctccatgaccagggttggaaggaacgtccggtatttggaaagatacgttatatgaattatgctggttgcaagagaaaatttgacgttgatgcttatatttcgtacgttaaaagattggttcctagggccaagaagaggaaaactgaggaaggtgaatccacggtcaaagaatccaatgtctga

SEQ ID NO: 11131 - DNA, 453 bp, Zea mays
  Peptide Sequence Number=SeqID_52910
atggaggaattctccacggggaatgagggatcggagcccccattgccatcactagcagtgagcctccctactccatgctacggtgagacctgctacgacggcgtggcccatcgtcagtgggcgaggcagtggtcgcggcgagtgaccgcgcccgtggccagggcgcatcggggcgcgtcgcggcttgctgcggcgacgagaccgatggtcggtgcctccatagtccggctgtggtggcgccctgtgatggtgtgtcatggtgccgggtgtggcgacggttcttggcttgctgttgacgtgcatggcagggacgcccgtgacgtgcacggcgggtcctggcctgacgatgtgttggaggacttcttgggcgaaatccttggcgacgatgacgcccgtgagcgtcgttcccctgatgggggcgtcgcattctccagctctgtcatccatgggtga

SEQ ID NO: 11132 - DNA, 1470 bp, Zea mays
  Peptide Sequence Number=SeqID_52911
atggattcttctcttgtcctagcgcttatcgccgtcgccttgcccgtgctcctccatctcctaaagaggggaaagacgccatggcggccggccgcggccaagctgccgccgggctcccttggcctgccggtgatcggccagagcatcggtcttctccgcgccatgcgcgccaacactgccgagcggtggatcctggaccggatacaccggtacggtccggtgtccaagctgtcgctgttcggcaggccgacggtgctcgtcgcggggtcggcggccaacaggttcatcttcttcagcagcgccttagcgatgcagcagcctcggtcagtgcagcggatcctgggggacaagagcatcctggagctcacgggcgccgaccacaagcggatccgcggcgcgctggtcgagttcctcaagccggacatgctgaggctgtacgtgggcaagatcgacggcgaggttcggcgccacctcgacgagtgctgggccggccgctgcaccgtcacggtgatgccgcacatgaagaggctcacgttcgacatcatctccctgctgctcttcggcctcgagcggagcccgctccaggacgccctcgcgggcgacttcgcccgcgtcatggatggcatatgggccgtcccggtgaacctgccgttcacggcgttcagccggagcctcagggccagcgccagggctcgccggctgatcgcggggatcgcgcgggagaccagggccaagctggaaaggggcgaggcctcccgtagcagcgacctcatcgcgtgcctgctcagtctgaccgaccacagcggcgcgcggctgctgagcgaggaggagatcgtggacaactccatggtggccctcgtcgccggtcacgacacgtcgtcaattctcatgacgttcatggtccgccacctcgccaacgacccggacaccctcgccgccatggtccaagctgccaccggtggcgacgcagagcacgacgagatcgcaaagaacaagggcgacggccagaccctggactgggaggacctggcgaagatgaagtacacgtggcgcgtcgcgctggagacccttcgcttggtgcctcccatcttcggcaacttccggcgagcgatgcaggacatcgagttcgacggctacctcatcccaaaaggatggcaggtgttctgggcggcgagcgtgacgcacatggacacgggcatcttccacgagccggcaaagttcgacccgtcccggttcgagaaccagtcggcggcatcggcgccgccgtgctcgttcgtcgcgttcggcgggggtccgaggatctgcgtcggcatggagttcgccaggatcgagacgctggtgacgatgcattaccttgtcaggcggtttaggtggaagctctgctgcaagaacgataccttcgccagggaccccatgccatcgccgctgcacggactgcccatagaacttgagcagaaggcatcgccatga

SEQ ID NO: 11133 - DNA, 168 bp, Zea mays
  Peptide Sequence Number=SeqID_52912
atggcgttgtctgctgaagtcggaacacgttgggtgcagcggcggagaacatgtgacctccaaaggtttacaaagaggcactacctctgcatggaaaaaggctttgtgagggttttgtataagcttgctccatggcagctggtgcctgaaacaatttatacgcaataa

SEQ ID NO: 11134 - DNA, 789 bp, Zea mays
  Peptide Sequence Number=SeqID_52913
atgggtgttaagctggatcggagcctcgtggccgttgttcgctctgctggaaactcttctcttctgcaagggcaaggctgcctgttccagctcgcttttgggaagctgaaatgggatggcaacaaattcccaggcctgggacggcaatgcaagcaggttcaggatcaggactcagagagctggaactgcaccaggttctctaggcttatccgtgtgtcccggcctaacgttctgattccttttgaatctgggcttgctgttgatcgtatggaatggaggttcctggaatggaagggcttaacaatcctcaaaggtcacactagcgccatggccagaggcagagccaggctgcagctgcaggagggttcagccggctgccggcagcagcctatatataacagtagaggcgcacacgtcccaggcggcaggaagctcacgccaagagaccccgctcccgatcccgtctcctcctcgcagtcgctgcttcgcgaggagccgaagatgctgctcctgcgggcgtcgacgccgttcgcgtacgccaaggtggacaaggtggacgcggaggaggcgcggcacctcagggcgcagttcctcatccacaaggtgctcgagaagaagagtccccggccgtcagcgctggcgcgggccaggcccaggatcggcgtccgcctcaagaagctcaggctcgccgtccgggccctcagggcgcgcgcgtgccgtgccctgcagaggcacctcgggaacctgaggcggctcgttgggcgcggaggagttcaggggtcgccgtga

SEQ ID NO: 11135 - DNA, 1731 bp, Zea mays
  Peptide Sequence Number=SeqID_52914
atggccaaggggcttggcatcggctgcacctatggaatcgcctgtatgtcatgggcgctggtgttctggagcctggggcagtcgttttcgaaccttggagcgttcagcaaagggaagattgccggctacaagctgctggaagtgataaggcagaggccaacgatagttcaggacacggcagacgggaggtgcctcgacgaagtgcatggcaacatagagttcaaggaagtggccttcagctacccttcccgcccggacgtcatgattttccgagacttctccctcttcttccccgctgggaagaccgcggccgtcgtcggaggcagcgggtctgggaagagcacggttgttgctctcattgagcggttctacgatcctaatcaggggcaagttttactcgacaatgtggacatcaagacgctgcaattgaagtggcttagggaccagattggcttggtgaatcaggaacccgcacttttcgcgactacgattcttgagaacattctttatggcaagcctgatgcgacaatggcggaggtcgaggctgcggctacttcagctaatgcccatagcttcattgctctccttcctaatggctacaacactcatgtgggagatagggggcttcagctctccggtggtcagaagcaacgcatcgccatcgcccgcgcgatgctgaagaacccgaagctcctgctactagacgaggccaccagcgcactcgacgctggttcggagagcatcgtccaagaagccctcgaccggttgatggtcggcaggaccaccgtcgtggttgcccacaggctatcgaccataaggtgtgtcgacatgatcgcggtgatccagcaaggccaggtcgtggagactggcactcacgacgaactcctcgccaaaggaagctcgggagcgtacgccgcgctcatcaggttccaggagaccgccaggaaccgcgcgtgcccgtcgacccgcaagtccaggtcgtcccgtctgagcaactccctctccacccggtcgctgagcctcaggtcggggagcctgaggaacctgagctactcgtacagcaccggcgccgacggccgcatcgagatggtttccaacgccgacaacgaccgcaagtacccggcgccgaggggctacttcttcaagctcctgaaactgaacgcgccggagtggccctacaccatactgggcgctgtcgggtccgtcctgtccgggttcatcggccccacgttcgccatcgtgatgagcaacatgatcgaggtgttctactaccggaaccccagcaagatggagagcaagaccagggagtacgtgttcatctacatcggcaccgggctgtacgccgtcgtcgcctacctcgtccagcactacttcttcagcatcatgggcgaaaacctcacaaccagggtgcggaggatgatgctcgccgtgattttgaggaacgatgttgggtggttcgatcaggaggagaacaactcgaaccttgtcgccgctcgcctctccacagacgccgccgatgtgaagtcggccattgccgagcggatatcggtgatcctgcagaacatgacgtccctgctcgtgtccttcgtggtgggcttcatcattgaatggcgggtcgccctcctcatcctcgtcaccttccctctcctcgtgctcgccaactttgcccagagcgacgaggaaggagaaggacccaaggacgcggtgcacggcgccctggtccatggatag

SEQ ID NO: 11136 - DNA, 951 bp, Zea mays
  Peptide Sequence Number=SeqID_52915
atgcccctcccaccacaaccgcgcagcaccgtcctgggcatggcgccccgcgcggggcgctcctcggcggagaggggctcggcggaggccgcagaggggagcggcgagaaggagatgagcagcgcgcgggaggaggagaagaagatcgacgcggagatgaggaggaggagaagcagtaggcgaagacgagcaccacgagctcgctcccctccagcagcgagcgctcctccagctccgcttgcaacaacctcacggaaggaggggcggagagcgacgaggagatacggcggggtgccagagatgggcggcgcgtcggcgtcggcctcgtcgggcgccggcgcggacgagcgtcccaagggggaggacggcaagcaggggcaggtggcggcgggggcgcagcctccagcgggcgggaagaagcgcgggcgcacggcgggggacaaggagcagaaccggctgaagcggctgctgcggaaccacgtgtccgcgcagcaagcgcgggagcggaagaaggcgtacctgacggagctggaggcgaaggccaagggtctggagctccgcaatgcggagctggagcagcgggtgtccacgctccaaaacgagaacaacacgctccgccaggttatagatgttagtggaaaagaattcaaattcacctgggcatctggacgtggcgaattgtgtgatatttatgaagaacgccagagtggagaggatggaaatgggttgcttctggagtgtggctctacttggcgcaaggtgcatgtgaaccctatagcctgggcagttcctacaaaacatgagggtgatgccagtgaagaagcttctctcgccgatgagacacttgcatcagaagtagtgctaacccggaagaggaaaataggaagctctttgtcagtagagccaaaccatctctctgatgaacttgaaccaaagttggaggatgcttag

SEQ ID NO: 11137 - DNA, 417 bp, Zea mays
  Peptide Sequence Number=SeqID_52916
atggacattctagggaacataacggacaccagcgtcgctgacccctatggacatttcacctggtggctgctgccgttgatggagccctacagcccgacaacgactttactcatgacgtctccatgggagatgcacgataggttggaaggtgtcgtggggaaagaaaaagggaaaatgagagcaaaggggaaaggcggcggtcgcctcctcttcccctgcggccgagctcgccagtcgcctgaactcgtctcgcccgctgccgatctcctctctctgctcgtcgcgccgcaacctggagaggggaccgcgctcggtcgactaccacctggggagcgggcgggcggcgtccgccctctgcacccccccggtgtccccgcgaccggctccggcgcggccggcacacaggtccgcaggtag

SEQ ID NO: 11138 - DNA, 297 bp, Zea mays
  Peptide Sequence Number=SeqID_52917
atggcggatggcggcgtggcgatggtggatgtaacaccccaggttaaagaaaatagaaaatgtgagttacatagtgaaccagaggacacccctatttttgttaggatacttattcaagactgtaaccttgctgacgaagagtacgtcctcgtgccggagcaaggagctgctcaggaggtagccccggacccagcaccagagcctgcaccagaggacctgcctgccactgctttggaaggcaagccccggtttatgcataacctatttgtcggcgtttcgagacaggggggtccctaa

SEQ ID NO: 11139 - DNA, 503 bp, Zea mays
  Peptide Sequence Number=SeqID_52918
gccacgatcccgactccgagggctcggtggataaaagtcgagcgcacgcgctttttctcccctatcccctctttagcccgatttctcctcgccaccagaacgccaccgcgagccgtgtgaggggattcagtccgccgtcgtcgaccggtcgatttctcagcgattggaccgaggtctggggtgcgggagctccacctggtccggtgggtcacggctggaaccttgcctgggcgcatcgcgcggcggacgaccttgaatttctcgtcgtcgctgcatcttcgccgtgcgccgcggaccgggcagagcgccactcgattcccggtaagaaccttaccaacgcgttcgcaatgttatcctattcatttagtagtgttctgagcgaaggtcgtgagctgggggcgctaatggcggaatgccggcgatggcgccgccgcgtagagtcgccccgacggccggagttgggtgatgcagctgagctaatgcgtgggccgttgatcttctaa

SEQ ID NO: 11140 - DNA, 123 bp, Zea mays
  Peptide Sequence Number=SeqID_52919
atggtgcacctgacactgtccaaagtcagagcagcaaagtcagaggtcaccggtctatcaggtgtggcaccggactgcccgatgcagcaagacgacaaggcgccccaacggtcaactgcttag

SEQ ID NO: 11141 - DNA, 1110 bp, Zea mays
  Peptide Sequence Number=SeqID_52920
atggcgcgggaggaagcagtgttgcggaaggcattgttggtcattattgttggtactaggcctgaggtcctaggggttgaagtcattgatgaagtagctcgacactttcacgttgaggcgggcgcaatgtccattcatcaggccttgctagaggacatcattctgttcctgtcggacgaggatgcagcttcaagggtctttaatgagggaaggattttcagaggtccacagtttgatctcgtttttaagagatggacgcgttgtgcaaatgcttctgcagcgacgctctcaaccttggtcaatgtggaaatcaaaggcattccggcgcatgcgtggtcaagaggtgctgcagaacatctattacgagattcatgtcttatctctaaattacacctgccaacagttttgaagacggatttttcgtccttcgggttgaggacgtggtgtgtggatctaaagaattttcaccgtgaaatgatcctcctcatctctgagtcggggctggcagcaagagagaagcgatgtctgtcctacaaggttaatttgatggctattcccgttgaagcctctggatcgaccgttgattcctcttcgctgatcgacgacaatctccctggtgcatcttctcgtggagaggaggaaagcctgatggagtctgaggtctcagttaagggcatggagggcgaagcgacaaaggtgctgccaccagatccatacccaattagtgggggtctagtgctaagcgacgactttaatgaagacccaagggagattttgctcagtcccgagaaatcggctctacaaactgaggacatggtgcaaggagatatcaatctggttgggagagcgttgcaagttcctgagaaggcgggcgtgctggactttcaagttgttgttgggctcgaggatgttatctctggtgatgggtcgttgggacaggccgctatagattcaccccaacaatcggttgggttgttggagtctatggggtcggtctcgccccatggtcgggtcgccgtctctggtgatgggccactgggtcaggcctcatctgattcgccccagcacttggctgggtcgctagagtctgatgggccggtctcgccttaa

SEQ ID NO: 11142 - DNA, 330 bp, Zea mays
  Peptide Sequence Number=SeqID_52921
atgcctggcgccgctgtctcggacccgattgaagggcgccgcccatctagctcgttctttgtgtgcagtggatccatcatcgatgatttggagctgttcaatgacgcagacattgccatttcttccccccaaggtcccgtaatgtcttcaccgccttgttcaagttccttaccgctagttgcattaggtggaaatattgctaataaggataatgattggaaatttatggtactatgtgatttttgggaggaggaagggagacgtgatgttccaagtgagatgcagatgtattctcaactaggactgaatgaagaggacaaggcaaagtaa

SEQ ID NO: 11143 - DNA, 276 bp, Zea mays
  Peptide Sequence Number=SeqID_52922
atggagtctacatgctttgacccggggtcctggcctggtgatgtgctagggaacatcttgggtgaaagcctcggcgaagaaactgcacgggaaaatctccatggaatggtaacgcaagaggccttcaactgcaatgaaggtgtgtcccatctcatctgtggcaagaatgctggtctcagcagcagctcactgaagctccacttgcagaaggcgcacaagaagatatcatctgggaagactgggagcgtagacagtgcccattgccatcctcattga

SEQ ID NO: 11144 - DNA, 552 bp, Zea mays
  Peptide Sequence Number=SeqID_52923
atgaccaaagcccttctccgaaaagaaaagcaacctctttcgatgaaatccctgcctttgatggaatctttgaagaaagctatggctgatgcaaaaaagcccaggtccatacaagacttgctgaaggagcaggtggctaaactcagagaacaagcatccggtggaggcggagggaatgggaatcgccgtggaggcagtggtggttctggtggcccagatgatgagtccttcaaggaagcattggatgaagtagtccaagttatcttagccactgttgctttcatacttgtgtacatccacataatcagaggggaggagctttaccgtcttgccagggactacaccagatatctcgtcactggtaagagaactgcccgactgaagcgttccatgcaaaagtggcacaacttctccgaaagcttcatgcagaaggaaggctcagaagaggaccaatatgagaaacctacatggtggcaacagcctcagaaacttgtgcatcttatggaggagctttgcaggggaaattggcgtccccatgcccaggagtcgtag

SEQ ID NO: 11145 - DNA, 441 bp, Zea mays
  Peptide Sequence Number=SeqID_52924
atgggcaagagcaagaaaggtggtggttcttcgcatcattccggcgacaagcgcaagcacgagccgactcctccctcggaggacttcggcaactcggagtactcggaggaggagttctcctccgagtctgagggctctccggctcctgcctctcccttggcatcgtctgatgattcagacaactcccaagggatcgccgcggaggtatggacttacattcgggccgtcgagcgcgccgggctcgagggctcggatgagtcggagtactcctcggacaaggagaactcctccgactcgtccgaggaggacagcggcggcgacggtggtgacggcgacgacgacggaggcgacggtgacggcggcggtgacagcggcaagggcggtgacggcagcgacggcagcaagggcagcagcaagggcagcaacaaggccagtggctag

SEQ ID NO: 11146 - DNA, 558 bp, Zea mays
  Peptide Sequence Number=SeqID_52925
atggagaggacgaagggcaaccgcgccaatcgtcacacggatgaactcgacaagggagaatggtcagtcgagcatggaacggtacaggggctcggctgggggatgcggacggtccggccagagagggcggacggcgagcacgagttccggcgaggctccacggatggcagcgagcaagtgcttgaggagtgcgtgagagagacagagcgggagttcgtcgtcggggcgtggacgaggtctgcgcggtgctcggtgcgcgggtcgtggcgcgggaaggcgaggcggacgaccggggggcgctcggcgcgcagcgcgggcgcggcgcgcggggcggtcgggcgtcctggcgcgggcggctcgaggttgcgcgactcggcgcggtcgtctggcggggggggcttgagcggggatgcggggctcagctgcgggttcctggcggcgcgcgtgggagagaaagggggaagggaggagagagaggtggcggtggtggccagcggggaggggcgcggtcatctgggaggcaaggggcgcgcgctaatgggccttggtgggccttag

SEQ ID NO: 11147 - DNA, 525 bp, Zea mays
  Peptide Sequence Number=SeqID_52926
atggaggcatggttgattaggccaagggaccatgccgggatcaggcttctaggctttgtcctggaggttccatatgtggctcctctcagctggatccgagatgcttcgcctggtcataaatggagaaaggtgtctcaggtgcgggcgtcattggatcctatctctagcggcggtagtgctcttatggcgcgagctatccccttgtatcggatgagggctggctcttctcctcctgacaccgtgctccctctcggtgacatggatgttgcccgcttccaggagttctgccgctcgcagcgcaaggagtccttcggcctccagcgctggctccagctcgtgctcagtgatgacgcctaccgccgcctcgccctccggtcgtgcattccacgctgctgccgttcctccgctgctgctctgttcctgacccatacggccgtgcgtgctgtgtacattcgttcaggacacggtcaagccgccgccgccgccatccgaagccaggtaataaagagggcagcggccacctaa

SEQ ID NO: 11148 - DNA, 156 bp, Zea mays
  Peptide Sequence Number=SeqID_52927
atggatgaagttgccaaagcttttgaaattgcaatgttgagaggggaaatcagaatattgtctgctcactcgacgaacaaaaccaagaaccttgaatcacaggaggagcccacgatcctgctcctgctcgacgcggaggcccaggccttggcctag

SEQ ID NO: 11149 - DNA, 531 bp, Zea mays
  Peptide Sequence Number=SeqID_52928
atgggtcagcgcgagacggagcgcgaaggggggaagaagctggagggagacaggcataaaaggggaaacccgcggccttcgtgtttgtcccgcgcccaggtcgggcgtaaggaaaggatccagggtaatgatggcgcctcctatgacgtggtcggtccgagccctgggttgggcgaggtggaggctcctccgaggtcgaggtcgagtctgtcttccaaggccgaggtcgagtccgagcccctgggtcgggcgaggcggagaccgtcggctgaggccagggctgagtccgagccctggggtcgggcgaagcggagtttgtcgtcttccagggctaagcccgagtccgagcccgagccctggggtcgggcggagcggtgttcgtcgtcttccggggttgagcccgactccgagccctggggtcgggcggagcggagttcgtcgtcttccagggctgagcccgagtccgagccctggggtcgggcggagcggagttcgttgtcttctggggctgaacccgagtccgagccctag

SEQ ID NO: 11150 - DNA, 285 bp, Zea mays
  Peptide Sequence Number=SeqID_52929
atggtcatctcggccatcgtcgaggactggcgtcgtgccatcgcgctcagccagacgacgctttgcaccaccatcaccgacttgcgatctcggccatgtccagcatgtggatggtaccgtagccatgctcctgaggctgtcggaggccttcaacctcatcagccagatcgagttctactacaagctctcttagaccgagacaatggaccggggcgggaacgcatccgcagtagagcaatgcgatgctgcaacatggcaacacacggtttccgcttccagcaataa

SEQ ID NO: 11151 - DNA, 162 bp, Zea mays
  Peptide Sequence Number=SeqID_52930
atggctgggagggagcgcgcggctcaagggaggaaaggcaaaggcgagccaggaatggagctcacgccggcgaggaagagagagatgggctggacatttaaagagccaggggcggctgggcggtccggcgaattcgctgatattttggatcgagatttgtag

SEQ ID NO: 11152 - DNA, 652 bp, Zea mays
  Peptide Sequence Number=SeqID_52931
gtgcatgtgggcccgataccttgggaggttctgccacacggagcggagttcgtcgtcttctggggctgagcccgagtccgagccctggggtcgggcggagcggagttcgttgtcttctggggctgagcccgagtccgagccctggggtcgggcggagcggagttcgtcgtcttccggggctgagcccgagtccgagccctggggtcgggcggagcggagttcgtcgtcttccggggctgagcccgagtccgagccctggggtcaggcggagcggagtttcctatggcctctgaggccggacttggctgctgtcagcctcactctatcgagtggcacagcagtcggagcggcgcaggcggcgctatcctcttgtcaggccggtcagtggagcggcgaaaccacctttgcattaaatgctcctgcgatacggttggtcggcgtggcgacttggccaaggttgcttcttggtgaagactgggcctcgggcgagccgaaggcgtgtccgctgctggagggggtcctcgggcaagacctttgtgctgatgggggttaccagctgagattaggagtcttgaggcaaggaaagggcttcgaggaactaagtgaaggtgaaggccaagcgacggcttgtggaccgaggtaccatgactaa

SEQ ID NO: 11153 - DNA, 192 bp, Zea mays
  Peptide Sequence Number=SeqID_52932
atggcgagagtagcgtgtaccctctgtggcaagaggctagacggtggtgtatctgtgctctcggttggcgtgaacctgatctgggctaagtgctacatatgtcgtgtgattggagatcctcaactgagtataatcgatttggatcgtcgtaacttcgcggatatgaagacttggtcactgacttacacgtag

SEQ ID NO: 11154 - DNA, 855 bp, Zea mays
  Peptide Sequence Number=SeqID_52933
atggcccctcctgcgacgtggtcggtccgagccctgggtcgggcgaggcagaggctcctccgaggtcgaggtcgagtctgtcttccgaggtcgaggtcgagtccgagcccctgggtcgggcgaggcggagaccgtcggctgaggccagggccgagtctgagccctggggtcgggcgagccggagttcgtcgtcttccggggccgaggccgagtccgagccctggggtcgggcgaggcggagttcgtcgtcttccagggccgaggccgagttcgagccctggggtgggtgaggcggagttcgtcgtcttccagggccgaggccgagtccgagccctggggtcgggtgaggcggagttcgtcgtcttccggggccgaggccgagtccgagccctggggtcgagcgaggcggagcttcctatggcgcccgaggccggacttggctgctgtcagcctcactctgtcgagtggcacagcagtcagagcggcgcaggcggcgctgtcctcttgtcaggccggagccttgggggtatccctaattatggtccccgacagggcgtgggcttcaagggcgtcggtcatgaagcactcttgcctgggatcatggcttgccctgttggacgaggagatgatgttgtagctagaatccgacatgaggatataatgcaccaaatccctgacgagggcagtcagggccctaaccaattccctttcattggtgacgaaatcaaggctttgaaatatgatggtagggagccattcaatgttgtggatggccatttggagcttggcggagagggtgacaaaaacacacaaaggcccctacatggcatgccaactgtcgatgtttcaaattag

SEQ ID NO: 11155 - DNA, 408 bp, Zea mays
  Peptide Sequence Number=SeqID_52934
atgtcgggccccacgggcactatcatcgtggggacaacaacacaactcgcctatgagagcaatgtggaatgttgtgactttgtggagggggcattgcaatataggaacacccacacaaagcaatggttgcatcgcttcgatgagaagaagcgcaaggccaacgacgaggagatagggaagctcttgatggctggttttatcaaagaggtgtaccaccccaagtggttagccaacatgttgttggtgaagaagaagaacgtgaagtgcagaatgtgcgtcgtgtacacaagattgaataaagttcacccaaaagactcattcctgctaccacgaatacaccaggtggtcgactctacctttaggtgtgaggtgttgagctttattgacgcctactctgagtaccattag

SEQ ID NO: 11156 - DNA, 405 bp, Zea mays
  Peptide Sequence Number=SeqID_52935
atggaactactgatggagatattgctatgggatggtggtattcaacttttgcttggtccaagtggaatgggagaaggagagctgaaaaagtatatgatggattggagaagtaggcagcaattcttacttgaagctgcccatcggtgtcaagaggctgggctctatgacaaagatgtggaaattcacaaaagagtaggagcctttgccatggctcttcagacaataaacaagtgcctatctgatgcagtcagtgccatggcatggagtatgttagacggcgagagtcgtgctgctgccctaattcattctggcaatgaaattttggagacaactagaaactcttctgaagccaggttattttcctctcctattctggcactggtagaatgctggttattttgctga

SEQ ID NO: 11157 - DNA, 252 bp, Zea mays
  Peptide Sequence Number=SeqID_52936
atgacgaggcacaacttcttctccagcgagagcgactcctgcggtggagcgaagagggtgggatcagagaagatattctcgtccaacggtggaggcacggacgagaatcagagaaaaacacaaaaggaaaaagacttggttggagcagccaagactctacgcagtctgcgtgcaccggacagtgtccggtgcgccaggctggagtctggtcaacaggccgctctcgggaattcatcggcggcgtacggctaa

SEQ ID NO: 11158 - DNA, 423 bp, Zea mays
  Peptide Sequence Number=SeqID_52937
atgcgagttcggggctcgctatccgtggaaggcgaggagagacggcgcatcggctctcgatccgcgctctacatggaaggtgaggcagatcggggggagtggctcgtggcagtcggctcgacgtcgtcctccgcgccgtccggcgaggtgtcgtccaagcacggcggcgacgactatgggatcgtgggcgggcccaacggcaacggcgtcgcgcccgccaccaagtccaccgtcgtcgagaccaccatcgagaggccgaccgttgaagatttggagccgttggcgcaccggacactgtccggtgcacaccggacagtccggtgctcccatctgaccgttggctcggccacgcgtcacgcgcagattgcgcggccggccgttggctcaccggacagtccagtgcaccaccggacagtccggtga

SEQ ID NO: 11159 - DNA, 744 bp, Zea mays
  Peptide Sequence Number=SeqID_52938
atggagggttcctgggattgcgcgaccaagagcagggcaaggggaggatgtcgggggcaggggcagggcagaaccgtgcgccacgccactgtggacgcctacgcgcaattgataatgccggcgtcgtcgtcgccgtcgccgtcgccgctcgagatcgtgacctgctccgctctggaggatccgtggtcaccaatgatggccatcgccggcgacaagttcacggtggtgcagcgggtgccgagggacgtctcggacggcctcctcggcaagttcgcggacaccagcgcgttcggcttcgactacgaccgcagcgcgctctggtcgccgctggtgctgcgtcccgaggccatgctgctcgcgcagtgcccggccgggcgccgcggccgacggcggctacgatggcggcagcgtcgccggaaccggaggaagtattatgcattcaaagagtcaatactgttaccatatcgtctctctatgatcaacgacgatgggaagctgaggacgctatgtaatgtatatacactcggcaaagcctggaaaacactcggtgaagtctttgccgagtgtagcactcggcaaaaagagctcgacaaactgtacatcggcaacggcttctttgccgagtactttttatcgggtactcggcaaagactttgccgagtatcactcgatactcagcaacgaaaagccgccgtcacgacgattggtaatggagacggcgccgttgcggagtgttctaggtga

SEQ ID NO: 11160 - DNA, 249 bp, Zea mays
  Peptide Sequence Number=SeqID_52939
atggccagcagcgcggtggccatagccttctcgggtcctccccacaggccccacaccgtggccagcgaccagcagcccggcggccccctgtacttcgacacgacgggcctcatgggggcgctgcagcaaatgtcgctgcaaggaaacaaaatagatgatttcactcatttttgctggacatttccccttaagcacaagtctaagtttagctacactattaagtgcttccaagctaataatgggacataa

SEQ ID NO: 11161 - DNA, 440 bp, Zea mays
  Peptide Sequence Number=SeqID_52940
gggatccggagggagatggggtgcgcgcggcaccagagcaggagggcgtgcggccaccatggcaagcgcaggggcgaactggactgaacccgagctcgaggaaagaggaggaacggctaggcgaggccgcgacacaggaaaatggcggagaccatggaaaaagggactcagtcgtgggagaaacagagcaggggatgggtgagctcgaagccgatcctgggaaggcgaggggaaggagctcggactggagaagcaaggggagcaagcagcgggtgcgacatccatggaagcaggggagcgagcccggggagcaggagcaccgcgcaggaggaacagaggccgagctcggcgcgcagaggaccatggctagggaggacggagctcaagcacagggagatgtgcggccgagcgacaacagggaggaattggaatggcgttag

SEQ ID NO: 11162 - DNA, 201 bp, Zea mays
  Peptide Sequence Number=SeqID_52941
atggagcagaatttggagcctcctttccctctgcatgggggtacttccaggtttgagattatggccatggatgatggagttgtgtgggacgctgctactcttgggatttttctctattactttaatggaaggtgtataacaccagacacattagattggggtgatgagctatatgatgctgaatcaaattattttctttga

SEQ ID NO: 11163 - DNA, 261 bp, Zea mays
  Peptide Sequence Number=SeqID_52942
atggcgtgcgggtgccctggggcctgggccctgctgctgcgtgcgcaatttaccatgaccgtcggtagacaaatcctagccgtccatccgtcgtggtcccgcggctgccgtgcccgagcgtgtcacgccaggcttgtattgaccaacacaagctgttccctgtggcttggaccctactattttgtgaagaaccatttggatcgcgatccattaccacctctactcgtaataccccggggaggaggacaaagttactgctag

SEQ ID NO: 11164 - DNA, 501 bp, Zea mays
  Peptide Sequence Number=SeqID_52943
atggaggccgcagcgttcagggaggcccaaaggataaaggaacttgaagaataccaatcgaaggataacatagagctaaaaattgtgctagccgccatcgatcaagtggagaagaccatggatgaagttgttcttaagatttgtaattacatttgtgacaagttagtgcctgagcctggagtagaagaaaccttcggacgtaagcctaaagaaaccctgaaaactagtgggagcatgtcttttaccttcttccatgatgagatagtgcttgatgaaagagatgaataccagttgagaaatatgaagcatcttttctttgcgcttatcaacatgttgctggatagcttcgagattctgaatttcccgatcgaggtcatcctatggcgaagggtcgataacttttctcttttatgtttatgcctcatggagaagtgtttcttcatcctggttctaatctatgggagtaaggatagaaccatgagattttttggatctacataa

SEQ ID NO: 11165 - DNA, 2490 bp, Zea mays
  Peptide Sequence Number=SeqID_52944
atggctgagctggtccgcctctaccgctcgtccgacctggggatgcggctcccggcctacgacggccgcaagaatctctacaccgccgggaccctcccgttcgacgctcgcgagttcgtcgtgcggctcaccgatgaggacgacggcaccggcgtcccgcctcgggagagggagtacagggtcgccatcaagttcgccgcgcgcgccgacctccaccacctcaggcagttcatcgccggacggcaggcggacgcgccgcaggaagccctacaggtactcgacatcgtgctccgcgagctcgccaaccagaggtacgtgtccatagggcggtccttctactcgccggacatcaggaagccgcagcggctcggcgacggcctgcagtcatggtgtgggttctaccagagcatccggccgacccagatgggattgtcactcaacatcggtgagctgtgcgggctggggaatatttcttgccctcatgcatgtgattcctttcttttttgtcctgtggctgccgcttacatggccatgttgacggcagacatgtcgtccacggcgtttattgaacccctgccggtgatcgagttcgtggcccagatattaggaaaggatgtcatatcaaggccattggccgatgctaaccgaatcaagatcaagaaggcattacggggcgtaaaagttgaggtcacgcaccgggggaatgtaaggcgcaagtatcgcatatctgggctcacaacacagccaactcatgaactgattttcccaattgatgaacaaatgaatatgaaatctgtcgtggagtacttcaaggaaatgtatggtttcaccattcagcatcctcatcttccttgccttcaggttggaaaccaaaagaaggcgaactatttaccaatggaggcctgcaagatcgttgaaggccagagatacacgaagaggttgaatgaaaaacagatcacatcgttgctaaagattattctttattttcagacagttcatcaaaatggatatgagcaagatccatatgcgaaggaatttgggatcaacattagtgagaagctaacctatgttgaagcccgagtccttcctgcaccttggctgaagtatcatgacactggaaaagagaaagagtgcttaccacaggttggtcagtggaacatggtaaacaagaaagtgataaacggatgcaaggtgagccactgggcatgtataaacttctcaaggagtgttccagaagccacagctcggggattttgccaggaattggcacaaatgtgtcaaatttcgggcatggaatttaacagtgagcccgtgatgccaatatattcagctagaccagatcaagtagtgaaggcacttaaaagtgtgtataatattgcactgaacaaactcaagggtaaagaacttgaacttcttctggctatactccccgacaacaatggtccgttatatggtgacatcaaacgtatttgtgaaactgatttgggattgatatcacaatgttgcttaaccaagcatgtttttaagatcagcaaacagtacttggcaaatgtctcactgaaaattaatgttaagatgggaggaagaaacactgtgctcctggacgcaataagttggagcattcctttggtcagtgacatcccaactattatatttggtgcagatgtaacacaccctgaaaccggggaggactcaagtccatcaatcgctgccgttgttgcttctcaagattggccagaagttacaaagtatgctggattggtttgtgctcaggcacaccggcaagagctcattcaggacctttacaaaacatggcacgatcctcagagaggcactgtaacaggcggcatgatcagggagctgttaatatccttcaggaaggccactgggcagaagccattgagaataatattctacagggacggtgttagtgaaggccagttctatcaagttctcctttacgagttagatgccatccgtaaggcatgcgcatccctagaaccaaattaccagcctcctgtaacatttgtggtggttcaaaaacgtcatcatacgagactatttacaaacaatcacaaagacagaagtagcatggacaagagtggaaatattttgccaggaactgttgttgattctaagatatgccacccaacagagtttgatttctacctctgtagtcatgctggaatccagggaacaagtaggcccgctcactaccatgtcctctgggatgagaacaatttcacagcagacgaaatgcaaacactgacaaacaacctttgctacacttatgcccggtgcacacgctcggtttctgttgtccctcctgcatactacgcacacctggcagcattccgggcgcggttctacatggaaccagagatgtcggagaaccagacgtcgaagagctccaatggcacgaacggaggcttggtgaagcccctgcctgctgtgaaggagaaggtgaaaagggtgatgttctactgctga

SEQ ID NO: 11166 - DNA, 693 bp, Zea mays
  Peptide Sequence Number=SeqID_52945
atgaagaaagtggtctactacgagaccgactcttcgtcaccttccaccttaggctccgaatcggcatccgccacttctaagtgccatgagcgcaagaagtatagtaagatgcccctccgctatcctcgcatttccaaatgcactccattacttttcgtcccattaggaaaaccaccagttttttacggtgaagattattctatgtggagtgataaaatgaggcatcacctaacctcactccacaaaagcatatgggatattgttgagtatggagcgcaggtaccgaatgaaggggacaaggactatgattcggaggaggtcgatcaaatccggcacttcaactctcaagccactactatactcctcgcctctctaagtcgagaggagtataataaagtgcaaggattgaagagtgccaaagagatttgggacgtgctcaagaccacgcacgaaggagatgaggtgaccaagatcaccaagcgggaaacgatcgagggagagctcggtcgattcatgctcaaccaaggggaggagccacaagccatgtacaaccggctcaagaccttggtgaatcaagtgcgcaacctcgggagcacaaaatgggatgaccatgaaatggtcaagattattctaagatcacttgtttttcttaaccctacacaagttcaattaattcgtggtgatcctagataa

SEQ ID NO: 11167 - DNA, 2697 bp, Zea mays
  Peptide Sequence Number=SeqID_52946
atggacgacgatgatggtagagctaggtggcgacggagctgtggggcggagaagaaagagtggtgggaggagggggacgtgcgagttgtgtcggcgccatgctctagcagcggtgaggctggaggtggagtggatgggcggtggctatgcgatcgcgacgccccaccgcaccgcgacaccgatcccccgccctcctccacgctgtctgtcggcgcccgccaagcccaccgtccccagctccgcccaaccaccccaaatctcgcgcctccccccccccccccccccgaatcccagccgatacagacacaccacgcccgctctccacttctcgtcccccagatccgccccgcccgacgcgagatgctcgtccaggaccgcgcgtccccgcacgcggccgccgcgggccagaagccgtcctcgtccccgcgcggcgcgccgggggcggaccgccggcacccgcggcccttcgccaagaacctcgacttcgccacatgggcgtccgagcactcctccaagctcctgctcctcctcctcgcgatcgcatccgccgccgccgtcttcctcctgcgcggcgcggcccccgacgccgccgcgctgctctgcctcgaccgctccgcccgctcgcgctcgggcgcccccgccaagctcccgtacccggacgtcgcctggtccaaggtcccgccgctcgcgatcgctgcgggtagccccttcgcgtcattccgggcggagcggtggatcgtggtcgctgtctcgtccccacctaccgcggcgctggccgcgctcgcccgcgtcaagggctggcagctcctcgccgtcggcgattcccacacgcccgcagggtgggagcttaagggcgccgtcttcctctccctcgagctgcaggcacagctcggataccgctccgtcgacttcctgccctacggctcccacgtccgcaagacggcgggctacctcttcgccatccagcacggggccaaggtgatcttcgacgccgacgaccgcgccgaggtgcccgggaacgatctggggaagcatttcgacgtggatttgggatctggagtcaccaaccacccagtgctgctccagtacagccacgcggatcccaatcgcacagtggtgaacccctacgtgcacttcggccagcggtcggtctggccaagggggctgccgctcgataaggttggggaggtcgcccatgaggtgttctacaccgaggtcttcagtggccggcaattcattcagcaggggctgtcggacgggttgccagatgtagatgcggtgttctacttcactagaaaaccaccaacttcggcgttcgatctgaggtttgattcggaagccccgaaggtggcactacctcagggcatgatggcaccagtgaactcgttcaatacattgttccagtcacctgctttctgggggctaatgatgccagtgtctgtgagctcaatggcagcagatgtgatccgtgggtactgggcgcaacggatcttgtgggagattggtggatatgtggctttctatccacctactatttacaggaaggactatattcaggcatacccatttgcagaagagaaggatcttcatgtgaatgttggtcggttgatcaagttcctgaatgagtggaggtcaaacaagaggacactctttgagaagattcttgatttgagttatgccatggctgaggaagggttctggacagagcaggatgtgagattaacagctgcttggctgcaggacctgctcgctgtgggctatcggcagcctcggctcatgtcattggagattgataggcagcgtgcaaccatcggagaaggtgacatgaaggagtttgtgcccaagaagctgccatctgtgcatcttggggttgatgagattggcacagttaactatgagattggaaatcttattaagtggagaaagaactttggaaatgttgtgatgatcatgcacgttagtgggcctgtggatcgcacagcacttgagtggaggctgctttatggaaggattttcaagacggttatcattcttgctgagcagagcaatgcagagcttgctgttgaacgctgcacgttgtcacacgcttataagtatttgcccaaggtttttgaaagatacagtggtgctgatggatttgtgttcctccaagaccacatggttcttaactactggaacctgatgcaagctgacaaggaaaaactttggattacaaataagattgcacattcttgggttactgttccattggagacgaataaagaggaatggtttgtaaagcaaggtgatatggtcaagcaggtcattggcagttccccagttcatttccaaacaaactacaaggagagcatgggcgaagataaaattatattctgtggtagtgaactattctacgtgccccggcggtttgttgaggactttggtgaccttgtgggtcttgtcggcaatttggatttgcatcacaagattgcggtcccaatgttcttcttggcaatggactcgactcaaaattttgactctgatgctctggctggaacagtgttcaggccacagttgccagctaatgcgacgttctcgtctatttatacagctcaagcacctgctgttttccctgtgaaagttatgaatgagattgatttcataaaggtgattcggctaatgtccataggagacccacttctgatggagttggtttaa

SEQ ID NO: 11168 - DNA, 672 bp, Zea mays
  Peptide Sequence Number=SeqID_52947
atgtccgtggccgtggggaagcgggtgctcgatacgggctggctcgccgcgcgctccaccgaggtcgcgctcaccggcgtccagctcaccaccacgcacccgccggcagctgaccccgccccagccgcgccctggatgagcgccgccgtccccggcaccgtgctggggacgctgctcaagaacaagctgatccccgaccccttctacgggctgaacaaccaggccatcatcgacatcgccgacgccgggagggagtactacaccttttggttcttcaccacgttccagtgtgccctgtcaggaaatcagcatgcgactttaaacttccggggaataaactactcagctgaaatgtatttaaatgggcacaaggaggtactaccaaaaggaatgttccgaaggcacaacattgatattactgatatcctccatcctgatggtaacaatctgcttgctgtccttgttcatcctcctgatcaccctggcaaaattcctcctcaggggggccagggtggtgatcatgagattggaaaagatgttgctacacaatatgttgaaggatgggattggatgtgcccaataagggatcgaaatactggtatctgggatgaggtatcaatttccatatctgggaccaaggaccaaacagtccagcttatattgaaagcttaa

SEQ ID NO: 11169 - DNA, 1020 bp, Zea mays
  Peptide Sequence Number=SeqID_52948
atgtccttcgcgtggccgacctcccgggacgaggtcgcggtctcgtggccgcccgcaacgtccgcgagggtgaggtgctcctctccgagcctcccgtcctcctctacccgtcgaccctctcctccctccgctcatactgctccgcctgcttccgctccctcccccccgccgccacgattccctgcgtttcctgccgcgccgctgccttctgctccccggcctgcgccgccgcttcgcacccgcacctcctctgtgccgcgctctcccacggcggcggcgctggccctcgccgccgccgctcccaccgaggcgatccaagagccgctcctcttccttctctccgcctactccctcccggagtcaaccatgcgctccatgctctctctctcctcggcgccgcccccgcccccgggcgcgcaggacgccgcggggctccatgctgctgtggcagccctagcgccgccgcacatgcttccccagggattgtcgccagacctaacggcggctctcctcgccaaggaccggggcaacagcttcgccatcatggagccgtaccgacacgggatgtcgctcgagctcctgaaggcgcgggcctacgcagtctacccccgtgcttcgctgttcaaccatgactgcctgcccaatgcgtgccatttcgattaccccgacaggcctgggccagggaacactgacattgtggtgcgtgcactccatgacatacccgaggggagggaggtctgcatcagctactttgcggctaattggaggtatgctgataggcagcgcaggctgctggaggattatgggttccggtgcgagtgtgatcgctgtcaggtggagagtcagtggaaggatgatgatgataacaatggagatgatggggatgacaccatggaagaggagggtgaggatgatgttggagatagaggtgatgatgggattgaggaggaagagggggatggtgctaccaatggcggtgatgatgatttcccacatgcctacttctttgtcagtgggtaa

SEQ ID NO: 11170 - DNA, 1359 bp, Zea mays
  Peptide Sequence Number=SeqID_52949
atgaggcacagggcgcggtcctcccccacctccccgctcaccccgtcctccagcgcaaggataaccgtcaccgagatcccgacgctctctgcgtccattgaccgccgtggcccccatgggccatggaagatggcaggatttgagattacgttaacaaacaagatacttggtttctctgtatctctcatcctcatcaatctggcttcaattatggagcgtgctgatgagaatctccttccagcagtttacaaggaagtcagtgcagccttcaatgctggtcctgcagatctgggatacctcacctttgtaatgaactttctgaagtcaatagcatctcccttggcaggtatccttgctctgcactatgatcggccaatagtgcttgcaatagggactgttttctgggccttatcaacaggggctgtcggtgttagccagcgttttgggcaggttgcattctggagagccgtaaatggcctagggcttgccattgtaataccagcgcttcagtcgttcattgctgatagctataaagatggtacgcgtggtgcagggttcggtttgttaagcctcattggcgctgtaggtggtataggtggtagtattttggcaacaatcatggctggaaaggactattggggattcccaggatggcgtgttgcatttatgatggtcgcacttgtcagcttgataattggaattcttgtgtacttatatgcgactgatccaagaagaatacctggcaatcgccttcttgacgaagatgagtatgagagctcagcagcactgaacagcctcttcgccatcgggtgtgccagcggagcatttattggcggggtgatagcagatcacctgtcaaagtacttcccagattcggcacgggtcatgtgtgcccagtttagtgccttcatgggcatcccgttttcttggatcctcctcacagtcatcccccagtcagttgactactggtatgccttcgccgtcacgcttttcttcatgggcatcacgataagctggtgcgccacctcggcaaacaaccccatgttcgccgaggtggtccctcccaagcaccgcaccatgatctacgccttcgaccgcgcgttcgagggctcattcgcctcgttggctgcccctgccgtgggcctaatcaccgagaagatctatggctatgataccaagaccgtgaaccttgcgaacgggtcagcggaaggggcgtacgcgctctcaagggggctgctgaccatgatgatcgtgcctttcggtgtgtgtgtcctgttctacagccccctgtaccttgtgttcaagcacgacagagagaacgctaaatttgccagcttcaaggagcaggagctagtatga

SEQ ID NO: 11171 - DNA, 288 bp, Zea mays
  Peptide Sequence Number=SeqID_52950
atggctctggctttgatggtgcgaactatccagaccacccgtgtgaacaccaactatatacctccgccacgacaagctcctgtctacccagtggtagtagacgaagtccctgtggatctccatcaccttcatgtggagaatggagtgattctggaggacagctcagaacagattctggcgacacccaccccgttgtcagaatcactagcctttgcagatggagcttcatcttcagccaccaacaccagcagcccaaccccctgctccaggaggcgacgatccagatga

SEQ ID NO: 11172 - DNA, 333 bp, Zea mays
  Peptide Sequence Number=SeqID_52951
atggcgaccaagatattttccctccttatgctccttgctctttctacatgtgttgctaacgcgaccattttccctcaatgctcacaagctcctatagcttctcttcttcccccattccttccatcaatgatagattcacagcaacaactattaccattcagccagctagctattgtctactctcagcaacaacaacttcttccatttaaccaattggcagcactgaaccccactgcttatttgcagcatcaaatactactaccatttagccagctagctgcaccaagtcgtgcttccttcttgacacaacaacagttgctgccgttctactag

SEQ ID NO: 11173 - DNA, 435 bp, Zea mays
  Peptide Sequence Number=SeqID_52952
atgaagcagtccctgcgccgttttgatgaagaaaagcgcagggccataggtgaggaggtccacaagctgatggctacagggttcatcaaagaggtattccatcctggatggttagctaaccctgtgcttgtaaagaaaaaaggtgcaacctaccaaaggtgcatgaaccatgtgtttggggagcacatcgacaggacggtcgaggcttacgtcgatgacatcgttgttaagacaaggaaagcctccgacctcctctctgacctcgaagtaactttcgggtgcctgcgtgcgaagggcgtaaaactcaatcccgagaagtgtgtcttcggagtcccccaaggcatgctcctggggttcattgtctccgaacgagggatcgaggccaacccggagaagattgcggccatcaccaacatgggacccatcaaacattga

SEQ ID NO: 11174 - DNA, 579 bp, Zea mays
  Peptide Sequence Number=SeqID_52953
atggacgccctcggctgcgaatatcttgattatgacagacttgacgaagaagccgggggaataaagaagagggttgtaagcattcagaaaagacaagcaatgatatccatcaagaaggataaaaagaagaagctgccaaaaagaccaaaggtttctggagaaactgaaattcctaagatgatactgaaaccttcggtatccaagaaacgaaaaactgcggaatcaaaccgctctgaggaagagaagtcttctccgccgaagcatactgtcggaaccccttcgacatcttctattggcgtgatagaaatcctagagataatgactgaacctttacctttcaccatgctaagccctctaggatcggagctaactagcttattacagccaaaagaaaaggatgctagggaagtcgccgaaacaaaatccaagagagatccttcgatgcccgggggaggaaatatccagaagaaattgacgcatgatgattgtgatgagagtcgtcctcgatactcccccccgattatacaaaagagaattgccccctctactgctgacgaagctgctgaagcgcctccttag

SEQ ID NO: 11175 - DNA, 495 bp, Zea mays
  Peptide Sequence Number=SeqID_52954
atggcgaaacagacaggggtgatcataccgatggactcggcgcaggtgatgtcgcccatgccgacggggattactgctttatgggtcggcggtcatcctgcgcggctcatttcctttctccctctcgctttccaaaccaccgccaccattgtcgccgcctcggagagccgcccgcccccgagcgccgcccgccgcccacacccgtccccggcccgccgcccggaccccggagcgcgcccgccacctgcccccgcccctggagcgctgtccgccgcgccgtccccacccctggagcgccggcggccccggagcgccgcccgccgaccgcccccgcccccgcccccagagcgtcgtctgcccctagagcaacgcccgctgcccgcccccgcccccggagtgtcgcccgccgcccgccgctcacccccggagcaccgcccgccgcccgtccccgttgcgccgctcgccgccaccaacgccgccgccccggaccgttga

SEQ ID NO: 11176 - DNA, 312 bp, Zea mays
  Peptide Sequence Number=SeqID_52955
atggctccccatcacggaggagagggtgctgccggcgggcggcttggaggagttggaggccgccggcgggtccctcttgacggtggcgttccagatcctggtggactccgtccccaccgccaagctctcgctgggctctgtagccacgagcgagaggaggggtggtgcagcttttggggatcggagatatttatcagtggggagtcaagaacgcacctcagactctccttgccatgtggtgctctgatactgatgcaagcagggaaaaagaaggcgtcaccactatgcaaggggggatggttcgggtattga

SEQ ID NO: 11177 - DNA, 243 bp, Zea mays
  Peptide Sequence Number=SeqID_52956
atggcgtcaattacaaagagaataatggtcggtcgatgcggggcacagacgtggcttgcgcggctgttgcggtcggtgtcgcgtgtgcggctggggcagaagcgcggctcggactcggacgtcgggcgcgcggtcgtcgcggctgtttgcctggcgcaggttttctttaacaagaatcgattaaaaacattcgataatcaatcaagcacatacaaagaaaatgatcaaaaagcaaataaataa

SEQ ID NO: 11178 - DNA, 234 bp, Zea mays
  Peptide Sequence Number=SeqID_52957
atgctcgacctgccttcaactccatgcgccacaaccgctccccacctcctcgactcccctctgcctccacctcctccacgcccggctccccccatccccctcatccctggccccgtcgcacctaccccgagacaaccaccgtcctgcctatcgtgccccctctacggtgccttcctctccgtctccaccggacccgcaggctggccgcaggcaccgggtagaaaccacatctag

SEQ ID NO: 11179 - DNA, 531 bp, Zea mays
  Peptide Sequence Number=SeqID_52958
atggcctcctactcttctttctctccttcctcttcctcctcttcttcctccttcccctacttcgagcatgacaccgatcgggagccaacgctggagtgggatccccaagctgcctatgagaaggaggctcctctacactgggatgcagaggagtgggacttcgtgatggagtccgaggacgagaacttcctcactgatggtgaggacctcgggctcctcttcggcgaggacagggaggagaatgacgacgacctcttcccctcggacggagccgatgagtcctcggtgggtgaggaggatgacgtgtcctctgaagaggagctaaaggaggagcccctcttcgttagtttctctgacgacgacgacaacgctggcaacggaaccggtgacacctatggctccacaggcggcgacgagaacgacgacgatgaggaggatgacgacaccaccaccaccagtgacgatgacgaggccgagacatccccccatccaagtgccacaagggcagcaagatacaaggggaaaaggtga

SEQ ID NO: 11180 - DNA, 609 bp, Zea mays
  Peptide Sequence Number=SeqID_52959
atggggcacttcccaaacctgctacaggatgtttggcatgcgctaggaacctacgtctgtcctctatatgacacaaggcgagtgcctgagcctccctgggcttactactacatcacttgtgtgcatatcagggtgatggatgcaggagatagaggtttcatgactctatcagcctacgttgcttcgtatcatgagtctttgatgccgctatctacctacgtttcttcggtcagcaatgctgctaggcgagctttgtggtctctcagccacacttaccggcagctactgcatgacacgagatacaggcatcttcctcaatgtcttcgtgaagaaagccagaccagtgttgttccaagtgaagctggagaagatcgcataaacacccttgtaggtgtggtggcaggtcttaacactgacctagacagtgctaccctagatctttcgagggtacatggagaactggaagaagctcacgccaggattgcaaccctcgaagctcagctcaaaggaaggaatccacccgaagcccaagtccctgccatggctgtgttctcgccacgcaagaggattcactatggaaaaccaggatctatcaccaggctactctag

SEQ ID NO: 11181 - DNA, 120 bp, Zea mays
  Peptide Sequence Number=SeqID_52960
atggaccttgacccgttacctatattgagatgcattcatgcatccttagccttgaagaatctccataattccatgaatgtgcagccctttaatgatcctacatctcccttggctgaatga

SEQ ID NO: 11182 - DNA, 759 bp, Zea mays
  Peptide Sequence Number=SeqID_52961
atggcgcgacggtggcccggggcgacggtggcggacctccgcggctgcacggaggacggcggggtgaggctgacagcagccaagtccagcctcgggcgccataggaagctccgcctcgctcaaccccagggctcggactcaacctcgactccggaagacggtccccgcctcgcccgaccccagggctcggactccacctcgacctcggaagacggtctccgcctcgcccgaccccagggctcggactcaacctcgactccggaagacggtctccgcctcgcccgaccccagggctcggactccacctcgacctcggaagacggtctccgcctcgcccgaccccagggctcggactcaacctcgactccggaagacagtctccgcctcgcccgaccccagggctcggactcaacctcgacttcggaagacggtctccgcctcgcccgaccccagggctcggactcagcctcgacctcggaggagtcaccgcctcgcccgacctcgggctcggaccgaccacgtcacaggggggccatcattaccctacccctagctagctcaggctacggggaacaagaccggcgtcccatctggctcgccccggtaaaacaagtaatgatggcaccccgcgtgctccatgacgacggcggttatcagccccttacggaagcaaggagacgtcagcaaggatccgacagccccgacagttgtgcttccgcatggctcaagcactcctccgacggccacgagatcacatga

SEQ ID NO: 11183 - DNA, 147 bp, Zea mays
  Peptide Sequence Number=SeqID_52962
atggcgcgacggtggcccggggcgacggtggcggacctccgcggctgcacggaggacggcgggttttgtctaagtgttgctatctctaccgcaaaggctaagtttcaatctatactagatgagtatgaatacaagattgaaacttaa

SEQ ID NO: 11184 - DNA, 201 bp, Zea mays
  Peptide Sequence Number=SeqID_52963
atgcaaagatggatgaacgacatcgacaaggactcagctacaactgtgatgagaacgttggggctctgcgagggctcagggaaggcgggggatcttcagagaagctcaccgagtgaccaaacagcgggggcgagctcaccggcgttgagaacaatgggtgcaatctcggcggcattggcaaaagcgacgggcagaggatga

SEQ ID NO: 11185 - DNA, 519 bp, Zea mays
  Peptide Sequence Number=SeqID_52964
atgattaagaaccactcaaccgatctaagtgatcgtttggagaagaaaataattgaaatagacttgacctacgtggcctcctcaatgaggagccacactacctctccagcgacgcctacggcctacctcattgatggcctcccctgctccaacctcgccgccggcgccgcgaagtcccccgcgaatctccccggcgtctgcggcaagacgggagctggtgaacaagattacaagacccatcaattgcctcctccaaccaccgtgtgttcccaagagaaggcccaaggctcaacgtcctcgctccatgcctcgccgcagcaggactgcaggagggtggccggcgttggcccctgttccccgggaccagtggtgtctgaggcgcaaaagaaggatcagtatagcaagctgttctgcaatcccattcctgatacacagctggctgtgttggcagcaattttcggttgggcagtagaggaagggctggagacccgtccgagtctccccctggatgtgctctga

SEQ ID NO: 11186 - DNA, 2238 bp, Zea mays
  Peptide Sequence Number=SeqID_52965
atgccgttcggcttgaggaatgcgggtgcgacgtaccagcggtgcatgaaccatgtgttcggcgaacatattggtcgaacggtcgaggcctacgtcgatgacatcgtagtcaagacgaggaaagcctccgacctcctttccgaccttgaagtgacattccgatgtttcaaggcgaaaggcgtgaagctcaatcccgaaaagtgtgtcttcggggtaccccgaggcatgctcttggggttcatcgtctccgagcggggcatcgaagctaacccggagaagatcgcagccatcaccaacatggggcccatcaaggacttgaagggcgtacagagggtcatgggatgtctcgcggctctgagccgcttcatctcatgcctcggtgaaagaggtctacctctgtaccgcctcttaaggaaggccgagtgcttcacttggacccccgaggccgaggaagccctcaggaacctgaaggcgctcctcacgaatgcgcctatcttggtgcccccagctgccggagaagccctcttgatctacgtcgccgcgaccactcaggtggttagcaccgcgattgtggtcgagaggcaagaagaggggcatgcattgcccgttcagaggccagtctacttcatcagcaaggtgctgtccaaaaccaagatccgctacccacaagttcagaagctgctgtacgcggtgatcctgacgcggcggaagctgcgacgctacttcgagtctcatccggtaactgtggtgtcatccttccccctaggggagatcatccagtgccgagaggcctcgggtaggattacaaagtgggcggtggaaattatgggcgaagcaatctcgttcgcccctcggaaggccatcaagtcccaggtcttggcggacttcgtggctgaatgggtcgacacccagctcccaacagctccgatccagccggagctctggaccatgttcttcgacgggtcgctgatgaagacgggagccggcgcaggtctactcttcatctcgcccctcgggaagcacctatgctacgtgctacgcctccatttcccggcgtccaacaatgtggctgagtacgaggctctggtcaacgggttgcggatcgccatcgagctaggggtccgacgcctcgacgctcgcggtgactcacagctcgtcatcgaccaagtcatgaagaactcccactgccacgacccgaagatggaggcctactgcgatgaggttcggcgcctggaagacaagttctacgggctcgagctcaaccacatcgccgggcgctacaacgagactgcggacgagctggttaaaatagcctcggggcgaacaatggttcccccggacgtcttctcccgagacctgcatcaaccctccgtcaagatcgacgacacgcccgagcccgaggcaccctcggcccagccggagaaggcacccgggggctacacgcacctgttagtcaccatcgacaaattatctaagtggatcgaggtccgacccctaaacagcatcaggtccgagcaggcggtggcgttcttcaccaacatcatccattgttttggggtcccgaactccatcatcaccgacaacggcacccagttcaccggcaggaagttcctggacttctgcgaggatcaccacatccgggtggactgggccaccgtggctcaccccatgttgaatgggcaagtagagcgtgccaacggcatgattctacaaggactcaagcctcggatctacaacgacctcaacaagttcggcaagcgatggatgaaggaactcccctcggtggtctggagcctgaggacaacgccgagccgagccacgggcttcacgccgttctttctagtctatggggccgaggccatcttgcccacagacttagaatacggttccccgaggacgagggcctatgctgaccaaagcaaccaagttaatcgagaagactcgctggaccagctggaagaggctcgggacaaggccttactacactcggcacggtaccagcagtccctgcgacgctaccacgcccgaggggtccggtcccgagacctccaggtgggtgacctggtgcttcggctgcgacaagacgcccgagggcggcacaagctcacgcccccctgggaggggccgtttgtcatcgccaaagttctgaagcccggaacgtacaagctggccaacagtcaaggcgaggtctacagcaacgcttggaacatccaacagctacgtcgcttctacccttaa

SEQ ID NO: 11187 - DNA, 1347 bp, Zea mays
  Peptide Sequence Number=SeqID_52966
atggactccttcagcttcctcaagtacctgcgcggcggcgtgctcaccggcgcccatcgcgcgcccgcggccgccacgaccatcgccgcgtcggcgtgcgagtacggcgacgacgcctcctccttcttcgacctggagttcgcggtgcccggcgacgagagcgccacgtccgacgtcgaggaggagcgggtcgagctcagcttcgccgcgggtgacgaaggcgtcgtggcgcccgtggccgccgtcgcgccggcggcagaggcggagcctgaggccgcgccgccgccgtcgctgccccgtccggccaccaggtttcgcgtgctgctgctcaagctacggaagcccaagggcggcctggcggcggcggacgcggccggcaccagcgccgcgccggtggcgagccggttcctggtaaagctccgggtggacgacgcgacgccgctggcgtcactgttcacgcgcgacaacagctcgcgcgcctcggacgccgtcgcggaccggccggctacggcagcggcggcggcggcggagccccagcagcaggagcaggaggtggcggcgtcgatcaccgcggaggagcggcggttcgccaaggaggtggtcctgcggtacctgagcaagatcaggccgctgtacgtgaaggtgtcccggcggtacggcgagcggctccgcttcggcggcgcggcgagcgagggagaggaggagacggacgcggaggcggacccgtccccgtcgcaggctcctccaccgtccgtgccggcgggggtggtggcgtgcggcgtgcgcgcgccacgcgccagcgtgcccgcggggctgaagcaggcgtgcaagcggctggggaagagccggtcggcgtcgtccgcggttgcggtggcgccctctcccgcggcggcggctctgagtggcccgcagccgcagcggcgggacgactcgctgctgcaggtgcaggacggcatccagagcgccatcgcgcactgcaagcgctcgttcaacgcctgcaatggtacgggcacgggcccacctcagcgatgcaacagcagcccctatgcatcattccccgtcgcggtcacgtgtgacagcgagcgtgcgtctccagcagtgcctgagtcagcttggggtagagtaatgatggcgcctcccgttgacgtggctggtctgcgccctaggttgggcgatgtggaggctcctccgaggtcgagtctgtcttccgtggccgtggtcgagtccgagcccctgggtcgggcgaggcggagactgtcggctgaggccagggctgagtccgagccctggggtcgggcgaagcggagttcgttgtcttccggggctgagcccaagtccgagccctag

SEQ ID NO: 11188 - DNA, 747 bp, Zea mays
  Peptide Sequence Number=SeqID_52967
atggtcgtccacggccacgacaccacgctccccatcacgctcgacatcatgctcgagcactgccgcgccgtggcccggggcgcgccgcgcccgctcctcgtcggggatctcccattcggctgctacgagtcctccgccgcccaggctgttgattcagccgtgagggtcctcaaggaaggtggaatggatgcgatcaagctggaagggggtgccccatcgaggatcactgcagccaaggctattgtggaggctggaatcgctgtcatggggcatgttggcctcacaccgcaagctattagtgttctcggtggatttaggcctcaagggaagacggttgacagtgctataaaggttgtggagacagcacttgccttgcaggaggctggatgcttctcggttgtgttggagtgtgtgcctgctccagtggcagcagctgcaacatcagcattgaaaatcccaaccattggcattggggctggaccattctgtagtggccaggtcacaccaaaattctgtaaacaatttggtaacgtgggcgatgtcatcaacaaggcgctatcagagtacaagcaagaagtggaggctcaggctttccctggtccaagccacacaccgtataagataactcccacagatgttgacggctttgcagatgcactgcagaagatgggtttgagtgacgccgcagatgccgcagccgccgctgctgaaaacagggagaaaggtggagaaccaaaaggagagtag

SEQ ID NO: 11189 - DNA, 1695 bp, Zea mays
  Peptide Sequence Number=SeqID_52968
atgctgccaaacggagaagctccctccggatccatgccgccggtgcctgccgccgacgcgaacacctctaattcagatgacactagatttgatgcgtcacagtatgccttttttggcaacaatgtgctggaggagattgaactaggcggattcgaagatgataacagcagtaatgctgctttcgctggactcgatgatttagagcgcccactttcttctcaggggattgcactagaggctgaagatagttcattttcagatcttgatgatcttgcaaatacattctcaaagctaagaagagatgttaacctaccaaagcatattggggtaaataaccttgggacttctttttcaagagaaagttctgctgctgctgactgggcgccggaatttgaatccccactctggtccgatcagcatgtgctagttgctaaccaaggaccgaatggcaatggctggtggtctccacagcatcattcttctctccttgctgattccagattgcacagaacatcctcatcccctcagcaacaggaacaacacaatcatgatgcacctattcttggaccaaggccatctcctttgcaccggacatcttcatacccgcaaaaggagcctcagtacaacccagctgaagtcattccaaatgcaccatacatgtcaaactatctacctggtgggccacccaattcagtgcctcgacaaccacatcagatgaacatgccatctttcaatgaatttcagatgcatatgtctgcgcaaagtgagaccccattctcccagtttcctcgtggagggacacctccagagccattatttggtggaaaccggggtcatatgatttcaacaggcttctcaactaacagcagtggacaacgagaccatctgctgaataatgggcagtttcatggggaaactgccagcatcatgccaaatttgctgccaaaccatctacaacgtccgaatacattcatgccccctcaattgttgacagtacgccaacagcatggcatgctcccaattcagcaatcttcaaagcagtcatcaagaacacagacacacatgtttggcccccagcatccaccacaaatgatgaataggtttgataattttgggatgcctgagttcagtgatccaagagcaagatcatcaatgcaccatggcaggcaaggtcaacattttcctctccatggctctgagtttggtattatgaagatgggtaatgggaggtcaaggtttagatccaagtatatgtccactgaagaacttgaaaacattttaagaatacagcatgccgccactcatataaatgatccatacatcgatgattattaccatcaagcttgtctggccagcagatatgtggatgcaaggtcgaagcaccgcttctgcccaaccttgattcgtgatccatcatcctgtacacggagtaaggatgagccacatgcataccttaaggttgatgcccttgggagactgccattttcttctgtacggagaccgcgtccactccttgacgttgagccagcttctgcaactgatgatgacaccgttatttcaaagcctcttgatcaggaacctctgctagctgctaggatcacgattgaggatggactctccctattacttgacatagacgatattgaccgcttgcttcagtttagcccagcagcaagatggtggtttcgaacttaa

SEQ ID NO: 11190 - DNA, 1443 bp, Zea mays
  Peptide Sequence Number=SeqID_52969
atggcggttcagcatcgcgaaatcatggccaagtcagtctcgcggagactaccgtcaatgcatgaagattgggcgattattaatattcatcctttgcctgagcatgaggtcttgttccctgtggtcagagatgtggtcagagagtaccttgtggaacatcgaagggttggggttagagccatccagcgctctcatttggggcaggccaatggcttcgttggagattcttggactgtccagtgtgagattatccagcaaaacatgcttggcgggcaggctcaagatgaggaccctattcctcctgccccggaagatggtcagcagctcccctggttttctttggtctgggtcaacccatgcccccggctgggcttgacctcaatttcccgcgctgagcctgtgggtggtgacttaccggttcatcaggatgccaatgcccagggggattgggaccaatggattgaaaacattcaacccaatcagcagattccgcagcccattcagcctgacttgcaacccattcaaccggatgaacttcaactcagtaaccagcactcaggcttgtcgtcagatagttcctttggcgctgttcaagttgcaccactccaaaatggccatattgttgaggatggacctgtgttgccaggggatgggcttgctttcaatgttgctccattcaatgggcctcaggaggttgatggcccgacgcttcaaatggacctactccctaccattgctgatctgccacatcaggcccaagatggggatccaaacaataaccaatttcagaatttggagatgaacttcatgttcactcaggagtggcaacctaaccctgtgttccagatgtttatggagaggaaaagatctgctcagttctccagactctgggccatgtattttgcacctgctgagtcaactggcctcttggtggaaatcccaaaaaatgggcacccttttttctctcgaatctgctacaacctgaagccttcagatgctctgctggaaccgggactgaagtctttatcttttgccattcctaaggaatgtccgaaagataaatttctggatgatgtcctttctgagaaccccaaaaaaacagatagttgtgatgccccggcaccaatcatagtggagtcagaactcagaagaagtaagcgcttgaaggaatcacgtgttgggttcaggcaaggggcctgcccaaaaaggaattgtttgatgtgccagcataactttgatggccccccctctctgtcctccaaggtgattcggaatctagggaccaggttctgcaacttgtcagatgatgacttatctgagcgcagtttgaagaagaagaaatctgttgcaggatcagttggccagaagaggacgggcagaaaggatatggatgatgagaggaatgaagactcaacagatgaagataagcaagataagctctag

SEQ ID NO: 11191 - DNA, 519 bp, Zea mays
  Peptide Sequence Number=SeqID_52970
atgccgagcggaggcaccggagtgacggaggtgccagggcggctctcgccgccagagcgagccaacggtctgggctcaggcgttgtccagtggacaggatgcaggggaggggcggcacggccaccagagggcgaccatggccaaggggaggagtgctcccctgcgctagcagaggaagaggggtgtccagcagagctggaagaagtcgtggagggggaagatgccatggatccaagggagcttggattcgagggaggctgggcgctagaggcgctgagtggacctgaggtgcgccacacagtggaagtgtggagtcgggcgggaggcggagcacccgttccggcgaagaatcccggtggccaggagcgcgattccgcccaggcgaagccgcgacgagcatccgtgtgcgcttggcttcctcccgagtcaatccccgagggctggacgtgggtggtggagcacgacctcggagagaagtggcccgacgatggaagatctgtaccggcgaggaatccctag

SEQ ID NO: 11192 - DNA, 519 bp, Zea mays
  Peptide Sequence Number=SeqID_52971
atgccgagcggaggcaccggggtgacggaggtgccagggcggctctcgccgccagagcgagccaacggtctaggctcaggcgctgtccagtggacaggatacaggggaggggcggcacgaccaccagagggcgaccatggccaaggggaggagtgctcccctgcgctagcagaggaagaggggtgtccagcagagctggaagaagtcgtggagggggaagatgccatggatccaagggagcttggattcgagggaggctgggcgctagaggcactgagtggacttgaggcatgccacacaatggaagcgtggagtcgggcgggaggcggagcacccgttccggcgaagaatcccggtggccaggagcgcgattccacccaggcgaagccgcgacgagcatccgtgtgcgcttggcttcctcccgagtcaatccccgagggctggacgtgggtggtggagcacgacctcggagagaagtggcccgacgatggaagatctatatcggcgaggaatccctag

SEQ ID NO: 11193 - DNA, 336 bp, Zea mays
  Peptide Sequence Number=SeqID_52972
atggtgaagccccagggcgagcaatcggatcctgagcgacggtatggacgtggttccatggcgcaccgacgagttcccccgcgagcttggtttatgggggggtcacccgtgatgacgatggctaggggaaaagcggggccggatttttataccgaggcagagtccgcgttcaaggagtccatggccgagaatctcgccgacgccattgcccgagatccctggcgagtttggcggtgctcagctgcgaggcacgcggtccgttacgaagaagacgcaactgacatcccgggtccacggcacagagaggcttacaagtgggaccgcccgtcggtgtga

SEQ ID NO: 11194 - DNA, 813 bp, Zea mays
  Peptide Sequence Number=SeqID_52973
atggcggcgctcctggagctgttcctgggctcctctcccacgccggtggactgggaggcagaggtctacccggcgtacggggacttcgccgtactccccttactcgtcgccttcttccccgccgtccggttcctcctcgaccgactcgtcttcgagatttgtgctggagtgggtttgggaaaggttttagcacgaaaatttatatttggaaagggacatgataagctttctgaaacagatgacagtagaaagaaaatcaataaatttaaggaatcagcatggaagtttgttttttttctttctggcgaactgctttcactatctgtaacatacaatgagccatggtttaagaacacaagatacttttggataggccctggtgaccagatctggcctgatcaaaagataaaattcgctcgtgttggcactgttgttttagcccttcatgatgcaagtgatatattcctagagattgggaagatggccaagtacagtagctgcgagtggctagcagttatggcatttcttctttttgtggcatcgtggatacttcttcggctcgttatgttccctttctggatcctaagaagcacaagctatgaagtgctgctgaccttggatagggagaagcatcgattttatggccccatatactactatgttttcaactgtcttctgttctcactcctagttcttcacatatattggtgggtactgatatggcggatgctagttaaacagattcaatcgaaagggcgtgttggtgatgatgttcgatccgattctgaaggcgaagatgagcatgaagattaa

SEQ ID NO: 11195 - DNA, 474 bp, Zea mays
  Peptide Sequence Number=SeqID_52974
atgaagcctaagccaaagctagaggcgcccatgcaaaaaacaccaaagaaaagcaatcgaatgacctcaattatgtacgtactctttggtgccacctccattaaagagtcttcccatgttgagccaatccccccgaagagggatgacgttgttgatgcggtggcagcaatgtcgcagaagccagccggaatagaagtcaatgtttctgagaagaaaaccactccagagggtgatgaagacaatgaggatggagaagctgaaaggctaaagaacaaaaaaggaacacctttgctagagggtgttgaacacgtgttttgtcatgcagccaacaaaaaattcactatcaagcagattggtgaagtgcaatcatatgccgaagggatagggtacccaacaagagccactatgtttggtggcaacaaagaggatcagttatattgttgcctatacaatatggaaattgacgcctgctga

SEQ ID NO: 11196 - DNA, 222 bp, Zea mays
  Peptide Sequence Number=SeqID_52975
atgggagtacaggtgaagggaaccgcgaggcgagccctgacgaacgcggcgatcgccttggaggcatccaaagccgagaaaacgtgggggcagacgcaagacgccggtaggcgcccggggcggagccgtgaacaagaaattgagcatgttggagatgaggaagatgttgaagcgggtcgcgcaagagggagagtgggccaaatcgaagcaggtggaagttag

SEQ ID NO: 11197 - DNA, 324 bp, Zea mays
  Peptide Sequence Number=SeqID_52976
atgtccatgatcagaaggccgtccactgagacgctggcaatggcggacgtcgactgggcgcggtacgacgaccgcgccttccacgacgacgaccaggacacgccgccggagcacctgcgcgccttcgaggccttcgttgagacggtggtgccgctggacatggtgctggcgttcgggcgcgagcagagcacgagggcccggcgcccaggccacggccgggaggacgacgtcaaggagaagctcaagctctgggccaaagccgtggccgccaaggcgagacgacaatacatcaccaaacaggacaacgacgaccagaatgcctga

SEQ ID NO: 11198 - DNA, 372 bp, Zea mays
  Peptide Sequence Number=SeqID_52977
atgacactccattcatccaccgacgagctcgaccgaagaggattcgtcgacgtatggcaaagggcgaaaaagcgacatctcaagatgcttgacggtgatctcaagcgtcgcctcaatagtcgcgccgacgccatcaagaagaaggcggtgaaatcctcaagcactttgcttgaggttaccaccgtaggctctcccccaggctccgtcatgcccggggtcgcaagcggcgacctacggcagagcgtagtggtatctgaggtggccactgccatcctgcagccaagcaagagcaaggccgctatgctccatagtaggtggagtcatctcccccgctcgtggggagtgacttcttcaacctgccaatgggtttga

SEQ ID NO: 11199 - DNA, 378 bp, Zea mays
  Peptide Sequence Number=SeqID_52978
atgcagcacctcgagccctcgtcggaaacgctttctgacaagaaggcacccgggggcttctcgcacctgctggtcgccatcgacaaattctccaagtggatcgaggcggtggcgttcttcacaaacatcatccatcgctttggggtcccgaactccatcatcaccgataatggcacgcagttcactgggaagaagttcctggacttctgcgaggaccaccacatccgtgtggactgggctgccgtagctcaccccatgacgaatgggcaggtggagcgtgccaacggtatgattttgcagggacttaaaccgaggatctacaacgacctcaacaagtttggcaagtggtggatgaaagagctaccctcggtggtctag

SEQ ID NO: 11200 - DNA, 321 bp, Zea mays
  Peptide Sequence Number=SeqID_52979
atggaccgacgagtaaattgtcgccgcatgccccagcccagatgggtcggcgcgagacggagcgcgaaggggggagaagaagtcgaagggagacaggcgtcaaaggggaaacccgcggccttcgtgtttgtcccgcgcccaggtcggggtaatgatggcgcctcctgtgacgtggtcggtccgagccctgggttgggcgaggtggaggctcctccgaggtcgaggtcgagtctgtcttccaaggccgaggtcgagtccgagcccctgggtcgggcgaggcggagaccgtcagctgaggtcaggtctgagtccgagccctag

SEQ ID NO: 11201 - DNA, 555 bp, Zea mays
  Peptide Sequence Number=SeqID_52980
atggcccctcggaagggttcgacagccaccccagagcagttgggccccgagcccattactgatcaggggttcgaaggctggccactcggaagggttcgacagctgccccagagcactcgagctccgcaccctttactgatcaggggttcgaaggctggcccctcggaagggttcgacagccgccccaaagcatgcaaagtgagggatgactttgggtacgtccgttacatggccgaggctcgggctacgctcccgagagggaggcatcgagcccttggaccctatcgaatgggtccaggtccggcaaatcacctgcaggtcaagacctcgtctaccaagggacgcaatctcgcctcgcccgagcccgggcctcgagcgggaacagtagtcccgggacgaattcacgcctcgcccgagggcctcctcagggcggtggggcgcaccctcggctcacctaaagcccagctcaggcaggcttcgtcaagaagcaaccttggccaagtcgccttaccaaccgaccgtatcgcaggcgcattcaatgcaaagaccgtctga

SEQ ID NO: 11202 - DNA, 339 bp, Zea mays
  Peptide Sequence Number=SeqID_52981
atgaggtacttcttaccggtacacgatgtgtggaaatcacgggccacagtggcagcggctcagcggaccaccatggactctggcgagcgattccgtccgagccagtggccccacttgcgcagcgacggcgagtcggcgaagcgaccacgatacggctcggccccaggcgagtcgggttcacccgtctccccaagctcggagttcatgggagggattttcttctgctggatgcgactgaacgaacaggggagagtaaggcggcggcatggctcggttgggataggtcctatagctcgggcgagggcacaacaaccgcggccgaatcggccgggaggttga

SEQ ID NO: 11203 - DNA, 1254 bp, Zea mays
  Peptide Sequence Number=SeqID_52982
atggcctccacacgtggctctcatgctcaggcacctcaccagccacaagcacagccaaaccttgaacttgagctggaatccgcgcttgggatgaggaagaatcatgtgaaggtacatcgattaaccttggctccagccaagtgcacatccgaggtgtctctacaggtgataaacaaagaagaagaaaaaattctacataaggaggagtttcaaaggcgaatagaattggcatcatctggtggggtgagagatctgcatcatgttcatggagttgaaccggatatggaggtggacaagggcgtggctatggaggtcgcgccaaaggaagagggatcaatggcacacgagacgtcgaagcaagctgctaaggaacctgaacaggtcaagccacaagaggaaattattcccagatcgaatgaagctgtagtccaagcgatggcattgctgcagaaagctttcgggggagttgaaaatgctaagactgaacaaaaggcaacaggctcagttacccaggagcaattgaagaagaatacgcaagagggcatacagatcaagatgtccaatgggaaagatgtggcagaatcatcagcacaaggtgcaagcaaggctaacatgaatagtgaggtgataatgagcataagatggtgctgcctaaagtctgggtacggagttgaaatagaagacaactcgcctcattctgcgcccatggatatggacaacaaagaagacaactcagatgcacatggaggaagtagtaagaagatagataagatggatgagaggaataacacgacagggaggaagcataatcttttaggcactgagcagggacatggagcaccttggtctgtgaatgatacatcaaaaaccacaaacagattggcagcagctgaaagccagatagttgtgaaggagatacacgctgtaacgaatctgagtcaagaagttgtgatggaggaaattgctcaggaagacgaggaggacatggaggatgacttcgcgagtaaaataaggcaactaattgaccctgaaacagtagaatcagaggacatggtgttgccaatagaaggtgcgctgaggtttgaaaagttagctgctattccagaagcttcacctccatcacgtcgaagcaaaagaagaggagaagtggcgtcacctgatcaacactcgcagaaacgagctgagatgttgaaggcaaggcgcaacctagatttccctactaaaggggtctatagtgagctttatagaggatga

SEQ ID NO: 11204 - DNA, 225 bp, Zea mays
  Peptide Sequence Number=SeqID_52983
atggcgcggcacccttgctatctcctccccttggtcattccccctgcactcctcctcctctctagccaacagcagccatcagcccccattccccagcagccccattggccgacgccctgctcagggaatgaagccgatgctccagcggccccatgtccaggagctcgacgctggctttctttcactgtcccttgccgcaggggagcagtagctcttcctccctag

SEQ ID NO: 11205 - DNA, 225 bp, Zea mays
  Peptide Sequence Number=SeqID_52984
atggtgcggcacccttgctatctcctcctttggtcattcgcccctgcactcctcctcctctccagccaacaacagccatcagcccccattccccagcagccccattggccgacgccctgctcagggaatgaagccgatgctccagcggccccatgtccaggagctcgacgctggctttctttcactatcccttgccgcaggggagaagtagctcttcctccctag

SEQ ID NO: 11206 - DNA, 285 bp, Zea mays
  Peptide Sequence Number=SeqID_52985
atggcctccacatgtggctctcatgcccaggcaccacaccagccacaagcacagccaaaccttgaacctgagctggttcacgtggacaaggcaaacttagacactattagtgtcaacaactgcactaatgggttgcacaaggaggggttggtagatgatgcagagcagatcgcagggaacaagattgatgaagctgaagctggagcacatgacaacaagaagctgaggaggggtgatgggacaaggaagctgaatcccaagtactatggcgccaactggctgtaa

SEQ ID NO: 11207 - DNA, 354 bp, Zea mays
  Peptide Sequence Number=SeqID_52986
atggctaagagcaagctcgggcttgagccatggagtagtgaactgcgcaggcttgggcgctcggatggggaaaaggaaggaggccggctcaaggtgcggcgccctggaggagaggaggagctgctgctcgcctacaccattggagctgaggagaggaagggcgccatgggaggaagggagccgagctccctgcgcgctggggaagaaggccccctgctgcgcgtgggggaaggagccagggagagaagaaagtggcggctaggggaattagaggggtgggaatggaaaatttccaaatttgcaagggagaggggtcctatttatagacatgtggtagggttagggttttcttag

SEQ ID NO: 11208 - DNA, 342 bp, Zea mays
  Peptide Sequence Number=SeqID_52987
atggggcctcggcggatgtttccaaggatcgcggggatacaaggaggctatccctaccaccaattcgggaaacggatgatcgaggctctggtgatttcttgccatggcaccaacattgccatggaatcgccctcactatggtctggcaaacgtgctgcaaagttcacgccggttggtgtggggttgggacatcagtgcgcgcagatgggccaactgcggcgggtcacgccgccgcgtgggaatcccgtgccgctggcgtgcgcgctggaggtgggagaggacccgattgccattgatttcaagtgtgcggctgagattagactattgcataccgattcgtag

SEQ ID NO: 11209 - DNA, 198 bp, Zea mays
  Peptide Sequence Number=SeqID_52988
atgaaagccacgtatgttagtcccagttgtgctgtcaccttggaacttttcaccactaggctagctgaacctgaagacgtctgccttcctgccctttatttaagtgctggttcggtgaagatttccctctgccctggtgttctagccaaagcttgcagtgctttggagctctttgctgctctatccatagagttatag

SEQ ID NO: 11210 - DNA, 246 bp, Zea mays
  Peptide Sequence Number=SeqID_52989
atggccgcagagctcaagacaacgggggtcgagctgtggttgcctccgctcgtcgccgtcgggggcggtagcttcagatccccagcacagcttcaagctggccctcccttggatgaaatgtctattccatacattccgaggaacttgttacacgcaattgagtatctacattctgagggactagtttggaatcgagggccacaagctgacttgcttgaaagggcccataaaatcctcttcacatag

SEQ ID NO: 11211 - DNA, 612 bp, Zea mays
  Peptide Sequence Number=SeqID_52990
atgatagacaaagaacatgagggtgaacagattgatcgggctgtgttgaagaatgtcttggatatttttgttgaaatcgggttgggtcaaatggagtgttatgagaatgactttgaagatttcttgctcaaggatactacagagtactactttgtcaaggctcaaagctggatttttgaggactcatgccaaaattacatgattaaggttgaggatctttgtatgatgtacaggctcttctccaaaatctcccatgggtgggcctcacagccagagctggtcaatctgaaaatactgaatataagtggaaaattttacttttgtattattctaaaaagggtagtgatcccgttgcaatgcacgggcactcagctagtagaaaagtatagaaaaacaggaaacgtgtcggttgagattgctgggccgcacaaactccggtggcacacaggcgcgggggaggtcagcggcccaactcactgctcgtgcggaagcggaactgaaacagactttggcctgttcggcttgtcgcattcatccccggtgactccgcggctgcgcacactgccaactactagggatgaaaacggtcaaaaacgatcggtagaaggctaa

SEQ ID NO: 11212 - DNA, 666 bp, Zea mays
  Peptide Sequence Number=SeqID_52991
atggagaacctttgtaggctacacgggtggatgacaggagctggagggcgtcggtgcacaggtaccgggccggagagacgaggtgcgcgcacttccggtagacggacgcgcagctcctcgccgacggccgactccgcgtggcactgcagcagcttctgcttccgccgcatcagcgactttgccaagaccgcgtggcactggacggtggaccacaccggcagctgctggggcctagtggtgggggtagtgggggcacataccagatctacggaggcgacaaatgaatcgaactccgcgtggcactacagcagcttctgcttccgccgcatcagcgatttcaccaagaccgcgtggcactggatggtggactgcaccggcagccgctggggcctggtggtgggggcggagagcggcaggacgactgagtccaaccccttcgcggcgcgtgccgtgcggatccacctccgcaaagtgcgcgactcgcaggccaaggcgtgtggcatcccctacgaaaagaagaagaagcgcaagcgcgcgcagcaggctacgaagccttcgacgagcttgtctactgctgccgccgggagcggcagggctacaacagcagctgctgcagcggcccctgctcaggctggagggagtagcgctgcaccgagctccacttga

SEQ ID NO: 11213 - DNA, 486 bp, Zea mays
  Peptide Sequence Number=SeqID_52992
atgggcaagagcaagaaaggtgggagttcctcacaccattccggcgataagcggaagcgcgagccgactcctccctccgaggacttcggtgactcggagtacttggaggaggagttctcctccgagtcagagggctcgccggtccatgtctctcccccggcgtcgtctgatgattcagacgactcccaggggattgccgcagaggtgtggacctacatccgggccatcgagcgcgccgggctcgagggctcggatgagtcggaggtctcctcggacgaggagaactcctcggactcgtccgaggtgggcggcgatggcgagggcgacagcgatgatggaggcgacgacgagggcgacggcgacgacggaggcgacggcgagggcgacggcgatggcaacggcgacggcggcgaaggtggcggcaaggacagcagcggtgacggcagggacggcagcagcaagggcagcaacaaggccagtggctag

SEQ ID NO: 11214 - DNA, 672 bp, Zea mays
  Peptide Sequence Number=SeqID_52993
atgccatggcttgaagctggtgccattgttcttgctgatcgtggtgttgtcttcattgatgaatttgataaaatgaatgatcaagatcgagttgctattcatgaagttatggaacagaaaactgtaaccattgcaaaggcaggaatacatgcctcactaaatgcaagatgtagtgtaattgctgcagcaaatccaatatatggaacttatgatcgttcattgacaccaacaaagaatatcgggcttccagattcactgctttcttgttttgatttactttttactgttcttgatcaaatggaccctgagattgaccggcaaatctcagaacacgttgcacgaatgcatagatattgcactgacgatggaggagcaaggtctcttgataaagagggatatgctgaagaagatgatggtgatgctaatgcagccatttttgtcaagtatgatagaatgctccatggtcaggatagaagaagaggaaagaaatccaagcaggacaggctaactgtcaaatttctgaagaaatatattcattatgcgaagaaccttattcaaccaaggctcactgatgagctccaggaattttttggacctagtgatgaccaagctccaaaaattcttggagctggaactctgccaaaaatttctggacctagtgatggcaggtag

SEQ ID NO: 11215 - DNA, 195 bp, Zea mays
  Peptide Sequence Number=SeqID_52994
atggcgtgggagagggaatggggtagagatgcattggatctcaggtgcctagaggccgacggcgatggaggcctgggcgagctcggcaatggagaacttcggccctggcaatcggagaaggcgaatcgtggcattttaaaatcgctgttgatatggggttttgaattcggtgcagacacaaagatactaggctga

SEQ ID NO: 11216 - DNA, 144 bp, Zea mays
  Peptide Sequence Number=SeqID_52995
atggcggaccagggaaggaagaatcttacaatggttacgcagcgcttgactctgtccacggcgcacggcgaattcgcggcgacagtgatgaattggaggcgcccagatcgctccccctccttgattccactgtttcaaacttga

SEQ ID NO: 11217 - DNA, 270 bp, Zea mays
  Peptide Sequence Number=SeqID_52996
atggccagcgtgctagacgctgttaaggaatctgtgaagacatcaactcctgcttctactgaagcgcctagcctggctttggctccgacattggccgacgtcgatgacgcgtatgtccgcgccgagtcgggcgatctcgcaatagatctacacggcctcgccgatgccaacggggagcaggacacggggatggggaggggtgcggtggcatgggcgggatctgtgtcggtgggcacggatggcgacatttgcaggagaatggacgcttga

SEQ ID NO: 11218 - DNA, 525 bp, Zea mays
  Peptide Sequence Number=SeqID_52997
atggatgcccttggcttcgagtatcctgactatgagagacttgacgaaggagccgggggagtaaaaaagaaaagggttttgagcattttaaaaaggcaagcgcaaagatttgttgagaaggacgagaagaaaaggataacaaagaatccaaagttgacaccaaaaccttcgccatcaaagaaaaggaggactgtgccatctagccatggagaagaaggaccttctctgccgaagcattcagcagagaccccttcgataacctctattagcgtgatagaaattccagagcgattcgagagaagctgccccactgtggctgacgaagggcctcaacaggctgaaaacaatggtggtctcctcgagacaaccttattagaaatcgatagacttattgctaatgttgcacctaagaaaaataccgaggggacaattgctgcggagacttcggcgtcgaagggaaaaagaactgaagaagtctctttggaagacaaaagcatcgatctacggaacctgggcggccaatag

SEQ ID NO: 11219 - DNA, 387 bp, Zea mays
  Peptide Sequence Number=SeqID_52998
atgggcaagagcaagaaaggtgggagttcctcacaccactccggcgataagcggaaacgcgagccgactcctccctcggaggacttcagcgattcggagtactcggaggaggagttctccttcgagtcagagggctcgccgacgtctcccaagggttcgccgcagaggtatggacctacatctgggccatcgagcgtgtcgggctcgaatgagacggaggtctccttggacgaggagaactcctcggactcgtccgaggagggcggcggtggcggcgatggcgagggcgacggcgatgatggcaacagcggcaaaggtggcggcgacggcggtgaagggggcggcagcaagggcagcagcaagggcagcaacaaggccaatgactag

SEQ ID NO: 11220 - DNA, 282 bp, Zea mays
  Peptide Sequence Number=SeqID_52999
atgtcgggaaatatggtaaccgatctggtgggtacaagtatggccactgcatggtggcagccggggtcagtggagcattgtatgccaaggcggggcaagagctggcctcgccgagccgacgggaagcgcaagcgtccctcaagtctgccctcgaaggattttggtgactcagagtactcggaggaagcgtcttccgagtatgataagtcgcccgctcccgcatcccccatggcgtcgttcgaggaatcggacgactccatggggatgtccactgcggcctga

SEQ ID NO: 11221 - DNA, 435 bp, Zea mays
  Peptide Sequence Number=SeqID_53000
atggcaaattacaaatgtaccttcggtctgaagaaaagcaagggtacaagcgtgatgcgaatgccaagtctgcgtgaacaagaaaaccactcccattttaggcctaaatatttaggaaaaacttgtgatttttggaaatttctaaaacagaagcgtagttcaacctaccctataaaagaccttaaaagtcaaaaaggggaagaaatccttggaacatattatgcactttggacaagtacaaatggatataattatgttgcattcatactcatacatttgcattcattagattacaatctcacggatgaagagtacgtcttgatccaagaaccagaggcacaacaagaggaagctcgggaactagctcccgaactcgtcgccgaagaatctcccgctgcacccacaattgaaggcaagccccgattttatgcataa

SEQ ID NO: 11222 - DNA, 138 bp, Zea mays
  Peptide Sequence Number=SeqID_53001
atggcccggccatgcaagcacgcggcggcaggctatagcaacggcggcgcggcttctctggccatgatggggctcggactaggggcgggaacagatcaggacggcgaggggaaggatcggatgaatgccatcttttaa

SEQ ID NO: 11223 - DNA, 846 bp, Zea mays
  Peptide Sequence Number=SeqID_53002
atggcagcccaaacaattcaccacgctcgttctaacagcttccccttgccatctagaccaaatccacttgtttcagagcttgatgaacatttgaacagattaagggactccgaagcaacgtcaacctcatcatcaataagccataagctaaatggccttcaggatttgtatgattgtgtggataagttgctgcggttgccattttcccaacaagaattagctcaagaagaaaacaagggacctgttgatgaattgttggatggaccccttaggctctttgacctgtgcaacactgctaaggatattttgttgcaaacaaaaggaagtatacaggatattcaatcagttatgcgaagaagaccatgcggagaagtcaagcttgtgggtgaggtgaggaagtacttcacctccagaaaagtggtgcagaagactatccacaaggcattgaagactgtgaagggtgtggaaacaaaatgcatcttctcatcttcgaacgaccacgagaccaaggcaatggttagcttgctaagggaggctgaagcagtcacttcctccatgtttgagtacttattcaccctcatctcagggccaatggacgatcaaagtgtggcagctgggctaatgagtcagaagatgagcaaatctgagaatgttgagatgccaagacagctaaaagagttggagctttgcgttcaagatcttgaagatggacttgagtgcctcttcagggccagaggcatcgagccggtggtcactagtttcaaagttaatgcaccagaaaagagtaagattggcatcgtctcagtcggcatctacatcgtcgtccttaaaccaaaaactcggtag

SEQ ID NO: 11224 - DNA, 2364 bp, Zea mays
  Peptide Sequence Number=SeqID_53003
atgggatgttctagttcgaagttagatgatccgccggcagttgctctatgtcgggaacgatgtagtttcttggatgaagcaattcaacaacgttttattttagctgaagctcatgttgcttatacagcttctttgaagttatttggacagtctttgaacaattttgttgataatgatttcgggacttcttcaggggcgttgcctccttctcctccatctcctaataaacttaaaagcaaagcggtggatccagttcaagttgggtcaagttcacccaagaaagatgttatttctcaccaccattcccattcccattctgggtctcatcttcacttcgattctggttctgatgaagatgattctgccgggtccttgcaccattcagatcattcttctcctttgcaccacgatggtgggggtcctcatattgagtatttgcaccaaaattaccccaattatggtgcctacgaaaccggctctttccctggtgggtatatgcatatgaattttatgaagaagcaaccaacgccgtctattgtttatgagcaaaggcctgtgaatccagagatagtttatatgggtgaatcttcatcattatcttcttcttataataacaataatcctagttctagttcatatccttatccgggttatcaaaattacggtggttttagtaattatgcttcctattcggcgcctggttatcagtcatcactgcaaccgtcgtcaatggctggagggtcatccttgaaaccaccgccgcctccaccttcacctccgagaacctcagcttgggatttcttgaacccgttcgagagttatgaaaactacaatcatccgtatacgccgagtagggatttgagggaggtgagggaagcggaagggatccctgatttggaagatgagaattatcaacatgaagtagttaaagaagtggacggagataagaaatttgttgatagcggagggtattccaagtccccagctgaagaagcagctaagggagttgttaatagtgaagcagaggcctcgctttatcagagcaggccaagtgtaggggtggaaaatgatagggtggaatatgaggttcatgtggtggataagaaagttgtgagtgatgagaccgctgaggagcgcggtaaaggatcaaaaggccctccaaggaatgtttttgaggtgattagagagatacaggttcagtttgttaaagcttctgagtcagggagtgaaattgcaaagttgcttgaggtgggaacacttccttatcaccgtaaacatgcttcgaagatgttgcaagtagttactccttcgttatcattagtatcatctcagcgatctacttctaagactgattcatcggctaacaatactgatccggcttttctagacttaaatgaagaattggccaagaaacagagaaacctttcctctacattgcagaagttgtatctttgggaaaagaaactctacaatgaagtaaaggctgaggagaagatgcgggtagcttatgacaggaaatgccgtaagttgaagcggttagatgaaaggggtgctgaagctaacaaagttgattcaacccggaatataatcaggagcctgtcaacaaagataagaatttcaattcaagttgttgacaagatctctgtgacaattaataagatcagagatgaggagctatggccgctgctcaatgaactgattgaagggttaaaccgaatgtggaaatgcatgcttgaatgccatcatagtcagtgtcagcttgagcatgaacttattagttggactataagattctctagttggataggtgcccagaagggatatgtcagggctttgaataattggcttctgaaatgtcttcactatgaacctgaagtgactgatgatggaatagctcccttctcacctagcagggtaggtgcacctcctatatttgtaatctgtaatcagtggtcacaagtaatggatacaatatctgaaagggaggtggttgactccatgcggatttttgccatgagcatattccagctttgggaacaagataagtcggaaatgcatcagagaatgatggcgaataaggatttagagagaaaggctaggaacttggatagagaggatcaaaagctacacaaagagatccaagcgatggataaaaaaatcgttttggtctctggagatggtaatagtctctcagtagctggacatgtgtatcagagtgacacgagcaacgccagtttgcagggtagcttgcaacgcatttttgatgcgatggaaaggttcagttctgagtcctccaaagcctatgaggagcttttggaacgtgttaaagaaaggattgctcaagatcatgaaagaattacgtag

SEQ ID NO: 11225 - DNA, 1458 bp, Zea mays
  Peptide Sequence Number=SeqID_53004
atgggttgttgtcaatcatcttgtctaacagagacccacccagaaaatgaccagagtcggcaacagcaacaggagcaccggaaccatagccaagcagtttcaggtgctggacccgacccagctgttgctaatggagtcccttctttctctgagttctccttggctgacctcaaagctgccaccaataatttcagttcagataacatagtttctgaaagtggggaaaaagctcctaaccttgtttacaaaggtcgtttacagaacaggaaatggatcgctgttaagaagtttactaagatggcttggcctgactccaaacagtttgtggaggaagcatgtggagtgggaaagttgagacacaggaggctggccaatttgatagggatagactacaggttgattttacttggggaaaatcaaaccatcgagtgggcaatgcgtttaagagtagctacgtgcattgctgaagctttagattattgtagtagtgagggccatccattataccatgatctaaatgcttacagggttctttttgatgaggatggtgatccacgtctttcatgtttcggactgatgaaaaatagccgggatgggaaaagttatagcactaatcttgcctacacacctcctgagtatctaagaaatgggagagtcaccccagaaagtgttatttacagctttggcactgttcttgttgatttgcttagtggaaagcacatccctcctagtcatgcgcttgatatgatacgaggtaaaaacatcgttctcctcatggattcacatttagagggaaaattttctatggaggaggcaactgtggttgttggccttgcctctcaatgcttgcaatatgaacccagggagcggcccagtatgaaggatcttgttgccacacttgctccattgcacaccaaacctgatgttccatcttatgttatgcttggaatctcaaaatatgaggaagctccaccaactccacagcgtcctctttcaccaatgggtgaggcctgttcacggcttgaccttactgcaattcatcagatattggtgatgaatcactacaaggatgacgaagggacaaatgagttatctttccaagagtggacccagcagatgagagatatgcttgaggctaggaagcgtggggactatgcattccgtgataaagattttaaaaccgccattgactgttattcccagttcatagatgtcggaaccatggtctccccaactgtttttgctcgacgcagcctgtgctatctattttgcgatcaaccagatgctgcccttgcagatgcaatgcaggcacaaattgtgaatcccgagtggccgactgccttctatatgcagtcagttgctcttgccaaactagacatgcataaagacgctgcagacatgttgaacgaagctgctggacttgaagaaaagaagcaacgggtcgttaagggatcgtga

SEQ ID NO: 11226 - DNA, 552 bp, Zea mays
  Peptide Sequence Number=SeqID_53005
atggaaaactcaaattctctctacgataggaatggtgaaggagacaaccctcttgatgatccaaacattaagaaggtccgtttcaaggaattagagattagcccagaagatgtgatggttgtggattcaacaccaacaccaactctgtctaggaaggacttgatattggggaaaagctctcttgagttgaatgaagtcggtggagaccattttgtcgacggagggttctcactaattgaaggggatgtcaagaaatcagtggctaatggtattccctttattgatttctcggaaagagaacatcaactacttgttaaagaaatgtccacttcagtggttcttaagttactgggaagaaacatcggatttgtggctttgcaagatatattatatggaatctggagaccttctaagacttttcaattgatggacattgaaaacggttatttcttaactaaatttcaaagtcctaacgattatgaaaacaattctttcacaagggtcatggcttattttggggcaatatttaatagtacaaccctagactgttga

SEQ ID NO: 11227 - DNA, 159 bp, Zea mays
  Peptide Sequence Number=SeqID_53006
atggatgtctcaaagccgaaagagtttaaggggatgaggcttgcgagggatgtggataacttcttatgggggatggaacagtactatgtactggtgatagataccataccaatgccttatgttcctacatgtgttgcggattctctaaagcttatgtaa

SEQ ID NO: 11228 - DNA, 1197 bp, Zea mays
  Peptide Sequence Number=SeqID_53007
atggagaaaaccaggaaaattgtcctatttgcatgcctgctgctggtttctttcttagcttcatcgtctgcccaaacctgtcttaaccatagcttttccaacaggcaatacgccaactgcagcgaccttccagccttgaactgtttcctccactggacatatgatgaagcagctggtaccgttgaggttgcctttagacacaccggaaccacctcatccaggtggtcggcgtggggcatcaacccaagcggaccaagcatgttgaacacccaggctctggtcgcctatgtcaactccagtggcatccctcatgctttcaccacatccatcgacagcatgagcccttccatgcaacagagtgctttgagctttcaagttccaagcctttcagccgagtttgagaacaacgaaatgaggatattcgctgtcatgagaatctcggaaagtttgttggctaccaaccaggtttggcaagaaggtccagtcagtaacgaccaactaatgatccatcctacttctggagacaacatgcgatctaccgcaagtgtcaatttccttacgggacaatctggggggacctcatctggcagttcaagaactcgaagaagaaatgttcatggagttcttaacacagtcagctggggaatcttgatgcctttgggagccataacggctaggtacatgaaggtgttcaaatcagcagacccggcatggttttatctccatgttgtttgccaaacatcggcctatgctgtaggcgtagcaggatgggcaactggtattaggctgggcagtgattcagctggtgtcacacacaatcctcataggaacattggcatcaccctcttctgccttggcactcttcaggtgtttgctttgcttctgaggccaaacaaggatcacaaatacagattgtattggaacatctaccaccattccgtgggttacgcagtcatcatcctcagtatcatcaacatcttcgatggcttcgacatccttcatcccgatgaccattgggagagaatttacatcggaattctcatatttttgggtgttgttgccactttgttggaaggaatcacttggtacattgttctgaggaggaagaacagagggtctgatactgataagcgctctcagagcatcaatggagccaatggagtgaatggatttggtgccaggggacaggacgtgtaa

SEQ ID NO: 11229 - DNA, 2139 bp, Zea mays
  Peptide Sequence Number=SeqID_53008
atggcagttcaaaaactatacccagacgcgaaagtgacaattggaccctggatagacaatgggttttactatgattttgatatggagcctttgagtgataatgatctcaagaggattaaaaaggaaatggatcggatcattaagcgaaatttaccgcttgtaagagaagaagtttcaagagatgaagctcagaaaaggataatggctgtaaatgaaccttacaagatggagattttggatagtattaaggaggatcctatcactatctatcatattgggaatgaatggtgggatctttgtgccgggccacatgtcgaaactacgggaaagattaacaacaaagcttttcagctcgagtccgttgctggtgcttattggagaggagatgaaaagaaacctatgctacagaggatatatggaactgcatgggaaaatgaagaacaactgaaagcttaccttcacttcaaagaggaagctaaacgccgggatcacagacgtattggccaagatctcgatttgttttctatacaggaggaggctggcggaggtttagtcttctggcatccgaagggtgccattgttaggcatattatagaagattcatggaggaaaacacacatagaacatgggtacgacttgctatttactccacatgtggcaagggctgatctttggaaaattagtggtcatctagacttctataaagaaaatatgtatgaccagatggagattgaggatgaactttatcaacttcgaccaatgaattgcccttaccacatattagtatacaaaaggaagcttcattcttatcgagactttcccatcagagttgcagagcttgggacggtctatagatacgagttgtctggtagcttacatggtctgttccgtgtaagaggttttacccaggatgatgctcacattttctgtttggaagatcaaatcaaggatgaaatcagaggggtcttagatcttaccgaggagatactattgcagtttggtttcagcaagtacgaggtaaacctctcaactaggccagaaaaggctgtgggtgatgatgatatctgggagaaggcaacggtagcacttaaagatgctttggatgataaaggctggagctatcagattgatgaaggtggtggtgccttctatggtccgaaaattgatcttaagatagaggattctcttggaaggaaatggcagtgctcaaccatccaggcaagttttgacttatccccaaatttctgcctttcttaccttactctttccatcctctcatgcattatctgtaattcggcttcttacttgacagagcattatgctggggactttcctttgtggctggctccaatacaagctcgggttttaccggttactgatacacagcttggatactgtaatgaggtggttggcaaactcaaatccaatggcatccgtgctgaagtttgccatggatgctctaacattacgtttcaaagtttcaccgtctctgcacccgaagaaagcctaaacacggacggaattcacatcggacgatcagatggggtctacattctcgactcaaagattgaaactggtgatgactgcgtctccctgggtgatggtagcaacaatgtgaaagtccagggagtaacttgtggaccaggtcatggcatcagtataggaagtctcggaaaatacaaaaacgaagaaccgatatcaggagtttttgtcacgcaatgcaccttggctaatactatgaatggtgtgaggatcaaaacttggccggcctctcaacctggctcagcaacggatatacatttcgaggatattaccatggataacgtcggaaatcccatcctggttgatcaagaatattgcccatggaaccaatgcgatctatcggttccatcgcgtgttcaactcagcaaacttagcttcaagaatattcgaggcacttctaaaactcagatagccgtgaagcttatttgcagcagcggtttgccatgtgatgaagtggagttggccgacatcgaccttacttacaatggacccgaaggacctgcgatatctcaatgttcaaacgtgcatcccgcactttccggcgtgcagaacccagctgcatgttcaagccaacctaccggagaagctgctccttaa

SEQ ID NO: 11230 - DNA, 729 bp, Zea mays
  Peptide Sequence Number=SeqID_53009
atggccggatcattgactcgtcttgataggcatcacatatcggtggaacaaatgacaatgtctgaagatcgagtattggaatgcaatatccggaatatgcatgctcctccatcacagttggtagagaactacctgcgggaagcgggtttttcgcacgtggcgacgatgggccggggatgcaagttggacccaaaactgatcagtgcgttgatcaagaggtggagacccgagacgcacacattccatcttccatgtggagagtgcactatcactctagaagatgttagtctgcagttgggattgccggtggacgggtacccagtcaccgggtctgcccaatctagcaattgggaggcggtgtgctacgagcttttgggcgctattccagagaaaatggagggaggtggaaccatctggcaagttatgcttgattaccgtcctctcttgaagatatacggcttctattggaccaacggtcggaaggagaagatccatggcaagctgtatttactgacgccagaggagagacagcgacaaatacgtgtcgaaaggatggatcatcgtcccaagtccgacaaccagatgccaaactggaagaaccagaatccccaccggaagaacaacaaccgccgccggaagctagagaaaggaggaatccagcgcgtaaccgtcgacggccgccatgtggcactgaatcccccgggcatagacattgattgtcgtatttaa

SEQ ID NO: 11231 - DNA, 642 bp, Zea mays
  Peptide Sequence Number=SeqID_53010
atggacatgtgcccaggccgtgtaagacagacgggcaaagaaacaggctatgtgactcactgtttacaatttaaaaccacacgggcagatgagacgggcgtgtgtcaggttgtgggagccacacaggcaagcacatgggcaaatcgtgggcgtcaaagagaagctcaagtagagtcatcctctatgggtggtatgcccaacctggagactagtgagtcagttggtactcccattgctgaaacggagtcccaaactccgacggctagggacaacgcattgtccaagtccatgattcaggcattggagaagtttgtcgggacccatactgatcgggaggccatgggtcggttactaaacgacttcggtcgaatggggctcaattatttaggggcatcattggaatcacccctactatcgctgagtatttgctcaaggccaccgaacggtgaccgatctgtggttgagtatgaagccaaggttctgcgattgagtagggagaggatttttgcatctttgattgataaagcaatgattgtggaagaggtaaagcgtaacgagtgcgagtggcgtgaccgcgaaagggatcggaggttcacacgggcaaaggacacgggcatgtgtctaggccgtttaactcattga

SEQ ID NO: 11232 - DNA, 288 bp, Zea mays
  Peptide Sequence Number=SeqID_53011
atggctgatccggtaacggctatggtgattgttgttgctgtcggtgtcggtaaccacggacgtcctcctggacgagacaccagcggtggggcgcgcggccgtgacaggagacgcgtggttcctgtcctgcatgagctccatctacgcgttgaggaagaaccgcacgcgctgcgactccagctcctgaagtccatgcgctggagctccacttcactgttcccttcctcgttgccgatgccaaaggttcatatacaaactatactaagtcgattgtccggaataccgtag

SEQ ID NO: 11233 - DNA, 264 bp, Zea mays
  Peptide Sequence Number=SeqID_53012
atggattggatgagatgggaggacactcaagagagaaggatcgctgatgggcctctacctgactacctcagtcacactcctccaatcaaggatgtttgccggtatgtgtggataggacaatctattctcctaaagactcctccaatcaccggcttagtacagcatcacgcgaaaaccagagtcaagggacatagggattatgatctagcctgctattggacaggagtagcactcatgctttatgctctccggatccagtgctga

SEQ ID NO: 11234 - DNA, 753 bp, Zea mays
  Peptide Sequence Number=SeqID_53013
atgccgatatatgactcatcatcagagtccgacaatgagatcaccccacgcggaaagctctttggacgccaaaggcctatgcatgccattcttggtggaggaaaagttgctgatgtattactatggaggaacccaaaggtatcagccgccttgttaacgggagtgacaaccatttggtttctcttcgaggtggtcgagtacaacttcgtcaccctcctctgtcacatctccatcaccgccatgcttgccatcttcatctggtgcatttctgctgattattttggatggaaacgtccaacgatccctcagttgttatcggatcaagctgccttcagtgaagttgtttacttcttccattggaggttcaatcagttccttcaaaagctcctccacattgctggtgggaatgatcctgtcaatttctttctggtcattatttctctttacgtactatcggtgattggatcttgtttcgacttcgtcaaccttctcttcattggcttggggaagaagaagaagaagatggttagggaactgaaagtaattagtgatgtggatggaggtgggataggtggtcttttcctagtcttatgggctgctttgctcaccctttcttccatttcagccatactattctcttgtgccgatggtgtatccaaggagaaaactgactcaggtgacaccaatttttatggcggaggatgtactgctgggtgtgggggtgctggatgtggtgcagcttgtggtgcataa

SEQ ID NO: 11235 - DNA, 2061 bp, Zea mays
  Peptide Sequence Number=SeqID_53014
atggatgccttcttcctttcaccatcttccttctccatcttattccttttaactattttccagctgtcttacgcccgagatgatttccactttacttcatgcgctccatttgattgtggaaaccttgttaatatttcatatcctttctggacccatcaatataatcgaccttcatattgcggttacggtaatgaagggtataagctgaagtgcaggcagaatcagccccctgttatgacgctcagttcccaagaattctatgtgctgcatctcaatcggtctcatggtttgttgacaatcaaacgagtggaattaaacaacacttgtcctcagccgattttgatgaacaatgcttttaattatactgaaactgctgaaaacattacgctgttctacgactgccgaagcaggggaggtccgaatcatcgtttcagttgcagaaagggtggaaaagaaacttccctcatgttctttaaggaggatgaaaatgaatgtattggaaacagtgagcaagttgaaattcctattgggaaaaaggcctttgatgatctgattggcggaatcagcactgttaatgaaagtttagtccaaccctttgatattagatactttgcatacgatccttattgcaaacactgcaaggattctggcggaagatgtggatacaaccaaactgaaacctctgcatttgtctgctattgtcgtgataagcctcatttacttaaatgcaaccaagtatctaatctcaccgccaccgctgtttttacactaaccgcaggccggcatggttctaacttggcaaaaaagcttgcaatcggtaatatactcccccgattctcccctgttccattcatctcttctggcagttttggagcggctgctggaggcataataatctcggccatcgctttctatttctggttgcgccatcgccgtggaaaggagttctttaaatcatcttatgcatggagcaaaagcttttccgatcgttctttcatgatggatcctgagaaggtcaaaagcttggctggtgtccatctcttcacctataaagaacttggagaagctaccaacaattttgattccaataaggaacttggtgatggaggctttggaaccgtatattatggcaaacttcgagatggacgcgcggttgcgattaaacgtttatatgaaaacaactacaagagagttgagcaattcatgaatgaagtttggatcctaaccaaattgcatcacagaaatctcgtatcgctttacggatgcacctctcgtcacagtagggaactgttgctggtatatgaatatgtttctaatggcactgttgccgatcaccttcatggacaacgtgctaaaccgggtgcgctctcttggtccattcgcttagatatagccatagagactgcagatgcactcagctatctccatgcttctaaaaccatccaccgtgatgtgaaaaccaacaatatcctcctcgacaacaatttcacagttaaagttgccgatttcggactgtctcgtctttttccatctaatgttacccatgtttccactgctccacaagggactcccggttatgtcgatcccgaatatcaccaatgctaccagcttaccgagaagagtgatgtgtttagctttggggttgtactcgttgagctaatatcatcaaaaccagccgtagacatcacgaggcacagacacgagatcaatttgtcgaacatggctatcaataagattcaaaaccgagcattacatgaactagtggatccatctctcgggttcgaatcagactacaaggttaggaaaatgataacgggtgtagcagaggtggcattccagtgcctgcaaaacgagaaagagatgagaccaacaatggcacgagtgttggaggccctaaagggtatacaaaatgaggattacaataaagcaaaggcagaagagatggatatttcagcagatgatgttgggttgttgaagagtggaccattgccacattctccagattctgtgatgacaaaatggcatagctcctctacaatacagtcaaatagtacgagttaa

SEQ ID NO: 11236 - DNA, 483 bp, Zea mays
  Peptide Sequence Number=SeqID_53015
atggccgaagcagagtcctttgttgagcttggtccaataaaagacaagttcgagttgtctaagcccaatggaaagggcaatgatgaaagaaaccatgaggaagatgaagagggacatagcgatgatggcaacacaatcaaaaagaaagatgagtcgaaggaagaggtgaagcctattgaggggaagacatcgagggtcaattcgatggtgctcattcctaagaaaaggaatggcgaagaaaggttgatatttgtggacatcaacattacaggtcagaagcggagtgctcttattgatactggagcatcgaacttgttcatatcggaaatggctgcgaagaagcttggtctgtcaattaagaaatcaaataagaagatcaagacagtaaattccgaggaggccccaactgtgggagtagttcacattgtcgagctacaaatcggtgaatggaagggaaagaaagacattgagaacctcccctga

SEQ ID NO: 11237 - DNA, 321 bp, Zea mays
  Peptide Sequence Number=SeqID_53016
atggtcttttccaagtactggaacgaatcaatgataactcatataagttggacctacaaggtgacgatttggggacaaatcaccttgaagatgggggatgatacgatctcgtccaagggctcaactgaatctgtttgtgaaccaatcgagctaccaactggttctattactcgagctcgagccaagaaattcaaagaagctattttggctctagttgctcaagtttggggagaggctttaaccagattcatcgatcgagcttgggagtgctcgtcaagtgccctatgcaacttgcttcaaactgatttcaaacttagctag

SEQ ID NO: 11238 - DNA, 233 bp, Zea mays
  Peptide Sequence Number=SeqID_53017
atgaaggcgttctccctatttggttcaatcttcatcatcacaaccatggagctaatatacgttgtgagtgtgcaagagtccactagaaggcgtattaactcaatactgcctaaggatgttgcgacataccccagaagacaccctgaagctgagcatactgctttaaatgtcgcgacacaggacctaatatgtcacgacatcacctctgtacgggaaactaatatgagccaagg

SEQ ID NO: 11239 - DNA, 168 bp, Zea mays
  Peptide Sequence Number=SeqID_53018
atggcgacggcaagtcaacccgctgcccccacgcccaacggctacggcggtggtattttggctggcggagacggggtgcacggcactgcacggcgtcagatcagtctgggtcactggtacgtacagctgaaatcagatccgccgcgtgtcaatttctgcttcgtttga

SEQ ID NO: 11240 - DNA, 1578 bp, Zea mays
  Peptide Sequence Number=SeqID_53019
atggccaagaagaggctcctcctactagcgcacaagatcttctccgccatgctctccctcctcctccacggccgccggagcaggccatccaccaccacgacggactcttcctcccccgcggtgcaccgcggcgctcctcctcctccgacgaccgccgccgccgccggggccctcgtggtcgacgtcgacaccgcgctgctgcggtccggcgacctgttcccgtacttcatgctcgtggcgctcgaggccggcggcttcctgcgcgggctgctcctgctcctgctgtgcccgctcgtccgcctcatgccgcgcgccgccgccgtcagggctatggcggcggtgtccttctgcggcctgcgcgccgcccggttccgcgccggccgcgccgtgctgcccaagtggctcatggaggacgtggcggcggaagggttccaggcggtgcgcgcggcggggagcagggccgtctgcgtcactgccatgcccagggtcatggtggacggcttcctccgggagtacctcggcgtgcacgccgtggttgccagggagatgaaggtggtctgggggttctacaccgggatcatggaggacgcgcggccggccgagggtgcagagatggtgaagaaggcggcggaggaacagacggtcgtcgtcgggtactctgcgtcaatggagtttcttaaccatcctctctcacgttgctgcaaggagatcttcgtggtgagctccgacgagaagagccggtggcggccgctggcaagggacaagtacccaaagccgatggtgttccacgacgggcgcctggcgttccggccgacgggcgccggcacggccgccatgttcgcgtggctgcccctgggcgtgaccctgggcgcggcgcggctggccgtggcgctggtcctgccgtacaggtactcgacgccgatcctggcggcgacgggcatgtcgtggcggctcaaggggtcgcgcccggcgctggcgccgccgtgctccggcgggcgcgggcagctgttcgtgtgcaaccaccggacgctgatcgacccggtgtacgtgtccgtggcgctggaccggcaggtgcgcgccgtgtcctacagcctgagccggctgtcggagctcatctcccccatcggccgcaccgtgcgcctgacgcgggaccgggacagcgacggcgccgtcatggcgcgcctcctggaccggggcaacctcgtcgtcgtctgccccgagggcaccacctgccgggagccctacctgctgcgcttcagcccgctcttcgccgagctcagcgacgacgtcgtccccgtcggcatcgccgtcgagacgtccatgttctacgccaccaccgccggcgggctcaagtgcttcgacccgctctactacatggccaaccccaggatgtgctacaccgtgcagttcctcgataaggtggacaccagcgccgtccggagcagggccgcgcccagcacccagatggccaacctcgtgcagaggaagatgggggacgcgctcggctacggctgcaccatgctcacccggaaggacaagtacctcatgctagccggcaacgacggcatcgtccgataa

SEQ ID NO: 11241 - DNA, 1800 bp, Zea mays
  Peptide Sequence Number=SeqID_53020
atggccaccacaccggaggacttcttcatccaggatctcacggcgcagccaccagcatccccgccggtcttccttgaccttctccagaagcccagtgtcgccagcaataatgaggtctggcgtcatgtcgtccctgacaatgacatggtgcttccttacatctcacacatgctcatggaggacgacgacgacgtcgacgatgagctcatcagtgacgaccctacgctactccaggtgcagcagccgtttgctcagatcctctcctccccttcttcccttggcaccaacaccaccagcaacatggaggggtgccgccggcagcggcccaacggttccttgcaacaagcaggcctgggccatggcgacgacgaacaaagcgcgctcagctcggcctacaagggcggcgccaagggccggccgacgatgacgttcaaggaagaggaacccgaagagaaacgtggcagcgagatgttcgacgaaatgatgtcgcgcgcctacgagacatgcatcaagagcatggagcgcgtcgccgtggacaacagcggcggcggcggcggcggcgcgcatgacaagaggaaccggaggaccggcagatccgcgaggggcagcaatgtggtcgacataggcgcgctgctgacctcctgcgtgaaggcgctggcagacggcgaccacgtggcggcgcgcaacgtgctggcgcaggtcaagcagcacgcgtcggcgacgggggacgccgcccagcggatggctcactgcttcgccagggggatagaggcgcgcatagccggcacagggagctggatctggcggctgcgcatgtcggtgtcggcgcaccacccgtcgtcggctgtggacttcctcaaggcctacagcctctacaccagggcctgctgcttcctcaacgtcaccttcattttctccgcgatgaccatcgtgcaggccatggcgggcaataagagcagcctgcacatcgtcgactacggcacgcgctacgggttccagtgggcgggcttgctccgcttgctgtccacgtcgagtagtaagcagcaagcaggcctgccggtggtgaagttcaccgccataaccgatcccaggcctgcgcactacccaggcgagcaggtcgagagaatcgggcgccggctcacgaaatgcgcccgcgagctcggcttcccttcgttcaagttccacgcgatcacgaggaagtgggaggacgtctccgccgtggacctgcacagaaacgacgacgacgacgacgatgatcgtgaggtgctggtcgtgagtgatctcttcagtttcagcgtcctgatggaagagagcgtgttcttcgactccccaagccctagggacacggtgctcggcaacgtcaggaggatgaggccggacgtgttcatccagagcgtcaccaaccgctcctacggctcctccttcctgtcgcggttccgggagatgctcttctactacatggcggtgttcgacatgctggacgcgaccgtgccgagagagagtaggtctcggctggtgctggagcaggtcctccttgggcactacgtgttcaacgacatctcgtgcgagggcatggacctggtgcagcgccccgagaagtacaggcagtggcaggcgaggaaccggcgcgcaggcctcaggcagcttccgctcaaaccaagcatcgtgaaggcggtggaagacgaggtcaccaagcattaccacagggacttcatggtgtgccaggatgggcagtggcttctgcagggatggatggggcgtgccctcactgcccacacggcatgggtcgcagatatatga

SEQ ID NO: 11242 - DNA, 2934 bp, Zea mays
  Peptide Sequence Number=SeqID_53021
atggcgtcgacggagcaggaggcggcggtcgaagcggccgccgtcgtggaggaagtgacgcggcagcagggcaaagggtgcggcgtcgcaggaggaggggataccgttgggtcctggaggaacatcgacattgcctggcgcaaggcggatgaagctgcaataagaaggtatgaggcagccaactggttgcgaaggatagttggggtagtgtgtgcgaaggaccttgcagaagagccttccgaggaggaattccgtattggcctgagaaatggcattattctctgcaatgcactcaataagattcaacctggtgcggttgtggaggttccatcggattctactgctcctgtcgatggtacagctctctgtgcatatcagtactttgagaatgtgaggaattttctcactggcatgcaagatctaggtcttacaacatttgaggcatcagacctggaaaagggtggacaaggtgttcgagttgtagactgtgttcttgctatgaagtcgttttgtgatgctaagcacgtgggaaaacgatctccattcaaatatggtggcattgtaaagcctttgtctggaaagtatgtcattcgcaagaataatgaaccttatatgaaggtgatgatgaggagtcactcagctgaattactccgggatggcatatcactggagcaaataggtcttgatttttctctagaacccactgaaacaactgctactccagactccatcaggatgcttgttcaaacagttctcgcagataagaaaccagaagaaattccatcagttgtggaatcactcttgagcaaagtaattaatgaatatgattgtcgtattgctagccagagtgaagtggtgaaagacactatggaacaggtgaaagacactatggataccaatgactgtaactcagttttgagaatggattctccgtttgacaccaatgatactaagtcattatccagagtggactctccacaagtggagtctactacccccagcgatctggacaaggccactgaaaatattaagatggacgaagatgagcagaatgcatcgagtctgacagaagatgtaagcacattagtacctctaccagtaccagtaccactaagcaatgatattgtaattaatatcccaaagatagtgagaaattttgatcaagaagagaaacagatccaggatttgaaaagtaacatgtccactgttaagtctttcatggagcagttaaaactgctgtactctgaagaccttaaaaagcttggtgatcatttgcgtattatttctcatgcggcttctgggtaccgcaaggttgttgaggaaaaccgcaagctttacaaccaaatacaagaccttagaggaaatatcagagtttattgtcgagtaagacctttccatcctggaaaagaatttccctcgagcagtgttgctggaatagaagatagaaccatcacagttatggtaccatcaaaacatggaaaagatggaaagaagtcctttactttcaacagtgtctttgggcctctggccacacaagcggatgtctttacagacatgcaacctttggtccgttctgttcttgatggcttcaacagtggtcccaaaattttgacagaagaagggctcggtgtcaactacagagcactaaatgatctatttggtatccaggagcagaggaaagatacaatttgttatgaaattgctgtacagatgatggagatatacaacgagcaattccagatgcaaatgtggtgccagtcagatcgaccgctgatctgtctgactgttcatgttcaaggacgagatttaacatctggaacagtcctaagaggttgcatgcatcttgtggatctagctggcagtgaaagagtcgataaatctgaagtggtaggaataggattaaaggaggcacagcacataaacaagtcactggctgcactgggagatgtgattgcagctctagcccagaaaagcacacatgttccttacagaaacagcaaacttactcaactattgcaagactctcttggaggacaagcgaaaacattgatgtttattcacatagccccagaaccagatgctattagtgagtccataagtactttgaagttcgccgagcgtgtttccactattgagcttggagcagccaagtcaagcaaggaaggaggaggaggaggaggaggagaagccagagagctcaaagaacagattgcttgcctcagggcagcattagctaggaaagatggagatcatgagagcatacgaagcactcaatcgagcccagacatatatagaatgggaacgggtaatgcatcacctgcgtccaggcacccaatagaagatgggatcatagagaacgactcagcattgggagatttggctgaacactcacagttcgggagcagcaattccctaccagagttgggacctgatgccacacaagatctagccttctaccaaagaagcaactccgaacagcaatggagctggtctgggtctgttgcaacggaggattccgatgatttcgaggttgcaactaattgctcgttagagctggactgcgtgaggccatctagtgccccaaaagcttcaggtttatcaaatggagggggcacagctgtaaaaaagatccaagtcaagggttcaaaaggttcagacgttaggggagtgaatcctggaaaaaggtcatcgccattacagaagaagccgagtggaccctcaccgacgctaatcaagaagggcggaggtgaaggaaggaagactccaaatgccatttctgctaacggtatggatgagcgtctggataaagatgttgttcaacttgatcatgcttctcaaatgcgggcctttgttagttctatgagccctctagttaatctatctatattgtcgctttacatcaatagcaattgctacaaccgggtgatattttag

SEQ ID NO: 11243 - DNA, 1593 bp, Zea mays
  Peptide Sequence Number=SeqID_53022
atggtgttcgcgttcgtggccggcagccgggtggcggcagcagaggcgctgacgacggcgcggttcgcccgccaggtgctctccgggcgatggttcacgctgctggcgtgcctgctgatcctgtcggcgtcgggcgccacgtacgcgttcggcatctactcccgggcgctcaagtcggcgctgggctacgaccagcgcgccgtggccacgctcgccttcttcaaggacctgggcagcaacgtgggcgtcccagcggggctgctcagcgaggtggccccgccgtgggcggtgctcgccgccggggccgccatgaacctcgcgggctacctcatggtctacctctccctcgccggccgcgtcgccgccccggccccgccgccgctctggctcatgtgcgcctacgtctgcgtcggcgccaactcgcaggccttcgccggcaccgccgctctggtgacgtgcgtccggaacttccccgaggcccgcggcgccgtgctcggcctgctcaagggctacgtcggcctcagcagcgccatcctcgcgcagatctacctcgccctctacggcggcggcgccgacgcccgctcgctcgtcctgctcatcgcctggctccccgctgccgtctccgtcgtgttcctcggcaccgtccgcgtcatgccgccgccgaatggccggaccaggaggagcacgagccgcggcggagtaggcgacgtgttcctctgcttgctctacatctctgtcgcgctcgccgcgtacatcctcgtcatgatcatcgtacagaggcaggccagcttctcgcgcgccgcctacgccgcgtcggcagccgggctcctcgtccttctcttcctgcccctcgccgttgtcgtcaggcaggagtaccggatcaaacatgagctcgagggctccccgagtgtcgacgcacccttgcccgtgatggtgacggtcgttgagaaatccatcgccatgccattggtagagccggcgatcactactagcgatacgccaccgtcttcctcttgcttagtaggaataagatccttcttgcggcacgcgttcagccctccggcgcacggcgaggactactccatcccgcaggcgctggtgagcgtggacatgctggttctgttcctggctatcgcctgcggcgctggcggcacgctgacggcgatcgacaacatggggcagatcgggcagtcgctggactacccgcccaagagcgtggacgccttcgtctccctcatcagcgtctggaactacgccggccgcgtcaccgccgggtacggctccgaggcgctcctgtcgcgctacaggttcccgcggccgctggcgctcacgctcgtcctcctcgcgtcctgcgccggccacctgctcatcgccctgggcgtcccgcgcgcgctctatgcggcgtcggtcctcatcggcttctgcttcggcgcgcagtggccgctgctgtacgccgtcatctccgagctgttcgggctcaggcgctaccccacgctttacaacttgggcgccgtcgccagccccgtcggcgcctacgtgctcaacgtgcgcgtcgcgggccggctctacgacgccgaggccgccaggtgttag

SEQ ID NO: 11244 - DNA, 807 bp, Zea mays
  Peptide Sequence Number=SeqID_53023
atggcgcctcctgttgacgtggctagcccgcgccctaggttgggcgatgtggaggctcctccgaggtcaaggtcgagtctgtcttccgtggccgaggtcaagtccgagcccctgggtcgggcgaggcggagaccgtcggctgaggccagggctgagtccgagccctggggtcgggcgaagcggagttcgtcgtcttccggggctgagcccgagtccgaaccctgggtcgggcggagtggagttcgccgtcttccggggctgagcccaaaaggacagcgccgcctgcgccactccgactgcagtgccactcgacagagtgagtctgacaggcaattaggccttgccaaagacgccacggcgaactccgctccgcccgaccccagggctcggactcgggctaagacccggaagacggcgaactccgctccgcccgaccccagggctcggactcgggctaagacccggaagacggcgaactccgcttcgcccgaccccagggctcggactcgggctaagacccggaagacggcgaactccgctccgcccgaccccagggctcggactcgggctaagacccggaagacggcgaactccgctccgcccgaccccagggctcggactcgggctaagacccggaagacggcgaactccgctccgcccgaccccagggctcggactcgggctaagacccggaagacgacgaaactccgcctcgcccgaccccagggctcggactccgccctggcctcggccggacgacttccgcctcgcccgaccccctggctcaggctcggccacggcaactga

SEQ ID NO: 11245 - DNA, 201 bp, Zea mays
  Peptide Sequence Number=SeqID_53024
atggggggaaagtttgaaccaaaccgctgtagcgcaggcggcggcctccggacgccggctggacacaagcagatcatttatgacgacggcgtccgcgcgacaatggccagctctggctccggctccggctccggctcccagtccccggccggacaaccaggggcgcgccgactaggaccgaggtcaaatctggtcgactga

SEQ ID NO: 11246 - DNA, 2055 bp, Zea mays
  Peptide Sequence Number=SeqID_53025
atgccgaccccgaagcagcggctcccctgctcgaccttcggccgaggcggaggagggaggcgcgccgcctgcggctccgccgtgctgccacccgtggtggtcctcgtgttcctgttcgtggtcgcgccttcgctcttcttcgtcgtgcgcaatggcggtcgcggctacggccacggccacgtagccgtagcctccgatcccaacggtaagaatgatgatcaggaaccaacggcaatgaagaacctcaaatcttttttgcctaaggaggtgtttgatgctataactgctagacaacaagaatcagacactttgagtcttgatttttttaggaatcacgcatcgccctcttggaaaactaatgatctagtcactgagaagagcatggatgtcgatgacaaggctaaagctgaaatcagtttgccagaacatgatctaccaacaaatagatcacccaaagatccagatgaacatcaagctgacaatgcagcaaaagtagctcgaaggaaacttagggagacaaggcgcgagaagagagcaatggatttggttcataaagatgatgaagcacatgttaagcaggagaatgccgctattgagcgatcaaaagctgtcgattctgctgtgcttggaaaatacagcatatggcgaaaagagaacgagaattcagattctacagttaggctgatgagggaccaaattattatggctcgtgtctattctgcgcttgctaaatcaaagaacaagagtgatctatatcaaaaactgcagacccgaatcaaggaaagccagcgggctgttggagatgcttctgctgatgctggcctgcatcacagcgcacctgagaaaatcatagcgatgggtcaagttttatcaaaggctagagaagaagtttataattgtatggcaatcactcagaaactaagggctatgcttcagtcagcagatgaacaggtcaggtgcttgaagaagcagagtacatttcttagccaattggctgcaaagacaattccaaacagcattcactgcttgtctatgcgtttgacgattgattactatctcctcctccttgaggaacgaaaatttccaaggagtgaaaatttagaaaatccaaatctctatcactatgcacttttctcagataatgtcttggcagcttctgttgttgtgaactcaaccatcatgaatgctaagaaaccagagaaacatgttttccatcttgtgactgacaagttaaactttggagccatgaacatgtggtttctgctgaacccacctggcaaggctaccatccatgttgagaatgtggacgaatttaagtggttgaactcatcatactgtcctgtgttgcggcaacttgagtctgctgccatgaaagagtactatttcaaagctgatcggcccaccagtctctcagcaggttcttcaaacctaaagtatcggaaccccaagtacctctctatgctgaaccacttgaggttctatctcccagaggtctatccaaaggtggataagatactcttcctcgacgatgacatagttgtgcagaaagatttgacagggttgtgggatgttaatcttaatggaaaggtcaatggtgctgtggaaacctgtggggagagtttccaccgttttgacaagtatctcaatttttcaaatccacacattgctcggaactttgatccaaatgcatgtggctgggcttatgggatgaacatctttgatctgaaggagtggaagaagaaagatattactgggatctaccacaaatggcaaaatatgaatgaaggcagagttctttggaagcttgggacacttccgcctggcctcttgaccttctacaagttgacgcacccactggacaagtcatggcatgttcttggactaggatacaacccaagcgtagaccgttcagagatagacagtgctgctgttgttcattacaatgggaacatgaagccatggttggagctagcaatgaccaaataccgaccatattggaccaggtatatcaagtatgatcacccttacatccgtggatgcaacttgagggagtag

SEQ ID NO: 11247 - DNA, 975 bp, Zea mays
  Peptide Sequence Number=SeqID_53026
atggcggggttccctctaggcggaggaagccacacccagagccgcgacgcgcccgcctcgtccgtcccgccggtgcatccctccgacgccgcgtccttcctctacgcggcgcgcgcgggagcgggcctgcagctatggcagcagcagcagcaacacccgttctacaactccaacatcatccgcttctccgatgatccacccggcgccgcgccctcgctcacgggcgccgcgtcgccgtcgtcgccgtcgcgcggcccgagggccggcgggggaagcggcggcggcggcggggtcagctgccaggactgtggcaaccaggccaagaaggactgcgtgcaccagcgctgccgcacctgctgcaaaagccgcggcttcgcctgcagcacccacgtcaagtccacctgggtctctgctgccaagagacgcgagcgccagcagcagctcgccgcgctcgcggcctccgccggcgacacagccgcggccgccggcccgtcccgcgacccgaccaagcgcccgcgcgcacgcctctccgtcgccaccccgacgaccacgtcctcgggggatcagcagatggtcacggtcgccgagaggttcccgagggaggtgagctcggaggcgctgttccggtgcgtgcgcctggggccggtcgaccgggccgaggcggaggtcgcgtaccagaccaccgtcagcatcggcggccacgtgttcaagggcatcctccacgacgtcggccctcgtagcttgcctgccgctggaggcggcgccgccgccgccgccatcgagtactacttccgccacgccgcggacggatcgccgccgagcaccacaggcgccgctggcgaagcgtgcggcgccggtggtgtgggcaatgtcgtcgtgtcatcggctgtggtgatggacccgtacccgacgcccggaccctacaccgccttcctgcctggcgcgccgttcttcccaggccacccgagacagtga

SEQ ID NO: 11248 - DNA, 333 bp, Zea mays
  Peptide Sequence Number=SeqID_53027
atggctgaccgaaccaccagcctcagcgcgacggtgcagccggcctgctgcctggcgcagcggccagggcagagcccctgcgcgccggacccaatgtgcccaatcgccaccgtacaccctgctcgccggcgaggcctccccagccgagcctcgccctcgccgtttgcgcgcccgtgccgcgaagagaagcttcatcgccgtccctcgccccgctattattcgtgtcttgtggccagcgcattgctgcgtgcgctccacgcggcttgcgcagcaccccgcacagcccccgcgccttcgtgcgacgcgtttctgcgtcctcgcagcgcgtcgtag

SEQ ID NO: 11249 - DNA, 723 bp, Zea mays
  Peptide Sequence Number=SeqID_53028
atgagggcatcggcctgtagaccggccaatttcatgatgattcacgagagtggcataattcccgcctcgccagaggagtacccaattttgggactcaatcttctgaggctgttggttcagaatagaattgccgaattccacactgagctggagcttttacctgccaaggcactcgagcatccttgcatcaagcatgctgtagagcttgagcaatccttcatggagggtgcctacaaccgagtgttaagcgctcggcaggctgtgccacatgagacctacgtttacttcatcgaccttctcgccaaaacagttagagatgagatcgctgggtgcagcgaaaaggggtatgattctctatctgtgagtgatgcaaagcaaatgcttatgttcagttctgaccaagatctgcacgagtacatcactgagctcagcttcaccgaaaaaggtgaagctgaccctaacttcaccaaatttatgaagctaaaagggtgctttacgaataggtgttttcaactctcttatgaagttgaggagcacccggaatgggagattaagaacggtgctgtcttcttccagaaggcgaaggaatcacagccctgcaaggagatcccatccttgcagcttatcaaccagacgctcagctacgccagggagctggagcgtattgcttctgacgtcacgttttcttctgcatctgatgcaggagataggaacgatatttag

SEQ ID NO: 11250 - DNA, 525 bp, Zea mays
  Peptide Sequence Number=SeqID_53029
atggccatctcttttgttttctttgcctcgtccgagctgcagcaatggcgatccatcgtcattcgcgcttccctggcgaagtcggctgagccgtcctcgctctctgttgtgtggtcgcgcgtctacccccgtagcccctccctacaatgccccttcgcggtcatggctggccgaaccaccagccccgacgcgacggtgcagccggtctgcttcctggcgcagcggccagggcagagcccctgcgcgtcggacccaatgtgcccaatcgccactgtatgccccgctcgccggcgaggcctcccccagccgagcctcgccatcaccgttcgcgcgcctgtaccgcgaagagaagcttcatcgtcgtccctcgccccgctgttgttcgtgtcttgtggccagcgcattcctgtgcgcgctccgcgcggcttgcgcagcaccccgcacagctcccgcgccttcgtgcgacgcgtttctgcgtcctcgcagcgcgtcgtaggggtttcgacgacgttcgtctacatgtag

SEQ ID NO: 11251 - DNA, 1338 bp, Zea mays
  Peptide Sequence Number=SeqID_53030
atgtcagcctccggcgaccccctggacgtcctcccggcggcggtcctcgccgacgtcctgggccgtgtagctgacgccggagacatcgcggcttgccgcctggcctcgcggacgcttctcgccgcgtcctacatctgcccccgcgttcgcctctgcgccgccgaccgcgcccgccgccggcgcgagggcggtggtggttcccccgctttccgcgcgaccactgcaaacctcgcctcgcttctcgggcctcacctccggtccctgtcgctcgacacggccggcggtcagggttcccccgatgacgcgatgtgggtggaggagggagagttcgatgaggccgacggcctgcatctcacctgcggcgaggccgtggcggcctgggcgacgacctccgccggaacggtcctccgggagcttgatatcgccgactactggccgcaagcgtgctggcggaaggccgaggcgctccccctcatctcacactactgtcaaaatctcgtcaagttgtgccttaaaaatgcatggctttctgttgacaggctcaagaaaatgccaaatctgacttatctgacgcttgagttcattagactggatgatgaagacctcaaccaattgaatgaatgttttccttgccttcacacccttaatcttataggagtcggagggctcaaggaccctaagatccaccttcttcaactaaaggcttgctgctgggaggtatcaaatgtcccacggtctttggttgtccatgcaccagacttggtttttctggagttgaaatgtatcagaccagatacactcattttggacactccatccttgtctactctaaagctcaccattgataaacttggtgcaactgcccgagttgatggccttctgcgtttgtcgaatcttcgcatagaatcactggattttagttccctttttccagcattcatggacaatcaagctatcaggacattggagctcgagctacctgagtcttcaagtcaatatgaacttcttgaagcagttaacccggattatcttctaagacggctagccagctttagtgaagtcaagctgggcccaagattttcacgtgaactgaaactatgtcttgcccaatacaaagatatccagtttggaagttgcctgaagaagctcctaattcatgtcccacaatcagggagttgtttccatctcatgcccctgtttgagatctgtgcacctttgtgtgaggtgactgtgcttttccacgctgaatcagctgatgctgtccgtcgtcaagatgcaatgtcgatttgtatgcagaacttcccagagatcagatggcagtggggtacctggcagtag

SEQ ID NO: 11252 - DNA, 798 bp, Zea mays
  Peptide Sequence Number=SeqID_53031
atggagccgggtacgaggccagacgccgggtcggcccattcccatctcaagacccgtggccgtggatggagcggcgacatgacgggcgtgatgcggacggaccggcaacccatccctaccggctctgaggtgggccaggtgccggacgggaggccgctgccggctcccgtggccaccggcggcggcggcggcggtaccggcacgggaggcgggcgggagccggagggcctgccgtgcccgcgctgcgagtccgccaacaccaagttctgctactacaacaactacaacctgtcccagccgcgctacttctgccgggcctgccgccgctactggacgcgcgggggagcgctccgcaacgtccccgtcggcggcggcacgcgcaaggccacgcccgccggccgccgcaagcgcgccggcccggcgcccgcaaccgcggcgccgcctgcgcctccgcctccgagcgcgctccacggctcgctgctgcgcccgtacggtgggctgtccttcgccgcgccggccctggcgtcgccgctcgccgccgtggacccggaccgccggctgctggacctcggcggcagcttcacgtcgctgatcgcgccaggggccgacgtcggcgtccacttctccgccgagttcctcgtgggcggactcgcgccggcggccctgcctcgcgcgaccgcctctgtccctgctctgccgccaccgccaccgcagcagcatcagcagccgacgacggtgtcccaggcgttgccggaaggcctgttctggagcatggggtggccggacctgtccatctaa

SEQ ID NO: 11253 - DNA, 786 bp, Zea mays
  Peptide Sequence Number=SeqID_53032
cgtgacttcccaaagttgagaaggtggtcgaaaggtgtcaatatattcaataacgcatacatcatcttgccgatccatgggaagtaccttgaaaaggagtggcgcttcttatccgttgcatggccgtgtcttctgaatgatatacgcaaggaagctgtccaggttccgcagcagaacaatgcgtacgactgcggtatcttcatgctgtattacattgaacagtttataaagaaggcaccggcaaggttcaccaccgataaacttggcatgtttaatcgcagttggttcaagcctgaagaagcatccggtctaaggcagagaataagagagctactgctgcaagagtttggaagtgccaggccggatgaagctgcatcagaggcagatgttgctgctaagagaaaagaaggcatcagtgctgcagagtggaacgaggaggaggcaggccgtgtcgtatcagaatcagactcatgttcatacggcgccggagacgaaaaaggtacagtaaaggcagattctggcagcgcagaagctgagaaagaaggtgggctggttgtgactgcatcatcgcagaaaagatcgaaggggacggcggaggaggaggaggaggtccgtggtagtagcatgccagtcccggatgcagtttgtgagatcactgggaccaaggtgtggatcaagagggtctacagacgaacagggtggccacctggaaattggtgctggagcagtggcggatccagcagggatgcacgcagggcgttcatagaacaattctctcgaaagtag

SEQ ID NO: 11254 - DNA, 243 bp, Zea mays
  Peptide Sequence Number=SeqID_53033
atggcaacgttattggggtattatcgtgtcctggaagtggagattgaacgcgaatttgttgctctgacaggaagcaagatagtttctatggaccttgttcgtatggcatatagccctacagctagtcatgttgtcatttctattcttgaggatgctacaattagatcctgtggtttctccacggagcagacacttgtgctgctctcgcagagaaaaacagattatgtttcaatagatacctaa

SEQ ID NO: 11255 - DNA, 288 bp, Zea mays
  Peptide Sequence Number=SeqID_53034
atgcaggcggcatgcaaccgcgccaagtgggcgcacctctccgacttccatcgcgcccagcatggaagcccaggcccacgcgtcatgcaaccggtgcgcggatgctacgtgcgagcaactgcaccgccactcacgccattgccacgcctcctcgactgcggaaccagtaccgcaactcgaggcaaccctacgcacgacccagcagcgccagcctgggaccgggaaagggggataccccgaaaaggatccttctctgtgaaggaaccaggcttcgagcctccctactga

SEQ ID NO: 11256 - DNA, 2124 bp, Zea mays
  Peptide Sequence Number=SeqID_53035
atggtgacctttcctcttcgtgatctgtcccccacttcactgctgctgctgctgtttctgtttcacccttgggcattgaaggctgggagcgccgcatttgagtacgggaccaaattctcacggtcacttggatggggcagtgatgatggtgaggatggctctgaagagtccatttttggaaccggggatgcagatgatgtcaagcccaagagctttcctgtgtgtgatgaccggcactctgaactgatcccctgcttggataggaacttgatatatcaaatgaggctgaagctggatttaaacctgatggagcactatgagaggcattgccctccacctgaaaggcgttttaattgcttgattcctccaccacatggctataaggttcctataaaatggccaaaaagtcgtgatgtagtgtggaaagcaaacattccacacactcaccttgcaaaagagaagtcagaccagaactggatggttgaagctggtgaaaagatcaagtttccaggtggtggaacccattttcaccatggagctgacaaatatatatcaaatattgcaaatatgctaaatttcaaggataacaatataaacaatgatgggatgcttcgtacagttcttgatgttggttgtggagttgctagttttggaggatatcttctttcttctaatgtgatagcaatgtctttggcaccaaatgatgtgcatcagaatcagattcagtttgcactcgaaagagggatccctgcatatcttggtgttttgggaacaaaaaggcttccgtacccaagtagatcatttgaactagcccattgttcacgttgtaggatcgattggcttcaaagagatgggattcttctgcttgaactagatagattgctcaggcctggaggttattttgcttactcctctcctgaagcatatgcacaggatgaggaggatctccgaatctggaaagaaatgagtgcccttgtagaaaggatgtgctggaaaatcgcagagaaaagaaaccaaactgttatttgggtgaaacctctggacaatgattgttacaagaggcgagcacatggtacaaagccacctctatgcaaaagtggcaatgatccagattcagtatggggagttccaatggaagcttgcattactccgtatcctgaacaaatgcacagagatgggggaactgggctagctccctggcctgcccgattgacagccccgcctccccgtcttgctgatttgtacattactgctgacacatttgaaaaggacacggaaatgtggcagcaaagagtagaaaactattggagtttgctgggcccaaaggtaaaaccagacactattagaaacatcatggacatgaaggcaaactttgggtcatttgctgctgcactcaaggagaaagacgtatgggtgatgaatgttgtgccacatgatggaccaagcaccctcaagataatctatgatagagggctgataggcagcaatcacgactggaaatctgttttggttgctgcaatgcttctcaaaaagttttgtgctgtgccttgtattgtgaaaattaatatgaagtttagcagtacgatcatgagcctcaaggtttccagcctcaagggcttatttggttgtgaccctgggaaaggtgtctgggccaggcagctccccaagccatcgatttcagacgcctggtggccgggtacacctgtctggccggtattcccaggccaggtttccgtagaagcgggaacatcgtgcttccacatttataattcactcaaatccaataatgcgttttgcaggtgtgaagccttctcaacctatcctcgaacatacgatcttctccacgcatgggcagtcttttctgaccttgataaaagaggctgcagtgccgaagacctgctccttgaaatggatcgtatcctcaggccgactgggtttgccatcgtgagggacaagggcaccgtcattgagttcatcaagaagtacctccacgcacttcactgggaggcattgactgtcgtggacgctgagcccagcccagaatcagaggagagcgaaatgatcttgataatccggaagaagctgtggctaccaaaagcaggcccgcaggattccggcacgtag

SEQ ID NO: 11257 - DNA, 399 bp, Zea mays
  Peptide Sequence Number=SeqID_53036
atggcaacgacaaaggaatttcggcgagcagagaagtacacacgggcggcggctgggcgcagggcgagccatggagatggcgccgagctggaggagcaaggggcgcgcggcgatgggggcagagcgcgccagggagaggcgaccacgaccaccattgggaacgagccggagctgcgcgcgctggaaaatcaccaaacagaggacgacaacctcgagaccctggatctctgcgcttccttttctcgtctccaagcttccaccggcggcgagtggaggtcgctgaccgccagatttagcgtagagaaccatttaccggctcttgctggagccagcctaagtcccaaatgttgtattgaatccttcaatttgattcttatgaacattcacttatacacttag

SEQ ID NO: 11258 - DNA, 321 bp, Zea mays
  Peptide Sequence Number=SeqID_53037
atggcgagcagagaagcacgacgcgcgacatggaagcttcgagcagcgaacggcagcgggcatggggaatttggtgcggccgtggaagctccaagccggcgcggggaagaggtcgagctgggagggaggctgcgcgccgaggaagctgccgcaggggacatcgccatggatgcgcaggggcagagaagacgctggcgagcagcaaggcgacgacgcggctggagattcaacgagcaggagtcaggcgtagaggcgagctccacggagaagaagctgagggggggggggggtgtcgcgaccaaggagatgggcaggggttga

SEQ ID NO: 11259 - DNA, 99 bp, Zea mays
  Peptide Sequence Number=SeqID_53038
atggccgtcatcccaaagcacaagaattcatggccgaacaacccaagagtcgtcggcattggcaacgaccatgaggtccccatgtttgacgatggatag

SEQ ID NO: 11260 - DNA, 1785 bp, Zea mays
  Peptide Sequence Number=SeqID_53039
atggcttccaacgacaacgatcgctgccccaccgacgacaaggcttccatcgccctcctgcgccgcatccgtgccggagagcacgtggacttcgtccatggcgtggacgtatgcgatgctgctccagagattctcgtcgcgaacctggaaccggtgccgggctacagcagcgtctggtacctctactgtgccaagaaatacacgaacaagcgaggccagctcagcgggtacaggcagcgcgctatcaccggtggtggcggcgcgtcctggcacccggagataggccgcaagaacgtccagggatccggtggcggcacattctgcaccttcagctacgcccgcaagcacaagacggaggagcgctccactagatcggtcgtcgtcgtcaatcgaatgggctggaagatggtagagtatgatgacttggccgaggccgacgccgtcagcaactacgtgctctgcaaagtgtatcgaacggctctcccgaaagggaagtcatcgttgccgtcctcctcctcctccggccagaacgagaatgcctcctcgtccaagccgccgacggccaagaagaggaaggcctgtggccgtgaccaccccgaggcggcgccagccagcaagttgatccagcagcagcaagtcgaagagttaaacgtcgacgactacgatatagacatcctggagatgttatcaggcgagccggtgccggagccaggaatgcagcagccaaccgacgccaggacggagcacgacggccggttcagcatcgtcgaagagttaaagatgttgccagacgagctggtggcggagccgggaatacaacagccaaccgacgccgggacggagcacgacggccggttcagcatcgtcgaagagttaaagatgttgcgagacgagccggtggcggagccgagaatacagcagccaaccgacgccaggacgaagcacgacggtcggttcagcatcgtcgaagagttaaagatgttgccagacgagccggtggcggagccgggaatacagcagcctaccgacgccgagacggagcacgacgtccggttcaaggtctgctgctcgtcagagcacgggcacgacagcggctccagcttcagcatcagcatcgaagaagagttaaacgtcgatgactatgacatagacatcatggagatgatgccagacaagtcgcaccacccggaagcgacgccagccagcttgatccagcagcaagaagcagatgtgcaacagcacgggcacgggcacatcgttggcttacacttcgagggaatgcagcagccaactaatgtcgccgagccggagcacgacgacggccgatccatccatcctacgtctggtgatctgttgttggctgcccaagccaacttcgacttcgagggaatgcagcagccaactacagtcgccgagtcagagcatgacgacggccggtccgtccatccactgtctggtggtccggtgttggccgcccaaatcagctacgacttcgaggaaatgcagcagccaactaccgtcgctgagttggagcacgacgacggccagtccgtccatccactatctggtggtccggtgttggccgcccaagtcagcttcgacttcgagggaatgcagcagccaactacaatcgccgagccggagcatgacgacggccggtccatgtccatccagctaccgagaatgtgcagctacacgtcaagtggggtgcacacatctgcaaccaagatacagcacaacgggcttcttcaaggacctgatgatgcacattctctgctcttttaa

SEQ ID NO: 11261 - DNA, 624 bp, Zea mays
  Peptide Sequence Number=SeqID_53040
atggagatgatgccagacgagccggaccacctggaagcgatgccagccagcttgatccagcagcaagaagctgatgtgcaacagcacgggcacagcgttggcttacacttcgagggaatgcagcagccaattaatgttgccgagccggagcacgacgacggccgatccatccatcctacgtctggtgatccgttgttggctgcccaagccagcttcgacttcgagggaatgcagcagccaactacagtcgccgtgtcggagcatgatgacggccggtccgtccatccactgtctggtggtccggtgttggccgcccaaatcagctacgacttcgagggaatgcaacagccaactaccgtcgccgagtcggagcacgacgacggccagtccgtccatccactatctggtggtccagtgttggccgcccaagtcagcttcgacttcgagggaatgcagaagccaactacaatcgccgagccggagcacgacgacggccggtccatgtccatccagctaccgagaatgtgcagctacacgccgagtggggtgcacacatctgcaaccaagatacagcgcaacgggcttcttcaaggacctgatgatgcacattctctgctcttttaa

SEQ ID NO: 11262 - DNA, 354 bp, Zea mays
  Peptide Sequence Number=SeqID_53041
atgggaggaagatcgagcttgaagacgcagctgcgcgcgagagctggagcaacacgtggcaggaacagagctctgctgagcgcgagctcacggcgggggaaggtgcgcggtgagcgggaaagacgcgcggctgggctggagcagggacgcgacaggaaggagctagagggtgtttggcggccatggctggacgcgcgcagggaaaacaccagagcagtagccgcggcttgggaaaggctccggccatgggggaagcttcggctgggctgggcgactggaggagcgccggctggagagttccatggctgggaggagcaggaggccgcagcgcacagggaagagagatgcggctag

SEQ ID NO: 11263 - DNA, 432 bp, Zea mays
  Peptide Sequence Number=SeqID_53042
atgaagaaatcttctaaggtgctgctcaaggaagaggatgttgcaatatgcaatgttaagatagatcttactcgtggaaaatataaccccctcgaaagaaatatcaaaattctaattgatcacattcctttgtttgtatgtaccaaccaatcaccagcatcaagttctttatggaacaatcagggtggtggcatggagattctgaacatggggtggagagcggacattggactttggttgctgttgcgcggtggtgggctcttcctcagtatgggaacagtcatcaacgtgttgcacaagaccacaaacaaagggaagagctgggtgtacgacaaggctgtcgccgccaacctctacactgtcaagttccttgatgacaacaaaggatttgtgctaggcaacgacggcatgttgcttcggggtcttggctga

SEQ ID NO: 11264 - DNA, 585 bp, Zea mays
  Peptide Sequence Number=SeqID_53043
atgcaggcggcatgcaaccgcgccaagtggacgcaccccttcgactccaatgcacccagcatggaggcccaggcccacacgtcatgcaaccggcgcgccggttgctgtgtgcgagcaactgcaccgccactcgcgccactaccgctcctcctcgactgcggaaccagtaccgcgactcgaggcaaccctgcgtgtgacccaacagtgccagccaggcacgtcggtcacaggcggcaccgttggcaggagaagcgggcgacgcttcgcctccgccataatggccacatcaaaaaagggaccggaaaagaggataccccgaaagggatccttctccgcgaaggaaacgggccccgagcccccctactgatcagaggttcgaaggctgacccctcggaggggttcaacagccgcctcagagcactcgggctccgcgcccactactggttagaggttcgaaggccggcccctcggaagggttcaacggccgcctcaagccactcgggctccgcgcccactactgatcaggggttcgtaggctggccctcgaagggttcacaaccgcctcagacacagagcgagggatga

SEQ ID NO: 11265 - DNA, 381 bp, Zea mays
  Peptide Sequence Number=SeqID_53044
atggaggacatgcatcgggcgacgggcgcagaaccgacgggcgaggcagaagtacttcaggcgccgccgccaccatcttctgccatgtgtcgtcagctcagctatgaagaaggcgatgatgaagccaccgtagatggttgggggagggctaccatccaactggtgctggagcggcacccgttgacagcgggttggaccaggcttctgccgcagaaatgtggaacgatgtcggagaatggggaagtagtcgcgtcggcggagaaaatggggttttctccggtctggagtcccatctcctgttgcagcagcggcgatagtggaccgcggattggggtcaacaagggggcgccgctctactgccgattccgactggatcgatag

SEQ ID NO: 11266 - DNA, 654 bp, Zea mays
  Peptide Sequence Number=SeqID_53045
atgcaggtggcatgcaaccgcaccacggagacgcacctcttcgatttcgacgcatccagcatggaggcccaggcccacacgtcatggaccgggaaaggggatatttcgaaagggatccttctccgcgaaggaagcgggcctcgagccctcctactgatcagggccgcctcagagcactcgggctccgcgcccaatactgatcaggggttcgaaggctggcccctcgaagggttcgacagccgccccagagcacgcagagtgagggatgactctgggtacgtccgatacatggctgaggctcgagctatgcttccgaggagcattcaatgtgaggatcgcctgacaccttatcctgacgtgcggtcctcagtcaacagggccgaacctcaggcgccacaagaagctccgcctcgcccgaccttgggcctcggcctcaggagaagtctccgcctcgcccgaccccagggctcggcccccgcctcggcctcggaagatggactccgcctcgtccgaccccagggcccggcctcaaccttgacctcgggaggaatcgcgtcctcgcccgaccccggcctcaggaggagtctccgcctcgcccgaccttgggctcggaccgaccacgccgcaaggagtacatcattaccctacccctag

SEQ ID NO: 11267 - DNA, 525 bp, Zea mays
  Peptide Sequence Number=SeqID_53046
atgtcgcagggtcgtaaggaccgtgagctcctcaccttcgatgccatagagtacgctgaagccaaagatgatgtcgcagggccactcctcttacacgcgcaagcgccgtacatgatgcttgcagtggcctctaaagaaggagatgatgtcatggagctgccagagaagggacgattctcccctcgttgctgcttgcggtggcacgctgatggaggaagtgagcaggggaggttgtggactgcgaggtcctttggctcctgctcgctacgctcgactgctgcccgctcaactgctccttctcatctgaggctcgaccgagatagcccatttgtgaagtcgccgacgtcgcgccgatgttggaagggaggaggggaagctgtggactacgaggtcttccagctctcgatgaaggaaggaggaaggctaggtgtgagctgtgcagggaatgggaatgggtatgggctatgcaaggagggggattgtgaaaggcagctaggcgtgggctgggcgagggaatgggaatga

SEQ ID NO: 11268 - DNA, 177 bp, Zea mays
  Peptide Sequence Number=SeqID_53047
atgactaaaaatttggcagaaaaacagtacaatagcaatgaatgctgcgcatttgagaacaagtccccaacagagaaaattactaaggagatcatggagggtttgtccgaagattctgatgatagtgatagttatgacgtggaaagtggcaatgaagattctgaggaccggtcctag

SEQ ID NO: 11269 - DNA, 402 bp, Zea mays
  Peptide Sequence Number=SeqID_53048
atggaaatgatgaggaacgcagtgcgaattcgtctagggagttcttaccggcgacggtggtgcgacatgcactggccacgagaaggggtgtgccgcaacgattttgcaagttcggcgagaaattcgcccgatgttggcgaccaactcccaatagcgccgccacgagagcctgccccgccgccaagggaagtcaccaagccccacaccgagcgcgcggtcgaagtggagaagatagcgctgaccgcctggccccacaaggcagacagaacacacccacacccaatgcagactgaactgagcaaaggggcccgtcgatcaaagattgcaatagagcgagagtggctgacggcgcgggacccagctgtcggcgctgagacatgggatggtcgtgcgggtgtttag

SEQ ID NO: 11270 - DNA, 378 bp, Zea mays
  Peptide Sequence Number=SeqID_53049
atgggcagaggcaagaggggcaagggatggcctcgccgtgcagacggcaagcgcaagcatcctccaagaccaccctcggaggactttggtgactcggagtacttggaggaacgatccatcgagcgcgccgggcttggtgggtcgaacaattcggaggaggtggaagactcctctgactccgaggagtggagcggcggcgaggacgacggcagcagcgacgacgacaatggcaagggcggcggcagcggtgaagatggcaacggcgatggtgatggcgacggagacagcaagggcgacggtaagggcgacggtagcagcaagggcgacggcaagggcggcggcgacggcaaggccagcggcataacgccgctggcgtaa

SEQ ID NO: 11271 - DNA, 213 bp, Zea mays
  Peptide Sequence Number=SeqID_53050
atgggggttgcgctcttgccgggcgagcctggaaggcggggaactcttgatgcctcggcgacgtggggatcagaggtcgtgcgttcctgttctcggcggccggcgtcgtctgcacctggatcaccgcgggttatggggcataggatcgtctggggcatcgcgccgtcatgcactggcaaacgccatggcggcgccgtcgctcggcttggataa

SEQ ID NO: 11272 - DNA, 495 bp, Zea mays
  Peptide Sequence Number=SeqID_53051
atggccatcaacggagcttcaatgagggagaggaaatgggggaggaaagggagaaacggtcgtgaggacttcgggcgtcgggctgcgcgggcggttcctgggcgcgcgcgtcgaggcttcggcgcggcggggtcgcggcagcgagcggttgggcggctcggctggcgtggtcgggtcgcgcgctggtgcagggctcctggtgcgcggcgtcggggtcggtcgcctgggcgcgacggcttcgggtcctcctggcgcggcgcggtcggggaagcagggaagggtcgggtcacgtccctggaggcgctcgggggcgtcggtctgcgcgtgggagagaacatgagaaagggaaggagagaaagactcaagctcggaacctggctccctagcgagcggcgagggcagaccccttggcgatggggagaggaagggcgcccgaccctcacgacccctgtccccctgaagggcatgcgccattggtggctgatagtcgcctag

SEQ ID NO: 11273 - DNA, 261 bp, Zea mays
  Peptide Sequence Number=SeqID_53052
atgaccggcgacgtcgccaggtcgaaccgcatgacagaactgccattcctcaagtgccttcacttatgcagtggcggagcacaacccaaaaataaggctctcgttcacgaactcaggcaggggcgactaaagacaaccgtcgacctcctcgacattgtgactgagttcgctgatggggaaggcgtagtaggggcaatcttcttcaaggggaaaagcccccatgacgctggtgagctgagcgatgagaagagggggcattag

SEQ ID NO: 11274 - DNA, 348 bp, Zea mays
  Peptide Sequence Number=SeqID_53053
atggatcttccacgcaaggcaaataacgggaacaaaatttctaatagatcttttgcaagctacaatgccatcgaagttccagataggcaggctatgatgtcaacaagcatctttaggcggtcgattgctgctcatgatgattttgcaccgatgggagttcgatcaaagaataatgagcagaaatctactgcacatttgggtgaatgcgaaggctttcaagggcggtcttggacggtgcagggtgaagtgattcatcactgcatgctgggccaaattcctcaagatgatctagttccagaaatccctgtcaatgggatagtccagtttgatttctttagtttgcggtag

SEQ ID NO: 11275 - DNA, 339 bp, Zea mays
  Peptide Sequence Number=SeqID_53054
atgaagaaagtggtctactatgagactgacgcttcatcaccttccacatccggcgccgagtctacatcttcaaagcgccaagagcgtaagaagtatagtaaaccaccatattttgatggtgaggattattgtatgtggagtgataaaatgaggcaccatctaacctcactccacgaaagtatatgggatattgttgagtttggagcgcaggcaccacaggtgggcgacaaggactatgactccgatgaggccgcacaaataaggcattttaattctcaagcaacctctatacgctcgcttccatgtgtcgagaggagtacaacaaggtgcaagggttga

SEQ ID NO: 11276 - DNA, 819 bp, Zea mays
  Peptide Sequence Number=SeqID_53055
atgaacagcttgttctcgagctcgtggaagcgcggcgtcggagacggcggggagcaggggacatcgagtccggcggcgtggagatgtctgcgccgccgggtgcccgagcggggccgagcctcgacaggttcggacgtggatgtcacgaggactggcccaggtacgctgacagtggagtccatcaaggaagagctccgcgacctggagcgcatccagcggtcgctccacgacgccaacgtgggcggcaagtcgctgcacgacgcggcggccgtgcgcgggctccgcgcgcggatggacgcggacgtgggcacgacgatcaagaaggccaaggtggtgaagctccggctcgagtcgctggaccgcgccaacgctgccaaccggtccgtgcccgggtgcggtcatgggtcgtccacggaccgcacccggacgtccgtcgtggccgggctgcgcaagaagctccgggactcgatggagtccttctcgtcgctacggtcccggtcgtgggcgcggggaggtcttgggcgtgtggtcgcggagatccaggagcggcacggcgccgtggcggagctggagcgcggcctgctggagctgcagcaggtgttcaacgacatggccgtgctggtggccgcgcagggggagcagctggacgacatcgagggcaacgtcggtcccgcccgctccttcgtcgaccgcggacgcgagcagctgcaggtggcccggaagcaccagaagagcacccgcaagtggacctgcatcgtcatcctcttcgccatcgtcctgcccatcgtgctcaagaacgtcaacagtaacaagaactag

SEQ ID NO: 11277 - DNA, 612 bp, Zea mays
  Peptide Sequence Number=SeqID_53056
agcaagacggcgtgctcaaacgttctcctcgtcacgcgcagaccagcccgccacggcgccacggcgtcacatcagacatcacatggtgatggaatgatggatgcctcccccaaatcagacgcccggccgattagtccaaactccgcagcagcggcgcaagcgatccaggcgatgcagccagccgccatgaacagcttgttctcgagctcatggaagcgcggcgtcggagacggcggggatatcgagtccggcggcgtggagatgtctgcgctgctgccgggtgccgcggcgggggcgagcctcgacaggctcttcgaggacgtggagtccatcaaggacgagctccgcgacctggagcgcatccagcggtcgctccacgacgccaacgagggaggcaagtcgctgcacgccgcggcggccgtgcgcaacctccgcacgcgcatggacgcggacgtcgccgcggcgatcgagaaggccaaggtggtgaagcaccggctcgagtcgctgcaggtggctaggaaacaccacacgagcacccgcaagtggatctgcatcgccatcctcatcctcctcctcgtcatcctcgtcatcgtcctgcccatcgtgagctag

SEQ ID NO: 11278 - DNA, 1878 bp, Zea mays
  Peptide Sequence Number=SeqID_53057
atgggcaacacctgcgtcggccccagtgccgctggccgcaacggcttcctggccaacgtcaccctgtggcggccccgcggcgacgatcccacgccagccccagccctaccgccgccctcctcgcccgcctccgacaaggcgcccgatcccgtcaccatcccggaatccaagccttcctcccaccactcatcccgatccaccgacctgccaccggcccccgcctcccagccacaggcgcaggcgcaggacaacactccggcgaagcagcccgcgcccaaggtcaaacgcgtccagagcgcgggcctcctcgcggattctgtactcaagcgcgacgttaacacggcccggctcaaggacctctacaccattggcaagaagttagggcagggtcaattcggcaccacctatctgtgcgtcgagaaggctaccggccgggagttcgcctgcaagtccattgccaaacggaagctgatcacggaggaggatgtcgaagacgtgcgccgcgagatacagatcatgcaccacctcgcgggtcatgccaacgtcgtctccatcgttggcgcatacgaggacgccgtcgccgtgcagctcgtcatggagctctgcgccggtggggaactcttcgacaggatcatcaagagggggcactattccgagaaggcggccgcgcagctggccagggtgatcgtcggcgtcgtcgagtcgtgccactcgctcggcgtcatgcacagggatcttaagccggagaatttcttgtttgtcaatcaaaaggaggactcgcccctgatgaccatcgattttggactgtccatcttcttcaagccaggcgagatgtttacagatgtcgttggaagcccatattatgttgcacctgaggttctgctaaaatactatggccgtgaggttgatgtctggagcgctggtgtcataatatatatcctgttgagtggagtccctcctttctgggatggtgaggcagaaagtgaacaaggaatatttgaacaagttttgagaggtgacctggacttttcgtcggagccctggcctagcatctcagagagtgcaaaggatttggtcaggaaaatgcttattcgtgacccaaagaagagattaactgcccatgaagccttatgtcacccttgggtttgtgttgatggtgttgctcctgacaagcctcttgattctgctgttctaagccggttgaaacaattttctgcaatgaataaactgaagaaaatggccctgagggttattgctgagagtttatctgaggaagaaattgcaggattaaaagaaatgttcaaaatgattgacactgacaacagtggccatatcacattggaggaactaaaaactggcttgcagagagttggcgctaatttgatggactcagaaatcaatgctctgatggaagcagcggatatcgacaatagtggcacaattgattatggggagttcattgctgcaactttgcatataaacaaagttgagaaggaggataagctctttgctgctttctcatactttgacaaagacggcagcggttacataactcaagatgagctccaaaaggcatgtgaggagtttggtataggggatacccgacttgaggatattatcggggacatcgatcaggacaatgatggacggatcgactacaatgagtttgttgcaatgatgcagaagggagataatcctctggggagaaagggataccaaagtaatggagcagatgtttcccgttatagcaaacgtagcattcagcaactaagaaatttggaccaaacaacagctccaaaagcttgtaccatgccagtacactggtcaccaagattcaatgacgccctatcaaaatccggggtcgctgaagcaatctag

SEQ ID NO: 11279 - DNA, 699 bp, Zea mays
  Peptide Sequence Number=SeqID_53058
atgggcatctcggcgaggtggctcaagtcattagttgggctgaggaaggtggagcagcagccgcgtaaggagagtgcagatgttggacgaatgaatcagcgctctcaagatgacagcagcattgctgcacaagaagaaattccagaggttccttatggaaatgatccacctgaagatgattctaatgcaccttcatgcttggaacccacttatagttcagctgatgtgccactgtttcaaactgaagaggaactgaaagagatctgggctgctacaattattcagacaacattcagagctttcctggctaggagagcccatcgagctttaaaagggttggttaggcttcaagcccttgtaagaggtcacatagtaagaaagcaagctgatacgacactccgttgtatgcaagctttggtcagggttcaggcccgtgttagagcaaggcgagttcgcatggctttggaaaaccagactgatcagcaaaatacttcaccagagcacacgaccgtggcacgtgtcagagaaattgaggatggctggtgtgatagtattggttctgtggaagatatccaagcaaaacttttaaagaggcaggaagcagcagctaaacgtgagcgagccatggcctatgctctagctcatcagtctaagcggctgttcagcttcccctcattccttggcctgcgttatgtctag

SEQ ID NO: 11280 - DNA, 145 bp, Zea mays
  Peptide Sequence Number=SeqID_53059
atgccggcggccacggacacgggcctgcgcggtgtgtctgacggcgctgtgccgcccgtcgtcccagcggccgtcgtggcggcggcggcggcggggagcgccgtggcctccggcttggctggcatggaggcgtcgagtgcctccg

SEQ ID NO: 11281 - DNA, 264 bp, Zea mays
  Peptide Sequence Number=SeqID_53060
atggaccatgttcttggttgtcgaagcctgtggctcatgggcaaggagacctggaccgaggagttgtcgcggcagccgttgtcacctatgccaacaaagttttgtggtaaatccaaagaaaacatattaaaatccaacacagccatagccaaatgtgtcaccgcagtccaccgtgtccaaaggtgcacatcctacatcggtctctcacttcgctcaaatcatctccatctgattggtgaacaaggcctgtctatccccatctag

SEQ ID NO: 11282 - DNA, 600 bp, Zea mays
  Peptide Sequence Number=SeqID_53061
atggctaaacataaaatcgacttagaaggattcaagttagatgtatacggaagtggtgaggactcgcaagaagttcaatccactgccaagaggttagatttgagtctcaattttttcaagggaagggatcatgctgataattcactctgtgggtgcaaggttttcaaaaatccgagcattagtgatgtcctgtgcacaacaacagcagaggctcttgcaatggggaaattcgtgatctgcgcagaacatccatcaaatgagtttttcatgtcatttccgaactgtttgacatacaagacttcagaggagtttgttgcgagagtgaaagaggcaatggatagagaaccccaaccgctaacccctgagcaaagatacaacctttcacgggaggcagcgaccgagagattcatggagtactcagaccttgaaaaggttctgaacaatgaggctgctcagtctgaacaaggtaggaaaagaaagaataaaagaacctcacagcctaatttgtcttcggtcttccgtgctcaccttcgagagatcaagggtgatgctgacagctcgttggacaggccgtggcagaagaaggctgagatcaagtag

SEQ ID NO: 11283 - DNA, 357 bp, Zea mays
  Peptide Sequence Number=SeqID_53062
atggcgtgcaagacgaagagcctgttgttggcgctctgcgtggcggcgctgctcgcagcacggtcggagttccacggcctgggggacttcacgagcggcgaggcaacgacgacgtcggagatgcagaccttcttcatgccccaggccacgacagcgctaccggaggcactcgacgcctccatgccagccaagccggaggccacggcgctccccgccgccgccgccgccacgacggccgctgggacgacgggcggcacagcgccgtcagacacaccgcgcaggcccgtgtccgtggccgccggcatggcggttgtggccatggttggcatcgcagatcacccagatgcggttgcgtag

SEQ ID NO: 11284 - DNA, 1642 bp, Zea mays
  Peptide Sequence Number=SeqID_53063
ccaccagcacataacaaagcaggcaggcaggctcatacagtacgctcaaagcggaaacagagcgaagaactcagcaggacagtcagctgcaaccgcaactggtctgcttgtcagcaggatcagttggatggccttgttcttcatccttgcttgcaccctcatttttgtagccatcgcctcctacgcccagtacgcgcgctggcagaaggggaaaggccgcctcggcggccatgagaaggcttcttcttcctcctcgaagctgcctcctggctccatgggctggccttacctcggtgacacccttcagctctactcccaggaccccaacgtcttcttcgcctccaaacagaagcggtatggcgagatcttcaagacgcaccttctggggtgcccgtgcgtgatgctggcgagcccggaggcggcgcggttcgtcctggtgacgcaggcgcacctgttcaagccgacttaccctcggagcaaggagcgcatgatcgggccgtcggctctcttcttccaccagggcgactaccacctccggctccgcaagctcgtccagggcgcgctcgggcccgacgcgctgcgcgcgctcgttcctgaggtcgagtccgccgtgcgctccaccctcgctgcctgggacggccaggtcaggagcacgttcgacgccatgaagacgctgtcgttcgatgtgggcatcctggcgatcttcggcggcggcgggctggacgagcggcgcaaggcggagctgaggaagaactactccatcgtggagaaggggtacaactccttccccaacagcatacccgggacgctctactacaaggcgatgcaggcgcggcggcgtctgcacggcgtgctgatcgacgtgatgcgcgagcggcgggagcgcggcgcgccgggcaccgacctgctgggctgcctgatgcggtcccagggtgacgacgacggcgcgcggcggccgctcctgacggacgaccaggtcgccgacaacatcatcggcgtgctgttcgcggcgcaggacacgacggccagcgcgctgacctgggccgtgaagtacctccacgaccacccgaagctgctggaggccgtccgggcggagcaggcggcggtacgcgaggccaccggcggcgggaggcggccgctgacgtgggcgcacacgaggagcatggcgctgacgcatagggtgattttggagagcttaaggatggcgagcatcatctcgttcacgttcagggaggccgtggccgacgtggagtacaaagggttccttatccccaaggggtggaaggtgatgccgctgttcaggaacatccatcacagcccggactacttccaggatccacacaagttcgacccttctagattccaggtggcgccgcggccgaacacgttcctgccatttgggagcggcgtgcacgcgtgccccgggaacgagctggccaagctcgagatgctggtcctcatccaccatctggtcaccgcctacaggtgggagactgttggatccagcgacgaggtcgagtacaggccgttccccgtgcccaagcaaggcttgcctgtcagattatggagagaaagcagtgcggcggtggacagaaatggccgccatgagaccgatgacgatgtggaggacataatagtttga

SEQ ID NO: 11285 - DNA, 483 bp, Zea mays
  Peptide Sequence Number=SeqID_53064
atgcgcgctcctgccgcgctgtgcaccgtgcgccacgccaccacggctcgctcggccgtgctggcgctttcgcccgcgccccttgtccatgcacgtgctccaggacatgccaggcgtcctgtctggggccagtggaaagcgaagcacacaccaaggaggagaggaggagtcgaggacgcatggcgacggtcggcaggtgtgatattattcggtcacagcgtggctctgtcccagcttttgggggcgcctccatctggtttctttgttgggggcctcgtgcgggggttagctttgctgttggctgttgctgatgctggttttctccgtagtttcattgccatcagagggaagccaccaccaaaccgagactgcgagacaggatctggcgcggcgctgatggatccaatccagcacaggctcgacgacgacgcagcaacgcccagctcgacacggctgccgcgatctggcctctgtaaccgctag

SEQ ID NO: 11286 - DNA, 252 bp, Zea mays
  Peptide Sequence Number=SeqID_53065
atggctgcacgggcagcggccccacggcggcacggcggcgcttgccccagtgctggaaccgacgacgcggtagcgtggccaccggtgaaggtccttgccatgctcacgacggagataagaacacagtggaaatggtacgggtgttgccatcgtccttcactctcacagatttggctatcgttatcagatcttcaagccttgttcggttcatcccgttacctatggattggacaagattggaaaaaattgtga

SEQ ID NO: 11287 - DNA, 378 bp, Zea mays
  Peptide Sequence Number=SeqID_53066
atggtgaccgtgacttgcttgggagcactcggatcagatgccccaggaaagcgaagtgcgggcggggggagagaccgaaacccaactggtggccatgattttggtcccctggaaaccgtgcatactttcatggctcctcctggagctggagctggagctggagtagccgtctggccgcgagtcaccgtcacagtagatgatgacagtgtggtgaccggttgtgagtgcgccagggattggcatttctggggggaatgccggcgattacttgttgagattggatttgctagctgtattattgagcggatggctctctctcggaaaaagctgcagccttccgcagtaaaaaagtcggcgacggcagctgccatcttctga

SEQ ID NO: 11288 - DNA, 1026 bp, Zea mays
  Peptide Sequence Number=SeqID_53067
atggtggaggaaggcgccaccgcggcggcgtcgaggagcgggccggcgccgttcctgagcaagacgcaccagatggtggaggagcggggcacggacgaggtgatctcgtgggcggagcaaggccgctccttcgtggtgtggaagcccgtggagctggcgcgcgacctcctcccgctccacttcaagcactgcaacttctcctcctttgtccgccagctcaacacctacgtagaacctactaaaagtcgttcaaagttctttcatatatatttttatggttgcatctgcaagctgctaaaaacagcatggatctgcattccacatttccacttacgtcgatggcgacaatccatgcagggtttccggaaggtggtgccggaccggtgggagttcgcgaacgagaatttccggcgaggcgagcaaggcctcctgtccggcatccgtcgccgcaagtcaacgacgccgcagccatccaagtacggcggcggcagcgtcgtgaacaccgcgttccctccgccgttgccccttccgcctcccgcgtcggtcaccacgtctggcggtggcggtgccggtggcgctggcaacgagcgcagctcctcgtcggcatcgtcgccgccacggacagacgacctgaccagcgagaacgagcagctcaagaaggacaaccgcacgctgtccaccgagctggcgcaggcgcgtcggcactgcgaggagctcctgggcttcctctcgcgcttcctcgacgtccggcagctcgaccttgggctgctcatgcaggaagacgtgcgagcgggtgccggtgacgacgccgcgccgcgccgcgcaatggtcagccagctagagcgcggcggcgaggaggggaagagcgtgaagctgttcggcgtactcctcacggatgccgcaaggaagagggcccggtgcgaggaggcggcggccagcgagcggcccattaagatgatcagaatcggcgagccgtggatcggcgtcccgtcgtcgggcccggggcggtgcggcggcgggaattaa

SEQ ID NO: 11289 - DNA, 528 bp, Zea mays
  Peptide Sequence Number=SeqID_53068
atggtggtggaggagatcgccgagggggtgaagaacctaaccgtcaccggagatgcggcggcttcaggcggagaggggcagaggaggggcggcggcggcagcagcaaccgcatccaggtgtccaacaccaaaaaacccctcttcttctacgtcaacctcgccaaggtacggctgaccttctctccctacgcgccgcatctttccgtgatactcctgcccacccgccgcttccagattctggctgatttggttacttcggtccgtgcagagaaggctctggctttggcttctgaagaaaccctaccaaacgggggtaatcttggagatgctcttagtcaggccatagcaacagttgtgaccgtggcagaaattctgaagaacaatggatttgctgttgaaaagagtgagacttcagggctttgttgtcttattgagataatcttgggaaagagcgacaaatttgatgagctgatggccgctgctgcagaagagaggggcgaagtggaagatggtgaagagcaggcttga

SEQ ID NO: 11290 - DNA, 369 bp, Zea mays
  Peptide Sequence Number=SeqID_53069
atggcgtcgatgaggctaggcctagcgtcgcggggagccggggcgatgggggagatgctccaaggcaaggttggcggcaccgtggaaacgcctggcctcccgatgccaaggtttttcctgaccggaaaagatgtttctctggaggaaaggattgattcaaacctacaacccatagattgggatagtgttgcagagtttgatggccctgctcatgaactcgatttcaacatggtctgggatgatggaatagaagatcatgaaattgtagcagatgaagtgcaagatcttagagccttccactatgttgagattggttacaacaacgccgtggctgcttacagtcttcttgacagcactccggcagagtaa

SEQ ID NO: 11291 - DNA, 234 bp, Zea mays
  Peptide Sequence Number=SeqID_53070
atgacacaacaagtcgaacttcttgcgctccaaaagcaaactgtgctcgcgttaccacatgctggtggctccaaggcagaggcaaggcagcggctggcggacgctgctaccgcgcgtgcgctgcttctggtggcgagggggcagaggcaaggcaacggctggcggacgctgctatcgcgcgcgagctacttctggtggcgagggggcaaaggcaaggcagcggcaggaacctga

SEQ ID NO: 11292 - DNA, 555 bp, Zea mays
  Peptide Sequence Number=SeqID_53071
atgccagcacctcctgctcctggatatgaccgactacctctgttttacggaggaggtggtggcgctccatctccaatttcacttggatctggtagctatggtggtccatatccacaccttgggatgcgatatggttatggtccaccagtaggagctcctggttcatatggccttttctcgtcatatggtcaacctgggccaatgagtggtatgggatatggcccaggacctgagctaggccgatatagctatgggtttagaggttctccaatgccggtttctagcccatggtctggtggagcaatagctgaaaacaatgacaacattgcttcacgaaagcgccgtggagttttcttgttcccatttccgatttctcagctgttatgcaaattcttatatgtaggccctgatggactttctgagggtgactggacctgtcccaaatgcgacaacattaacttttccttcagaaacacttgcaacatgaagaaatgtggagctccgaggccaactcctgaaaggatgctcgtacaacaagtcagccccgacgaataa

SEQ ID NO: 11293 - DNA, 210 bp, Zea mays
  Peptide Sequence Number=SeqID_53072
atgaagggattcctaccaacagggatgatggcggtgctctcctcgtcggaaagagcatggccgctccaccgccacctcctcctcttcgaatatggggataggcctcgactcggtagacgcctcaagcccaagtaccggcacgtccagaccaacggacgggcccgtctaggatggctcggaccaaagcctgatctcagggctgaagcctag

SEQ ID NO: 11294 - DNA, 588 bp, Zea mays
  Peptide Sequence Number=SeqID_53073
atggacaaagtgaaaaccaacataaagccaaagacagttcagtctgagagcaccggactgtccggtggtgcaccggactgtgtccgggctcggactcgggctaaggctcggaagacggcgaactccgctccgcccgacccagggctcggactcgggctaaggctcggaagacggcgaactcagctccgcccgacccagggctcggactcgggctcagccccagaagacgacgaactccgcttcacccgaccccagggctcggacaccgccctggcctctgccgacgacctccgcctcgcccgacccaagggctcggactcggcctcggccatgaaagacagactcgacctcgacttcggaggagcctccacgtcgcccaacctagggcacaggccagccacgtcaacaggaagcgccttcatcaccctgccccgagccgactcgggccacagagaacaagaccgggggacgtcagcaaggacacaaccatcggacagctgtccctccgcccaggctcccgttgctttctccgacagcccacgaccaccagaccatctgggtgccaagatctctccggctgccacatga

SEQ ID NO: 11295 - DNA, 492 bp, Zea mays
  Peptide Sequence Number=SeqID_53074
atgggtcaccccatgcctcagcctcctcctccaattcctgcctaccctgagaacctcaatgaatggcatcagcaggagtatggagtgccctttgtgactctagaggatgaagcaaaaaagtttgatgattccttctttcagtctgctcatgtcgccgctctaggacctattccaggtaactctagaccttcaggctctggttatactcctcatccaccaccatttcaaggtcctttatcttcttcaactttttctttgtcttatgactctcctggggactcgtcatatgaggatcttcctcatatgacgaaagatatgggagacccggtggaggaggataaggaggatatgagggatacaccacgaagaaagagtgaaccatctcttcctcatatgacgagtcccggggagggtcgtcagacgaaggaaaagctgaagaagatgaaggaccctaaaacggtggaggagggtgacccgagcctgaaggcctag

SEQ ID NO: 11296 - DNA, 225 bp, Zea mays
  Peptide Sequence Number=SeqID_53075
atgaagcgcctaagtatggcggcggtgcacagcttcctcaacagcacgactgcgacacatggcgaagaccccggtgatacccttagccaggcgcacaaacaaaccctgaccatgaccttgacctctgtcctgacctctgcctcgacctccacagtccatcggacacgaggcagcggcaacacgagaggtctcatggagaggaggctgaggtggtggttcatctga

SEQ ID NO: 11297 - DNA, 324 bp, Zea mays
  Peptide Sequence Number=SeqID_53076
atggcgagggaggagctcgaccagggatggagcaaggcgaatccagtgaagagtagtgccggggcgtgcgtcaacctaggagcaaaggcacaacagcgtcgccaccatggccagacagcgagctccgatgagggaggagcacgacagaacgcgacgcatatcggagttgagggaagaaggggcgtcgagcagaattcgagccagggcgcggcacagagactcgagagagagagagggcgtggattgggaagaggagcagcgcgtgtggagaattggaaggaggaaagaggagcgaccggcgcacggaaattgggcgcgccatag

SEQ ID NO: 11298 - DNA, 561 bp, Zea mays
  Peptide Sequence Number=SeqID_53077
atggcgagggaggagctcggccagggatggagcaaggtgaatccagtgaagagtactgccgaggcatgcatcaacctgggagcaaaggcacaacagcgccgccaccatggccacacagcgagcttcgacgagggaggagcacgacagaacacgacacatactggagttgagggaagcaggggcatcgagcagaatccgagccagggcgcggcacagagactcgagaaagagagaggggtgcggattgggaagaggagcagcgtgcgtagagaattgggaggaggaaagaggagcgaccggcacacagaatttgggcgcgccatagaactgcgcgcgtggagagcaggagcctcggctgggaggtgctcggcagggagagagaagcgcagcgctaggagccggctgggcgcgcgctctgctgacagagagcaggcaggggcgctcggctggggaagaagatggacaccgcggtgggatttttatcagggtggccgagcggatgggagcgagggaacgacgttgagaatttcttccacgaacctgaggcggcgccgaagataa

SEQ ID NO: 11299 - DNA, 222 bp, Zea mays
  Peptide Sequence Number=SeqID_53078
atgaccacaacaagctgggaaatcgacggcgagcaggaagcctgcacgtggagagcagagagcacggtgcacggactgggcgagcacagcagggacatggaaccagggcgagctctgaacatcagccagcccgcaacaaatacacagcgagaaaaaaggattgaggagtttggcaagctcggtctcgggaggggtgagatgaaggatcttggcgctggatga

SEQ ID NO: 11300 - DNA, 126 bp, Zea mays
  Peptide Sequence Number=SeqID_53079
atgtacaatcaagtgaacacaagctcgaaagaacagtataaacacaagagcgatgaagtcgccggagacgaggcagacgcggtcgtcagggaatctgggtcgccggtgagggctggaactgactag

SEQ ID NO: 11301 - DNA, 304 bp, Zea mays
  Peptide Sequence Number=SeqID_53080
atgacaattgaggacgagaaagacatgtcaatttcatattttgatccaaacaaagcttcagggatatcagttgttctaccaccgaccatcaatgatggaattgctgatttcttcacaagtccgaagcagatccacgagatcaaggacttcctgctgactgcgcggcggaaggacgcacggtcggtgcggatcaagcgggccaaggacgccgtcaagttcaaggtgcgctgctccaggtacctctacaccctctgcgtccacgacgccgacaaggccaacaagctcaagcagtcgctcccgccag

SEQ ID NO: 11302 - DNA, 636 bp, Zea mays
  Peptide Sequence Number=SeqID_53081
atggcaaagctcccgcgtctacgctgtccgtttgccgtgctcgcgctcgtgtgcatcctcccgctctttgcgccgcggcccgccctgtcctcccgcgccgcgccgaaggacggtgtctccttcgccggcgcaggcaacacgatacatcaactccttaaagatcacggccttcccggaggactgctcccgcgcggcgtggagtcgtacaccctggacgaatcaagcggtctgctgcaggcgcggctgtcggcgccgtgctacgccaagtacgacaacggcgacctggcctacttcgacaacgtggtccgcggcaacctgagcaagggtgcgctccgcggcgtggagggcctctcccaggaggagctcttcgtctggctccccgtcaagggcatactcgtccaggaccaggagcccggggtcatcctgttcgacatcggcttcgcccacaagagcctctcgaggtcgctcttcgaggacccgccggactgcaagccgtcggccgccagcgggatgagcgccgccgccgccgtcgccgccgccaggtggaaggttcgccgattggatttcgaatcggctgtaaatcttagcccagctgatgaggagatgcagctgcaggcgttggattccgagagttga

SEQ ID NO: 11303 - DNA, 261 bp, Zea mays
  Peptide Sequence Number=SeqID_53082
atggccgacccggagtccggcatggtggacaaagccgcgtacgtcctccactccctggtgagctccggcgagggccgcgccgccaccgtcgaggaaggcggcatccccgtcctggtcgagatggtggaggtcggcacctcgcgccagaagatcgccaccctctccctcttgcagatcgggatcgatcacgatggggcggatgacggggatcgcggagtagaggagaggatgtcggtggggtcgatggaaggtggccgttga

SEQ ID NO: 11304 - DNA, 1431 bp, Zea mays
  Peptide Sequence Number=SeqID_53083
atgccggtttcctgggacctgcccgacctggagcacgacgccgtgccgccgcccatcgccgccgccgcctccgccgcgccttcccccgcggcggcgtcgggcattgccgccgcagctgctgggcctccccccgcggcggcaccgcgcggggcgccgagccgggcggagtgctccgtggacctcaagctcggcgggctcggcgagttcggggctgcggacgggacgaaggagccggtagtggcagcggccgcggccgcggccgcggcgccgccgtccgctagcccgatgaagcgcccgcgctcggggcccggtggcgccgccggggcgcagtgcccgtcgtgcgcggtggacggctgcaaggccgacctcagcaagtgtcgcgactaccaccgccgccacaaggtctgcgaggcgcactccaagacgcccgtcgtcgccgtcgccggccgcgagatgcgcttctgccagcagtgcagcagggagggcaatgtaacatgcctgagacgtaggaatttgctatttgagagacagtttcacttgctcgcggagtttgacgaggccaagcgcagctgtagaaagaggctcgatgggcacaaccggcgtcgcaggaagccgcagccagataccatgagctctgggagctttatgacgagtcaacaagggacgaggttctcgtcgttcccggttccaaggccggagccgagctggcccggagtcatcaaatccgaggacagcggctcatactacgcgcaccagcgccacccggtcctaagcagcaggccgcacttcgccggcgggggctccacgccgccggcctactcgtccaaggaaggccggcgcttcccgttcctccaggacggctgcgaccagcagcaggtcggcggcttcagcgcgggcgcgggggcgcagcagctcgaggtctcttccacgtccacggtgtgccagcccctcctcaaggccgccgccgccgccgccccaccgccgccgccagagagcagcagcagcaacaagatgttctccgacgggctcgcccccgccgtgctcgactcggattgtgctctctctcttctgtcatcccccgccaactcctccagcgtcgacgtgggccggatggtcgtccaccagcccgcggagcacatccccatggcgcagcccctcgtccccggcggcctccagcagcagcagcagcaccacccgttcggcggctcccccgcctggttcgcctgctcccaggccggctccagcgccgtctccgccggcggtttcgcctgccccccgggcgtggagagcgagcagctcaacaccgtgctggtgccgagctccgacggtggcggccacgacatgaacatgaactaccacggcatattccacgtcggcggcgacggctcctccgacgggacgtccccttcgctcccgttctcgtggcagtag

SEQ ID NO: 11305 - DNA, 660 bp, Zea mays
  Peptide Sequence Number=SeqID_53084
atggatgcaagccaggatgtgtgggactgggaggtggtcctgccagaccacaggagcttctccctgagccatggcggcaagaatcttgatgataaagaaacagaggagcatgatctgctgcccccgtcaggagacgttgacgtgcacgacgagttcaagggcatcggcgtcgtgctggatgagacctgcaaatccgccgtgcctagtgttgccgatccgataatgaatcctgagggtggcgaggaagagaaggcgatccagagccctgatgccgaggagtccgtcaccgccgacagcaactttgctcaacaggaggaggaggaggaagaagatatcaagaaggacggcgacgataaggttggagccctgatcggcgcgctgtgctcgtttggggtcgcagccgccaccgcctgcgtctttctcatcggcggcaggctgcatcatcaccacacgcagcacaacaatattcagctgcagttcttcggcgatgataagaggatccagcaagttgtgcgccagacgtcaaggctgaaccagaaggccatgtcgtttgcgatgggggcaggagcgtcacggcattttggaaggccacgtgcgggtgcaattgctcgcttctctgtcatcggctatcgctcgctcgcttcgcctccgcacctctaa

SEQ ID NO: 11306 - DNA, 432 bp, Zea mays
  Peptide Sequence Number=SeqID_53085
atggactacgagtctaccatccatgacgatggtgacgtcatcttcgtctccttcggccaggacgcgcctacctccgacgacaccaagtccttcttccatgagcccgtcacgttcagctccctccacacagccatccacggcgaccccatcgtatgctccaccggcaactccggcccctatgacgacactgtcatcaacgccgctccatgggtcatcattgtcgttgccaccaccgtcgacagggactttcccaacatcctcaccctcggcaacatcatgcgcctcggggggacgagccttatgtccaccacacgccagcgcactctactcgatggtcgatgcttcctgcgccacctccaacccgtacgacaccgtcgaccctgtgaggggatcacggatgaaagcatgattaatgagggagggattctctaa

SEQ ID NO: 11307 - DNA, 1419 bp, Zea mays
  Peptide Sequence Number=SeqID_53086
ggctctgccctctcagctaacgttgttgccaagggtgaggatgttggggaagtccctgtcgacggtgacagcagcgacggtgatgacccatggcacggcgttgatgactgtgtcatcatagaggctggaattgccgctagagtatacgacggagacaccatagatggcggcgtggagggagccaagcatgacgagctcatggaagaaggacttggtatcagcgagagacgcgtcctggccgaaggagacgaagatgacctcagtaccgtcatggatggcggactcgaagcccacgaagacgccggcatcggcaactcactccaccgactagcagaccttctaggccgcgacacgcgtccgtggtgtgccgcttttggctgtgacagtggcgtatccgaagaggctggcacggggcacgtagctgtcgacagtgatggagagcgtgtgggtgtcgtggccctcggtgtcacatgtccagttagcgccatgtttgctcaagaggaggaggaggagggggaggaagaagatatcaaaaaggacggcgacgataaggttggagccctgatcggcgcgctgtgctcgtttggggtcgcagccgccaccgcctgcgtctttctcatcggcggcaggctgcatcatcaccacacgcagcagcacaaaattcagctgcagttcttcggcgatgataagaggatccagcaagttgtccgccagacgtcaaggctgaaccagaaggccatggtcgagggtgtcaagtccacatttgaatgtgtcgtacgggttagaggtggcatcaaccatcaagtagagcgcgctggctcgtggtggactcaaggctcggccccctcagctcacgctgttgccaagggtgaggatgttggggaagtccctgttgatggtggcggcgacgacggtgatgacccatggcgcggcgttgatgactgtgtcatcataggggctggaattgtcgctggagtatacggcggagacattatggatggcggcgtggagggagccaagcgtgacgggctcatggaagaaggactttgtatcgtcagcgagagacgtgtcctggccgaaggagacgaagatgacatcagtaccatcatagatggtagactcgaagcccacgaggacgccggcggcggcaatgcactccgccgaccagcagaccttctaggccgcgacacgcgtccttggcgtgccacttttggcggtgacagtggcgtatccgaagaggctggcacggggcacggagctgtcgactgtgatggacagcgtgtgggtgtcgtggccctcggtgtcgcacgcccagttagcgccatggtcgttttgctgagtagcatttctttgttgaagaaccaggcgccgatgatcttggggttgcaggcaaaaccgtgcttcacagagtcatggtag

SEQ ID NO: 11308 - DNA, 225 bp, Zea mays
  Peptide Sequence Number=SeqID_53087
atggtgttcatcagatatgagccagggtccaaggcgtacaggttctacaattctgacatctgtttgtctctttggattgcggttgcagcaatccgaacaattgcctttaatccgaagcgaacaacccagagaatctatgtcaagaaaaagcaacatggtgcctacatcgggctcgtcggggcgcacgagtggcagctgcaggctcgccaaggatgccaacattag

SEQ ID NO: 11309 - DNA, 369 bp, Zea mays
  Peptide Sequence Number=SeqID_53088
atggagtttgtgaaaccacctgacactactcgagacctagacaccagccacgacggtgagacgcttctccaattcaaaatgttggacattgtgctcggatcggtggaaattcctaggttggtagaatgggagtttgtggtgaatgaggactttcttcttaccatcggcgatgatgaaccagacacgttcaaggaggctcgaggcaatgccgattgtcgcaagtgtgatgagcaaggcagcgccgtcaagcacaaggcccaatttgtcgccaagggctacagatcaagcacgggcgcgacccccatcacattgggacaagcagcgtatgcctgcaagctgttggagaaggctagcatggggaaattctaa

SEQ ID NO: 11310 - DNA, 294 bp, Zea mays
  Peptide Sequence Number=SeqID_53089
atggaggtaagggaggggaagagggggtatccctacttatcccccgaagactcggctcgggatagggataacgacgtgcccgattccggcaatggtggcgagcttctcgcgcggtttgttgtcgcgggcagcgagatgacaagtgggaccgaagaaccagcgacagaggcgaagagagcggcgcgggcgagacattgctggtggcggctgacaagggtttggatgtcatgggcacattattacattgctattgatgcttttatttttatcatccacaaatgcacaatcaactaa

SEQ ID NO: 11311 - DNA, 435 bp, Zea mays
  Peptide Sequence Number=SeqID_53090
atgggaaggtgtcggacccctgtatatatggtccgggcctccaagtttggtccaggacctccacgcttctacatctggccgccgctgcgctacaccccgcgcgaccgtgcctatggccgccaccgctacgctccaggtgacctcccgcggttccacctttctctcccttcctcctcccatcgcatccccagtctatctatcctctccgcccacctctaccgtagcagcgcgccaccacctccgcgtactatgtctggatctctgagcccacctccatcgaggagcgccgccgtctcctgctccaacggcttcacctacccgtcgccttccccgactcacagctcgcctctacctcctgctccagcgacgttcaacgctgccggtatgggcgatcttcgtcgctctggtggaccacgtgacggcggtggcggatag

SEQ ID NO: 11312 - DNA, 1536 bp, Zea mays
  Peptide Sequence Number=SeqID_53091
atggctgatggccccccgctccacctccaccacctccacctgcacgatggggattcagatgtctcgctttggcgcgagatgggagggacggagagaccgccgggcccgccaccaactgcagctgcaagcctgcaactggccaaaggactggcgccggcggctagcaaatgcaaatggctggcagcagtgcagcacctctttgggaaaggaaaggaaatgaaaggaaagaaaaggctgtggtgtggtgtggccgaggtttcacgcccgggggcgctttctacacttggaaacagcagggaggatccctgcctgcctgatcgcgtgtcccgtgtccgttcaatgaagagaggtgggagggagaggttcattggcctcttgcagttgcggtcgcagatcgcgaaacaacggccttctctttcagaagaggagctagtgctgcgtgtgcggaggaagtcgacgccgacgtttcggggccctttaacgccgccgagggggcggcactggcactggcactggcgcgcctcctgtgagacggtgaccacggacccgtcgtacgcagaaccctggcatgcgaggattcaagaacgcagtaggtactataactgtaatggccaaaccgcggctgcggcatctactagtgtcgctgaggcagctacgagcgagtcgtcctcgtccatccacccggcccggcccctggagatcgaggattcgaggcatcgccaggaccacaactgccaagcctgcgtccggcgtccctctacaagggacgctaaagcgttcgatatgttatatttagcgtttctcgccgtccgctaccgcccccagcaagaaccggcaaatggttcgctaaaatatagcggcagctcgacgaccggtaaatgtggagtgttgttgttcatccgctatccgtccgcacagagctgttgcctggttcttatcgtcttcgccaacagcgtgccacaacacaactctgctacgccaccagctctgctgctgcgccaacccgttgagcaccacgccatggccgtcagggcggaggttccacgacgtggcgccgtgcgtggtctcgtccgcgacattcgtgtccagagcgtgccgattcggtccagcacatggaaggagcatcatgggcatggagtccatggtggcctccggcggcgcggtgctgttgtaggcagccctatccgccggcaaaggggccgacggacgcctgctactgctagcaacggaacggagcgcaacgcaatcatgtcaggcgcgcaaggagctcagccgaagggcgccttcacggcgaccacctacacgtcggctgcggccaccggtggcggcgcggcccaggggcaggggcaggggcaagaggaccaggagagaaggcagactccgcggacggagctccggtcggccgaggacgagcgcgggctgcctgtcaggaagctggaggacgcggtcgaggatgccgcgggcaagggcgggccggtgttcggcgccggcacggaggacgggaagccggatctcggggtcaccggcaccggctga

SEQ ID NO: 11313 - DNA, 576 bp, Zea mays
  Peptide Sequence Number=SeqID_53092
atgggggtgtgggcatgggtcccgggcttttgcgcctcactccactcgcccaccccaccctaccccggcgccgtcgccggtggccgcggcttgtgttgttgccccgttgctttccagccccactccctttgccgtccgccgggctcggacactgccgaggccgagccagccggccacggggggcgcaccgtgtactctgcacccctgcccgtgcccgcgtgggctggggcctggcctgggggtgggagccgggcaggcggcgcggcggggaaacgcaaatctggcgccgcggcccggaaaaggctgtgcgacctgcaagtgcaagggggagggagggagggagtgcgggagcatgaggcggtggtcgtcaacagtcaacaatgcgccatgtccccggccggacaaatctttctgccgatgcgctctgcttgtgctttgctccgcttcgtggtcgtggctgccatcactgatgctctgtcaaaaacatgggtgaagatagtggagcagcagttcgtgcgtgcggcctcgaagcgtagtattcttattattaaccgcgggagcaaggctgtcacgtag

SEQ ID NO: 11314 - DNA, 114 bp, Zea mays
  Peptide Sequence Number=SeqID_53093
atggcgatcggtaccctatccgacgcagcaaatgattctattgacatagacaaactcacctatatagatggacaatgcacaggagacaggattgagatgtaccaaaaattgtag

SEQ ID NO: 11315 - DNA, 183 bp, Zea mays
  Peptide Sequence Number=SeqID_53094
atggccttcaagctgtatagaaaaggcagctctttaatctcaaccattgaacatcaacagatcaacatgagggctatgactttgattcttcttaaatttggcgttattagtgatgagagctatatgagtctacttatgagtcttgtttatgagtcatcctttgttcgtttcatgctgtcatag

SEQ ID NO: 11316 - DNA, 396 bp, Zea mays
  Peptide Sequence Number=SeqID_53095
atggcgaggacaccgacacattccctaggctatggtgaacacaggcacacattcaattcaatcgcggggcactggaacgtagctaccgacggtggcggcagaacagcgggtccgacgagctcgatcccacgagcacggaacgtgtacagcacagttgaggaatccttgagattaccgagccacaatgaggtgggcactcgggttgcatggtcaccatggtcacttgatgcactggctaaagcagactgggtagctatggggaaggttaacactagcagaacaccaggatccccacgcccacaaagtgtactatggttgaagcttaagataagagatgatagctgggagcccataaatatcccacttgaggattggctcaaacagtgcattcactag

SEQ ID NO: 11317 - DNA, 273 bp, Zea mays
  Peptide Sequence Number=SeqID_53096
atggaggccgggcgagctgaggccgaggacgcgcagggagctggaagcctcgacgtcggacaaaggagatgggcaccattttctaacaaaaaggacacaaaaatatctcagcttagaatgagcgttctggtctgcatcgagagtgcgacccattccggaagcgacgtcacacatcgcacatgtgggcgagaagctatgcgctctccagacacggattttgcactgaaaactttagttgtcaagttcggctacggtattatagactgtatttag

SEQ ID NO: 11318 - DNA, 810 bp, Zea mays
  Peptide Sequence Number=SeqID_53097
atggaggcccaggcccacgcgtcatgcaaccggcacgccgaaagcttcgtgcatgcaactgcaccgccacttgctccaccaccgcgcctcctcgactgtggaaccgataccgcaactcgaggcaacccagggcacgaccaggcggcgccagcctggcgcgacggtcaatgcggccaaaaatgggccggcagtaatggcggtggcaggcgggcaggagaagcgggaccgggaaagggggataccccgaaaaggatccttccccgtgaaggaaccaggctccgagcctccctactgatcagaggttcgaaggctggcccctcggaagggttcgacagccgcctcagatcgcgtgggctctacacccactactggtcagaggttcgaaggccggcccctcggaagggttccaccgacgcctcaggctactcgggctccgcgcccactactgatcagggggctcggacatgggctaagccccggaagacggcgaactccgctccgcccgacccagggctcggactcgggctaagccccggaagacggcgaactccgctctgcccgacccagggctcggacttgggctcagccccagaagacggcgaactccgcaccgcccgacccagggctcggacttgggctcagccccagaagatgacgaactccgctcctcccgaccccagggctcggactacgccctggcctcagccgacggtctccgcctcgcccgacccaggggctcggactcgacctcggccacggaagacagagtcgacctcgacttcggaggagcttccacatcgcccaacctag

SEQ ID NO: 11319 - DNA, 240 bp, Zea mays
  Peptide Sequence Number=SeqID_53098
atggagctcggcgccaagatttatggcgccgagctcggaccaaaatgcaaaaaattcggcctggagggtatctcctatctaagcttgccaggttgcatggttgttcttggacaacttttcgatgtgataaacgatgtgtccattaacaacgaaatagctatgatgcttttgaaggattcactaccagaatcgggtgctttagtgctttaccgagtgtctgaagcactcggcaaagcctga

SEQ ID NO: 11320 - DNA, 159 bp, Zea mays
  Peptide Sequence Number=SeqID_53099
atggcgcagagcctttttcttcctcacagatacctagatcttgccccctgggagagagatcttagggttctctggggtcgacaggccacacggggtgtccctagacgtgtttatgtttatagttcacaggatgcgaagaggattggactaagacactga

SEQ ID NO: 11321 - DNA, 582 bp, Zea mays
  Peptide Sequence Number=SeqID_53100
atggcgccagaagcaccttcccgccgcggcgacaacacgcacatgaagctgctgtgcagccacggcggccgcttccagccctgcggcccagacggagagctccggtacgtcggcggcgagacgcgcgtcctcgtcgtgccgcgcacggtgtccttccgagacctggcggcgcgtctggcggagatggccggaggctcggtgcaggtgcgcgccatcaggcaccgcctcgcggacgagggcgtcgaggacgtgatcgtgacggtcacctgcgacgaggaggtcgcgcacatgcgcgacgagtacgaccgcctgcgcgccacgcggccggccgcgaggttccgggtctatgtcaccaccaccgcatcgccgtcctccgccggttcgaagacagcgacgacggccgggctcccaccccgggcgccgtcgatgcggcgcgtgcagagcgagctggaggtctccgcgagagcgcacaaccagcaccggccggcgcagcgcgtccacagcgcgccggagctggcgggaggcgtccacatgcagatgcagccgtccttctacaaccaccatcgccaccagcactgttag

SEQ ID NO: 11322 - DNA, 3957 bp, Zea mays
  Peptide Sequence Number=SeqID_53101
atgaggaggcctccaatcgtggcgcgcgtgcgccgctcgctcttcctcctcctctgctgctgttgctgcctcgccgcctggtcgtcgccgccggccgtgcgcgcactcccgctgtgcaccgacgggcgggcgccggtgccgctgaacaggacgctgggcttctgctccgcttacggcgggggcggcagcagtagcagctgctgcgacgccgcagcggacgccgcgctgcggaagaggttcaacgccatgaacatctctgacgcggcctgcgctggcgtcatcaagtctgtcctctgcgcggaatgcagtccattttcggctgagttgttcaactcaagctcaaagattcagatggttcctctcctgtgcaactatacttcttcatcaagttctgctcaatcaaaagattctacacgagattactgtaaactagtttgggagacttgcaaaaatgtgacaatagtgaactctcctttccaacctcccttgcaaggaagtgcaagactgcctagttcatcgtcaaagctcacagatgtctggcagtcagaacatgacttctgcacatcatttggtggctcatctggtgagcagtctttatgtttcaatggaaatggaattttcttcaacagcacagaaccatcacccacacctaaagggatatgccttgagagaatcagcaatggatcttatctgaacatggcttcacatcctgatggatccaacagagttttcttgtctagccaagctggaaagatatggttggccagcatcccagaacaaggctctgggggcactctacaatatgatgaggcaaacccatttcttgacataactgatgaagtttatcatgattctcagtttggcctcatgggtatagcatttcacccaaagttcgctactaatgggcgcttctttgtttcttataattgtgatagaactcaatctcctaaatgtgctggtaggtgttcatgtaattctgatgctaactgtgatccgtcaaagctcggcactgataatggtgctcagccatgtcaataccaagttgttgtttcggagtattctacaaaaatctcctcacctaacgtttctatggcaacatctgccaatccatctgaggttagaaggatttttacaatgggactgccgtatatagctcaccatggagggcaaatactatttggaccaacagatggatacctttaccttatgatgggggatggtggaagtgaaggcgacccttttaatttctctcaaaataagaaatcacttttggggaaaataatgaggcttgatgttgacagcacacaaggccaaagtcaaaccacaaatcagagtttgtggggtaactattctattccaaaggacaatccgtttgctgatgatagtgactttcaaccagagatatgggccttgggatttagcaacccgtggagatgcagctttgactccgagaggccttcgtacttctactgtggagacgttgggaaggacgcatacgaagaggtagatttagtcaccaagggtggaaactacggatggcgtgtatacgaggggccatacatctttcacccgcaaaagtcgcctggagggaatacttcgcctgagtccataaacgcaatcttccccgtcatgggctacgaccattctgctgtgaacaaggaaatcgggtcagcatcgatcacaggcggatatgtgtaccgaggttccgctgacccctgcttgtacggaaggtacctctacaccgacctgtactcatcgctgatgtggacgggcacggaggccccagaggggagcgggaactacacgtcggccgtgaagccggtgagctgctccaaggcctccccgatcggctgcgagtccgtcgccgggagcacggacccgctgctcgggtacgtcttctcgttcggggaggacagccgcaaggacgtcttcgtcctggcgagcaagggcgtgtaccgcgtcgtcaggcccagcctctgcggctacacctgccccgcggagagaccggcgaccgacaacggcaccgcgccaggtccaggcgggccgtcgtcgggcgctcccgccgcgacacggctagggaggtcggtggcggcggtagcggtagctctggcgttgatcccgaaagggttgttggaaggcgcggaggaatcagctcttgtccccaacgcagcagcggctcctcggttctggccacggggaacgtcgctctcgtctggcggctgcgcgtcctcgtgctgggacggaatgccgtcgcgccggccccgtcgtgtcgtgcggaggcgtggccgcccaaacggggaaacaggagcaatatgtgctctgtttaacaattcgacagcagacggatcacaacgcaacaaaaatccaatgatgcgatcctcgctgtcaaccgccacgacttacgtgattacgtcacggttccgatgccaatgccatgctggcacgacacgacgaaaccataaagagcgcgacccagccttgccggcttctccactctccagtgccctgccaatcccccgctctcccgcctaccgccaggcccaggcgccagcctccaaagtccaaacccagctagagcttagagctagcatggagtccgccgccccgtgcccgcgcgcgcacgcgcaccccgtggacctccgctggctgctctccgtcgccgccggcggcctcttcgcgctgctgctggtgctgctggccacctccccgtcgttccggctcgcctccacctcgccctcaccccgcctcttcctcggccccgcgtccggctcctcccgggcgcgcccaccactcttcgtcgagcccgccctgtcccgcccggcggcgccgtccccgcccgcgtccgcctcgctcccgcgcttcgcgtacctcatctccggctcggccggggacgccggcatgatgcgccgctgcctgctggcgctctaccaccccaggaaccgctacgtgctccacctagacgcggaggcgcccgacgccgaccgggcggggctggccgccttcgtcgccgcgcacccggtgctcgcggcggcgcggaacgtgagggtggtcgagaaggccaacctcgtcacctacaggggccccaccatggtgaccaccacgctgcacgccgccgccgcgctcctgtggggcgagggcaggggccgcggcgccgactgggactggttcatcaacctctccgcctccgactacccgctcgtcacgcaggatgatttgatgcatgtgttctccaagctgccgcgcgatctcaacttcatcgaccacacgagtaacatctcctggaaagcgtttgcgagggcgatgccggtgatcatagacccggcgctgtacatgaagaaaaagggcgatctgttctgggtgccggagaggcggagcttgccgacggcattcaagctgttcactggttccgcgtggatggtgctgtcccgggcgttcgtggagtacctgatctgggggtgggacaacctcccgcgcacggtgctcatgtactacgccaacttcatctcgtccccggagggctacttccacacggtggcgtgcaacgccgacgggttccggaacaccacggtgaacagcgacctgcacttcatctcctgggacaacccgcccatgcagcacccgcaccagctcaccgtcggcgactgggaccggatgctcggcagcggcgcgcccttcgcgcgcaagttccgcagggacgacccggtgctggacaggatcgacgccgacatcctcgcgcggggccccggcacggtggcgcccgggggctggtgcggccgcggagcagccggcggcggcgggcaggggcagagcaacgggaccgacccgtgcgcggccgtcggggacgcggcggtcctgcggcccggcccgggcgccgagcggctgcagcggctcgtcacgtcgctgctgtcggaggagaacttccggcccaggcagtgcgtagtagaaaacgagaactga

SEQ ID NO: 11323 - DNA, 450 bp, Zea mays
  Peptide Sequence Number=SeqID_53102
atgggccggctggccttgctcatctgcgtgctgctcttggcagcggcaatagtggcgaacggtgccaggtctgcaggaaccgttcgcggcggcggcggcggcgctgcacctgctagtcctgtcgtcgcaacaaaacctactgttgctgctgtagataagacgacaccggcggcggcggcggctgctaccgctgaaactacggcgacttcagagcagcagcagcagcccaccctggatgacccgtccagtgacagcaagaggaaggagagccagatggggagaagcaccgtccaagagagtgtagggtggcgacgacgatgcagctaccagtgctatgcagaggctaataggagctgctgggagaccaagatcgcgaggccaaagtggtctctggggcttaacggtgttaaaaggagcacctgccggactcctagcactcacttcacatag

SEQ ID NO: 11324 - DNA, 318 bp, Zea mays
  Peptide Sequence Number=SeqID_53103
atgactagagaaaggagtgatgatcttgccctggtggcatactacgatgctgcggagaaggctagggttgaaaagattactaaagaaatcatggttggcttatatgattactcggacgacagcaaagagtttgattttgaagaggatactgatgatgtcgaagatcaaccatcgaagccaagttatctttggcaagtaaaccataaaggagggtcatatcaaggcacggccggcgcggctgcccgcggctggcgcgacgtccccggcccggccacggtgcgggtgcgggagaccgggccatggtggcaccggccctga

SEQ ID NO: 11325 - DNA, 795 bp, Zea mays
  Peptide Sequence Number=SeqID_53104
atggatttggcgacggcggtgcagtacaggtcaaacttcctcttgagcaccacagtgtacgcgtcggggttgctaccgcctcaccgctatctacgcgtcggtgcgtgggagctggtccacggggcggcgacgcggtggcaggcgacatgtgccttgagcaagagctcgtatagtgggtgcaccgcgatggcctccttctccctctcccagccggggccgacgaccatgacgcctgagacaaagctagggttcgaggccaccccaaccgcgggttccatcgccaacgcatggtccatcgaatcaagggagcgctacgccaaggaggccaccactgttgggatcaagggacgtttgtcctcgaatccgtaccttgcaccgtcgatggaagccggaggtgagggcgcaacggaggtcacggcgtgcgtggccggagcgtcgggcgagatccattcgcaggagtgcgtgcggggaggtctgtggtcggacggggagatccacatgcgcggttctggcgagagcactgctggcgcggtggaggcgggcgcacgacgggtgcaggcggtggcgcgtggggcacggatctgggaggatttgaggttgcggatgcacagcgcggacgaccttccgttgcggcggtggtgggaggaaggcgatggggaggagggcccgcggatccgtgttgattgtcgcagcgcggtgttgaccgctgatggcgaggtgggtggggaggagggcccacggatccgcgttgattgtggccgcgtccacgcaggggccaccgtcgccggggcttga

SEQ ID NO: 11326 - DNA, 3207 bp, Zea mays
  Peptide Sequence Number=SeqID_53105
atgcccggcataccgagggatgtcgccgagcactcgctggatattcgggccggagcccgacccgtcaggcagcctctgcgccgattcgacgaggagaagcgcagagtgataggcgaggagatccacaagctaatggcggcagggttcatcaaagaggtattccatcccgaatggcttgccaaccctgtgcttgtgaggaagaaaggggggaaatggcggatgtgtgtagactatactggtctcaacaaagcatgtccgaaggttccctaccctctgcctcgcatcgatcaaatcgtggattccactgctgggtgtgaaaccctgtccttcctcgatgcctactcagggtatcaccagatccggatgaaagagtccgaccagctcgcgacttctttcatcacaccgttcggcatgtactgttatgtcaccatgtcgttcggtttgaggaatgcgggcgcgacgtaccaacggtgcatgaaccatgtgttcggcgaacacatcggtcgcacagtcgaggcctacgtcgatgacatcgtagtcaagacaaggaaggcttccgacctcctctccgaccttgaggtgacattccggtgtctgaaggcaaaaggagtcaagctcaatcctgagaagtatgtcttcggggtgccccggggcatgctcctggagttcatcgtctccaagcgaggcatcgaagccaacccggagaagatcgcagccatcaccagcatgggacccatcaaggacttaaaaggcgtacagagggtcatgggatgcctcgcggccctgagccgcttcatctcacgcctcggcgaaagaggtctgcctctgtaccgcctcttaaggaagaccgagtgtttcgcttggacccctgaggccgaggaagccctcgagaacctgaaggcgctccttacaaaggtgcctgtcctgatgcccccaactgatggagaagccctcttggtctacgtcgccgccaccactcaggtggttagcgtcgcgattgtggtcgagaggcaagagaaagggcatgcgctgcccgttcagaggccagtctacttcgtaagcgaagtactgtccgagaccaagatccgctacccacaagttcagaagctgttgtatgcagtgatcctgacgaggcggaagttacgacactacttcgagtctcatccggtaactgtggtgtcatccttccccctgggggagatcatccagtgccgagaggcctcgggcaggatcgcaaagtgggcagtggaaatcatgggcgaaacgatctcgttcgccccttggaaggccatcaagtcccaggtgttggcggactttgtggccgaatgggtcgacacccagctgccaacggctccgatccaaccggagctctggaccatgtttttcgacgggtcgctaatgaagacgggagtcggcgcgggcctgctcttcatctcgcccctcggaaagcacctgcgctacgtgctacgactccatttttcggcgtccaacaatgtggccgagtacgaagctctggtcaacgggttgcggatcgccatcgagctaggggtcaaacgcctcgacgcccgcggtgattcgcagctcgtcatcgaccaagtcatgaagaactcccactgccgcgacccgaagatggaggcctactgcgatgaggttcgacgcctggaagacaagttcttcgggcttgagctcaaccacatcgcttggcgctacaacgagactgcagacgagctggctaaaatagcctcggggcgaacgacggtccccccggacgtcttctcccgggatctgcatcaaccctccgtcaagatcgacgacgcgcccgagcccgaggcaccctcggctcagcccgaggcgccctcggctcggcccgaggcaccctcggctcagcccgaggaaccctcggcccccgaggccgaggtactggacgtcgaggaggagcagagcggggccacgcctgatcgaaattggcaggccccgtacctgcgatatctccgccagggagagctacccctcgaccaagccgaggctcggcgggtagcgcgacgcgccaagtcattcgtcttgctgggcgacgaggaggagctctaccaccggagcccctcgggcatcctccagcgatgcatctccatcgccgaaggtcaggaactcctgcaagaaatacactcgggggcttgcggccatcatgcagcgcctcgagcccttgtcgggaatgccttccggcaaggtttctactggccaacggcggtggctgacgtcactagaattgtctgcacctgcgaagggtgccaattctatgcgaagcagacccacctgcccgctcaggctctgcagacgatacccatcacctggcccttcgctgtatggggtctggacctcgtcggtcccatgcagaaggcgcccgggggctacacgcacctgctggtcgccatcgacaaattctccaagtggatcgaggtccgacccctgaacagcatcaggtccgagcaggcggtggcgttcttcaccaacatcatccatcgcttcggggtcccaaactccatcatcaccgacaacggtacccagttcaccggcaaaaaattcttggatttttgcgaggatcaccacatctgggtggactgggccgccgtggctcatcccatgtcgaatgggcaagtagagcgtgccaacggcatgattctacaagggctcaagcctcggatctacaacggcctcaacaagttcggcaagcgatggatgaaggaactcccctcggtggtctggagcctaaggacgacgccgagtcgtgccacgggtttctcgccgttttttctggtctacggggccgaagctatcttgcccactgacctggaatacggctccccgaggacgagggcctacaccgatcaaagcaaccaagctagccgagaagaatcgctggaccagctggaggaggctcgggacagggcattactacactcggcgcggtaccagcagtccctgcgacgctaccacgtccgaggggtccggccccgagacttccaggttggcgacctggtgcttcgactgcggcaagacgcccggggaaggcacaaactctcgcccccctgggaggggccattcgtcatcgccaaagttctgaagcccggaacatacaagctggccaacaatcaaggcgagatctacggcaacgcttggaacatcaaacaactacgtcgcttctacccttaa

SEQ ID NO: 11327 - DNA, 225 bp, Zea mays
  Peptide Sequence Number=SeqID_53106
atgaagtttgggaggaaattctatacgtatgtccagcttggtggagggaagaagttggctcataaagctgctaataaagttgaagtaataagggaagctattaggttaaaggacttgaagttgtttgatgataaacatacatactcagatgctctttcgttggagcccgaagagcatatttcaaagaacaatctagagataaaggagtccttagctatttattaa

SEQ ID NO: 11328 - DNA, 891 bp, Zea mays
  Peptide Sequence Number=SeqID_53107
atgaccacgtcaaaaaaggtgcgccacgtcattcgatttcgtatccttttcctcttcctctttctctctcttacaacaaggaccgggaaaggggatacccagaaagggatccttctccgcgaaggaaacgggccccgagcccccctactgatcagaggttcaaaggctggcccctcggaggggttcaacagccgcctcagagcgctcgagttccgcgcccactactggtcagatgttcgaaggccggcccctcggaagggttcaacggcctcctcaggccactcgggctccgcgcccactactgatcaggggttcgtaggctggccctcgaagggttcgacagtcgcctcagacgcagagcgagggatgaccctggaggacagcgccgcctgcgccgctcggactgctgtgccactcgacagagtgaggctgacagcagccaagtccggcctcgggcgccataggaagctccgcctggcccgaccccagggctcggacttggcctctgccccggaaggcgatgaactccacctcgcccgaccccagggctcggactcggcctcggccctagaagacgacgaactccgcctcgcccgaccccaaggctcggactcggccccagaagacgacgaactccgcctcgcccgaccccagggctcggactcggcctcggccccggaagacgacgaactccgcctcacccgaccccagggctcggactcagccctggcctcaaccgacggtctccacctcgcccgacctaagggctcggactcgaccttgacctcggaagacagactcgacctcgacctcggaggagcctctgcctcgccctacccagggctcggacctaccacgtcacaggaggggccatcattaccctacccctag

SEQ ID NO: 11329 - DNA, 621 bp, Zea mays
  Peptide Sequence Number=SeqID_53108
atgcagcgcctcgagccctcgtggggaatgccttccgacaagaaggcacccgggggcttcttgcacctgctggtcaccattgacaaattctccaagtggatcgaggtccgacccttgaccagcatcaggtccgagcaggcggtggcgttcttcaccaacatcatccatcgattcggggtcccaaactccatcatcaccgacaatggcacgcagttcaccggaaaaaagttcctggacttctgcgacgaccaccacatcagtgtggactgggccgccgtagctcaccccatgacgaatgggcaggtggagcgtgccaacggtatgatcttgcagggactcaaaccgaggatctacaatgacctcaacaagttcggcaaacggtggatgaaagagctaccctcggtggtctggagtctaaggacgacgccgagccgtgccacgggtttctcgccgttttttctagtctatgaggccgaggccgtcctccccacggactccctgaggaccagggcgtacgacgaccaaagcaaccagaccagccaagaggactcgctggaccagcttgaagaggctcaagacattgccttactacattcggcacggtaccagcagtcgctgtga

SEQ ID NO: 11330 - DNA, 153 bp, Zea mays
  Peptide Sequence Number=SeqID_53109
atgggacaaagccctgaatacgaagtgtactttcgcgagtcttacccgtcaacacaaaagactctcaaggatatgctggcttttaagggagtcaagagcaatgctaagaataagaaaaacctttttgtaaaacaggggattaaggagaagtaa

SEQ ID NO: 11331 - DNA, 498 bp, Zea mays
  Peptide Sequence Number=SeqID_53110
atggccgtcgccacgccgcagtacgacgacgaacgtgtcttcaaggtgtggcctatctttgacgaggaatgcatcttcgatgcagagcctattttcgatgaggatcccaacggcctcatcactgagagcgtcgacgtgtttggctcttcgggtgtcccgatgtacgacgatgtctttgccacaaccgcctactccacggttgtcacatccgaatttaaggaacaaagtcgggaggccgagaagtgggcacgagctggtcaaccctccggcgaagtcgcggcgacagttgcgcgtgggttcggtggaagggaggagtccgacagcttgggcccacgagtcagtgaggcgcgcgagagctggatgacaagtgggggccacggcatcggcacccgttccctaatgcacggcacacacgcgactgaccccagtggtccacatgtcggcgctggggctgaacttaggccgtatgtgcgcgggagtgaaagtctgttgggctaa

SEQ ID NO: 11332 - DNA, 312 bp, Zea mays
  Peptide Sequence Number=SeqID_53111
atgacgcaaaaacacgtcccagctatattcggtgtcggcgtcggtggtagcagttgcagcgtcggcggttacagcagcactggtgtccgtggggtgggtgtgaccgtcagtgacggaggaattcgagccaaacccaatggtctgccgtcggatccaccggactccagcctcctgctgcccagcttcacgtcgaacatggacaacgcacaccgcgagcgaaccggaggcgcggaggagaaggtcatcacgggaacggagcgggagatggaagattctggctttggccaccaggatgcaactgccaccatatag

SEQ ID NO: 11333 - DNA, 318 bp, Zea mays
  Peptide Sequence Number=SeqID_53112
atggcgccgccgtgtttgatgtcgcgccgtcgcggagtttctttttcaacactggaatccgctcggatcggacggtttagaataaaccagactgtcggctgtgtctcttttgctaaagagtccccgaggaactcaccaatcaacccgccatccagagattactattcactgtgtctcggggatcttgcgccaagacccctgacctttctagaattcgaggcccagtccaaagaagacgagcaagccactgtggatcctgaggttcagcaggtagaagttgttgagcaggagctcattgaaggcaagttgtgcccttga

SEQ ID NO: 11334 - DNA, 1353 bp, Zea mays
  Peptide Sequence Number=SeqID_53113
atgcggcggcgcgcggaggtggccgtggtgggcgcgggcgcggcggggctggtggccgcgcgcgagctgctccgcgagggccacaccgtgtccgtcttcgagaagtcaggccgcgtggggggcacctgggcgtacagtccgcgcgcggacgcggacccgctgggcagcgacccgggcgcccccggcgccgtgcacagcagcctgtatgcgtcgctgcgcaccaacctgccgcgcgagctcatgggcttctcgggcttcccgctggccgggcgggcgttcgccggcgatccgcgcacgttcccgggccaccgggaggtcctcgcctacctcgacgccttcgccgcggattccggcgtcgccccgcacgtcaggctccgagcccaagtgctgcgggtgaggccgctctgtccgggtcggggacagggggagaagtgggcggtggcgtggcgcggggaagacggcgacgtcgcggaggaggcattcgacgccgtcgtcgtctgcaatggccactgctcggtgcctctagtgcccaagatccgaggaattaacaagtggcggggaaagcaaatgcacagccacaattaccgcaccccggaaccattccaagatcagcttgtcatcactcctcaccagttccagactggcaaactctccttgcagagtgttgtagtcgtaggattgggagccagcggaatcgacatcgctagagaaatctcacacgtggccaaggaggtgcacatctcagctagatactcggagggcaggctcggaaagattgaactctatcataacgcctggatgcacagcgagatagagtgcatccaagacgacggccaggtgcgctttgccgaaggctcatctgtggctgcagacaccattctttactgcacagggtaccgctaccattttccgttcctggacctggatgggttcaccgtcgacgacaaccgcgtcgggccactgtacaagcacgtcttcccacccaagcatgcacccaatctctgtttcgttgggctgccatacaagagcatcatcttccaggcactagagctggaatccaagtgggtcgccgccgtcctgtcggggcgtgccgagctgccggtggaggaggacatgacggccgacgtggaagaggagtaccagcgcatggaggacgccgggaagccgaagcgccacacccacacgctgtggcctcggtgggtggagtacctgaactgggtggcggaccaggtcggcgaggcgcacctggagcctaggaagtgcgagatgtatgagaaggcgctcaagtgcgtctggtccctggacgagggctaccgtgatcgatgggaagaagaaagcattggcagtggctga

SEQ ID NO: 11335 - DNA, 312 bp, Zea mays
  Peptide Sequence Number=SeqID_53114
atggttgtgggcgcggtgggaggcgcggcagggggggcggaggtgtggggcgcggcggggacgggcggaggcgggcaaggcggcggtggatgggcgggcgcagcggctgggacgagcgggcacaacggcggggacgggcgcgacacggtggcggggacgggcgcggcggagacgggcgagcgtggtggccggcgtgtaaggcggcgacgtcggcagtttgagaggaaagagagaaatgagcccgcacggggtgcccgcggcgttcataaacctttaatccctgtcggccagagcataggccgacgggaataa

SEQ ID NO: 11336 - DNA, 603 bp, Zea mays
  Peptide Sequence Number=SeqID_53115
atggtggcgcggcttaccggcggtaggagaggtccgggaggtcctggcggtcatgtcgaggggcggatcactggtggtgatggtgggatagggctggccgcgtgcgcaggcagtcgggctcgtcggcgatgcttgctccggcctgctcacgacggtagaatccaattaaatagcacggggagcttcactggaggtcaaggatgttgtaggcacaaggaattgacgaatggcttaccgtgtagctcggtcgacgtgcgacagcggccggttgaagtccggcggcgtcaatctggcgtctctggtgaggtggtgtttggtctgtgggctcggggagcttcactgagctccgaggaagctagccgaggggttagacggggtggaggagggttggagtggccggtctacagtggatggggctcgggcggccgctggcacgccgttcccagggcaaacgccggtgaacttgtgctcgggcagggttggagcgcgcgggggcatacggtcgaggccggggttggctttatagccgcgggcgtgggcgcggggttgacgcggcgcggcgcgcgcagggccgagcgccgtggcgtgctctggtgttgctag

SEQ ID NO: 11337 - DNA, 255 bp, Zea mays
  Peptide Sequence Number=SeqID_53116
atgtctgtggatagggggtgcgagctaggaacgtcgttggttgtgccctggccactgagcatcaaggaaacgaatttcctttctttgttaagacttaagatacacacccaaacagttttcctttttgacaaaatggagtgtcggcaggcgcagaaacgaaacggcagtgcagagttgaagttgaggattttccacgcatttcttcaagggagtcggcctcctgtcccctccctccctgtccctgccccctggtaa

SEQ ID NO: 11338 - DNA, 246 bp, Zea mays
  Peptide Sequence Number=SeqID_53117
atggagagttctccgatgtcgtcagctaccctcaccgctaacgacctcctcaagcgagtcaagggcatggtggggaaggctgattacaacgtccttcctcaggttttctgtttgttcccgggggttgcggggttacagatccgccctgcctccagtcccgaaggacgtggtgagccaagtgtcgcgcaggttatctatagagcagtagtagaagaagaaggactaggaaaagaagcgagcccgtga

SEQ ID NO: 11339 - DNA, 219 bp, Zea mays
  Peptide Sequence Number=SeqID_53118
atggggggcgtcgtcagtgtgggcctgggttggtcccgctggataagggcggtgactggtcagacgagtccgcgacgtctctccttgttcccgtcggccgtccgtagctctccagccttcctgcgcgagcgtgccgagaaggaagggcggatgagcatctcaggtagagatggcaatggggacccgatccccgattccccgcgggaattcccctattag

SEQ ID NO: 11340 - DNA, 315 bp, Zea mays
  Peptide Sequence Number=SeqID_53119
atggagcagtctatcacgcagtccagtggatctagaactccgacaaactggcaaggagcgaagcacatgggcaaaatcgggattcggagagacggactctggggattcagagagacaaactctgggcaaattcgagattcagagagaacggactctgggagatttgttacctggacgacggcaaagacttggcgccggctgctggcgtccgagaaggatggaggcctaggtggcggcgcggcaccggcgtccaaggaggaggaggaaggctcgagcggccctgagcgagtgaatcgaggcattgattccggctag

SEQ ID NO: 11341 - DNA, 672 bp, Zea mays
  Peptide Sequence Number=SeqID_53120
atgcgtgcccctcggtgtggtagcgtctttatgctgcggcgggtgttcgtgtcgtgcctcgtcctccggcgcgtcggcgacaggtttggagaaggacctctgacctctccaccggcgtttgcgcctctggaggaaaagaaaggagcggccatgcatggaggtgataacgccatgcagattaagaagaggaagataaggcgtgggagaggtggaaagggcaacatgcaatctaagccttcttctgggtctgaggaagacataggccctcatctggtgcagttggaatcaagagttgctgaagtcattcagcctaaaccatcttgtgtactcgatttctcagatgaaatggcttgggaagaagttgagctacgtcgtgccttgttcgttacaatcgtcggaacaaggccggaggtgtcgggtagggaggtcgttgaggaagtggcgcgttatttccaggttgaggaagacaacatggtgattcatcattctatgttggaggacttcatcatgttccttcctaacgcacagccaccagggttctcaatggaggtcaggtgtatcgaggtcctcgtttcagcttgcaattcaggcgtcggacgcggtttgcacacgccacagcgaccgatttgccgcgcctggttgatgtggaaatatgtgttataccggctgtga

SEQ ID NO: 11342 - DNA, 504 bp, Zea mays
  Peptide Sequence Number=SeqID_53121
atggatctcatcattgttgaaccaagattaggcgggcaagagcagcggtgtctctcatacaacgtggaagtgatggtatttccagtggacaagcctgtgggggatgcttcggccccaccactggaagaggacgagcaggacgctggtatcgaggaggaagatctacaggcagtattgggagaaggggcagaaggtccgctggctgagcgtttactgctagcggcactgggcggcacgacactcgaagaagagttggagggtttcgtggaggagatgtatagttccaagtatggtggtgtgcagcctgggaccacgacagacaggaatgttgaggccaataggcagtcccttcaatttttgccccagattcatgggccgctagattttgatgggccaaatatctgcattgcttcgcaatgcacctctgacgaggctgaatctcctgatgggacgctgggacttggtgagccgttttgcccatgtgcatgtgtgatggcccgttga

SEQ ID NO: 11343 - DNA, 342 bp, Zea mays
  Peptide Sequence Number=SeqID_53122
atgacgttacctgaaggttggagaagatggcgatctggtggagatgccggtgctgtgttgcgtactatgctggcggaggtgagtgggcgtccgacgttcggtgtccgcactcggctcttctcgacgagacgccaccaaccacttccttgtcattgctccttttatgccgaccacggacggttcgcgcccctggtccggacggtctgcccctgcacatcaacgactgaaatcacaacgtgttcctgttcgaggcacaccctgatgtcgcggatggtccactgtaagggcctggacaatccgcgcataggtgaatttccaaaaagcttctcatgtccggaataa

SEQ ID NO: 11344 - DNA, 414 bp, Zea mays
  Peptide Sequence Number=SeqID_53123
atggtcaccaattcccccccactggcggccaagaatggcggcgcccgcacagaatgcggcggcggcatcgccggagcgcaggcgacacaagtcccaggcgcaccaacacaagtctggctgggtgctacgcgtagagggtgtgagggcgagttcgttggtgccaccaatcccacgaatcggccatggctagagcctgctcgcgacaacgcaccatccgcgacgaaaatggacaccgacggaaattcccggcgtaccgcgaccctatcccgattcatcaagtgtaatgggcagagggacggaacgaacaagcgatacatgggtgtcttaccagcgctagagtacagggcatgcttgcccaagacgacaggcggtggtcgggtccgtccgcccatggcaagggtccccagcgcctag

SEQ ID NO: 11345 - DNA, 1227 bp, Zea mays
  Peptide Sequence Number=SeqID_53124
atgacgtcgaccgccgccggcgcgtcgtcgtcggcggcgaagagcgagtcctacctgcgggccgacaagatcgacctcgagagcctggacatccagctggagaagcagctggccaagacctgggagaagcacaaggggtcgtacaaccaggggcccagggaggactgggagatcgacctcgccaagctcgagattcgctacgtcatagcgcagggcacctacggcacggtgtatcgcggcacgtatgatgggcaggacgtcgcaggcaggctagcatggcaaatgatacatttagtatcagctgatggctttgcgtcagaaactgaaactgccacactgcgagcatcatttaagcaggaggttgctgtctggcatgagctcaaccatccgaatgttacaaagtttgttggtgcatcaatgggtactacagaccttaagattccagccaatagttctaacagtggtgggcgcactgagctgccgccaagagcatgttgtgttgtggtcgaatatctcgctggaggatcactgaagcagtatttaataaagaacaggcgaaggaagcttgcatacaaggttgttgttcagatagcactggatcttgccagaggaggagttggtggcgtcctctggtcgatgttatctaggccgaggccaggctcgggcgagatggaggttcctcctgaggccttggtcgagcctgcctcgggattgaactatctacattcaagaaagatagtacatcgggatgtaaaaactgaaaatatgctgctcgatacacagcgaaaccttaagattgctgattttggtgttgctcgtgttgaggctcagaatccaaaggacatgacaggcgcgactgggacacttggctacatggccccagaggtgcttgaaggcaagccatacaacagaaagtgtgatgtctacagttttggcatatgcttatgggaaatatactgctgtgacatgccatatccagacctcagttttgcagacgtctcgtccgccgtcgttcaccagaacctgcggcctgacatccctcgctgctgcccaagcccaatggcgaacatcatgcggaagtgctgggacgcaaacccggataagcgccctgacatggacgacgtggtgcggttcctggaggccctcgacacgagcaagggcggtggcatgataccagaaggccaggcaggcgggtgcttgtgtttcttcagagcccgtggtccttag

SEQ ID NO: 11346 - DNA, 228 bp, Zea mays
  Peptide Sequence Number=SeqID_53125
atggcggctcgatctgttaccgagatccacggaggaggtgctgacactggggcccacgagcttcggcagcgttgcgcgacgcgagcgagggacccggtcccatgcgaagtccgcggcggccagtgcgtgcccgcccaatctggcgaagaagacgagccgggcacggcgactgcaccgtggggccgcggggcagcgataggaaggaatcccaggcacgcgctatggtga

SEQ ID NO: 11347 - DNA, 2508 bp, Zea mays
  Peptide Sequence Number=SeqID_53126
atggaggcgcgtttcgagttgcggacatcgaggcaaaactcaccgaggcaaaagacacggcggggcctcaacggcggcgacagaatggatgtgcggggcgcggtgaacggcgatggtcttccaagctcaagcaagaggcagcgcacgagcgaaggcgataccaaatttgatgcatcacagtatgctttctttggcaacaatgccgtggaggaggttgaactaggtggattggatgatgatgatgatgctgcatttattgagcacgaagatgaagaaaaccctctttatgggagggataatatgttggaggagggtgtaggttcatttgctgacattgatgatcttgctggaactttctcgaagctgaccagaatagtcaatggaccaaagcaaccagtagtagttagtcatagtggatcaatttctagacaaaagtgggtgcaagagtctgaacttccatattggcctacacagcctgtattggacactgatcacgggctggataaaaagaattggtggtcccaaccaccccattcagtcaacttcattgactatagactgcagaggacatcgtcatccccacagcaagatgctcagcataatcctgttgaacctattcttgaagcaaagccatctcctttacatagaacatcaacgtacccacaacaagaacctcagtacagtaatactgaaccaattcctgtgcccaagtcatcattcatttcatgtcctccatctggtgcagcatctcattcttcacctagtcagccacatcatgtgaacatgccatctcctcccactgcattccagttgcatatgtcttctgcacaaaatgatctactccttccccagttccatcatggaggtacgcctccagggcctccatttggtagacagaatcatgttttaaataatggatcgatgcatggaaagggtcccaggtttatgccaggtttgatgcctcatcaattgcaatgtcccaatggactgatgccacctcagatgcagccacctcatcaacatggaatgctgccaatacaacagtccccaccacagttctcacaactacatgcacggatgattggtccccatcattccccaccacaaagcatgcagatgtttggtcctcaacatccttcttcacaagtgatgagtagatttgatgcaaactttgctatgcctgacttgagtgatccaagagcaagatcaatgttgcaacatgaaaggctgggacagcgttatcctcaccaaggttatgagctcaataatattaggatagataatggatggtcacggttcagatccaagtacatgtgtactgaagaaatcgagaacattgcaaggatgcagcaggctgccacacacatcaatgacccgtatattgatgattactaccatcaagcttgtttagcaaaaaaatcagcaggggctcaactaaagcaccacttttgtccaaccttgattagagatccatcttcacgtgcacgcagtaaggatgagccacatgcatatctacaggttgatgctcttgggaggcttccattttcttctatccgcaggcctcgtccgcttcttgatgttgaacaagcctctgcaccaagtgataatgctgaaaaatctgtgtcaaagcctcttgaccaagagcccatgcttgctgctaggatcacaattgaagacggactttgcctactgcttgatgttgatgatattgatcgtctgctgcaatttagccagcagcaagatggtggtttgcaactgagaaacagaagacaggggctcctcgagcagcttgcagaatcactgcaattagttgatctccttgcaccaaataagaattcacctgtgtctccgtatgatgatttggtgtttcttcgcatagtcactctatcaaagggccagaagctactttcccattaccttgagcttctgacatcaggcagtgagcttgcaaggatagcttgcatggcagtcttccggcatctaagatccatatttggaaatatgccctctgatatcagtgcagtggagacaatgaatagacttgcaaaagctgtatccgcacatattgttcagatggatttgagtgatctcagtgcttgccttgctgctgttgtgtgttcatcattgcaaccacctcttcgacctctgggatccccagcaggtgattgggcttctgtcatcataaagtatgtattggacagagcaacagttctactcactgatcaccatgtggcttctaactacagcatgcggaatcgatctctatggcaggcatcattcgacgccttttttgggctgcttacacagtactgcatgagtaagtttgatcgtgtggttcatactgcccaattgcaacctgctgctgcaaccgttataaccagggaaatgccagtagagcttctgcgtgccagcctccctcataccaatgaggctcaacgcaagcaattgctcagttttgctcaacgcactgtgcctgttggtacccacagttctcatgggtcttggtag

SEQ ID NO: 11348 - DNA, 615 bp, Zea mays
  Peptide Sequence Number=SeqID_53127
atgtcgatgatgggcaagttgacctactttcttgggttccaagtgaagcaactcaaggatggcaccttcatctcccaaacgaagtacacacaagatcttcttaagcggtttgggatgaaggacgccaagcccgcgaagacaccgatgggaaccgacgggcatgttgacctcaacaaaggagtttctacgccttgctttgggatctggtatccaaagggatctacctttgacttgattggatactcagactccaattatgccgggtgcaaggttgataggaagagcacatctgggacgtgccaatttctaggaaggtccccggtgtcctggagttcaaagaaacaaacatttgttgccctatccaccgctgaggccgagtatgttgccgcaggacagtgttgcgcgcaactactttggatgaggcaaaccctccgagactttggctacaatctgagcaaagtcccactcctatatgacaatgagagtgctatccgcatggcggataatcctgttgaccacagccgcactaagcacatagacatccggcatcacttcctgagataccaccagcaaaagggagatatcgaggtgtaccatattagcaatgagaactag

SEQ ID NO: 11349 - DNA, 1008 bp, Zea mays
  Peptide Sequence Number=SeqID_53128
atggcgttcccgacggcgatggcagcagtggccgtagccctgtgcgcggcgttcgcgctcgcggcgctcggcggcgccgaggcgcagcagctcagcccggcgtactacgacgactcgtgcccgcacgtctacgacacggtgcggcgcgtgatccaggaggcgcgcgcctccgatccgcgcatcctcgccagcctccttcgtctccacttccacgactgcttcgtcaatggctgtgacgcgtcgctgctgctcgacgagaccccgacgatgcgcagcgagaaggaagccaaccccaacaagggctctgcgcgagggttccccgtggtggacgacatcaaggccgccctagagaacgcctgcccaggcgtcgtttcctgcgccgacgtcctcgccctggcagccgaggtctccgttgagctggcaggaggtccgtactggagggtgatgctgggccggacggacggcatggcggccaacttcgacggtgcccagaaccttccaaacccgacggaaccgctgaacgatctgaagcagaagttcgccgacctcggcctcgacgacaccgattttgtggccctccaaggggcacacacgatcggccgcgcccagtgcaggttcttccaggacaggctctacaacttcagcgacacggaacggtcggacccgacgctggataggtcctacctcgccgcgctccgggagagctgtccggcggcggtgagcgacaacacgtgcctgaacaacctggacccggccacgccggacacgttcgacaaccgctactacgccaacatcctcagcaaccgcggcctgctcaggtccgaccaggccatgctctccgcgccggaggagggcgcggtgtccaccgcgccgatcgtcgggcggtttgccaacagccaggtcgagttcttccaaagcttcgccacggccatggtcaagatggggaacatcgcgccaatgaccggggggctccgggaggtcaggagaaactgcagggtggtgaactga

SEQ ID NO: 11350 - DNA, 402 bp, Zea mays
  Peptide Sequence Number=SeqID_53129
atggcctgcgcatgtcgatacgacccggtcgtcttccctgcgtcgtgcgccgttgctggctgtggacccgctcgtgtagggctgtctcaccctcaactaacgtgcgatgtgagctccgcggagctcggaaccgaaatcgacctcgcacaccagccaccacctgctaaggccgcctccaacgacgggattgagcgccgcaacacgaaattcacgcctacaccgccatcggggctccggtttgtgctcgggagcttctctggcgctcggtggaggttcctggggcaacctaagggggtgcgacaactcggagccgggggaattcgtcgccgtggctcaggatccatcgccgtgccgctcctcgccgtggccagtctccacgtcgtcatcatcgctggtgggtga

SEQ ID NO: 11351 - DNA, 1005 bp, Zea mays
  Peptide Sequence Number=SeqID_53130
atggagcgcaaatcattctcctgcagagacactgcgagctgcctcgccctgctcgccgtcgcgctgtgcctcggcgccgccacggtggcgcggggccagctgacggacgacttctacgacgactgctgcccccaggcggagaacatcgtgagggcgcgcgtgtccgccgcgatgaaggccgagccccgcatgggcgcctccctgctcaggctccatttccacgactgcttcgtcaacgggtgcgacgggtcgatcctgctggacgggaacaacaccgagaagctggcggggccgaacctgaactcggcgcgcggcttcgatgtcgtcgacgccatcaaggccgacctcgagaaggcgtgtcccggggtcgtctcctgcgccgacatcctcgccatcgcggcaaagtacggagtgctgctgagcggagggccggactacgacgtgctgctgggaaggagggacggcctggtggcaaaccagtccggcgccaacagcaacctgcctagcccgttcgatcccatcagcaccatcacaaagaagttcagcgatgtgggtctcaacacaaccgacgtggtcgttttatcaggaggccacacgatcgggcgagcgcggtgcgtgctgttcagcggccggctggccaacttctcggcgacgagctccgtggacccgacgctgaacgcgtccctggcgtccagcctgcaggcgctgtgccggggcggggacggcaaccagacggcggcgctggacgacggctccgccgacgcgttcgacaaccactactaccagaacctgctgggccagaggggcctcctgtcctccgaccagggcctcttctccagcaccgacggcagcgcggccaccaccagggcgctcgtccaggcctacagcgccagcagcgagcgcttcttctgcgacttcggcaggtccatgctcaagatgggcaacatcctcccgctcaccggctccgccggccagatccgcagcaactgccgtgccatcaactga

SEQ ID NO: 11352 - DNA, 432 bp, Zea mays
  Peptide Sequence Number=SeqID_53131
atgggcaagaacaacaagcgcaagcgtgagccaactcctccatcggaggattttggtgactcagagtactcagaggaggagttctcctctgagtctgagaggtctccggctcccatccccctgcgtgagtcatctgacgactcagacgactcccaggggctcgcggcggaggtctggacgtacatccgggccgtggagcgctccgggctcgagggctcgaatgagtcggagtactcctcggatgaggaggactcgtccgaggaggacggcggcggcgacggcgaggatgacgacgacgacgacgacgacgaaggcggtggcggcggtgacggtgacggtggcggcaggggcggcagcagcggcagcaagggcgacggcggcggcagcagcaagggcggcaacaggggcggcagcagcagggccagtggctag

SEQ ID NO: 11353 - DNA, 366 bp, Zea mays
  Peptide Sequence Number=SeqID_53132
atgccggtgtccgtgcttgcatttgccacagccggcgtcatcaacttcctggtgcccgaccctgctgtccaagctctacagatgtggggagacttgcttggtgcttgcttcccggccaccatgggtatctcgccgtcgacgtatagcctgcagctgctcggacaaacttctctgcttcggcgtgcttacctagaaccgccaccggagtggaatcctaggaatttgggtgaagaaagtcgtgtggcatttgtcagatactcgacgaatggcttgaacccggagttcgtcgttgtttctcatccacgggtaggatattgtgtttcgccgtcgtacatagacctattaggtgctcgagaaaacgtctga

SEQ ID NO: 11354 - DNA, 162 bp, Zea mays
  Peptide Sequence Number=SeqID_53133
atggcgagcgcgaacccgacccagcactcggcgtcgaggccacaacaagggactataaaaagtaaaactgtcggagggattaggggggagggagatatcatgttaagatataatggccgcatggaagggcaaaccatcagtattaccaccatcgaggactaa

SEQ ID NO: 11355 - DNA, 366 bp, Zea mays
  Peptide Sequence Number=SeqID_53134
atgcatgtccaccacatctgcctgcaccaacccgacattgtcaacctctccctcaatcatgaagacctcgacatcatttgtagcaaaatcgacatcgtcgacaccctcaaactccgagtcaccatcaattgcatcacactcaacgctctcatggactccaactctactcatacttttatctgtgatacgattattcgatgtcttgggtcacaagttacacctaagactggcatgtggatgaaggttgcaaacggtgagtgcatcctcaatggtggctacaccatgacaacactcaccatcgataatgaagggtttatcacgactagtgagtttgtagggaaaagggaccccgacccatttgactaa

SEQ ID NO: 11356 - DNA, 1452 bp, Zea mays
  Peptide Sequence Number=SeqID_53135
atggttggtaccgagcaccccgtgcacgttgtcctgttcccgttcatggcgcagggccacgtcgcgccgttccgcttcctcgccgagctcgtccgccgagcccgaccagacgccagcatcaccatagtcgcaactccctgggtgtccgagtcactccgggccactctcgcggcgagcaacgtcgacgtccacgccctgccgttcaacccagccgaccatggtctcccggccgacgcccacaactcggcaagcatcggccccgatcagctcggcagcctcttcgccgcctctgagtccctcggcccagcgttctgtcgcttcgtcgccggcctcagggccaccgaccctgccgctcatgtacatatcatggcggacatgttcttgggctggacggtgggcgtcgcccgcgacgacgccggcgtgtcccactccatcgtcttcacctgcggcagctacggggcggcggtttacttctcgctatggaacagcgtcccgctcggcgcattcagcgcggggtcaaccgacgacgccttcgtgttgccgcagttcccgcagattagcgtccggcgctcgcagctcagcgaccaacttgccgcggccgacggcaaggacaccaggtctactttcatccgcaagcagatcgccttcttctcccgtgccgacgcgctgattgtcaacaccgcagagaacctggaacccaaggggctgacgatgctccagcaatggttcaacgtaccagcgtacccagttgggccactcctccgtaccacggtggcagcgtcgtcgtcagaaacgaaggatactagcagcacaatcttcgcctggctcgacaagcagctgccgggttccgttctgtacgtgtcgttcgggtcacagttcaacatcaacgccacacagatggtggagctagcgattgggctcgagcagagcgcccacaagttcgtgtgggtgatccggccgccgtctgggttcgacgacaaccgcgagtgctggtccgagtggctgccggacgggttcagtgagagactagtggtcacagggcagggccttgtggtaccgtgctgggcgccgcaagtggaaatccttgcgcatgcagctaatggagccttcctgacgcactgcggatggaactcggtgcaggagagtctcgcccatggcgtgccactgatagggtggccgctctcggcggagcagttctacaatgccaagatgctggtggaggagatgggggtgtgcgtggaagtggctcgcgggagcgacggcgtgagaagggagaggatcaccgaggtggtggcaatggtgcttggcgataccttggagcttgcagcgctgagacggaatgcggcggccgaggcggagaagttgattcgcgcagcaggggagaacgaccgcaacgggtcgtcggtgaaagtgatgcagatgttcttcaacgaaatgtctcatctcttctaa

SEQ ID NO: 11357 - DNA, 264 bp, Zea mays
  Peptide Sequence Number=SeqID_53136
atgaacgcgctctcccgcgaagggtgccggcacttcgaggtcttcgaccaagccgatgaagattttgagcgagatatctacaaggttgaggaccccatagtgaaggaatccgccggagccatctacgaccggatgtggggtccgcacggtcgcgaggtggtcagggagcgggccgagacggcgagggctcaggctgtggcttatacccatgcggtcgaaggcgtggaagaagatgatgtccgcctgactaccattgtcgactag

SEQ ID NO: 11358 - DNA, 273 bp, Zea mays
  Peptide Sequence Number=SeqID_53137
atggcgccccgcatactctgtgacgatggtggctctcagcccccttacggaagcaagaggacgggaggtcttgacggtcacgccgatgtgctgatcgtctccgaggatggttggagtaggctggtccacgtgcgcaggcggagacttacccggtccacgttcgccagtgagcggaggaagtccggcgagggtgattcggggtcgtcggtgaggctctaccaggtccgaggacttggggagcttcacggatctctggcgaagctaaccgaatag

SEQ ID NO: 11359 - DNA, 132 bp, Zea mays
  Peptide Sequence Number=SeqID_53138
atgacaaaggttaaaccttcttatattgtcttcgaagtggagcaacataaggatagaaaggcgcgacacgctgttgctgtgtttggcggtgcccttctggctactgattatgggtcaaggctggtgccatag

SEQ ID NO: 11360 - DNA, 291 bp, Zea mays
  Peptide Sequence Number=SeqID_53139
atggccatacacggcggtgctccatggccggacccccctcccccacacacggctgcacaaactcaaatcctgcgggtgctacgtgatgagaaggcgaaggtgaacatcaaaggagggtcttaccaagggatgcgagggcgtagagacccagtgacggtggatggcggcgtcgctgtggtctttggctccggcgagcaatccccatgcttcaagcccccaataccgccatatgaggtcgcggacgcgttcagtgtgctctggagactctcctcgaccgtcaaccaagcctag

SEQ ID NO: 11361 - DNA, 297 bp, Zea mays
  Peptide Sequence Number=SeqID_53140
atgacgagaccaaggtcagattgctttccactgatcctcgtctacttgatcttcagcgagccacagctgcctggatacattgaggagtgggtcagagtattttatgccacggtatggatagatccagatcatcagtggctaaggccggtcaccctggatttctcgacccaggtcatcaggcctgttagtgctcagccaccattgccaccagcgtatgctattaccactactatcatggctgtttttgtgactgctccagctccggcagttcctgcaccacaaccaacgtcaaagtga

SEQ ID NO: 11362 - DNA, 447 bp, Zea mays
  Peptide Sequence Number=SeqID_53141
atgtggcaactgtggggacgcgtggagctcgcgcccgagcgcgcgctgcttctcctcgcatgcacgcctcgtccgcgctgcgcccggcttcatctagctgaagtggacgcgcctcactctctcccactcactccagtgcctcgctctcttcttcctcctctcgccagcgccacaccaaaccgccatggtcgacgtgagctgagctcgtgcccgcgctcccactgccgccattgccccaaaccaagcaccagcactcgcttcaccgtccagccgaaaaaccagagcccttgctcgagctcggagaagacccgagcacaccccgtcgacgctgtcgttcatcgatttccgccgacgtgcgtggaccgagcgctgtcgtccaccgttcgcaaagccgagggcaccaacgagttcgtcgtcaaccgtcattcctcaccgaccctcgcctag

SEQ ID NO: 11363 - DNA, 1917 bp, Zea mays
  Peptide Sequence Number=SeqID_53142
atggccgctgggcgccatgggggttacagggactacgaggagagggagcgggagctcgacgcggaggcctccaggaggagcaaggagcagcaccaccatctcggcggccgccaccgcgacgtggaccgccgccgcgatggcgggcgcagcaggggtggtagagactttgccaacggccacggtcgccgacgttcgcccccgcccaggagccgcctcgcgggaaggcttggtgaccgtgagcctggcgaggtgctgagcggtagcgcatctgatgactccggtgggaggtcggatagagggagggaaaatggcgtgcgcagttctagcagggagggcgacatggtggcaggcactgggatctcgtcaccgatcaagaagaggaaattctcaccgataatttgggacagggatagcccaaagccaccgcattctggtgcagccagggacaagaaatcggtagaatctgttccttctgagctccctccgccgccgccgctgccacaagaccacatcccactgagcttgtctgtggagaagtcacctatggatgtagaaactactgttggtacagagagtgctgagcagttgccggaacatgaggtcaataaggtgatagagcaggaagaggactatccaagtccaacaatgaggaacatatcgacttcaagatgggcgggtgcaaatgatgatgaggaaggtggggcagctccaatgaagaagagaagtgtttcacctgcagactcctctgtaccaggtcagtggaaacgagcaagcccagaacctggtgaagtctctggaggaagggcaatgtctaggtcatctgattcagggaaaataggtaatgatgagaaagaagattccgaggtcgataaagatgactatatggatgttgacagggagcatgctagtgacagtggtacagaaaactgtatgtcggatactgactcagacaatgaaatgtgcaggcctgaaacccctgaaccagagaggccaccacacaggtgtatcaatatgcttcaaggttgcagaagtgttgatgagtttgagaggctcaacaaaattaatgagggaacatatggtgttgtatacagagcaagggataagaagacaagtgagattgttgcattgaagaagtacatggaacatgatcttaaaggtgtcatggagaccatgaaacaaccatatacacaaagcgaggtcaaatgtttgatgcttcagctgctagaggatggccatcttttctacagggatctgaagacctcaaatcttttgctgaataaccgtggtgagttaaaaatatgtgattttggactgtctcgtcaatatgggagcccattaaaaccttatactcaactggttgtgactttgtggtacagggccccagaactgttgttaggaacaaaggagtattctactgctattgatatgtggtccgtgggctgtataatggctgagctccttgccaaagaaccattatttaatggaaaaacagagtttgaacagctagataagatttttagaacacttggcacacctagcgagaagatttggcctggctatgctaaattaccaggcgtgaaagtaaattttgtcaaacaaccgtataataggctaagggataagttcccagctgcatctttttctgggcgaccaatcctgtctgaagctggttttgatctattgaatagactgctaacttatgatcctgataagcgcatatcagcagacgatgctctgaaacacaaatggttctctgaagttcctctgcctaaatcaaaagacttcatgccaacatttcctgctcttaatgaacttgacaggcgtaccaaacgttatctgaagagtcctgatcctctggaagagcaacgtctgaaagaactgcaagggaacataggcaaccgtgggctttttggctga

SEQ ID NO: 11364 - DNA, 384 bp, Zea mays
  Peptide Sequence Number=SeqID_53143
atggcgtctgtgcgggcgtgcggccacggctcccaaaatctcgcgttgcatgggactggcggaggacccaacaaaatcaagagaaagcctgttgtgcaagaggaggagaagggcaacggtagtcccaccttttcttgggtggtgatcccagaggaggtggagaccaggcgcctcgcgctgctgctgcgtcttggtactcggccgccttccgcttgtgtaccggagccggtactgggcgatggagcccctggcagcggcaagccagtcccggtggaccgacggagtcgcggagggccggaggcggtcctggcctcctgggacctaggcggagaccagtgcccggaggaattactgggtagaataactgcacgtctgcagatttaa

SEQ ID NO: 11365 - DNA, 894 bp, Zea mays
  Peptide Sequence Number=SeqID_53144
atggaccagttagcagttgtttcgaatcccgcgcgcatgctcgccgcgaatggtcggctgacagtcaatgggaagaaggcgtctactacctcaggcatcctccctcgggaagaaaaaaggcaaggcggaatactgttcagaggttcgaaggttaggccctcggcagggttcggtaagaccgccttaggacgtcagggctctgagcccattactgatcaggggttcgaagaggcacaggagcacaatggcaacaagacagcggtcacgtctggacgcaacaacatgattacgcatgtgccactatgcgcgcacgccacctgctatacccggatgggatacctcatacggcgaaagagtagactggccctcgggcgcaaaactctacctcgcccgatgctgggcttgccctcaagcaccatctccgcctcacccgacgtttgggctcgccctcgggtatcgtctccacctcgcccgaactcgtcttcggctacctgttccaccgtgaatcccgcagacgaccactccaccaactgtggcgcacgtcagggaaagctcgaccatcgcctcgggaagacttccgcctcgcccgagcaggtctctgacctcaatatctgcagcgaaggactcctagtgtcacctagcacagggacgctgacgcctcccataagcaggcttttacccatgccaaggccctgttacaaccactacggtatggacaacccctcccctgggggctcaggtgtgtggccgaccgctcggcatcggcctcggctctcagagggaaaacaacaagctcaagtcaacaatgcagtgcagggtcgtgtcatccacagggcgccaagacgtctccctagtagtgcgacggcctccgactcaacagcgtacaccccctag

SEQ ID NO: 11366 - DNA, 1140 bp, Zea mays
  Peptide Sequence Number=SeqID_53145
atggagtgcatcgccgagatgccccgcgcgccgctggacagcaggctgcgcaagcgtcagcgtctcggctgggacgtcggccctgccgagatgtataaggccgtgcggccgcggcacgggtgggacgtcggccccgccgagatgtatcagttagaactttgtggacaagaagttgtgaatgccatcagtgctgcagccttgggcctttcgtcgggctgtgtttcttctcaagtcaaacaagagcagcctcatgatggttcccctcctctgagagaagatgacagggatgggcattatgtttttgctgttggagataacctcacatctcgctataagatcaatgcaaaaatgggagaaggtacctttggtcaggtgttggagtgttgggacaaggaaaggaaagaaatggtggctatcaaaatcattaggggcattaaaaagtacagggatgctgcaatgatcgaaattggcatgctcgagcagcttggtaaatatgatgaaagtagatctagttgtgttcaaattcggaactggtttgactatcgtaaccatatctgtattgtctttgagaggcttggaccaagcttatatgattttctgcgggaaaacagttaccgctcattcccaattgccctagttcgggagattgccaaacaactgttggaatttatgcacgaattgtgtctcatacacactgatttaaagcctgagaacattctccttgtttctccggagtacattaaagtgcctgattacaaagtttcatcccgatccccaaaggagggatcctattacaagcgggtgcccaagtctagtgctatcaaggacttggatggagttacccatgtgatatctggagtgttggttgtattcttgttgagctttgcacgtcggcactctgacaaatacatcagaaaaggacgcctgaattggcctgagggttgcacttcgcgtgaaagcatgaaagctgtgatgaaattgtccaggcttcagaacctggtgatgcaaaatgtggatcaagctgcaggagatttcattgaccttttgcaagggctgctgaagtatgatccatcaagccgtttaacagcacgagaggccctgaggcatcccttctttacccaagggttttggcgaagatga

SEQ ID NO: 11367 - DNA, 231 bp, Zea mays
  Peptide Sequence Number=SeqID_53146
atggcggtgtacggctataaatcaccggactgtctggtggtgcaccggactgtccgccttacttccgtgcttctttgtgaacatcaaattccaattcaacccaaaatcaatggatggagctcgatattgcaggtacaactgattgaactaagaacaaaggtaagaaggacttcgaagaaccgagtgcatgagagaaggtcaagaagaccgaggtacatgaagccagagtga

SEQ ID NO: 11368 - DNA, 318 bp, Zea mays
  Peptide Sequence Number=SeqID_53147
atggggaaaccgccatggaaaggacctcagctggctggggctggggctcggccggcgagcttggccggcggcgctgggaactgggcgcgggaggatgcggctggagggaggaacacagcgtgcttgagggagaagcgagcagggagaaacactgaacgccatgggaaagcagttggaggtagaggaaggagacggggaggagcagagaaggaactgtctgatttgggcgagctcggggagcagcgcgcgcggcgcggcaggggagctttgacggcgagcttggagcagggagcgcgcgatgcaggggaggcgcgctga

SEQ ID NO: 11369 - DNA, 324 bp, Zea mays
  Peptide Sequence Number=SeqID_53148
atggaaaggacctcggctggctggggctggggctcggccggcgagcttggccggcggcgcttgaactgggcgcgggaggatgcggctggagggaggaacacgacgtgcttgagggagaagcaagcagggagaaacactggacgccatgggaaagcagctggaggtagaggaaggagacggggaggagcacagaaggcactatctgatttgggcgagctcggggagcagcgcgcggggcacgcagagccgagccaggggcatagcaggggagcttcgacgacgagcttggagcagggagcgcgcgatgcaggggaggcgcgctga

SEQ ID NO: 11370 - DNA, 780 bp, Zea mays
  Peptide Sequence Number=SeqID_53149
atggttctgccgcgcaatcctctccatccgttcctcatcgcacggccaccacaccacagccgctctcaattgcctcccccaccgcgccagagccgcaatttgtgcctcccctaccgcgcccttccatccatggcgcgatccccgccaccccatcccccgcctcccttccatcctagcccgccccttccattccccgcatctccatcctcgtccgtcctccaccgatccacatgtgcgccccttccatccttgccgaaccacgcgcaggatgtgcccgctccggtggaggaggaagagacgatcgcgtcggcgcactatgccaggagccggtctgagacggcgcctactgcgcgggagggtgacagaaggccgactccgcccagggtaaagaagtcaacctcggaggtgaggaggtcgcaggtccgagccggcatgggagcagcaggacaagaaggagaagacgcagggggcaactcaacaagggccaagtcaagctcgggggctaggaagacgcctgctctgaggcaggcggaggtgcaccactaccaggaggaggaatacgtcccgcctccggcgcccgcgccgccgctgtcgcgcacgtcgtccgtcctagaccgcctccgctccttcgacctgtaccgcttccgctctggcgacctcggccccgaccttccctccgccgccgccgccacggagacggacaagaatgagaagcagcagtcggcgcactacgggcggagccagcgcgggagcagggcaagtcgcaggacgcaaggatga

SEQ ID NO: 11371 - DNA, 384 bp, Zea mays
  Peptide Sequence Number=SeqID_53150
atggagagctgggaggagaaattgaggagggacccgaactctggcgtggctgcagcttcgacttatagtgcgagggagggagctgtggagaggagaaggtgcaaggctattaatggtggtagcggcagttacggggagaaaaaacggcattcgctggagggcggctgggcatggcgcgggtcgctcggctctgcagcacgttgcggcttgaggcgggtcttcgggcgtggtgacagctccctggcggcgtcggcgtcgaggctgcgtggtgctcttacgcgggtcgcagggtgcggcggctgcaactggcaagcgagcgatgtttcagtgttcttccatgagaaaaacgaacaggatagaactagaagaaccaaagaaaaatga

SEQ ID NO: 11372 - DNA, 795 bp, Zea mays
  Peptide Sequence Number=SeqID_53151
atggcgcctagaaagcattcatctggtagtaagaaaagggagagaaggaaagaagtagaggaatttatagaatcacaaagaggtgccatgggtaaatttgttcgcactaatacaagaacttcaagtaatgaagatcaaccaaatttggctatagttattgtggcggaacaaccaaataccaacgaagaagatcatgaccctacacttgaagaaaatgttgacatcaacacaaatgctaatgatgtgactgaccatgatccaatatttgattcatctcatatagaaaatgatagctttgatgaacagtctgttcctactgaggatatatatgacccaaggaattggggtaatcttgataacaagtcgaggaatacattggtagagaaggggtctataagagaagaaaatattgtatttcctttggatgctaatgtcgccatcatgtgccttgatgctacattaaagaacatagaaggtgcaatgaagttttttgaatattatagaaatgaagggtttgcttctagcttgatcattgcaagagagattgcatcagaactaggtgtggagccatcatttccagtaaagcgccatgctaagaggaagacacaatatgatgaaactgaattcgaggaagcaaaactcgaagctgagaaggcttttgaagttaattactttttggttatggttgatgttgcaattagttcattaaaacgtagatttgaagctccaatcattcaaaagtatatttgggtttttgatgagctcaacaaccctgaaggcactggatactactga

SEQ ID NO: 11373 - DNA, 1377 bp, Zea mays
  Peptide Sequence Number=SeqID_53152
atggatacagcggaggaggctgggcaggaagtagtcagcgctgttggggaggatagtatcccggaagctgccgcctgcagcagggaggagaggaaggaggaagaggaggaagaagtggaggtgagcttcgatgaacttggcctggacgagcagctgaagagggcgttgaggaagaagggcatcctcaaggccaccccgatacagcgggaagccatcccgctcatcctggaagggaaggatgtggttgcaaaggccaagactggctctgggaagacctttgcctatcttctcccacttctgcacgagctactgaagttgtcctcagaaggacgtatacgaaaacctgcaccaaatgctttcatcctggttcctactcgagatttatgccaccaggtgtataatgaggcattatctctccttgagctctgtacatgcaaattgagggttgtgcaagttaccgcgagcatgtcggataaggatattactgttgcattgtctggcccccctaacattctcgtatcaactccagcttgtgttgcaacatgcatatcaaagggaattattcgtggacctgcagttaaagagtcactttcaatgatgattcttgatgagtttaataattgtttgaatgcatctgacatctctgatgttgacaagttgacaaaactacttctgcataacccatttgttctaactctttcggagatctcctgtgatgccaaggataaaatacttcatatccttgcacttctaaagtttgagctcattcagaagaaagttcttatatttgtaaactcaattgatatggctttcagattacgactgatcttggaaaagtttgggataagatctgcagttttgaatgctgagttgccacaaaattcccgactacatattatagaggcattcaacgcaaggctatttgattatctaatagcaacggatgacactaaaacaaaggagaagcaaaccaatgaggaaaataaaaaagaggcaacattgtcccgcaaacggaagaagcaaaccaataaggaaaaccagaaagagcaaaaggtgtcccgcaaacatttgcaacagactttagatgctgaatttggagttgtcagaggaattgacttcaaaaatgtatttacagtagtcaattttgacatgcctctggatgctactgggtatgttcacagaattgggcgaacaggtagagcaaataagactggtgcatccatatcgcttgtttcaccaaaggaggatagtacttttaaagagattgagcatatgttgcaagatgtcgaaaagaaagatatggactgcatttcacctttcccattacttacgaaagatgctgttgaatctctacggtatagggctcagttcctttaa

SEQ ID NO: 11374 - DNA, 879 bp, Zea mays
  Peptide Sequence Number=SeqID_53153
atggccccgcacccgcaggaggacaaatcagatcggcacagcagcggcgccggtgcgtcgagggagcaggaacggcggccgtccaaggcatggggaatcctcatcttcggcctcatcggcgtcaccaccgccagtttcgctttccagattactcaagttcgcaaaagcatggactggttctacactcagttgaataaagtgcagtcaacatcatcttggacttggaggtatacaagtaataactcaagtcgtggaagcttcagtgaggaagctaagaaaagatattatcagcgaatgcagcaggaatatgaagaggaacaagagagagttcaaagaataaggcatatgcagagtgtcttcaacagagagaggaataaatttggacgaggttatgaaagctggagggagaatggccctcctcgtggctacaattacatccctcgggatgattggtattggcagaccgatacttctcactcagaacataaaaataggcggacgtacacaccggcaggacctagggtttatcctatgtcgcatcactatgcagttctaggtcttgacagatcacgagcgacaccatatacagatgcagaagtgaagactgcttttagaacaaaagcgatggaagtgcatcctgaccaaaatcaaaatgatagagatgctgcagaagagaagttcaaggaggttgtcaagtcttacgaagcaattaaatcggagagaaaaaacggtgaatcctcatccgatgtacgaatcccgtggaggaaagaagctggtatttatcgccttgatcccgtggaggaagaatggaggcacttggccatagctcacgctatgatcccgaaccccaaaagccagatgtgtgcgaccgaggcgtga

SEQ ID NO: 11375 - DNA, 111 bp, Zea mays
  Peptide Sequence Number=SeqID_53154
atggcgatcggggtcattgaggcattgtacgccaaggcggcgagtcctattctgttgacggggaatcgatggcaaatgagactgcttgatccatgctgctacattgagtaa

SEQ ID NO: 11376 - DNA, 924 bp, Zea mays
  Peptide Sequence Number=SeqID_53155
atgcaggatgctgcacggcgtgcattttcgctgtattgttcgttgttcagtggggttgcagatggtctcgacctgaagtataacccccaccactcgactggcagtactggaggtgtgattgtctcaccagttggcaccaaggtggaaggcgtgcccagcaagaggagcaagcaccacaggatgaggcaccccagcagcagttgccacacccccccccccaatgacaatagagcagttgtttctaatgcagactcaagcagttcaagcgattggtcagaccctggcagccatgcaacacgtgccacagtagtagcctcaacctcagcctcaaccagcccatggacgccgaagactggttgcgcacggtggagtgggagctacataccgctcagtgcaacgatcgagacaaggtttgatgatagtgaggaaggaagaatttctggcattgaagcaaggtcccctgttgatcatagttcaagcagaatcacccttagggacaccagcaccagcatcaacgtccgcatcaatagcagtttcagaggtagttccctcagcagcagtagtaccgctagagcaactaatcaggaggaagtcagtaccagagacagaacaaccagacacctcgctttcctgccccagcaaccaatcagacagccccaacgtaaggaggaggccgaggatgtttctactttggggaacaaggccactgggcatcacattgcccaaataaagaagctcagcatcagtcagctcccaatgccccagcaagacagaatgcaactcagaaaggagcaaacaaccgtggacagccccgtgcctagtataaaaagcgtgttcatggactacctcaacaagatcatagtggtgttcatcgatgatatcctcgtgtattctcacaaggaagaagagcacgaagagcattag

SEQ ID NO: 11377 - DNA, 240 bp, Zea mays
  Peptide Sequence Number=SeqID_53156
atgctggtggacgacgacagagactttgcggagtcagagtgcccgagctgtgcttgtgttgtggcacaccggcgttacctgcaccgagtacagaaacagaaggggggcaggggcgtcgaggacatgatgctgcttgagatggctaaggggaagaattggaagcggtgccccaagttcgagttcttcatggagaagcgtgatggctgcatgcacatcacttgcaaggtcaacttttcttag

SEQ ID NO: 11378 - DNA, 252 bp, Zea mays
  Peptide Sequence Number=SeqID_53157
atggagcttgggaagctatgcgcagagacgaacagagagctgggcgtgcgcggtgagcaccagcgagtagcgggggcgcggtttggcgagggagcttggctgggcgaacgcgccagggagcttcggacccagacgcagggagcagggcgcgagctgcagcaggggtcgagcgccatgggagctccacgagctgctcggctggctgaggcgccatgggggagaagccagcgtgcagtagagaagcccggctga

SEQ ID NO: 11379 - DNA, 228 bp, Zea mays
  Peptide Sequence Number=SeqID_53158
atgatgtgggggatggtggcgcagcggcggggcgtgattcggctggaggtggaaaagtggaacacgaaggagaggatcgcctggatcgtgataccaggttgtcaagtgtcttggctcccagggtcgccggaccacgactacataactcatagtcgcgctctaggcctcaccatgaggttatacccctctgctggtggcttgagaacgaaggaaaccactttattctag

SEQ ID NO: 11380 - DNA, 729 bp, Zea mays
  Peptide Sequence Number=SeqID_53159
atgccggactcggatgtccccagcccagcatcgtcgccgcttggcagcgtgcagaagattgccaggggtcggaaaagcaggcgcggcggcgggcggagcccggcgtaccgcggcgtgcggatgcgggcgtgggggaagtgggtgtccgagatccgcgagccgcgcaagaagtcccgcatctggctcggcaccttcccgacggccgagatggcggcgcgcgcccacgacgccgccgcgctagtggtcaagggccgcggcgcggtgctcaacttccctgagatggcggcgtccctgccgcgcccggcttccgccgcgccgcgcgacgtgcaggccgcggccgcgcgcgccgccgccatggacgttcccgtgggcgcggcggagccgctgccgtcctcgtcgccgcagcaggtgctggggcagccgttagttgtaggcgaccccgatgtggagctcctggaggagatcgtggagctaccgttgatcgacgaggatgtcatggcgtcggacgacgtgttctgctggacggcgtcgttccacgactgtgccgccgacgacccgctgtcgtacgagccgaacgcgtggatgcaggcaggcggcagcattgcggcgcaggtcgcggagatgatggtgcccgggaccgggctcgccacggaccagctctggacggcgcagccagacggcattatgccttcggagctcggtgcgttcttatggaacccctgtagttaa

SEQ ID NO: 11381 - DNA, 156 bp, Zea mays
  Peptide Sequence Number=SeqID_53160
atggcattcaatttgaagaaggcgcgctggcggccggagagaggggaagtcactggcgtgagcgctatcgtggctttcaccagggcagtgtctcaggtgatggacaggcttcttcagccgatttactgcgacgtgggcaaaatcctcatgaattga

SEQ ID NO: 11382 - DNA, 456 bp, Zea mays
  Peptide Sequence Number=SeqID_53161
atgggagcaggcacgcacagggagggcgcggagaaggagcaccacggcaagcgcaggggagctcaggccggcgcgcaggaagaagccgggggagaaggaaatctatgcgccagggagatggagaccgagcgcgaaagacagagggaaacacgggcgctgaggagctcgtctggggaggcacagcagccatggagcttggggcgggagggggcttgccatggccgatccgtcacgactacagacgccgccgttgcagccagggcaagcacgaccgaggagatggacgaccaagcgccatggattgaggaacaaagaaggcaccggcagagagcagaagggggaagaagtcttctaatttttgtattcacttacgcgcgtgatctgaacagttcaaaattcgccagtgatgaagattcgataatcccaaaagttcatgaaacctttttaactgcctag

SEQ ID NO: 11383 - DNA, 177 bp, Zea mays
  Peptide Sequence Number=SeqID_53162
atggcccacgacgaggagaacagggacgtagatccgagtgagcgccgactaggagcaggcacaggcgagatcgcaaggggctgggagctcaacaccgaagtggtagggaggtcgagcacggaccaaggcgacggagcaatggagcttgcaggggagctcgccgaggccactaggtag

SEQ ID NO: 11384 - DNA, 330 bp, Zea mays
  Peptide Sequence Number=SeqID_53163
atggagaccgagcgcgagagacagaggggaacacgggcgctgaggagctcggctggggaggcgcagcagccatggagcttggggcgggaaagggctcgccacggcggatccatcacgggtgcagacgccgccgccacggccagggcaagcacgaccgaacagatggatggctgggcgccatggattgaggaacagagaaggcaccggctgagagcagaaggggaaggtgaagccgaggggctgcgcagcggccaagcgaacgccgcaaggaggaagaggagggagagaggggcgcgtggctaccagagctggaggaaactacgcgcgtga

SEQ ID NO: 11385 - DNA, 741 bp, Zea mays
  Peptide Sequence Number=SeqID_53164
atggcccacgacaagcggaactgggacgcggatccgagtgagcgccgactaggagcaggcacaggcgagatcgcaaggcacaacaaatggggaggaggcgacacactggtgaattggcggctggaggagacggcgccgagggaggtcgacgccgatggggagaggaaactgtggctatggcaaggggccaaggatcgagctgctgggtgtggccgagcaggggagcacagggttcgacggtcaacaacgagggaggatgaggggcgctggcccagtagggagctgggaacaggaaacaggggcgcggcggccaggggagctcaccgaggccaccaggtagagggacgggtcaagcacgggatagaaattaaagactgcacggtcgaggtgcttgccgggtctctagtaggagtaggccatggtgaactggtacagggcagtgagcagcggcgtccgatgtggtcaacagggacgacggcgccgccaccgatggcatgggagacagagaaagggaggcggggaaggtcgcaggggagggaggaatccgggttcctcatcatggcgctgaggaggaggcatttgaagctggggaagggggcgtgggcggacgaggtggacgcggcctggcagagcaacagccgcgagcgagctatggaggatgccgcggccagagggagagtgagcggtcggcgagctgaagagaagagaagaaatgaggacgacgccaggaatatcccgtga

SEQ ID NO: 11386 - DNA, 364 bp, Zea mays
  Peptide Sequence Number=SeqID_53165
aagtgatgcagaagcaggtaaagctctggagagcttgaaagagtgggaaggggtaaaagtcatggatgatgttctcccattcttccagtcgctcaagctatcgaggactgcagttactgttgacgattgtgttaaggagcttgctggagttgtccgtgagaagctaggacctaagaatgcaatcttcaccaaagcagccgatgccatggtggaatggaacaatctctggaaagtgcatgctcagcagaacctctgggcaggcgctgtcaaaatctatgaaagcatttgctgtataccagatatgtttcgtaagaccatccaccacacccagaagaaatatcttgcaaaatttactaacacatga

SEQ ID NO: 11387 - DNA, 261 bp, Zea mays
  Peptide Sequence Number=SeqID_53166
atggagcaccagtgctctgatcatgaagagttaacacacgcgaactgtgcaccctacaaggccggatggtctgtgacttgggagatagtactgtccgggcttatcctccagacagtccgtagtggaaacatccaaaaacacacagtccctgcccaaaccaatttggcacctacggacgttgaagatacaacacacataatcgatcagagttttgatggagatcttcctacagtcatggttatcgaggcatgcaagaagtaa

SEQ ID NO: 11388 - DNA, 1695 bp, Zea mays
  Peptide Sequence Number=SeqID_53167
atggcgagcacggctccagcggcctccaccgccgtggcattcggggcagccgccacgccgcggggaccggcgtcggcgtcggcggcgctctgcgcgagggtgcctgccgctgccggcggcatgcgtcgctccggggtggccgtgcggtgcgacgccggcgccgacgcccaggtgcgggcggtggccaaggcggccagcgtcgccgcgctcgagcagttcaagatctccgctgaccgtcaaaagatctcggtggtttggggaaggaaggaaaaaggagtagtagtctttgacaatgttttaactttatatccacgaccagggtacatgaaggaaaggagtagcatagctgtgataggcctcagtgtgcacacagcaccagtggagatgcgcgaaaaacttgcggttgcagaggaactatggccccgtgctattcaggaacttactagtctgaaccatattgaagaggctgctgtgcttagcacctgtaacagaatggaaatttatgtggtggccctatcatggaaccgaggtatcagggaagtcgtggactggatgtcgaagaaaagtggtattcctgcttctgagcttagggaacacctattcatgctgcgtgacagtgatgctacacgccatctgtttgaggtatcggctgggttggactctctggttctcggtgaaggacaaatccttgctcaagttaaacaagttgtgaggagtgggcaaaacagtggaggcctgggaaagaacattgatagaatgttcaaggatgcaatcacagcgggaaagcgtgtgcgctccgagactaacatatcatctggtgccgtttctgtcagttcagcggcagttgaattggccctgatgaagcttcgaaaatctgaagcgctgtcagctaggatgcttttgattggtgccggcaaaatgggaaaactagtgatcaaacacctgattgccaaaggatgcaaaaaggtggttgtggtcaaccgttcagcacaaagggtggatgccatccgcgaggagattaaagctatcgagattgtgtacaggcctctctcggagatgtatgaagctgctgctgaagctgacgtcgtgttcacgagcaccgcatctgaaaccccattgttcacaaaagagcacgcagatgcacttcccactgtttctgatgccatgggcggtgtccggctctttgtcgacatatctgtcccaaggaatgtcagcgcgtgtgtctctgaaattggctccgcgcgagtgtacaatgttgatgacctgaaagaggtggtggaagccaacaaggaagaccgtctcaggaaggcaatggaggcgcagacaatcatcaccgaagagctgaaacggtttgaggcatggcgggactcgctggagaccgttccaaccatcaagaagctgaggtcatatgccgacaggatccgagcctcagagctcgagaagtgcctacagaagatcggggatgacgttctcaccaagaagatgaggagagccatcgaggagctaagcaccggcatcgtgaacaagctcctccacggcccgctgcagcacctgaggtgcgacggtagtaacagccgcacccttgatgagacgctcgagaacatgcatgctctcaaccggatgttcagcctcgacacggagaaggcgatcatcgagcagaagatcaaggccaaggtggagaagacccaaaattga

SEQ ID NO: 11389 - DNA, 558 bp, Zea mays
  Peptide Sequence Number=SeqID_53168
atggagaggactatcaaggatttggaaaaagaccaagtttttgagaccccatctcatgatcaatacagttttgattgtgttctttcttgtgttcttgattgcgcttacagggataagatttctggcaagatcgaatccctgacatggtcagccacccccacaaatctgatgttctcgggggtggacatgtggcccttagcaacgagggcggtgatcattcccgcagcgttgtggaggcatggcgagaacgcggtcgaggtgtcccttgcgagagcatccgaggacattcgctttccttcgacgagctatgtcattgtgttcgcatatcaaaaagagaagaacatggtcacgcgaaggatcgagtcagaggtctacaagggtctctgtgatggtatcaaggttgctggccggaagagactgaggaacgagggacctaaccagtcctccctcaatggtaacaaggtcgaggctcccaaagggtacgatcgcctaggggacccagtctatgttgtgactgaccatccagtgcctgatgatgagaattatcaaaacacataa

SEQ ID NO: 11390 - DNA, 255 bp, Zea mays
  Peptide Sequence Number=SeqID_53169
atggtcgtgctcccggtggcgccgcggccgccgcaggctccggcaacctccttgtcgttgtccctctccctgccagggctgcaccagcagcccgaaccatccccaccgccaacacctcaagcacaagcaagctcgccgttaagcgcggagttcctgttgatgatgcaggatatgatccggatcgaggtctggaactacatgttcgggtcgagcttcgatgcacgcgccgtgatgggcatggccgagatcgactag

SEQ ID NO: 11391 - DNA, 558 bp, Zea mays
  Peptide Sequence Number=SeqID_53170
atgtacttcgacgggtcgctgatgaaaaccggagcaggcgcgggcttgctcttcatctcacccctcggagaacatgttcgctacgtgctgcgcctccatttcccggcatcaaacaatgtggccaagtacgaagccttggttaatggcctgcgcatcgccgtcgagctaggggttcggcgcctcgacgcttgtggcgactcgcagctcgtcatcgaccagaaggcacccaggggcttcacgcacctgctggtcgccatcgacaaattctccaagtggatcgaggtccgacccttaaccagcatcaggtccgagcaggtggtggctttcttcaccaatatcatccatcgctttggagtcccaaattccatcatcaccaacaatggcacgcagttcaccaggaaaaagttcctggacttctgcgaggaccaccacatccgtgtggactgggccgccgtagctcacccgatgacaaatgggcaggtggagcgcgccaacggtatgattttgcagggactaaaaccgaggatctacaacgacctcaacaagttcggcaaatga

SEQ ID NO: 11392 - DNA, 339 bp, Zea mays
  Peptide Sequence Number=SeqID_53171
atgctgtgccttctcgactgcggaaccagcgccgtgactcgagggaccgagaaaggggatattttgaaagggatccttccccgcgaaggaaacgggcccccgagccctcctactgatcaggggttcgaaggaaaacagtgccgcccgccccgctccggctgctatgccaaccacccgggcgaaaccgacaacggtcaagttaagcctcgagcgcaacaggaagctccgcctcgcccgaccccggggctcggcttcggcctcgggaggagatctccgcctcgcccgacgccagggctcggcctcgacctcggcctcgggaagagtcacatcctcgcctga

SEQ ID NO: 11393 - DNA, 369 bp, Zea mays
  Peptide Sequence Number=SeqID_53172
atgacgactcgctcgaaggtctcgagaagaggagggagaggggaatcccgctgttgtggcctcccatataatcgcgaagttgaccagtgtgccacgacggactgcgcgactatggcgcagcgccccaccatgcgaggaggttcgtttggaatacgctgcagcgtctgcgcgtttggacccacacgtcagtgcgcgcgactggcgagccacgcgcacggtgaaactgcaggcgggacccacgggtcagtgtctcacgcgagaacggcgggagtggaccgatgggttgcgcagagggataagtgggccaaattcacgtattacaacggcccaacttcgattctaccacaccagcccgccagcaaacgctga

SEQ ID NO: 11394 - DNA, 159 bp, Zea mays
  Peptide Sequence Number=SeqID_53173
atgaagtctgtggtcccgatgttacgacccacgaacgacacgcactacctaacgcgaaaggtctcactagtaaaaagggctacccacttccggccctcggggcacccgcagcaccggattgacttctgcgaccctaaggacttgtttgggaccaagtga

SEQ ID NO: 11395 - DNA, 456 bp, Zea mays
  Peptide Sequence Number=SeqID_53174
atggcccttgtagatgatgtggtaggcggtgacaacaaggatctcggcgacgactccacatctgagactaagctagcaaagagagacactagaaaagcctttcttgagaaggctagctcagtgagtgccccttcatctgtgttgtgtgcactttatgagggtttgcagtctgctctcgagtcctatagacacaacaagacccggaccgaggaagaaaacacataccttcaattggtcttgagctgggtttcaaaccgtgagctccaattgggcatggtggtcagtcagttcaagaggggaactgatggaccgagaataagctttgcttctaggtcttggagtaacgttcatcttagcaaggttggtgactggagtggattgaaaccattagagaaacattcagccacacctaagcttatcaaaatcaccccacctaagcctatcacccctctgtga

SEQ ID NO: 11396 - DNA, 147 bp, Zea mays
  Peptide Sequence Number=SeqID_53175
atgatgcttgatgctgatgaggatggcgagcccgtggaccagaaggagtacatgagcatgattagctctctattgaccgcctgtggtgctctatccttttcacaagcggaccctaagacaaaaccgcctgtgattgtaaaaatatga

SEQ ID NO: 11397 - DNA, 606 bp, Zea mays
  Peptide Sequence Number=SeqID_53176
atgacggggacgcagggaggccttgggtcgacggtgaaggagctccggctgcaaggtgcagaagccggtgagctcggaccgggcaaaacagaggggttgggggcaaagcagagggtgtcccacgttgctagtgaggaggcggagctcatcgaggcaacgaatgcggcagaagctcgacgacggccacagaacggatggcggatcaccatggagctccacaggcgcgtgtgcggagcgaaacgcgtggtcatgggcgcgtccatggaggagagcgtggggctggaggttagggaaagggtagtggctgacaggcgggaggagcgggtggagagcctcggggataaggagctggtgcttgtggctagccggttcatgtggttccacaacaaccgccagaaccgacgacatggcaagttgaaggatggatgtttcaactgttgtgaccccaaccacttcgtcgccaatttcctcaacaagggaaagtctgaggctggctcgcgcgaccaccactctagccggcgcaaggacaagcgagagcactcctctggcaagcacaagtccatggggaggtttgataaggaggcgctgaagaagaagtacctttag

SEQ ID NO: 11398 - DNA, 204 bp, Zea mays
  Peptide Sequence Number=SeqID_53177
atggagtctggcggagggacaactgtcggagcggttgggtccttgctgatgtcctcttgcttccgtgacactgcagtcggagtggcgcaggcggcgctgtccttctgtcaggccggtcagtggagcggcgaagtgacggcggtcacttcggctctgccggagggcgcgcgtcaggataaaggtgtcaggctacctttgcattaa

SEQ ID NO: 11399 - DNA, 2550 bp, Zea mays
  Peptide Sequence Number=SeqID_53178
atggcggcggtgcttacccgagccggcggccgctccaagcgatccgtctccggcttccacctccgctctgttctcgcggggcacgggaccttctcatctgaagccgcgtcgaccgccgtgggcgatcgcgtggtcgcggctacgggcgagcacgatggggacgacctgcgcagccgcatcttccgactgggcctggcgaagcggagcgcgacggcggcactcgagaagtggtccagtgagggacgcgacgcacccacggcggagctccgccgcatcgcgcgcgacctcacccgcgtccgtcgctacaagcacgcccttgaggtagcagactggatgaagacacatcacgagtctgatctatcagagaacgactacggaatgcgcatcgacttgattaccaaggtcttcggtgccagtgccgcggaagatttctttgagaagctcccaccgggagccaaatcgctagaagcctacacagcacttctgcactcctatggccggtcgaagatgacggacagagccgaaaggctgttcgagaggatgaaagacgcgagcctgcctatggacgccctggtctacaacgagatgatgaccctgtacatctccgtgggggagctcggtaaagtggaggccgtcgcagaggagctgaaacggcagaacgtctctccggacctgttcacgtacaacctccgtgccagcgcggccgcggcgtccatggatctcgagggcttcagagcagtcctcgacgagatgtccagagacccgaagtcgtccacagaaggagggtgggcgctgtaccgggacctcgcgtccgtgtacgtcgacgcgggccagcttctgggctctgtgaattcgccgccggtggaggccggggaggcgaggatcagccagagggaatggatcacctacgacttcctcgtcatcttgcacgccggcctcggcaggccagagaggataagggacatctggaggtccatggtggcgacctcgcagtcgcagtcgcagcagcagcagcgcatgacgagccggaactacgtctgcgtggtctcgtcctacctggcgtgcgggcggctggaggatgccggggaggtcgtcgaccagtggcagcgctctaaggcccccgagttcgacgtctccgcctgcaaccggctgctggacgccctcctgcgcgccggtctcgccgacgccgcgggctgcagctattgtaaagacgacaggtacagcggctacgagctggcggaaacgatgctgttgcatactgtttgtcctatgctccacattctcgccacgaagatggattcgctccacagcagacagaccggcggcagaagtggtgccgtttccccaaatctgtgcctctgcgtgcgtgcttcgcgaggagcgatggagacgcggcagctgctcctcgtgttctgcctcctcggcgccggcatggccgtcgtcgtggacgcgcaggcgcagtcggcgccggcgccgccgcctcggcagacgccttctgcgccgccgcaacagacgcagttcggccgcaccatgtcgaccttcatcacggtggccatcagcgtcttcttcttcttgctcttcgtctgcgcgtacatcaaccagtgccgcctagcggaccccggggcggcggcggcggcagcggcagcggcagcggcagccggcggcgggggcgggggcccgtccaggagggggaagcgcgggctggaccccgcggtcgtcgccacgttcccgattgtgtcgtacagggaggtcgtggagcacaagatcggcaagggcgtgctggagtgcgcggtgtgcctgacggcgttcgaggacgacgacgacctccgcctgctgccgcactgctcccacgcgttccacccggagtgcatcgacccctggctgcagtcgcgggtcacgtgcccgctctgccgcgcgaacctcgagaagccggcgccggcgccggcggtggcgcccccgtcgccttcgccgcggctagcgccgcgccagccttcgccgccgccggaggccgtggcgataccggtgtcggacgacggatcggaggggggcagcagcagctgcgaggacgacaggaaggaggaggccgtcgagctggagacgctgcgcagcgcgcggcgcgccgccaggatgccgcggtcgcactcgacggggcactcgctgttcgcggcggcggcggccgccgccgccgcggaggaaggcgaccacgagaggttcacgctgcggctgccggagcacgtgcgggagcaggtgctccggtctcgccgcctgcgccacgccaccagcctgctcaacctctcggacatgagttccgaggggagctcccgaggcggaaggggcgtagcaggagcaggaagctttggcaacggcggggggagcagccacggcgggcgccggtggcaatcgttcctggccaggacggtctcctgggcgcgaggcggcggcgacggctcggtgcggagaggctgggacgggtccacgaggagggggagggacggcggtgagtcaagctggaagggcgtggcgtcgccgccgccgacgggccggccgtga

SEQ ID NO: 11400 - DNA, 348 bp, Zea mays
  Peptide Sequence Number=SeqID_53179
atggctctactcaagtgttacttcatgtgtattattgtctcattttactctacagctattgtaagcctctcattttactctacagctatttttgtattgtacattggactttgtgcccagaacatcacaatcttcattatcagatttcccagaatctgtagatttccgaccacggttgcacgagcatcagactcggaccatgcaaagcttagcgtgtcagttgcaactgggcgccgtggcaccaacagcatatgcaccgttgcttggattggagctggagcagcaccgatcagaagatcgaatccacgcatggtactacctcgcatcggagtgacgtgcacttgctaa

SEQ ID NO: 11401 - DNA, 447 bp, Zea mays
  Peptide Sequence Number=SeqID_53180
atggggaagacacgtgcgctcctcctcgctctccaccaagtgataaattttctcaaatttgtgaggttgtcaatatggtggaatttcttgattaatgtcttggcgtggggattcagttgcctgggtaccagatatagcgatgagcgaaatttaaggtgtgaatcccagaaattctttttttatgctaatgatgaagatgttgcagaagatggagatcaggatgctgaattgctgatacttcggtttgaaaaagatagattgtctcatgccgatagagcgcccgacagcctgcactgctactcctcatggacgccggcgtgtgcctgctcggtgtggcaccacgtcgctcattgtctccggcgtcgtgcccgtgctgtcttactgactggtgagctgccgccgctctcactcttcgttttgccatttctcatcgatttggcactttag

SEQ ID NO: 11402 - DNA, 723 bp, Zea mays
  Peptide Sequence Number=SeqID_53181
atggcgccgtcgccggtggcgggcgcgcacggcgagggcgcgagcgccggcgccgtgtgctgcatgtgcggcgaccgcggcctgccgggcgagctgttccggtgcaggtgctgccgctcccggctccagcacaggtactgcagcgacctgtacccgagggcggccgcgtaccggcggtgcaactggtgcctgcgggagccggggccgggggtcggccaagcgggcctgggccatgcccatgccgcggcggtatttgcggctaacaacaagcccgaggatgataaacaacggaagaccacggcggcggcgtcggacgaggagcggcggctgcgccacgaccacgatgggtgctccccctccccgaagaggttgtcgccgccgcggccgcctgcggagctcggacacccggtgaagaagaagcacagggccgaggagaagacgccgcagccgccgccggcggtggcggctaacaacaggcccgaggatgataaacggaagaccacggcggcggcgtcggacgaggagcggccgcggcagcgccacgaggggtgctccccgaccctgaggaagtcgtcgccgccgcctgcggagctcgtacacccggtgaagaagaagcacagggccgaggagaagacgccgccggctgtcgcggggaaggtgcgggtgaacagggtctgcagggtgcggcggtacaagctcctcgctgaagtcatcagctgctga

SEQ ID NO: 11403 - DNA, 1329 bp, Zea mays
  Peptide Sequence Number=SeqID_53182
atggcggcggttgtgagctggtacgggccactgatcgacctctcggcggccgccagccatgtcggcggattcgtgcagcttctggcggtcgttcgccggctccttccccaccaggagcagaatgctgcgaccggaaggacgtatcagagaaccattgccgaagtcggcgacgatacacggtccagcttctctgtctccctgtggtcctccaagcataattcgaccataatcgctggtgatgtcttactgctgcaaaatattaagatagtgcaatttagaaatggcctggagggaagagcttctcagatgtcgtcagtccaagtattgttgaactctaaagacttgctggacactgagcctgaaggaatatgtgaactaataagcagttgcaaagtcgggaacgctacaaaatcaaagttaagaaaagtggcagaatggatcatacacactaaatgtgctcttggggaaagtcatcatcaggtggtgtctaagaactggaaactagcaaaagaaaatgaatcagcacattttttgtctatatcagagctaatctctcagagaaagttatgtaatataaacatttatgcatgcatcggcaagatggttctagtgagttctccgacctcccctttaaaggtaaacttgtcggtcatcgacagacgttctttcaaagagcacagtgatattgtcagagatttggttactgctggatgtaagctaaaccttcatgaggaaaacacgtttgcacttgattgtcctaataacccaaaatatctccatgttcctggtcagatatacaggccatttctgatatatatctatgaccaatctggacaagttcctttgcttgtgaggaatagagctgcggagaccttgtttgccaatatcactgcagatgatgtatctgaatgccacaacagccacatgctgtcagaaacctatgaatcgtgtaacctgagcacccctggtacggtagatgattgcggcaacaaagagatagcgaaaaggagaaaaaccgaacagaagcctaatttctatcttatttggcttactctgatcaagtgtctgctgagccaaggcagcaacagtcccttctgcttccagatctcagtcaaccccgagaagaatgttgaggatggacgtttcgaattggttccaaatgagacaccagggaatactgcgattgacctggctgaacagggtgctctgttctacgactggcccgttcctttggcgtgtgtgcttagccttagccagagttgtcatatcaaaacaggatacttttcttttttctcctctggcgatttggattttgtgttcctagtttaa

SEQ ID NO: 11404 - DNA, 765 bp, Zea mays
  Peptide Sequence Number=SeqID_53183
atggccgcgctcggtcctgcttctgttacctccacgggcttggcgctgcacacccctgcgattcctcatcgtcggcgtcgccacgggaatgcagtggcctgtgcgtcgtcgtctcaacaccagcgaagccttaatggcttggcgatgagttcttcaggcacgaacaatgccttgcccatcaaaggaattaccactacacgggttcctgcagtcggtcgttcggtccctgcagcgaatccgtcgccgtcaggagggaacaacctcccggtgcccaagattcctccgtgggtcaagtgggtggctggcgccgtcatatttgcagtgcccatgtacaggaggttcagagctttagaaggtaaacagatatcgatcgatcgatggatcgcgtattcatcggttcgcgagaccatttcctactacagtacagcacatagcgcgtgccgtcatgtttttgatcgcggtgcgcgcatgacagacaagatagagaagacggcggaggtggcgatcgaggtgatcgacaaggtggcggaggcgacggagaaggtcgccggcgaggtcgccgacgagttccccggcaacgagagcatcaaggaagcagcctccaggatcaagaaggtcatgcacgtggtcgaggaagacgccgacaaggctgaggccctgatcgagaaggtcgacgagataaagaaagatgtggattcgattgtcgatcctataatcggcaaggttgccaaggataaatcgcggagaatgaaccaaaaaggatga

SEQ ID NO: 11405 - DNA, 186 bp, Zea mays
  Peptide Sequence Number=SeqID_53184
atggctggacacagcgtcttcttcctacagcacactacggaagcaggttgccgtcttcttccctggcgcgacaccaggcgcacagccgatggtgtgcccgccattcctatgccagcgcgccgcaaagaggggagaacggatcttgatttgaagaggaggaggatgaaccgtaccgtggagaagtga

SEQ ID NO: 11406 - DNA, 186 bp, Zea mays
  Peptide Sequence Number=SeqID_53185
atggctggacacagcgtcttcttcctacagcacactacggaagcaggttgccgtcttcttccctggcgcgacaccaggcgcacagccgatggtgtgcccgccattcctatgccagcacgccgcaaagaggggagaacggatcttgatttgaagaggaggaggatgaaccgtaccgtggagaagtga

SEQ ID NO: 11407 - DNA, 1368 bp, Zea mays
  Peptide Sequence Number=SeqID_53186
atgaggcctcgccgccgggccctcttcccgttgcacagcgcaggcgctggggcctgcggtgacccgtgggccgactgccagacaccaccgccggttcccagcactcctgattccggccctggcccttccccatcgctgcctccctatggcgatctaccgtgccctcccgttttgtcgccgtcgccgtctccgtcgcctgctcccgcgcataacggtaggaggaaccagggagggacgcagggatacgggcccccacccggtgcaggcgaccacgaccgacggcacctcgtcaaatacgcgctcatcgccgccggggtgttcgccttcgtatgcctgatcctgctcggcgtctcggtggccgtgcggcgccggcaggtccggcggaggcggcaggcgctcctcgcaccgcctatcccattccccgagggcgcggcgaacgtcggcggcggcggcgggcacgaccacgggtgggacggcgcaggcggggtggtgcaccacgtctggaacatccggaccgtggggctcgacgaggcgtccatcagttccatcgccgccacgcggtaccgcgccggggcggggctcctgggcgcggctgactgctccgtctgcctcggcgagttccaggacggcgagctcgtgcgcctgctgcccaagtgcgcgcacgcgttccacgtcccctgcatcgacacctggctccgcgcgcacgtcaactgccccgtctgccgctccgacgtgctcgaccccgccgtcacggccgactccggaggaggcggcgagtccagctccagcccgccgccagctgatccggacgcgagtcccaacggcggaccagatcatgttggcgcggcgagcgacgcagccccggatcacgaaggagaggagagcgacggcctagacgcttcgcccgcacgagaggaccagcaagagcgacccagctccgcacagccgccgccgccgccagaactcttgtgtgcgctgccgcgtaacgtgcggcgcgcggcatccatggatgccgtggcggtgtcaactgcggcgagtgtcgcggagctagaccggctgccggaagtagcagctcctgaagaggagcagatcggtgggaggcggaagcgctggacgggcccgtgcccgtcccgcccgaaggcatcgggttcggggcaccgcagcaacctcagcaccgactggctgctggctcccagcggcgtcccgaggtccttcttctcgcgccattcccgcgctcggagctcggtgctgccattgttagaagttgatgatcggatccaggaattggatgtttgcaactcgagaaatgagcatcggcacgaggagataattggagaaaactgcgcctccccgtctgctttaggttag

SEQ ID NO: 11408 - DNA, 810 bp, Zea mays
  Peptide Sequence Number=SeqID_53187
atggcgtcgccgcgcgtgtgcgtgaccgggggcggcgggtacgtcgcctcatggctcgtcaaactcctcctctcccgcggctacgccgtgcatgccactgtccgcgacccaagtgatcccaagaacgcccacctccggcggatggaaggggcatcggagagcttgctcctgttcaaggccgacatgctcgatcgcgacgccctggccgcggcggtctctgggtgcgagggggtcttccacgtcgcctcccctgtgcccgcagataaggcagaggtactgtctcctgctgtcaaaggcactctgaacgttcttcaggcttgctcggcaaataatgttcggaaagttatcgtggtttcatccacagctgctgtccattttaatccgagttggccccaaggtataatccaagacgagagttgctggtcagataaatttttttgcactaagagtgaggaatggtacattgctgccaagacaattgctgaagagacagcactggagtatggagagaagaatgggctactcgttgttacagtttgcccttgtgtcgttttaggtccactcctgcagcctctaatcaacaccacgagtgaagtattcgtctacattataaaaggaggtcctagagcgatgaaaaacatcacctggaacatcgttgatgtccgtgatgtagccgatgctttgcttttggtatatgagaaagtggaatcatctgggagatacatttgtgcaccaaatcggatcagcacttacgacatagcgaacttgtttagaaagttctaccccaactacaattatgtgaagtggtga

SEQ ID NO: 11409 - DNA, 1431 bp, Zea mays
  Peptide Sequence Number=SeqID_53188
atggccttcggagctctcgtcacgtcgaggctggtcaggtccggccacacccttgcatctgccgttgcccagggtcccgttgcccagcggatagcacctcctctgctctccaggcttggagcagtagctcgtcttctcagcacaaagccagccgcaacagatgtcatcggtatcgatctaggcacaacgaattcctgcgtctccgtcatggaaggaaagacccagaaggagatgaagatggtgccttacaagattgtcaaggcgccgaatggtgatgcctgggtcgagatgggtggccagcagtactcccctagtcagattggtgcatttgttctcactaagatgaaggaaactgcagaggcttaccttggcaagacagtctctaaggctgttattactgtcccagcttattttaatgatgctcaacgccaggctaccaaggatgctggtaggattgctggactggaagttatgaggattatcaatgagcccactgctgcagctttgtcttatggaatgaacaacaaggagggccttattgcagtgtttgacctgggtggtggcacatttgatgtgtcaatccttgagatatcaaatggggttttcgaggtcaaggcaaccaatggtgatactttccttggtggtgaggattttgatggtgcactgcttgagtatctggttagtgagttcaagaagtcagacaacattgatctgagcaaggacaagttagcactgcaaaggctcagggaagctgctgagaaggccaaggttgagctttcgtccactatgcagactgaaatcaacctcccatttatcactgctgatgcatctggtgcaaagcacttcaacattaccttgaccagatctaagtttgagtctcttgtgagcaatctcattgagaggactcgcatcccttgtgtgaactgcctcaaggatgctggcatctctgctaaggagattgatgaggtcctactggtgtcagctagggacaaagccacaggcaaagaacaagaaatcaccatcaagtcttctggtggtttgtcagaggtcgaaattgagaagatggtgaaggaggccgagctacattctcagaaggaccaggaaaggaagtctcttattgatctcaagaactctgcagataccacgatctacagcattgagaagagtgtcagcgagtacaaggacaaggtccctgctgaagtcaccaaggagatcgagtctgctgtctctgatctgagggcagctatggctgaggacgatctggacaagatcaagcagaagctggaagcagcaaacaaggctgtttcaaagattggagagcacatgcaacaaggtggcggcagcggcagcgctggcggcagcggcagcagcagtggaggagaccagactccagaagctgagtaccaggacgcaaaggaagccaagatgtag

SEQ ID NO: 11410 - DNA, 147 bp, Zea mays
  Peptide Sequence Number=SeqID_53189
atggctccgtcgtggggagctatcggcgccgccgcacctgtctgcctgagttggggatatctgatggtgctagggctattgggcgtggttaccgtcgatctcgtgatcaacgggcagtgcagggtggggagtccagatctaatttga

SEQ ID NO: 11411 - DNA, 186 bp, Zea mays
  Peptide Sequence Number=SeqID_53190
atgaacccggaattgctcactggaatccttcgggcccgtggtgccgctcgtcatcgtgggcagtgccctctgtgcttccaaccccgatctgatggtgccagggctattgggcgtggttaccgtcgatctcgtgatcaacgggcagtgcagggtggggagtccagatctaatctgatccgtttatag

SEQ ID NO: 11412 - DNA, 351 bp, Zea mays
  Peptide Sequence Number=SeqID_53191
atgaccccagaacgcgacggaggcggtgagagaggtgcacagcgcagtgtgcgaggacggcatccgccgggggctgaagagcctctgcaggttccaccgctgcttgatgacggaggttggctgccagcaccagtaggtatggctctctcacgccttggtcaccgccgccgctgtggtgctcatgagcagcatctttatcccgtgcccatggccatggccgcaaggtcggggagctccattcccgcgccaacgcctcgcaatgcggcggcgaggagccgggcgagcgatgagggattttcgtgtgacggcaaggagccgacagtagctgatttttcgaacaagaacaagtag

SEQ ID NO: 11413 - DNA, 258 bp, Zea mays
  Peptide Sequence Number=SeqID_53192
atggccggaaatggctcaccgggagtttctccggtccgcccgaagacttttctcaccgccgttctccccctctctgctcgtggattcatggtcccttccccgccattgaacaacgaacagtccgaggttcctgagtgtgttgttggagacctccctgagcaaccacctggtgaaggcaagtgtcctcagacctatcatgtcctactttacttttataattcaccgtcccgcattactttattgaaacctaaggattga

SEQ ID NO: 11414 - DNA, 399 bp, Zea mays
  Peptide Sequence Number=SeqID_53193
atgacgtcagacgcttggggcggcggctatctcagggttcgggcacgatgggagcgccggagcggggtggggctcacggaggcgagggcgtgcgagcgaggatggcgttgccagatggagccgaaggggcaggggcacacaggagacgtgggagagggcgagaggcgggggcgtggaggtgtcggcgaggagctcagcaacctcggcctcgtcggcggaggaaggcacgcgcttggacctgcgcgagggggagcacggacgcggggcgtggatcctgtgattgcgtctatggaaggttgccgaaggaaggtgccaaaggttcaacacaaactaataaaaagatctaagttagggttcaaaagaaaggagcaaaagaaaccaaagagaaccctggtctag

SEQ ID NO: 11415 - DNA, 525 bp, Zea mays
  Peptide Sequence Number=SeqID_53194
atggggacagactactacaatgcgctcaaggttttgagtgatccccagaagagggcggcatacgatcagtatggcaagaaagggctgaaggcctttgcagatatccaggagcgttgtgaggctgaatgggcagaagagcccccttcactgtttcatatgttaaggcataaattgcagtttgctagcagtatattcattgcagatgcaacccctaaatcacttcctccatttcagatgaaggaaatacttggtgattatgatgctattcatagccttcatcctcatctagacagagacaccacacctgagtataacagaaaaagaattgcacaatggattccaccgggtcaaacttcattcattgcattaaatgaaagaactccatgcttcttttccactctgtcagacaggcaacaattcaggtacaagttagcgtactcgtgcaacttgagtagcatgttggagccaattattaaggaaaactatcagttattgacagtctgtaagaacgaacctgcacattga

SEQ ID NO: 11416 - DNA, 993 bp, Zea mays
  Peptide Sequence Number=SeqID_53195
atgtcgggccccaacggggtcatcaccgtcggatccacataccgacacgcgtacgaatgcgacatggagtgtgtggagtacgctgaggccctcgccaaatccgaggccctcatcgccgacctggagtgcctctccaaggaggtgccagatgcgaagcgccatgccggcaacttcgagccagcagaggcggttaagtccgtccctctcgaccccagcaacgacgcctccaagcaagagctattgcaagagatacactcgggggcttgcggtcaccacgcagcacctcgagccctcattgggaacgccttccgacaaggcttctactggcccaccgcggtggccgacgccactaggattaaggcacccgggggcttctcgcacctgctggttgccatcgacaaattctccaagtggatcgaggtggtggcgttcttcaccaacatcatccatcgcttcggggtcccgaactccatcatcaccaacaatggcacccagttcactggcaagaagttcctggacttctgcgaggaccaccacatccgggtggactgggccgtcgtggctcaccccatgacaaatgggcaggtggagcgtgccaacggcatgattctgcagggacttaagccgaggatctacaacaacctcaacaagttcggcaagcggtggatgaaggaactaccctcggtggtctggagtctgaggatgacgccaagccgagccacgagtttctcaccgttctttctagtctatggggccgaggctgtcttgcccgcaaacttagaatacggttccccgaggacaagggcgtacgacgaccaaagcaaccagaccagccgagaagactcgctggaccagctgaaagaagctcgggacgtggccttgctacactcggtgcgatatcagcagtctctgcgacgctaccacgcccgaggggttcggccccgagacatccaagtgggagacttggtgcttcggctgcggcaagatgcttga

SEQ ID NO: 11417 - DNA, 291 bp, Zea mays
  Peptide Sequence Number=SeqID_53196
atggccaccgacctagtaatcaaacgcggttcacaccgtagaaatgatagggaaaagggcctcaccgcgggtgtgacgaggatggagctggcgacgttgcctcgccaccatccacgagcagcgagctccgatgatggtcataccattgctggagaccccgaggcgcttgagctccgacgcaggagtcgttcggcgcatgccccaccacacccacgcggcggcaaatcggccaccaaattcccagggagagttctggatttggttttgggaaatattattttggatgtgtag

SEQ ID NO: 11418 - DNA, 2976 bp, Zea mays
  Peptide Sequence Number=SeqID_53197
atgccggagcggcaccagtcgatcgacgcgcagctgcggctgctggcccccgggaaggtctccgaggatgacaagctcgtcgagtacgacgccctcctcgtcgaccgcttccttgacatcctccaggacctgcacggcccccacctacgcgaattcgtacgccccgatcagtaccgccttcctcctcacccccagatccgcatgtttcgacgaagccgtgcacgtgctgatcaggagtgctacgagctctcggcggagtacgagaacgaccgggatgaggctcggcttggcgagctcgggagcaagctcaccagcctgccgccgggggactccatcgtcgtcgctagttccttctcgcacatgctcaacctcgctaaccttgccgaggaagtgcagatcgcgcaccgccgccggatcaagctaaagcgtggggacttcgccgacgaggcctccgcgccgacagagtcggacatcgaggagacgctcaagcgcctcgtctcgcagctcggcaagtcgcgggaggaggtcttcgacgcgctcaagagccagaccgtcgacctcgtcttcaccgcccaccctacacaatccgtgaggaggtctcttctccagaagcacggcaggatccgtaactgcctgcggcagctctatgccaaggacatcactgctgacgacaagcaggagcttgatgaggcacttcagagggagattcaagctgcttttagaactgatgaaatccgcagaacccctcctactcctcaagatgaaatgcgtgctggactgagttacttccatgaaactatctggaagggtgtacctaaattcttgcgccgtattgacactgctctgaaaaatattgggatcaatgaacgtctcccttacaatgctcctcttattcagttctcttcctggatgggtggtgatcgagatggaaatccaagagtaacaccagaggttacacgggatgtatgcttgttggcgagaatgatggctgctaacttgtatttctctcagatcgaagatctaatgtttgagggctctattttagatctccttgttggagatgctcttagtgcatatgcactacaaaaaagtatgcatgctaatttgagaaaaatcactaatcgagtgtcaacactcgcagaattctggaagcaagttcctccaaatgaaccatatcgtgtcatacttggtgatgtcagggataaattgtactacacacgtgaacgttctcgtcatctattgacatctggaatttctgagattccagaggaggcaacttttactaacgttgaacagtttctggaacctcttgagctatgttatagatcattatgtgcttgtggtgacaaacctatagctgacggaagtcttcttgatttcttgcgtcaagtatcaacttttgggcttgcccttgtgaagcttgacatcaggcaggaatctgatcgacacacagatgtccttgattcgataacgacacatcttggaattggctcctatgctgaatggtctgaggagaaacgccaggattggttgttgtctgaactgaggggcaaacgtccattgtttggttctgatcttcctcagactgaagagactgctgatgttttaggcacatttcatgtccttgcagagcttccagcagattgctttggtgcatatatcatctcgatggcaactgccccatctgatgtgcttgcggtggagcttttgcagcgagagtgccatgtaaagcaaccactgagagttgttccactcttcgagaaacttgcagaccttgaagcagctccagcagctgtagcacgactcttttcaattgactggtacatgaataggattaatggtaagcaggaggtcatgatcggatattcagattctggcaaagatgcagggcgtctctctgcagcatggcaaatgtataaagcacaagaagagctcatcaaggtggcaaagcattatggagtgaagctgacaatgtttcatggaagaggtggaacagttggcagaggtggtggtccaacccatctggctatattatctcagccaccagacacgatacatggatcgcttcgtgtaacagttcaaggcgaagttattgagcactcctttggagaggagcacttgtgctttagaactttacaacgctacactgcagctactcttgagcatggcatgcatcctccaatttcccccaagccagaatggcgtgctctgatggatgaaatggctgttgtagcaactaaagaatatcgatcaattgtctttcaagagccacgcttcgttgaatacttcagatcggctacgcctgagactgaatatggcaggatgaatattggcagccgtccatcaaagaggaagcctagtgggggaatagaatcgctccgcgcaatcccatggatctttgcttggacacaaacaaggttccatctgcctgtttggcttggatttggcgcggcgatcaagcacatcatgcagaaggacatcaggaacatccatatactgaaagagatgtacaatgagtggccattcttcagggtcacccttgatctgctcgagatggttttcgccaagggtgatccaggaatcgcagctgtgtatgacaaattgcttgtggctgatgatttgcaatccttcggcgagcaactgaggaagaactatgaggagacaaaggaactactcctccaggttgccggtcacaaggacgtccttgaaggtgatccttacctgaagcagcgtctgcggctgcgcgaatcctacatcaccaccctgaacgtgtgccaggcctacacgctgaagcggatacgtgacccgagcttccaggtgagcccgcagccgccactgtccaaggagttcaccgacgagagtcagccggcggagctggtgcagctgaacgagcagagcgagtacgccccgggcctggaggacacgctgatcctgaccatgaagggcatcgctgccggcatgcagaacaccggctag

SEQ ID NO: 11419 - DNA, 120 bp, Zea mays
  Peptide Sequence Number=SeqID_53198
atgacgtcgtcgccgttcatcatcgctgcgctcgaactcgcccaacgaccccgcaatcgcccgttccctgctccatccctgctctgctcgtcgcctgtcgaaagatttaaagataattaa

SEQ ID NO: 11420 - DNA, 210 bp, Zea mays
  Peptide Sequence Number=SeqID_53199
atgagaaagcagtatagggtaaaactgcttaggattcttgacctgagtcagaatcaccctacaactgtgccggagggcatcaagaatttcactgcactcattgagcttgatctgtctgacaacaatataacagcactcccagcggagctgggattgcttgaagctaacctgcaagtgttgaaactggatggaaatccgctaagaaggtaa

SEQ ID NO: 11421 - DNA, 828 bp, Zea mays
  Peptide Sequence Number=SeqID_53200
atgacacgacacgatccacctggccgttgcgttacacgccgcgccgcacacatcagtgtcatactgtcatcacccgtgcctgtgtctcaccagcccactttccccagtactctactcacccacccactcacggactcatctactgagcagcgcggtgggcatccgagcgagagggcgagcgcggaaggatcggaattccgaaggttgggcatggaggcgagcggcgagaaggctgcggtggtgcgacggctgatggaggcgaaggaggtgtccgggaagaccttctcgggaatcgccgccgagacgggtctcaccaacgtctacgtggcgcagctgctgcggcgccaggcgcagctcaaggccgacacggtgcccgcgctgagggcggccctgcccacgctcacggacgacctcatcgaactcatgatgcagccgcccttccggtcctaccaccccaacatcgtccacgagcccgccatttacagtagccaagctgcggtggctgagcgattgaatgaagctgttatgcattttggagagagcatcaaggaaatcatcaatgaggagtttggtgatggaatacactttgttaggacctggaatgctttgaattttgtgcagctttatttaagcctgagccctgacgaagcctctgtaaccacacacttgaaaagcatgtcagccatagacttctattgttcagttgacaaggttgaaggggccgacggaaaagatcgtgtggtggtcacatttgatgggaagtatctaccttacactgaacagaaatctgaacatatgatgtctaggccaacccgcaagacatcttga

SEQ ID NO: 11422 - DNA, 528 bp, Zea mays
  Peptide Sequence Number=SeqID_53201
atgtcgtggatctacatcgctacaacgcgcagcggggcagcacggatggagcagcgcgccggaataaaagtcaacgatgttgtccccgacacagtgctccacaccgacagttcgacaacgccaaaaaggggcgagcagggctgcgcacaacacaagcatgacaacacgcagtcgactgcgcatatcgtcgagcaggggaaatggtggaggacttcctggggtggggctccctgcgctggtggtgaagtggtggtcggacaccaagtgggggaggaacccggctccatggagaagctggcggccgttggagtcctgggcgcggccaaggggaagagtaggggcgaggggccagcctggtcggcgcccatggagaagaaagcctctacgctggctgtgttgggaggagaggggtcgccatgggcagcaaagggagtcgctggtggctattgctaccgtgagggaggagacagcggagagtgtgtgcgtgagaggaaaaaggagaagagagagtggcgcctaggggggtag

SEQ ID NO: 11423 - DNA, 1581 bp, Zea mays
  Peptide Sequence Number=SeqID_53202
atggacactagtagctactttattctgcatcagaagaaagtattgacattcgattcgtgggagcaaactgcagaatcgaatcagaaaatttatttgctgttcctcctgtctgacagtgcttctccaccacctcttgaagctgcatctctaccacgtgggatggttactatgcgctgtgatatcactacttgcagctcttcccatgtgtcactcctcgtttctggtagcgcacagacttgtttcgatgaccagcttctagagagccacataaaaaatgaaattattgagaaaagccagttagtccgggctctctcaaatagtgaggacaagttaccatcaagtgagcctttaacttccatgtctacggcttgtggggcttctacctttgaagtttggatgtcccttcctaagtgggcagcacaggttctgaagcatctagcgccagatatatcatacaggagtttggttgcacttggtattggttgtataaatggtactcctgttgcttcatttgagaggcgagatgcagaccgtcttcttttcttttgcacaagccagtgcaaagatttggctaatgaaaacggtccatattttcatctgccaagatggtcagcctcccttaccaaggacagaacaaagttgggttcagaatcaaaacaaaatctgttgggtgcaaatggagttttggaagacaagaagcatatgatggaagggccttcctcattttcagccgtcaaggctaaattaaagcctgcaactatgaggccaattcctcactctcaaaagcaacaaatgcatccttttatgtgtttacctgaaacttcctttcatgaaactagtattgtgaagccaagcttgacagttgcgccaactgtgaagcacaattcagtttcttatgccccaaccacgcacagaaaatcaacatcagggccatctcatactccttcagtcattcagttgaatcctctgcctatgaagaaacatggatgtgataggttgtctatacaagtatgctctgaggaggacttcttgaaggatgtcatgcagtttttaatccagaggggccacaatcgacttgtacctcacggaggactagctgaatttcctgatgcagtccttaacgccaagcgccttgacctttataacctgtacaaagaggtggtgtctagaggtggattttatgtgggtaacggcataaactggaagggtcaagtcttctcaaagatgcgtaaccatactgcaacaaacagaatgactggtgtaggtaacacattaaaaaggcattacgagacatacttgttggaatatgagttagcacatgatgatgtggatggcgaatgctgcttgctttgtcacagtagcgcacctggagattgggtgaactgcggtttatgtggcgaatgggctcactttggttgcgacagacgacaagggctaggcactttcaaggattacgctaagacagacggtttggaatacatctgcccccactgtagcttagcaaactacaagaagccaccactaccaccaaaagtagctaatggtttctcaaatacagcatatgtaccacgaagtgtttaa

SEQ ID NO: 11424 - DNA, 444 bp, Zea mays
  Peptide Sequence Number=SeqID_53203
atgtctcaaatccaaagcttctcgcggaacaactgtgtgctccttgtggtgctgtgtgggaagtatgctgagaagcgagcaccagcagcgaagtctgggctggaggcgaagcggccacggccgtcttacccattcccggagctcagctcagctgggcgattggaggtccacacactgtttaatcctacaccagagcagttcctcgaggcgcagcgggtggtgcagcccaacttcttgtacatccagggtcagcagcttgaggatgagaaggagattggctcacttgtgtggggggacgccgatgtctctgatccgcaggcgtttagcactcttatcagcccaccattcccaacgatagtatatctggaagttcctattggtgaaaaacttgcccaagcagttcactcaaaggccctgtttggatctcttaaaaatgataattag

SEQ ID NO: 11425 - DNA, 222 bp, Zea mays
  Peptide Sequence Number=SeqID_53204
atggcgctgccgcggtggttcatcaccgttggctgggtgccgaccggagaagacgaagacagggagtttgggaggagatgggttgcgccgtccaataacgtgctcgggcagttcgcgccgagcgccagggacgcggcagacgagccagccactgtggaatctgaggttcaacaagtagaagtagctgagcaggagctcattgaaggcaagttgtgcccttga

SEQ ID NO: 11426 - DNA, 222 bp, Zea mays
  Peptide Sequence Number=SeqID_53205
atggcgctgccgcggtggttcatcaccgttggctgggtgccgaccggagaagacgaagacagggagtttgggaggagatgggttgcgccgtccaataacgtgctcgggcagttcgcgccgagcgccagggacgcggcagacgagccagccactgtggaatctgaggttcagcaagtagaagtagctgagcaggagctcattgaaggcaagttgtgcccttga

SEQ ID NO: 11427 - DNA, 396 bp, Zea mays
  Peptide Sequence Number=SeqID_53206
gcacctgagcgcgcggctggagcagaggacgccggctatggaaagcagagcgcgagcaggaacggcgcgctgggagggatcgaggggaaaccgccatggaaaggaggccgagcgagctggggcaagccaggcgcgcgcgcgagaagcaaggcgccgcgacacgggaacagggcgtgtggcgcgtcttccatcgccgaacagcgcggccgagcagaggcaagctggagcgggagtgcgccatggcctagagctgaggacgcggcgcaaaacacagacgcgcgcgcagaggaagtcggagcagaggggattgccgagaaggaagatggagagcggctgggcggctggggatgcccacacgcaaagaaatatccacgagagaacggcggtttgggataa

SEQ ID NO: 11428 - DNA, 1893 bp, Zea mays
  Peptide Sequence Number=SeqID_53207
atgtcatcgtcggcgttcggcgacttcggtccgctcaccgagcgccgccgcgctgagaaggcgcggcagcagcgcaggcgcatcatgatcgccgtcgggactgtctccataatcgccatactcatcgtcattggctggtacgcggtcatgtacagcgggaagaagtcgtccagcgacggtgaccacaaccacaagtcttcgtcgtcgccggccaaaggcaagtccagcggcggatcggactcggaatcggaagcggaaacggaaacggaaacggaatcggggtcggattcgaagacggatctgaaggctgtgtccaagagcatcaaggcgatgtgctcgcagacagactacacggacgcgtgcgagaagagcctcggcaaggccgcgaacgccagctcgtcgtcgcccaaggacatcatccgcagcgccgtggaggtgatcggcgacgcgatcggccaggcgttcgaccgcgcggacctgatcctgagcaacgacccgctcgtgaagggcgccgtcgccgactgcaaggaggtgttcgcggacgccaaggacgacctcaacagcacgctcatgggcgtcgacgacaaggacggcatcgccaagcagggctaccagctgcgcatctggctcagcgccgtgatcgcgaacatggagacgtgcatcgacgggttccccgatgaagagttcaagaccaaggtgaaggagtcgttcaccgaggggaaggagctcaccagcaacgccctggcgctcatcgagaaggggtcgtcgctcctctccgcactcaagggcgtctcaaaacggcgtttgctggaggaggagcaaggcgcggcggcggcggcgtcgcaagccgggccggcactcgacaaggacggcatcccggagtgggtacccgacggtgagcggagggtgctcaagggcggcggcttcaagaacacactcacgccaaacgtggtggtggcgaaggacggcagcggcaagttcaagaccatcaacgaggcgctctccgccatgccgaagacctacgacggaagatacgtgatccaagtgaaggaaggggtgtacgaggagtacgtgaccatcaccaagactatgaagaacgtgaccctcttaggtgacggctccaagaagtccatcgtcaccggcaagaagagcttcgccgacgggatcacgactttcaagacagcaaccttcactgcgcaaggcgacgggttcatggcaatcgggatggggttccagaacacggccggcgcggagaagcaccaggcggttgcgctgctggtgcagtcggacaagtccatcttcctcaactgcaagatggacgggttccaggacacgctgtacgcgcactccaaggcgcagttctaccgcaactgcatcatctccggcacggtggacttcatcttcggcgacgcggcggcggtgttccagaactgcatcctggtgctgcggcggcccatggacaaccagcagaacatcgtgacggcgcagggccgcgcggacgcgcgcgaggccacggggttcgttctccagaagtgcgaattccaggccgaggccgcgctccgggacgccaagcgcccggccatccgcaactacctgggccggccctggcgcgagtgctcgcgcaccgtcgtcatggagtcggagctcccggacttcatcgacaaggccgggtacctgccctggaacggcgacttcgggctcaagacgctgtggtacgccgagttcggcaacaccgggcccggcgccagcacggcggggcgcgtcagctggccgggcttcaagaaggtgatcagcaaggcggacgcgaccaagttcacggtcgagaacttcctgcacgctcagccctggatcgatcccacaggcacgccggtgaagtacgatctgttcacatga

SEQ ID NO: 11429 - DNA, 357 bp, Zea mays
  Peptide Sequence Number=SeqID_53208
atggggcgtcgggtgcaggcgcgatggggcgccggcgacgcgtctggtggggagggccactccctgggctgcacgggcatcgagggtggctggtacaggcgtgatgtgggacgtcggtgccatgctggcgtcagaggcagggcagtcacgacggcatctgagagggagtgcaggagcaggggacgggccagccagggggagagggctggccagcggctgggaagggagccgccccagaagggaaggatgagcctcccggggcggcgacgcggaagccggtggcggacggacctaggggctgacagctgtggggtggaaggggtgggggttgaagacctagctaatggggtaggctag

SEQ ID NO: 11430 - DNA, 150 bp, Zea mays
  Peptide Sequence Number=SeqID_53209
tacgtcagaggaacctcctccggcaaggagagggtgctcggatggctgggagttcgaattatggggagcagaggggtcgtgaggataggggcagcgttcaggttgagaatatgcgagattgacaaaggaatgtccatcgaggaacagtga

SEQ ID NO: 11431 - DNA, 1260 bp, Zea mays
  Peptide Sequence Number=SeqID_53210
atggggcgcgcagcgactccagcccccggggcccagtcctcccggttgccgcgcgccgtctcgaggctgcggcttgtgcttcgctcctcggaagcagcagcgaggagcggcagcaagagatggatagggtgcttccggccgtcgccatcgccggccaccgccgcggcgggggcggccgtggtgaaggaggcgaagggaaagcggccggaggtggaggtggagccggcgcgcggcggaggggaggacgtgtggagcgccgatgctgagaccgaagtggctcagggtggggcgttccccgagcacctcgtcatcatggtcaatggcctcgtcgggagcgcggacgattggaagttcgcggcagagcagtttgtgaggcggatgccggacaaggtgatcgtgcaccaaacatgggatattgtttgtgtaacacggcgatctgatccaccacacggtgtgacaagtgttttgacatatctgttaggagacagtgacatacataggaaacagaacctgacagagagaattggagatgaagtaaccatatccttgtacgacgacttagcgaagattaaaggcagctgccatcatccgctgcttgcacagtactttactgagaggatagcagccgcaaccacagctgctggaagtcagtgcaactctgccactcagacatttgatggtgttgatttaatgggtgaaaggttagcaaatgaggttctatcagttgtagagcaaagacgaggtgtgaagaaaatctcgtttgtggcacattctcttggtggccttgttgccagatatgctataggaaggctctatgaacctaatagtagaaggaaatcttctgggggggagagcagagatgatgttgtgcacttgaatggtcacattgctggtttagaacctatgaatttcataacatttgcatcaccacatttgggttcaagtggaaacaaacagttaactaagcaaacagatatggttggatggagaacatcatcaatccgacgtcagcatgagttgccaaaacatcgtcttcttgttcgtgatgaaaagtatccacatattgtttatgttgaaaaggaagttacagacaacaatgaaacgaaggcccatgctgatcattatgatccagaagaggagatgataagaggccttacgcaagttccgtgggaacgtgttgatgtgagcttccagaaaagcacccaaagattagttgcgcataacacaattcagcatctgaagattctgaactttccttaa

SEQ ID NO: 11432 - DNA, 318 bp, Zea mays
  Peptide Sequence Number=SeqID_53211
atggcgatagtgcccgcacgtgcggccgaccagcgatggcggcgtccgcccgctggctcggccagcgacggcggcgccctcgtgtggctgctaagacagcaggccggcggtgggaggacagaggaaggccagtggggaagggccgacgacctggggaggagtcgtgcgacaccactgggcctgacagcagatctggtctgcggccacgcggtggaggacgatgactgcgtcctggttgggcccgcgtcatggggagaggaaggggagctacatgtcgtcagaggcggtggccttgagctgcaccggcgtggcctatag

SEQ ID NO: 11433 - DNA, 288 bp, Zea mays
  Peptide Sequence Number=SeqID_53212
atggcagtcggggtcagtgaggcattgtacgccaaggcgcactggatagcgggggttttggtacccggaatcgccatgcgaggtttcgccggtgtgagcgctgccgcggatatctgctgcacccttggctaccgggaggttgatgatgtgttcgtggccgttgatgcggaatgggcggttgggattggtgctacgtaccggttcgtcccatgggatctgggacgtcgagatcggattcaacgtgcgcaatgtaagcgggttccactaaacaatgaccgtagatcataa

SEQ ID NO: 11434 - DNA, 435 bp, Zea mays
  Peptide Sequence Number=SeqID_53213
atggccttgcggggtaactggcccgtgaccccatgcgaggccttcatggtaggaacaggagctaccctagaccacttgaggaagggtaggaggggcagggattggcctcgccgcgctgatggcaagcgcaagcgcgctccgagtcctccctcagaggacttcgacgactcagagtactcggaggaagcctcctccgagtatgatcgattgcccgctctggcttctccctcggcatcatccgaagatttggatgactctatggggctgtccaccgcggcccgagcgtacttgcgctccatcgagcgcgccgggctcgatgggtcggatgagtcggaggaggtctcctcggaggaggtggactcctctgactcctccgaggagtggagcggcgacgatggtgacgatgagggcgacggcagcaaagggcaacagtga

SEQ ID NO: 11435 - DNA, 321 bp, Zea mays
  Peptide Sequence Number=SeqID_53214
gtgccaaaggttcaacacaaaccaataaaaagacaaagaaagggttcaaataaaaagagcaaaagacaaccgaaggttgtcctggtctggcgcaccggactgtccggtgtgccaccggacagtgtccggtgcaccagggaaatcaactccgaacttgccaccttcgggaattctgggagccactctgatataattcaccgtactgtccggtgtgccaagcggagcaacggctacctgcgccaacggtcgtctgcaacagctacaggaacagtgaacagtggccattttggtggttggtactttatgtatagcgaacacctg

SEQ ID NO: 11436 - DNA, 786 bp, Zea mays
  Peptide Sequence Number=SeqID_53215
atgcgcccccaggcgccgcgggccgagtcttctccaacacgctccaaggccctcccctgcgactcgggggccgggtcccgcatgtcatacaagccggctcagggcagaagaagccaaaccgccgcgcatgggaccggggaagggggataccctgagagggatccttctccgcgaaggaaccgggctccgcgccccccattactgatcaggggttcgaaggctggccccccgagggttcaacagccgcctcagatcgcgtgggcccgacacccactactggtcaggggttcgaaggccagccccccgaagggctccatggccgcctcaggctactcgggctccgcgcccattactgatcagggggctcggactcgggctaagacccggaagacggcgaactccgctccgcccgaccccagggctcggactcgggctaagacccggaagacggcgaactccgctccgcccgaccctagagctcggactcgggctaagacccggaagacggcgaactccgctccgcccgaccccagggctcggactcgggctaagacccggaagacggcgaactccgctccgcccgaccccagggctcggactcgggctaagacccggaagacggcgaactccgctccgcccgaccccagggctcggactcaggctaagacccggaagacgacgaaactccgcctcgcccgaccccagggctcggactccgccctggcctcggccggacgacttccgcctcgcccgaccccctggctcgggctcggccacggcaactga

SEQ ID NO: 11437 - DNA, 231 bp, Zea mays
  Peptide Sequence Number=SeqID_53216
atgcaggccgaggagccggagctgcggcaccaggggcagcatctggtgctgctgattgcacagcatgtgtcgttggtgctgctactgctggcgcaacaggtggcgctgctgcgtgtgctggggcgcctggggtgccggtggcaggtggcacaacaggaggcactgcaggtgcctctacgaggccagcctgctctgcaggaagccgggcgcgtctactgtagactgcgctga

SEQ ID NO: 11438 - DNA, 1110 bp, Zea mays
  Peptide Sequence Number=SeqID_53217
atgggtaccagtgttcaggatctctgcccaatagctgacaggaagagacgcctgaaaaaggagacaaccgatcatgttggtggtgaaaggagcgagaggcgtacttgtcgaacttgcggccgttatgacactggagtgcacgaactgagcgcggaactaggtggagactcaagcgaagaagtgggcaagggtggaaaaggtatcagacttgaggcgcaaaggaaaggtctaaagaaaaggagtcctgactacaagagatatcagagcgactggagagctggaacatcacgtcaggtccaggtgatcgagacgacgatgccaaatggtggaggtggtggtagtagcaagagcatggggggaggatacgttgatgggggaagtgggtggcaagtgaatagagtagaggggactagagctgtcacaacgagcgagcatgacacgagtgagagccggcaaggtgggaaggaggccgaccgtggttgcgagccaggcggcgtcgctggggatgctgcgggcgagggagaggtcgccggtgagcgcaacaatcatgttgggaaggaggccagctctggcgtgctgcgggccaacagcggagagggcgtgtgcgcccacggggagagtggactaaagggggatgtagccagcggcagcgacatggcggcccatgctgggggccatggggaggaggggccatgcctgggaaagaggagggttggggccggcgagctgcgcatgggccgatggttgggaaaacggttgtggcagattggggaccagcggccacgtggggtggggcctttggcagtagcgcgggtcaaaggaagggccgcgacagcggcacaggttggagaggaggccgctacgctggctagacgggaggcggtggtgctggtgaggccggccgcaccaagcgttgcaccgacgacgagtctgaagccaacaggagcacgagcgttggggatgtggctgtcgttcgtggtggagggaggggtggaatatggcaaccaaggagtcggtgtcgtgtctcagcaactatacaagtcacttacaagcctccagatgggcaatgtggaggactggatgggttggaccatgcaacttaatcagtag

SEQ ID NO: 11439 - DNA, 207 bp, Zea mays
  Peptide Sequence Number=SeqID_53218
atgggatttgcgtggggaaggtttggagaggtgtggcgaggcctagcgaacacagtggtggtgctcgaccgcgtggaggtggctggaggagggccgaccatgaacgcaggagggtggaacgtcatcgacgttagtgacgaaggtctcgccgacgttgttcggcctcgagaaggggcgcgcgagcttcggtgttcaaacattctctag

SEQ ID NO: 11440 - DNA, 570 bp, Zea mays
  Peptide Sequence Number=SeqID_53219
atggcgctccgcgagctctgtgacgacggcagctttcagctctcttacggaagcaaggcgacaagtgctcgagggtttgatcaacccgaggcaaaaagggaatcacggctcatgggtaaagggcctgattggttgcccgcatataggccaaccaggctcacggttgcctttggtgcaacctatgctcaagtaaagaaggagaagaaaacgtcgaggcggatctccaggagttccaggacttcgacgagttcgaggattaggctagcgacctccccaagtcagctgcatgtggtggcttcaggcacatgtagttttttatggccacaatctttgtataacatagcacccgaaaatggtgtggtacgcaccaacgatgtcaacaacctcaaaggcccactatctagatatgaccccgttgaattgagctctagaaggttagagcttgacaacttggtcctcgggatgctaagggcgtcgagggttttagtgtgcacaacattgaggccactcccaccatccattaggacccaagtgagccgcttagaccggaagattgggtcaaccacttag

SEQ ID NO: 11441 - DNA, 420 bp, Zea mays
  Peptide Sequence Number=SeqID_53220
atgcccgacataccgagggatgtcgccgagcactcgctggacatccgagccggagcccgacccgtgaagcaacacctgcgacgtttcgacgaagaaaagcgcaaagccataggtgaggagatccacaagctaatggccgcagggttcatcaaagaggtattccatcccgaatggttagctaaccctgtgcttgtgaaaaagaaaggtgggaaatggaggatgtgcgtcgactacaccgggttgaataaagcatgtccgaaggttccctaccctctgcctcgcatcgatcaaattgtggactccactgctgggtgcgaaaccatgtcattcctcgacgcctattcaggtgcgacataccaaaggtgcatgaaccacatgttcggagagcacatctgttggagacttgttctcaaatgctaa

SEQ ID NO: 11442 - DNA, 273 bp, Zea mays
  Peptide Sequence Number=SeqID_53221
gtggattctgtatatattccagacatttcagcaaaatatccattgtgtgtttctggaaggtacaatggcaagcttccggagacacttatcgccaagggtcacttggctgacatgagtgaaatatctattgaattgaaagtccaacatataaaggatatacctcttgataaaataacttgtacaaataaggatgaagttttcctctaccttaaggctgaactttattgcattactttgaagtggattcttgaccccaagaaacttacagcgtag

SEQ ID NO: 11443 - DNA, 1137 bp, Zea mays
  Peptide Sequence Number=SeqID_53222
atggagcttcgaagtcggagcctctttagagggagccagcccagatctgtgcattctgtttcccacttggggctgatggagcttcctgctaaggcagagagcgcgccggtcgatgcgcagaaggcggataatacccgctgtaaagagaagtcgcggcattccaagcgctgccactgccacctcgaagagatgcccgtcatccctgagcaggccatggagttcctctctcggacgtggagcccctcctccacggatctcttccaaatactctcccccagtgacccagagcaagatgaagcgagaggagacggaggcgacgacgacgacaaggagaaacatcttggcacggttcgtctcaatggggggacgaaccagttgtttaatcagacatgtgtaagtcagccaatgggctcaccgtgccagtcacggggagccgggaggaggcggcggagggacgagctccggctgcactcggcacaggcgcacgccgccgtgtcggtggcgcagctcgctgcggcggtcgcgggcatcgtgtcggcgtgcgacctgaggcccgcggcctcggccggcgctggcggcgacaggaggctgggcacggtgctcgcgtccgccgccgcgctggtggccaccgtgtgcgccgaggccgcggagaccaccggcgccaaccgcggccgcgtcacttccgccgtgaggaccgggctcgagagccgcacctccgccgacctgctcaccctcactgctaccgctgccacatgtttgaggggagccgcggcgctgaagcaaaggacagctgacctcaggggaatcagcaccagcagcagcgacgccatggccatgagcgtcagcgccggcatccacaagggcacgactctcgcagtctgcctgccttgtggaagagtgcgggtgaggacggtgtccgtcttcccgcggcgcggcgatggcggcgcggcggtgctgcggctgggaaagaagcgtctgcgcggcgcgttcgccaccttcaacgacttgtcggtggtcacgtcagaggggtcgacggtgcagctgctgttcgagcaccagacgcactgcaaggtctggaaggccgccatcgagggcatgctggccgagcagaagctcaggcgcgggacgacgaactga

SEQ ID NO: 11444 - DNA, 360 bp, Zea mays
  Peptide Sequence Number=SeqID_53223
atggtctacgaagggcccgtgccaccatctgcaaggaaagaagacaggcgtcaagccctcgcaacgtccgactgcaacgcaacggagctcaaccgcctcggggccacctgtcaacgattggacatgctaccgagtgtttggttcacggttttccgtaccaacatttggtgcccattgttcgtgctccgaacaatgacactcacgatggctcctaagaaagtgactaccagggccacctcctctctggatgaggccaccaagacagccctcgccgataagaaaggcaaagtagtcctcgcagagaacacctggcccgctatagctgagaccaacgtggccgactgtcacacccgattttag

SEQ ID NO: 11445 - DNA, 504 bp, Zea mays
  Peptide Sequence Number=SeqID_53224
atgggcagaggcaagagaagcaagggatggcctcgccgcactgacggcaagcgcaagcgtcctccgtgtccaccctcggaggacttcgacgactccatggggctgtccaccgcggcgcgggcatactggcgatccatcgagcgcgccgggctcgatgggtcagatgactcggaggaggcctcctcggaggaggtggaagactcctccgactttgaggagtggagcagcggcgagggcaacgacggcgaggatgacggcagcagcggcagcgacgacgacaagggcagcagcgagggcgacggcgagggcgacgatgacggcgacggcaagggcgacgacaagggtgacggtatgggcgacaacggtgacggtgctaacggcaaaggcgacgacgacagcaagggcgacggcgacggcaagggcgacgacaatggcatgggcgacgacagcggcaatggcgatgacggcgatggcaaggccagcaacataatgctggtggcgtaa

SEQ ID NO: 11446 - DNA, 171 bp, Zea mays
  Peptide Sequence Number=SeqID_53225
atggacgagatggtcccgaagcagaacgcggatccagggcagagagcaatcttgcattggaaggtagtcgtgtgggagaatcggatcagagctgtggataacgttcacaaccccataagccgccttggcccacgtttgctcattccctatgtcggcctgaaagggaaatag

SEQ ID NO: 11447 - DNA, 588 bp, Zea mays
  Peptide Sequence Number=SeqID_53226
atggactacagcttgttgctaggagttcactttcgtgatgatttctcaatgtctaaaataggtgtatctcagtttattggtttgccaaaatccacaggcaaaagaaaatcatttgaaggtggaggcgatgtttgtgagctttgctttacggaatctggatgcaaggacagagatttcattgttgactctcgtgtaaccccctgtgtctgcacttatcaggaaaccactggtccagttaggcaagaacatgcctgcccaggcagagcggagacccaaagttgtactcgagaagattccaagagttcagtcgcagagtgttcatcagagaacattaaagaacaatttgtccagcgggtgactgctccactggcattttacatcatgggatccattggtgaagtcctggggtatgatggtttcaccgatcccgagcgtgccctggaacagtggaaaggatggtcggtttacccgacgcatagttttctgaataattggcgtcgagggaggaggagcactgccgacacgcatgctaatgctgaaaggatgcgagctaaaactgtagagctttgccttttcaaggacttgtaa

SEQ ID NO: 11448 - DNA, 225 bp, Zea mays
  Peptide Sequence Number=SeqID_53227
atgtatggtttacaggtggtgatgaggatgatggttatgattatgactatggtaatgctagtccactacagccaaacgggacattttgttgagtatgttgatgtgtactcacacttgctttacacaccaaaccccccaagttgtccgtgttgcaaccactgctcaggtgaagatgaagtcgtggaggaggacttccaggagttccaagagtacgatgagttctag

SEQ ID NO: 11449 - DNA, 396 bp, Zea mays
  Peptide Sequence Number=SeqID_53228
atgggcagagacaagagagccaagggatggcctcgccgcgctgacggcaagcacaagcgtcctctgagtccaccctcggagtacttcgatgacttggagtactcggaggagcgcgccgggctcggtgggttggacgactcggaggaggcctccttggaggaggtggaagactcctctgactccgaggagtggagcggcgacagcgagggtgacggcagtgaggacgacggcagcggcggcgacgaagacggcaagggcgacagcgagggcgacggcgagggcaacggagatgacaaaggtgatggcgacgacgacggtgacggcaagggcgacagtggtgacggcaacaacgattgcggcgacggcaaagccagcgtcataatgttgctggcgtaa

SEQ ID NO: 11450 - DNA, 477 bp, Zea mays
  Peptide Sequence Number=SeqID_53229
atgggcaagagtaacaaacgcaagcgcgagccgactcctccatcggaggacttcggcgactcgaaatactcggaggaggagttctcctccgagtccgaggggtctccggctcccgtctctccactggcgtcgtttgatgattcagatgactctcaggggattgtcgcggaggtctggacttatatccgggccgtcgagcgcaccaggctcgagggctcggatgagtcggagtactcctcggacgaggaggactcttcggactcgtccgaggaggactcttcggactcgtccgaggagggcggcggcggtgatggcggagacgacgacgacgacggaggcgacggtgatgacggcgacgacagcggcggtggcggtgacggcggcagcaacggtggcagcaagggcgacaacggcggcagcagcaggggcagcaacggcagcggcagcagcaagggcagcaacaaggccagtggctag

SEQ ID NO: 11451 - DNA, 603 bp, Zea mays
  Peptide Sequence Number=SeqID_53230
atgggcgccagcggtgatggctcaccggagacacgcgacccggcatcatgcaagggctcaggcagaggaaagaggagacgatgggataacctaaggagcggtagattaccggaggcaaagcaacaacgaggccgaccatggagcgaagcaacactggtagaagacctcaactccaggaaggaattcagggcgacccgatcacccgcagcctccaatttggcttcaacgactccaggcagtgccccccaacgccacaacgcagctgaatcgacagcgaatcgaggaagagcttgtgtcgatgtctccctccctcacagcggcgtttatccctcggtttgtggagtcacaggggtcttcaccattgggcgcaagcaggtcagggagggggagatgtcctccattttagggcgcggcaagatgacggctcgcccagctggcgtcgagtggatgccgcggcggtggttgcaaccacccgcccgagaaaatctccacagcgcccgcggaaatttcgctcagatccgcgcgcaagtgaggcgaggtccgccaaactcggccaggttcggtacgagcgcggggaagtgggggagttcgctcctatgctga

SEQ ID NO: 11452 - DNA, 249 bp, Zea mays
  Peptide Sequence Number=SeqID_53231
atgcctatacattccattggcaggcagtacgcccatgctgccgcatgcactgcactcatcataactcgcgcgtaccgaggaagcagcggtgacatatcaatattgtatgcactacggacattatggcgctcagagatcaccctgcgttacagacgtccagggcgtcgagagctgcgcctggggcgctgtctgcagccagggaatttctgcaccaccctcctagctccacggcctcgccatgggccatga

SEQ ID NO: 11453 - DNA, 183 bp, Zea mays
  Peptide Sequence Number=SeqID_53232
atggagaggagcagcgccacccgcagccgtctgtttttctcccggactgatcccctccgtctgatcctgatcgcatggcccggactgcgggtatcgcttcgcgcgcacacgccctgtgcccttggcccgcctgtcagcgcccaagtcctctggcgctgggcccgctcggtcacaataaaataa

SEQ ID NO: 11454 - DNA, 687 bp, Zea mays
  Peptide Sequence Number=SeqID_53233
atgtggaagctcctccgaagccgaggtcgagtctgtcttccgtggccgaggtcgagtccgagcccctgggtcgggcgaggcggagttcgtcgtcttctagggctgagcccaagtccgagccctaggtcgggcggagcggagttcgtcgtcttctggggccgagcccaagtccgagccctgggtcgggcggagcggagttcgtcgtcttctggggccgagcccaagtccgagccctgggtcgggcggagcagagttcgccgtcttccgggacttagctcgagtccgagccctgggtcgggcggagcagagttcgccgtcttccgggacttagcccgagtccgagccctgggtcgggcggagccgagttcgccgtcttccggggctgagcccgagtccaagccctgggtcgggcggagcggagttcgccgtctttcgggacttagcccgagtccgagccctgggtcgggcgaagcgaagcttcctatggtgcctttggcagggcctgactgcctgtcagtctcactctgtcaagtggcaccgcagtcggagtggtgcaggcggcgctgtccttctgtcaggtcgctttatgttgatgggggctaccagctgagaattaggaaccttgagggtacccctaattatggtccccgacagacatactctagatacgggataccaataatatag

SEQ ID NO: 11455 - DNA, 705 bp, Zea mays
  Peptide Sequence Number=SeqID_53234
atgggtgttggtgtgtcgtcgcggtgctgcccagtgccggccattggtggtccatccccactgaacaagtaccgaatccacaacgtcaccgaactagtgaagagcgaacgaccaggcaaccaacaggcatcaattctgcaaagtgttgaagaagaacaaatagagaaagagaaagtgctgcctagtactggccattggcggtccttccccactagacaattgctgagtccccgcgtcaccgaaccagtgaagagcgaaggagtaggcaaccagcaggcatcagttctgcagagtgttgaagaagaacaaatagagaaagagaaaggtgtgatgccccggcctatgggcgttggtgtgacgttgcggcgctgcccagtgccgccaattggcggtccatccccactggtcaattatcgagtccctagcgtcactgaaccagtgaagagcaaacgaccaggcaaccagaaggcatcaattccgcagaatgttgaagaagaacaaaacgagaaagagaaatgtatgaagccccgacctatgggcgttggtgtgctgtcgcggcgctgccccgtgctggcctttggcagtccatcctcactggccaattgccgagtccccagcgtcaccgaaccagtgaagagcgaacgaccaggcaaccagcagacatcagttctacggagtgttgaagaagaacaagtagagaaatag

SEQ ID NO: 11456 - DNA, 566 bp, Zea mays
  Peptide Sequence Number=SeqID_53235
cccggagaagcccctgttgcgccggtgggtactgcgggcgccgtcgagaggatctacgtggttagggttgcagtccccaagtgcgatgagatccagaacgccatctccgacggtgaggctgagctagcgcccgtgccggtgttcgtgtttttggattttgtggatctgatgatgctcgtagaccttgtgcaccgggtccggaacgatgtcggcgggaggacctcccctgcccccacgagatttgtatctgtacctgactacgatgaggagtacaatgactgtgatgatgatgactatgatggaaccgaatatggcatcaaccatcctgttaatatggggaaagacataatggaaagatatgccatgaacaaggtcatcagaaatgtagtatacatttacaggaagaagggcgagcccatcaagctcgtcttcaccggcaagaagaagggaatcactcccgtcgcctccttcagcgccctcgacaaggagggcgaggaccccactccgtctgccgcagccgagccgaagcccagcaacgatccagccgaggacgacataagcacttt

SEQ ID NO: 11457 - DNA, 1894 bp, Zea mays
  Peptide Sequence Number=SeqID_53236
gaaaatgggtttgtcaatctcatatccaccagatgactatttgcctgaggatgatgatgatgatgatgatgatggtattgacaggctgtttgtgcggtctctaagctttgataatctcaacacacatgatacccttgaatcaccaacagcattgctcgatgcactgacctccaagaggctcatggtgagaggctctttaagattcgaaagaagggagggtgatccatttcaagttgaaacaacgttatcaatggtgagtcctaaacctgcaaagaagagttacaactacaagcctatagtcctgccaagatataagtccacagagaacctaccaccagattctccggtaattgggatggtcagcccagtgcaccaggctgcagcaataagagtgcagaaggtgtacaagagcttcagaacaaggcggcagcttggtgattgtgctgttcttgttgaacaacgctggtggaaactacttgattttgcattgctcaagcgcaattcagtgtcatttttcgatgtacaaaagcctgagtcggccctctcgaggtggtctcgtgccagaatgagagctgccaaggtaggaaaaggtctttccaaggatgaaatggctcagaagctcgcactgcaacactggcttgaagcaattgatcctcgacatcggtatggtcacaacctccactactactaccaatactggctacactgtgaaggaaaggaggttaatattgatgagcactgtccaagatggaagctgctgcagcaatgcatcaggtaccttggcccgaaagaaagggagtcctatgaggtcgtggttgaggatggaaagtttatgtacaaactgagccagaaaatcgtcgacacatctgaaggccccagggatgcaaaatggatcttcgtgctgagcacaacgagagctctatacatcggtacgaagagcaagggcacatttcagcactccagcttcctcgccggtggagccacatctgctgctggcagactgattgtagaggatggaattctaaaggctgtctggccacatagtgggcactaccgccccacggaggcaaactttcgtgagttcatgaactatctgaagaacaggaacgtggatcttacaaatgtcaagctgagcctgtcagaaggtgaggaggacgagtggttcaggcacagggccagtagcctctcccagcttaacaacacggagagcagccaccccacgagtgcagaagactccaagtcccactcccaccccgctggcgctgctgacaaaggcaatgacactacaccaggcacgccaccatccacgagccatgataaaacaacgaccagcgcagcgacatcaggcacgccggccatgaagaggtcctcgtcgggcagcaagctgcagcgcaagaggcctccacggctggcagtgagcaagagccggctgggcaagggcagcggggagcagggcgcgggcgcgttcggggactgcctaaacttctgcaaggagaacctgttccggggcggcgagggcgacggcgagggcggctgcgagggcgaggagatggtggtggtgccgcaggagaagatcctgcaccgcatcaactccaagatgagcctgcactcttaccagctcgggaaccagctctcgttccgctggaccaccggcgccgggcccaggatcgggtgcgtccgggactacccgccggagctgcagttccggtcgatggagcaggtcagcctgtcgccgcgcggtggcgccgagcaccctaggttcggcggcacgcctccccgccagagcccgtgcgcaccgctggtgccatcaacgcccggaggccccgtgtcgccgctgtacggtcacggtggggcggggacaccttcgccgcggctgcaacacggtgctgcctag

SEQ ID NO: 11458 - DNA, 492 bp, Zea mays
  Peptide Sequence Number=SeqID_53237
atggccgacgatcagggatgcacacggacggggaaggggacgcgccaccgggctcgacatggaatgcacgcagatatggggaggaaagagagcaagaacgaggagctcaccccggcgaccaacctcggctacgatggtgaggcacggcgagcacggacgacgagctcagatggatggcacgacgatggcaacgacgacacgccaggtggctctgcaaagcggctctggcaaggcgcgcagcacggcaggacgaaggtcagcagcgcacaggctatcccagtcactgcttatcaaaggccagcgcgcggtagggcaccggaccactgcgcggcaaggcctaacgtcgaggagttggtaggctcgattgcatgccggagcacggtccaagcagatgaggcggcgcgcgatggagcagagccgccgggctggccgcgccacaccggggatcgaatgccgaggccaacgacctccatggctgcgcgccagggatga

SEQ ID NO: 11459 - DNA, 480 bp, Zea mays
  Peptide Sequence Number=SeqID_53238
atgtgggaccgaaatgcaagaaaggtttatgcattcgggggctcaagctggatcattgatagcggatgcacaaaccacatgatgggggagaagaagatgttcacctcctacgtcaaaaataaggattccaatgacacgattatctttggagatgggaatcaaggcaagctatgtcacatgagatataattgtttatttacaaatgttgatgtaactgtgtttataagaagtgatggttcattagcatttaaaggtgtatctaacgacaagctttatttagtagattttactaaagaaaatgtcgatctagatgcatgtttacttgctaagactaacatggcctggctttggcatcgccatctagcacaagttgggatgaagaacattcataagcttctaaagggagaacttgtgttagaactaaccgatgtctgtattgagaaagacagaccttgtgcaacatgtcaagcagggaaatag

SEQ ID NO: 11460 - DNA, 1386 bp, Zea mays
  Peptide Sequence Number=SeqID_53239
atggagattgaagacgatgatgctggcagaacggcgaccgcatggtctggctcacgtgagaggcctgctggaatggatagggatcagatgcaacaagctgcagaggattacgcggatgcaactgtcattgttcgaggctctgagacgattgcttcgaccagtgatgagtttgtttgcgccaccattgattggtggcctccagagaagtgtaactacgaccagtgtccatgggaaagggcttctgtcttaaatctggacttgactaatcctttgctggctaaagctatccaagttgttacattcggtctcaacgcgcttcgaggaagacagcagacaagaaaaggtgtctggggtggtccctggaattctagcaatgctcgagaattcattgaatataccgttttaaagaactatcctatcgattcttgggaatttggtaatgcgatttttatagaattctcatttgatgctcttggagttgggaatatatcgtatacatgtaattctcatgtaagatgctgtgttcgtgtcatagggaatgaattgagcggaagtggagttggtgcgagtgtgtcagctgaacaatatggaaaagatctagttgaactccaaaccatcatcagcgagctatacggagattccaacaaaccactggttgtagccccaggaggattttatgaccagaaatggtttgctcagctcctcgatgtctccgggccaaatgttctcaacgcaatgactcatcatatttacaatcttggtgctgaagtctccaactcaccatacagcgccatggaccatggtctgctccatgggttggtgaatctggtggtgcatataacagtggcagccggctcgtatcttgatcagctgggtcagtcagcaaagtatgacaccaaggtctactgcagacagacgctgattggtggcaattacggccttcttgacaccgagactttcgtaccaaacccggattactacaggcaagcctatggtggcgtcactcttctcttgctgaacctgcaccgaacgatgggcttcatggtctcagtcaggaacgacctaaatgtcaacctcgcagaagggcaagggatcaggagggacagtgcctttgtccatggcctgaagaggacggtttcttgggtcgggagcaaagcctccgatgggttttccaagagggaagagtaccatctctcgtcgaaagatgggaacccttttgcccggaccatgctgctgaatggagcccctcttgagctcactgaagatggtggcatcccttcattgtatccagtggaagtttcagttaactcgccaatctatgttgctcctctgaccattgcgtttgtcgtcttccctgactttgaggctgaagcttgtggccgatga

SEQ ID NO: 11461 - DNA, 1392 bp, Zea mays
  Peptide Sequence Number=SeqID_53240
atgcagatccggctgtcgccgagcatgaggagcatcaccatctccactagccatggcctgctagacttgatgaggctcaaggtcgccgcgcgacacttttcctaccgcaccgtcttccacaccgtcctcatcctcgccttcctcctgcccttcgtcttcatactcaccgccatcatgacgctagagggcttcaacaagtgctcctcactaggaagacgtttaggtccgcgccttcttggtaggggaaacgatggttccatgaggcttgtgagggatttatatgtgatgcttgataaagtaaattctgaggaagcacctcttgacttgaaggttccagaaacttttgatgaatttatctgggacatgaagaataatgattatgatttaaggtcatttgcttttaagctgaaggctacgatggagagcatggataaggaattgaggtcatcaaggctatcagagcagttgaacaagcactatgctgcaattgctattcctaaaggcctttattgcctttcattgcgtttaactgatgaatactcctcaaatgcccttgcaaggaaacaattaccgcccccagagttggtgccttgtctttcagacaactcctatttccattttgtgttagcatcagataacatccttgcagcctcagttgtggtcagatcaacaattagatcatcactgaagcctgagaggattgttttccatgttattactgataaaaagacctatcctgccatgcattcatggtttgctttaaattctctcagtcctgctattgttgaggtgaaaggtgttcatcaatttgattggttaacacaagaaaatgttcctgtacttgaatcaatagaaactcagcgcgctgccagagatcgttaccatggaagtcgccgcccaataaccagtgctaatgatagcccaagggtttttgctgccaagcttcaggcaggaagtccaacatatactaatgtgctcaatcatattcgaatatacatgcctgagttgttcccaagcctcaacaaagtcgtatttcttgatgatgatgttgttgtccagcatgacctatcaccactttgggatattgatctatctgggaagaacctgaagtcaaacttcacactttggaggctgggaacattaccaccaggccttatagcatttaaaggccatgttcacccaattgatccatcatggcatctgttaggtttggggtatcaggaaaagacagatatcagtagtgttgaacaagcagcagttatacattataacgggcaaagtaaaccatggctggagattggttttaaacatcttcagccattttggacaaaatatgtgaactactcaaatgaattcttaagaaactgccatataatggagccacagttgtag

SEQ ID NO: 11462 - DNA, 705 bp, Zea mays
  Peptide Sequence Number=SeqID_53241
atgttagggcaccatggatttccttatagggatgtcacagttcgtgtggagagtgcctggagctcaattaacctctatgatttactaatagtcatgttcgatgtcaataggcatcttaatctgccagattcacgagttataaagttaattaaacgtttgggtacggaggtgaacccaaaccagaggcgtatattgtgcatgaataaggttgacttggtggaagacaagaaggacctacttaaagttgcaaaagaatttgaagatcttcctggatatgaaaggtacttcatggtatctgggctaaaaggcaagggagtgaaagaccttgtacagtatttgatggagcagaactacagtgccattgtcatatgtagcatgcattcatcctacaaggctacactattctttactaaggaagcagtaagaagaccttgggatgaggagccaactgtaatgactgaagaggaaatcccctatgtaattgagcatcgtctgatgggctggaaggagctaaaagatggttctcttagggtggagcagcacttcattgcacctaagcaaagccagcgtcagattcttgttggtaaaaatggttctaagatagggagaatcggtattgaagctaatgaagagctaaggtccatattcaagagagatgtccatctaattctccaagttagagttgcgaaaaagagaagtgcctga

SEQ ID NO: 11463 - DNA, 2562 bp, Zea mays
  Peptide Sequence Number=SeqID_53242
gctgtaaccaaggacgattcaggcatgcggacgcttcccaatgggagtttgagtgaagatatgccttctagaacacggagtgggctggtcaggagaagccctactgttaagactgtaagcaaggacaaaagggctgttgagggtttgcctgatggatggcgaaaagaatacaggccaaggaagaatggttcatttctggatgtgtactacattgatccagtcagtggatatgaatttcgctcttttaaggatgtgcaccgttatcttgaaactggagatattagacagtgcgccgtgagaccaaagaagagtaccatctgcgaagttcatataatagaaagtcaaactcatgcaagtgcatcaccacaacacacgaggcctggtactgcggataagggtattcagtgtgaaatattaacttcggatggtatcatggtaccattgggggaactgattgctccatataatggaaatgatactgaacatactgtgttaccagagcctgagaacttgaaagcaattcaagggtctgacaacaagcttgagacttcggaacacgtgagtgttcaaccggtttctgcacgtaatggttcaaggcaaaccaaatctgttaaaaggaaagaacgaaatgcagaggtcaaatccaagaagcgcaaaaccagttctgctgtgactgctgttcgagcgtcgccccgcttagctgcattgaaggttcagcttgaagtgagcatcaaacatgaagatgccatggttagcataaatcatgtggaccaggtacagactatagaagagagcgccattgatcaggcacacaaaagccaatcgggctctgttgatgagatacatggtaatctggaaagcactttcagtcagttacagttgagccaagcagacactgctaatggaatgcaggctatgcaggaaaacactaccattcattcacaaccaagccaattggatactctgaatcctacacacagaagccaggagaatagtggcaatcagttacaatcggtgctcacagattcttcgattccaaaacgaaccacacaggaatgcactatagacgagccaagccagccaggcataaatcatatacacacagatcaggagttcactgggaatcaatttcggtcgaacctaccagatgacactgttatttcattaagggatattgaagaatgcacagcccactcaaagccaagcaataccgacagtactggacaaattcaggccaatgaggaaaacactgccaatcaagtacagtcgagcctaacagacacagttattccagtaccggttattcaggaatatgctactggttattcacagctgagcaaagctaacacctcaaataaaaaacaggccaatcaggaatacatagctgatcaagtacaatcgagcctaacagacactgtcattccagtacaagttattaaggaatacacaactggttatccacatattaataaagctgacatttcaaatcaaatgcaggccaatcaagaaaacactgatgatcacttatatttaagtcaagtaggctgtgtcactcaaatgcagataattgaggaaaatttgcccaagcaacctcagctgagccaatcaggcactgggggtagaatacaaattgatctggaaagcactaccaatcacttgctaccaaactatgatgaaaattctatgttgcaatgtggtttatcttgggctcctgaacagaacagcggagcccttagtacagatttctggaaaaatgttgaaactcaggcttcatcggtttccatgccaataaatggagcacctgttgcaagctttccagcaaatgttagattccacaatgcagcagcagcagcagaacctgctttaccgccacaggttgctccagctgaagcaggttctgatcagtcggggttggcctttcaatctgttttcggaaacatctggtcggatccttgcatcgagtttgcttttaagacccttacaggtgacattcctgttctggacgacacaacggctgtcacagactactttccggagcaacaagacttgaataaaggcccagcaccaaaccgtgcaggttctgttgataattccagaaaccacacacaagtcgatggctcggactcgggctcagccccggaagacgacgaactccgcctcgcccgacccagggctcggactcgggctcagccccggaagacgacgaactccgcctcgcccgacctcgggctcagccccggaagacgacgaactccgcctcgcccgacccagggctcagactcgggctcagccccggaagacgacgaactccgcttcgcccgaccccagggctcggactcagccctggcctcagccgacagtctccgcctcgcccgacccaggggctcggactcgacctcggccttggaagacagacttgacctcgacctcggaggagcctccacctcgcccaacccagggctcggaccgaccacgtcacaggaggcgccatcattaccctaccccaagctgactcaggctacggggaacaagaccggcgtcccatctggctcgctccggtaa

SEQ ID NO: 11464 - DNA, 594 bp, Zea mays
  Peptide Sequence Number=SeqID_53243
atggccatgatgggttcaacatctgaaaagagtacctctgccagggtgaggctgatagccgccaagactggcctcaggcaccataggaatctccgcctcgccggaccccagggctcggactcaacctcgactctggaagacggtctccgcctcgcccgacccccggggctcggactcagcctcgacctcggaagacggactccgcctcgcccgaccccatggctcggactcagcctcaactctggaaggcggtctccgcctcgcccgaccctagggctcggactcagcctcgacctcggaagacggactccgcctcgcccgacccctgggctcggactcagcctcgactccggaaggcggtctccgcctcgcccgaccctagggctcggactcaacctcgacctcggacgacggtcttcgcctcgcccgacccccggggctcggactcaacctcgacctcggacaacggtctctgcctcgcccaacccctgggcccagactcagcctcgacctcggaggagcctccgccttgcccgacctcaggctcggatcgaccacatcacagggggccatcattaccctacccctagctag

SEQ ID NO: 11465 - DNA, 291 bp, Zea mays
  Peptide Sequence Number=SeqID_53244
atgacgacgacgacgaagacggtggcggcggtgacggtgacggcagcggcaggggcggcggcagcggcagcaaagacggtgacggtggcggcagcaggggcggcagcggcggtggcggcagcagcagaggcagcaccaggggtggcagcggtggcggcagcaacagggccagtggctagatgccactggaatgatgttggtttctccttgatgattgccctgctcatttgtgaagctgattcctttgaaacagtaactgccgagtcactgaacacgatgtcggagttttag

SEQ ID NO: 11466 - DNA, 768 bp, Zea mays
  Peptide Sequence Number=SeqID_53245
atggcgcccccagcccccgctcctctctgccgctcctatggtgccccgaccaactccctgctccagtttcccctgcgtcggcctcctgcgcgcaaagttcctctctggccgcgcgcacaaatccctgctcgccagcgtgctctggattcagccatggagcgtcccctgcgtctcctcgtcgtgatcttccttctccaaccgtgcccctgcacaagccctgatgcttctcctctatttcagtcatgtgcacgcgctctgtttggattcctgttggtgcgcgctgctcccacagcgcgccggttccctaccccgtggtactcgccggtgattcctctcgtgctcccagcgccgtggcccttccctagttactccctgcgcgtctgctccgctcatccatggccgaccgtcgtgtgcgctgctgcttcttccctgtgtttggtcctggctcgatcgcgctttggtgctagcgccgtggtctgcagcttgtctgctccagctccagctcgctgcgcgccgagctcagcgtcctttgttttccccatggcgcgtcctgctctgttgctgcccgccggagtttgccgatggactgtgtcattcctgcgcgccgtggtcgtgtgcaactcgcgcacagctcgcggagcttttcctcgtcggccccagctcgatttgtcttcagctttctgcgcgcgcgaatccgccgtcgcgtcttgctccgtgccgctcgccgagctcgccctgcgctcggattccaccttcctatgcgcgtag

SEQ ID NO: 11467 - DNA, 390 bp, Zea mays
  Peptide Sequence Number=SeqID_53246
atgtcgcttccctacgctgcgctgcccagacatctctctggtgccgacatgtgggcccacgacaccagtcgcacacccacatggatcgcgcccgaccccgcacgtcagctctgcgctcctgtcttggctcgcctggggtcgctgccggtgggtccgccagaacccttgggcggatcatgtgggactctccgggaggctctgcgtgtgctcggagttttgctaggagagggccgccaccgaggattcacatccgtggtgagatccaagtcccatcggagtagtatccgcggcggaattcaccaaccgtcatctgcgtgtgatcgacgctggtgcatggagttggaggacgtcgggcgtatcgcggcgaatcgctcggcggccagtgattag

SEQ ID NO: 11468 - DNA, 321 bp, Zea mays
  Peptide Sequence Number=SeqID_53247
atggcctatctggtgggtcttgtggatgcgttctttgtctgcgcaatgcgaggtggaagtcgtcgagcgaaggtggcatgttcgccttcgtcccaacagcccctaaaactcaagctgattaagataatcaggttgaggatcaagcaaattattcctatgagtggtcttggtgaggcagcccccgagccagtaagcagcaagtcagagagcgtgggcgatggcctagtccccgatccgacgaagcagcgagtcagcgggccacatggcggtgcagcccctgagccgggaagcagcgagtcggtgaggcgagtgatggcctag

SEQ ID NO: 11469 - DNA, 567 bp, Zea mays
  Peptide Sequence Number=SeqID_53248
atggcgcttcctgtcgacgtggtcggtccacgccctaagttgggcgatgtggaggctcctccgaggtcgaggtcgagtctgtcttccgtggccgtggtcgagtccgagcccttgggtcgggcgaggcggagaccgtcggttgaggccagggctgagtccgagccctggggtcgggcgaagcggtgttcgtcgtcttccggggttgagcccaagtccgagccctgggtcgggcggtgcggagttcgccgtcttccggggcttagccccaagtccgagccctggggtcgggcggagcggagttcgccgtcttccgggggcttagccccgagtccgagtcctgggtcgggcggagcggagtttgccgtctttcggggcttagcccaagtccgagccctggggtcgggcggagcggagtttccaatggtgcctgaggccgggcctgactacctgtcagcctcactctgtctagtggcactgcagctggtgcggcgcaggcggcgctgtccctctgtcaggtggtcagtggagcggcgaagtgactgcggtcacttcggctctgtcgactga

SEQ ID NO: 11470 - DNA, 180 bp, Zea mays
  Peptide Sequence Number=SeqID_53249
atggacgactgcgtccccctacacttgctcctgaggtctcggtcatccgtcaacctgcaggacgcgacgtcggcggtgagcagcgcccgcgacctggccaagccagagaacccattcaacaagcgcgcggcaggaatggaccagaaatcattccagctgatcaaaacttatataaattag

SEQ ID NO: 11471 - DNA, 399 bp, Zea mays
  Peptide Sequence Number=SeqID_53250
atgggggcagcaccgccgccaggagaattcaccgaggagattagatgggcagccggggacgctattgcacaggggttaccatgctcgcgtgactgctgcatgcgcggggccgtacctacgcagtggaaaacgcgatggagcagttcgagcatggagtctgcacgcaccaaggatcaactctgctaccgtcagaaaatacaagtacgtgctcctaggttacttgctaactcgtacgcattgagtagatgcctccagtatggagaacggggaaccagggtgtcgaggcatttgctctaccattgcgggcactgtggaggactccctcgccgcgcgagccgcgaggccctctctgtgattctgcactctctctctgctcgattcaacggacacatcgcgtga

SEQ ID NO: 11472 - DNA, 249 bp, Zea mays
  Peptide Sequence Number=SeqID_53251
atgggggtggaggatcccacagcgatcttcaccaccggtctcactatcctcgtcaggtccagggccgtcgatcagcgattcgctggtccacatttcataccgcttcgggacaatctcggtctaatcctagcacttggggcgcgatccaacggctgtgatcagcccgtaccccttcggtcgggtctttttgctaaagagccctcggggttttgtggaatcaacccgccgtccatctgtaggttaatttga

SEQ ID NO: 11473 - DNA, 264 bp, Zea mays
  Peptide Sequence Number=SeqID_53252
atggagaacgtggtggccgcaatggaggcggtcgccgcttgcgtaccgaggaagtggcggaatgtgcgggcactgcacgtcaagtccctcgaatcaaccgcgttgtcgctctactctgctcccggcaccgacggggaggacaattatggagacgacgacctagaggctgcgaagtcggagggcacaccgactaaggaggagcaggggagaatgaagaggaggaagaaggatatattagaagtggttttgagctacatgccctaa

SEQ ID NO: 11474 - DNA, 561 bp, Zea mays
  Peptide Sequence Number=SeqID_53253
atgcagagaatgcgctgctcttacgcccaggctacggaccgtccggctcagtgccgtgggctaacatcggacgccccaccgcactatacaccgggtccatgcagccttcagatcgtccacctcctgctccgatcggggaggcggagcgtcgctgcggcgcctactgagagtctgagaccgacccccgacctagccgcggtaaataaatacccgacttcgccggcgtccgcgagcttcgagaatacatccttccccgcgttttaccctaacaacctaactagctgcggttctccactatcactcgctgctactgcacctacttcctttccgctctggtactgttgctggcttgctgctgctcttggtggtggtggtggtggcaccgaaaccctagcccttgccctcatgtcgcagcaggaggctgtggacccgccttcggcgacggacgagcggctgggaggtctaccgcggagcggctccaccagccgcctcaacgcgcaggcgccggagttcgtgccgcgcgctgccgcggttccccctccccctccgcagcagaaggtg

SEQ ID NO: 11475 - DNA, 321 bp, Zea mays
  Peptide Sequence Number=SeqID_53254
atggagcacgagcgcgtccgcgcgctgcgcgagatcaagaaccagatcatcggaaaccggaccaagaagctgctctacctccgcctgggcgctgtgtccgcagtcgtgtcggcgttggcggatcccggagcctcgccggctgcgctcgtgcaggcggcggccgcggcggggatctttgcgtgcggcgtcgaagactgcgcgcgcccgtgctggccgcccggcgctgtggggcacctcactcggctcctcgctcaccccgacgagaaggtagtggagatgccatatgagtcataccattgtattccatcatatgtctgttaa

SEQ ID NO: 11476 - DNA, 252 bp, Zea mays
  Peptide Sequence Number=SeqID_53255
atgaaacattattcccttcaggataatgagccttggacgaagcacttgcgaggctttgatgtgtttggaagtgttgctctagtgtataagagtgaaatcccagctcttgtttttcaaagtacagaatggggtgtatttatagcctccaagtccctaaatagccatttgggcgaagtgggaaaaactgcacagtttctgggcgcaccggaccttgaacaacgatggtctggtggtgcaccggacctctactag

SEQ ID NO: 11477 - DNA, 312 bp, Zea mays
  Peptide Sequence Number=SeqID_53256
atgacgaaggatgaaatttacctgggcaatctcaccttcagtcgcgttgtgtatatcccgaaggggaagacccaacatgaccacaatcaagttatgaagaaggaggatgagaccctgcacaactatgtcaagcattggtatgacatgaaggccgacatctcgagcatgcctgaggcaatgaccaaggtgttcaagaaaacgctcaggcatgatgttactcttgaaaagtacaaggaaaggcttctggccaagggttatatgcagaaaaagatgggcgataagacaatgtttctaaatagagagttaaagtag

SEQ ID NO: 11478 - DNA, 354 bp, Zea mays
  Peptide Sequence Number=SeqID_53257
atggggccagtaggaggcttcggaaaacctgctgcaccggaccgcctgtacgactggacaatctatgttcccctcaatgggaactttcacttatatccacacctagggcaacaaggccacgtgtcagcagatctaacaccgtttgtgctccgaaaaccaacacctgcgatggctcccaaaaaagtgaacatcagagcaagcttctccatggatggggccatgaaggcggccctcgtcgagaagaaaggcaaagcagccctcgcagatgacaccctacctaccatatctaaaaacaatgagacaagggcagtcaacaacaagaaccctcatactgatgacccaccctacccataa

SEQ ID NO: 11479 - DNA, 405 bp, Zea mays
  Peptide Sequence Number=SeqID_53258
atggcgagaggagatgcgaggtgcgggttgggaaagaaaccgacggcaccgttactttacaaaattaacttccgagagcttcgggtcagcccgtcggaagttaacagggcggggcccagtccgcagccgttatcaccgtcccaggggccagaatatcacaataacttggagacaatggatcaaactgagtaccaaagcaagaagaacttcaaggaaccaagggcacgggagaaagtcaagaagaccgaggtacttaaagctaggggtgaagaagatggcttgcaagaagtcaagggtgttggagctcaaggatgccttatgagatcaaattatattaacttgatgctttggattccaaccccgactcaaacaggccaagaggagaaaaacattgaaaaatgttaa

SEQ ID NO: 11480 - DNA, 108 bp, Zea mays
  Peptide Sequence Number=SeqID_53259
atgtattaccttcgggatatacacaacgcgactgaaggtgagattgcccaggtcggcatcacagcagaccagaataatacgaaggtcggtacagcgccgaaggtgtaa

SEQ ID NO: 11481 - DNA, 267 bp, Zea mays
  Peptide Sequence Number=SeqID_53260
atgggggagagaaacagacgcaataaaggtccattaacgcggggagaagaacggacgattgcggcggcttcggtccttggcgcggggcagacgcgcgggtgcagggaagtcaggtctggcgtgggtggcgcggtcaacgtcgggtcttggtcgctgggcgtcatgcctgggcacggtgcgcagggcgctgtcctcggcgtggggctgctcggcatagcaggggcacagggtcaggcttcggtcgcggctggagcgtcctggagctag

SEQ ID NO: 11482 - DNA, 399 bp, Zea mays
  Peptide Sequence Number=SeqID_53261
atggtcaaccgcgggcgaatcaagacgaccacggcggtggccacttccgtcgcgctgtcccatggcgggatgagcacgggcccgcacagacggcggcgtgctgaccagcggcgccctggcgtccagtcttatagccctgaggcagtccggatccaggggcacgacgttgaggacaatggcgcaccacggacggatggacgaaggggaggtcgattttataccgaggtagagtccgcgttcaaggagtccatggccgagaatcttgccgacgccgttgcccgagatccctggcggcaccaccggatttggtctgttgcagtggcgcaaatcacgcgagtttgttttcgagggaagaagatcgatctggcgagagagggccacggtacagcgagagggtag

SEQ ID NO: 11483 - DNA, 208 bp, Zea mays
  Peptide Sequence Number=SeqID_53262
atggggacccctctggcggattctttgccaagtgctgttaggcagacactcggcaaagctccggcgagctccatgggcttcgacgacggtgtggcgaactctggcgacggtggtagtggctctaacggcgaggataggaagtcaggtctggcgtgggtggcgcggtcggcgtcgggtcttgggtcgctgggcgtcatgcctgggtgcg

SEQ ID NO: 11484 - DNA, 2613 bp, Zea mays
  Peptide Sequence Number=SeqID_53263
atggggagcgaaccagatggttcttttcaaaatcagaaaaataacctttttctgtatgtgttgtttcccagaaatggtgggtggtgtatgcacgatgaagctgccgtgcattacattgacatgattgatcagaccacgcttggtcaccggatgatcaagaaacagttcaataagactccaagagctggctggcaaattgatccttttggtcactctgcagtgcaagcttatttgcttggagcagagcttggttttgattctgtacatttcgcaagaattgattaccaagatagggcaacacggaaagcagacaaaggcctagaggttatatggcgtggctcaagaactttcggctcatcttcacagatcttcacgaatgcctttcctgtccattatagcccaccagatggctttggcttcgaagttttggatgaaaatatcatacctgttcaggatgacctgtcactttttgactacaatgtccaagaacgtgtagatgattttgttgctgcagccttagcacaggcaaatgttacacgtacagaccacataatgtggaccatgggggatgattttaactaccagtacgctgaatcctggttccggaatatggacaaacttatccaacatgtgaacaaggacggcagagtgcatgcgttgtattctactccgtctatctacacagatgctaagcatgcatcgaatgaatcttggccagtaaaatatgacgactatttcccctacgctgattcaacgaatgcatactggactgggtactttacgagccgtccaactttcaagcgatatgttcgagtacacagcggatactacttggctgcacgtcagatagagtttttggtgggcggtaggagctccttgggattgttcacttccagcttggaagatgcgatggggattgcccagcatcacgatgcagtctcaggtactgcgaaacagcacacgactgatgactacgcgaaacggcttgcgctgggagcagcaaaggttgaaaaaggtgtaaacaccgctctggcttgtctgaccagctccaacgggacatgtggatcctctgttgtaaaatttagtcagtgttcacttctcaatataagctactgcccttcgaccgaggaagcaatttcatcaacaaagcgtttagttgtagttgtttacaatcctcttggatgggaacgtagtgacttcataagagttcctgtcaatgatcaaaacctagttgtaaaaggctctgatggaaatattgttgagtcacagctagttgaggttgataatgtgacgagaaatttaagaaagttttatgtgaaggcttatcttggaatcacaacacacaaggcccctaagtattggctactatttcaagcttctgtaccaccaatgggctggaattcctacttcatttcaaaatcaactggagcaggatacaacagtactgagcatgtctcggacgtggtttccccaagtaacagcacgattgaagttggaccaggacatctaaagatgtccttctcaaaagcatctggacaactcaataggatattcaattccatctcaggagtggatttaccagttcaacaaagctttctttggtacagatcaagtgagggtgatgcctcagactcacaggcatctggagcatatatatttcgaccagatggtaatacaccgactacggtttcatcctcggtgccactgaaagttatccgtggaccactggttgacgaagtgcatcagcaattcagctcatggatttatcagataacacgactctacaaaaacaaggagcatgctgaagttgaatacacggtgagaaactacagggaggactggaatcttcaagtaactcaaccagttgcaggaaattactatccggagtgttctgacaggttgactctccaggtgaacctaggagtgtatgtagcagatgaaaaatatgagctatctgtgcttgtggaccgtgctgtcggagcatcaagcattcaggatggtcagctagagattatgctacacaggcgtttacttaaggatgatggcaggggtgtcggagagccacttgacgaggtggtttgcgtggatcaagattgccaagggcttacgtcactgatagctaccgtaatccttccaaaaacaccacaggccaggggcaattactacgtcaatgtcgagaagctagggcatggagctcactggcgacgtacatatggccagcaagtctactcaccctttctccttgctttcactcatgaggatgagaccagctcgaaatcctacagcgtggccaaagctggtatgatgaatgccaactacagccttcctgataatgtcgccattgttactttgcaggctgctgaggacccgagatattccaaggtggcaaaggttgatctgaaaaaggtgttcggaaagagaactatcaaggaattgacggagactagcctctccgcgaaccaaaagaagtcagacatgaagaagctcagctggagggtcattgggaacactgaaactggtcctgccgcagtaaaaggtggcccagttgacagtagggctctagtcgttgaactaggacccatggagatacgcaccttcttgctgaaattttag

SEQ ID NO: 11485 - DNA, 210 bp, Zea mays
  Peptide Sequence Number=SeqID_53264
atgaccattgagcagatgtttctgatggaaactcaagcagtccaagcgattggccagactttagcagcaatgcagcagatgccacaaatgcctatggacaagcgtctggagttcatgagggttcatccccctgtctttgcccattctgctgaccccatggacgctgaagattggcggcgtaccgtggagcgtgacttgcacacctcttag

SEQ ID NO: 11486 - DNA, 408 bp, Zea mays
  Peptide Sequence Number=SeqID_53265
atgtctgttttgagaaagacagaccttgtagcatgccaagaaggtaaacaggtgggaataagtcatccaagcaagaatatgatgacaatatcaagaccctccacaaggatctctttgggtccattgcttatcttagcatcagcggaagataaaactgaaacccaagaaaccctcaagcgcttcttaggacgggctccaaatgagtttgagctaaaagtgaagaagataagaagctataatggatctaagttcaagaaccttcaggtggaagattatattgaggaggaaggcatcaagcatgagttctttgctccctacacgccacaacaaaatggtgtagtggaggggaagaacaggacgctcatcgacatggcaaggacgatgcttggagagtacaagacgtcgtaa

SEQ ID NO: 11487 - DNA, 159 bp, Zea mays
  Peptide Sequence Number=SeqID_53266
atgaacaaggataaaggtccaatgccaatgagtatctccaagatgaaaaccaagaagccaatcggtacccctaccggcagcaagctaatggcatctgcattcaagttgtgcaacctgcaatcgcaagtgctagtgctagtgctagtgaaagtcgcctag

SEQ ID NO: 11488 - DNA, 363 bp, Zea mays
  Peptide Sequence Number=SeqID_53267
atgggtttcccctacaccgacagcgccaccactcaagctgtcttctccgacgacactgactacttctttggtgaggagctcgacaccgaccggaccaaggaattccgctactgcgacagcaaacacgtcggagtcaacatcaacatcctgcccacaggtacgtcgtttgatgcccttcaggtgcagcaacaggagctgctcctcacgacagaaatcaactccaaccacgtcgacctgccgaccgttgtagccatggggtgcatcatcgtcgaggtcatcgacagcaacacagtgtctgtggtggaggcccaactcatgtgtgccctcatcctcaagcgcaacctcctgtcgggccaccactag

SEQ ID NO: 11489 - DNA, 1326 bp, Zea mays
  Peptide Sequence Number=SeqID_53268
atggcgcctccgattgacgtggctggcctgcgccctaggttgggcgatgcggaggctcctccaaagccgaggtcaagtctgtcttccatggccgaggccgagtccgagcccctgggtcgggcgaggcggaggtcgtcggcagaggccagggcggagtccgagccctggggtcgggcgaagcggagttcgtcgtcttctggggctgagcccgagtccgagccctgggtcgggcggagcggagttcgtcgtcttccgggactgagcccgagtccgagacctgggtcgggcggagcggagttcgtcatcttccgggacttagcccgagtccgagccctgggtcgggcggagcggaggcctgactgcctgtcagtctcactctgtcaagtgatgctgcagtcggagtggcgcaggcggcgctgtccttctgtcaggccgctttatgctgatgggggttaccggctgagaattaggagtcttgagggaaggaggatcggagtgatgggagacgcagcagagaccaacaagactcttcacaactggatgggcgagccgaggccgaggtcgagcgaccagcgcgacgaggaggagacgcttcagctcagcctcggcctccccggaggaggagcaagtgcgggtggtggggtagcacccgccgcctggagaatgctgccggccagagacgaggagatgcgctctgctgctgctgtcgtcgacacctccctgctctctctcggctactccgccccagctttctcgccccgctcaccaggcaaggcaaaggggtccccagcagcagctacagagaatgcccttgcatccaccaacaacgcctcccagagaagatctccaaataccccggttattgggtggcctccagttcgtgccttcagaagaaatctggccacctctagcagagcatcccttgaacatcagaatgggaagaaggaagacaaacctgaacagaccacaaaaagagctccatttgtaaagatcaacatggacggcatccctattggtagaaaaatcgatctgagtgccctcggtagttacgatgagctgtctctgtctgtcgacaagctattccgggggcttcttgcagcacaacaagaccctctggctgccggcgcaaaggagtgttcacaggaagaggtggcgatatcgggtttactagatggaactggggagtacactctggtttatgaggattatgaaggcgatagggtgctggttggcgatgtcccctgggggatgtttgtttcttcggtgaagaggctgcgcgttctgaagacatctgacctctcttcatctgtcagtacctctctctaa

SEQ ID NO: 11490 - DNA, 309 bp, Zea mays
  Peptide Sequence Number=SeqID_53269
atggagtttggggggggctgtagaagcgagttggttggagatcagaaacaggctacccaacttgaagatggcactgcgacgggctctaggatggtcggaaggggaggttatgcgaccagagtcaaagccctgctcccggttaatgcggcagactgcgggcatcttctccgtcggtggtggtctggctttctgggtgctctgccgccttcactatggtccaagaatcactgttccaaggagtctcagatgggcgtcatgcggagcagtctctatgagcgcgacatcagcattgcttgtgcggctctttag

SEQ ID NO: 11491 - DNA, 336 bp, Zea mays
  Peptide Sequence Number=SeqID_53270
atggaggtggcaatgcaacaggttctcaaggcgatggcacgcatggagctacgcttgaccgcgacactggctagcagtggtggcgagcaggtcctcgaatccttctcctatgtgaccgcttcctccgccatcgagccacggtacgacgacagagtgttcgactcttcaacggtcacgaagtattacaacgttcccttcgacgatgagttgtaccacgatgagatcgccaaggtgctcgtggtactagagtacaacgggatgatttcgtcgaccacagtcctcgctgactataccaccaccaccaatgtaacaccccaggtgtttgtcttaagataa

SEQ ID NO: 11492 - DNA, 381 bp, Zea mays
  Peptide Sequence Number=SeqID_53271
atggcgggtgtggcggcgcgagcgtggagcaggggagcacaaaggcaaaggggcgcatcgattgggagagaatgcgaaaaggcagcgtgctcagtccacgatacgtgggacgtgcagttactcacacgttaccatatcgagggcaatgactcaccattactcgattgtccaaggttgttggacaaagattgtgggcagtgggacgaggacaagaagagggaggggggaggagcacccgtaggacgaaggaggaggcgtagcaggatgacgacgcttagcagcaggccgctgtcgatgcggcatagaaggacgtcgatgcggcgcagcaggatgacgataatgctcagcaggatgcctcaggttctagcacctcaggtttga

SEQ ID NO: 11493 - DNA, 201 bp, Zea mays
  Peptide Sequence Number=SeqID_53272
atggggtccaggcacagtgcttgctctgccgaggctgagtgccgaggttcttttgttttgcttttgttagtcaccctcctgcggggagagagatacttgatcagagatggttggtttacagatgatgatgaggatggttatgatcatgcttatggtaatggtaaagaagaagtcgtcgaggcggatctccaggagttctag

SEQ ID NO: 11494 - DNA, 291 bp, Zea mays
  Peptide Sequence Number=SeqID_53273
atggctagcgatggcacaaaagagaaggggaaggtgattgaggaggaggagaagatccccaccaatgacacgacaaatggaggagaaaccatcgactcaggatctggcaaaaggaaggaaggcaagaagaagaggatcaagaagatcatctactacaatagcgactctttgtcttcttcgcacaaggacgccgatgactcctcttcaaagaaaaagatgaatttatgtttagaaagaaaaatgacaggatttggtagaccacttaatttgtcgagaagtttatactcatag

SEQ ID NO: 11495 - DNA, 345 bp, Zea mays
  Peptide Sequence Number=SeqID_53274
atggccatgatgggttcaacatcgaaaaagatgtacctctgccaggtgttccctatccctcactggagcttgcgctggcctcagcgcatccgatttccccttcgcttagtcgagattgctcgccgaagtaaccccgacccgtccgaagcaccccctccgccatccactcgcctccagtcccgctctgacggccagaacccagccatcgagctcgccgggtccccctcaccggccttggccagctccggcgacctcagacccccggaggccatgcctgcctcgtcttcggcgactccaccgccacggacgggagcagcgccatccgccgtgccgttaaccccctag

SEQ ID NO: 11496 - DNA, 423 bp, Zea mays
  Peptide Sequence Number=SeqID_53275
atggctccgagcgcgacatcgagggcgggcgagatcagagatgaaggcgtggcgtctgacggcatgtacgacgaggtagagatcgatggaggagctcgacaaccgaacaagcaggaggggacgctggcgcggggacagcaaggacgtgccaacgcgatgagcttggacgacggcgctcgctgcagtctagcgaagaggacaccgacaccaggaaaccaacaatttgggcgaccacgaggtgagcgcgctggggaggttgagcaagaagagagcacagctgttgctggtctccttcctatgcccgaacgcagctcagactcgcggcgacgagcagagatcgtgtcgaggcggacgactgcgagcgcgcaagcacgcggcgcggcgacagttgcgtggctgtggcctgagcggacacgagcgtag

SEQ ID NO: 11497 - DNA, 252 bp, Zea mays
  Peptide Sequence Number=SeqID_53276
atggagcagggggatgcgggtggcgaggggtataaaaagggaaagccaggggcctcggcggctgcggctcggcgcggtgcggttttgagcagttgcgcttgcgcgtgtgcggcgcacgcgcacgtcgggacggacggggagtggagggctggctggaggtactgctgcgcggtctgcggtctgcgggggctgctggctgcgggctgcgggctgccgaccacgggtattgactgcgtgcttcccccgctgtag

SEQ ID NO: 11498 - DNA, 285 bp, Zea mays
  Peptide Sequence Number=SeqID_53277
atggagacggtggagcggtggatgcgagactacgagaagcgacgaggggcttcacttcacggcgtgatctccttcctcccgcttccctaccctctggtcgccctctggtcttctcgattccccctgaatggacctagccaaattggattttcggccggagatcgtcttcgaggactctctcaggctctgtttggcctcttcgatcctgttggctaccttctccaagctgccctgggaggatttgcggtaggctttgaggtttatcagcttttgaaagttgactag

SEQ ID NO: 11499 - DNA, 771 bp, Zea mays
  Peptide Sequence Number=SeqID_53278
atggcgtggcgcggcccgctcggagccggagaggaggccctggacagcggcctcgagctcagcctcggcctcccggcctacttcgcccggccttcagcctcaggtttggacgccgccagggaggagcccgccgaggcctctgcctacgctatccaggccgccagtgggagcaatgtctccaaggcaagggtcaggccagcgggcgcggcgccggtggtggggtggccgccggtgcggtcgttccggaggaacctggccgcctcctcctccaggccgtcgtcggggaaacacacccgccaggagggcagcgccaaggacggcctgttcgtgaagatcaacatggacggcgtgccgatcgggcgcaaggtggacctcacggcgtacggcggctacgccgacctctccgccgccgtcggcaagctcttccgcggcctgcttgccgctcagagggaccgagcggccacggcgggtggcgaggaggaggaggagggggagggccccgtgatcggcggcgactacacgctggtgtacgaggacgacgagggcgacagggtccttgccggcgacgtcccctgggagatgttcgtggccaccgccaagaggctgcgcgtgctcaagagctccgacgtgccggcctcgtcggtgacgctgcttgtaaaaagtcccgagtggaggagacgaggagtggccctatccctggcctcttttttgtgtgttgctcttgctgcctttctgctagtggtactagtattgggtgccagtaaaaagtag

SEQ ID NO: 11500 - DNA, 1068 bp, Zea mays
  Peptide Sequence Number=SeqID_53279
atggcgagcttcttcagggacgcgcgcctcccgcagcagcgcgtcgtcgagggcgtccccttcccggcggtgctcgtcccgagcgctcgtgcgggctcctgcgccggcggggtcgacaagttcctggcggccgtgcgctgcgagagagcgtcccggctggagccgctagtgcgggacgcgggggccctgctgctgcgcgggttccccgcgacgacggccgccgacttcgaccgcgccgtcgacgccttcgggtacgaggagctgccgatcgtcggcagcgtcgcgccgcggaccaacgtcgtgggccgggtgttcaccgccaacgactcgccgcccgatcagaagatccccttccaccacgagatggctcagtctgcagtctggtggcactggcacttggtctttgaaacattgcctttggtctttgaccgtatgtaccttgcctaccagcacgttccaacatttccgtccaaattgttcttcttctgcgaagtggagccaaagagtggcggagagacgccggttgtaccgagccattatgtctacaagaggatgaaggagaaattccccggatttgtggagaaactggagaaggacatgattgtatatacaagggttttaggagagggcgataacccgtcctcgtcaatcggtcgtggatggcaatcgacatttctcactaaagataaagctgttgccgaggaaagggccgcaaagctcgggataaagctagaatggaccgacgacggcgtgaagacggtcatgggccccatccccgcggtgaagtgggacgagagccgagggcggaagatctggttcaacagcattgtcgccgcctacattgggtggaaggacgcccggaacgaccccatgaaggcggtgaccttcggcgacggctcacccctgcccgctgacgtcatcgacgcgtgcggccaggtcctagaggaggagtctgtggccgtgccatggcagcacggcgacatcctcctcatcgacaactgggccgtcctgcactcccggcgctcgttcgagccaccgcgtcgcatcctcgcctcgatctgtaaatga

SEQ ID NO: 11501 - DNA, 303 bp, Zea mays
  Peptide Sequence Number=SeqID_53280
atgggcgctggctggtactatgatcttgggaactggctgctggtcttgcagagggaggaggagggtgctggctgctggtcttgcggtcgccggtcggccggcggtggcgcaggcgcgcagtggtctgctgtgggcctgtgggaggagggaggagggggagccgagcgacgttttaataacaatgggtgtttgcggtgctttcgttttggtcttcgggcggcgaagtgcacctccctcccggagggtacaaagaagcaggtgatgtggcaacgtctggaaaacatcgaggagcgcccccagtga

SEQ ID NO: 11502 - DNA, 384 bp, Zea mays
  Peptide Sequence Number=SeqID_53281
atggcaactgccaacggcgacatcaatcagaggcagctcaggaacccaccttcgtcagcgtttgcggtgcgggcaggattcgagtcggcggtgtgcgacgtgactcgcggcggcacgtacctggcggcgtggtgcgtggaggtgacgacgacgaggtccacgtcgtccgaggacgcggcggcgctggggagcttctctgtgtcagccggacacttgccgctgcccgccctgtcgcgcgtcggcgacggggtggcctactgctgcgcctggatcgccatgtgggggtgggggacgcgagaaccgcggaggtgggaggacggcggcgctggggtggtgagggggcagttgctgcgcacgcgggcgccgccgaaggtggtagggtga

SEQ ID NO: 11503 - DNA, 498 bp, Zea mays
  Peptide Sequence Number=SeqID_53282
atgacgacagcacaggaaggccgcacgggggggggggatcagcaccgagggtggaggtcgcatgccgggaggggccaggcaggccgcgccgtgcagatgtggcggcagaggtctggtgggccgtgccgcgcgggcaacggcggtggtccacacgtggaaggtcggtcggcggcagagatccacacggagggatcctctttgactcttgggaacatatttggaaatcctgggcacctgcttcttcagaaggtcggtctccagaagctgtgccacgaacctggaattgcttcctttggtgattggtggtggcatgctagtgaggcagtatctaggctctcaaggcatggccttgtgatccaagtctcagaggagctgcatctttggagtttagctggggcaaagggttatgcaaccgaaacatacaaattggcagatttgaacgcggaggctcaagaatctggagatgatgaagatgataatgtgtgggaagagggttaa

SEQ ID NO: 11504 - DNA, 706 bp, Zea mays
  Peptide Sequence Number=SeqID_53283
cccaagctatgcccgcgccgatccctcatccacggatccaaggatctcctacccccctcaagaagcccgacgatggcactgtcatcaaggccaaggagatcagaagatcgcctacgccaagatccgtctccacaatttagtagagctgattgccaacaacctcgcgcttgagaagcacacggccatggagaacccagacgcgcaggcgaaggcatgggtgtcggagatgcgcgagctggcctacgacatggaggacaacatcgatctcttcacccaccacgtcgaccacgaaccgaccgacaccgccaccaccggcgtcaagaggttcttcctccggatcatccgaaagcttaagaaactccactaccgccacaggattgaggagggcggttcaagcctctcgcacgcggagatcgatcctcgattagaggtgctctacgtggaggtggagaaactcgtgggcatccagggcccaagccaggagatcactggacagctcgtcggcgagaacacaacggagcgacggagggttgtcaccgttgttggatctggaggttcaggcaagaccacacttgccaaacagctggtcctttgtggagcgtcctgggttcttgctagcgtttgcttcttggtggcgcaactgattgctactctgattactgtatacaccaactgggcatttgctgcgatcaagggcattagatga

SEQ ID NO: 11505 - DNA, 876 bp, Zea mays
  Peptide Sequence Number=SeqID_53284
atgccgaggagttgggacatacgaggttcgaatgttaggctgaatcgtgtgttcgagctgaatggtcttcactacggcccatatccgcaggaggactctactgatgctggggatgatgatcgcaagagaaatggtatggcaaaacgtggtggtgtggatgaggggtgctctaagggtaaggtcgtggctatggcggtgagaaaaaaaataagggttgaggctaaaaagaagggtttagcgaagacatctagggtggcgggggcctcaaacagatttgttgaggtgcagacggagatgtgcaccgatctaggggaggtcatggcctcgcctgacctccgggacgcatcttctcggatgttgaaagtaatcggaggatctttaaaaacgaatatcccccaacaggtccaactaaaccaactcaccgcgctagcccaattccgcgcgctggctgagggaccccccttgtcagtctcccccgcgtcctatcacacgctccgggccgctgccgcactagccccattcgccaacgcctctgacgcggccacctacactaagcgtcgggctactgccccttgggccccgctcaccagcgcgccagcctgcgagtaccccggctcgtcagccgcctatgccacacgcgctcccacctgcactgacctctgggacccacgcctcaacctcacatccattcctgcttcaccttgctgcctttggcgcgcgggcctaaagcaccaaaagcttcctcctaacagaatctgtcatgtccgcgtgtttgtttatgagaaccgtggcgagctcgcccgggagttgcttgagatcattcgccaactcggactcctagcatggccatatatgtggacgctgctcaccgcctag

SEQ ID NO: 11506 - DNA, 537 bp, Zea mays
  Peptide Sequence Number=SeqID_53285
atggttagcgattcagtgacggttatggatttgttgccagggcacatgatggaatttggcacgttgaggatctactcgggccacgtgcatgaaatgcagcgcttagggtatttcagagacggtgtggggcgtgctccgggggccaaggaggtcccagagccggagggggagttggtggtttttgaagagttttcactactggtcttcgactgcctgcatttcgagaagaaggttgctagtggcaagattgtgcagtttggtttgggtgaggttgtggaactcgttccatgtgcgaagaacaagtgggggaattggtgggattttttgttttatgtgacattgaaggacaccgagggtgttccagggctacctttgtccatcatgtgctcacatttctacatggccttcccacaatttaaattgaaaaaagaagatgcgaacaaagatgcccttcaccgcgcctccaaagcaagcaccggacgtgacttggtggaggagtttattgcctacggagtgtggtcgcttgtgcacggctag

SEQ ID NO: 11507 - DNA, 444 bp, Zea mays
  Peptide Sequence Number=SeqID_53286
atggtcgccacgaaggggtattgtcgcgttctggccataggatcccagatctatggcatagagtcatggcgccgcctagggctacggtggtacccactggagtactctcacccaaagctcccgagcccattcgtcgaaccaaatttgctcaatcgtgacatacacgtcaccctgaacccattagccaccccagcactccctgataacaagaccgatcgcaaggccacgataggcggtggcaccacggtggcgccgagcttcgatgagcaatatctgcaccacagcatgacatacaccctaattactcagtcctacgctcggtggacgcgacaaggaaattccaggagagtcttactgaggtccagcgacgcggagaacccagttcgcgcggtgaaacagcttggcggcggtagtggtctccgtcgagcaattagcaggatctag

SEQ ID NO: 11508 - DNA, 357 bp, Zea mays
  Peptide Sequence Number=SeqID_53287
atggacgatggagccggagctagggaagaaggagaacagggatggctagagtcacggaaaaaggaactggggatgaggaaccgaggacgccaacatagtggggacaaggacactatggcgatgaggggtggtcgggccaggcgcacgacggagattgaaatcaagtatccaacattggcgcccacctctggtgatctcgtgaccacgacgagcttcatcacgatgaagagcatggcaagccatcaagcttcgccaacttccatggagaagcttactctccacatcactaggggtcgagctttgaacctagcaaaaagaaatagaagaaagaagcccaaacaagggtgcaacatgtag

SEQ ID NO: 11509 - DNA, 1515 bp, Zea mays
  Peptide Sequence Number=SeqID_53288
atggctgccccaacactaactgcagatggtcctcgcctcggccagcaggagatgaagaagatgtctccctccttccatccaactctgtggggagatttctttctttcttacgaggctccgaccgaggcacaggaagctcaaatgagagaaaaggctgcagtgctaaaggaagaagtgagaaacatgattaaaggttcacatgatgtgccagaaatagtggaccttattatcaccctgcagcgactaaatctggactaccactacgaggatgagataaatgaaaagttgactgttgtttacaaatccaattatgatggtggtaatttggacttagtttcacgtcgattctatcttctgcgtaaatgtggctacgatgtttcatctgatgtattcctaaaattcaaagaccaacttgggaattttgttgaggctgataccaggagcttgttaagcttatacaatgcagcattcctgaggattcatggagagacagtgcttgacgaggcaatttcttttactatgagagttcttcaagatagattagaacatttggaatcgccattagcagaggaagtgtcttctgctcttgacacaccactttttcgaagggttggaactttggaaatgaaggattacattcctatctacgaaaaggacgctaaacaaaataaatcaatattagagtttgcgaaactaaacttcaaccttttacaacttcgttattcatcagagctaaaagagtgcacaacctggtggaaagaacttcgcgtcgaatcaaacttgagtttcgtcagggataggatagtagaggtgtacttttggatgagtgggggatgctatgatcctcaatattctcattctcgaattatacttacaaagatagttgctttcatcacgattctagatgatacccttgactcacatgctacttcttgtgagagtatgcaacttgcagaagcaatcgaaagggaagtgaaggaattagttcgggaatataccaaggaaataaaatggcgtgatgaggattatgtgcccaaaacattgaaagagcaccttaaagtttcactcataagcattggaggcactctggtgctatgttctgcgtttgttggaatgggtgatgtagtaacaaagaagatcatgaaatgggttatgagtgatgctgaacttgttaagtcttttggtatatttgtacggctctccaatgatattgtatcaaccaagcgtgaacaaagagagaagcattgtgtctccactgttcagtgttacatgaagcagcatgaaataacaatggatgaagcatgtgagcagataaaagaacttacagaagattcatggaagttcatgattgaacaaggccttgcactaaaagaatacccgataattgtgccacgaacggtactagagtttgcacgaactgtagactacatgtacaaggaagctgataagtacactgtctcacatacaatcaaagacatgttaacgtcgctttatgtgaagccagtactcatgtga

SEQ ID NO: 11510 - DNA, 159 bp, Zea mays
  Peptide Sequence Number=SeqID_53289
atggtgcgcgtaaacggaccagatgcggcgccggtttacaagtttctgaaagctagcaagcctggtttgtttgggtcatcaaggatcaaatggaactttaccaagtttctggtggacaaagatgggaagaaggacatccagaaggcccttgaggaataa

SEQ ID NO: 11511 - DNA, 768 bp, Zea mays
  Peptide Sequence Number=SeqID_53290
atggtgactatgtctggcacccgcaccgccctggcgcacgagggcttggattatggtcccaggctggtggcgccgcgccgcagcaggctaagcgtcgtcgccgttgcggtgcggaccaggccggccagcctcgcagtcccgggcctcccgcccccgacgccggagcccgtgctgccgtcgccgcccgtggccgcaggcgtcgcggcggtgctgctcgaggcgggcgtgccgcccgcggacctccggcgcgcggcggggatgtgcccggagctgctgtccgtgcccgcggaggccgtcgcggccgcgctccggttcctgacggaggaggcgggcgtcccggaggcggagctccagcgcgtgctccggcggcgcccgcgcctgctcgtgtgccccgtggcggcgcggctgcggcccacgctctacttcctgcgcgcgctcggcgtgcccgacctgcaccgccgcgccgacctgctgtccttctccgtggaggacaagctgctgccgcggatcgagttcctcgagtcgctaggcctgcccgcgcgcgccgctcgctccatggcgcgccgcttccccgcgctcttcggctacggcgtggacgggaaacatgcggcccaaggcggagtacctcctggggcgtgggcgccatgggccgccgcgcggacgagctgtgattgttaccctgatcgtgtgaatatacactcctcccagaggcttgggcgtcagtcaagagcactctttgtggacaacttttccccccagttctactag

SEQ ID NO: 11512 - DNA, 708 bp, Zea mays
  Peptide Sequence Number=SeqID_53291
atggatttggcgccggagagcagggtgtactcgagacagacaggcaggacggccacatccgccatattcaggcatggaagcaccggctgcgaagcgcgtcctccgcgtggccgccatcagcggctccattcgcaaggcctcctggcacagcgggctcatccgcgccggaatgggtacactagcttggcaaattatccagccgcggaggtgtgcgaggactgcatcccggggctgcgcgtcgaccacctcgacgtcgccgacctgccgatgctcaacaccgacctcgagacgaacggtggtacgggcttcccgcccgccgtcgaggcgttccgcgccaaggtccgccatgccgactgcttcctcttcgcctcgcccgaatacaactactccatcaccagcccactgaagaacgcgcttgactgggcttctagaggagtgaactgctgggcagacaagccggccgccatcgtcagcgcgggaggcaacttcggcggcggcaggtccagctaccatctgcgccaggtcggggtgttcttggacatccatttcatcaacaagccggaactgttcgtattcgccttcttcgagccggccaagtttttcgacagcgacgggaacctcatcgacgccgacaccagggagcgcctcaagcaggtgctcctgtcccttgaggccttcacgcgcaggctccagaacaacaaggactga

SEQ ID NO: 11513 - DNA, 231 bp, Zea mays
  Peptide Sequence Number=SeqID_53292
atgtggcgatatgtttacaaagttatggtttttgaaccatttaaggacccaagggtggatactattgctcctaagttgctctttattgccctcaatttggctgccatgggattgggtatatggaagcttaatacattgggccttcttccaacaaatccatcagattgggtgtcttctctggctcctgctcgggaggttgaatatgccggaggagggctccccttaatttaa

SEQ ID NO: 11514 - DNA, 204 bp, Zea mays
  Peptide Sequence Number=SeqID_53293
atgcccattggacctaacccgtctgacaagaccactgcctcaggacccgctccccactcagggacaggtccggtgctgccacgtgtcccaaagagaagatgctcatggactactcacatgggtctggaccaccttgtatatcgtctggacccttatgggcgggtcttggacctccacgtgtattatccggaacccccacacaag

SEQ ID NO: 11515 - DNA, 390 bp, Zea mays
  Peptide Sequence Number=SeqID_53294
atggcggtggtaggcgggcgggcgcagcggtcacgtcgtcagccaggctcacgtcccatcctgagacagcaagagagcctcctctcacggcgtgaagacgggaccggggaagggggataccccgaaagggatccttctccacgaaggaaccgggctccaagccccccattactgatcaggggttcgaaggctggccccccgagggttcaacagccgcctcagatcgcgtgggcccgacacccactactggtcaggggttcgaaggccaaccccccgaagggctccatggccgcctcaggctactcgggctccgcgcccattactgatcaggggttcgaaggctggcccccgaagggttcacagtcgcctcagacaccgagcgagggatga

SEQ ID NO: 11516 - DNA, 843 bp, Zea mays
  Peptide Sequence Number=SeqID_53295
atgtccagcttggcttggcacaccggactgtccggtggtgcacccgacagtgcccggtgcgccaggccagcctttggtgaacatgccactctcgggaaaattcggcggcgtatggctataattcaccgaactgtccggtggtgcaccggactgtccggagagccaacggccgccagcgcaacggtcgaccgcacaatccgtgggcgacgcatggcccgcgctaacggtcagcagggggcaccggactatccggaagaggaggaggaggtgcaacgccatgaggaagaggttgcgaccacagatgtcggggtgcaaggccatgaggaggagatcatgaccatagatattgggaggcagaaccatgaggaggctgtgaccactaatgttgggtccaaggccatgaggaggtctaggcagatgatgagaccattgaggctcttgcctttcgacgaaggaccactcgaaaaggccactttgtgctccgtccctcatcgcctgcatagtcagaaactcgtgtactggtcatcccagttcgtgatagctaatgggatgacacatctttcgatggccaaggtcaccatagacaggagacttacggacatgagatgtttaagaagcatgtattctatgtttaccggtgtgatcgattcgacggagttgcggtctcgtgggggctcttcgtcgcagacgggttgtggtagcagccgtagtccgtgctcgagcatggaggaggctatgagagagcagcaagaaatgtttcatgaagagctactgcagcagcaaatgacattcgtccgtcaacaatcagattacatggctacttacaacgcacaggcgcaataa

SEQ ID NO: 11517 - DNA, 201 bp, Zea mays
  Peptide Sequence Number=SeqID_53296
atggagatccactggtctcggggtgcacgcaccgacggcttccacatgctgggcgtgctgggcgcgcacgggtcggcaccgggtcgttcatctgtcgccggggatgtcgtcgacagctctcgttttgggcaccgcaacgactcacatcaccgggatagcggaccatggctccccggtgctgacgcccactacccggtcacg

SEQ ID NO: 11518 - DNA, 1207 bp, Zea mays
  Peptide Sequence Number=SeqID_53297
gccgcttgatgcggttctgagccggggcgcaggtgccccgccgtccccgctaccgccgctgcctggcgcgcaaggaagcagctcggcggccggcggaggttcggcgcccccgggcaacttttctggctcacgcaggaggacctcgtgcgctacttcctcaactccatcggcctcttctaccatgtggccgcgcgctccgtgtcctcgctcgggctcgtgcgcaccgacttcctgtccgtgcgccccggccgaggcggccctgtcggccgtgcccctcatccgccgcgcccgtcgccacggagacggccggtcgcccgtggtcaccgaagacggccacctgctcggcgagatctcccccgccctcctcgcggcctgcgacgagacggcggccgcggccatcgccacgctctcggcggcggacctcatggcctacgtcgactacttcgggtccccgcccgagcacatctcgcgcgccatcaaggccgggctgaaggacaagggcctcgacgccatgctggcgctggttgaggacgagacgctatcgtcgttctcctccgcgtcctcgtcgtccgacgaagaggcaggccggacgcagctgaggcgcccgtcgtcggggagctacgggcggcggtcagccgaggagccggtggtgtgcagccccgcgagctcgctggtggccgtcatggtgcaggccctcgcgcacagggtgagctacgtgtgggtcctcgacgaggacagcgactgccgccttgctggcatcgtcacgttcgcggacgtactgagggtgttccgggagcagctgctgttgcgccttgctgaacgaggtgctctatacggcgacgaaggttttgaggctttcagccccttctatccagctgagttgctcgccgtcgccgatccgaatcagcacggcgaaggcagccgcaaccacggcaaggccgaagtcgtcatcgcccgctgctggcgacaccgcgaccggcggcctcctcgtcgtggccccgcgcggcctccgctccgaaggccagaccgccagacggcctccgcgtcgtgggcccgcgtatatggactcacgtcacggccggcggccgcctcccgcgcggccttgtcccagcagccggtggcctcgtccacgcagcaggaggccgcagctctgtcgtcgtcgaccgacctgccaatgaacaccatcccttgccggtgtgtactatag

SEQ ID NO: 11519 - DNA, 600 bp, Zea mays
  Peptide Sequence Number=SeqID_53298
atgggtgagcctcgctggagcgtcgcttggccagcgcgccatggccggatcaaccacgccagccgtgggccgcaagtcgcgccgacgcgcgcgagagggcacgggaaggcagcgctgcgcggctccgggtggggctatggtgtttgggaggtgggcacatggcgaggacgggccccggcgcggcggctggcgtcggccacagggccatgctcgtcggcctgcatgcagcagcgaggagagagagatatggggggtggggagaggatccatggacgtggtgtgttttgggcagtttcctggcggtcaggatggcggctgctagcatcagggagaggaaaaatggtgctgcgcatcgtggggaagcagggagagaagttgggggagagagagatggcaggaaaagatgaacaggggctctggcggcgcccaggagcgcccaagcacgcgcatagggctgcaggtgcgcggttgggtggggaaatggcctgctgggccgctggggaggggatggcgcaaggcagctgggccaatttggcctggcggcctgggcaggggcacgcctgcgcgcttggcgggctagggaggggcgcgtggcgctag

SEQ ID NO: 11520 - DNA, 357 bp, Zea mays
  Peptide Sequence Number=SeqID_53299
atgacaaagcgggagctggaggcggacaccggcgaagcctacgagttgcccatcgccgccggcggaggtgaggctgcttctggttacgatagtaccacacgtatagacattctcagacgcgttgtgtacaacccatccacgtcccaccttctacgagcacagagagtgggagagcaggcctccgaaatcgtcgtctgtagagttacacttgcacaggtagccttccataaagtgcccattttgttcaacccaaaagtgcaactcgagctctcccttcttgtgtggcttgttcatttgcttttgaggaggaaagagctaggatttgagagaggaaagggcatcactatggagatttag

SEQ ID NO: 11521 - DNA, 195 bp, Zea mays
  Peptide Sequence Number=SeqID_53300
atggagttgctgtcgaattccacgcgctatgatctacaaaaatcggcttctatggccgattctaaagatctcagcaatgttatagataacgatagaaggctgactaatttatcggtcgctgagcgtgaggaattagaatactacgtgaagaagtgggaagaggagttccagcgacaacaagctcagaagcgctag

SEQ ID NO: 11522 - DNA, 882 bp, Zea mays
  Peptide Sequence Number=SeqID_53301
atggacttcaggagcaacgacgacctcgtcatgccgccgccgccgccgccctgcggccatggctgggagatgatggaggccatgaggaggcagcaggagctcgtgatgcagctccgggcgctcgtcctcccgctgctcgtccacggcgccatggatggtggtggcggtggcgccccctcggcagccgacatcgccgtccagctcttcgacgacgtgatcggctgcaacataggcgtggtgtccacgctcgagggctgcatcctcagcaccggcggaggcgggccttcggtagagtccgtcgacgacaagtcgttggtgatgaggaataatagcgctcctgctagtaataacggcgagaaggcggagaagcaggcgcgattggcggcgaattcgaagcagctgaatagcgtcgtcgttggtcagaagagaaggaggaacaacgacaagcgatcaaggtcccttgttacgcatgttccacactacgacggccacctgtggagaaagtatgggcagaagaacatcaatgggaggaaacatcctagggaacggaactgcttagcaacaaagacagttgaggagcaggagccaaatgccgacgacggtaacagtagcagcagcgccatggccggcgaggaaagcccaaagtacactgtcgtgtactacggcgaccacacttgcaacgaccatattattcatgccgtcagcacggtccagcttccccaacttgttgcaagtgtggatcttggtcagggcacggaaatggatcaaacgacggcaacacgtgcaggtggtgttcaagagtctgacgaggcagatcacttggacttgccagctttgctagagaacgctgtaaaagctgaaaaggtcatgtcgtcagaataa

SEQ ID NO: 11523 - DNA, 312 bp, Zea mays
  Peptide Sequence Number=SeqID_53302
atggagagcagcagcaagggcatgtgcaccgtcgagaggcgcggccgcgtgcacctcatcaccatgaccggcgccggcgagcaccgcctcaacccggacctcctcgcggcgctccgctccgctgtggccgcctccgctggcgccggcgcgctggtgctggccgcggaggggaagttcttctccaacgggttcgacctggcgtgggcgccgcgcggcgccgccccggcctggcacggcgccatggacggcgggctccgcgcgcttgctggccgacctgctggcgctgcgcgtgcccacggtgggcggcggtga

SEQ ID NO: 11524 - DNA, 1386 bp, Zea mays
  Peptide Sequence Number=SeqID_53303
atggagcagtggcgcagaggcggctggcgcactggcctgtggagcactggagcggcggtgacgcactggcctgtgaagcaatggagtggcagcgcactgccctatgggcggagggaagagggaggagggagcgcactgccctatgggcaaatataccatcctttgaaattcctgcatttcaatccatacattgatatgctggtagaacatagaagatgctcacacacatgcttgaaacaggtacacattgggaattcaccaacctatagacttgaaaggaagcttggaaagggaggatttggacaagtatacgttggtcgacgtatttcagctcctcgtctcagtgaccgtaaccctggttcaaatgctttagaggttgcactgaaatttgaacaccaatccagcaaaggttgcaactttggagctccttatgagtggcaagtttacaagtatgtccatggtgatgtgaagcctgagaacttcttgcttggtcctcctggtaccccagaggagaagaagctttttcttgttgaccttggattggcaactaaatggaaggatgctggtacggggcaccatgttgaatatgatcagagacctgatatttttaggggaactgttcgctatgctagcgtgcatgcccacttgggaagaactgggagtaggagagatgatcttgaatccctcgcatacactcttatttttcttctccgtggccgcctcccttggcaaggataccaaggagagaacaaaggttttcttgtctgcaagaaaaagatggcgacatctccggagtctctgtgtggaatctgtccacaacctttccggaattttgttgagtatgtcgtgaacttgaaatttgatgaagaaccaaattatgctaggtgcatctctctttttgatggtattgttggcccaaatccagacataagaccgataaacactgatggtgcccaaaagctagtatatcaggttgggcagaagagaggtcgcttaatagtggacgaaaatgatgatgagcaacctaagaaaaagatcagaatggggatgccggcaactcagtggattagtgtctacaatgcccgtcgacctatgaaacagaggtaccactacaacgtagccgataatagattggtgcagcatattcaaaaggggaacgaagatggcttgtttattagttcagttgcctccagctcaaacctgtgggctttaattatggatgctggcactggttttacatctcaagtatacgaactttctagttactttcttcacaaggaatggataatggaacagtgggagagaaatttctatatcactgcactggctggtgcgaataatggaagctctttggtgattatgtcaagaggaagagctcaaaaatga

SEQ ID NO: 11525 - DNA, 1905 bp, Zea mays
  Peptide Sequence Number=SeqID_53304
atggacagagacatcgccattgcagggaaccatcaccacctgatcgacatcgcaccagacgcgagcatgggcgaggccagtggcgcgacggacggcagcgcggagcggctaggggtaggcacgggcggcggtggtggcggaaacgagaagaagtggctgcgcaagctcacgtcggctacagtgaacacggcggtgctccgagacctcatctcgcggacgcccatgctgtggtacctcggcgagaggacggggacaatcctccgcccgtgcgcccggcgcgagcccgtggaggcgctgcacgcggtgcgcgccgtggccatcggcccgttccaccgcgctgaccgcggcctccccttccccgacgacgccaagctcccgttcatgcggtacctgcaggaccagtgcggcctcgacgtggacgggtacgtcgaggcgctctgcctggagcgcgaccgcctccgctgtgagttcgccgacgacggctcggacgggcccgccgtggagattctagacgacgaggcgaagctgctggagatgctgctgctggacagctgcttcatcctggtggtgagcttgatgctcagcaaggccggcacaggcgacgacgccgacagcgtgacgcgggcggcgtccatcagcaaggactacttcatactgaacatggccgtggcgcagcacgccgacgacatcaagctcgacatgctcgtgctcgagaaccaggtcccgttcagagccatcaagcttctcgccgcttcgtgccctgggctcaagctccggaactccgtcgaggagctcgtgctcggatgtttcgacgacatctgccccaagcgcgcgcgtcgcgccgcctacagcgctgccgccggcgagttccaccacgtcctgcacctcttccactggtcccgcgtgcccaaggacaagtacttcgtcctctcgacgccacggaagctcctcaagatcaagaaggagtcggagcggctgttcccctgctccatggagcttcggaggtcagcggtgtggttccgcgaggcgtcgtcgagctgcggcgacctggacatgtggttctggcgacacccggcgagcccggtggccgtgatgaccgtcccgtgcttccacgtccacgagtacagcgcggctgtgctccacaacctcctggccttcgagaaacacttctactgggcgcacggcgcatgcgtgacggcgcacgtagcgcggatggagggcctgattcgttgcccacaggacgcggccatgctccgcaagcgaggggtccttgccagcacgcggcgcacggacaccgagctggtggccttgttccgggagctaggtgaggagaccgtcggggcgcggcttcctgacgactacggcgagatgcttgacgccgtagcgggccaccggggccggcttgtcagcgggtggtgcggagggttcgtgctgcacttcttcccgtcgccatgggtggccgtctctctcgccgtcgctgccgcgctcatcttcgtgccgtcgatgctgcagaccgtctacaccatcggcggcccgtctcgtggcgctcgcgctctggcactgctcgggcgtgaccctctcctcgttgtcgcctcgcttctagcttctgatcccgtcccacttatctcccttgtcatgtgggcgcgcctccagccgcggttcgttccctcctccgacatctcctcgctcctcgatacgcgcctcccgtcggccactcactccttcgaactccttgctctcttcgacgacaacctcgggctccccgatctcgtcaccttccctaagaccctcaacaccattgtctccacgctcgccaaccacggcctcctcgagtcagccttctactacttcaagtgcctccgcgacaccagcttaggctctgtttgtttgcacagaaccccttaa

SEQ ID NO: 11526 - DNA, 324 bp, Zea mays
  Peptide Sequence Number=SeqID_53305
atgtcggaggagggaacgaaccgcggctggaggcgcgcccacatgacaagggagataagtgggacgggatcagaagctagaagcgaggcgacaacgaggagagggtcacgcccgagcagtgccagagcgcgagcgccacgagacgggccgccgctgcaaggtggtggagcggttgcgcggaagcgcagtaggtggggggattgtgcggcagaggcgatggctggggaagaggcgcggctattttcgggcgacgtggcctccgcactgaggagcaccgagcacgtacggaattctccggtgcactcaaatgccttcaagttttaa

SEQ ID NO: 11527 - DNA, 444 bp, Zea mays
  Peptide Sequence Number=SeqID_53306
atgaacgctgccgccgcctcctccgctccggacgctgctgcggccgccactggcgaggagggcgcgaaggaggccgtggacgtgctggtccagtacgtggtcctgcggcgcgatctggcggacgcgtggccgctggggagcgtcgtggcgcagggctgccacgccgccgtggccgccgtgtgggcgcaccgggaccacccggacaccgccgcctactgcgcgcccgacaacctcgaccgaatgcacaaggcatgttcgacggtaacactggaggtgaaaggagagacacagctgaataacctggctgagaagctggcagcagctggtgtccggcacaagctgtggatagagcagcctgagaacatcccaacatgcatagctacagcaccctgcccaaagtcgcaggtttcttctttcttcaagaagctcaagctttgcaaatga

SEQ ID NO: 11528 - DNA, 828 bp, Zea mays
  Peptide Sequence Number=SeqID_53307
atggatccagtgttgctgcttctagagttcttcactagtctctgctttctcgccctctcccctggcttggccgccaacctccaccacttccacgactgggccaccgccctcctcgccggcacgggctacaacctggaagccaaaaggcgtccccggccagcggtacttcgccacctgcgagtctgcgaccccgccaacgtgcgccacatcttcacgtccaacttcgccaactaccctaaaggccacgagttcgccgagatcttcgacgttctcggcgctggcatcttgaactccgacggggagtcgtggcggcgccagcggcgtcgacactgggtgcctggcgtccgggctgccggaggttcccttcatgcgcgccacggacgctgcgctggagacgattttcctccgccacgtcatccccatggcgtgctggaagctgatgagaaggctgaatgttgggcccgagagaaagttggctgcagacgccgcaccatcgacggcttcgtctcggagatgattgcacgggcgcgacgccgggcagacagagtggacgaaggtgccagcttgctttcatccgttctctgtcacggtaacaccgctgctgacgaggagagcaccgacaagttcttacgtgacacgacggtgaacctcctattcgccggccgtgacggccccgccactgggctctcgtggttcttctacctcgtgtccaagaacccgcgcgtgggagcagaagctcctaggcgagttgtccgctgccgttgcttcctccagggatggtgcaggctacgccgcgggcaccagcggcagtggcatggtgactgttga

SEQ ID NO: 11529 - DNA, 477 bp, Zea mays
  Peptide Sequence Number=SeqID_53308
atggcgcgcgccgccgcctccaggctcgccgccgtggcgaactcttcctctacgcgcgagttgttcgcccgccacctcgccgccgctgccgcctcggcgtggaccgcaccgccgcgtctgcctgaaccagccacaaggcgggtgtatacaagggattactatgatgtgcttggagtaagcaaggatgcttctgcaccggatataaagaaggcatattatgcgatgtttaatcataaaaacagtacaaattatcccattgttccagtgcagccttggtactgtggtgacttaatcatcggggatgacttggaccttcctccaggtgctgagctcgggctgattacttcctctaatgatggcctgggcatgctctttggctcttcgtctcctttctgtttgatctcaaaacaggcccttagtttgagaaggtttactagagataagttagttggcttgattgaattgtcaagcagctga

SEQ ID NO: 11530 - DNA, 375 bp, Zea mays
  Peptide Sequence Number=SeqID_53309
atggcgacgaccgctgacaccgtcttccgcgccgatgcaccttgcatgttgtcaccgaatgatagcctcgacaacgccaaggttacagaggccatcggcatcaggctgccggacatcggaagggccataaggggagatattgcgttacctatttttggctttgtgattgggttgacaggaggcattagtggcagggatctgaaggagcatcttggaaggttgcagcagtcgtctgattccaggagggctgctatgaatgaaatgatgagggcggcggaggttgccgcagatgagaacatgtccactatgcatttaatcaatcatcgttgggtgcgagaagttcagaagcagcaactaggtggatcatctgtgtaa

SEQ ID NO: 11531 - DNA, 933 bp, Zea mays
  Peptide Sequence Number=SeqID_53310
atggcctccgacgagccacagtcgcagctgactggcctaggcgatccaaaagccagccgatctgatgcggcgaccatggtgacgaccggcggtgctggcgacggggaggaggtgatgggggcggagagccccctcgacttcgtcctcgtcggcacgccttgggggctgctcctcgctcccacaccgctggcgagcatgaagcaggacgaggaggaggtgagtgctcctccctgtccagagaagacacctgctgcagcgaatggggcgaagcagtgcgtgcagtgcggcgcgaccgagacgccacagtggaggatccagccgacggggcagggcgcgctctgcaacgcctgcaggatccggctcaggccggccgaggcgctgcgggagaaggtgcacgtgcacgcgcaccgcccatcggcgccggcgctagggccggcgacgtcgacggccatctccgagcctccagcggacggctggatctcgggggcctggatggatttcgacgcgcacctgctgaaggtgacgcctccccctcccgccaggcggcaggagtctccgtccccgacgacggaaccagcgccggagaagaagacacggaagaggaagccgtcgacgcggcggtgccaggctgccagcactgctgcaagtcgcaggttcgagttcgactcctgcaggaataccgcccggcggcgagccctaacttcaagcatgtctggctctgagcacgcctgcaagcgccgcgaggcgatccagcttcgccagaggaagcacaggggaaaagagcagcaccaggctccggaaccgggcgcaggtgatggcatggagcagcgcgccagcacctgcctccgccaccgccaccgccgccagcgcaggctgttcgacgggccggcgccgccgccgccgcttatcgacgacgacgacttcgtcgactag

SEQ ID NO: 11532 - DNA, 678 bp, Zea mays
  Peptide Sequence Number=SeqID_53311
atggcccctcctgtgacgtggtcggtccgagccctgggttgggcgaggcggaggctcctccgaggtcgaggtcgagtctgtcttctgaggtcgaggtcgagtccgagcccttgggtcgggcgagacggagaccgtcggctgaggccgaggtcgagtccgagccctgggtcgggcgaggcggagttcgtcgtcttccggggccgaggccgagtccgggccctgggtcgggcgaggcggagttcgtcgtcttccggggccgaacccgagtccgagccctgggtcgggcaaggcggagttcgtcgtcttccggggccgagcccgagtccgagccctgggtcgggcgaggcggagtttcttatggcgcctgaggccgggcttggccgctgtcagcctcactctatcgagtggcacagcagtcggagtgacgcgggcgacgctgtcttcttgtcagactggataaggtgtcaggccacccttgcattaaatgcccctgcgatacggtcggtcgtcgtggcgatttggccaaggttgcttcttggcgaagactgggcctcgggcgagccgaagctttgtgctaatgggggttacccgctgagattaggagtcttgggggtaccactaattatggtccccgacacagaggctcatcttcttcttggagggagcaggcagctctga

SEQ ID NO: 11533 - DNA, 339 bp, Zea mays
  Peptide Sequence Number=SeqID_53312
atgacgcccgcccacgcgcccagctcccttcttagagccctgctcgtgccccacgcacaccccttgcctcatttcgctcagcttcaccctctctcgcgctctgcccacgccgccagccgccgccggagacccgcgcccgcgttcctgtccattcatctcgtcggaggccgctccaagcctccccgagctccgcctcgagacaacgagcagtccgaggttcctgagtgtgttgttggagacctccctgagcaatcacctggtgaaggcaagtgtcctctgaccccattatgtcctacatactttatgattcactgtcccacattactttatgaaacctaa

SEQ ID NO: 11534 - DNA, 771 bp, Zea mays
  Peptide Sequence Number=SeqID_53313
atgggaaagatgaaggcagtggcgtgcgtcgcctgctgggcggcattgtcactgatcaatgtcgtgatggccgtcgattacgtcgtcggcaacccggccggcggctgggacgggaggaccgactaccagtcttgggccgcagccgagacttttgctccgggagataccctaaccttcaagtacaactcataccacagcgtcatggaggtgaccaagagcgccttcgaggcgtgcaccacgaccgacccgatcttgtacgacaacagcggcagcaccaccgtcgcgctcaccatgccggggacgcgctacttcatctgcggcgcgccgggacactgcctgggcggcatgaagatgcaggtgcaagtcgccgaccgacccgcacccaccacacccagttcgccgccgccgccgccagcacacgcgaaacagaagcggcatgcaacggcaccatcaccgacgcctatgccgtgggctccagcgccgacaccatggtcgcccgcgccggcacccgcggccgcgccaccgagacgtgcagggcacaagaagaagcacaagaagaggtactgcccgcctgaaaccgtgcatgcgcccgcacgggcccccacccccacagtgcaggccgtcgaagcagactttccgttcgcggcgtttgctcctatgacagctccgccgccgccgccgccaacgtcgggagggcttgcatggcggcgagcaacgtgtggcgaggctactgcggccttagccgctctcgtctggttcatgctcctctga

SEQ ID NO: 11535 - DNA, 339 bp, Zea mays
  Peptide Sequence Number=SeqID_53314
atgtcctattcctgttcaaggaggagtgcggtgagccagtacccggtgacgccgttgcggaccctgctcgacaagctcttcagtggcgacagcccctacgtgggcttccctcctgagcacacgacaaccggtgtgatgactagaatcgatctagtgtataatgtaaacatatctgcttttggcaaccatgttacttttgttatagagtctggagagaatctgacaaataattttgatgttctaaatgttggtggatttgtcctctattcatggtcatggcagaggcaggggtgtgaggagcagatggattacgatggctgcagtggggaggaagcatga

SEQ ID NO: 11536 - DNA, 2778 bp, Zea mays
  Peptide Sequence Number=SeqID_53315
atggcggcgagtgccatgctgactgccgagcaagtgccgaacaaggccttagtgaaaaaggcaaaaagaaatgcaatggatccaaagggtgcagcttggaagccaagtctgggcttgcttcgtgtggattgcatctggggaggcggtagcgtgcacgggtgtgattctcggaccggcttcatgcgggacggcgcgccggctcctcgcgccggcgggggcttcttctcggcgcggtcgctctccaactgcatgaggatcgtgtcgtcgggggcgtccacggccgcctccacgctgcgctcggccggggcatcgctggtcaactcgatggccagccacgaggaggatgcaagtcgtgaccaggtacagtgggctggctttgataaacttgaatgtgggggtggcttgctacggcaagttttgttgctggcttataaatctggtttccaagtgtgggatgtggaacatgctgatgatgtaagacagctagaatccagacacgatggtgctgtttcgtttattcaagtgctgaaggatccaattttcacaacagaatctggagacagatttgcagacacacgaccattgctagctcttgcctgtgaaggaactcacacaggaagtggaaagaaccatgatactaatgttcctgtttttgatggaaccaatggtgctttccatagtataggcggtgaaaaccttcctactgtcttactattttattcactgagaacccatgaatatgtgcatacattgaggttcagatcagctgtttattccataaggtgcagtccgagagtcgtagctatttcacaggctactcagatacattgttttgatgccgcgaccatggagagagaatatactgttcttaccagtcctacggttgcacaagtttcaggctatggcccacttggattgggtcctagatggattgcatattctgggaatccagttccggttccagatactggacgtgttagcccacagcttcttagtctatctccctctgttccacctcctggttcaaatggtagtgtggtggcatattatgcaaaagaatcaagcaagcaactggcagctggcattgcaacacttggtgaggttggatataataagctgtccaagtactatgcagatttcattccaaatggtaatggtaccataaagcaaagaagttctgtttacaaagcaaatggtgtaacaaatggccacctcattgacagtgaatatgctggaacggtcatagttcgagatattgtctctaaattattgatagttcagttcagggcacacactagtcccatttctgcactttgctttgatccaagtggaactttgctggtgacagcatctgttcatggtcaaaacatgaatgttttccgcattatacctccacatgggacatcagaagctggtcaaattggaacctatgttcatctgtacaaactgcaaagaggcataaccaatgcgatcataaaagacatcagctttagtgatgatagtgactggataatgattagctcttcaagaggaactagccatttgttttcaatctctccatattgtggatcaacaagattccgttacagtgataacaaccctgtagaaaatgattacacagtggattcatcagttaatcatactgctcattggtcccaaaattcagcaacctctttgagtctgagtcagaagactctcttcgtatctggaccccctgtcacattgtctgttgttagtaggataagaaatgggagtaacgtgtttaagggtgctgtccatggtgctgctgcatttgcaactggtgcttccactccaatttctggtgcgattgcttcaacttttcacaaccgcatggctggtgacatcgattcagatggcagtttgcgcatgaagtattatttactagtattttctccatcaggaagcatcatacagtatgctctccatctctcagctgaacaggattctggattggatttccggacaagccccatttcttatgggccagagagagaaactgatacaaaatttgttattgaagctcttcagaagtgggatgtttgttataaaagaaatagaagagacagtgctgagagttttgcatatagtgattttgagaatggagaaaataataaacttttgctgaaagctatgtggaaagggactagtatctacccatttgactgttctgttgaaaggcaaaagctcagtgctgatgaaaaccgtaatctctatatttctcagagtgagttgcagactcatgttgtgcaaactccactctggtctaaatccaggatacactttcaagttatggagggtgaaactttagaagcagacaatgctgatgtaatttcaggggaagttgaagtagaaaaagtccagacccacaacatagaatcaaggtcaaagaatctcataccagtcttcgactccctccatacatcaaggtttcaacagacaaggttgaacgctcctgataacagcaggtgcgggctgctgcagcgacagaaatctgggatttcagaagatggtagactctctcgcagaagcagctgtagttctttggactgcatgtctgaagggcccaaaagctctgatgacggtgctttcagtaaatatgtagtagatgataacagttctgctgtaattaacaacccaagtgttaaatttcatgccgagcttgtaaataatactgggagcctcaagtcagaggcccagctcggatttgtaaatagcgaggaggatggtggaggtggagagcaactcccagacttgtga

SEQ ID NO: 11537 - DNA, 267 bp, Zea mays
  Peptide Sequence Number=SeqID_53316
atggctctcgcggaggtgaacgatatctcgctgaatgactacctggttgtgactgcggcgaagcacgcgacatttctgccgcactccgcggggcgctactccaagaagcgattccgcaaggcgcagtgcgccatcgtcgagcgcctcaccaacttgctcatgatgcacgggcgcaacaacggcaagaaggtcatggccgtctacacatatgtggcctataataattctaaaatctggaaacagaataactgccccattcttggttga

SEQ ID NO: 11538 - DNA, 1719 bp, Zea mays
  Peptide Sequence Number=SeqID_53317
gtccctgtgggtttcctcggcaagctctggagcttcgtttccttcgtgcccttcttcgtcctcctcctgcttctgggatccatcaaagctgccctagtcggcccggtcacagcttccatcgtattcttcgggagctctgcggttattattggcctctggcctgctcatttcatctggacatactactgcgttcttaaaacagaaaggatcgggctgcagttgaagattcttactggactactgctgccattgccactgcttctcttgccagtacttgctagcatcgggagtctcctgggtggtactggatacggagtttgcgtacctctcatggcgaccttcgaggctgttggcgagggtgtcactgacaagctgacccattgtttcacggatggaaccgtaagcgcgatggctggagcttgcacggttgtccgtgatgtcaccgatttctgcttccactcgtacttctctttcatggatgatcttattgacaaaatgggggacaatgaagaagcccctctcgacatcaatggatgtgctgctgataagcgcagtggctttgtggaaaagcccctgcatgttgttcaaaggatggcagaggaggcttctttccaaatgggacttgcatacatgatttcagcagtagcaattttcgatgaatacaccaatgacttgctttacctaagagaaggatcatgccttccaaggcccaagtatcggagagcagatatcatgagggagtgtgaaactgagcctgcagagaggcaacaaactggccatcacaagcatagaaggacgttacctcgatcaaagacgttcatgcaaaccgtccagcgactacgaccgattcaaatatgggattggttcttccggtcctgtgagctcaatggaaggatactactgagcgagggcctgattactgcccaagacatggagcaatacatcaccaatggaaaatgcaagaagctggacactaaattaccctgctggtcaccaccactgtccctgttccatctttctgttttcactcacatgcttcctgtagctgatcatgtccaagtgacgaccctcaactggcccaaagacagagtccttgactggctgctcggaccactcctgctcatcaaggatcaaatgaagaaactggaggtcaccgaagacgaggagatgtgcctgaggaagctgatcatgacaagcaagaacgagaagccatctgactgggacgattcgggtttcccgtcagacgacaacataaagagaggccagctgcagtcgataatcagaaggttgcaagggattgtggcctacatgtcccgagtgccgagtttcaggaggcgcttcatcaacctggtcaaggccatgtatctagaggccatcgaagcaggggccatcgacggatcgcgcaaagttaaggcggatgtggctgacagcttgaacgacgtgtggcttgagtatgagtacggcgtcgtcagacaggaaccagcttccggacatgagttttttatgcaaaagagttgtgagtggttcctccctacctctcccgtcgcacctcgccctctcccttgccctgctctagatctcggcctccagtcctcgctgccgccgcgacttgctcgccccgtctccctccggccccgcctcatcgcgaccgtgaagctggccgctgacccccgcccgcctccgcttggccgtctggccgccccccgcgtggtcacctag

SEQ ID NO: 11539 - DNA, 303 bp, Zea mays
  Peptide Sequence Number=SeqID_53318
atgtcaaagtttttgatcatagaactaaacagaactatgtgcagtggaacaaatgaaggattggatggtagactggagcgggtgcggcggggcgaggtccgctttgacgccggcgttgatgccgaagcaaatggtgtcgtgggcctcgctgatctccctcttcatgttgctgctctgcatcttctccgcaactccgcctctttctctgtcgcgacttgcgagaagccgagaactcttgccttctttctttgcggtaccattcatacttgtgcgttcacttttgcattattgtatgggttataa

SEQ ID NO: 11540 - DNA, 276 bp, Zea mays
  Peptide Sequence Number=SeqID_53319
atgacgaggggcggcggaggcgacacgaagtccttctaccgtcagcagaagacgcacgccgccgccgccgctgccgccactgccgccactaccaagcccactggcggcgtctccaagaaggcggctgtgcaccaccacaagaaggccgcgctcgccaccaacgtccacccagccccagatgagaaccagatgtattcgtccttttgtggtttgctgacaatatatttagagtacctgtttcaaaatcctcataaagtgaccgttggcgcgaagtag

SEQ ID NO: 11541 - DNA, 2721 bp, Zea mays
  Peptide Sequence Number=SeqID_53320
atggtggccgtcgtaaaggaagacacacatcgtgactacggcggaactgggcggagacggaggcaccaagggtggtgggataccgtaggaagtgccgggagcggcggcgtacggtggaagagtagcgggaaagggggtcaggaaaccgggagccgcagggctacttgcgagggaaacggaggagcgaccatggcagagggtggtggctggggcggcagccgagcagggggcgaacccggcggcgactgtgggtggaaggggagaagagaaagaaaactggctctggtataccttttgaagcctaaaagtttagcatttgagtattttgagaagctcattaattttttggaacagttctatcatccgtcaaatgggggtcgttggacctactcattggaacgcttcctgcgctatcttgttgtttactttgagaaacgccttcagcatgaacaatttgttatggcagttgaggaccatgatcaatcttatctgggaaaggaagaaaggtctgtttttgtcaaagctatcttgaaattattggatcgtggtcagtacagcaaggataattctcttgctgaaacagtttccgttgcaacttcgatcctgtcttatattgaaccaaccctcgtgcttcagtttgttgcaaaaaacttccaacgagccttagagacaactacagctacccatcagttaaagaacgctgtcacatctgttgcattttctggacgtgctcttcttctatgttctttatgttcatctcagaatgatgatagcagtgttgttgattcattcagtgatcttgttgtcgcttccctttcaaatgcgttacttggcatggatgccaatgatccacctaaaactattgctacaatgcagttaattgggtctatcttttcaaatctagctgcagttagtgatgatgtgcctatattgctccaatctactactctatcgaactggctagatgaattcttttcccgactgttttctgtgcttcataatctggaatcaagtagtcccattaatgagggttaccaaagctcattcatgtcagggacttttcttgttgacagtccatattacttttgtatgcttgaaattcttctagggaagttatcaaaacccttatttaatcagtccctgaagagaattgccaagttcgttaatgcaaatatcctccctggtgctacttcagaagttgggcttctttgttgtgcctgtgttcattcttatcctgaggaggcttcagtctaccttgtaaagccaatcttagagaccatcatgtcatcctttgaggggactccaaccactggttatgtaggaagagtagttgcagataaagcatctaccaaggctgcactttctcctgctctggaaacagcaatagattactatctgagggttttggccatatccatcagttatgccggtcctaccttactcaattataaggaggaactaaatcacataataacatctgcgttccagtccccttcttggaaggttaatggagctggggatcatctccttcgctctctgctaggaaatctggtttcttattacccaattgatcagtacaagccattcacttgtcagcctattggaaatattattgaaccatgggggtgttcgaaagctcatcaggatagggaggatgaaatgcttaatttccctccaaagtggcatgatccaagtcatgatgaactctcttttgcaaatgaattactacaacttcatttccagtcagctttagaagatcttttgactatttgtcagacaaaagttcattctgacacagaaattcgcccgtcatataaagatgggaggtccctggaagtggagtcggctttcttcatagcaggatctgctggtagcactgttggaagctcagaaatgcgtgaaaaggctgcagaatttgtgcacatagcttgcaggtacttattaaaggaaagaactgatgacagtattcttctatcccttgttgtgcgtgtcattgatgctttggtaaactatgttagctgtgtaggaagcttggaataccaagaatggtcaagccatgttcaagcttggaaactagaatctgcttccataattgagcctccatgcaacttcattgttccatttcatgctcaaggaaaaaagagacctagatgggcacttgttgacaaagcaaacttgcatagtacatggaggtgttcacaatcatcatatcacagatacagaatgaatgcagatgtttcgccatctgtccccatgattaatttgatgaatgatctcttagatctctcactacacaactatgaaactgttcgatcgtatgctggaagatcgcttacaaaattgttgaaacgttggccttctctaatttctaattgtgttctcacactcacgggaaatttgcgtgacccaaaagctcctgaacatgttgttcttggttcttgcagcattctgatctcacagactgttttaagacacttgaccactgattctgtttccctctcttcctttatcatgggaattctggaaagctctcatcatgaatcgttgaagtgtcagaaagctattactgagctctttgtaacatataatatacgtttctctggaatatcaaggagcttctttaaaactcctgaaaatcaagctgacaagccaggatttctcagtctaatttctcaaattaatgctttgggctttgagactaatggactacattggaggtag

SEQ ID NO: 11542 - DNA, 777 bp, Zea mays
  Peptide Sequence Number=SeqID_53321
atggctctctcatccttccccatatcattgtcgccctttcactccggcgcctcattccacaccactcccgaccccagaactgtctctttaccccattcccataaccccacctctccttcctccatcgttgccaaagtaagagaagcaattggtattgccatgtgtgttacaacctcaaatatgagactttctgggttatttggcactggatgttcaccgcaaggccttcatggggatgtaagcatgattgaacaaacaggaaataaatattggtctgaacgtttgacagatggagctaatgaattagccatatttcattttatgatcgcatctttgaagtctgggcgatcttctgttctactggacactattattaggcttgtgtacccaattctctcactacaggttagggagcatgctgctggtgttcttgcaagcttaatgaagggtatagatgaagatctatcaaaggatttccgtgaacggtcatatgcacaagcccagcatatttttgttgcacggagaagaaatttgaagttttctgttggtaccatccatggtgcagtccttgctttgacagcttcggtcctttctgttccatacgacatgcctagctggcttccttctaatgtctcgctacttgctcgcttcatccgggagcctccccctataagatcaacagtcacgaaagctgttgcagaatttaagcgcacccatgctgacacatggagcatccagaaggacgcattcactgaagacgaactggaggcaagctag

SEQ ID NO: 11543 - DNA, 429 bp, Zea mays
  Peptide Sequence Number=SeqID_53322
atgtcagtgaaggagaccgaggctccgacgggcacatggaagatggtcgtgtctggcatgaaggtggggcagggcctcacgtcgagaggattgggaggcggttgcgccctcggccagggaggtggcggcgccatacgttgggcgtcgccggagaagggagtcgtgctactgccgcatgtgggggtcgaggccgcgttgccagtggagcaagagagcactggtcccgccaggtcaacaggaagaagggtgacgacgtccctgccgcgcgctgaggttgcggcgccgattggaggtgggagcgacgtccatggaggagggcatgacctgggcgaaagcgacgctggcgtcctggagcccaacgtggccggagtgacgcgaaagccgacggcgagcttgaagatcatggcctcgggcacggcacagaggtga

SEQ ID NO: 11544 - DNA, 735 bp, Zea mays
  Peptide Sequence Number=SeqID_53323
atgaccggtgctcccgtgcggcagacaccaaattggacccctcttaatcatttcccctcactcaatttcaccaatgaggctctacatcaactagtccacgaagacagccgccgcctgcgccactccgactgcggtgccactcgaaagagtgagtctgacaggcagtcaggcctcgccaggggcgccatagggaactccgctccgcccgaccccagggctcggactcgggctaagacccggaagacggcgaactccgctccgcccgaccccagggctcggactcgggctaagacccggaagacggcgaactccgctccgcccgaccccagggctcggactcgggctaagacacgaaagacggcgaactccgctccgcccgaccccaaggctcggactcgggctaagacccggaagacggcgaactccgctccgcccgaccccagggctcggactcgggctaagacccggaagacggcgaactccgctccgcccgaccccagggctcggactccgccctggcctctgccgaacgacttccgcctcgcccgacccaggggctcggactcggcctcggcaacggaaggcagattcgaccccagcttcggaggagcccccacgtcgcccggcctcggtgtggttatgaggaggatggtttttgattatgattatggtattggcgaagatgaagctgtggaaggagacttccaggagttccaagattacgacgagttctag

SEQ ID NO: 11545 - DNA, 123 bp, Zea mays
  Peptide Sequence Number=SeqID_53324
atggccgtgagcccccccatctggccgccatccacccctgtgctcggccctccacgtgcggcgtcaatcgatctgtgctgcgagcaacaacctcggagtgatgtagtggcaagcgagaagtaa

SEQ ID NO: 11546 - DNA, 414 bp, Zea mays
  Peptide Sequence Number=SeqID_53325
atgggcaaggacaagaaaagtcagagctcgccgcatcgctccagcaacaaacgaaagcgagaaccgagtccttcgtcggaggacttcggtgactctaagtactcggaggaggagttctcctccgagtccgaggggtccccggtctacgcttcaccccggcattcgcgccgggctcgagggttggatgagtcggaggtctcctcggacgaggagaactcttccgactcgtccgaggagggaagcggcggtgacggcaatgacgagggcgacggtggcgatggtggtgacggcagtgacagtggcagaagggacgacggcggcaagggcggtgacgacgacaacgacaaaggcggcgacaacggcaagggcggcaggagcagcagcaaggccagtggcaaagcgccactggcttaa

SEQ ID NO: 11547 - DNA, 420 bp, Zea mays
  Peptide Sequence Number=SeqID_53326
atggggcatgacatccgtcggtgtgctctcatggacgtcgacgtcaagctccgcacaggcccactataccatatcctctgtgtaagctccgcgggagccgcggcttcggaacacctgttcgcgtttggcgcaaccgggcgcctcagcgtctggttcttcgcctggcttaccggccgcaagcgcctccagacggggaacaacctactccgcaaatgcatcgtattggatacctcgtgcgcaatctgcggcgccgaccttgaggacgcctcccatatcctcctccgctgcagattcacccgcatgttctgggaccacattggtgtcattgtccccaacaacgcctcgctcggcctcctgcgccccccgccccctgaaggagttccgcacgctcatgctgctgtgctactggatgttatgtaa

SEQ ID NO: 11548 - DNA, 1092 bp, Zea mays
  Peptide Sequence Number=SeqID_53327
atgacctcagggcagacgctgctgcgacaaggccctcgcccacgtccccactcgaggggcgaggacaagctattaaagccaaagagccggagggaccgggaaaggggatactccgaaagggatccttctccgcgaaggaagcaggccccgagccctcctactgatcagaggttcgaaggctggcccctccgaagggttcgacagccgcctcagagcactcaggctccgcgcctactactgatcagaggttcgaaggctggcccctcggaagggttcgacaaccgcctcagaccactcgggcttcgcgcccactactggtcagaggaagctccgcctcgcccgaccccagggctcggactcaacctcgacctcgaaagacggacttcgcctcgcccgaccccagggctcggactctacctcgacctcggaagacggactccgcctcgcccgaccccagggctcggactcaacctcgacctcggaagacggactccgcctcgcccgacccccagggctcggactctacctcgacctcggacgacggtctccgcctcgccccgacccccggggctcggactctacctcgacctcggacgacggatcgcctcgcccgacccccaggggctcggactctacctcgacctcggacgacggtctccgcctcgcccgacccccagggctcggactctacctcgacctcggacgacggtttccgcctcgcccgacccccagggctcggactttacctcgacctcggacgacggtctccgcctcgcccgacccccgggcccggactcagcttcgacctcggaggagcctccgcctcgcccgacctcgggcttggaccgaccacgtcacaggggggccatcattaccctacccctagctagctcaggctacggggaacaagaccagcgtcccatctggctcgccccggtaaaacaagtaatgatggcaccccgcatgctccatgacgacggcggctctcagccccttacggaagcaaggagacgtcagcaaggatccgacagccccgacagctgtacttccacagggctcaagcgctcctccgatggccacgacatcacatga

SEQ ID NO: 11549 - DNA, 1098 bp, Zea mays
  Peptide Sequence Number=SeqID_53328
atggatggacgacaagcacccaaatcccgtcgtgattcgttggatgctgccctaggaagctccgcctcgcccgacccccaggggctcggactcaacctcgacctcggaagacggactccgcctcgcccgaccccagggctcggactctactttgacctcggaagacggactccgcctcgcccgatcccagggctcggactcaacctcgacctcggaagacggactccgcctcgcccgacccccagggctcggactcgacctcgacctcggacgacggtctccgcctcgcccgacccctggggctcagactctacctcgacctcggacgacggactccgcctcgcccgacccccagggctcgtactctacctcgacctcggacgacggtctccgcctcgcccgaccccagggctcggactctacctcgacctcggaagacggactccgcctcgcctgaccccagggctcggactcaacctcgacctcgaaagacagactccgcctcgcccgacccccagggctcggactctacctcgacctcggacgacggtctccgcctcgcccgacccccggggctcggactctacctcgacctcggacgacggactccgcctcgcccgacccccagggctcgtactctacctcgacctcggacgacggtctccgcctcgcccgacccccagggctcggactctacctcgacctcggacgacggtctccgcctcgcccgacccccagagctcggactctacctcgacctcggacgacagtctctgcctcgcccgacccccgggcccggacttagcttcgacctcgaaggagcctccgcctcacccgacctcgggctcggaccgaccacgtcacatgggggccatcattaccctacccctagctagctcaggctacagggaacaagaccggcgtcccatctggctcgccccggtaaaacaagtaatgatggcaccccgcatgctccatgacgacggcagctctcagccccttacggaagcaaggagacgtcagcaaggatccgacagctccgacagttgtacttccacagggctcaagcgctcctccgacggccacgacatcacatga

SEQ ID NO: 11550 - DNA, 585 bp, Zea mays
  Peptide Sequence Number=SeqID_53329
atggggctactcagcattatccgcaagatcaagcgcaaggagaaggagatgcgcatcctcatggttggcctggacaactcggggaagacaaccatcgttctcaagatcaatggggaggacaccagcatcattagcccaacccttggattcaacatcaagaccatcaagtaccacaaatactctttgaacatatgggatgttggaggacagaagacaatcaggtcttactggagaaactactttgagcagactgatggattagtttgggttgttgatagttcagacataaggaggcttgatgattgccgtgctgaactccacaatctcttgaaagaagagagactagttggagcttcattgttggtttttgcaaataagcaagacatacagggagctctaaaaccagatgaaattgcgaaggccgactcaccttccatcttttttcaggttctgaatctggaagtgatggacagaagcaggcactggaagattgtgggctgcagcgcttacacgggagaggggcttctcgagggcttcgactggctggtccaggacgtcgcttctcggatctacgtcctagactga

SEQ ID NO: 11551 - DNA, 168 bp, Zea mays
  Peptide Sequence Number=SeqID_53330
atggagtttcttcgaggcaggggattaaggggtggcatgtgggcgtctcatgatctagggagatttggggcggtgattgcagccgcggcagaaacaaagccccttcatctgtattatatacatcgtgccgctcgatctcgtgctattaccgtccatgagatagattaa

SEQ ID NO: 11552 - DNA, 1089 bp, Zea mays
  Peptide Sequence Number=SeqID_53331
atgtcagcaacagccgtcgtcctagcgcacaagaattcatggccgcgcgatgcagctgctctggaccgcgtccaagcggcggctgcggcggagcttgccgaacacagcgacgcatgcagccacgtagtactgcttccagaggtcgaactggcagtcgtcaagcttcttctcgtcgtcgatgagcgacaccagcgtgagcgcctcctgccagtgcccctaccgcttcccggcctggctctggacgccgcgtaccacggcgaccggcccagtgttttcctctcgcactcgcaggtggccgggcgaaagcgcaccgccacggcggccgtggccggggacggcgtcgtggagaggacggtggagaccactacttcactcgctgctgtgaaagcctggcaggggtttcgcccggttcgccaacgtcagcgacgaccacagcgccacggcgctacacctcgccgccatatgcaaggccgccccgactacgtgcaggtgctgctggagaacgacgctattgtctccgctctcacaggctcctacagtggtgtggcctccccgctcaatttcatcagcgagctggacccggaggctaaggctctcctggaagtggcactgacggacgccaatagggagagggagaggagaagatcatcaagggcaccaagtattctcagccgtcgccaccttcccctcgcgagcacgaggacgatgccattaacgaagcgtcctcagagcatctcgcggctgctggtgtcccgggcgagccccggtactggcaacaaggccgatgactcgtccctgcagctcgtccggcggtggtcgtcccggcggtctcacaaccttagcgacgtcggcagcttcaaggggccaccgtggtcgggtccttctccaggatcgggcgaggtaaaagcgaccaaggataccttgctgacgccaaaggatgtgcagctcgagggtgactcgaggttggcgagcctgtccattggccagatggacgtcacagtgtcgcaccatcgactcggcggtggcgatgctcctccaggagtccagggtgcattagaagcggctggcgtcactatcttgcttgtatga

SEQ ID NO: 11553 - DNA, 297 bp, Zea mays
  Peptide Sequence Number=SeqID_53332
atgacctcgagcggtggctgcgccggatctactaggaacgccgaggcgacgcagccggagctccaacgatcgcctccgctctgctcacggagttctcagccgatgaggccgcaccacatatggcagctaactctcctagcggcatctaagaccacaacagcaaaggcaaaagctgatgcaagcatctcaacagcggttgatgccatcagctgctgggcgatgctagcgcagagcgcacttcctcaactagaagatttacagggggcaagttcaacaaaaattacaggcaattactga

SEQ ID NO: 11554 - DNA, 366 bp, Zea mays
  Peptide Sequence Number=SeqID_53333
atggttgagggtctcctcgacatgaaccctggtgagattctggacccctttggttcgcttgttggtccgctctacgtagcacaaatcgtagggggaaagtggagctttggtgctcggctggacgggagcaccggtgatggtctccgccgttgggggcggccgccgctggtgcgggatctgctgcgctcagctatcggtggtggaagacaacccatgaaccgtagatcgcgttatcagtggccaagattagaagatagggccaacttgactagagcctatctccgccattcgatcatgatcgtgcgcgcaggactccattccgttgttttaaatcctagccatcggccggtgaggttgtacaggtga

SEQ ID NO: 11555 - DNA, 348 bp, Zea mays
  Peptide Sequence Number=SeqID_53334
atggttgagggtctcctcgacatgaaccctggtgagattctggacccctttggttcgcttgttggtccgctctacgtagcacaaatcgtagggggaaagtggagctttggtgctcggctggacgggagcaccggtgatggtctccgccgttgggggcggccgccgctggtgcgggatctgctgcgctcagctatcggtggtggaagacaacccatgaaccgtagatcgcgttatcagtggccaagattagaagatagggccaacttgactagagcctatctccgccattcgatcatgatcgtgcgcgcaggactccattccgttgttttaaatcctagccatcggccg

SEQ ID NO: 11556 - DNA, 267 bp, Zea mays
  Peptide Sequence Number=SeqID_53335
atggcgctagccgccggcgcgcagcgattccgggttccagtgccccacaacaaaatcctatggtgctattcgaataggagtagcttgacgaacgtggtcacgggcttcttaccggcagacggatcgagcagtgacggtgttccgcggcgccgcggcagcgaagcaaccacggcgagcgacggtgttgtggcggagatccccctcccaatctcggtggcgatttcttctagcgaatttgatgccgatggaggagggggcattgcatag

SEQ ID NO: 11557 - DNA, 267 bp, Zea mays
  Peptide Sequence Number=SeqID_53336
atggcgctagccgccggcgcgcagcgattccgggttccagtgccccacaacgaaatcctatggtgctattcaaataggagtagcttgacgaacgtggtcacgggcttcttaccggcagacggatcgagcagtgacggtgttccgcggcgccgcggcagcgaagcaaccacggcgagcgacggtgttgtggcggagatccccctcccaatctcggtggcgatttcttctagcgaatttgatgccgatggaggagggggcattgcatag

SEQ ID NO: 11558 - DNA, 1152 bp, Zea mays
  Peptide Sequence Number=SeqID_53337
atggcacccacgccgccgaccagcacgaggcctcgccgccaccacacgatcctccgcccgccgctggcactcgcgctcgcgctcgccattgtccgccccgcctcgccgcagctcctccagccgccgcccggcgccaccgtctccagcgcattctcgccaccgccgtcgccacccgtggacggcgtcggcggtaggtttgccgtcaccacctcgctcctcttcgtcggcctgatcgtcgcgctcttcctgctcggcttcttctcggccttcctccgccgccgctgcggcgccggagccgacacgcgcggccgcgggggagggggcggtgtcggttccctggccgccagcgccggcgccgccgcgggcgcggggctcgacgccgcagcgatggaggcgctgccggtgctcacgtacgcgacggcgcgggcggtgagggccggccgcggggcgctcgagtgcgcggtctgcctctccgcgttcgacgccgccggcgagaagctccgcctcctccccgggtgctgccacgtgttccacgccgcgtgcgtcgacgcgtggctcgcggcgcacgtcacctgccccgtctgccgcgccgatctctccgacccggccgtcgccgccgccggccacgtcctggccgctgacctcgccgccgacacggtcgttgtcgtcaacgtggtggacgggccagctgctcctgccgcagaagctgcgggacaggacgccacgccgtcggagacggccgaggaccggttcacgctgcgcctgccggagaggctcaggcgggagatcgacgaggccaggcgcctccgcagagcgctgagcgcgtcgaccgcgctgccgagcggtgggccgttggcgtcgtcggcagcagcgccgcgcacaatgtcggcggcacgcccgagccggcgatggtcggggctgctccgggcgttgtcgggatctcggcgggtgagcgagcccgacggccattggagggtggtgccgttgcctaccggtgctggcaacggggaggtggtgcaggagcaagacgacgtggacaagtacttcagcctcacgttcgctggcttcgtcatcgacggcgacgtggcggctgtcgactggcatccggaggtttttcacgtctcgactggcgttccggccgcgcagcggtga

SEQ ID NO: 11559 - DNA, 576 bp, Zea mays
  Peptide Sequence Number=SeqID_53338
atgactaccaaccaaaaaatatcacccgcggacgcgctagcagtaaacggggaagcgcgaggcacgcaaggcacgcggaaccacgccaagggccagaacgacgcgcgcagggccgaggccgcgccgggggcagggcccgagccgccggggacacgccgggggccggaggccgcgccggggccgcgttgggcgagcagggggcgggcggggggcgccgccgcgggtaggggggcgggcggcgggccgccgcgcgccggcgagcaggggacggagcggggccgccgcgcgcgagcaggggcgggcgaggccgcgcgccggcgagcagggggagggggcgggatcgccgccgcgggccggggggcgggcggggccgctgcacgcgagcagggggcgggcggggccgccggcgagcaggggagcgggggcaagggccgccgctgtgggcagggggcgggcggggtcgcgcgcgagcaggggaaagggagggcgcgcgtgggggaggaagaagaggagggagagggggagagagagaggagaaggggaggggagctcacctcggggtccaaattccggtga

SEQ ID NO: 11560 - DNA, 309 bp, Zea mays
  Peptide Sequence Number=SeqID_53339
atgaacaccaacttcttggatgatttaagctcttcttgtatcgactcacattgcaaactgggcgcccgccacgccgccgtccccgagcccaacgccgctgtccccgagcccaacatcactgtctccgagcccaacgccgccctcctcgaggccaatgcccccgtccctgagcccaacgccgctgtccccgagcctaatcctggcaggttctatctctctctctctctcaatgggatcactgccagtgtttactatcctcaatgggatcactgccagtgtttactatccctgcttggatataggtcataa

SEQ ID NO: 11561 - DNA, 267 bp, Zea mays
  Peptide Sequence Number=SeqID_53340
atgggttcaacatcggaaaagatgtacctctgccaggaccgtctcgatgtaggcctgctgaccgaggaccctttaactggtcacatgcctcgtcatgggggagggccttcctcctccgacctagtcggcgcagggaaggaggtcatcgagctacaagcgggttatccaacccccgtggccaccccgtcagacgggttcccgcgggagaatttgaggtacacccttggacgtggcgccaagcaaatgacctatgagccgatcacctag

SEQ ID NO: 11562 - DNA, 339 bp, Zea mays
  Peptide Sequence Number=SeqID_53341
atggcgctaaaggctagttgccaaagattccggaaattttgcctgctccaccgcacctttccgttctcatgggttatgtggacactagctggcagtagtcaattagctgcggcagatctttcggtccgatgtctggcgatcaacatcatgctggggcaagcgagccagcgcttcgcccccatgtgccttggtccgcgccggtggatgcggcggatgcacccagatcctgttcgctctgcagatgacaaggacgccgacgcgcagttgcccagccgcccgagctgtcagccagcctgctgcctgccacgctgttccgcaacgccgcagttgggaagctag

SEQ ID NO: 11563 - DNA, 762 bp, Zea mays
  Peptide Sequence Number=SeqID_53342
atggtgaaggagaagaagcggaagcagcatcctgccaactcggcgctgcccctgggcgacgagggcgaggggatatgcgggcggaaggccaggaaggagaaggcggaggcgacactgccgtcgcagattaagaacaaggacaagtgccgtgaggtgcatgccaagcttaagtgtttgcagccgtcggagaggcaggtgccccggacgattgagaacacaagggagcccgatgagactgtgtgccagcccgatgagactgggccaaaggaatcgataacaggagggacctcaagtccaagcggactgacgttgtccagcataggtcctgtagcgcgtcgtgtgggagaagcacgggaggttcacacggaagcaggtcacgcggccccagcaccagcactgggcgaatcgggcggggtcaacgccgccgactctaccgcgcggccccttggaccccgacccccggcgacacggaccaggaggtgggaggttttaccgtttccaacgggagtcggcggcgggaaccggcggtggcggcaggcgggcttaggatttggtctaggtcgcgccgggtatacgccaagacagggggcgaacggggaaaaggaggaggaaacgatgcgggacgtggacggtgacaggatgagcagccattgccgcggggagcgggcgcagtttgcgggctgggtgtcgcggggtggaggcacggtgaagccgtggtggacgccctccttgcgtccttatagagtagtaaagatttcgtaa

SEQ ID NO: 11564 - DNA, 1344 bp, Zea mays
  Peptide Sequence Number=SeqID_53343
atgggacttctgtttgcgggaaggaaagttttcaggggaatgagaaagagagatctattacttagacgatattggaggcgagaagatgatggaacttatggtggaggttatgtaatatcaccagtcaatcaaggaagacaatcagttgtaaagcacatgcttgccatagattggaaattctggaagtcttatctgtttacatcatctgccaaatatatcactatacgaatgttaggcagagtagcagcactacgagaattcttccgagcgaaaaatggtaattgttcttgcatggagttctcatctggagagttgaccagggacacgggattacctcaaggtgaaaatcagcgaataaatttggaaatgcagcaagaaaatgagaacggaagacttgaaggtcctactgaaggatcactgggtggttctaacaggcacttaagcagtactggttcctttgttcaactcaatgatgcagcagatgagttctttgacgtgccagacgaatcagaatatgatcagagagaagttatgtttccttctgatgagagcttgcatgctgcggaccagcgtcacgctaaactgtccactgctgctgtttttgtaaaaaggttgcatgatcttgcagttcagaaaagaggatacattgacttacagggagctgcagatgctgataatgggccatgttgctatggatatactcttcccaaagattcgagctatacagtgccttctacttgggcaatgacagatcctacaacattcttaatccggggagagacttatttgcacgatcgtataaagatcaaggcaaatagtaccctgatgcaaatggtaggtgctgactggataaaatctgataagcgtgaggatgatctagctggtcgccctggggggctagtccaggttcctggttcaaccacatacagcttagctttgtattatatgatggatacaccattagaaaaggtccctctgcttgaaagatttgtaaatggagatgatgcattcagaaattcaaggttcaagctcattccttacatctcaaagggatcttggattgttaaacagagtgtgggcaagaaagcttgcttggttggacaagcattagaaatcaattattttcgtggaagaaactatttggagcttggagttgatattggttcatcaacggtggcacgaggtgtggtgagcctagtgcttggctacttgaacaatcttgtgatcgaaatggccttcttggtacagggaaacacaaatgaagaactcccggaattcctcctaggtacctgccgactgaattacctggatgcctccaaggcagtgtccatagacgagtgctag

SEQ ID NO: 11565 - DNA, 1305 bp, Zea mays
  Peptide Sequence Number=SeqID_53344
tgcccgctccgctcccttgatttgctgcctcggcaatgtcaacgctatcgcgtgcgggcgagcgtgtatccagagaaagtaaacgctgtttcattcatggcttcgtctgcaccagcaggagggaagtcaccggccgtcggcggggaggagatgtcggacggcgcgggctcccggacgggcgtcgctggcgcgctgggcctctcggtcacctcgtcggtggccatcgtcatctgcaacaagtacctcatcagcactctaggcttcttcttcgcgacgacgctgacgagctggcacctcatggtgaccttcttcacgctgtacgttgcgcagcggctgcgcttcttcgagccaaagccgatcgacgcgcgcaccgtcatctccttcggcctgctcaacggcatctccattggcctcctcaacctctgcctcgggttcaactctgttggcttctaccaggcaagcatgaccaagctggccatcatacccttcaccatagtcttggaaaccctctttctgagcaagaagttcagccagagcatcaaggcctccctcatggttctgctgctgggagtcgggatcgcgtcggtcacggatctccagctcaacctcctcggctcgatcatcgccgtgctcaccatcgctgcgacatgcgtcgggcagattctgaccaaccaaatccagaggaggctgaaggtttcgtcgacgcagctgctgtaccagtcgtcgccgtaccagtccgcggtgctgctcgtcaccgggcctttcgtggacaagctcctcaccaagcgtgacgtcttcgcgttcagctacaccacccaagtcgtggtgttcatcctgctgtcgtgctcgatcgcggtgtgcgtaaacttcagcacgttcctggtgatcggcacgacgtcgcccgtgacgtaccaggtgctgggccacctcaagacgtgtttggtgctctccttcggctacatcatcctcaaagaccccttcagcgcgcgcaacgtggtgggcatcctcatcgccatcttcggcatgggcctctactcctactactccgtcgtcgagagcaggaagaagaccgaggacgctagctcgctgccggtcgccgcgcagatgagcgagaaggactcggcgccactcctcggcgccaagagctcgccgcggacagagaacaaggccgaggaaaccttcgactacatgccgaggacggccaagagcgcgttcaccggccggtccgggctgttctttcgccttgaaaatttatatcatggggccggcggccctgactttggaccaattcctcaccaagagtaa

SEQ ID NO: 11566 - DNA, 843 bp, Zea mays
  Peptide Sequence Number=SeqID_53345
atgacccaacagtgccaattaagtgcaacgatcacgggtcagtcagccgtgggggcaggcacggcagttgatatggccaaaagcgaactagcaataactgctgcaacagacgagcggaagcagcgggtgcgccctgcggggtccagcagccgccccagtgcactcgggcccccgagccctcctactgatcaggggttcgaaggttgcaccctgcggggtccagcagccgccccagagcactcgggcccccccccgagccctcctactgatcaggggttcgaaggttgcgccctacggggtccagcaaccaccccagagcactcgggctccgcgcccattactgatcaggggttcaaaggatggcccctcagaagggctcgacagccgccccagagcactcgggctccgcgcccactactgatcaggggttcgaaggctggcccctcggaagggttcgacagccgccccagagcacgcagagtgagggatgaccctgggtacgtccgttacatggccgaggctcgggctacgctcccgagcaccgctcgccccgctccggctgccgtgccaaccacccgggtgaaaccgacaacagccaagttcagcctcgggcgcaacaggaagctccgcctcgcccgacctcaggcctcggcctcgggaggagatctctgcctcgcccgaccccagggctcggcctcagcctcggcctcggaagagtcacgtcctcgcccgaccctgggtctcgaccctagcctcggcctcggaggagccgccgcctcgcacgacctcaggctcagatcgaccacgccacaagggatacatcattaccctactcctagctag

SEQ ID NO: 11567 - DNA, 1626 bp, Zea mays
  Peptide Sequence Number=SeqID_53346
atgggagcagcagcagcaggtggccacgcgctgcgcgccgtcggcgacgtcgtctcgttccccgcgaccgtcgccgccttcgtggaggcgctgctccagggctgggccgaggccagggccgggctgctggtgccgctgctccgcgccgcggtgctgctgtgcacggccatgtcgctgatcgtgctggccgagaaggtgttcctgggcgcggtcagctccgtggcgaagctgcggcgccggcgtccggggcgggtgtgcaggtgcgaccccgacgaggaggcggctgcggcatcccaggcctatcccatggtgctcgtccagatccccatgtacaacgagagggaggtttaccagctatcaatagaggcagcctgcaggctcacatggccggtagatcgactaatagtgcaggtgctggacgactccaccgactccgtcatcaaggagctggtgaagggcgagtgcgagcggtgggccacggaggaggggatcaacgtcaagtacgagacgcgcaaggacagggccgggtacaaggccggcaacctcaaggaggggatgcgccacgcctacgtgcgcgcctgcgagttcgtcgcccatgttcgacgcagacttccagccgccgccggacttcctcgtcagaaccgtcccgttcctcgtccacaaccccagcctcgcgctcgtgcagacacgctggaagttcgctgccctgtagtgaatgccaacgactgcttgctgacgagaatgcaggagatgtccatggactaccatttcaaggtggagcaggaagctggctcttccttatgcaacttctttggatacaacggaaccgctggagtatggagaacgcaagcgatcgtcgagtccgggggctgggaggaccgaaccactgctgaggacatggacttggcgctgagagcagggctcctgggctgggagttcgtctacgttggaagcataaaggttaagagtgagctgccgagcactctcaaggcgtaccggtcccagcagcaccgctggtcatgcggacctgccctcctgttcaagaaaatgttctggcaaattctcgctgccgagagagtgtcggtctggaagaagtggtacatggtctatgacttcttcattgcccggagaatcgtaggcaccttctacacgttcttctttttcagcgtcctgattcctctgaacattctgctacccgaagcgcagattcctgtgtgggagctcatctatatccccatagctatcactcttctcaactctgttgggactccaaggtctatccatctggtcatactgtgggtcttgttcgagaacgtaatggcgttgcatcggtttaaagccatcttgatagggtttctcgaagctgacagggccaacgaatggatcgtgacgcaaaagctggggaatctgcagaagctgaaatcgatcgccagacttacaggaagctaccgtttcaaagacaggttccatttcctggaggtgttcattgggctgttccttttggcctctgcgtgctttgactacttatacagagatgactatgtttacctctttgttcttccccaatcgatcatgtatttcgcgattgggtttcagttcgttggtctcaatgtctctgaagactga

SEQ ID NO: 11568 - DNA, 1110 bp, Zea mays
  Peptide Sequence Number=SeqID_53347
atgctcgcgaccgcctcgccgcaccttcaggcggccgcgcgccgcctcttcctggctgtacccgtgaatcagggctgcagtagcatccgcctcccgcgcagatgcttcggccggtacgcgtcggtgcgcgcggcgtcggtgaccgccccgcccgcgaaggagggggcggacgacctggggttcctggagatgtcgtccgggacgcggcgacggtactacatgcttgggggcaagggtggggtcgggaagacgagctgcgcggcgtcgttggccgtgcggttcgccaacaacggccacccgaccctcgtcgtctccaccgaccctgcgcactcgctcagcgattccttcgcacaggatttgagtggcgggacgctcgtgcaggtcgagggccctgattcacctctgtttgcgcttgagataaatcctgaaaaggcccgggaggagtttcggacagtaagtcaaaaaaatggaggaacaggagtaaaagatttcatggatagcatgggccttggggtgcttgttgagcagcttggagagttaaaattgggggaattgttggacacaccaccacctggcttggatgaagcaattgcaatttctaaggttatgcaattccttgaagcacaagaatacagcatgtttagtcgcattgtatttgacactgcccctacgggccatacactccggttattatccttgccagatttcttggatgcgtccattgggaaaatcttgaagctgaggagtaagattgcttctgcaacatcagctattaaatcagtatttggacaagaggtccaacagcaggatgcagcgaacaaattagagcaactcagagaaaggatggtcaaagtaagagagcttttccgcgacacggaatcaacagagtttataatcgtgacaatcccaacggtgatggcaatcagtgagtcatcaagactgcattcttcgttgcaaaaggaaagtgttcctgatcaaacgcgtgcattggatatgatacggactgacccagagttaaaaggtttgaacattatccaagcacctcttgtggacatggagattagaggtgttccggctctcaattttttgggtgatatactgtggaagtaa

SEQ ID NO: 11569 - DNA, 462 bp, Zea mays
  Peptide Sequence Number=SeqID_53348
atgccgctgtggacggcggcacatcatcgacgcctcctcggctgcggctctccttctccggccgctccgcccattgacgccgacacttcatgtaataccgcaagttgcgtccgcaacgagatcctctgcagttacttccgcgaggtaactgtagatgagtcactgacgtgtgggcctgatttggaactggactcacgtgtcattgatgggaagttgcagattgcagggtacaaagcaagcaaagctctcttctcaaccgtcgcctgcagaaagaacattctaaagcctggtgttgggatagggcctaataacttcaagtactatgcaagtgaagatgaggctgctgaagccttgccagcagaagacaattccatggatgcggtgattggcgcactgctgacggatgccacctcaccaggaaaacaggacacagcatcagagatgttgggttctcgagcctga

SEQ ID NO: 11570 - DNA, 765 bp, Zea mays
  Peptide Sequence Number=SeqID_53349
atggcctcgccgctgctcaagtcgcactctcagctcgccgccgccgccgccctgcactccgtgaggagagccgaccgctgccctgcgacaatacacctgggcaagttccatgaccacgggctcaggtccggccgttctaagagatccggttcagcgaaggtgggcgccttcccgtcgctggacgtggtgccgctgatggtgacgatggtggagcacgtggacatgtcgcgggactacgtcgtgaccaagtccatctggcatctcagcgacgcagccctcaagagcgtctataccttctacgccatgttcaccgtctggggagtctgcttcttcgcgtccatgaaggcaagcgtttgcagtactactataacacacacacgcacccatgtaattgcactgttttgctggagtgttcatggcacagcttgcttgcgtgcatgggtcaaatcgaaacaggatcccttctacgacagcgagacgtacaggagccagggtggcgacgggaccgtgcactggtactacgacagggtaagcaagcacgcacgcacctttgcgcagcgtctgtgcctccattccaaagcaggtagcttggccacagacaacttcgctgacatctcgtgtaatgcccactggcagcaagaggacctggaggcgtctgcgagggaggagctgctgcgggaggagctgctcgaggagattgagcagagggttgggggcctcagggagctggaggaagcgagcaaggaggagcagctcacaaagtga

SEQ ID NO: 11571 - DNA, 561 bp, Zea mays
  Peptide Sequence Number=SeqID_53350
atggctttgcctatagggtcaggaaattttctgggcccagctagaataagagaggagggaacagatggagatggaggcgaggataagggcgaagcgggaggttcgcttggtggatcaacaaaggatggcggagatgttccagtacatgcaaacccttggctttgtatagggttttgctccaccacctctgttgttccctccagccgacccttctcagttccatactcctggacaattgacagcatgaaacaaccctcatggatcgcccaacccatcgccgaactagtccggcctcccacctcgctgatgatcttatgtttgttggtgttgataacatttagatccatatcacatattgataaagtgatacacaatgtatattacatttgtaccttcggcttggttgaaggcgaaagcgagagtgcaattccaacccagcgtgaacagtacgagggtactgttcatctatttataggcttgcttcggcacttagtcccattggttataggtgatttctccgtcctaaggaccttctacagagaaggagacccccaacagtag

SEQ ID NO: 11572 - DNA, 585 bp, Zea mays
  Peptide Sequence Number=SeqID_53351
atgaagattgagatgtatgggcgaaccatcaaagaagatgtctattatggaacgactgatgacttcactgactatgatttgtcagccttcagtgagatccacatggagaggcatttaacagaccaagagatagtcttcataaatgtgcttgcaagaatccaagccaatggtgagcccttttcaatatctcattttctttgggctaagattcagcttacttctgaggacacctggaagtccttgccctgtgctccatatatcatgttcatcattgagcagataattggatatttcttcacccataatggtcttgatgagtcgtttagggttgagaggtcccacttcacagcctttgttgctcaggcgcatactttagttggcctccctcccattcctgctcctcagcctcatcctgcctacaatgatatctctaatgatgatgaggatgaggatgaggacgatgatgaggaagaggagatccatctagctcgcaccaagcctttgcacttcacttcttcaacttatcgtggtggtcgtgctattatctctgatgacactgatgctggcggtggtgatattccatag

SEQ ID NO: 11573 - DNA, 1854 bp, Zea mays
  Peptide Sequence Number=SeqID_53352
atgccactcctgaggccgacatctctgctctcagcccattcttctctagccccctttgattttcagaagcggtttcaggggttgtcggcagaccccaagaggatggatcagtatgaggtgctggagcagattggaaaaggagcatttggttctgcgcttttggtgaggcacaaggtcgagaagaagaagtatgtgctcaagaagatacggctcgcacggcaaaccgaccgcacacgccggtctgcccaccaggagatgcagctcatcgcgactgtccggaatccattcattgtggagtacaaagattcatgggtggaaaagggctgctacgtttgcattgttattggctactgtgagggaggagacatggctgaggttatcaaaagagccaatggaaaccatttctctgaggagaaactttgcaagtggctcgtgcaacttctcatggctcttgattatctacatgcaaatcacattcttcatcgagacgtgaagtgctctaatatatttattgccagagatcaaagcatacgccttggtgactttggccttgcaaagatattgacatcagatgaccttgcctcatctgtggtagggactccaagttatatgtgcccagaacttcttgctgatataccatatggatgttgcatttatgaaatgactgctctcaggcctgcatttaaagcttttgacatgcaagctcttattagcaagatcacaaagtcgatagtatcaccattgcccacgagatattctggttccttattgttttactctaataaaaacatttcgcataactggcatatgcaggctgcagaactgctaaagcatgtgcaccttcagccttatgtgcttcaggtccagttgaagtccagtccctctcgcaacatgtctccaatctatcaagctctgacagacaaagttaagaagatgacatttcctagtgatataactgattccgccagaagagtggcaagaagaaactcgcttggaaatgagaggactgtaacattctgcaaaccctctcctgagcggaactctattagctctacacggagcatcaaagaatatacaactacccagagtgtcaaagagctatctgttgacagcagtcaaattgatgatgaggttacaagtaaagccattagaacaaagacaacaggcattctaaggacgcccaagagtaccccagccaagacattgactactagaaatcggttggatcctccaaaaacttcttacagcagaacaaaccatagtgagttgacctcaagaacacctctgaacaagagtgctgtgacagcaagaagagcatcgctcccgctgccgacatacagagcacccaacagccgtgccgccagcgtccttgaccaactggactccccagacgtgtccgtcaacgcgcctcggatcgacaggatcgcagaattccctctagcttcatccgaggaccccctggcgcccatgaagaagaacctgtcctcggcgcccggccacgacggctcatgctccacgcctcccttcatcaaccggtccatcacgaaggacaagtacacggtgcaggtgctgcacaggggcgacggggacaacgcgagcgactcgtcggggcgcaacgccaccgccgcgtcgagcggggggtccaacgactcgaggcagcagcggttcgacacctcgtcgtaccagcagcgcgccgaggccctggagggcctgctggagttcagcgcgcagctgctgcagcaggagcggtacgaggagctgggcatcctgctgaagccgttcggccccgagaaggcgtcgccgagagagactgccatctggctcaccaagagcttcaaggagacggcgtcatag

SEQ ID NO: 11574 - DNA, 1692 bp, Zea mays
  Peptide Sequence Number=SeqID_53353
atggcctacctctccagtctccaccacgcgccttatccccgcctacttctccaccaccgctacctcttcttttctgcatcctccccacctcccgtcgtcactacacgacgccttgttcctacactggcatgccatggccgcgatctgctcgacgtaatgccctacagagacagcaggccctcaggaacggagggaagcagagcaggcccaggcggagcaccgcgtgtcacaaacagctcaactgtgcgaggaaacgccacagcacaggaggcacatatgccgatgtggcgggaaaggacccctggcacgccaaggacgtggaagaaaggggacagggttatgctacaagaacatgcggagggggagtcacaagaaaagagctggaggcgagggctgacacggagtttggagtcaaaagggcccatggtgaggaagagctggactagagacggaaatggaatgcgggcaaaagaatctggaaaggttggaaattcaagagatgagggtacaggaagaagaaacgcatgtaagaaaatgaagaaacccccggatggtgagtatgctggcaagctgagagttgagctggacatgtgctccaagagaggagatgtgatgggggcgatcactctgtatgattccgcagtcgaggaggggatcaagttggggcagcatcactacaatgtgctcctttatctgtgttcttcagcttctcttggttttgtgcaaccagcaaaaagtggtaatatgggtagtggtatcgccagtattggtcctgcacagaaacttgatccatcacccagcagaagcttgggaggttcagagggagacaatgcatatgcatctgaaagtcatgttcaagatcagggaaaaaacaaggccgatttgattccaggtggtttgaaggcacaaacagttagcataccagtagaagatgagcttggagactatgcacgtgcacgaggatttgagatatttgataaaatgtgctcagagaaagagagagttcaaatgagtgaggctgctctgaccgcaaaggcacgtatggcgttgtccatgggtgacagtgatatggcctttgagattgtgaaacagatgaaaggcctgggtttaaagccaaagttgcgctcatatggtcctgctttaacagcattttgcaacagtggtaatgttgaaaaagcatttgaagtagaagcccatatgttggaatctgggatcacacccgaagaagctgagttggagacacttctcagggctagtgtggttggccgacgcggagacaaggtatattatttgctgcataaatttaggactgctgtcagacaggtatcccattccacagctgaattgtttgaggcttggtttcggagcccaacagcatctaaagttggaaagagaaagtgggatgcaggtgctatagcgaaggctattgagaataatggagggggttggcatgggtttggttggttggggagagggaaatggacagtggcacactcaaatatcaacgagaatggtgtctgccttgcttgtggagaaaagctggctattatagatcttgacccaaaagaaacagaagattttgccacatttgtggcaaaattagctattaagagagagaggaaatcgaactttgagaacttccaggttatctacctcgagcttttatattttggtttaccaggttgcacatga

SEQ ID NO: 11575 - DNA, 201 bp, Zea mays
  Peptide Sequence Number=SeqID_53354
atggcgccgccgcgcccctatgtggcgccgccgtcgggacagcctgggattggggagctgatcgcggcccgtcgatcgaatgatcgatggctcagattagaagtaggaaacgtttcggaagagcccgtgaccgaggatcctggtgagcagcaggttgaagtagctgagcaggagctcattgaaggcaagttgtgcccttga

SEQ ID NO: 11576 - DNA, 342 bp, Zea mays
  Peptide Sequence Number=SeqID_53355
atgctcaacatcaacgccgccccaccaccgcccgtggtcaggcacctctggtgcccctccgaccacgccgaggacgccaccgaagtcccgagagcccactcttgcttaccaaagatccctttgcctcaattacgtcctgagacgatgcctcgacctcaccgaagttctgcggacgaccgtcgtcatggacaagtgatcccacgcctcccagacgaccggcgaatgtcgctcgaggaccttcatcgaccccgcatcctcattcttcggtcagacttgcctctgcgccaccgtaattcgccctcgtgctcgcaggagtcctctgctgccatcagcctgaggtag

SEQ ID NO: 11577 - DNA, 783 bp, Zea mays
  Peptide Sequence Number=SeqID_53356
atgggccggccggatataaaaaacaaggcaacacaaatgaatcaatcttctactccaccatctaattacctcttctcgaagagcagggtaggggtatttataggtaaccgagaggggtggtgggtccccaagtactgttataccccggttacctgctacattcccagaatattccacttaacgggtcattgcagtggatggagtacggtgagcaacgagcgtgactttgtggaagagtttattgcctacacagtgtggccgcttgcccatggttgggaggtgggaggctctattgatgctggggatattgatgatcgcaagagaaagagtgtggcgacacgtggtggtgtggatgaggggtgctctaaaggtaaggtcgtggctattgtgggggcctcgaacagatttgttaaggagctggtggagacgtgcgttgagccaggggaggtcatgaccttgctcgacctccgggaggcatcttctcggatgctgaaagtaaccgatggtgagtggcacaaaaaagtccctattcccatggctcccagcgaggataattttacgtcttatctggctcggtgctccaaagttttcccttacgagcaaaatattggcgctgctgtgacagctgtgatggacaaggactgccaggagtctttgcggaagaaacggaaagctcgttgtggcttgtggagcctcaatgtgaggcaaaggcactccataccagcacgaagggtaccgttgctaccgcagcgattcctccgcctgcggtgctggttgttatag

SEQ ID NO: 11578 - DNA, 195 bp, Zea mays
  Peptide Sequence Number=SeqID_53357
atgggcaagaacaagaaaagtcaaggttcatcgcaccactccagcgataagcggaagcgcgagccaagtcctccctcgaaggactttggtgactccgagtactcggaggaggagttttcctccgagtccgaggggtcgccgactatggaagtatttgtatcactgtcagcctgggatggctgggggcagcactag

SEQ ID NO: 11579 - DNA, 540 bp, Zea mays
  Peptide Sequence Number=SeqID_53358
atggccgcctcaggctactcgggctccgcgcccattactgatcaggggttcgaaggctggcccccgaaggaggctcgggggctgctctcgcaaaaaccggctccggccaaatcgttgacagcgtcaacataccagcccgagagcttgggccccgaccgtgcacccgggctacggccaaaggacagcgccgcctgcgccactccgactgcagtgccactcgacagagtgagtctgacaggcaatcaggccttgccaaaggcgccacggcgaactccgctccgcccgacccccagggctcggactcgggctaagacccggaagacggcgaactccgctccgcccgaccccagggctcggactcgggctaagacccggaagacggcgaactccgctccgcccgaccccagggctcggactcgggctaagacccggaagacggcgaacttcgctccacccgaccccagggctcggactcgggctaagacccggaagacgacgaaactccgcctcgcccgaccccagggctcggactcgggctaa

SEQ ID NO: 11580 - DNA, 168 bp, Zea mays
  Peptide Sequence Number=SeqID_53359
atggcgccgagggtcttcttcttcacagcagacctagatctcacctcccgcgagggaccccgtcggggaggcgaaatcgtaaggtcattcgctcaggggactgtcaacgatctgcagatcccgccccccggccgtaactgcaaaagtgtaagtgttttgtcgtactag

SEQ ID NO: 11581 - DNA, 2157 bp, Zea mays
  Peptide Sequence Number=SeqID_53360
atgaaagagtccgaccagctcgtgacttctttcatcacaccctttggcatgtactgctacattactatgccattcggtttgaggaatgcgggtgcgacataccaaaggcgcatgaaccacgtgttcggagagcacattggtcgaacggtcgaggcttacgtcgatgacatcgtagtcaagacgaggaaagcctccgacctcctctccgaccttaaaacgacattctggtgtctcaaggcgaaaggcgtaaaactcaatcccgagaagtgtgtcttcggagtcccccgaggcatgctcctggggttcgtcgtctccgagcggggcatcgaggccaacccagagaaaatcgcggcgatcaccaacatgggacccatcaaggacttgaaaggggtacagagggtcatgggattccttgcggctctgagccgtttcatctcacgcctcggcaaaagaggcctacctctgtaccgcctcttgaggaagaccgagcgcttcacttggacctccgaggccgaggaagccctcgggaacctaaaggcgctccttacaagcgcacccatcttggtgccccccgctgccggagaagccctcttgatctacatcgccgctaccactcaggtggtcagcgccgcgatcgtggtcgagagacgagaagaggggcatgcattgcccgtccagaggccggtctacttcatcagtgaagtactgtccgagaccaaaatccgctacccacaaatccagaagctactgtacgcggtaattctgactcggcgaaagttgcgacactacttcgagtctcatccagtgactgtggtgtcatccttccccctgggagagatcatccagtgccgagaggcctcgggtaggattgcaaagtgggcggtggaaatcatgggcaagacaatctcgttcgcccctcggaaggccatcaagtcccaagtcttggcggactttgttgctgaatgggtcgacacccagcttccagcagctccgatccaaccggaactctggaccatgttttttgatgggtcgttgatgaaaacaggagcgggcgcgggcctgctcttcatctcacccctcggaaagcacctccgctacgtgttgcgcctccatttcccggtgtccaacaacgtggccgagtacgaggctctggttaacgggttgcgcatcgccatcgagctaggggtccgacgccttgacgctcgtggcgactcgcagcttgtcatcgaccaagtcatgaagaactcccactgtcgcgacccaaagatggaagcctgctgcgatgaggttcggcgcctggaggacaagttcttcgggctcgagctcaaccacatcgcccgacgatacaacgagactgcggacgagctggctaagatagcctcggggcggacaacggtccctccggatgtcttctcccgagacctacatcaaccctcagtcaagaccgacgacacgcccgagcccgagaaggtctcggccctgctcgagaaggcacctgggtgctacacgcacctgctggtcgccatcgacaaattctccaagtggatcgaggtcagacccctaaacagcatcaggtccgaacaggcggtggcgttcttcaccaacatcatccatcgttttggggtcccgaactccatcatcaccgacaacggcacccagttcaccggcagaaagttcctggacttctgcgaggatcaccacatccgggtggactgggccgccgtagctcaccccatgacgaatgggcaagtagagcgtgccaatggcatgattctgcaaggactcaagccatggatctacaacgacctcaacaagttcggcgagcgatggatgaaggaactcccctcggtggtctggagcctgaggacaatgccaagccgagccacgggcttcacaccgttctttctagtctatggggtcgaggctatcctgcccacagacttagaatacggatccccgaggacgaaggcgttcgaccaccgaagcaatcgaaccaaccaagaagactcactggaccagctggaagaggctcgggacatggccttactacactcggcgcggtatcagcagtccctgcgacgctaccacgcccgaggggttcggtcccgagacctccaggtgggcgacttggtgcttcggctacgacaagactcctga

SEQ ID NO: 11582 - DNA, 201 bp, Zea mays
  Peptide Sequence Number=SeqID_53361
atggctcaaaacgagggctccaggaaaaatccaattgaaaatgccttggctcgagcagccaaagtttgctcagtctgggagcaccggactgtcccggtgcgccaggcttgctctggcgaacaggctgctctcgggacttcaacggcggtgtacggctataattcaccggactgtccggtggtgcaccggactatccggtga

SEQ ID NO: 11583 - DNA, 567 bp, Zea mays
  Peptide Sequence Number=SeqID_53362
atgaggaagactttctgcttcgggggcagacgtgtggccaggaagatgtcggaacgggcgccgatggtcgacgggtgcgtgttctgcgagatcgtccgcggcgcccccgcctccaccaccgctctcctctactccgttccgtaccactgtctcacgtatcaccttcgatctagtgccgctttggctgcagaaaatgatgataaggtcgtggcgttccgcgacatcaacccgtcggcgttcaggcactatcttgtcatacccattgatcatataccaactgtaaatagcctccgcaaaaccaaagatgatcaccagttagtgagccacatggtgaaggtggggaaagacttcctcaatcaagatgctccaaattctgaggaacacaggtttgggttccatcagcccccatttaatagtattgatcaccttcatcttcattgcctggcactgccatttatccccagttggaggcaagtaaaatatacccctctgggacctttaggggggtttatcgcagcagaaaagctattggaaagaataaaaccagaagcagaagcatacagttag

SEQ ID NO: 11584 - DNA, 861 bp, Zea mays
  Peptide Sequence Number=SeqID_53363
atgtggtctcactccaaggacttgctcgagatcgagcccctcgagctccgattcccattcgagacaaagaagcagatctcgtgctctatgcagttgacaaaccgaacagatgactacatcggctttaaggttaagacgacgagcccgaagaagtactgtgtccggcccaacagcggcatcgtgccacctcggtccaccagcgatgtcattggtaattccaacagaccaacactcacctccttccctccaagttcatttgacatgggcgtccccaagattactatcattcaaatgcctgacgccctttgcaatttctcagtgacaatgcaagcacaaaaggaggcgccaccggacatgcagtgcaaggacaagtttcttgtgcaaagtgtcgttgtggcggaagggaccttagtcaaggacatcactggcgatatgtttaccaaagaatcagctaatgtggtggatgaggttaagctgaaggtcgtctacatcccaccacccaaaccgccatccccagtgcatgaggaatctgaagaaggctcatcaccccgaccttcattgtccgatggaattaacttgaattatcaagagatgcagacaacgagggaatctgatgagtcactgttgttctcggctgtaaaaactcatatagatcaaaaggactacacctccgagacatctgctttgatttcaaagttgacagaagagagaaactctgccattcagcagaacaataagcttcgagaggaactggaccttacgaggagggaagccaacaagcagaatggtggattctcctttgtggtcgtggtggccattgctctcctgggaatgctactgggatatatcatgaagagatag

SEQ ID NO: 11585 - DNA, 1629 bp, Zea mays
  Peptide Sequence Number=SeqID_53364
atgagaaggatgatctcttggactcccaagaggacttccctaatcaaggaaaataaaaaacatgttaaggttaaaaatgcttactctctacaagttgaaaaatgtgaaaaattgtctagtgagctaagcacttgccgtgagatgattgacaaccttagaaatgaaaatgctagtttaaatgctaaggttgattctcatgtttgtaatgtttcaattcccaatcctagagataataatgatgatttgcttgctaggattgaagaattaaacatttctcttgctagccttagattagagaatgaaaatttgattgctaaggctaaagattttgatgtttgcaaagttacaattgccgatcttagagataagaatgatatacttcgtgctaagattgttgaacttaattcttgcaaaccatctacatccaccattgagcatgtcactatttgtactagatgtagaaatgttgatattgatgctattcatgatcatatggctttaattaaacaacaaaatgatcatatagcaaaactagatgctaaaattgccgagcacaacttagaaaatgagaaatttaaatttgctcgtagcatgctttataatgggagacgccctggcatcaaggatggcattggcttccaaaggggagacaatgtcaaacttaatgcccctccaaagaacttatccaactttgttaagggcaaggctcccatgcctcaggataacgagggttacattttgtaccctgccggctatcctgagagcaaaattaggaaaattcattctaggaagtctcactctggccctaatcatgcttttatgtataagggtgagacatctagctctaggcaaccaacccgtgccaagttgcctagaaaggaagctcctattgcatcaaatgatcatgctatttcatttaaaacttttgatgcttcttatgtgcttacaagcaaatccggcaaggtttatgcatccgggggctcaagttggatactcgacagcggatgcacaaaccacatgaccggggagaaaagaatgttctcctcatatgagaaaaaccaagatccccaacgagctatcacattcggggatggaaatcaagattctttagattacaacttgctttctgtttcccaattatgtcaaatgggctacaactgtctttttactgatgaaaaatctcaaacccaagagactttaaaggggttcttgagacgggctcaaaatgagttcggcttaaggatcaagaaaataagaagcgacaatgggacggagttcaagaactctcaaattgaaggcttccttgaggaggagggcatcaagcatgagttctcttctccctacacacctcaacaaaatggtgtagtggagaggaagaatcgaactctattggacatggcaagaaccatgcttgatgagtacaagacaccggaccggttttgggccgaagcggtcaacaccgcctgctacgccatcaatcggttatatcttcaccgaatcctcaagaagacatcctatgaactcctaaccggtaaaaagcccaacatttcatactttagagtttttggtagcaaatgctttattcttgttaaaagaggtagaaaatctaaatttgcttgcccactgtag

SEQ ID NO: 11586 - DNA, 348 bp, Zea mays
  Peptide Sequence Number=SeqID_53365
atggcgaggtcgatggggaaggattcagggcctggggcgagggattcgtcgtttatgcgggattttagtttcgggcgcccgctgccactgatggcccaaaccgaagaggaccacagctgcagcagcgtctactaccctccctgtcgccgaggccggggaggatgcgatgaggagggggacgagggccatcgcgagaagggcatcgtcttgggaggcatcgcgatatggaggggcgggcgctggcatcgcgcaagcggaggaagaggtgtagaggacgggagtgggcatggtgtcgggtggaggaagaggcacagaggatgggagcgggggcaggcgggggcgcgctag

SEQ ID NO: 11587 - DNA, 1521 bp, Zea mays
  Peptide Sequence Number=SeqID_53366
atggaggtcgcgacggcagcgaaggcgccgtcgtcccggctcgctcggagcctggctgctgcagcgccttgttacaaaggggtgtccgtcttcttcgccgcggtagtcgccggcgctctcgtctccgcctgctggatgtctgtcagcgccagagtcactccgatcactcctgccgccactccaggcatagcacgcaacgctgcaacggggccggaggcgccagcgccgggtcggccacggtccactggcgtcggcgcgagcacgaaccaaacgccgtccgcgggggcggccagttccgcgccaccgcctcgggaggtgccggactgccccgcctacttccggtggatccacgaggacctgcggccgtggcgcggcacgggggtcacgcgcggcgcggtggagggcgcgcgccggttcgcgcccaggctccgcgtcgccgtggtcgcgggccgcctgtacgtggcgcgctacggccggcggcggtgcttccagacgcgggccgcgttcacgcagtggggcatcctgcagctgctccgccgctaccccggccgcgtcccggacctcgacctcatgttcgactgtgaggacctgcccgtcgtcggcgctggcgaacgccacggggcccagccccagcctcctcctcctccgctgttccggtactgcggcagtgaggccacgctggacatcgcgtttcctgactggtcgttctggggttggccggagctcaacataaagccatgggaagcgctgcaaagggagataaacgaagcgaacgccgtggtgaactggacggacagggcgccgtacgcgtactggaaggggaaccccaaggtgggcgccgaacgcctgctcctcctccggtgcaacgcgtccggcgagcgtgactggaacgcgcgggtatacgcgcaggactggggagaggaggtgcggcacggattcagggggtcggacctgtccaagcagtgcacgcacaggtacaggatctacatcgaagggcgggggtggtcggtgagcgagaagtacatcctggcgtgcgagtcggtggcgctcatggtgcggccgaggttccacgacttcttctcgcgggggctgtcgccgctgcgccactactggcccgtccgcggcgaccgcggcatgtgccggtccatcaagcacgccgtggactgggggaacgctcacgcggacagggcgcaggagatggcagggaacgcgagcaggttcatccgggaggagctgacgatggaccgcgtctacgactacatgttccacctcctgacagagtacgccaggctgctgcggtacaggcccgcggtgccgcgcggcgccgcggaggtcaccgtcgagtccatgatccgggggaggcgggggctggagaggcagttcatggtggacacgcttgcggccagtgcgagtggcgatggcccctgcaggctgaagccggcttacagtcccgaggaactgcaggcgctgcggagagcgagagcggatgcggtgaggcaagtggaggcgtgggagatctga

SEQ ID NO: 11588 - DNA, 282 bp, Zea mays
  Peptide Sequence Number=SeqID_53367
atgacggcctggatcaacaccgtgctgctcgccctcgcctccccggagctgctcgtcgccaccgtgcagcgcacgccgtcatccactgcgtttgtgacctccgtcatgcgtccatgcctcgctgtcgtttcttccggcaagtctttcatcggtgatcccctctcccgccccctctctttccgttccctgcgcagcgcctaccctccgcagtcggcatccattgccagcagcacgcgcctagctcttgctctccggccggtggccgctgcggtcgagcgctag

SEQ ID NO: 11589 - DNA, 312 bp, Zea mays
  Peptide Sequence Number=SeqID_53368
atgggggcccaggcccacgcgtcattcaaccggcgcgccggttgctgcgtgcgagcaactgcaccgccacttgcaccactaccacgcctcctcgactgcggaaccggtaccgtgactcgaggcaaccctgtggacgacccagcagtgccagccaggcgcgacgggaccgggaaaggggataccctgaaaaggatccttctccgtgaaggaaacaggctccgagcctccctactgatcagaggttcgaaggccggcccctcagagggggtcaacagccgcctcaggctactcgggctccgcgcccactactga

SEQ ID NO: 11590 - DNA, 516 bp, Zea mays
  Peptide Sequence Number=SeqID_53369
atgtggcagagtgggcccactaccggaaacaacttctttgccgagtgtctcacgcactcggcaaagcctagaaaacactcggcgaaggctgacactcgacaaagaaagctcgacgaactgtacatcggcaacggcttctttgccgagtactttttatcgggcactcgacaaagaaaagtcgctgtcgcagcgctaggtaacggcgacggagcctttgccgagtgcccacagagcggcactcggcaaaggctctctctttgccgagtgtgcactgtattgacactcggcaaagaagctccccgtgggcccctttaccagtcgattttcaacaagatacgtgccaacaaggcgcaacttacctatgatgatcatgagagagcattgaagttgctacatgctctagatcatagggttttggaggtgaaggtctcagcaatcatcgagtcacccaattatgagactctcaccatggatgagctattcagcaagctcatgtccatcgagattgaccactag

SEQ ID NO: 11591 - DNA, 141 bp, Zea mays
  Peptide Sequence Number=SeqID_53370
atggccatgatgggttcaacatcggaaaagatgtacctttgtcaggtgaagaagcagcaaacttttgttgcttctgttcaaaggtggtaccaaaagaagagcaccaagactaaagctgcgagaggaaaggtcctccgttaa

SEQ ID NO: 11592 - DNA, 393 bp, Zea mays
  Peptide Sequence Number=SeqID_53371
atgactgcgtgcaagccttgcagtacctcgatgaacactcaggccaagctctcctccgatggctcaccggttccagagtcgacgttgtaccgcaacctggtcggtgccttgcggtatctcaccttcacccgtccgaacatcacttatgcggtacaagtctgcctctacatgtatgatcctcgggagccgcatctcaccgccgtcaagcgcatccttcgctatctgcacggcaccgtcgacctcgagttgttcgtagctcgtgcttcctcgccgcacacgctgactatctacacagatgccgactgggtcgagagcccggacactcatcgctccacgttaggatacgtcgtgttcctcggtgtctgtctcatctcctggtccagcaagcgatag

SEQ ID NO: 11593 - DNA, 1059 bp, Zea mays
  Peptide Sequence Number=SeqID_53372
atggacagacaggtggcggagattgcctcggagcccgaccgcgccgccgcgtacgcacggttgcttctcctacagcgcggctgcgccgacgacgcctcctccgccgccgagctcgccgcggaattaccttccaccctcctcccgctcctcctccgcgacgcggccgccgatgacgaggccgtcgccgcttctgcgctcaagtgcctcggcttcgcgctctaccaccccgtcctcgtttctactatttcagcacagatgacccaattggtattggataccttggtacatataatcatgagcactcggatgaagtctgcttgcaatttgggtgtctggtgcttctcggttcaacaactgaacccattgattatagaggatagagcagatccaatgcttattgctattgttcatgcgctcgacaatccatttggttccttgtccacaacatttgaggcagctcaggctatcatgaagcttggtggtcaaagtcccaaaagaatgagggacctatcaagcttgtgggttccaccagtataccggagactcttaagtgctgacaaggcagaaagggacatggtagaaaggtgccttattaaggtgtcatgtgttattctaccacctcaacctctcctttccaaggctgttgcttcagaccttgagcagaagctactctcctgtatggtaaatatgcttgatgatccttccaagaaagttcaaactgtgaagtcatggggatggattgtatctttgcttggtccagatgcagtgaacaatagacctctgcttaataaacttataaaggttcctgagcagatgtttactgatctgaatccacaagttcaggttgctacaatggcaactgagattgtggcccagcaaactgtgatttccccattaaaacccattgaacaggcaagtgcacaggagaaccaacatgcagaatgcagcccaaagctgtccttaccaagaatcagatcactctcttacatggagatggtttctccagcagtttatgtgactgcactgtctctgtccatgatatctcagtatactgtatag

SEQ ID NO: 11594 - DNA, 570 bp, Zea mays
  Peptide Sequence Number=SeqID_53373
atgaataaggatttagttgctttagctcacgtcctcatcagggaccgactcaaccggctccacgcgggcctcgcgcacatcaccgtctccacgggcgacgagaacaggtacgatgcgttcgagaacctcctgcgggacgtcgcggcggccgcccgggaggtgcgggagctggtgccgcggagccagggcggcactacggcggcggcaagctgcggctgcggactccgccggctccgttggaactttcgcggctgccacaccatcttcctcgacggcggcgcccccgtcgacatgacgtgggacctgcacggttggctcttccacgcccacgcgcccgccgtcgagttgccgcactcgtcttcctcctgcgtcgtgttcacgttccaggcgcgcggcgcgtcagaggcaaagttgtggacagtcgacggttgcttacgcgacggagatgagccggacaagctgccggtgacgccgaccggtcggcggcagaaggcggcagccggtggggcgtcggggcaggggttctgcctgctgatccaaggcttcaggggcttttccaagaacatttaa

SEQ ID NO: 11595 - DNA, 462 bp, Zea mays
  Peptide Sequence Number=SeqID_53374
atgaggccaccgatcgacatgccgacgccgctcgacgtgctggcaagtggcaaggatacaacagttgatgcgctgctgtcggccccgaggcggaagcgcacgctggtggccgcgtccgcggtcgccgcggcggcggccgagttcgtgagggtggccaagaagcagaggcagctggcgctgtcgtcgctcgacacgctcccaacgagtgcctcttcgagatcctgcgccgcgtgctcgtgcggccacggccgcggctgcggcgcctccgcctgcgtcacccgccgctggctcacgctcctcggcagcatccgggcctccgagcaaacatgtctcccgcagtgcatcgtgaagttgtaccacacggtgaggtccttcgtcctgctcacaggcaacgaggacttccgcatcaaaaagagtccattcgaccaggagtccattcagtacagggatgtggcaaactga

SEQ ID NO: 11596 - DNA, 435 bp, Zea mays
  Peptide Sequence Number=SeqID_53375
atggatgaaagagctaccctcggtggtctggagtctgaggacgacgccaagccgagccacgggtttctcgctgttctttctagtctatggggccgaggctatcttacccacagacttagaatacggttccccaaggacaaaggcgtacgacgaccaaagcaaccaggccagctgagaagactcactggaccagctcgaagaggctcgggatgtggccttactacactcggcgcggttcagacatcgacagagggagcagcagcaccctcggcgttgtttccaccttcggcgaaatctggcctagcctcggaaggcgacacgggcggaaggatctccacctcgaaggaggacaccagcaccgcgctcgggccatcgcagcccgggtctccgctagggccccggcccgagcagacacctcagttggccactccgtag

SEQ ID NO: 11597 - DNA, 507 bp, Zea mays
  Peptide Sequence Number=SeqID_53376
atggcgcctcctgttgacatggctggtctgtgccctaggttgggcggtgtggaagctcctccaaagccgaggtcgagtctgtcttccgtggccgaggtcgagtccgatcccccgggtcgggcgaggcggagactgtcagctgaggccagggcggagtccgagccctggggtcgggcgaagcggagttcgccgtcttctggggctgagcccgagtccgagccctgggtcgggcggagcggagttcgtcgtcttccgggacttagcccgagtccgagccctgggtcgggcggagcggagttcgccgtcttccgggacttagcccgaatccgagccctgggtcgggcgaagcggagcttcctatggtgccttcggtcgggcctgactgcctgtcagcctcactctgtcaagtggcaccgcagtcggagcggcgtaggcggcgctgtccttctgtcaggccggtcagtggagcggcgaagtgacggcggtcacttcggctctgccggctag
